United States Patent Application Publication US 2021/0199660 A1 - sequence listing, part 14

SEQ ID NO: 188711 - DNA, 120 bp, Artificial Sequence
  ENSG00000112182_22 (sequence is synthesized)
aggaggtaaaacttccttttcctgtagatcaaatcacagatcttccaaggaacgatttccagatgatgattaaaatgcacaagctaacctcagaacagttagagtttattcatgatgtcc

SEQ ID NO: 188712 - DNA, 120 bp, Artificial Sequence
  ENSG00000112182_23 (sequence is synthesized)
gacggcgcagcaagaaccgcatcgcggcccagcgctgccgcaaaaggaaactggactgtattcagaatttagaatgtgaaatccgcaaattggtgtgtgagaaagagaaactgttgtcag

SEQ ID NO: 188713 - DNA, 120 bp, Artificial Sequence
  ENSG00000112182_24 (sequence is synthesized)
agaggaatcaactgaaagcatgcatgggggaactgttggacaacttctcctgcctttcccaggaagtttgccgagacatccagagccccgagcagatccaggccctgcatcggtattgcc

SEQ ID NO: 188714 - DNA, 120 bp, Artificial Sequence
  ENSG00000112182_25 (sequence is synthesized)
ctgtcctcagacccatggacttgcccacggcctccagtattaaccctgcgcccttgggtgctgagcagaacattgcggcctcccaatgcgcagtgggggaaaacgtgccctgctgcttgg

SEQ ID NO: 188715 - DNA, 120 bp, Artificial Sequence
  ENSG00000112182_26 (sequence is synthesized)
agccaggcgcggctccccccggacccccctgggcacccagcaacacctccgagaattgtacctctgggaggagactagaaggcactgacccgggaaccttctcagagagaggacctcctc

SEQ ID NO: 188716 - DNA, 120 bp, Artificial Sequence
  ENSG00000112182_27 (sequence is synthesized)
ttgaacccaggagccaaacagtgaccgtggacttctgccaggaaatgactgataagtgtacaactgacgaacagcccaggaaagattatacctagtgactcggctctgcctcccagtccg

SEQ ID NO: 188717 - DNA, 120 bp, Artificial Sequence
  ENSG00000112182_28 (sequence is synthesized)
cacacctctcccatccaggcgttcttcagtcagcctgtggcactgttcatctgctgtcccgaagaaaccgagaacacatttggtgcacactacagcggtcttagcagcaatactgttccg

SEQ ID NO: 188718 - DNA, 120 bp, Artificial Sequence
  ENSG00000112182_29 (sequence is synthesized)
aagtatcctctcctcttctcgagcaggagtgatagttaccttcacaatggtgctaccccttgcccaggcaaggaaagacagcagtgatgacactgtctgtctgtggctcaatttcagtct

SEQ ID NO: 188719 - DNA, 120 bp, Artificial Sequence
  ENSG00000112182_30 (sequence is synthesized)
tcacagggatagactacaacacctctaggccccaaccacggattttttttctcagtggcccatgtcacaaaccctatctcaggaatttcttctgaatgttcaatttttttcattgaagac

SEQ ID NO: 188720 - DNA, 80 bp, Artificial Sequence
  ENSG00000112182_31 (sequence is synthesized)
atatatatatatatatatatatatccatatgcaaaagtcctgcatgcctcaactttctcatcctaaaactggaaacttat

SEQ ID NO: 188721 - DNA, 120 bp, Artificial Sequence
  ENSG00000112182_32 (sequence is synthesized)
ctcatcctaaaactggaaacttatttctcatttagaaacaggttccaacattcctcttcttttgtctctgatgctagaactagtttggtaactgttaacatggtcatttttcttgcttca

SEQ ID NO: 188722 - DNA, 120 bp, Artificial Sequence
  ENSG00000112182_33 (sequence is synthesized)
cagttcaattttcaattcgtacttatttatggacaaaattcagtgttggaagctttttcccaaggttttatttcagatttctttttcgtttggtttggttttggcacctccaagtggtgt

SEQ ID NO: 188723 - DNA, 89 bp, Artificial Sequence
  ENSG00000112182_34 (sequence is synthesized)
gccttgcagatactgtacagtaatggtcaactttgccacttgcactgagttttgggtcaaacctattttcttaaatgaagttgtaactt

SEQ ID NO: 188724 - DNA, 120 bp, Artificial Sequence
  ENSG00000112182_35 (sequence is synthesized)
ttttgggtcaaacctattttcttaaatgaagttgtaacttcggtataactcaagtatactgtatattctttgcttttagttaaaaaagtaaaacattttagctaattaaaaagcactcag

SEQ ID NO: 188725 - DNA, 120 bp, Artificial Sequence
  ENSG00000112182_36 (sequence is synthesized)
gtgataattatgtaggaaaaacaatcttgccaaataatgaattcatcctaggatgtgtagacaataatctgcttgaatatttttatatttcacctcctccccacctttccctaagcaaag

SEQ ID NO: 188726 - DNA, 120 bp, Artificial Sequence
  ENSG00000112182_37 (sequence is synthesized)
tttaaacgcagatagagagttcagagttgatgctggatgttcagattcctaagtggggagagagtttggacatctcactcaaaagtacatcagaaaaacaggaatccgtgattttatacc

SEQ ID NO: 188727 - DNA, 120 bp, Artificial Sequence
  ENSG00000112182_38 (sequence is synthesized)
ttgctcttggaagtgttgtgcagtaggacctgctcccctgaaggacggggccaaccagccactggctttcctgcccaggcttggcctcccaggacatctggcctgaggggatttgaatca

SEQ ID NO: 188728 - DNA, 120 bp, Artificial Sequence
  ENSG00000112182_39 (sequence is synthesized)
cagccccgaaggtcctgccttcaccccattgggagagagcagggcatcctggcatctgcgatccatccctgacacaggctgacacattctttctcctttccttctccaaaggcttggagt

SEQ ID NO: 188729 - DNA, 120 bp, Artificial Sequence
  ENSG00000112182_40 (sequence is synthesized)
tttcttctgaggtttttctgccagtgtcttgtctgaaggcagacttcattctgaggctttggacaagctatcaccgggaaccctccctgtccccttcccgaatcacacacataccctacc

SEQ ID NO: 188730 - DNA, 120 bp, Artificial Sequence
  ENSG00000112182_41 (sequence is synthesized)
ctcacctgatgataattttctcttcttgctgcaaaactggttggcttgcaacccagagagagcagcttcccttggctctggggccgtgttggccccagccacgtttacaggaaggtgtgc

SEQ ID NO: 188731 - DNA, 120 bp, Artificial Sequence
  ENSG00000112182_42 (sequence is synthesized)
cccagaggaggaggaatcagctccctcgctccagtggccttgggtccgggtctcactgagcagcccgagggccactccagcccggctggggaagagagtcctgaacggtttgatgtgggg

SEQ ID NO: 188732 - DNA, 120 bp, Artificial Sequence
  ENSG00000112182_43 (sequence is synthesized)
atggggtggtgggcagtggggaatagatggttgactttgtttctttatttgtgccattgtttggacaatattaaagctgcatgtaaaaggggaaattagtatatgatgtaggctaaaagt

SEQ ID NO: 188733 - DNA, 120 bp, Artificial Sequence
  ENSG00000112182_44 (sequence is synthesized)
gaaatcatagtaacatatgttttagtattattaacttttttctgtacaaatattagcactaaatgtttaaatatgtatgaatgccagaaatttgtcagttcatgcagtaggataaaaaaa

SEQ ID NO: 188734 - DNA, 81 bp, Artificial Sequence
  ENSG00000112182_45 (sequence is synthesized)
cttctttttaaacagttccacttttaaaacctgcctctgggtttttgttttttcttgtttgtgtgtgtgtgtgtgtgtgtg

SEQ ID NO: 188735 - DNA, 120 bp, Artificial Sequence
  ENSG00000112182_46 (sequence is synthesized)
tgtgtgtgtgtgtctgaaacagatcttgataaagctctgtgttggagctgctggtttttgttatggttgttggaatttcttggcctactaggacagttctgtgcttcaccatgaggtttg

SEQ ID NO: 188736 - DNA, 120 bp, Artificial Sequence
  ENSG00000112182_47 (sequence is synthesized)
cctttgtggaaaactggtgacagtgagaatataaactcaatgtgaatcacgtgatacttcgcaggcgtgtgttacagtggagtcagctgacagtattttgctttttaactctattgttgc

SEQ ID NO: 188737 - DNA, 120 bp, Artificial Sequence
  ENSG00000112182_48 (sequence is synthesized)
ctttccaagtgacctctcctcttcttttaaaaaaagaacactttctgctcatatcataaccaggtccaacccagcttcttggcatgaggtttaccctggtaacaactcatgtgcaactgg

SEQ ID NO: 188738 - DNA, 120 bp, Artificial Sequence
  ENSG00000112182_49 (sequence is synthesized)
tagtcttgaccacattccatccatttcctcaggtttctgtggttcagtagcccagacctgtttggcagccatttctagcaggggcggggcctctttatttctctccaccctaactcagac

SEQ ID NO: 188739 - DNA, 120 bp, Artificial Sequence
  ENSG00000112182_50 (sequence is synthesized)
ctcaccttcctcccacccacccctgccttgcttttcttcctcttcccccaacctaacttctgccatgggaactggttaaaaacactgctctaaaaaccatcttccaatttcatagagatt

SEQ ID NO: 188740 - DNA, 120 bp, Artificial Sequence
  ENSG00000112182_51 (sequence is synthesized)
tctcacaagttatttcattcataatccaccatgaacagtgactagcttcgtgcagttgttcatgtgatgtgtgtgtgtcttttcctattcagaactatgtgcttgtcaaaattatttctg

SEQ ID NO: 188741 - DNA, 120 bp, Artificial Sequence
  ENSG00000112182_52 (sequence is synthesized)
ggttgattcaaagggaggacttgctggggaccagaatccaaacggcctcaagtggaattttaaaacctagcctgtctcttttccctgggatccctctgtcaaccccacgccttttaggaa

SEQ ID NO: 188742 - DNA, 120 bp, Artificial Sequence
  ENSG00000112182_53 (sequence is synthesized)
aaagaaaagtgagtgaacagcaaggaagagtgtttgcacagtacagtaacatttggttgttcttaaggctcttttcttacaaaaataagagaccctccaaccacgggctgtttaggagga

SEQ ID NO: 188743 - DNA, 120 bp, Artificial Sequence
  ENSG00000112182_54 (sequence is synthesized)
tgcctgcttgggtctccaaatggctggggtaggaatggttgttggggcagagccagtggaggtgagtgaccctgagactaatgaacatcccacctaaatccagtcctccccttggatctg

SEQ ID NO: 188744 - DNA, 120 bp, Artificial Sequence
  ENSG00000112182_55 (sequence is synthesized)
cctttgtcctgcttgtgtatccaggcaacctcttttcaagttggtcaggctttggacaggtgagtgatttgctgtatgtgtttgtttctctgcgttacctgggggtgccttgattaaaat

SEQ ID NO: 188745 - DNA, 120 bp, Artificial Sequence
  ENSG00000112182_56 (sequence is synthesized)
cgaactttattacatactgattctggaacaaaacagttagaaaaactttaaaaaaaaaaaaaccgacaaagttacgaggccatcctgctatttatcttctgagttcccagcaatgactca

SEQ ID NO: 188746 - DNA, 120 bp, Artificial Sequence
  ENSG00000112182_57 (sequence is synthesized)
ggcatcagagatgatgctgcagtggaaaacctgactctgtgtgtctgcaactgaatgttgtgcgagtaatttattaactgtctttctaaaggtttgctgcttttaagatgcactataatt

SEQ ID NO: 188747 - DNA, 120 bp, Artificial Sequence
  ENSG00000112182_58 (sequence is synthesized)
cgggatgtaatccttacattgcttttccaaggaagggaacaaaagtctagtgattagtatgccaactgccactactccttcaaaaggagccaggaccagcgacaagactcatgagaggac

SEQ ID NO: 188748 - DNA, 120 bp, Artificial Sequence
  ENSG00000112182_59 (sequence is synthesized)
tggctaaagtgaagtgtgcacagtgtgaagtttaatgctgttgtcaagaggcctaaacccacattttctcttttaatattttatgattgccatcaaagaagaagaaaaagaaggaacaga

SEQ ID NO: 188749 - DNA, 120 bp, Artificial Sequence
  ENSG00000112182_60 (sequence is synthesized)
caaaggtttgaaaatgataagcctgttaagacaccaaaaactcctgtcccgtgaagctgcttgacatcctgtggagtagcataatcctctcaaaatgaggaagagctgcctgcaaagctt

SEQ ID NO: 188750 - DNA, 120 bp, Artificial Sequence
  ENSG00000112182_61 (sequence is synthesized)
tctcaagtccctatttggctacctacttctctacattatgccccatttaaactaggagctgtcttagaaatgacttcaaactgcttcactattgcttacagtttaggaggagtctcagat

SEQ ID NO: 188751 - DNA, 120 bp, Artificial Sequence
  ENSG00000112182_62 (sequence is synthesized)
ccagaaggagcaagaatcaagtttggtcctcaaatgactgtaaatagactaaagaacaaggtgttttttgtttttgtttttgttttctaagaataaagctgttcgttgtatcatgagtta

SEQ ID NO: 188752 - DNA, 120 bp, Artificial Sequence
  ENSG00000112182_63 (sequence is synthesized)
gtgtttcttccccaaactgaagactgtgttggaagtgcaatttctggtgagtcagtccacaatacaatgccctgtgtggagttggtattcatacaggaaatctgtgtgcacgaggcattg

SEQ ID NO: 188753 - DNA, 120 bp, Artificial Sequence
  ENSG00000112182_64 (sequence is synthesized)
tgtgttgaaagtgtatgtttatagtactgcctgagccatctcatgaccccagcgtccaaaaccgatgctgtagaacagaacatatctgtacacaaatagtgtgtgcaaatagcatttgta

SEQ ID NO: 188754 - DNA, 120 bp, Artificial Sequence
  ENSG00000112182_65 (sequence is synthesized)
catagaaaagtctcattgtggcagattgagcataaattattcaactgacggtgcaaaaacattacttgcaaagaaaagtttatagtattttcctacactccaccctgggagatgatattt

SEQ ID NO: 188755 - DNA, 120 bp, Artificial Sequence
  ENSG00000112182_66 (sequence is synthesized)
ctatcaaatgaatatcagtgcattttaaatgtaatatgaaaacgatgctgccattttgtgaagaatacccacttggttgcagaggccaactttcatagctttgatttaatgttgtgacac

SEQ ID NO: 188756 - DNA, 120 bp, Artificial Sequence
  ENSG00000112182_67 (sequence is synthesized)
ggtgtatgcattttgctgtcaagcaatggataaacagctctgactttcattctcattccagtttattgacctcagataaaacactggcccttcttagaagcagaagtgtgcaccaagacc

SEQ ID NO: 188757 - DNA, 120 bp, Artificial Sequence
  ENSG00000112182_68 (sequence is synthesized)
attcatttcaggtagactcacattcagtgccaagtgctcccatgggaataatcagacgcatatgttgcgaaagagtgaagggacttggacaaagaggggttttcctacagatggatgctc

SEQ ID NO: 188758 - DNA, 120 bp, Artificial Sequence
  ENSG00000112182_69 (sequence is synthesized)
agtcttctaccaaaacatgtttggaggcagaactatgacctccccttaagtcctaacaatgtattttgtgtgtgcaaatcctgggatgcccgtttcacgctctgacataaagacatggca

SEQ ID NO: 188759 - DNA, 120 bp, Artificial Sequence
  ENSG00000112182_70 (sequence is synthesized)
cctctagtgagtgatcaggaagattccatatgcatttgggagcttcaggtgcttgttagacacagtgagccattcaaggcaagcaccacctttgctagtgaggccaagagagcctgtgac

SEQ ID NO: 188760 - DNA, 120 bp, Artificial Sequence
  ENSG00000112182_71 (sequence is synthesized)
aatttgacaatttgttccagaaccagtctgatgcaagtgcacctctaatatatgccttacaaactccagaggccatattcaaaacagggtcttctcagtgtatgcaaggggctgcagccc

SEQ ID NO: 188761 - DNA, 120 bp, Artificial Sequence
  ENSG00000112182_72 (sequence is synthesized)
ctcttctcttcctccccaggttgaacaatacggacagttttcacacatatctacctgtataaccctctgtacctctcataactggtcaacgactgtaacaggttacatcaggtgtttttc

SEQ ID NO: 188762 - DNA, 120 bp, Artificial Sequence
  ENSG00000112182_73 (sequence is synthesized)
tacatactttttacacagattctatgcgattaatgtaatttaattcaatgcatcattttattgtactagttcttaggcttgtccttatttttttctaagtgattgtggtttttctcgtgg

SEQ ID NO: 188763 - DNA, 120 bp, Artificial Sequence
  ENSG00000112182_74 (sequence is synthesized)
tttttattgtaaaaaatgaaaggctgttgatgcttattctctgtaactaagaatttttaccttttgggggaaaaaagcattgctatgaactaatgaattgaaacttcatttactcattgt

SEQ ID NO: 188764 - DNA, 120 bp, Artificial Sequence
  ENSG00000112182_75 (sequence is synthesized)
aaatacactattgtgcaaaaaaagttttcactcaattgaattgctagtgttaactgaattttgtctagacaccatttctgttgatgaaataaagacatatcattatgcattgtaaactga

SEQ ID NO: 188765 - DNA, 120 bp, Artificial Sequence
  ENSG00000112182_76 (sequence is synthesized)
ccaaacaaagaccacactgttgacagcgttgggttccagtagcggtaaactaccaaggggctggtttacagaaaatgagtttgctctgtgatgtcatacaagtttgctttgtcctgacgc

SEQ ID NO: 188766 - DNA, 120 bp, Artificial Sequence
  ENSG00000112182_77 (sequence is synthesized)
ttatttagcaggacttgaacagagggaggaaaatattgtgaaggattgctgcgaggtgtaccataattgcgtgcagctgtctgcttcagaaagtgagggctccaggaatgaggagaatct

SEQ ID NO: 188767 - DNA, 120 bp, Artificial Sequence
  ENSG00000112182_78 (sequence is synthesized)
cactgtgacatgtctgatcccttgctcccatccctgcagcatgaacaagaaaccgctcctgcctcaactccaagggccagagcgagttggcacaccctccaagaggagcacctcgcttct

SEQ ID NO: 188768 - DNA, 120 bp, Artificial Sequence
  ENSG00000112182_79 (sequence is synthesized)
ttcacagcaccttctttgcttgggggaaaaataaaagcaactagtaattttcaccattaattcagtaagattctaagaagtgtaaacttgcttttctcaccgttgttgaaaacagcccac

SEQ ID NO: 188769 - DNA, 120 bp, Artificial Sequence
  ENSG00000112183_0 (sequence is synthesized)
gccgcgaaagggtgcgggagacgcggagccggaggaggaggcgcagccgctgcccgagccgcagccgcagccggagcccgagccgcggggcgggtgcgaagatgcacacgacccagaagg

SEQ ID NO: 188770 - DNA, 120 bp, Artificial Sequence
  ENSG00000112183_1 (sequence is synthesized)
acacgacgtacaccaagatcttcgtcggggggctgccctaccacaccaccgacgccagcctgcgcaagtacttcgaggtcttcggcgagatcgaggaggcggtggtcatcaccgaccggc

SEQ ID NO: 188771 - DNA, 120 bp, Artificial Sequence
  ENSG00000112183_2 (sequence is synthesized)
agacgggcaagtcccggggctatggatttgtcaccatggctgaccgggctgctgccgaaagggcctgcaaggatcccaatcccatcattgatggcagaaaggccaacgtgaacctggcat

SEQ ID NO: 188772 - DNA, 120 bp, Artificial Sequence
  ENSG00000112183_3 (sequence is synthesized)
acttaggagcaaaaccaaggatcatgcaaccaggttttgcctttggtgttcaacaacttcatccagcccttatacaaagacctttcgggatacctgcccactatgtctatccgcaggctt

SEQ ID NO: 188773 - DNA, 120 bp, Artificial Sequence
  ENSG00000112183_4 (sequence is synthesized)
ttgtgcagccgggagtggtcattccacacgtccagccgacagcagctgccgcctccaccaccccttacattgattacactggagctgcatacgcacaatactcagcagctgctgctgctg

SEQ ID NO: 188774 - DNA, 120 bp, Artificial Sequence
  ENSG00000112183_5 (sequence is synthesized)
ccgccgccgctgctgcctatgaccagtacccctatgcagcctctccagctgctgcaggatatgttactgctgggggctatggctacgcagtccagcagccaatcaccgcagcggcacctg

SEQ ID NO: 188775 - DNA, 120 bp, Artificial Sequence
  ENSG00000112183_6 (sequence is synthesized)
ggacagctgccgccgccgctgcagcagctgctgccgctgcagcatttggccagtaccagcctcagcagctgcagacagaccgaatgcaatagaccagccatctgatcaaagttgaattgt

SEQ ID NO: 188776 - DNA, 120 bp, Artificial Sequence
  ENSG00000112183_7 (sequence is synthesized)
tttctctttccctcccaattttccaatttttagtagctaataagagagttaacattgacttaacagctttaaaaaaaaaaacagccatgctattgtgaagcagagttattatttttttta

SEQ ID NO: 188777 - DNA, 120 bp, Artificial Sequence
  ENSG00000112183_8 (sequence is synthesized)
tactccaggtagtgttctagatgagaaagaggtaagaatgaggggaatgggcacaattttggaaatcaatcccaaagagcctgagtaaatgaaaggccactacgaaatgacgccaggagt

SEQ ID NO: 188778 - DNA, 120 bp, Artificial Sequence
  ENSG00000112183_9 (sequence is synthesized)
aacaacggaacttcacttttgtaacgggatttttatttttgctctttttatagtatcagggaagcaaactgccttttacaagttagaaaatgctgtttgaatctagttgaaccagggaat

SEQ ID NO: 188779 - DNA, 120 bp, Artificial Sequence
  ENSG00000112183_10 (sequence is synthesized)
tttttacaaacaaaatggcgaaagcactgattgtcatttttagcagtcacttaaggcctatagaacttttttcaagtcggaaggtcctgttcttactatctcaaaaatgggcatcgaaca

SEQ ID NO: 188780 - DNA, 120 bp, Artificial Sequence
  ENSG00000112183_11 (sequence is synthesized)
atcaatctaggagcgtggcagtgggtaaaatggtggacaggcaccaaagctattttctcatctgtcctgtggatgagtggaactgtggaacaagtgatgtggaattaatgggtgcaacag

SEQ ID NO: 188781 - DNA, 120 bp, Artificial Sequence
  ENSG00000112183_12 (sequence is synthesized)
ctgtacagacaatcaataacacacacagttctggaaagaacacatcacttgtgcttgtttgatgagcttgtcacattctaatccctctccccatcctgtttcaattttgggaaacttgta

SEQ ID NO: 188782 - DNA, 120 bp, Artificial Sequence
  ENSG00000112183_13 (sequence is synthesized)
tctgctggtgtcagcaattctgattctgaaataggatcaggcttttactacaacagccttctctttctatttattgtgtcgactcgtggcttatgaataaaggcaggcaaagtttgcaga

SEQ ID NO: 188783 - DNA, 120 bp, Artificial Sequence
  ENSG00000112183_14 (sequence is synthesized)
actgtcttaaggacatttattttttttccctttttaagtaattttacactttagtatctatttcagagtcatatttaaaactatttattagtgactacagtacatgagacaacaaggtta

SEQ ID NO: 188784 - DNA, 120 bp, Artificial Sequence
  ENSG00000112183_15 (sequence is synthesized)
ctgagattacaattcttcaaaggttaatgataatgtggtttatactgtgccttaatagtaatgctatttaagatatttatttttaagttttactatgctgcactctaaagaaaggaactt

SEQ ID NO: 188785 - DNA, 120 bp, Artificial Sequence
  ENSG00000112183_16 (sequence is synthesized)
tagatgtgacactgtaaaattatgtattcatctcatggcataaattatttagtaagtctagatgtagcgtattaaatattaacctattcaactaaagatgttgacttggatttatttaaa

SEQ ID NO: 188786 - DNA, 120 bp, Artificial Sequence
  ENSG00000112183_17 (sequence is synthesized)
ttcatatgtgcactgtataagagagtactcttacattaacacattttagtttagtttttagatttttttttaaacgatatattgctagtttcatgcttcctcctctgattttgcctgtgt

SEQ ID NO: 188787 - DNA, 120 bp, Artificial Sequence
  ENSG00000112183_18 (sequence is synthesized)
agatttcatttattggtaattcattagtttaacactattatgtagtttttaaatgctgctttacatttttcttctgaaactgcaatacttgcaatttttattcttaaactaaattgaata

SEQ ID NO: 188788 - DNA, 120 bp, Artificial Sequence
  ENSG00000112183_19 (sequence is synthesized)
ctattttacactgtattggatttttatacttgaacaatttcatacaagggaagacaggttagcatttttatggactttctccattatcactggatttactttaagtattcccatactaga

SEQ ID NO: 188789 - DNA, 120 bp, Artificial Sequence
  ENSG00000112183_20 (sequence is synthesized)
cagtgttatgtaatgtagacatgactctcctgtgcaaattatttattcgttgtgtatattgctttataacatttcagatcttctaatctattcacttgtattaaatataatttttaaaaa

SEQ ID NO: 188790 - DNA, 120 bp, Artificial Sequence
  ENSG00000112183_21 (sequence is synthesized)
gcgcctggtttctgacaagcagttaagaacatctctgagtgtcctcagaaacacttgatgacgtcgtttctcctggcactgggaaacatctacaagtctgagataaacaagctggctgac

SEQ ID NO: 188791 - DNA, 120 bp, Artificial Sequence
  ENSG00000112183_22 (sequence is synthesized)
aaccatggcttgttattctaccaaggcattaaacataaatgagagttgttttgcctttggtgttcaacaacttcatccagcccttatacaaagacctttcggggctcgtatacagttaag

SEQ ID NO: 188792 - DNA, 120 bp, Artificial Sequence
  ENSG00000112183_23 (sequence is synthesized)
ctaactgatcagaaggataccatgataagaggtggaatagttctgtttggaattaaactctgtaaccagtagactcagacacacaagctcagatggatacctgcccactatgtctatccg

SEQ ID NO: 188793 - DNA, 120 bp, Artificial Sequence
  ENSG00000112183_24 (sequence is synthesized)
acaattgcattcccgggctggatgccggttgttaagcgcgctgttgctttgtaaaaatgcgtgtgttctggtgttttggctggggcagggaggggacaccccacgaggtctggggctgtt

SEQ ID NO: 188794 - DNA, 120 bp, Artificial Sequence
  ENSG00000112183_25 (sequence is synthesized)
gatctcagttttatcatgaatgacttctccattgtgattcttgatttccttcatgggttaatttagaggttatgtatgtatgtctgtgtgtgtctgttgctaaggtcaccatggctgacc

SEQ ID NO: 188795 - DNA, 120 bp, Artificial Sequence
  ENSG00000112183_26 (sequence is synthesized)
acacgttgtagacacggcagcctccagggacagtgtttcataaagccacacctgttgttgcgagtgagccagtcacctgacctgcagcaaagttctgagtgtgtgcatgaccacgcgcct

SEQ ID NO: 188796 - DNA, 120 bp, Artificial Sequence
  ENSG00000112183_27 (sequence is synthesized)
ggtttctgacaagcagttaagaacatctctgagtgtcctcagaaacacttgatgacgtcgtttctcctggcactgggaaacatctacaagtctggatacctgcccactatgtctatccgc

SEQ ID NO: 188797 - DNA, 120 bp, Artificial Sequence
  ENSG00000112186_0 (sequence is synthesized)
gactctcccctggagcagcgtgactgacaccggctcctattcagctgggaggagggagaggggaggagaaggggagggccgcgggaggagggtacgagtggccgaccacggatttgcatt

SEQ ID NO: 188798 - DNA, 120 bp, Artificial Sequence
  ENSG00000112186_1 (sequence is synthesized)
gccgaggacgggaccccagggcagcgaagcagaatggccaacatgcagggactggtggaaagactggaacgagctgtcagccgcctggagtcgctgtctgcagagtcccacaggccccct

SEQ ID NO: 188799 - DNA, 120 bp, Artificial Sequence
  ENSG00000112186_2 (sequence is synthesized)
gggaactgcggggaagtcaatggtgtcattgcaggtgtggcaccctccgtggaagcctttgacaagctgatggacagtatggtggccgagtttttaaagaacagtaggatccttgctggg

SEQ ID NO: 188800 - DNA, 120 bp, Artificial Sequence
  ENSG00000112186_3 (sequence is synthesized)
gacgtggagacccatgcagaaatggtgcacagtgctttccaggcccagcgggctttccttctgatggcctctcagtaccaacaaccccacgagaatgacgtggccgcacttctgaaaccc

SEQ ID NO: 188801 - DNA, 120 bp, Artificial Sequence
  ENSG00000112186_4 (sequence is synthesized)
atatcggaaaagattcaggaaatccaaactttcagagagagaaaccgggggagtaacatgtttaatcatctttcggccgtcagcgaaagcatccctgcccttggatggatagctgtgtct

SEQ ID NO: 188802 - DNA, 120 bp, Artificial Sequence
  ENSG00000112186_5 (sequence is synthesized)
cccaaacctggtccttatgtcaaggagatgaatgacgctgccaccttttacactaacagggtcttaaaggactacaaacacagtgatttgcgtcatgtggattgggtgaagtcatatttg

SEQ ID NO: 188803 - DNA, 120 bp, Artificial Sequence
  ENSG00000112186_6 (sequence is synthesized)
aacatttggagtgaacttcaagcatacatcaaggaacaccacaccacgggcctcacatggagcaaaacaggtcctgtagcatccacagtatcagcgttttctgtcctctcctctgggcct

SEQ ID NO: 188804 - DNA, 120 bp, Artificial Sequence
  ENSG00000112186_7 (sequence is synthesized)
ggccttcctccaccccctcctcctctgcctcctccagggccacctccacttttcgagaatgaaggcaaaaaagaggaatcttctccttcacgctcagctttatttgcccaacttaaccag

SEQ ID NO: 188805 - DNA, 120 bp, Artificial Sequence
  ENSG00000112186_8 (sequence is synthesized)
ggagaagcaattacaaaagggctccgccatgtcacagatgaccagaagacatacaaaaatcccagcctgcgggctcaaggagggcaaactcaatctcccaccaaaagtcacactccaagt

SEQ ID NO: 188806 - DNA, 120 bp, Artificial Sequence
  ENSG00000112186_9 (sequence is synthesized)
cccacatctcctaaatcttatccttctcaaaaacatgccccagtgttggagttggaaggaaagaaatggagagtggagtaccaagaggacaggaatgaccttgtgatttcagagactgag

SEQ ID NO: 188807 - DNA, 120 bp, Artificial Sequence
  ENSG00000112186_10 (sequence is synthesized)
ctgaaacaagtggcttacattttcaaatgcgaaaaatcaactattcagataaaagggaaagtaaactccattataattgacaactgtaaaaaactcggcctggtgtttgacaatgtggtg

SEQ ID NO: 188808 - DNA, 120 bp, Artificial Sequence
  ENSG00000112186_11 (sequence is synthesized)
ggcattgtggaagtgatcaactcccaggacattcaaatccaggtaatggggagagtgccaacaatttccattaataagacagaaggttgccacatatacctcagtgaagatgcattagac

SEQ ID NO: 188809 - DNA, 120 bp, Artificial Sequence
  ENSG00000112186_12 (sequence is synthesized)
cctcaggatggtgattatagagaatttcccattcctgaacagttcaagacagcatgggatggatccaagttaatcactgaacctgcagaaattatggcctaacttcctgagagaccgaac

SEQ ID NO: 188810 - DNA, 120 bp, Artificial Sequence
  ENSG00000112186_13 (sequence is synthesized)
cccctcacctgaatccccctctatcaaacaaacaaaaaagcagcagtaaagagctagaagttgcagtagcccctactgctttagctttggcctccaacgattctgtgctatagatacagc

SEQ ID NO: 188811 - DNA, 120 bp, Artificial Sequence
  ENSG00000112186_14 (sequence is synthesized)
actgtttctggcacgcctcgtgggcattttgaaatatttaacgtttcctcatgatttgcctttgtgtgtgattttagttccacatgatgacttgtgaacattagggatttaaaggaaaaa

SEQ ID NO: 188812 - DNA, 120 bp, Artificial Sequence
  ENSG00000112186_15 (sequence is synthesized)
aaaaaagaattctgttcccctcatatcatgaacacagtaactgataggtaaaaagactgcatgattcacttttacacttatatttcattgctagttaaaaaataaaacctttgagaatct

SEQ ID NO: 188813 - DNA, 120 bp, Artificial Sequence
  ENSG00000112186_16 (sequence is synthesized)
aagatgtacatttttaccttttaggcaatttcaatataatgtagaagtagtagtgtgccctgaaaaatgtacacgttttttcttattgttaccacatgttcacctttatcagcgtggata

SEQ ID NO: 188814 - DNA, 120 bp, Artificial Sequence
  ENSG00000112186_17 (sequence is synthesized)
ctgtcagcatgagtacatatttcaacccacgcttgtaaaagacataagagtttataaaggaccaaattcagttccttggtccttggaagacctatattctctgtagttactgaaaaccga

SEQ ID NO: 188815 - DNA, 120 bp, Artificial Sequence
  ENSG00000112186_18 (sequence is synthesized)
aagtcaattctaattattcatcttacatatttttccaccatgtcatttgaaaacttgcttttcttctgcataagagattcttatgccaaaaacattaaacagaagaaatcattttttttg

SEQ ID NO: 188816 - DNA, 120 bp, Artificial Sequence
  ENSG00000112186_19 (sequence is synthesized)
ctatgtaatacctcgcaactttgctctaaaatcaagctcagttattattttccaagtttgaacatgttaaatatcagatgccttgtaaattatgtctttaacgttttcttatagactaat

SEQ ID NO: 188817 - DNA, 120 bp, Artificial Sequence
  ENSG00000112186_20 (sequence is synthesized)
ttcctcttttccacctgccagacttgctaaccaagctcgaaaatgaacatgaaaaagccatacatgtattatttctcctaaaacctaaggcattatctgttggtttggcttgctgctcct

SEQ ID NO: 188818 - DNA, 120 bp, Artificial Sequence
  ENSG00000112186_21 (sequence is synthesized)
attttgtagtcttgatagtagatgcttcttcagcgtaagagtagctatgatattcctttttatcttttcagtacatagtgctgaaaaatctgcaacttcttggatcatatttaatgaatt

SEQ ID NO: 188819 - DNA, 120 bp, Artificial Sequence
  ENSG00000112186_22 (sequence is synthesized)
atagtataatgcttgcaggcccagtacaagcatatatattgtgcctcttacagcctttggaatacattgtttccattttttaaatatcttctatatccatatagtattcaaattattaat

SEQ ID NO: 188820 - DNA, 120 bp, Artificial Sequence
  ENSG00000112186_23 (sequence is synthesized)
gctcatgtaccaaggttttgctataaaagttttgtctgtatgaataatgtggctttagtaaataatcatttttcaactgtaaacttattctgaaataaagtaaaattctaattgtttaaa

SEQ ID NO: 188821 - DNA, 120 bp, Artificial Sequence
  ENSG00000112186_24 (sequence is synthesized)
ggctgtctcacagacttttgctgctggccagagtgaatgactcagcacaagtcaaccccaggagagaaacaatacagagctcacccctggctgattgagggccagaagcgccattcttgt

SEQ ID NO: 188822 - DNA, 120 bp, Artificial Sequence
  ENSG00000112195_0 (sequence is synthesized)
acactgcctcacttccctaaatgggcagcttcacttttagaaccccgggtccttccctggcaggcccaggtggcacatcctgtgtcgggtgggccctcaccttggatctccaggcctgac

SEQ ID NO: 188823 - DNA, 120 bp, Artificial Sequence
  ENSG00000112195_1 (sequence is synthesized)
actgcccagctggatggaaccatggccccagccttcctgctgctgctgctgctgtggccacagggttgcgtctcaggcccctctgctgacagtgtatacacaaaagtgaggctccttgaa

SEQ ID NO: 188824 - DNA, 120 bp, Artificial Sequence
  ENSG00000112195_2 (sequence is synthesized)
ggggagactctgtctgtgcagtgctcctataagggctacaaaaaccgcgtggagggcaaggtttggtgcaaaatcaggaagaagaagtgtgagcctggctttgcccgagtctgggtgaaa

SEQ ID NO: 188825 - DNA, 120 bp, Artificial Sequence
  ENSG00000112195_3 (sequence is synthesized)
gggccccgctacttgctgcaggacgatgcccaggccaaggtggtcaacatcaccatggtggccctcaagctccaggactcaggccgatactggtgcatgcgcaacacctctgggatcctg

SEQ ID NO: 188826 - DNA, 120 bp, Artificial Sequence
  ENSG00000112195_4 (sequence is synthesized)
taccccttgatgggcttccagctggatgtgtctccagctccccaaactgagaggaacattcctttcacacatctggacaacatcctcaagagtggaactgtcacaactggccaagcccct

SEQ ID NO: 188827 - DNA, 120 bp, Artificial Sequence
  ENSG00000112195_5 (sequence is synthesized)
acctcaggccctgatgccccttttaccactggtgtgatggtgttcaccccaggactcatcaccttgcctaggctcttagcctccaccagacctgcctccaagacaggctacagcttcact

SEQ ID NO: 188828 - DNA, 120 bp, Artificial Sequence
  ENSG00000112195_6 (sequence is synthesized)
gctaccagcaccaccagccagggacccaggaggaccatggggtcccagacagtgaccgcgtctcccagcaatgccagggactcctctgctggcccagaatccatctccactaagtctggg

SEQ ID NO: 188829 - DNA, 120 bp, Artificial Sequence
  ENSG00000112195_7 (sequence is synthesized)
gacctcagcaccagatcgcccaccacagggctctgcctcaccagcagatctctcctcaacagactaccctccatgccctccatcaggcaccaggatgtttactccactgtgcttggggtg

SEQ ID NO: 188830 - DNA, 120 bp, Artificial Sequence
  ENSG00000112195_8 (sequence is synthesized)
gtgctgaccctcctggtgctgatgctgatcatggtctatgggttttggaagaagagacacatggcaagctacagcatgtgcagcgatccttctacacgtgacccacctggaagaccagag

SEQ ID NO: 188831 - DNA, 120 bp, Artificial Sequence
  ENSG00000112195_9 (sequence is synthesized)
ccctatgtggaagtctacttgatctgaggccacttaagcatggggtggggagcttctcccagagtggccccagggggttagaggaggggtgaagattggggccagtatcgatcttatgaa

SEQ ID NO: 188832 - DNA, 120 bp, Artificial Sequence
  ENSG00000112195_10 (sequence is synthesized)
gctggaggacttgtgcagtgctggactcacccaggacttcccaaacccagaggctgccatcctaagcagccccacagcccagtgttctccttgggggcaggaacctggggaggggcccag

SEQ ID NO: 188833 - DNA, 120 bp, Artificial Sequence
  ENSG00000112195_11 (sequence is synthesized)
agcaaagggcatcagggagaaagtcccgaggaaatgtgaccagtggtttctgctcggagctgcagaccccagggctcttggtggaggcaggggaaccctgagagtgctgtttacagagaa

SEQ ID NO: 188834 - DNA, 120 bp, Artificial Sequence
  ENSG00000112195_12 (sequence is synthesized)
cctcagctcccgtctgcctcagaaaccctattgggctgagctgccctccccaccagggccactgtgtcctctgcttccctccgttctgcttcagcttcccctaaggttagggaagaaaga

SEQ ID NO: 188835 - DNA, 120 bp, Artificial Sequence
  ENSG00000112195_13 (sequence is synthesized)
atcgggctcacgaatgccagaggcagtgatgtcccatcctggaggagaggaaacagtgactaaaagctggggacccacagaggggttggcagcttctcttgtcgggacaggtgtcctttg

SEQ ID NO: 188836 - DNA, 120 bp, Artificial Sequence
  ENSG00000112195_14 (sequence is synthesized)
ctgggcctctggatggccctgccctgactggggctgctcctccctcctgtcctgggaccgcgcagagcccacgctctcactgctgcctcctgctggccgctgcctccttagaaagctgtg

SEQ ID NO: 188837 - DNA, 120 bp, Artificial Sequence
  ENSG00000112195_15 (sequence is synthesized)
gacttggggctctctcccccagcttctacacctgggctccaagtctgagttcccacaggggacccagcagcctccaggaagtccataccctggggtggctgagaccttggctctgtatgg

SEQ ID NO: 188838 - DNA, 120 bp, Artificial Sequence
  ENSG00000112195_16 (sequence is synthesized)
aggctgctcaccccacagacactggtggggagaccatggctcagaggaagggtggagcaaccctcctcctacccctcaggatagagagagaagacacacttgggacacagtgaagacagt

SEQ ID NO: 188839 - DNA, 120 bp, Artificial Sequence
  ENSG00000112195_17 (sequence is synthesized)
aacttggaactgaccacggcctggaggactggcccaggcagggggacagggaaaatggagcccaagtagcctctggccagggacccaatgtcccgaggaatctgcctcccacccactgac

SEQ ID NO: 188840 - DNA, 120 bp, Artificial Sequence
  ENSG00000112195_18 (sequence is synthesized)
ccacccactgactcagggctcagactcagcctctattgtccagagcactggcttggcgtccagcaatgaaggctggagaatgcagcctggattcccctacacacacacacacacacacac

SEQ ID NO: 188841 - DNA, 120 bp, Artificial Sequence
  ENSG00000112195_19 (sequence is synthesized)
acacacacacacacacacaggtgtctactgacctggagtgactggaatagcacctggggataaatgtgacaactgtgcattgaaccctgggtcagggacgttccaatggccaagagagtg

SEQ ID NO: 188842 - DNA, 120 bp, Artificial Sequence
  ENSG00000112195_20 (sequence is synthesized)
acacagccaggaccctggtggacagccagaggggccacttcaggatggatgtggggagagtggaagaggcagggagtaatcctgggggacagcagggaggaggcacttcttccctatgtc

SEQ ID NO: 188843 - DNA, 120 bp, Artificial Sequence
  ENSG00000112195_21 (sequence is synthesized)
ggggacagcagggaggaggcacttcttccctatgtccaggagagggcaatagagggaagactgaggctgaagaattgacggctctggacccaggacagacagacagacagacagacagac

SEQ ID NO: 188844 - DNA, 120 bp, Artificial Sequence
  ENSG00000112195_22 (sequence is synthesized)
agcaagcagcctcctaagatagctgttctccctatcatgacggtgtagccaccatcctgttgtatactaggagagaacttaacccacctgggggaaaatagctccccaagagctggcacc

SEQ ID NO: 188845 - DNA, 120 bp, Artificial Sequence
  ENSG00000112195_23 (sequence is synthesized)
agtaccactgatggccctgcttcctctgagtgagatgcccaggaggaggagccctagggaagaagtcagggacagggaccaggataccactctgtcactgtgtgaccctcagcaagtcac

SEQ ID NO: 188846 - DNA, 120 bp, Artificial Sequence
  ENSG00000112195_24 (sequence is synthesized)
taacccttggcctcatttttcctgtcttgtgaaagaggacaataattcctacttctcaagattgttttcaagataaaataacattagcattgtacaatgatgcaaatgcctcattaccat

SEQ ID NO: 188847 - DNA, 120 bp, Artificial Sequence
  ENSG00000112195_25 (sequence is synthesized)
tattccttaagttgttttccagctctaatgttgtttccaacattacatttaagaccttaggattctgtttcttgcttttgtcatatctcttcccaagtgtcatcactatatggatgttga

SEQ ID NO: 188848 - DNA, 120 bp, Artificial Sequence
  ENSG00000112195_26 (sequence is synthesized)
gggcccccgatgacagtccctttggtaaggtcctcttttgaggaggggagggtacagggtggactcatctcagtgtgaacttggcaagtcactgtccctctctgatcttgtttcctcatc

SEQ ID NO: 188849 - DNA, 120 bp, Artificial Sequence
  ENSG00000112195_27 (sequence is synthesized)
tggagaaggagtgagagaggagaaaggaagaaaccagtcaggcaggcagttagggtgggttctcggtagaattcttttaaacaaaagaacagcctgaaaaatcaagctgcaggcacagat

SEQ ID NO: 188850 - DNA, 120 bp, Artificial Sequence
  ENSG00000112195_28 (sequence is synthesized)
atgggaacttgcacaggggggcttgcctaagacatgcccacagcctcatagataagacagactacacaggtgacttgcccaaacatgcctgcaatggaaaatttcatcccctgacatgtg

SEQ ID NO: 188851 - DNA, 120 bp, Artificial Sequence
  ENSG00000112195_29 (sequence is synthesized)
cagtaaggggaacaaagcaatatggagtaagtaactcaagccaagggcccacatgtacattagaaggacagcagggagctaccagaaattcatgccttatgcagatgagctgcccagtcc

SEQ ID NO: 188852 - DNA, 120 bp, Artificial Sequence
  ENSG00000112195_30 (sequence is synthesized)
tcatcggtttcttataaaagcctttacattcaactgtaaaaatggcaaccctctttcaggcctcctctccacagcagagagctttcttctctcactcattaaactttcactccaacctca

SEQ ID NO: 188853 - DNA, 120 bp, Artificial Sequence
  ENSG00000112200_0 (sequence is synthesized)
agtaagggccgctcctcctttgaagaggttttgcgtctctttccgccggtggcgtcggcgctcacgcaggggcgggtcccggtagcgccaggcggtgcagggcgggaaggggattcgtgg

SEQ ID NO: 188854 - DNA, 120 bp, Artificial Sequence
  ENSG00000112200_1 (sequence is synthesized)
cgacggcggcggcagggacagcaggagcagtggtgctgtcagcgcggccgtcggagacatgggagacccggggtcggagataatagaatctgtccctccagctggccctgaggcatctga

SEQ ID NO: 188855 - DNA, 120 bp, Artificial Sequence
  ENSG00000112200_2 (sequence is synthesized)
gtcaacaacggatgaaaatgaagacgacattcagtttgtcagtgaaggaccattacgacctgttcttgaatacattgatctggtcagcagtgatgatgaagagcctagcacctcttatac

SEQ ID NO: 188856 - DNA, 120 bp, Artificial Sequence
  ENSG00000112200_3 (sequence is synthesized)
tgatagaatgcctgaatctaaggtgccatcctctgagaatcatcgcccagaaatgtgctctagctgcaatgttcctcttcccattggagatagcagctccttctctgggagttgttccag

SEQ ID NO: 188857 - DNA, 120 bp, Artificial Sequence
  ENSG00000112200_4 (sequence is synthesized)
cagtccagaaaggatagtttctcaaacttcctctgttgagaacccattggagaaccagaaaaatgatcaaaataattcagatactaagatctctgagacagagacccttaaatcatcaca

SEQ ID NO: 188858 - DNA, 120 bp, Artificial Sequence
  ENSG00000112200_5 (sequence is synthesized)
gaattttcagactctgccttcatctccacttctggtcccccaagaatctttggcctcttctgaggtcaaagagaatttacgtatagattcttcttcagcttcacagcatggacgggatgc

SEQ ID NO: 188859 - DNA, 120 bp, Artificial Sequence
  ENSG00000112200_6 (sequence is synthesized)
catcctctatctccagacacaagtagctgaaatgtcccgagtgatacgtgatctgcagtccaggagctgttttagatttcatcattctaggccaagtgagaactcctcagttccttggga

SEQ ID NO: 188860 - DNA, 120 bp, Artificial Sequence
  ENSG00000112200_7 (sequence is synthesized)
catctccacctctaaagaggaaaatttatccacagttgaagaagaaactgattacaaatcaccatcagctgatgacaaagggcagccatctgaccccagccaatctagtttcacaggtct

SEQ ID NO: 188861 - DNA, 120 bp, Artificial Sequence
  ENSG00000112200_8 (sequence is synthesized)
tttgaagagaatggaacaaagaggtgttataaaaagggtgacattacaatctgaagcggagtcatgtgaagggaaacctgattgtgtgacttctaaaaaacgtttggttcctccattgca

SEQ ID NO: 188862 - DNA, 120 bp, Artificial Sequence
  ENSG00000112200_9 (sequence is synthesized)
tcctcttctgagaattgccaccactgaggtttttaaagaccctgctgattgccatccttcttccttcatgggacacagggtatatcctgtggccaaggacacctctcctttccaaccaaa

SEQ ID NO: 188863 - DNA, 120 bp, Artificial Sequence
  ENSG00000112200_10 (sequence is synthesized)
cccaccagctgaaggccccattgtagaagcattagaacacagcaaaagaggaaacacaacatcccctctagattctacctcaaaagaaatggaggtcatgggttgtaggttttaccacgc

SEQ ID NO: 188864 - DNA, 120 bp, Artificial Sequence
  ENSG00000112200_11 (sequence is synthesized)
tgcctccattgcagcccgagctgctagctacatggcctatatgactcaatatcagcgtaaactctgggaagacatggaagatctggttcatgacccagaatttgatcgtggaaaagcaag

SEQ ID NO: 188865 - DNA, 120 bp, Artificial Sequence
  ENSG00000112200_12 (sequence is synthesized)
atgcataatatctgatggtatggatgcaggcctttggcaactttgtactactagggacataatggactctgtagtcagagttatggccatggccatagactatagacggcaggcctggct

SEQ ID NO: 188866 - DNA, 120 bp, Artificial Sequence
  ENSG00000112200_13 (sequence is synthesized)
tcgacttacatctctcactaagaaaacccaggagaagatctcccacttgccctttgatggtacttccctttttggacaagatgtgaaagctgttgttgcagaagacaacaatataaaaga

SEQ ID NO: 188867 - DNA, 120 bp, Artificial Sequence
  ENSG00000112200_14 (sequence is synthesized)
aaatgactataaagatcacaaatactataatcagcatcgatacttttatagtcatgatcagaaagcacattatcacaatagaggatactccaaaggggattggtacaaacctcgaaacca

SEQ ID NO: 188868 - DNA, 120 bp, Artificial Sequence
  ENSG00000112200_15 (sequence is synthesized)
cccctatagatatagaaagaagggagactctccagaacgccatgggtacaagaattaataacctgtttaatgttcagcagagtagtcattcaagatcctaactattttacttgttcctcc

SEQ ID NO: 188869 - DNA, 120 bp, Artificial Sequence
  ENSG00000112200_16 (sequence is synthesized)
ttgtacaaataggatctacaggtaggagatcatctcaaaaactggatgcatgtctggaatgatcacagctgacatttgaattctagacttttgaaatgaagtatataataaagaaactca

SEQ ID NO: 188870 - DNA, 120 bp, Artificial Sequence
  ENSG00000112200_17 (sequence is synthesized)
tgacttattggccaagtgagcagtggagactttcttgaaagggttggacaaatgtttatcctttatttctggtccaaaaataagtgtggaggaggaccactcaggaatctgaatcctctt

SEQ ID NO: 188871 - DNA, 120 bp, Artificial Sequence
  ENSG00000112200_18 (sequence is synthesized)
gtgattaaagaaaaatataaagatgtgttcctcaggaaaatcttatttgtaaactgaggactagcagattttgaatctagaaataatactagatgtctgtttactaagaccagaggtaaa

SEQ ID NO: 188872 - DNA, 120 bp, Artificial Sequence
  ENSG00000112200_19 (sequence is synthesized)
tccttaacttttaggttatcagtgcttccttgttcaggcttcagtttgacagatcttcacaaaatgacacatctgttaaaatgtctttatgtcaagatggtcaactcaccaagagtccgt

SEQ ID NO: 188873 - DNA, 120 bp, Artificial Sequence
  ENSG00000112200_20 (sequence is synthesized)
actactatcaagctctgtgagacttcagaatcagccatgaagctttgtgtcaactggaattcaaatcaaattttgccaaatccagtttgcttccccttggaatggctagatgtcgcaggt

SEQ ID NO: 188874 - DNA, 120 bp, Artificial Sequence
  ENSG00000112200_21 (sequence is synthesized)
ctattatggacaccaactggaaaaagacttctacctgtaacatctctgtagaaattgcacagtaactatcttcatcaagactttgatggccaccataccatcactactcataaagctaca

SEQ ID NO: 188875 - DNA, 120 bp, Artificial Sequence
  ENSG00000112200_22 (sequence is synthesized)
tgtgagagaattgtttgttgttatcaatcctaatagtctttgacctatcaagctctcgtatcaagctgtaagactgagtcatggtagtctctcactgtaagctgggcctttcaccaagat

SEQ ID NO: 188876 - DNA, 120 bp, Artificial Sequence
  ENSG00000112200_23 (sequence is synthesized)
ggccttcttaaacaacctaccttctaaacatttaattcttttgagcttgatagtgcatcacactctaaatacaaaaaagatacgcacatcagtgccctggaaataaaggatgttacacga

SEQ ID NO: 188877 - DNA, 120 bp, Artificial Sequence
  ENSG00000112200_24 (sequence is synthesized)
tccaggcatgcaaatctgaactcctaagaccaagaattccaaacatgcctgacaatcttgtccccttattgtaataaagagggataccatcagtctagattttattgagaatccttaaga

SEQ ID NO: 188878 - DNA, 120 bp, Artificial Sequence
  ENSG00000112200_25 (sequence is synthesized)
tttaaagcatagctgtggatgtggtgaagagaacaagccacacagctctgtttctggatatctaagtgatgatatccattaatgatttgaaaggctgaaatcaagatttaagtgatacgc

SEQ ID NO: 188879 - DNA, 120 bp, Artificial Sequence
  ENSG00000112200_26 (sequence is synthesized)
tcttggttaattggttacttaatttagtcagattcttagtgtaagagacagcttatctttttgctcccaattggtcccattaatagtttttcaccatactggaactggcagcagatacct

SEQ ID NO: 188880 - DNA, 120 bp, Artificial Sequence
  ENSG00000112200_27 (sequence is synthesized)
caattatatgtcccacagtatcttctctttagactcaaggtagtggatgtatggtatatcagcccttagatccatgtcttcacagcatgacatcaggaatggagaatatgtcaaatttga

SEQ ID NO: 188881 - DNA, 120 bp, Artificial Sequence
  ENSG00000112200_28 (sequence is synthesized)
ggggtctgaatacatcacctagtattatttgcttggcagccaaaaacagttgtttttattgacagacttaattctgtaacttctgcgttttttcatctgcttgatcaaggcattttggat

SEQ ID NO: 188882 - DNA, 120 bp, Artificial Sequence
  ENSG00000112200_29 (sequence is synthesized)
gtactgctaatggaatatggcactgttttacggtttatgtggcttctgttcttgccacagttgttgcacagtggtaattgatgttttctctggtgccacactttttaataatctattgga

SEQ ID NO: 188883 - DNA, 120 bp, Artificial Sequence
  ENSG00000112200_30 (sequence is synthesized)
agctcattcctcctcccccatcataaccatattcagcacccatttttaaatctacttttcttccttatttgtgctacagaggttgatggcgtaaattttcctacttggaagaaattactt

SEQ ID NO: 188884 - DNA, 120 bp, Artificial Sequence
  ENSG00000112200_31 (sequence is synthesized)
tatcagttaatttcagggtactgtattgatcttgtttgtcctatttgtagattaaacttgaactagtcttaataaaggggatattgttttgcaaatttagcccagtcatatcaagagtta

SEQ ID NO: 188885 - DNA, 120 bp, Artificial Sequence
  ENSG00000112200_32 (sequence is synthesized)
atatttatcttatttttctgtattttactcaaaattttatttccacttctgtagaaataggtccatgccagtgttctctacaaagtgtctttcaaactaaactctagaagaatatcgatt

SEQ ID NO: 188886 - DNA, 120 bp, Artificial Sequence
  ENSG00000112200_33 (sequence is synthesized)
acctgaacagaaacaaaggcctaagaaatcatacatttttgtagcttatgtgtattgcaccaatcaagcaatcccatgtgctcttgatattggcactgtagttttatcttagaggacttg

SEQ ID NO: 188887 - DNA, 120 bp, Artificial Sequence
  ENSG00000112200_34 (sequence is synthesized)
ccactggagaactcagtggtgagagaccttggaaatgttttatgtggctgcacataagtgtttctgactagctaaggctacttcagacttttcactttccatttgtccccttttccttcc

SEQ ID NO: 188888 - DNA, 120 bp, Artificial Sequence
  ENSG00000112200_35 (sequence is synthesized)
ctgaattagatgctatgtcataaacttggtggtttttgaaatactcttatttcaaaccttaaactaaaccgaaataagttatgcctgagaatgcgtttgtctgaaacgattttggcactt

SEQ ID NO: 188889 - DNA, 120 bp, Artificial Sequence
  ENSG00000112200_36 (sequence is synthesized)
ccctttaatatgcttccccttccctttgccttttaaattgtggttaaaaaaaaagaaaaaaaaaggcacataaagctgagcaccttaaccattttttaagcgtatggtagtgttgactat

SEQ ID NO: 188890 - DNA, 120 bp, Artificial Sequence
  ENSG00000112200_37 (sequence is synthesized)
atttgcattgttgcgcagctcctccattcttaaatatttgtaagatgatgttgctgttctcttttcctcctgtgatatttatgttgcccagtaataagtaaaagtatcctttcttagtta

SEQ ID NO: 188891 - DNA, 120 bp, Artificial Sequence
  ENSG00000112200_38 (sequence is synthesized)
ctctaactgatatgcccaagtgtctccagatactctgttttcctggaagtgtaaaggtattgggaaattatcaaattggtgaccaagtagttctgaaaggatttgaccgtttaataggga

SEQ ID NO: 188892 - DNA, 120 bp, Artificial Sequence
  ENSG00000112200_39 (sequence is synthesized)
gataatgttataaaacttaaagtgaggatttggtctagggagattaccccaatagaatcagaaactcttagtcagataataaatcctcatattatgcctgccatgttcagaacctgcaac

SEQ ID NO: 188893 - DNA, 120 bp, Artificial Sequence
  ENSG00000112200_40 (sequence is synthesized)
aaaattccctactaggccaacctctaacgtttaaatacctctaggttttctaggaggccttggaatagttgcaagtttaatgatctggtattctcaaaaaggatgtatctaatgatcttg

SEQ ID NO: 188894 - DNA, 120 bp, Artificial Sequence
  ENSG00000112200_41 (sequence is synthesized)
attcttcaaaatgttatttcttgattagatatacaatgtatatagagacaatatggtttcttgtagttactgtgtatagagaagtactgtttccatttttatatgaagtgcctttttaat

SEQ ID NO: 188895 - DNA, 120 bp, Artificial Sequence
  ENSG00000112200_42 (sequence is synthesized)
tctacacttttctttaaaacttaaactttgatgtcttgcatatattgctggtggtatttatgtgaattttgtacagtgatttaatcttgtagtttatcatttgtacaattgcactatcta

SEQ ID NO: 188896 - DNA, 120 bp, Artificial Sequence
  ENSG00000112200_43 (sequence is synthesized)
aatgtactcccttctgaatgttaatttgttttctttatagcactgttgattcatttcagaaggttgtagagtatacctccctcccccttatttaactaactagacagtagttcctttttg

SEQ ID NO: 188897 - DNA, 120 bp, Artificial Sequence
  ENSG00000112200_44 (sequence is synthesized)
ttattagtgagtggctaattttggggggccttaaggcagctttgttttctatagatatgctctaggttttctgattgtctcgtatctaaccttgttcttagccatgataacacaacttat

SEQ ID NO: 188898 - DNA, 120 bp, Artificial Sequence
  ENSG00000112200_45 (sequence is synthesized)
atttgataagtggatgtgtttacttggttagaataagcaaggacatttttaaaaagcagtaaatttgctgacacttttatctttttttaaaagaatgaatgacagcttccttatcagtat

SEQ ID NO: 188899 - DNA, 120 bp, Artificial Sequence
  ENSG00000112200_46 (sequence is synthesized)
aattacatttaaacttttttttttaaaccgtgtggcagcttctttatcaatcagtataattccatttatttacttagccctcaaaatgacattttgaagggagcataaactctttcaggc

SEQ ID NO: 188900 - DNA, 120 bp, Artificial Sequence
  ENSG00000112200_47 (sequence is synthesized)
tacttggacagtatttagtattctatattagtactacactaataatttactgagtgctacctaagtgacctgattgataatgtccttaaggacctgatacatccaggataacctctcagg

SEQ ID NO: 188901 - DNA, 120 bp, Artificial Sequence
  ENSG00000112200_48 (sequence is synthesized)
tactgtaaacaaggaggttgaaaaagacacattccggaatccctttgtctggtaaaattggatactgatgtggatggacatgacattcattattcttgaagatataactagttgactggg

SEQ ID NO: 188902 - DNA, 120 bp, Artificial Sequence
  ENSG00000112200_49 (sequence is synthesized)
tgaagatataactagttgactgggattctgatgaaggtttgaaattatggattagatctttgtagaagtagtttaaagattgcaataagtgaaatcttttttttttttttttttttgaga

SEQ ID NO: 188903 - DNA, 120 bp, Artificial Sequence
  ENSG00000112200_50 (sequence is synthesized)
cgcctggctgtgaaattttttttttttttttttttatgtgaggcatattttgccacagtctcgcactgtttaggttctcttgtcttttggaatctatcattctgtatttaatgttagtgg

SEQ ID NO: 188904 - DNA, 120 bp, Artificial Sequence
  ENSG00000112200_51 (sequence is synthesized)
ctagtccaataattgattgtctcatctgtatgcatcttatgcatgtgattcaatagactagatcgattctgtgtggtttatcatagtagatacacaaaccagtctttattttttacttaa

SEQ ID NO: 188905 - DNA, 120 bp, Artificial Sequence
  ENSG00000112200_52 (sequence is synthesized)
ataagtggaagttatcagtaaactggtgattattgtattgaatgcaaatctttttattatttttccagatatattgagttttataaaccattaaaatattattttatgaaatttcccttc

SEQ ID NO: 188906 - DNA, 120 bp, Artificial Sequence
  ENSG00000112200_53 (sequence is synthesized)
ttcccttcctggatgaacagaatattgttttattaaatcttctcttattagtggaatattttttacttctttgtcttttcatttacttgttttttgttataatgaaaactttactagtgt

SEQ ID NO: 188907 - DNA, 120 bp, Artificial Sequence
  ENSG00000112200_54 (sequence is synthesized)
ttggtaccattgagataacttattactggaaattttgtttgcttcctgtgggatatatctggaagtggtcatagtccaaccatgtccttttgatgttgttagcatatcagttattctatg

SEQ ID NO: 188908 - DNA, 120 bp, Artificial Sequence
  ENSG00000112200_55 (sequence is synthesized)
tattgatcttttcttctcctgtattcaacacctctttctgaaaggatgtctgatcttcccataatcgctttgatgtagatgatatttttattctatcagtgtatactagacaggattttg

SEQ ID NO: 188909 - DNA, 120 bp, Artificial Sequence
  ENSG00000112200_56 (sequence is synthesized)
atgtggctttgtatttgtatatttaaataccatgtctttaaagcattattagaagagatattctagtttcttctaatgtcccttttaaaaaaaatatagccagtccaatatctcaaacta

SEQ ID NO: 188910 - DNA, 120 bp, Artificial Sequence
  ENSG00000112200_57 (sequence is synthesized)
ctttgatttttgaacttaaatcaacttttagtgctaccttgtttaatggtagtagtattttctcatttctacatgttcacacaagtttattatatatagtttatggtcatatgtatctta

SEQ ID NO: 188911 - DNA, 120 bp, Artificial Sequence
  ENSG00000112200_58 (sequence is synthesized)
taaaaattttgaagcccatccccatggatttattataatacagctctgatatatcttaaagttaacccgttttccgtagatgttaagggctttactggttgaggtaacctatttcaaatg

SEQ ID NO: 188912 - DNA, 120 bp, Artificial Sequence
  ENSG00000112200_59 (sequence is synthesized)
gtctgttgggttttgtggtaccttgtcaagaattcaataagaattctcaggctgtctgtattttcttttaggactttggagatctctcaagttgtactgttttctagtattcctgagtat

SEQ ID NO: 188913 - DNA, 78 bp, Artificial Sequence
  ENSG00000112200_60 (sequence is synthesized)
gatctctcaagttgtactgttttctagtattcctgagtatattcctttggtaacgtgaaagtaaatagtttatatttg

SEQ ID NO: 188914 - DNA, 120 bp, Artificial Sequence
  ENSG00000112200_61 (sequence is synthesized)
aaaaaattctactttgaccttaagtgcttcaagaattgtgttcagttagtagtccttttgtaagactaactttcatatgctatctttgctccatgagctatcatagtactgttttctttc

SEQ ID NO: 188915 - DNA, 120 bp, Artificial Sequence
  ENSG00000112200_62 (sequence is synthesized)
attacccgtaagagtggctctatcacagcatttactgttaagggctacagttagacctcttgttaactctacttttatttgtgatggctgtgtttcacactaccttgatttataaatgta

SEQ ID NO: 188916 - DNA, 120 bp, Artificial Sequence
  ENSG00000112200_63 (sequence is synthesized)
gtaatgtgttaaataactatatgttgtggtcccttaatacctcttttgattggtgaggtaacagtgatgtggatgatgaaataaaaacgtttccccaagtcactaaacacagttttcaat

SEQ ID NO: 188917 - DNA, 120 bp, Artificial Sequence
  ENSG00000112200_64 (sequence is synthesized)
tcatttttttttacatatttaatttacatctaactactgttaggtatgcagcccgttcctttttgccttcagtagaatatagttatataagtagtctcatttagattcttgggacagaac

SEQ ID NO: 188918 - DNA, 120 bp, Artificial Sequence
  ENSG00000112200_65 (sequence is synthesized)
ggcctgtgtattgatctttctttaatggcttggaacagcttctatatattctgacaggtcttggaagcatgttaatatccgtgtgtttaattgtcatcttcctgcctgggaaggcagtag

SEQ ID NO: 188919 - DNA, 120 bp, Artificial Sequence
  ENSG00000112200_66 (sequence is synthesized)
aagaaagaatctacatttgtatagtctgtagtacaggctctgtgctgattgcaaggcactcttgagagaaattcattcttattttgcagaagaagaactgaaacttcattaagtcattaa

SEQ ID NO: 188920 - DNA, 120 bp, Artificial Sequence
  ENSG00000112200_67 (sequence is synthesized)
gcaacttgctcaggtggtggaactgagctttaaatatggactttttccagtctcaattcagcattatactaggctgcctccatgtgtttttcaaagccccattcaagttttacttctatg

SEQ ID NO: 188921 - DNA, 120 bp, Artificial Sequence
  ENSG00000112200_68 (sequence is synthesized)
gtaaactaattttacatacacaaatcttttcattttctgaacttcctttatggctttactgtcaccccactagtatttgatgtcttagctattaactaattcctgattatttcacttgtc

SEQ ID NO: 188922 - DNA, 120 bp, Artificial Sequence
  ENSG00000112200_69 (sequence is synthesized)
acatcaggaaccctatcctcttagttctcccattgagatttcactgctggactaagattattcttgattcgtagtcattggtttctgtttccattcattttcagcactgattatgttaat

SEQ ID NO: 188923 - DNA, 120 bp, Artificial Sequence
  ENSG00000112200_70 (sequence is synthesized)
cgtattgcttgagttttttctttgttcaatgttgtttattacattcattttgtttcatatacacacattttttttttttaactggcattttgaggatattggtttaatggaaggaaaaag

SEQ ID NO: 188924 - DNA, 120 bp, Artificial Sequence
  ENSG00000112200_71 (sequence is synthesized)
gaatggtgcaaagcacatggtatttgaattccaaagaccttgaccctcagcattagcaagtcacttgttttctgagcctcagttttcttactctcaaatgaggtaatatccgaaagtact

SEQ ID NO: 188925 - DNA, 120 bp, Artificial Sequence
  ENSG00000112200_72 (sequence is synthesized)
ttgacaacacactaaagcctgatgcagatttcctttttgaagtaattgtgctgtttctattcatattggatatggtattctatggtattggctatagatacatacattttaaaatgttat

SEQ ID NO: 188926 - DNA, 120 bp, Artificial Sequence
  ENSG00000112200_73 (sequence is synthesized)
ttaacagcatgtaaatgttcatttcatgccatgtgatcatgttcccctttatgattttttaaggctgtcttacaagcctaacagtgtactaagtcattaaaagatatatttaaagtaaaa

SEQ ID NO: 188927 - DNA, 120 bp, Artificial Sequence
  ENSG00000112200_74 (sequence is synthesized)
aatagagcattcagagaaaaaattgattttcagcatgctcatgggttacaagaattggaatttattcgaggacattctgatacagaagcagcaagactgtgtgtggaccagtggctaaaa

SEQ ID NO: 188928 - DNA, 120 bp, Artificial Sequence
  ENSG00000112200_75 (sequence is synthesized)
atgccaggactcaaaacaggcacaattaattgtggaacaaaaagttcattccgaagaggaggccacacgtgggtgtctgggaaaccaattttatgtcctataatgcactgtaacaaggag

SEQ ID NO: 188929 - DNA, 120 bp, Artificial Sequence
  ENSG00000112200_76 (sequence is synthesized)
gtaagtttgtgctatgcaagaggcattgttaatgaaaacctatggtgttatctccatagagatgaatgcatatgattttcaaaacaggagaatttaatgtcaccatttttaatattattt

SEQ ID NO: 188930 - DNA, 120 bp, Artificial Sequence
  ENSG00000112200_77 (sequence is synthesized)
ggcaagcactggaaaaaacctagtgtgggaaagtagtgtaacactaatgaactgtattataatgagtaagcttgggtatgagcagttattgaaaataatattgagaatacataaatttat

SEQ ID NO: 188931 - DNA, 120 bp, Artificial Sequence
  ENSG00000112200_78 (sequence is synthesized)
ggcacaataactgcatgtattgattcttctttacagaatgtgacagtgatgataacatgggtgccaaaaatacttcaataggagaagaatttatatccacagaagatgtggaattagaag

SEQ ID NO: 188932 - DNA, 120 bp, Artificial Sequence
  ENSG00000112200_79 (sequence is synthesized)
agatattaccacacaacatcaagtggccttgaagagactgagataacgaattcttgagtttgttttctaaaggagaccagaaatccactattacaaatgtatttgaaaacatgtttttgc

SEQ ID NO: 188933 - DNA, 120 bp, Artificial Sequence
  ENSG00000112200_80 (sequence is synthesized)
tttcatatgttcaaaatctgatctttgttttgtatttttgtgctaatgtgcaaacatgtacagaagaaatagaatacatgttcatgcaaatataaattatgtattctaatataggtgtaa

SEQ ID NO: 188934 - DNA, 120 bp, Artificial Sequence
  ENSG00000112200_81 (sequence is synthesized)
cagtttcccagttaactttgaatttatatatttagatttaaaggattaaaaaaaaggaaagctcttgacagttgtttcccaaatagcattagttctttaattttatttgtactgtacaaa

SEQ ID NO: 188935 - DNA, 120 bp, Artificial Sequence
  ENSG00000112200_82 (sequence is synthesized)
gatcactctccatgtgatccaacaattacactacatggacctttcttcagctcctttgcttgtgtagtatgttataaaaaatttgttactcaacaacaatatagagatcacctttttgat

SEQ ID NO: 188936 - DNA, 120 bp, Artificial Sequence
  ENSG00000112200_83 (sequence is synthesized)
aaggaagccacagatgatggacataacaacaaccttcttcctcagattattcagtgttttgcatgtccaaattgcttccttctttttagcagaaaggaggagtgttcaaagcatatgtct

SEQ ID NO: 188937 - DNA, 120 bp, Artificial Sequence
  ENSG00000112200_84 (sequence is synthesized)
ggaaagaatcatttccatcagagtttcaaactgggtgataacaaaggaattgcacatccaatatctttcccatcttttgcaaagaaacttttgatctctctgtgcaaagatgttcccttt

SEQ ID NO: 188938 - DNA, 120 bp, Artificial Sequence
  ENSG00000112200_85 (sequence is synthesized)
caagttaagtgtgtggcctgccacaagacactgcgttcccacatggagctcactgcccatttcagagttcattgtcgaaatgctggacctgtagctgtagctgagaagagcattacccag

SEQ ID NO: 188939 - DNA, 120 bp, Artificial Sequence
  ENSG00000112200_86 (sequence is synthesized)
gttgcagagaaattcatattaagaggttattgtccagattgcaatcaagtctttgtggatgaaaccagcacccaaaatcataagcagaattcaggacacaaagtccgagtcattaactca

SEQ ID NO: 188940 - DNA, 120 bp, Artificial Sequence
  ENSG00000112200_87 (sequence is synthesized)
gtggaagaatcagtcttactctattgccacagcagcgaagggaacaaggatccttcttctgacttgcatttattgttggatcaatcaaaattttcatcacttaaaagaaccatgtctatt

SEQ ID NO: 188941 - DNA, 120 bp, Artificial Sequence
  ENSG00000112200_88 (sequence is synthesized)
aaagaatctagctcactggagtgcattgccattccaaaaaagaagatgaatttaaaagataaaagccatgaaggtgttgcttgtgtccagaaagaaaaatcagtagttaaaacctggttc

SEQ ID NO: 188942 - DNA, 120 bp, Artificial Sequence
  ENSG00000112200_89 (sequence is synthesized)
tgtgaatgcaatcagcgattcccaagtgaagatgcagtagaaaagcatgttttctcagcaaacacaatgggttataaatgtgtggtctgtggaaaggtatgtgatgattcaggggtcatt

SEQ ID NO: 188943 - DNA, 120 bp, Artificial Sequence
  ENSG00000112200_90 (sequence is synthesized)
aactttcttttctggtgtcggacatgcaaaaaggagttaacaaggaaagatactatcatggcacatgtgactgaatttcataatggacacagatatttttatgagatggatgaggtagaa

SEQ ID NO: 188944 - DNA, 120 bp, Artificial Sequence
  ENSG00000112200_91 (sequence is synthesized)
ggtgaaactttgccatcatcctctacaacattggataatttgactgctaacaagccttcatcagctattactgttattgatcattccccggcaaatagttctccgaggggtaaatggcaa

SEQ ID NO: 188945 - DNA, 120 bp, Artificial Sequence
  ENSG00000112200_92 (sequence is synthesized)
tgccggatttgtgaagatatgtttgattcccaggaatatgtaaaacagcactgcatgtctttggcaagccacaagtttcatagatacagctgtgctcactgcagaaagccttttcataag

SEQ ID NO: 188946 - DNA, 120 bp, Artificial Sequence
  ENSG00000112200_93 (sequence is synthesized)
atagaaacattgtaccgacattgccaagatgagcatgacaatgagataaagattaaatacttctgtgggctttgtgatcttatctttaatgtggaagaagcatttctgagtcattatgag

SEQ ID NO: 188947 - DNA, 120 bp, Artificial Sequence
  ENSG00000112200_94 (sequence is synthesized)
gagcaccacagcatagattatgtatttgtgtcagaaaaaactgaaacttcaattaaaaccgaagatgattttccagtaatagagaccagtaaccagttaacttgtggttgccgtgagagt

SEQ ID NO: 188948 - DNA, 120 bp, Artificial Sequence
  ENSG00000112200_95 (sequence is synthesized)
tacatctgtaaagtcaacagaaaagaagattatagcagatgtctccaaatcatgctggataaaggaaaactgtggtttcgctgcagtttatgttcggcaacagcacagaatttaaccgac

SEQ ID NO: 188949 - DNA, 120 bp, Artificial Sequence
  ENSG00000112200_96 (sequence is synthesized)
atgaacactcatatccatcaagtgcacaaagaaaagagtgatgaggaggagcagcagtatgtaatcaagtgtggcacctgcaccaaagcatttcatgatcctgagagtgcacagcagcat

SEQ ID NO: 188950 - DNA, 120 bp, Artificial Sequence
  ENSG00000112200_97 (sequence is synthesized)
ttccatagaaaacattgcttcttacagaaacccagtgtggctcattttggatctgaaaaatcaaacctgtacaagtttactgctagtgcctcacatacagagagaaaactgaaacaggca

SEQ ID NO: 188951 - DNA, 120 bp, Artificial Sequence
  ENSG00000112200_98 (sequence is synthesized)
ataaactattcaaaaagtttagacatggagaaaggagttgagaatgacctaagctatcagaatatagaggaagaaattgttgagcttccagatttggattacctgcgaaccatgactcat

SEQ ID NO: 188952 - DNA, 120 bp, Artificial Sequence
  ENSG00000112200_99 (sequence is synthesized)
atagtctttgtagattttgataactggtcaaacttttttggtcatctaccagggcatctaaaccaaggaacatttatttggggctttcaaggtacggttaataagaaaaacaaaagaaaa

SEQ ID NO: 188953 - DNA, 120 bp, Artificial Sequence
  ENSG00000112200_100 (sequence is synthesized)
ctttttcccacctcttagaatatagttcagtttaaaaggctcctcttaaaccttcctggatagaacataggaacataattggaatattgttcttttgtattatagttactctgctagaat

SEQ ID NO: 188954 - DNA, 120 bp, Artificial Sequence
  ENSG00000112200_101 (sequence is synthesized)
ttttgtattatagttactctgctagaatcgttttctttacatgcctctgtggtaaatgttagctctatctggtgactcaaagtttatggatcttttggccgggcgcggtggctcacgtct

SEQ ID NO: 188955 - DNA, 120 bp, Artificial Sequence
  ENSG00000112200_102 (sequence is synthesized)
acagaaaatttgttttctcttagaaaaaaggatatgtagagatccttttaggaatggagaatattaaacgtaaagaccatattgattatcagaaggataaagttgctttaactctggctc

SEQ ID NO: 188956 - DNA, 120 bp, Artificial Sequence
  ENSG00000112200_103 (sequence is synthesized)
ggaacatttatttggggctttcaaggaggaaacaccaattggaagcctccgctcaactgtaagatttataactacctgaacaggattggatgcttcttccttcatcctcgctgtagtaaa

SEQ ID NO: 188957 - DNA, 120 bp, Artificial Sequence
  ENSG00000112200_104 (sequence is synthesized)
agaaaagatgctgctgattttgccatatgtatgcatgctggccgtctagatgaacaactacccaagcaaattcctttcaccatcctctcaggagatcaaggttttctggagctagagaat

SEQ ID NO: 188958 - DNA, 120 bp, Artificial Sequence
  ENSG00000112200_105 (sequence is synthesized)
caatttaagaagactcagaggccagctcatatactaaaccctcaccacttagagggagatatgatgtgtgccttgttaaatagcatatctgataccaccaaaggtacgcagctgcagtca

SEQ ID NO: 188959 - DNA, 120 bp, Artificial Sequence
  ENSG00000112200_106 (sequence is synthesized)
cagtgcaaaccacccaagaggaggagacttcactgctgagagaaaccaataaactgctgtccgctagtgaactgttgcctgcttgctaaaccatcatgttctcttacttctatcttactt

SEQ ID NO: 188960 - DNA, 120 bp, Artificial Sequence
  ENSG00000112200_107 (sequence is synthesized)
atcttttttaaaaaaatctcactttcattctttagtgttttagaaggaggatgaattcataataattttctggagctttttttgatctagtagataaaatctatattgatgtatataaaa

SEQ ID NO: 188961 - DNA, 120 bp, Artificial Sequence
  ENSG00000112200_108 (sequence is synthesized)
catatattcatgtgttacagtatgttactacaattttaaaagctcagaattcagatcttcactttgtttctgaaattccaagttgaccttcagttttttagaaagcagtgcgcttagagg

SEQ ID NO: 188962 - DNA, 120 bp, Artificial Sequence
  ENSG00000112200_109 (sequence is synthesized)
tgaaaaccagaaagcaataacaaaggtgatcatttaagaggttgacagtgacaaaataaaacgctgataggcttttaggtccttagagaagtgggtacatcctatcttattgctgggact

SEQ ID NO: 188963 - DNA, 120 bp, Artificial Sequence
  ENSG00000112200_110 (sequence is synthesized)
gaatataaaaaaggtgacataggtcaagttttccataaattctacttctcatgtggcactattatataatacctttgagatctttgtttatgtttattagaagagggtaatggaaactga

SEQ ID NO: 188964 - DNA, 120 bp, Artificial Sequence
  ENSG00000112200_111 (sequence is synthesized)
tcatggaaacatttaaaattttatcagcaatgttctttgtgggtgccatgcatatgtaaattattgctttaattagagcagcacattgctaaaataaaaaatacaccttaatttttaaga

SEQ ID NO: 188965 - DNA, 120 bp, Artificial Sequence
  ENSG00000112200_112 (sequence is synthesized)
aataatttaaatgaaacaatttccattccttttacctgcttagacttttatgtgacttgtatggtctcctggttaaagggaatggtgtcagaatatttgcataaaattatttttcataac

SEQ ID NO: 188966 - DNA, 120 bp, Artificial Sequence
  ENSG00000112200_113 (sequence is synthesized)
agtccttttttatatattggtgtaaacataatattcttcaagaaataatgttgaaagcctactcaggaataatcttccttaactctttaaatttttatttcatgtgaagtgttttcagtt

SEQ ID NO: 188967 - DNA, 120 bp, Artificial Sequence
  ENSG00000112200_114 (sequence is synthesized)
tagttattcactgaattgtcagtttccttcatttggtattacatatttaattcttaaatattgaggccccattgtgagtaataaaaaatacgacataagtagaagactaagaagggcttg

SEQ ID NO: 188968 - DNA, 120 bp, Artificial Sequence
  ENSG00000112200_115 (sequence is synthesized)
agggcttgtcatattatctttgtgtatatgcttcatgttatttaaccagaaatgtcttatctctaaaaatttttagtagtaattatttaccaaacttaaaaacatttctataaatataaa

SEQ ID NO: 188969 - DNA, 120 bp, Artificial Sequence
  ENSG00000112200_116 (sequence is synthesized)
ttatatttaagacaaaatataaaggctagaatttggttccttctctgtaacactaaatattttagtgtgaaattgaatttttttattactatagtcttttcaatctataatttgtgtttt

SEQ ID NO: 188970 - DNA, 120 bp, Artificial Sequence
  ENSG00000112200_117 (sequence is synthesized)
taatttcttgatatgtcacttctgttcctccctgcttgcattttttaaaaactagacattgtggcttgagaatttatcaatcatctttccgaaatgaccacattgtgcttttagtttgta

SEQ ID NO: 188971 - DNA, 120 bp, Artificial Sequence
  ENSG00000112200_118 (sequence is synthesized)
tgtttaagtggtcaagcaaggctctaggaggtagtcactgagctggaccttaaacacatctgcaggagctcacaaaatgggagcaaaagaggcattccagaaagaagagtagttaagcag

SEQ ID NO: 188972 - DNA, 120 bp, Artificial Sequence
  ENSG00000112200_119 (sequence is synthesized)
atgtgggggcagggcaagaggagacagcaccttgttgccagagattctacacaaaggtgtgatggacactgatgctctattaagaagcttttgtggtgtgtgtggtagagaataattaag

SEQ ID NO: 188973 - DNA, 120 bp, Artificial Sequence
  ENSG00000112200_120 (sequence is synthesized)
gcttctgataagacaggaaagggatatttcatcatgactgttaagaaaaggtaactgggttgtttaatgttttaattgataattgtcactgatcgtatttctacttgttaaataattaaa

SEQ ID NO: 188974 - DNA, 120 bp, Artificial Sequence
  ENSG00000112200_121 (sequence is synthesized)
aatcatcttaaaattcatactttgactttaatttagacacaaggagatgtaatcgctgtgtaacatcagagaaagctatatggattatcgtcagaagtaaatgtttctaacattgacaaa

SEQ ID NO: 188975 - DNA, 120 bp, Artificial Sequence
  ENSG00000112200_122 (sequence is synthesized)
ccatgttgaagtggagaaacagcagaaagaagagaagaatagagcattcagagcctttgtgaattgttggtgtcttcactattaaagtaagttatcttacttttgtgctggagaggtttc

SEQ ID NO: 188976 - DNA, 120 bp, Artificial Sequence
  ENSG00000112200_123 (sequence is synthesized)
gagacagtagttttcaagccttatccacttggtggcccaggagttattctgtgatttgtagaatacagaatctgaaactaaacacagcatgctgaaggaaaggagtgatatagatatgga

SEQ ID NO: 188977 - DNA, 120 bp, Artificial Sequence
  ENSG00000112200_124 (sequence is synthesized)
ggggggtgcaaaaatgggccctctcatttaaattttattgaaatatacataaaagtgcacaattcataagtatacttgttggataaagttttgcaaagcctcatacatctatgtaaacag

SEQ ID NO: 188978 - DNA, 120 bp, Artificial Sequence
  ENSG00000112208_0 (sequence is synthesized)
agacgatccgctagccacattaggcgctcggtctctgcgtccgcccctcccgtgcctcagagacttgcgctccccaggcccgagcccctgtcggcccatcctcgagcccgtgtggctcgc

SEQ ID NO: 188979 - DNA, 120 bp, Artificial Sequence
  ENSG00000112208_1 (sequence is synthesized)
gaacctctaactccagccgctgcagccccctcccaggcccggcgtccccgagccccgcgggcgccgcgcctgcccttctttggctacgctgcagccgcggtgtcggcgagtcctcccggg

SEQ ID NO: 188980 - DNA, 120 bp, Artificial Sequence
  ENSG00000112208_2 (sequence is synthesized)
ttgcccccgcgggcgtcagagggagggcgggcgcccgcgtggtgacggcgacgcctgcagcccaaggagcgctccactcgctgccgccggaggggccggtgacctcttggctaccccgcg

SEQ ID NO: 188981 - DNA, 120 bp, Artificial Sequence
  ENSG00000112208_3 (sequence is synthesized)
tcggaggcttagatggctcaggcgaagatcaacgctaaagccaacgaggggcgcttctgccgctcctcctccatggctgaccgctccagccgcctgctggagagcctggaccagctggag

SEQ ID NO: 188982 - DNA, 120 bp, Artificial Sequence
  ENSG00000112208_4 (sequence is synthesized)
ctcagggttgaagctttgagagaagcagcaactgctgttgagcaagagaaagaaatccttctggaaatgatccacagtatccaaaatagccaggacatgaggcagatcagtgacggagaa

SEQ ID NO: 188983 - DNA, 120 bp, Artificial Sequence
  ENSG00000112208_5 (sequence is synthesized)
agagaagaattaaatctgactgcaaaccgtttgatgggaagaactctcaccgttgaagtgtcagtagaaacaattagaaacccccagcagcaagaatccctaaagcatgccacaaggatt

SEQ ID NO: 188984 - DNA, 120 bp, Artificial Sequence
  ENSG00000112208_6 (sequence is synthesized)
attgatgaggtggtcaataagtttctggatgatttgggaaatgccaagagtcatttaatgtcgctctacagtgcatgttcatctgaggtgccacatgggccagttgatcagaagtttcaa

SEQ ID NO: 188985 - DNA, 120 bp, Artificial Sequence
  ENSG00000112208_7 (sequence is synthesized)
tccatagtaattggctgtgctcttgaagatcagaagaaaattaagagaagattagagactctgcttagaaatattgaaaactctgacaaggccatcaagctattagagcattctaaagga

SEQ ID NO: 188986 - DNA, 120 bp, Artificial Sequence
  ENSG00000112208_8 (sequence is synthesized)
gctggttccaaaactctgcaacaaaatgctgaaagcagattcaattagtcttcaaacctaagagcatttacacaatacacaaggtgtaaaaatgataaaatactattttaattgataact

SEQ ID NO: 188987 - DNA, 120 bp, Artificial Sequence
  ENSG00000112208_9 (sequence is synthesized)
agttctttgttaggtataaccacttagttgacactgatagttgtttcagatgaggaaaatattccatcaagtatcttcagttttgtgaataacaaaactagcaatattttaattatctat

SEQ ID NO: 188988 - DNA, 120 bp, Artificial Sequence
  ENSG00000112208_10 (sequence is synthesized)
ctagagattttttagattgaattcttgtcttgtactaggatctagcatatttcactattctgtggatgaatacatagtttgtggggaaaacaaacgttcagctaggggcaaaaagcatga

SEQ ID NO: 188989 - DNA, 120 bp, Artificial Sequence
  ENSG00000112208_11 (sequence is synthesized)
ctgctttttcctgtctggcatggaatcacgcagtcaccttgggcatttagtttactagaaattctttaccttaagcagcacacacatttactacacacacagtgttaacaaagcactgtg

SEQ ID NO: 188990 - DNA, 120 bp, Artificial Sequence
  ENSG00000112208_12 (sequence is synthesized)
cttagagggtaaaaaggaatcacaaaacaagaatctttccaaagttgtctcattcagcaatgttaaggcatctgtatcaaattattttggatgtaaagattcctgtgtctcataatatga

SEQ ID NO: 188991 - DNA, 120 bp, Artificial Sequence
  ENSG00000112208_13 (sequence is synthesized)
atgtattttttgatatacaagaaactgacataaaatgtgagaaaaccacctataatttaccactgtgaacaattatatatctatctgcttcatcttttctcaaatgcatcaattctctaa

SEQ ID NO: 188992 - DNA, 120 bp, Artificial Sequence
  ENSG00000112208_14 (sequence is synthesized)
aattcctatattgtaacttgcctttttttaaaaaagttagatgctgatataaagtctgcttaattgtcaacttaatgagctctattttgtgtagttatatctttatccattcctctttta

SEQ ID NO: 188993 - DNA, 120 bp, Artificial Sequence
  ENSG00000112208_15 (sequence is synthesized)
tggacatttaggttgtttccaacttgttgctattactgcaacatatttttgtacacaggactttttccttctttcatttttgtttttctctgtataaaggcccagcagtgaattatattg

SEQ ID NO: 188994 - DNA, 120 bp, Artificial Sequence
  ENSG00000112208_16 (sequence is synthesized)
ggtcaaaggatatagacgttttcatggcctcacacatattaaactttttttgtataaaggttacagcaatttatacttttttcagtaattaaaatatagctatttcactgaaatatttcc

SEQ ID NO: 188995 - DNA, 120 bp, Artificial Sequence
  ENSG00000112208_17 (sequence is synthesized)
agcactgagcattaatacctagtttgcattttgtttactaaaaaggttgaccagtgtgttgattcttcttttatctgataaagtgtgaagcaactagagaacacttatttgttcaaagta

SEQ ID NO: 188996 - DNA, 120 bp, Artificial Sequence
  ENSG00000112208_18 (sequence is synthesized)
actagtcctattgatatacaaaaaccacaacaacttccctggatactattttgaaatgaacacatcaatttttatttgaatgtaggtattcttcacactgaaaaaccaaatcaagatcca

SEQ ID NO: 188997 - DNA, 120 bp, Artificial Sequence
  ENSG00000112208_19 (sequence is synthesized)
aactgactttatgtatgtatatatctctcaatgcaagcaatatcaaacttcattttctctacaaaaatgccaagttagtctctttataaaaagcagttacaatctgaagacattcatgtt

SEQ ID NO: 188998 - DNA, 120 bp, Artificial Sequence
  ENSG00000112208_20 (sequence is synthesized)
acttcctttgccagctccaactctgccttatttaaatctttgcatttcatgggaaacattaattctatctatggcagagccacttggtttgttagcagactgatttgctgtcatcagact

SEQ ID NO: 188999 - DNA, 120 bp, Artificial Sequence
  ENSG00000112208_21 (sequence is synthesized)
gtgagatgattttttgtgtgcatcatttttttcttgaccagctttttgaaaattaagaaatggatagtcatgttttcttcaggttctcaagtattgtcagcatccgtaaatcccttccac

SEQ ID NO: 189000 - DNA, 120 bp, Artificial Sequence
  ENSG00000112208_22 (sequence is synthesized)
tctgggaaatactactgctccctgcttcccatggcttccacatcagtccaggactttttctacacaaattattctggctctgcctccttgaccttggtattcttagcattatttttccca

SEQ ID NO: 189001 - DNA, 120 bp, Artificial Sequence
  ENSG00000112208_23 (sequence is synthesized)
tttttttgcaatggagtttttaatggaggtcattgatttctgatcacagacttgaagagctatgatccacatttccaagctgcttggggtccctggtttacagtgtctccagcattctgt

SEQ ID NO: 189002 - DNA, 120 bp, Artificial Sequence
  ENSG00000112208_24 (sequence is synthesized)
acctagagccacatctaaagggcagggaatctccagtgtggttttttgtttttttgttttttgttttggagtcttgctctgtcacccaggctgtctgacaagtagaagacatatccactg

SEQ ID NO: 189003 - DNA, 120 bp, Artificial Sequence
  ENSG00000112208_25 (sequence is synthesized)
tagcaaggaacactatggagtatatgagttagggaaaagagactgtgaagggaagagaacaaacattttgtagacgtttggtgttgaatatatgctatggaggcagtttctatagtttca

SEQ ID NO: 189004 - DNA, 65 bp, Artificial Sequence
  ENSG00000112208_26 (sequence is synthesized)
gtgttgaatatatgctatggaggcagtttctatagtttcatttacttcatgaggtttcatttttt

SEQ ID NO: 189005 - DNA, 120 bp, Artificial Sequence
  ENSG00000112208_27 (sequence is synthesized)
gcatgagccaccacgcttggccaatgggttggttcttaacatgtatttttatttataagaatgggagtataatttattttcaaatgatgatgaatctcctgagtcacatttttaccctca

SEQ ID NO: 189006 - DNA, 120 bp, Artificial Sequence
  ENSG00000112208_28 (sequence is synthesized)
tttaaactattgtcttttatatagactataagtggatatagagtatgttttgctgtatctcaattctctaccattcctagcatataatacataattttagggtagccctcctgccattcc

SEQ ID NO: 189007 - DNA, 120 bp, Artificial Sequence
  ENSG00000112208_29 (sequence is synthesized)
ttgttagcactactttcaataaaatgagagtattaaatattggcagagtatctgaaatatgaaataattttaggttgctttgatctttaaagaagttgcattatatattttactatttag

SEQ ID NO: 189008 - DNA, 120 bp, Artificial Sequence
  ENSG00000112208_30 (sequence is synthesized)
atccacactgttgatacaatcatacatatcacacaaaattttagctttgaaatgcatttattttctgattattggaattcatccttcatgaaatttttagagtagtgttttaaattaagc

SEQ ID NO: 189009 - DNA, 120 bp, Artificial Sequence
  ENSG00000112208_31 (sequence is synthesized)
tccagagtgtaactgcaaccaaatagcaatacatacaagtggttttccattcaaatttacaaaagcattatttattagtaataaaaatatagaaggaattcagttttccttttatcccca

SEQ ID NO: 189010 - DNA, 120 bp, Artificial Sequence
  ENSG00000112208_32 (sequence is synthesized)
attttttgcttttaaaagaccatttactaacatcctactgtagatatttcgagagacagatgaaaataataataataaagattattatagccaaatcatccagttagccaggagtttgat

SEQ ID NO: 189011 - DNA, 120 bp, Artificial Sequence
  ENSG00000112208_33 (sequence is synthesized)
gactggatatttcagagtctactgcgggttttaaatattttgttagcaaatgaattcatctgtatgatgagagacttacatgttttatagctgaaaacctaaggagtgacaatagtacat

SEQ ID NO: 189012 - DNA, 120 bp, Artificial Sequence
  ENSG00000112208_34 (sequence is synthesized)
gtgacattcttaacagttaaaaactgagtaagtcctgttcattaggtaggtgccatgtggaacaagctttcacctcatcaatgcattttgttttcagagaaacagactaatgatagatta

SEQ ID NO: 189013 - DNA, 120 bp, Artificial Sequence
  ENSG00000112208_35 (sequence is synthesized)
atgggaacattttatcaggttagcagtaactatttcaaaggttttgaaaagtatgctaataattaacaatatcttatattaaaagggtccaacactaagttgggacattaggtcctaagg

SEQ ID NO: 189014 - DNA, 120 bp, Artificial Sequence
  ENSG00000112208_36 (sequence is synthesized)
ccaactccctattctaaggtcttcagaaaaggtccagtttcctaaaactcacaggtccaaggagtacatgttatttattgagagttccttctgagcactgcactgccaacttctaaagca

SEQ ID NO: 189015 - DNA, 120 bp, Artificial Sequence
  ENSG00000112208_37 (sequence is synthesized)
accacctagaacttcactccataatgaggaaaaagttttcatcctctttttggtagttttagctttattttgaaaaagtaacgtgtgctatcaactttgggcagatacaaaggaaatcat

SEQ ID NO: 189016 - DNA, 120 bp, Artificial Sequence
  ENSG00000112208_38 (sequence is synthesized)
ttaacctggttttatttaactatattgccttatatgggtcattctatatactatttaattcatagacagagactggaaaaggaaaaggaaacctgaggaactctgaaatatggcagttat

SEQ ID NO: 189017 - DNA, 120 bp, Artificial Sequence
  ENSG00000112208_39 (sequence is synthesized)
tccacagcgatatgtctacgcaaaagattagccgtaatgttaaaaaagtagattagagcacaaatgcacaatcacctggaatcttggaaaagtttttctttagtatacatggtttcataa

SEQ ID NO: 189018 - DNA, 120 bp, Artificial Sequence
  ENSG00000112208_40 (sequence is synthesized)
aattaaagttatttaagagaatgaagggtcttggaaaaaaaatgtcaatttttgaaggctttaagaattgattaaattgagaaattaacatggctgactttcaggcctacttaattattt

SEQ ID NO: 189019 - DNA, 120 bp, Artificial Sequence
  ENSG00000112208_41 (sequence is synthesized)
taaatgactaattatggttaggtttaaaatacagcagtgcaaattaaaaattcaaatatgtaacaaagctctctcttcagttcttatttaaaaaaagataaaactaggtacataaaatta

SEQ ID NO: 189020 - DNA, 120 bp, Artificial Sequence
  ENSG00000112208_42 (sequence is synthesized)
tattacaggaactgtaactatcctcagagattactttttttaaatatagaaaggtaacacgcttttagccacacagctaacatgaaaaagaactaactagaacacatataacaagtgatt

SEQ ID NO: 189021 - DNA, 120 bp, Artificial Sequence
  ENSG00000112208_43 (sequence is synthesized)
tttctgccaataaagacaaaagactatttgttgcaaagtattattttgtgcaaaaattaaagaggagagtagagagtagaaaattgaagagagtagaaaagatgactcattagcagtatc

SEQ ID NO: 189022 - DNA, 120 bp, Artificial Sequence
  ENSG00000112208_44 (sequence is synthesized)
cactgtttgttaggaactgaattttgcccccaaaacctatgtcactatcagcaatgggagtggtgacaactggtgacataaaaataagcattttacattactgtgaaatagataatgcca

SEQ ID NO: 189023 - DNA, 120 bp, Artificial Sequence
  ENSG00000112208_45 (sequence is synthesized)
gatcatttcaatataatgaaaagcaaaaatttactttttaattttttttatttttccatctaaaatggcaaagagaacatttacttttgatcacttaacaaggacacacccaggaaattt

SEQ ID NO: 189024 - DNA, 120 bp, Artificial Sequence
  ENSG00000112208_46 (sequence is synthesized)
gattttctcaacattaggaggatgaggggagtacagatggaaaaacaaaagataaaacacaaaaggagtacataaaacattgtttagtacaaataatgaaaaatgacttcatgacatttt

SEQ ID NO: 189025 - DNA, 120 bp, Artificial Sequence
  ENSG00000112208_47 (sequence is synthesized)
ccaataaaagttatttttacagattttgcaatgctgtaaaaaccaggtatattgaaaggggttatttataggttaaaaataaagccattgatgagtgataatcagttttaacagagttca

SEQ ID NO: 189026 - DNA, 120 bp, Artificial Sequence
  ENSG00000112208_48 (sequence is synthesized)
cgcaattatcttagctggaaagctactgtcccaagtgacaaaatttatgtcctgacacatgattacatattaaatcattttgtaaaagaaatgattctgtatgtgggactgacagctctt

SEQ ID NO: 189027 - DNA, 120 bp, Artificial Sequence
  ENSG00000112208_49 (sequence is synthesized)
gagaaagtgctatacaaacaaggttatagaaatgttgaagtgattgataatcttaaaataccatacaaaaatgtgtaaacaaaaggatggtttagagttgcagggcattataaaatatgt

SEQ ID NO: 189028 - DNA, 120 bp, Artificial Sequence
  ENSG00000112208_50 (sequence is synthesized)
aattttagttaagactaataataatatttttgtgcactttaaaaatggttagtgtaatcttgtaagttcaaagctgggttctcagtgagcagcaaaaggtgttagatgcatcaccacact

SEQ ID NO: 189029 - DNA, 120 bp, Artificial Sequence
  ENSG00000112208_51 (sequence is synthesized)
tcacaggacctcctgaatgactgcagatgtgctgtgtaccttcttaaggggctttggctgaccttatgagagcaggagctcaccatgcttatgggtgactatatcaaaaagatctgcaat

SEQ ID NO: 189030 - DNA, 120 bp, Artificial Sequence
  ENSG00000112208_52 (sequence is synthesized)
aaggctcacctgggagatgctctagcattcaaattcctatactcctcttttatctacgctgtcagatgaaaactgcttactgcttttaaaagatataataaacaatataaattctgatag

SEQ ID NO: 189031 - DNA, 120 bp, Artificial Sequence
  ENSG00000112208_53 (sequence is synthesized)
taaagcactataaaaattaggtatgatatttttggcacaaagcactttttaaacccaagctcattttgcaaaatatatgtctagagtttatcatttgaaaataaaaacatatacacaata

SEQ ID NO: 189032 - DNA, 120 bp, Artificial Sequence
  ENSG00000112210_0 (sequence is synthesized)
tgacactggttgctacagaattaactttactcggagatccgaggagccatcggcagttcccaggagtaagaacctgagagcgtgtgagaatttgagagggaagatctgatctcctagaat

SEQ ID NO: 189033 - DNA, 120 bp, Artificial Sequence
  ENSG00000112210_1 (sequence is synthesized)
tagagttggtacagaaaccatttcagctccaaaaatgttggaggaagatatggaagtcgccataaagatggtggttgtagggaatggagcagttggaaaatcaagtatgattcagcgata

SEQ ID NO: 189034 - DNA, 120 bp, Artificial Sequence
  ENSG00000112210_2 (sequence is synthesized)
ttgcaaaggcatttttacaaaagactacaagaaaaccattggagttgattttttggagcgacaaattcaagttaatgatgaagatgtcagactaatgttatgggacactgcaggtcagga

SEQ ID NO: 189035 - DNA, 120 bp, Artificial Sequence
  ENSG00000112210_3 (sequence is synthesized)
ggaatttgatgcaattacaaaggcctactatcgaggagcccaggcttgtgtgctcgtgttctctaccacagatagggaatcttttgaagcagtttccagttggagagagaaagtagtagc

SEQ ID NO: 189036 - DNA, 120 bp, Artificial Sequence
  ENSG00000112210_4 (sequence is synthesized)
cgaagtgggagatataccaactgtacttgtgcaaaacaagattgatcttctggatgattcttgtataaagaatgaggaagctgaggcactggcaaaaaggttaaagttaagattctacag

SEQ ID NO: 189037 - DNA, 120 bp, Artificial Sequence
  ENSG00000112210_5 (sequence is synthesized)
aacatcagtgaaagaagatctaaatgtgaatgaagtttttaagtatttggctgaaaaataccttcagaaactcaaacaacaaatagctgaggatccagaactaacgcattcaagtagtaa

SEQ ID NO: 189038 - DNA, 120 bp, Artificial Sequence
  ENSG00000112210_6 (sequence is synthesized)
caagattggtgtctttaatacatctggtggaagtcactccggtcagaattcaggtaccctcaatggtggagatgtcatcaatcttagacccaacaaacaaaggaccaagaaaaacagaaa

SEQ ID NO: 189039 - DNA, 120 bp, Artificial Sequence
  ENSG00000112210_7 (sequence is synthesized)
tccttttagcagctgtagcataccctaagatgttttgggaggaaaacaattgaattacattgtgcaatgcattaagaaacccatccagctgtcatggtatgttacaaggttttcagcaga

SEQ ID NO: 189040 - DNA, 120 bp, Artificial Sequence
  ENSG00000112210_8 (sequence is synthesized)
ctttgctcctaatggctctctgaaagtgacagacttaaatattgctctgcagtgcttttcagaatgtagagtgagacctctggtggaaaaattattgccctgtggactcctttaattttt

SEQ ID NO: 189041 - DNA, 120 bp, Artificial Sequence
  ENSG00000112210_9 (sequence is synthesized)
tttacattagacgaagcttctcctgtttgtaaaggaatgctataagaaatttcaaacacaggttttgcggaattttaaatgctggaaaacataaatgaaatgcctaaatatattgttaca

SEQ ID NO: 189042 - DNA, 120 bp, Artificial Sequence
  ENSG00000112210_10 (sequence is synthesized)
gatagcaagcattcttttcctgaaattggtcatgtagcttttctgcgaaatagtattgaatctgaatactttcacaaaataatactgaaaggtaaaccctaaatcttgccagactgcatt

SEQ ID NO: 189043 - DNA, 120 bp, Artificial Sequence
  ENSG00000112210_11 (sequence is synthesized)
agtattttggcattgaaacttgtgcaatatctgtgtaatgtagaatgtggggtgtgcatgcagatgtctggtactggagtaagctgaaggtatgtgcagtatttaagaaaatgtacattc

SEQ ID NO: 189044 - DNA, 120 bp, Artificial Sequence
  ENSG00000112210_12 (sequence is synthesized)
taattaattcacttataaaaccatttacatattgtgtatatgtttttattttcaaatgataaactctagacatatattttgcaaaatgagcttgggtttaaaaagtgctttgtgccaaaa

SEQ ID NO: 189045 - DNA, 120 bp, Artificial Sequence
  ENSG00000112210_13 (sequence is synthesized)
atatcatacctaatttttatagtgctttactatcagaatttatattgtttattatatcttttaaaagcagtaagcagttttcatctgacagcgtagataaaagaggagtataggaatttg

SEQ ID NO: 189046 - DNA, 120 bp, Artificial Sequence
  ENSG00000112210_14 (sequence is synthesized)
aatgctagagcatctcccaggtgagccttattgcagatctttttgatatagtcacccataagcatggtgagctcctgctctcataaggtcagccaaagccccttaagaaggtacacagca

SEQ ID NO: 189047 - DNA, 120 bp, Artificial Sequence
  ENSG00000112210_15 (sequence is synthesized)
catctgcagtcattcaggaggtcctgtgaagtgtggtgatgcatctaacaccttttgctgctcactgagaacccagctttgaacttacaagattacactaaccatttttaaagtgcacaa

SEQ ID NO: 189048 - DNA, 120 bp, Artificial Sequence
  ENSG00000112210_16 (sequence is synthesized)
aaatattattattagtcttaactaaaattacatattttataatgccctgcaactctaaaccatccttttgtttacacatttttgtatggtattttaagattatcaatcacttcaacattt

SEQ ID NO: 189049 - DNA, 120 bp, Artificial Sequence
  ENSG00000112210_17 (sequence is synthesized)
ctataaccttgtttgtatagcactttctcaagagctgtcagtcccacatacagaatcatttcttttacaaaatgatttaatatgtaatcatgtgtcaggacataaattttgtcacttggg

SEQ ID NO: 189050 - DNA, 120 bp, Artificial Sequence
  ENSG00000112210_18 (sequence is synthesized)
acagtagctttccagctaagataattgcgtgaactctgttaaaactgattatcactcatcaatggctttatttttaacctataaataacccctttcaatatacctggtttttacagcatt

SEQ ID NO: 189051 - DNA, 120 bp, Artificial Sequence
  ENSG00000112210_19 (sequence is synthesized)
gcaaaatctgtaaaaataacttttattggaaaatgtcatgaagtcatttttcattatttgtactaaacaatgttttatgtactccttttgtgttttatcttttgtttttccatctgtact

SEQ ID NO: 189052 - DNA, 120 bp, Artificial Sequence
  ENSG00000112210_20 (sequence is synthesized)
cccctcatcctcctaatgttgagaaaatcaaatttcctgggtgtgtccttgttaagtgatcaaaagtaaatgttctctttgccattttagatggaaaaataaaaaaaattaaaaagtaaa

SEQ ID NO: 189053 - DNA, 120 bp, Artificial Sequence
  ENSG00000112210_21 (sequence is synthesized)
atgctccgcagcgcggcgggtccacagatgaggggagtcgagactcccgcgccccaccacccccggcggagctgctgctgagccactcaatctgagccctggctactaataaagttcgtt

SEQ ID NO: 189054 - DNA, 120 bp, Artificial Sequence
  ENSG00000112210_22 (sequence is synthesized)
taaaaatcataatcattcttaagagagcgaaagagggtgcgaactagccgctcggccccgcagggagagctggcgcgtcgggaggagacagcggcggcagcggttgcgccgcgaccagga

SEQ ID NO: 189055 - DNA, 120 bp, Artificial Sequence
  ENSG00000112210_23 (sequence is synthesized)
tggcgccgggcggcgggtccgcggccggtgggggacggtgagtagcggctcgcgctgcggtgcagcggcgctgcactcactcgccctctccaggggctgggggttcgtccggctccactg

SEQ ID NO: 189056 - DNA, 120 bp, Artificial Sequence
  ENSG00000112210_24 (sequence is synthesized)
ctccactggggaagactcagcttctccccggggtcccgggttgtgccttactctccggagtgggcaggggtatcgagggcaggggcctcccggcccggctcccccatcccccggttcgga

SEQ ID NO: 189057 - DNA, 120 bp, Artificial Sequence
  ENSG00000112210_25 (sequence is synthesized)
ccgccgagcgccggctctcccctccctgagcaccgatcccaagttccagctagagaaggtgggcggcagcgccagcccggcgccccctcccagctcccagcgatttgagagggaagatct

SEQ ID NO: 189058 - DNA, 120 bp, Artificial Sequence
  ENSG00000112210_26 (sequence is synthesized)
aggttttgggggcaaaattcagttcctaacaaacagtggatactgctaatgagtcatcttttctactctcttcaattttctactctctactctcctctttaatttttgcacaaaataata

SEQ ID NO: 189059 - DNA, 120 bp, Artificial Sequence
  ENSG00000112210_27 (sequence is synthesized)
ctttgcaacaaatagtcttttgtctttattggcagaaaaatcacttgttatatgtgttctagttagttctttttcatgttagctgtgtggctaaaagcgtgttacctttctatatttaaa

SEQ ID NO: 189060 - DNA, 120 bp, Artificial Sequence
  ENSG00000112210_28 (sequence is synthesized)
aaaagtaatctctgaggatagttacagttcctgtaatataattttatgtacctagttttatctttttttaaataagaactgaagagagagctttgttacatatttgaatttttaatttgc

SEQ ID NO: 189061 - DNA, 120 bp, Artificial Sequence
  ENSG00000112210_29 (sequence is synthesized)
actgctgtattttaaacctaaccataattagtcatttaaaataattaagtaggcctgaaagtcagccatgttaatttctcaatttaatcaattcttaaagccttcaaaaattgacatttt

SEQ ID NO: 189062 - DNA, 120 bp, Artificial Sequence
  ENSG00000112210_30 (sequence is synthesized)
ttttccaagacccttcattctcttaaataactttaattttatgaaaccatgtatactaaagaaaaacttttccaagattccaggtgattgtgcatttgtgctctaatctacttttttaac

SEQ ID NO: 189063 - DNA, 120 bp, Artificial Sequence
  ENSG00000112210_31 (sequence is synthesized)
attacggctaatcttttgcgtagacatatcgctgtggaataactgccatatttcagagttcctcaggtttccttttccttttccagtctctgtctatgaattaaatagtatatagaatga

SEQ ID NO: 189064 - DNA, 120 bp, Artificial Sequence
  ENSG00000112210_32 (sequence is synthesized)
cccatataaggcaatatagttaaataaaaccaggttaaatgatttcctttgtatctgcccaaagttgatagcacacgttactttttcaaaataaagctaaaactaccaaaaagaggatga

SEQ ID NO: 189065 - DNA, 120 bp, Artificial Sequence
  ENSG00000112210_33 (sequence is synthesized)
aaactttttcctcattatggagtgaagttctaggtggttgctttagaagttggcagtgcagtgctcagaaggaactctcaataaataacatgtactccttggacctgtgagttttaggaa

SEQ ID NO: 189066 - DNA, 120 bp, Artificial Sequence
  ENSG00000112210_34 (sequence is synthesized)
actggaccttttctgaagaccttagaatagggagttggccttaggacctaatgtcccaacttagtgttggacccttttaatataagatattgttaattattagcatacttttcaaaacct

SEQ ID NO: 189067 - DNA, 120 bp, Artificial Sequence
  ENSG00000112210_35 (sequence is synthesized)
ttgaaatagttactgctaacctgataaaatgttcccattaatctatcattagtctgtttctctgaaaacaaaatgcattgatgaggtgaaagcttgttccacatggcacctacctaatga

SEQ ID NO: 189068 - DNA, 120 bp, Artificial Sequence
  ENSG00000112210_36 (sequence is synthesized)
acaggacttactcagtttttaactgttaagaatgtcacatgtactattgtcactccttaggttttcagctataaaacatgtaagtctctcatcatacagatgaattcatttgctaacaaa

SEQ ID NO: 189069 - DNA, 120 bp, Artificial Sequence
  ENSG00000112210_37 (sequence is synthesized)
atatttaaaacccgcagtagactctgaaatatccagtcatcaaactcctggctaactggatgatttggctataataatctttattattattattttcatctgtctctcgaaatatctaca

SEQ ID NO: 189070 - DNA, 120 bp, Artificial Sequence
  ENSG00000112210_38 (sequence is synthesized)
gtaggatgttagtaaatggtcttttaaaagcaaaaaattggggataaaaggaaaactgaattccttctatatttttattactaataaataatgcttttgtaaatttgaatggaaaaccac

SEQ ID NO: 189071 - DNA, 120 bp, Artificial Sequence
  ENSG00000112210_39 (sequence is synthesized)
ttgtatgtattgctatttggttgcagttacactctggagcttaatttaaaacactactctaaaaatttcatgaaggatgaattccaataatcagaaaataaatgcatttcaaagctaaaa

SEQ ID NO: 189072 - DNA, 120 bp, Artificial Sequence
  ENSG00000112212_0 (sequence is synthesized)
agatgtgctgccgcattcgtgactagaaaagagtccccaggaatttctggctcctgccttcagattgtgaactttccaggttggtagatcagcttaggtagaacagttctcggtgagggc

SEQ ID NO: 189073 - DNA, 120 bp, Artificial Sequence
  ENSG00000112212_1 (sequence is synthesized)
cagctacatacctggctaagcgctgcccactgcagaaaagctcatcacccgggacctgatctccaggactcagaagcacttggaggaaggcctattcacttagaagcagttaccagtgct

SEQ ID NO: 189074 - DNA, 120 bp, Artificial Sequence
  ENSG00000112212_2 (sequence is synthesized)
gggcagtgtcctccaagtgccagaggagtgctgtggagaaaagaagtccatggaagccaggagatgggcaagattttgcctcttcaaggtgaatgcggcttcaaggggctatctttgtgc

SEQ ID NO: 189075 - DNA, 120 bp, Artificial Sequence
  ENSG00000112212_3 (sequence is synthesized)
tcctgccccacctggggcccatcctggtctggctgttcactcgtgatcacatgtctggttggtgtgagggcccgaggatgctgtcctggtgcccattctacaaagtcttattgcttgtac

SEQ ID NO: 189076 - DNA, 120 bp, Artificial Sequence
  ENSG00000112212_4 (sequence is synthesized)
gcctcttggcctctatgctgttcagctcaccatcagctggactgtcctggttctctttttcacagtccacaaccctggtctggccctgctgcacctgctgctgctgtatgggctggtggt

SEQ ID NO: 189077 - DNA, 120 bp, Artificial Sequence
  ENSG00000112212_5 (sequence is synthesized)
gagcacagcactgatctggcatcccatcaacaaactggctgccctgttactgctgccctacctagcctggctcaccgtgacttcagccctcacctaccacctgtggagggacagcctttg

SEQ ID NO: 189078 - DNA, 120 bp, Artificial Sequence
  ENSG00000112212_6 (sequence is synthesized)
tccagtgcaccagcctcagcccacggagaagagtgactgaggccctagggcatgggagaggagggacgcccagggtggggaggaagagtctgcaagcagggctgtggagttagggttcac

SEQ ID NO: 189079 - DNA, 120 bp, Artificial Sequence
  ENSG00000112212_7 (sequence is synthesized)
cccaatgggaccaccctcctgggtcccctggtgccgtttttccttagaaatcagagaaatgggaaagggggggaaactgattttacacttaaataataaaatcctattagtaactctgaa

SEQ ID NO: 189080 - DNA, 120 bp, Artificial Sequence
  ENSG00000112212_8 (sequence is synthesized)
tccaagtgccagaggagtgctgtggagaaaagaagtccatggaagccaggagatgggcaaggtgtggcctggggttggagagagctcagagattttgcctcttcaaggtgaatgcggctt

SEQ ID NO: 189081 - DNA, 120 bp, Artificial Sequence
  ENSG00000112214_0 (sequence is synthesized)
tgcaagtccagagagcagggaactaccttgagtattctactcaaacttatgtctcagagttccccaatttcccaagaagggagagatagaggccacaatccagggggccatctcttaagg

SEQ ID NO: 189082 - DNA, 120 bp, Artificial Sequence
  ENSG00000112214_1 (sequence is synthesized)
taccaataattttgcagcccagtaggagtcatgtacacggtataagacttggaggaaatgcagggacccttctgttttctcctgcaaagttgaaaaagctgcatgcagttggaagggatc

SEQ ID NO: 189083 - DNA, 120 bp, Artificial Sequence
  ENSG00000112214_2 (sequence is synthesized)
ttcagatggtgctggtgactttctgttccttttggagttgacatgcatgtggattggaggaaaaataatcaacatatattctcctttcgtactgtttaaatcacaggaagaagcggcttt

SEQ ID NO: 189084 - DNA, 120 bp, Artificial Sequence
  ENSG00000112214_3 (sequence is synthesized)
aagacaaagatcaaaccaaaatgacaactgctcacttttactgtcaatactgcacagcatcacttcttgggaagaaatatgtactaaaggatgacagtccatactgtgttacatgttatg

SEQ ID NO: 189085 - DNA, 120 bp, Artificial Sequence
  ENSG00000112214_4 (sequence is synthesized)
atcgtgtattttctaactattgcgaggaatgcaaaaaaccaattgaatctgattctaaggatctttgttacaaagaccggcactggcatgaaggatgcttcaagtgcaccaaatgcaatc

SEQ ID NO: 189086 - DNA, 120 bp, Artificial Sequence
  ENSG00000112214_5 (sequence is synthesized)
actctttggtggaaaagccttttgctgccaaggatgagcgcctgctgtgcacggagtgctattctaacgagtgctcctccaagtgcttccactgcaagaggaccatcatgcctggttccc

SEQ ID NO: 189087 - DNA, 120 bp, Artificial Sequence
  ENSG00000112214_6 (sequence is synthesized)
gcaaaatggaatttaagggaaactactggcatgaaacctgttttgtgtgtgagaattgccgacaacctatagggacaaagcctttgatctccaaagagagtggcaattattgtgtgccat

SEQ ID NO: 189088 - DNA, 120 bp, Artificial Sequence
  ENSG00000112214_7 (sequence is synthesized)
gttttgagaaggagtttgctcactactgcaacttttgtaagaaggtgataacttcaggtgggataacattttgtgaccagctatggcataaagagtgttttctgtgtagtggctgtagga

SEQ ID NO: 189089 - DNA, 120 bp, Artificial Sequence
  ENSG00000112214_8 (sequence is synthesized)
gtctcacaggtgccaagtttatctgctttcaagacagccagtggcatagcgaatgctttaactgcgggaaatgctctgtctccttggtgggtaaaggcttcctgacccagaacaaggaaa

SEQ ID NO: 189090 - DNA, 120 bp, Artificial Sequence
  ENSG00000112214_9 (sequence is synthesized)
tcttctgccaaaaatgtggctccggaatggacactgacatctaggagacagtccttgcccacctaaaatccattttgccttcgttgtcactaaagccagaactcagttgcggtcttattt

SEQ ID NO: 189091 - DNA, 120 bp, Artificial Sequence
  ENSG00000112214_10 (sequence is synthesized)
ttgacttaagttttagaaaatattcatgtagtttagagtggaaaagtttttgcacacattttgatcgaactatattctaagcacacaaaaagcacagtagaacagaaatgaatatatgct

SEQ ID NO: 189092 - DNA, 120 bp, Artificial Sequence
  ENSG00000112214_11 (sequence is synthesized)
aaatcacaaagacaactctccttgcaaaatactgcactctgctgttagaagcagaggaaaatatctcttcataatcaaatatatgacatatacctaggagctgtggatgtaattactgaa

SEQ ID NO: 189093 - DNA, 120 bp, Artificial Sequence
  ENSG00000112214_12 (sequence is synthesized)
gaatgaggtttttcatacctgaagagtaaaagaaaaactaagagatcaaactgagaggtatacatgaggctagtgtttgcattcctggttatatgtaatgtgataaattagctatgaatg

SEQ ID NO: 189094 - DNA, 120 bp, Artificial Sequence
  ENSG00000112214_13 (sequence is synthesized)
gtaaaagaacaaaactgatcagagtaaattcattagcaattatcacatttaagaattgttatcatttaaaaatcatcctttttttcacacatactgactgtagaattaaaaaacaaagct

SEQ ID NO: 189095 - DNA, 120 bp, Artificial Sequence
  ENSG00000112214_14 (sequence is synthesized)
acaatttgccctcatacacactgcttccacagcttgctagttctgtgtttactcaatggaatatgagaactgaggacattatggctctcataatctgcataggtataaagaggatcattt

SEQ ID NO: 189096 - DNA, 120 bp, Artificial Sequence
  ENSG00000112214_15 (sequence is synthesized)
ctacctagggatagccaaagcatgggtttcaacacgttttgtattaaatatattttcaaagtccacagtgatttttctaaacgcttacagattccatgaaataaaagtctattctttcaa

SEQ ID NO: 189097 - DNA, 120 bp, Artificial Sequence
  ENSG00000112218_0 (sequence is synthesized)
actttcagctccagctcccgccaccgccgcctgtatcgccgccgccgccaccacctcctcttcgttgtcctccttcctcctccgcctggcagcgttgttctctgcagcggaggagagaag

SEQ ID NO: 189098 - DNA, 120 bp, Artificial Sequence
  ENSG00000112218_1 (sequence is synthesized)
tgctatgtcaggaaagttccgggagggactacatggagccatgctccctgggctcttccgcgggcgcccgcgcgctgcccttcgcttgaggcaaaaggactcttgtggaagatggaactc

SEQ ID NO: 189099 - DNA, 120 bp, Artificial Sequence
  ENSG00000112218_2 (sequence is synthesized)
attgtccattttccagaatgtatttccaagcccatcaatgggacctgatactgctgttctgtgttgaaatgcttgaagaactcctgcatctctgcttgcatcttccatcctactgaaacc

SEQ ID NO: 189100 - DNA, 120 bp, Artificial Sequence
  ENSG00000112218_3 (sequence is synthesized)
atggtcttctcggcagtgttgactgcgttccataccgggacatccaacacaacatttgtcgtgtatgaaaacacctacatgaatattacactccctccaccattccagcatcctgacctc

SEQ ID NO: 189101 - DNA, 120 bp, Artificial Sequence
  ENSG00000112218_4 (sequence is synthesized)
agtccattgcttagatatagttttgaaaccatggctcccactggtttgagttccttgaccgtgaatagtacagctgtgcccacaacaccagcagcatttaagagcctaaacttgcctctt

SEQ ID NO: 189102 - DNA, 120 bp, Artificial Sequence
  ENSG00000112218_5 (sequence is synthesized)
cagatcaccctttctgctataatgatattcattctgtttgtgtcttttcttgggaacttggttgtttgcctcatggtttaccaaaaagctgccatgaggtctgcaattaacatcctcctt

SEQ ID NO: 189103 - DNA, 120 bp, Artificial Sequence
  ENSG00000112218_6 (sequence is synthesized)
gccagcctagcttttgcagacatgttgcttgcagtgctgaacatgccctttgccctggtaactattcttactacccgatggatttttgggaaattcttctgtagggtatctgctatgttt

SEQ ID NO: 189104 - DNA, 120 bp, Artificial Sequence
  ENSG00000112218_7 (sequence is synthesized)
ttctggttatttgtgatagaaggagtagccatcctgctcatcattagcatagataggttccttattatagtccagaggcaggataagctaaacccatatagagctaaggttctgattgca

SEQ ID NO: 189105 - DNA, 120 bp, Artificial Sequence
  ENSG00000112218_8 (sequence is synthesized)
gtttcttgggcaacttccttttgtgtagcttttcctttagccgtaggaaaccccgacctgcagataccttcccgagctccccagtgtgtgtttgggtacacaaccaatccaggctaccag

SEQ ID NO: 189106 - DNA, 120 bp, Artificial Sequence
  ENSG00000112218_9 (sequence is synthesized)
gcttatgtgattttgatttctctcatttctttcttcatacccttcctggtaatactgtactcatttatgggcatactcaacacccttcggcacaatgccttgaggatccatagctaccct

SEQ ID NO: 189107 - DNA, 120 bp, Artificial Sequence
  ENSG00000112218_10 (sequence is synthesized)
gaaggtatatgcctcagccaggccagcaaactgggtctcatgagtctgcagagacctttccagatgagcattgacatgggctttaaaacacgtgccttcaccactattttgattctcttt

SEQ ID NO: 189108 - DNA, 120 bp, Artificial Sequence
  ENSG00000112218_11 (sequence is synthesized)
gctgtcttcattgtctgctgggccccattcaccacttacagccttgtggcaacattcagtaagcacttttactatcagcacaacttttttgagattagcacctggctactgtggctctgc

SEQ ID NO: 189109 - DNA, 120 bp, Artificial Sequence
  ENSG00000112218_12 (sequence is synthesized)
tacctcaagtctgcattgaatccgctgatctactactggaggattaagaaattccatgatgcttgcctggacatgatgcctaagtccttcaagtttttgccgcagctccctggtcacaca

SEQ ID NO: 189110 - DNA, 120 bp, Artificial Sequence
  ENSG00000112218_13 (sequence is synthesized)
aagcgacggatacgtcctagtgctgtctatgtgtgtggggaacatcggacggtggtgtgaatattggaactggctgacattttgggtgatgcttgttctttattgacattgaattctctt

SEQ ID NO: 189111 - DNA, 120 bp, Artificial Sequence
  ENSG00000112218_14 (sequence is synthesized)
tctcatagcctctccactttatttttttttatagggtttgtgtatgtatgtgtgtgagcagtgtaaagaaagaatggtaattatagttctgttaccaagaataaataataggaaagtgat

SEQ ID NO: 189112 - DNA, 120 bp, Artificial Sequence
  ENSG00000112218_15 (sequence is synthesized)
tacaaatattacctccagggttcaatagaaatcctcaatttagggtgaggagacttttttttggttttggggtttttccttgattgattttgttttcatagtgggaatcaggattgtgct

SEQ ID NO: 189113 - DNA, 120 bp, Artificial Sequence
  ENSG00000112218_16 (sequence is synthesized)
ttattgagcctgcagttacattgaattgtaggtgtttcgtgtgctgctaaggtatgcttatttgagtttatcaagactttttttttctggaagacactgctgcttttaccatcacattgg

SEQ ID NO: 189114 - DNA, 120 bp, Artificial Sequence
  ENSG00000112218_17 (sequence is synthesized)
agccaaacatctcaatcaatatatatttagttttattttaaaaactaacccaggaaggttagcgacattttaagggtcattactatttactttggtgcactttaagagataatgtacaaa

SEQ ID NO: 189115 - DNA, 120 bp, Artificial Sequence
  ENSG00000112218_18 (sequence is synthesized)
ttaattcagtcttatttttcagaattgtttttatacatgatatgtgctttaggaaatgtgcattatcatttatgggaagatagttttaagaaatgttttatctgcatgtacagttgtaaa

SEQ ID NO: 189116 - DNA, 120 bp, Artificial Sequence
  ENSG00000112218_19 (sequence is synthesized)
agagaacataaaatgtagatacttttctaagcacaatagcaactcttcaagcaatagcgcaaaatctaggagacaggatccttgcaaatttaaaaggtgaatgtagtgagggggatggca

SEQ ID NO: 189117 - DNA, 120 bp, Artificial Sequence
  ENSG00000112218_20 (sequence is synthesized)
agtggctggtacaggctgtggtgattccttttactcaagggtttttgtggagtatagggagaaggggttgatatttatggacacctatgtgtcaggcactgtgcatcattttatccttac

SEQ ID NO: 189118 - DNA, 120 bp, Artificial Sequence
  ENSG00000112218_21 (sequence is synthesized)
aggatgttgtgaggtaggtattattgttttcatttttacaggtgaagaaagcaggtctcagagggactaaaatcctgcccaaggttagtggtagagctgggatccaaaaatctgtcagaa

SEQ ID NO: 189119 - DNA, 120 bp, Artificial Sequence
  ENSG00000112218_22 (sequence is synthesized)
tcctgagactgcgctgttccactgtgccacgcagacagttcattcagtttagatgtcacatagtcaagagggaactctatgcatcctttaattttttagactatgatattctttttaaaa

SEQ ID NO: 189120 - DNA, 120 bp, Artificial Sequence
  ENSG00000112218_23 (sequence is synthesized)
attagcctttattttctaactaccaaaagaaatatgaaagcattacagaaacactggaaaatagaaaagaaaaaataaaatcacttacaaccactttttgttttttggagtctcgctttg

SEQ ID NO: 189121 - DNA, 89 bp, Artificial Sequence
  ENSG00000112218_24 (sequence is synthesized)
caacctcccaggctcaggtaatcctcctgtctcagcctcctgaatagctggaaccacacacacacacgcacacacaggtgtgtcttttg

SEQ ID NO: 189122 - DNA, 85 bp, Artificial Sequence
  ENSG00000112218_25 (sequence is synthesized)
acctacaaccactttttaatgtgagacttaaaaatcttagataaataaggctgtgaagcaaaaccagtgatttttttttttgttt

SEQ ID NO: 189123 - DNA, 120 bp, Artificial Sequence
  ENSG00000112218_26 (sequence is synthesized)
taaggctgtgaagcaaaaccagtgatttttttttttgtttttgatttgcaaaacaagtgactgacaattattgagaaattaaagatagctatgtgtaggtcttgcccctgcgggtttgga

SEQ ID NO: 189124 - DNA, 120 bp, Artificial Sequence
  ENSG00000112218_27 (sequence is synthesized)
ggtttccagttgtccatctgtgttagttgtaagtgttctgggcagaatagtattgttgccccaatgcttgccctagcagagctggagtttgtgaacgtgctcagatgtgtgtctcctaca

SEQ ID NO: 189125 - DNA, 120 bp, Artificial Sequence
  ENSG00000112218_28 (sequence is synthesized)
aagaagggaaaatgaaccctcgtctgagcctagaacaagttttaatagggcatgtctgacatttcaaattgtttttctcttgctgacagtctgcccccaggtgcatctagggccttggtc

SEQ ID NO: 189126 - DNA, 120 bp, Artificial Sequence
  ENSG00000112218_29 (sequence is synthesized)
agcttctctgttaccagtggctcactttataaaacagcccacagggataagggctgaaaatatagccacttggctacatcattgactaattaagtaagttaactgtggatttatagcatc

SEQ ID NO: 189127 - DNA, 120 bp, Artificial Sequence
  ENSG00000112218_30 (sequence is synthesized)
ttttcaggatgttagtgttttgtgagccagtggaaaaaataagcttctatttcttcatttgtaaaaccagagagttggattagatgaatctctaacgtcctgtccagctcaaatgtgctt

SEQ ID NO: 189128 - DNA, 120 bp, Artificial Sequence
  ENSG00000112218_31 (sequence is synthesized)
tcctctatactagggtatagatttttgaagagcctagctgacttcagcatcacctcaccctttggtctccagtattacttctttacattttacttcattagctatttcttaatattaaat

SEQ ID NO: 189129 - DNA, 120 bp, Artificial Sequence
  ENSG00000112218_32 (sequence is synthesized)
gtctgaagagtgtggcactgtatcaggagttggggcattgaaaggttgaagacatcatgaaatatctgggaaactctgctcttaaggaaattgcaccgatgttggaactcattgtccagt

SEQ ID NO: 189130 - DNA, 120 bp, Artificial Sequence
  ENSG00000112218_33 (sequence is synthesized)
taaagagctctttggggactcaagcatattattcaacatgttgttttgggattatcttcaaatgatagtcacctacctctttcatttctaatttttattcacaggtaaaattgtttttgt

SEQ ID NO: 189131 - DNA, 120 bp, Artificial Sequence
  ENSG00000112218_34 (sequence is synthesized)
ccatagggattttataggacataagcactgtagtagatactagtagcattttgaagtgtattatgctctccattttccatataaactagatttcaagcagatattgataaggacattttt

SEQ ID NO: 189132 - DNA, 120 bp, Artificial Sequence
  ENSG00000112218_35 (sequence is synthesized)
tattagacttttctctgaggaaagtcagcatgatctgtattcatcttacatattgataggtcatgaagactcctttttggctggaggtgaaactgagctttgttttctttgttcctgttt

SEQ ID NO: 189133 - DNA, 120 bp, Artificial Sequence
  ENSG00000112218_36 (sequence is synthesized)
tatgggcagtctttaggtactttcatgctgcttaataggcagtgcctcatttggtgagagctctggagtgcctgccgagacgctccctgtttgtgaacaaagattatgaaggggtctttg

SEQ ID NO: 189134 - DNA, 120 bp, Artificial Sequence
  ENSG00000112218_37 (sequence is synthesized)
tgagaattcagcagcaacactgaacagcagttctttttacactggattatcttgatctgatgagagtttacaaatcattttgaacatttttattatgtatacattgtgaaagctttaaaa

SEQ ID NO: 189135 - DNA, 120 bp, Artificial Sequence
  ENSG00000112218_38 (sequence is synthesized)
ataagtactatggagcacctttgagaaacgtaggtgcaaaatcatatgttgcctattcccccatattttcttgaggcagggaaagataccactactaattctcactgcttacaggcataa

SEQ ID NO: 189136 - DNA, 120 bp, Artificial Sequence
  ENSG00000112218_39 (sequence is synthesized)
tcagaaatggttttttgtttgcctgtttttccttctggctagtaagaagcgtaaaagagataatgaaatatttgtggtcaaaagaaagatgcaagggaaattccaaatagtatggagtaa

SEQ ID NO: 189137 - DNA, 120 bp, Artificial Sequence
  ENSG00000112218_40 (sequence is synthesized)
cattatttaaactttaatacatgtttaagcatccccaagggagcttgttaacagtacagattcctgggcctccagagggtctgtggttgagcccaggaatgtgcatttttattttattga

SEQ ID NO: 189138 - DNA, 120 bp, Artificial Sequence
  ENSG00000112218_41 (sequence is synthesized)
gcactctgcctgactctggctcaggtagtccctgggaaactcttcaggaaacattcctgtagaaaatatatctatttaaatatcatctgttttatcccacaatgtttgtttcgtgttgca

SEQ ID NO: 189139 - DNA, 120 bp, Artificial Sequence
  ENSG00000112218_42 (sequence is synthesized)
agccattatcttctaggcatgggtaatccacattgagaggaaaatccacacaacattgtgcctgatttgctgccacctgtgtttgtgctggatcttgccagtgttagctttattttcttt

SEQ ID NO: 189140 - DNA, 120 bp, Artificial Sequence
  ENSG00000112218_43 (sequence is synthesized)
caactggcaaaattctgataaagcatatagcttcacagtagagcaaaatgggtgacttaattgaaagtcatgactttcagcagtctaattatgctcatattttattttcttatagagagc

SEQ ID NO: 189141 - DNA, 120 bp, Artificial Sequence
  ENSG00000112218_44 (sequence is synthesized)
tgtctttattgtgtgtaattcccggaagaatgtaaagatttatctaattcctattgctctgccagttgtgttcaatgcaagcattgaagtaaaataaaaataacctttttaatatgtgta

SEQ ID NO: 189142 - DNA, 120 bp, Artificial Sequence
  ENSG00000112218_45 (sequence is synthesized)
tttctgttgcccacaaagatatttaatttttttcttgatctttgtttttgtttatgtgaaaatatttacatatgtatcatttctgtatatatcacagaaaagttttcacttgcttgacat

SEQ ID NO: 189143 - DNA, 120 bp, Artificial Sequence
  ENSG00000112218_46 (sequence is synthesized)
tttattctacaatgatttttagtttaagtttaaagaatggctacattcagatttattttcacaactatagtcctgctaaactgccttcattgaaaactcagtttttatgataaaaaatat

SEQ ID NO: 189144 - DNA, 120 bp, Artificial Sequence
  ENSG00000112218_47 (sequence is synthesized)
caaagcacaagtttgttattggaggtaaattatacatttcttagatatctattggtactagacctttgtaattaaaattaatttattttacaatagtaactgacctgtatggaaaaaaaa

SEQ ID NO: 189145 - DNA, 120 bp, Artificial Sequence
  ENSG00000112218_48 (sequence is synthesized)
acaaccttgaattatgggttctaatatttaaatatcgaaaaatatggttatttgtgcatattcttattacaaccaagaaaagaactcctgataagaaaataaataaatatttaacatttc

SEQ ID NO: 189146 - DNA, 120 bp, Artificial Sequence
  ENSG00000112232_0 (sequence is synthesized)
gtcctgttcccgcctctccagttaaggccgctggtgtgagccggggctctgcgcgagcgagggacgacggaagggacgggcaggtgtgggcgcggggccacgcagcccgacggcgggagt

SEQ ID NO: 189147 - DNA, 120 bp, Artificial Sequence
  ENSG00000112232_1 (sequence is synthesized)
cgcaggtgctgggtgcatgggccagtgaggacgcacagagatccctcgccgcgcggaggaggagcagcgcgggagccaggcgctgccccaagaccctgcctgcgtccgagcgagcggaac

SEQ ID NO: 189148 - DNA, 120 bp, Artificial Sequence
  ENSG00000112232_2 (sequence is synthesized)
ctcgcgcttcgcccggggacaatccgaagtccgcgctatggaagaggagaaatatttgcctgagctgatggcagagaaagatagcctggatccatcttttgtgcatgcgtcgcgcctttt

SEQ ID NO: 189149 - DNA, 120 bp, Artificial Sequence
  ENSG00000112232_3 (sequence is synthesized)
ggcagaagaaattgaaaagtttcaaggttctgatggaaaaaaggaagacgaagaaaagaagtatcttgatgtcatcagcaacaaaaacataaagctctcagaaagagtactgattcctgt

SEQ ID NO: 189150 - DNA, 120 bp, Artificial Sequence
  ENSG00000112232_4 (sequence is synthesized)
caagcagtatccaaagttcaattttgtggggaaattgcttggaccaagaggaaactccttgaagaggctacaggaagaaacaggtgctaaaatgtctatcctgggcaaaggatcaatgag

SEQ ID NO: 189151 - DNA, 120 bp, Artificial Sequence
  ENSG00000112232_5 (sequence is synthesized)
agataaagctaaggaagaagaactaaggaagagtggggaagccaaatatgcccacttgagtgatgagcttcatgtattaattgaagtgtttgctccacctggggaagcttattcacgtat

SEQ ID NO: 189152 - DNA, 120 bp, Artificial Sequence
  ENSG00000112232_6 (sequence is synthesized)
gagtcatgcattggaagagattaaaaaattcctggttcctgactacaatgatgaaattcgtcaggaacaactacgtgaattatcttacttaaatggctcagaggactctggtcgtggcag

SEQ ID NO: 189153 - DNA, 120 bp, Artificial Sequence
  ENSG00000112232_7 (sequence is synthesized)
aggtattagaggcagagggatcagaatagctcccacagctccttcaaggggccgtgggggtgccattcctcctcccccaccacctggacgaggtgttctcacccctcggggaagcactgt

SEQ ID NO: 189154 - DNA, 120 bp, Artificial Sequence
  ENSG00000112232_8 (sequence is synthesized)
aacccgtggagcgcttccagtgccacctgtagcaagaggtgtccctacccctcgagcccggggggcaccaacagtgccaggatacagggcacctcctcctccagcccatgaagcttatga

SEQ ID NO: 189155 - DNA, 120 bp, Artificial Sequence
  ENSG00000112232_9 (sequence is synthesized)
tatgagacttatgataacagctatgcgacccaaacacaaagtgtgcctgaatactatgactacggtcatggagtaagtgaggatgcctatgacagctacgcaccagaagaatgggccaca

SEQ ID NO: 189156 - DNA, 120 bp, Artificial Sequence
  ENSG00000112232_10 (sequence is synthesized)
acccgctctagcttgaaggcaccaccgcaaaggtcagccagagggggatacagggaacacccctatggtagatattgaaggtccttcccacctgtgacctcacctcaaagacaattcata

SEQ ID NO: 189157 - DNA, 120 bp, Artificial Sequence
  ENSG00000112232_11 (sequence is synthesized)
gcctgtggtctccacataaacagcaacaagacaagtaatagtcctttttttgtttgtttgtttctattctagggataactgctcatgattactcccatatatttctagtatttccctctg

SEQ ID NO: 189158 - DNA, 120 bp, Artificial Sequence
  ENSG00000112232_12 (sequence is synthesized)
tactgttggcgtgacattgacactagtattattttacaaaacagactgaaaaagacattagcaagcatagtctataaacctttcagtaggatgatattctcttggttgtttttcattgtt

SEQ ID NO: 189159 - DNA, 120 bp, Artificial Sequence
  ENSG00000112232_13 (sequence is synthesized)
ttttctttttcttttttttttttttgaggaaaagcatgaatttgttaacagattttgagtctcaaccaactagcagaaactttgtttagggttgctaaaagactgtaatatgatttttga

SEQ ID NO: 189160 - DNA, 120 bp, Artificial Sequence
  ENSG00000112232_14 (sequence is synthesized)
gactgtaatatgatttttgaactagctgataataaagttgtagataagatgttttaacctgtcttttaatatctgttagttagacaaagatgtttgatattaagtttgtaaatttaattt

SEQ ID NO: 189161 - DNA, 120 bp, Artificial Sequence
  ENSG00000112232_15 (sequence is synthesized)
gctgttttaatggggttgaaaacaagcagctactgtatgtatgtagctaactgaatttgttcagtgttttaacctgtatttgttaaaaaagaaaaaaaaacacacataaagttccatgtg

SEQ ID NO: 189162 - DNA, 120 bp, Artificial Sequence
  ENSG00000112232_16 (sequence is synthesized)
taagcttctctaaataggaaaccacaatttgtcaaatatgtttgccataatttgtcaataaagctgaaaacttttgtaaaaattaaatttggaattacttgttttctagctttaaatgcc

SEQ ID NO: 189163 - DNA, 120 bp, Artificial Sequence
  ENSG00000112232_17 (sequence is synthesized)
tgctttatttcttcttcaagagatgcctaaaatgttttctatttaaaaattacaaaaatgaacccaagtctgttttaagatatttgtgtaatacttaaaaatgtattaataacttatggt

SEQ ID NO: 189164 - DNA, 120 bp, Artificial Sequence
  ENSG00000112232_18 (sequence is synthesized)
tggttgttaaataatttaaaagttaacaaactaaactgttacatgaatcatggttagtaaacactaatgtataacatgttaatggaaaaaaatggatttagaataataaatggattttaa

SEQ ID NO: 189165 - DNA, 120 bp, Artificial Sequence
  ENSG00000112234_0 (sequence is synthesized)
ctcctccccggctccgccccgcctccccgggcccgccgctcctcgcggcctccgcgtcttccttccgggtcgcgctaggccgggcttgcggcggttgtgccgcatctagagagtcgggga

SEQ ID NO: 189166 - DNA, 120 bp, Artificial Sequence
  ENSG00000112234_1 (sequence is synthesized)
gccgcccccgcacccaggccttctcgcgctgcctggtcgctggtgaagcccgcggcgcgcgcctctcccggaccctgcagggtaaaagaatgtcacatgtcagcatttgtacctgaagtc

SEQ ID NO: 189167 - DNA, 120 bp, Artificial Sequence
  ENSG00000112234_2 (sequence is synthesized)
agcatgcaaagttcagggtacctggatgaatgccaacttttgcatttcccatgtgtatcctgtgaccattctatctgggaacatccttcaaagagttcatgcatcttactgaggacacct

SEQ ID NO: 189168 - DNA, 120 bp, Artificial Sequence
  ENSG00000112234_3 (sequence is synthesized)
gaccttttgaagcttcataattcacatctagatgtcaccggtctttcccatgttaacagttctgaccatgttttattatatatgccttcggcgccgagccaggacagctacaagaggaga

SEQ ID NO: 189169 - DNA, 120 bp, Artificial Sequence
  ENSG00000112234_4 (sequence is synthesized)
aatgatgaacacccatagagctatagaatcaaacagccagacttcccctctcaatgcagaggtagtccagtatgccaaagaagtagtggatttcagttcccattatggaagtgagaatag

SEQ ID NO: 189170 - DNA, 120 bp, Artificial Sequence
  ENSG00000112234_5 (sequence is synthesized)
tatgtcctatactatgtggaatttggctggtgtaccaaatgtattcccaagttctggtgactttactcagacagctgtgtttcgaacttatgggacatggtgggatcagtgtcctagtgc

SEQ ID NO: 189171 - DNA, 120 bp, Artificial Sequence
  ENSG00000112234_6 (sequence is synthesized)
ttccttgccattcaagaggacgccacctaattttcagagccaggactatgtggaacttacttttgaacaacaggtgtatcctacagctgtacatgttctagaaacctatcatcccggagc

SEQ ID NO: 189172 - DNA, 120 bp, Artificial Sequence
  ENSG00000112234_7 (sequence is synthesized)
agtcattagaattctcgcttgttctgcaaatccttattccccaaatccaccagctgaagtaagatgggagattctttggtcagagagacctacgaaggtgaatgcttcccaagctcgcca

SEQ ID NO: 189173 - DNA, 120 bp, Artificial Sequence
  ENSG00000112234_8 (sequence is synthesized)
gtttaaaccttgtattaagcagataaatttccccacaaatcttatacgactggaagtaaatagttctcttctggaatattacactgaattagatgcagttgtgctacatggtgtgaagga

SEQ ID NO: 189174 - DNA, 120 bp, Artificial Sequence
  ENSG00000112234_9 (sequence is synthesized)
caagccagtgctttctctcaagacttcacttattgacatgaatgatatagaagatgatgcctatgcagaaaaggatggttgtggaatggacagtcttaacaaaaagtttagcagtgctgt

SEQ ID NO: 189175 - DNA, 120 bp, Artificial Sequence
  ENSG00000112234_10 (sequence is synthesized)
cctcggggaagggccaaataatgggtattttgataaactaccttatgagcttattcagctgattctgaatcatcttacactaccagacctgtgtagattagcacagacttgcaaactact

SEQ ID NO: 189176 - DNA, 120 bp, Artificial Sequence
  ENSG00000112234_11 (sequence is synthesized)
catactgggcaaaactagatgacacttctctggaatttctacagtctcgctgcactcttgtccagtggcttaatttatcttggactggcaatagaggcttcatctctgttgcaggattta

SEQ ID NO: 189177 - DNA, 120 bp, Artificial Sequence
  ENSG00000112234_12 (sequence is synthesized)
gcaggtttctgaaggtttgtggatccgaattagtacgccttgaattgtcttgcagccactttcttaatgaaacttgcttagaagttatttctgagatgtgtccaaatctacaggccttaa

SEQ ID NO: 189178 - DNA, 120 bp, Artificial Sequence
  ENSG00000112234_13 (sequence is synthesized)
atctctcctcctgtgataagctaccacctcaagctttcaaccacattgccaagttatgcagccttaaacgacttgttctctatcgaacaaaagtagagcaaacagcactgctcagcattt

SEQ ID NO: 189179 - DNA, 120 bp, Artificial Sequence
  ENSG00000112234_14 (sequence is synthesized)
tgaacttctgttcagagcttcagcacctcagtttaggcagttgtgtcatgattgaagactatgatgtgatagctagcatgataggagccaagtgtaaaaaactccggaccctggatctgt

SEQ ID NO: 189180 - DNA, 120 bp, Artificial Sequence
  ENSG00000112234_15 (sequence is synthesized)
ggagatgtaagaatattactgagaatggaatagcagaactggcttctgggtgtccactactggaggagcttgaccttggctggtgcccaactctgcagagcagcaccgggtgcttcacca

SEQ ID NO: 189181 - DNA, 120 bp, Artificial Sequence
  ENSG00000112234_16 (sequence is synthesized)
gactggcacaccagctcccaaacttgcaaaaactctttcttacagctaatagatctgtgtgtgacacagacattgatgaattggcatgtaattgtaccaggttacagcagctggacatat

SEQ ID NO: 189182 - DNA, 120 bp, Artificial Sequence
  ENSG00000112234_17 (sequence is synthesized)
taggaacaagaatggtaagtccggcatccttaagaaaactcctggaatcttgtaaagatctttctttacttgatgtgtccttctgttcgcagattgataacagagctgtgctagaactga

SEQ ID NO: 189183 - DNA, 120 bp, Artificial Sequence
  ENSG00000112234_18 (sequence is synthesized)
atgcaagctttccaaaagtgttcataaaaaagagctttactcagtgacttaatatatgttctgtattaaaattaatgtgctttgttggggtttaattttgggattggttttgggttttgt

SEQ ID NO: 189184 - DNA, 120 bp, Artificial Sequence
  ENSG00000112234_19 (sequence is synthesized)
ttttagttgttttaatggtaagaattaagacatttgtagattttaaagaaaaatatgaaattgtccattaaatcaagtaaaaatgtgcacaaatgttttcataaaatactgcaagcactt

SEQ ID NO: 189185 - DNA, 120 bp, Artificial Sequence
  ENSG00000112234_20 (sequence is synthesized)
ctcttcaagaatatgagtggatattatttttaccttatgttaatcagtgatatgctttagtcaataatatgattgataaaagaataacatggaatcatgctaacttattttcaaaggaac

SEQ ID NO: 189186 - DNA, 120 bp, Artificial Sequence
  ENSG00000112234_21 (sequence is synthesized)
actgagcaataaagtatcgtggcatttatgcaaaaaaaaaagttaattttttacaccttcatgtaaggatgtcttattaagcctgtgacctggcaagtgttttgtttggtatgtacaaaa

SEQ ID NO: 189187 - DNA, 120 bp, Artificial Sequence
  ENSG00000112234_22 (sequence is synthesized)
tggtcagagctagttggagaatgagacatgcttttccagctgtttggttatttctctggattaactgttcaactggaaaatttttagtttttctagccaggtgtggtggcacacacttgt

SEQ ID NO: 189188 - DNA, 120 bp, Artificial Sequence
  ENSG00000112234_23 (sequence is synthesized)
gcctctcccggaccctgcaggatttttcttcctggcctggttcccttgccttctccatttgcttcattcgcttggattttcaagaagctttgaagctggataggagtctccagtcttcct

SEQ ID NO: 189189 - DNA, 120 bp, Artificial Sequence
  ENSG00000112234_24 (sequence is synthesized)
acaggaggtggaggcaggaggattacttgagatgggattttgagactctagtgtacttatgattgcacctgtgagcagccactgcactccaacctgggcaatatagcaagtccctttctc

SEQ ID NO: 189190 - DNA, 120 bp, Artificial Sequence
  ENSG00000112234_25 (sequence is synthesized)
ttaaaaaaaattgtagtgtttccacttttcttctgatatttttgtctatttcactactggataatgccaatataaaaatttgggtataatcaagaataagaggtaaactactaaataaaa

SEQ ID NO: 189191 - DNA, 120 bp, Artificial Sequence
  ENSG00000112234_26 (sequence is synthesized)
aaagctttccaactgttagaagcagatgccttaacattttgtgaaaggtaaagttttgaggtttctgaattatataaaaaaacataaatgtggagatatatattatatatacacattata

SEQ ID NO: 189192 - DNA, 120 bp, Artificial Sequence
  ENSG00000112234_27 (sequence is synthesized)
tatacatatatataattatatatattatatagagagagatatatatcttgctagggtgtgtggatgctggaatataacgattttgcacttaacaggacaatgaattttgttatactacag

SEQ ID NO: 189193 - DNA, 120 bp, Artificial Sequence
  ENSG00000112234_28 (sequence is synthesized)
ttaatattagttttgtgttcaaaacagctgtgccttttcatgccacaaaatattttctgtctactttctgagtagcagaattaattcatttttttaacaaaacgatgtatgtcaagtgtt

SEQ ID NO: 189194 - DNA, 120 bp, Artificial Sequence
  ENSG00000112234_29 (sequence is synthesized)
cagtagtcacatgaggagaatgcttcctttgtgcctggcactgtttcttgtgctttgcattgactaattcaattctcacaacaaccctgtaagataaatgccattacttacccccattta

SEQ ID NO: 189195 - DNA, 120 bp, Artificial Sequence
  ENSG00000112234_30 (sequence is synthesized)
cagatgaggaaactgaggcaaagaaagattgaagaatttatttatgatcatacagctgctagtggcagagccaacatataaacccaggccatctggcttctgaagcattgcattaaacct

SEQ ID NO: 189196 - DNA, 120 bp, Artificial Sequence
  ENSG00000112234_31 (sequence is synthesized)
gtgcttttaggtgttcagggtagcttctggctctagggcagaggtcaggaaactttttctataaagggccagatagtaaatattttaggctttgtgggctaagaggtaaaactgagattg

SEQ ID NO: 189197 - DNA, 120 bp, Artificial Sequence
  ENSG00000112234_32 (sequence is synthesized)
aactagagagaaataaaatttgcacgaaaattttattgacaaaattcaaaacaataatttagaacaattttttttgtaatacgggtttactaatgaaaagaattaaatatttacagggag

SEQ ID NO: 189198 - DNA, 120 bp, Artificial Sequence
  ENSG00000112234_33 (sequence is synthesized)
gatcaaagttaatgtttcgtgtcattaaagttgattgtaagtactcatttgttaatgctgatctgtaataagattttatgtattttacttctgaaaattccttgcagataggtattgtca

SEQ ID NO: 189199 - DNA, 120 bp, Artificial Sequence
  ENSG00000112234_34 (sequence is synthesized)
aatacttacattaatccatgagaatatgatttttgttgagcatattcatcacttgaaaggttacttcttctctggatattttccttttagcatgttattacattgcagcttaatcacttc

SEQ ID NO: 189200 - DNA, 120 bp, Artificial Sequence
  ENSG00000112234_35 (sequence is synthesized)
caattgaagactaggcagaagctcctcaattgcactgttaaattgattttgaaaaatggaaatttcctttacatttgcaaactccaaaaaatactgcaggcactatggtgtgagctacaa

SEQ ID NO: 189201 - DNA, 120 bp, Artificial Sequence
  ENSG00000112234_36 (sequence is synthesized)
atttgtgtgagagtggagatctcgcttctttgtcttaccttttgatagcacaggaaatgtgtaaagcagcttgttgttacttgtaattcaaacaatgttgtcatcaaaatgacttatgtt

SEQ ID NO: 189202 - DNA, 120 bp, Artificial Sequence
  ENSG00000112234_37 (sequence is synthesized)
ttgcttgtaaacacgttttgccttgtaattttggcttgaattcatttcaaaattttattaagtcttgagcaaaagctaaattccaaagccattcagtgttccataatagtgattgaggac

SEQ ID NO: 189203 - DNA, 120 bp, Artificial Sequence
  ENSG00000112234_38 (sequence is synthesized)
atgtcttctttttcagaaaaatgtcaatatcagccctgaacgcaaaagctcacaatagaactaacactattatgccaatgtggttgggcaaatcagcatattcatcttctgtatctgaca

SEQ ID NO: 189204 - DNA, 120 bp, Artificial Sequence
  ENSG00000112234_39 (sequence is synthesized)
aaagataactgaaccattgatgtttaatctatcagaaactatgagagcaaatgaagttcaccattgctaccagtagttcagtaatacaaaattgaatcaaatatatcccacaaagtacct

SEQ ID NO: 189205 - DNA, 120 bp, Artificial Sequence
  ENSG00000112234_40 (sequence is synthesized)
gctgatgaataatacagtaaataaccatagattttaaataccttcttaccttttcacaggctttataaatttgacaaacgtaatcattttgcttcacacatttttaacaccaccagttgt

SEQ ID NO: 189206 - DNA, 120 bp, Artificial Sequence
  ENSG00000112234_41 (sequence is synthesized)
aacacatcttagcagattctacttcaggttgcatgaaatttgtgttttcttcttataaaatattcatgcttgtaattgtgccacacagataattcatagagactaatttcagtcacttca

SEQ ID NO: 189207 - DNA, 120 bp, Artificial Sequence
  ENSG00000112234_42 (sequence is synthesized)
acgttggcattgacttatcaaataagcaataactaggcagtgtcagtaacatctgttgactcatcaagagccaaggaaaaccactcagggtcatttgccttgttttttattgactgttga

SEQ ID NO: 189208 - DNA, 120 bp, Artificial Sequence
  ENSG00000112234_43 (sequence is synthesized)
tgttgttcccagtgttctcaattctttaagcaaccattcttgccaaaaggctaatttaatagtcttaagtttactttggacacagtccttcagccgatagaatcaaacacaatttagtta

SEQ ID NO: 189209 - DNA, 120 bp, Artificial Sequence
  ENSG00000112234_44 (sequence is synthesized)
tcgttagtaaaatgttttccttgcttggttaacatctgagtcactttggctgcaactttattttcatttttgagtttgtttttttttttttttgagactgagtctcattcttttgcccag

SEQ ID NO: 189210 - DNA, 62 bp, Artificial Sequence
  ENSG00000112234_45 (sequence is synthesized)
atgcttggattacaggcatgaaccactgcatctgacctccctatagtattctttaagaacag

SEQ ID NO: 189211 - DNA, 120 bp, Artificial Sequence
  ENSG00000112234_46 (sequence is synthesized)
ccactgcatctgacctccctatagtattctttaagaacagctataatgacattgcatattaaacatcatactctgacatctaatctgatttttaaaaattcatatactaatgtgccttaa

SEQ ID NO: 189212 - DNA, 120 bp, Artificial Sequence
  ENSG00000112234_47 (sequence is synthesized)
aaatgtcacttcaagtctacttttctttttttctcttgttttgatgttatgggtaagcactagtaataaaaaatttaaaaatattgtggtatgacaacatatgtggcactcaaaatgctg

SEQ ID NO: 189213 - DNA, 120 bp, Artificial Sequence
  ENSG00000112234_48 (sequence is synthesized)
gtaactgcattactgcagtttttagtgtgccaagtagcagtgcaaaatgatgacagcaccacataagtctcctttgcatttgttcaactctgccattctaatgtgaaagcaatcatagac

SEQ ID NO: 189214 - DNA, 120 bp, Artificial Sequence
  ENSG00000112234_49 (sequence is synthesized)
agtacctaaacgaatgagtgtggccatgttccaataaaatttcatgagcactgaaagttgaattttacataattttgatgtgttacaaaatactactgtgttagccattagattttttca

SEQ ID NO: 189215 - DNA, 120 bp, Artificial Sequence
  ENSG00000112234_50 (sequence is synthesized)
gccattagaaaatgtgaaactgttcttatgagctggctggatttggcttgtggaccaaatttgtgacccctattccagagtattttcgagtcagttaatccatgtttgcccattcctaat

SEQ ID NO: 189216 - DNA, 120 bp, Artificial Sequence
  ENSG00000112234_51 (sequence is synthesized)
tttataaaccacattcaaacctgttaattcgctgttatcattctcattttgccatttagattttaaaatgaagagcagtgttttgttagaaaaaacaaaatgtttaccataacaagaaag

SEQ ID NO: 189217 - DNA, 120 bp, Artificial Sequence
  ENSG00000112234_52 (sequence is synthesized)
atgtgtagacaagaaagatatttatgtagactctttgtttgttaaattttgaagccaggtgatgcattgttagctttgacaactgacttaaatttttgtataattatttatctttgcatt

SEQ ID NO: 189218 - DNA, 120 bp, Artificial Sequence
  ENSG00000112234_53 (sequence is synthesized)
ttgctcaggtaaattatcttcccagagtctagaaataaagatatccctgatcctgtttaagagcataaataatactctcaatgtaaattgttttgaaataagatcttaaaaatacaaaat

SEQ ID NO: 189219 - DNA, 120 bp, Artificial Sequence
  ENSG00000112234_54 (sequence is synthesized)
gtagacaattaatattcaggtgcttacttttgagccaatatgtagcagagaaaaactaatttctctgtggcagtatttttatttttggcatttcccaggaattaactgaagactaaaact

SEQ ID NO: 189220 - DNA, 120 bp, Artificial Sequence
  ENSG00000112234_55 (sequence is synthesized)
catatgtgaagtgtaatgatactaatcaaagagtcagtaaaatttccatttggctaccatgtatgtgtgtatatatttatgtatgtatgtgtgtgttacatatttgagacagggtctcac

SEQ ID NO: 189221 - DNA, 74 bp, Artificial Sequence
  ENSG00000112234_56 (sequence is synthesized)
gtatgtatgtgtgtgttacatatttgagacagggtctcactctattgagtctcccaggctcaagcgatcctccc

SEQ ID NO: 189222 - DNA, 120 bp, Artificial Sequence
  ENSG00000112234_57 (sequence is synthesized)
cacctggctaatttttttattttttatagagacacagtctttccatgttgcctatgttggtcttgaactcctgggctcaaataattttcccaccttggcctcctgtagtgctgggattac

SEQ ID NO: 189223 - DNA, 120 bp, Artificial Sequence
  ENSG00000112234_58 (sequence is synthesized)
gggcataagccactgtgtcaggccccatgtatgttaatagtgaatgtttggcttttcatttgttactttcagctattaaaggatacctattacagacacaggaatttacattttcaaagt

SEQ ID NO: 189224 - DNA, 120 bp, Artificial Sequence
  ENSG00000112234_59 (sequence is synthesized)
catttttgacacatcagtgctgcatctacttttctccttttagcacatttgatattgatacttcagagaaacttttttaactacccttaaaatcttgtcaatgaccattaactgccaatc

SEQ ID NO: 189225 - DNA, 120 bp, Artificial Sequence
  ENSG00000112234_60 (sequence is synthesized)
atcacctcatttgctttttttgacaacatactactagaaacctaggctgtgagtgtaaaaccataactgttagaatcatttttttggcaatagctcacattctgttaagagtcatttgct

SEQ ID NO: 189226 - DNA, 120 bp, Artificial Sequence
  ENSG00000112234_61 (sequence is synthesized)
ttaatcaaagatcatgatttattatatattttttataagtagggatggggccaagattattcctttggcacagcagtaagtgtgctcaagatctttgcctgtaagcttgaatatttggct

SEQ ID NO: 189227 - DNA, 120 bp, Artificial Sequence
  ENSG00000112234_62 (sequence is synthesized)
taaattttgtgcatatgaatactgttaaaggtatatttgactacattttgaaaggaaaaaggtagtcctgctaaaattgacatttagggatattttaatctatgtatttggtaaagtaat

SEQ ID NO: 189228 - DNA, 120 bp, Artificial Sequence
  ENSG00000112234_63 (sequence is synthesized)
tagtgaagtattagttataaaaattttaaggaaaacatttaaaagcaaaatagtcgtatcagataaatagagtagaatacactaaagataaaacaagtctctgttacaaatgaagttgtc

SEQ ID NO: 189229 - DNA, 120 bp, Artificial Sequence
  ENSG00000112234_64 (sequence is synthesized)
tgtacagacgactgagatattttaattttatttacataaaaatgctgttcaatatctaatgatttctgttgtttgtattctgtactttagagtaataaaataagtttgagtatctcatta

SEQ ID NO: 189230 - DNA, 120 bp, Artificial Sequence
  ENSG00000112237_0 (sequence is synthesized)
gtcgccgccgcggagcggagtcgagccgagctgatttgatcgaggagcgcggttaccggacgggctgggtctatggtcgctccgcgggccgctccgccggctggtgcttttttatcaggg

SEQ ID NO: 189231 - DNA, 120 bp, Artificial Sequence
  ENSG00000112237_1 (sequence is synthesized)
caagctgtgttccatggcagggaacttttggcagagctcccactatttgcaatggattttggataaacaagatctgttgaaggagcgccaaaaggatttaaagtttctctcagaggaaga

SEQ ID NO: 189232 - DNA, 120 bp, Artificial Sequence
  ENSG00000112237_2 (sequence is synthesized)
atattggaagttacaaatattttttacaaatgttatccaagcattaggtgaacatcttaaattaagacaacaagttattgccactgctacggtatatttcaagagattctatgccaggta

SEQ ID NO: 189233 - DNA, 120 bp, Artificial Sequence
  ENSG00000112237_3 (sequence is synthesized)
ttctctgaaaagtatagatcctgtattaatggctcctacatgtgtgtttttggcatccaaagtagaggaatttggagtagtttcaaatacaagattgattgctgctgctacttctgtatt

SEQ ID NO: 189234 - DNA, 120 bp, Artificial Sequence
  ENSG00000112237_4 (sequence is synthesized)
aaaaactagattttcatatgcctttccaaaggaatttccttataggatgaatcatatattagaatgtgaattctatctgttagaactaatggattgttgcttgatagtgtatcatcctta

SEQ ID NO: 189235 - DNA, 120 bp, Artificial Sequence
  ENSG00000112237_5 (sequence is synthesized)
tagacctttgctccagtatgtgcaggacatgggccaagaagacatgttgcttccccttgcatggaggatagtgaatgatacctacagaacggatctttgcctactgtatcctcctttcat

SEQ ID NO: 189236 - DNA, 120 bp, Artificial Sequence
  ENSG00000112237_6 (sequence is synthesized)
gatagctttagcttgcctacatgtagcctgtgttgtacagcagaaagatgccaggcaatggtttgctgagctttctgtggatatggaaaagattttggaaataatcagggttattttaaa

SEQ ID NO: 189237 - DNA, 120 bp, Artificial Sequence
  ENSG00000112237_7 (sequence is synthesized)
actatatgagcagtggaagaatttcgatgagagaaaagagatggcaaccattcttagtaagatgccaaaaccaaaaccacctccaaacagtgaaggagagcagggtccaaatggaagtca

SEQ ID NO: 189238 - DNA, 120 bp, Artificial Sequence
  ENSG00000112237_8 (sequence is synthesized)
tgaatagcttgtttctgtcaagcatattggaaagtgattttatttttgcaaaataagtttttctttaatatgattctagtacataattgattaaaatctcttgattataaatgtttggaa

SEQ ID NO: 189239 - DNA, 120 bp, Artificial Sequence
  ENSG00000112237_9 (sequence is synthesized)
aggttctaaggggacctacagacagacatacatagacatttcaaaattaatagcttttgattagtataatatttcttaatttggataataaaaattgtagctttttattaagccaggaaa

SEQ ID NO: 189240 - DNA, 120 bp, Artificial Sequence
  ENSG00000112237_10 (sequence is synthesized)
catgaagcataatttgtttaaaattctctttggtcattgagggaccaaaaaaggacgtaaaatttacagtcaatctatgagggtttttttccctccataagtttaactttaaaactgtat

SEQ ID NO: 189241 - DNA, 120 bp, Artificial Sequence
  ENSG00000112237_11 (sequence is synthesized)
ttaaggaatcaaatcttacaaaatcctggaagattttggtaatgatgttgataatttcagggaaattaatcaagtacctatattgatttaaaagtgtattttattcagtagtttgaggat

SEQ ID NO: 189242 - DNA, 120 bp, Artificial Sequence
  ENSG00000112237_12 (sequence is synthesized)
cttgccatggaagatactagcccagcctagcagaaaagtgcaatatgtatagcatactttgacattttaaacatgatagtccataaccattttgaaatgctgggcaaactacatgaagtt

SEQ ID NO: 189243 - DNA, 120 bp, Artificial Sequence
  ENSG00000112237_13 (sequence is synthesized)
atttataattaattcacagctaatcaggcattttgaaagcttaattggattcaaaaaccataatgttggaatttggtaaaattttaatgttgatttttactgtgaaaaggtttttataag

SEQ ID NO: 189244 - DNA, 120 bp, Artificial Sequence
  ENSG00000112237_14 (sequence is synthesized)
atatacacaccctagtttaatgttgtgtcttggtgtggatttacagatttactacaggtattctgaaccaggaacacaatcaggtttcaggccagtttgatactggctgtccttaattct

SEQ ID NO: 189245 - DNA, 120 bp, Artificial Sequence
  ENSG00000112237_15 (sequence is synthesized)
aatatgagagtaggacatcatactaaatgttatgtcagtgggactgtactgtctgtggaacttagcaaattaatcattttcttcagacttgaaggagagtgataaataaaatttggagtc

SEQ ID NO: 189246 - DNA, 120 bp, Artificial Sequence
  ENSG00000112237_16 (sequence is synthesized)
ataggatattgatgcacaatttaaggattaaacatttttaatcaattgtggatgatggcttattaaatgttgacttcctagtataaaactgcaagaataaaagtaacttctccagctgta

SEQ ID NO: 189247 - DNA, 120 bp, Artificial Sequence
  ENSG00000112237_17 (sequence is synthesized)
attctccactagtggcagggcctgaagctgcaagatgatggtggacaagataaggcaataatcctattgccaaagttactggtattttcagttttagttatttttaagtattcagcattt

SEQ ID NO: 189248 - DNA, 120 bp, Artificial Sequence
  ENSG00000112237_18 (sequence is synthesized)
ttattttaagtattcagcattttccaggaaattaccatatttcttgctgacttataaaggtttgctgtatttatatatgattttattatgcctttggacaacagttttggtttttttttt

SEQ ID NO: 189249 - DNA, 120 bp, Artificial Sequence
  ENSG00000112237_19 (sequence is synthesized)
tttttgaagaacacttcttgtttttcataaatagtaggaataggattttatatgtaagatttaattttataggaaatttgtttagaagaagctgtaatctctatgttgagtgatacctgt

SEQ ID NO: 189250 - DNA, 120 bp, Artificial Sequence
  ENSG00000112237_20 (sequence is synthesized)
aataacaatgaaatcccataccctaatttaaagtttttgagtatatatggacactaacttccagaatgcttgttatatgtgagggcacaaagttatataagaataaaaacataaaaccaa

SEQ ID NO: 189251 - DNA, 120 bp, Artificial Sequence
  ENSG00000112237_21 (sequence is synthesized)
gaacactagttctcttcaatctcagcacctccaagggtcagcacctcccctccggctccctccgctaccgcgggccggaacttttgtcgataggaacgggtttgcacatttgcaatggat

SEQ ID NO: 189252 - DNA, 120 bp, Artificial Sequence
  ENSG00000112237_22 (sequence is synthesized)
gattaatagattaaaacatttttaaattaaatgaagttggaaattatttaaagaaatgattttagagaggtacattttaaaaccatccacctaatatgtgatggtgaaatcatggtagcc

SEQ ID NO: 189253 - DNA, 120 bp, Artificial Sequence
  ENSG00000112237_23 (sequence is synthesized)
acctatatatttcttaacacatttgcaaatcctagaattagaccactgtgactcacatagagcatgtgtaggttttttcctttgttaaaaatgaacataattatgatttaaccacatgga

SEQ ID NO: 189254 - DNA, 120 bp, Artificial Sequence
  ENSG00000112237_24 (sequence is synthesized)
ctcttcaatctcagcacctccaagggtcagcacctcccctccggctccctccgctaccgcgggccggaacttttgtcgataggaacgggtttgcacagttgagtgttgtcggccggcgtg

SEQ ID NO: 189255 - DNA, 120 bp, Artificial Sequence
  ENSG00000112237_25 (sequence is synthesized)
taattctaaagaaagctccagagtacatagatttttttttttttagtttatgagacatatgagattggttggctttattaaatttcctgaggataactttatatctagtgtatctggcaa

SEQ ID NO: 189256 - DNA, 120 bp, Artificial Sequence
  ENSG00000112237_26 (sequence is synthesized)
aaaaatcaagctaaaaggtttttttttaaaaagatataaagatattacttttaatgttaaaatggatagtaattatcaatccaaaaacatcaactcagtggcttttaatcttgtaagagt

SEQ ID NO: 189257 - DNA, 120 bp, Artificial Sequence
  ENSG00000112237_27 (sequence is synthesized)
aaagaaaaaattctgtttccgaattttattgtattttattgttttctaatgactattatgtcattcttatgggtagatattaatatctatgtgcaaacccgttcctgtgttgttgggttg

SEQ ID NO: 189258 - DNA, 120 bp, Artificial Sequence
  ENSG00000112237_28 (sequence is synthesized)
taagcttttagaacagtgccttgcttagtatgttactttgctgaggctgccataacaaaatgccacagaacaggtggcttaaacaacagaagcgtattttctcacagttttagagcatgg

SEQ ID NO: 189259 - DNA, 120 bp, Artificial Sequence
  ENSG00000112237_29 (sequence is synthesized)
aaatccaagatcaaggtgtctggctattcttacatggacctttctgtgagcacacacactcctggtttgctgtcttcttcatgtgaggacaatagtcttacagaattaggccccactctt

SEQ ID NO: 189260 - DNA, 120 bp, Artificial Sequence
  ENSG00000112237_30 (sequence is synthesized)
gctgggattataggtgtgagccaccatgtctggcctgtcctcatttaatcttatccctttaaagaccctctctccaaatacagtcacattctgaggtactaggagttagggcttcaacat

SEQ ID NO: 189261 - DNA, 120 bp, Artificial Sequence
  ENSG00000112237_31 (sequence is synthesized)
cagtcacattctgaggtactaggagttagggcttcaacatacgaattttggagggggacatatattggtccacaatacttggtaaactttaggggctatcatcatcatcatcatcttcaa

SEQ ID NO: 189262 - DNA, 120 bp, Artificial Sequence
  ENSG00000112237_32 (sequence is synthesized)
tgacaacaacatcattatcactggaaaacactgtgccaatgcagtggcattggtaccaaggtaaaatacaaggaatttaaggacaaaaaaagaagacagaaacataaaaatattaataca

SEQ ID NO: 189263 - DNA, 120 bp, Artificial Sequence
  ENSG00000112237_33 (sequence is synthesized)
ctctctggaggaaatatacaatcagatgaggtagttctgctttcagtaataatatgatttacatttctataggaggatagtgaatgatacctacagaacggatctttgcctactgtatcc

SEQ ID NO: 189264 - DNA, 120 bp, Artificial Sequence
  ENSG00000112237_34 (sequence is synthesized)
ttttgtgtggtaatttgtgaactgttttagtgcatacctaacatttttgcttatacaggtattctttttacaacatattcatttatctttctttttagtgatccaaataaagtttttttg

SEQ ID NO: 189265 - DNA, 120 bp, Artificial Sequence
  ENSG00000112237_35 (sequence is synthesized)
gttacctaatctccctaagactttataataattattagacccagttcaaggttggctaaagcaaagtactttgaggataaatgattctttggattgacatcctatagtggtcgtttctct

SEQ ID NO: 189266 - DNA, 120 bp, Artificial Sequence
  ENSG00000112237_36 (sequence is synthesized)
tagaactttgctttgaagggaagaagatgtagggatagatctttactctgacatgtagtaggtttgtcacataatttttttaactttcggttcactattttgtaaacttatctttttttt

SEQ ID NO: 189267 - DNA, 120 bp, Artificial Sequence
  ENSG00000112237_37 (sequence is synthesized)
ggttcactattttgtaaacttatcttttttttgaggattcgttatggatttttatgtattatttatttattttggtgagctgtataaagctaagtgtggtggctcacacctgtaatctta

SEQ ID NO: 189268 - DNA, 78 bp, Artificial Sequence
  ENSG00000112237_38 (sequence is synthesized)
aggtgggcagatcacttgaggccaggaatttgagatgagcctggccaacatggtgaaatggcacaagaatcacttgaa

SEQ ID NO: 189269 - DNA, 83 bp, Artificial Sequence
  ENSG00000112237_39 (sequence is synthesized)
gaatcacttgaacctgggaggtggagattacagtgagccaagatcgtgctactgcatcaacaaaaaaagtggtagtattaaca

SEQ ID NO: 189270 - DNA, 120 bp, Artificial Sequence
  ENSG00000112237_40 (sequence is synthesized)
tcccactatcctaaaagaagggaccactttgccttgctcaaatcccttgagcagtcatggagtttcttatctggaaaaggtaacgagtgtggaagacaagacaattctggaaaaacaaac

SEQ ID NO: 189271 - DNA, 120 bp, Artificial Sequence
  ENSG00000112238_0 (sequence is synthesized)
gccattcagcggcctcgattatgcagggggctgagggaaccactccatgtgaccctctcgggtgggactctgcagctgcttcgcagcgcaactctctcaccaaactccgcgcccttgcgc

SEQ ID NO: 189272 - DNA, 120 bp, Artificial Sequence
  ENSG00000112238_1 (sequence is synthesized)
tagcggtgccaaaaggctcccgccccgattgaaaaggcgcagtgcatgcccgcccgcgtcactccgcgggcggaggacgcacgtcggggcgcggctctctggctagcgcgcagctccagc

SEQ ID NO: 189273 - DNA, 120 bp, Artificial Sequence
  ENSG00000112238_2 (sequence is synthesized)
tctgtcactcgcgcccttccaaggacctggagcacccgagcgcctgcctggtggcggcggcaacaatgcacggagccgccagagcgccagccaccagcgtgagtgccgactgctgcatcc

SEQ ID NO: 189274 - DNA, 120 bp, Artificial Sequence
  ENSG00000112238_3 (sequence is synthesized)
cggccggcttgcgcctcggaccggtgcctggtaccttcaagctgggcaagtacctgtcagaccgcagggagcccgggcctaagaaaaaggtgcgcatggtgagaggggagctggtggacg

SEQ ID NO: 189275 - DNA, 120 bp, Artificial Sequence
  ENSG00000112238_4 (sequence is synthesized)
agtcggggggctcccctctggagtggatagggttaatccgggcagccagaaactcccaggaacagactctggaagctattgcagacttacccggaggacagatcttctaccgagcattgc

SEQ ID NO: 189276 - DNA, 120 bp, Artificial Sequence
  ENSG00000112238_5 (sequence is synthesized)
gagacgtccagccaggggaggagctgacagtgtggtattctaactccttggctcagtggttcgacatccccaccacagcgactccgactcacgacgagaaaggggaggagcgctacatct

SEQ ID NO: 189277 - DNA, 120 bp, Artificial Sequence
  ENSG00000112238_6 (sequence is synthesized)
gctggtactgctggaggacgtttagataccccaacagccttaaggcacacctgcgtttccactgcgtgttcagcggcggtggaggcggcgccttcctgcaccacgaacacgcggctcgcc

SEQ ID NO: 189278 - DNA, 120 bp, Artificial Sequence
  ENSG00000112238_7 (sequence is synthesized)
aaggcgccgtcccagcggctgatggcctcggtctctccccaaaacccccggcgcccgatttcgccgcgccttcccaggcaggaactttgcgaccccaccccctgggcccgccaccagttc

SEQ ID NO: 189279 - DNA, 120 bp, Artificial Sequence
  ENSG00000112238_8 (sequence is synthesized)
aggcctgcggtgcgcgggagggcatcaagcgcgaggcctcttccgcgccctcggccacctcgccgaccccaggcaagtgggggcagcccaagaagggcaaggagcagctggaccgtgccc

SEQ ID NO: 189280 - DNA, 120 bp, Artificial Sequence
  ENSG00000112238_9 (sequence is synthesized)
tggacatgagcggagccgcccgaggacaagggcacttcctcggcatcgtgggcggctcctcggcgggggtcggcagcctggctttctaccccggcgtgcgctcagctttcaagcccgccg

SEQ ID NO: 189281 - DNA, 120 bp, Artificial Sequence
  ENSG00000112238_10 (sequence is synthesized)
tcacggcgacccctaccgggaggagagcagcagcaagcaaggagccggcctcgctttgggcaggctgctgggcgggggccgggcgtgcgggcgccccgggagcggggagaactcggcggc

SEQ ID NO: 189282 - DNA, 120 bp, Artificial Sequence
  ENSG00000112238_11 (sequence is synthesized)
cgggtcaccaccatcaccaccacgcgcaccaccaccaccatcccaagtgcctgctcgctggggacccgccgccgccgccgccgcctggcctgccctgctctggggccctgcgcggcttcc

SEQ ID NO: 189283 - DNA, 120 bp, Artificial Sequence
  ENSG00000112238_12 (sequence is synthesized)
ttccctctgctctccgtccccccggaagaggcgtccgccttcaagcacgtggagcgcgccccgcccgcagccgccgcgctgccaggagcgcgttatgcgcagctgccccctgcgccgggg

SEQ ID NO: 189284 - DNA, 120 bp, Artificial Sequence
  ENSG00000112238_13 (sequence is synthesized)
ttgcccctcgagcgctgcgcgctgccgcccctcgacccgggcggtctcaaagcctatccgggtggtgagtgcagccacctgcccgccgtcatgccggcctttacagtctacaacggggag

SEQ ID NO: 189285 - DNA, 120 bp, Artificial Sequence
  ENSG00000112238_14 (sequence is synthesized)
ctgctctacggctcaccggccaccaccgcttattacccgctcaaattgcacttcggcgggctgctgaagtatccggagtccatctcctacttcagcgggcctgcagcggccgccctaagc

SEQ ID NO: 189286 - DNA, 120 bp, Artificial Sequence
  ENSG00000112238_15 (sequence is synthesized)
cccgccgagctggggtcgctggccagcatcgaccgagagatcgccatgcacaatcagcagctgtccgagatggctgccgggaagggtcgcggacgcctggactcggggacgttgccaccg

SEQ ID NO: 189287 - DNA, 120 bp, Artificial Sequence
  ENSG00000112238_16 (sequence is synthesized)
gccgtcgcggcggcgggaggcaccgggggcggcggcagcggaggcagcggcgcaggtaagcccaagaccggccacctgtgcctctactgtggcaagctgtactcgcgcaagtatgggctc

SEQ ID NO: 189288 - DNA, 120 bp, Artificial Sequence
  ENSG00000112238_17 (sequence is synthesized)
aagatccacatgcggacgcacacgggctacaagccactcaagtgcaaagtctgtctgcggcccttcggcgaccccagcaatctcaacaagcacatccggctgcacgccgagggcaatacg

SEQ ID NO: 189289 - DNA, 120 bp, Artificial Sequence
  ENSG00000112238_18 (sequence is synthesized)
ccctaccgctgcgagttctgcggcaaggtacttgtgcgccgccgggacctggagcgacatgtcaagtcccgccaccctggccagagtctgctcgccaaagcgggcgacggcccgggtgcc

SEQ ID NO: 189290 - DNA, 120 bp, Artificial Sequence
  ENSG00000112238_19 (sequence is synthesized)
gagcccggctatcccccggagcctggggatcccaagagcgacgacagtgacgtggacgtctgcttcacagacgaccagagcgaccccgaggttgggggcggcggggagcgcgacttgtaa

SEQ ID NO: 189291 - DNA, 120 bp, Artificial Sequence
  ENSG00000112238_20 (sequence is synthesized)
acaaaaccgtttttgtttttgagagggcgccagatttgaaacagtgagaggtcccacatctggtgctgaaactcagagcaacagttcagaggtggcgtaaatctggccacctggagagct

SEQ ID NO: 189292 - DNA, 120 bp, Artificial Sequence
  ENSG00000112238_21 (sequence is synthesized)
cgagtgccaccagtacctccgcaccccgggcctctggacttcttggatgagctcaccctgaaccgcccaggcggtctgctcttggtgttcagaatcacatcaatgcgaacgtcacagcgc

SEQ ID NO: 189293 - DNA, 120 bp, Artificial Sequence
  ENSG00000112238_22 (sequence is synthesized)
cttcgagggcgcagattttaactgccacgtatttttaagttgtacttttctgtggaggaaattgtgccttttgaaacgacgttttgtgtgtgtatttcacgttagcatttcattgcatag

SEQ ID NO: 189294 - DNA, 120 bp, Artificial Sequence
  ENSG00000112238_23 (sequence is synthesized)
gcaaaacactagtcacaattgggtagatgtgacatccatatacttgtttacattttatctgttctcatgtcaaagactactccttgccccattgaatatatagtggtagcaggtgtacaa

SEQ ID NO: 189295 - DNA, 120 bp, Artificial Sequence
  ENSG00000112238_24 (sequence is synthesized)
attggtcaagttgcaattatttatgagaaaataatgataaatgtaaaatatctaaagcatgaatctaagagcacgcaatatataattttaaagaaaatattctatttggtagaatacaaa

SEQ ID NO: 189296 - DNA, 120 bp, Artificial Sequence
  ENSG00000112238_25 (sequence is synthesized)
tgtggtgtgtgttgttttataatgactgctgtacagtgggtatagtattttggttttggttccagattgtgcaatctttaagaaaaataaagatacaaacgagagttttgttcacttagt

SEQ ID NO: 189297 - DNA, 120 bp, Artificial Sequence
  ENSG00000112242_0 (sequence is synthesized)
attcattgtcagcagcagcttcctggagccatttttcagctgccggccgcagcacccgggctgccgccgccgcctcgcaatccgttgcatcggccgcccccgacgcctccatccccgctt

SEQ ID NO: 189298 - DNA, 120 bp, Artificial Sequence
  ENSG00000112242_1 (sequence is synthesized)
ggggcccgatatccgtgcggccgggaccctcctctctccagagccccgattatttttggcccccggggcctgtgcggtgcggaaaaataaaaagaaaagagagagagggggctcggaagc

SEQ ID NO: 189299 - DNA, 120 bp, Artificial Sequence
  ENSG00000112242_2 (sequence is synthesized)
gccgggcggggaggagagaaggaggagagacttggaaactccgactgcaaataataaagaaattgaaaacaatacattaatataccataacactaaaaagagcaggagcgagagatgaga

SEQ ID NO: 189300 - DNA, 120 bp, Artificial Sequence
  ENSG00000112242_3 (sequence is synthesized)
aagggaatccagcccgctctggagcagtacctggtgaccgccgggggtggggagggggcggctgtcgtcgccgccgccgctgcagcctccatggacaaaagggcactgctagccagcccc

SEQ ID NO: 189301 - DNA, 120 bp, Artificial Sequence
  ENSG00000112242_4 (sequence is synthesized)
ggcttcgccgccgccgccgccgctgccgccgccccgggcgcgtacatccagatcctcaccacgaacacttccaccacctcctgttcctcctccctccaaagcggcgccgtagccgccggc

SEQ ID NO: 189302 - DNA, 120 bp, Artificial Sequence
  ENSG00000112242_5 (sequence is synthesized)
cccctcctccccagtgcccccggcgcggagcagaccgccggcagcctcctctacaccacgccgcacggaccctccagcagagccgggctgctgcagcagccaccagcgctgggacgcggc

SEQ ID NO: 189303 - DNA, 120 bp, Artificial Sequence
  ENSG00000112242_6 (sequence is synthesized)
ggcagcggcggcggcggcggccctccggcaaagcgaaggctggagctaggagaaagcggtcatcagtacctctcagatggtttaaaaacccccaagggcaaaggaagagctgcactacga

SEQ ID NO: 189304 - DNA, 120 bp, Artificial Sequence
  ENSG00000112242_7 (sequence is synthesized)
agtccagatagtccaaaaactccaaaatctccctcagaaaaaacgcggtatgatacgtctcttggtctgctcaccaagaagttcattcagctcctgagccagtcacccgatggggtattg

SEQ ID NO: 189305 - DNA, 120 bp, Artificial Sequence
  ENSG00000112242_8 (sequence is synthesized)
gatttgaacaaggcagcagaagtgctaaaagtgcaaaagagaaggatttatgatatcaccaacgttctggaaggcatccacctcattaagaagaagtctaaaaacaacgtccaatggatg

SEQ ID NO: 189306 - DNA, 120 bp, Artificial Sequence
  ENSG00000112242_9 (sequence is synthesized)
ggctgcagtctgtctgaggatgggggcatgctggcccagtgtcaaggcctgtcaaaagaagtgaccgagctcagtcaggaagagaagaaattagatgaactgatccaaagctgcaccctg

SEQ ID NO: 189307 - DNA, 120 bp, Artificial Sequence
  ENSG00000112242_10 (sequence is synthesized)
gacctcaaactgttaaccgaggattcagagaatcaaaggttagcttatgttacatatcaagatattcgaaaaattagtggccttaaagaccaaactgttatagttgtgaaagcccctcca

SEQ ID NO: 189308 - DNA, 120 bp, Artificial Sequence
  ENSG00000112242_11 (sequence is synthesized)
gaaacaagacttgaagtgcctgactcaatagagagcctacaaatacatttggcaagtacccaagggcccattgaggtttacttatgtccagaagagactgaaacacacagtccaatgaaa

SEQ ID NO: 189309 - DNA, 120 bp, Artificial Sequence
  ENSG00000112242_12 (sequence is synthesized)
acaaacaaccaagaccacaatgggaatatccctaaacccgcttccaaagacttggcttcaaccaactcaggacatagcgattgctcagtttctatgggaaacctttctcctctggcctcc

SEQ ID NO: 189310 - DNA, 120 bp, Artificial Sequence
  ENSG00000112242_13 (sequence is synthesized)
ccagccaacctcttacagcagactgaggaccaaattccttccaacctagaaggaccgtttgtgaacttactgcctcccctgctgcaagaggactatctcctgagcctcggggaggaggaa

SEQ ID NO: 189311 - DNA, 120 bp, Artificial Sequence
  ENSG00000112242_14 (sequence is synthesized)
ggcatcagcgatctcttcgatgcttacgatttggaaaagctcccactggtggaagacttcatgtgtagttgattatgcttcgtgtgaactctccttaaaaaccgatatttttttatcatg

SEQ ID NO: 189312 - DNA, 120 bp, Artificial Sequence
  ENSG00000112242_15 (sequence is synthesized)
gaaccagaacatctgtcatgcagtgttgtcccttcctaccttcttcctccaagagagtatcatgaagtaaactacaaacttcagaagaaagctgacattttaatgaattttttaaaaaat

SEQ ID NO: 189313 - DNA, 120 bp, Artificial Sequence
  ENSG00000112242_16 (sequence is synthesized)
taataaacaaattgtctaaacgcacagttgcaggctcccttgggaaagccctgctttgctccaggctccaagatctcctggctaagtcagcaagtgagaaaatgtgcaatcaggtgtctc

SEQ ID NO: 189314 - DNA, 120 bp, Artificial Sequence
  ENSG00000112242_17 (sequence is synthesized)
tcaccccgaattgtccttcctccttcctccccggattggcttgctgtgcctgacggatgggctgtagaatggggtctggccacctggcctgctgggaaacagcaatcttccttaatagca

SEQ ID NO: 189315 - DNA, 120 bp, Artificial Sequence
  ENSG00000112242_18 (sequence is synthesized)
tttcaagccgtgccttctccgcagaatgcatgtctttgaggtctgctaatatggaatggaactgcagcaaatgcaaacttgaagtcatgcaaaagtatgaaatggatttcttcagctctt

SEQ ID NO: 189316 - DNA, 120 bp, Artificial Sequence
  ENSG00000112242_19 (sequence is synthesized)
cttaggaatatttaaattactgtcataattcagtttaagctatgaactgtgtgtcccagtaggaggtcaagaaaacctccacagccttctggatgaagaacctgttttcaaatatacttg

SEQ ID NO: 189317 - DNA, 120 bp, Artificial Sequence
  ENSG00000112242_20 (sequence is synthesized)
ttgtagcaaatgcctacttagttctttgtggattgttctagacttttaatttttttagctgccatttaagcattcctgtggcacccatcaccatttcaatttaattgtttactttgaagc

SEQ ID NO: 189318 - DNA, 120 bp, Artificial Sequence
  ENSG00000112242_21 (sequence is synthesized)
ggtttttgcaaattcatattacttaagcagagggagagaacctctactgatcagagcatctaaacctgtgtgatctaaggtttatcagcctctgcaaggagctttgtcccatcgtgcttc

SEQ ID NO: 189319 - DNA, 120 bp, Artificial Sequence
  ENSG00000112242_22 (sequence is synthesized)
cattcccaggagggggagcttggagcgagtcagtcctggggcttgctgacatgggtggcccattggaaaggagaaccaggtcagatgatgtaacagccccaaggagcagcaggcatgggt

SEQ ID NO: 189320 - DNA, 120 bp, Artificial Sequence
  ENSG00000112242_23 (sequence is synthesized)
ccctccatccttgggcttcccgggcccctgtgacaggggaaagggctctcttacaccgcactcagggagaccacttctcaggatggggtcagatggagagacctctagggagaaagacat

SEQ ID NO: 189321 - DNA, 120 bp, Artificial Sequence
  ENSG00000112242_24 (sequence is synthesized)
ccccattgtgtgagtggcatttccttaagctggcaggaacagggagcagccctgtgtcgggggctggaatagttctggccagaccccgttccccttcctctatgaaggaataagttggac

SEQ ID NO: 189322 - DNA, 120 bp, Artificial Sequence
  ENSG00000112242_25 (sequence is synthesized)
caagggaagtcggggacgtaaaaaatgaagcaaaacaatgccagggtgtctcccgctttactcttcaggaatggtgtcccaagttggaggctttgtgtcagctgcaaatcctaccagtta

SEQ ID NO: 189323 - DNA, 120 bp, Artificial Sequence
  ENSG00000112242_26 (sequence is synthesized)
tgtccaagaatggctttccctcgggcaggtggcagcggccatctcccactgggaatatggcgtagtatctccggtccattccttggatgctaaggactgcgggaatgagggagtcagata

SEQ ID NO: 189324 - DNA, 120 bp, Artificial Sequence
  ENSG00000112242_27 (sequence is synthesized)
aagaacaaacctcgaaacgaacagttaaattgaaatgctatgtgcctgacccaatggtaggcacatagtaggcactcaactcatatgtttaattgaattgaaaatatcccttaggaaaaa

SEQ ID NO: 189325 - DNA, 120 bp, Artificial Sequence
  ENSG00000112242_28 (sequence is synthesized)
aaaaaaacacacaaaaaaccacaagagccccagccagtttactccaggtagatttccacaatatgcaaagtggtggtggggtcaagacagatgacaccagcactttaaactctttgtgtg

SEQ ID NO: 189326 - DNA, 120 bp, Artificial Sequence
  ENSG00000112242_29 (sequence is synthesized)
ggtatgcgtgggtgtatgtttgggaagaaaaacaaaggtgcagactatcttcctttttttcttcttcagcctccatccctggcctcctcccctcacacacactggacttggtacaaaatg

SEQ ID NO: 189327 - DNA, 120 bp, Artificial Sequence
  ENSG00000112242_30 (sequence is synthesized)
tcggtgtggtcctagatgaagcattggggtgggggagggagagggagctttgtgttaagtgcctactggaaatgcactgtggggttttttcctgtatgggaaaccatttatgccaagctt

SEQ ID NO: 189328 - DNA, 120 bp, Artificial Sequence
  ENSG00000112242_31 (sequence is synthesized)
ttccccatttcccatatttatctcatctggttagctgcctctgcttccagctttgtgtaattctctttgccagctgcacaaagctgattttttccaaagtctaaagactgagctcacctg

SEQ ID NO: 189329 - DNA, 120 bp, Artificial Sequence
  ENSG00000112242_32 (sequence is synthesized)
gctagattgttgtgtgttttgttgaattttttcataatgtaatgccgtatttattgtttttaaaatgaaaggaatactaataagtcttaaaagttccttcatgcataagatttttttcca

SEQ ID NO: 189330 - DNA, 120 bp, Artificial Sequence
  ENSG00000112242_33 (sequence is synthesized)
gttactgggtttaactggtgtacattaattagatgtccatactgtattttgtttgcattaagtaattttctttttgacttagtatccggcacacaaagtgggttagtactacagtatttg

SEQ ID NO: 189331 - DNA, 120 bp, Artificial Sequence
  ENSG00000112242_34 (sequence is synthesized)
cgttactttaagtactaagtatgcaggtttcctggtaccattgagttgctgctattaaagctcacacacgaaatggctaaaagttacaagtgtgcaaattatgactgcgtgagccttaga

SEQ ID NO: 189332 - DNA, 120 bp, Artificial Sequence
  ENSG00000112242_35 (sequence is synthesized)
aaataaaatgtataaagggcaacacatgagctgtcaaacagtgttaggagtgtgtttatatgtacagagttgtgcatagcaatcgttttatttaagttgatatgtagtctactcacattt

SEQ ID NO: 189333 - DNA, 120 bp, Artificial Sequence
  ENSG00000112242_36 (sequence is synthesized)
tcattatttagcaattttgtacaaaaatagcaattaatttgtaaacactgccagaatactttctagctgctttgtaattttttaagagtgttattttgtttttgtttttctgttctttgt

SEQ ID NO: 189334 - DNA, 120 bp, Artificial Sequence
  ENSG00000112242_37 (sequence is synthesized)
tgtggctcttgttttcatttttgttgtacgtgtagatctgtaaataaaattgcagtatttaaagcttaagctttcaggaaaaagaaaataagaattcagtgtgtgcatgacaactcgtgt

SEQ ID NO: 189335 - DNA, 120 bp, Artificial Sequence
  ENSG00000112242_38 (sequence is synthesized)
gtatgagaaggagggatatgaaggaagatggcttgcagagtaagtcgggtggcaattgtcagggtgtgggaatttcttttcctacggggtacgtgattttgtaaaaaggaagtatttctc

SEQ ID NO: 189336 - DNA, 120 bp, Artificial Sequence
  ENSG00000112242_39 (sequence is synthesized)
ccaaaattgggagtaggcaaactactaatcagtttagctttgtgttgtatgctagtttaaaaaagaaaatatgtaatataatgtaaaaaaaaacaaaaaaaagcttttatgatggatttt

SEQ ID NO: 189337 - DNA, 120 bp, Artificial Sequence
  ENSG00000112242_40 (sequence is synthesized)
gtaaatagatttgttacagggtgacctgttctctagctgtgatcttaccacttcaaatgggtgtaatttgaataaattttgtatggtaaaggatcaataaaatgattttttttaagagtt

SEQ ID NO: 189338 - DNA, 120 bp, Artificial Sequence
  ENSG00000112242_41 (sequence is synthesized)
ccaccggcgcccgccctcgccctgcgccgccggtctgttcggccctccgggccccctctccagccggccccccacctccccccggagccaggctggtttcggaaatgcccttacagcagc

SEQ ID NO: 189339 - DNA, 120 bp, Artificial Sequence
  ENSG00000112242_42 (sequence is synthesized)
caggctggtttcggaaatgcccttacagcagcaggcaaagcgaaggctggagctaggagaaagcggtcatcagtacctctcagatggtttaaaaacccccaagggcaaaggaagagctgc

SEQ ID NO: 189340 - DNA, 120 bp, Artificial Sequence
  ENSG00000112245_0 (sequence is synthesized)
gagattactgccaggcacagcacgacctctatgcagacaagtgaactgtagaaactgattactgctccaccaagaagcccccataagagtggttatcctggacacagaagtgttgaattg

SEQ ID NO: 189341 - DNA, 120 bp, Artificial Sequence
  ENSG00000112245_1 (sequence is synthesized)
aaatccacagagcattttacaagagttctgacctggatggggtaaacctcagtgcacttcttttctgttggcctcagtattactggattgaagaattgctgcttcttgttaggaggttca

SEQ ID NO: 189342 - DNA, 120 bp, Artificial Sequence
  ENSG00000112245_2 (sequence is synthesized)
tttcacttatcattacttacaacttcatactcaaagcactgagaatttcaagtggagtatattgaagtagacttcagtttctttgcatcatttctgtattcaatttttttaattatttca

SEQ ID NO: 189343 - DNA, 120 bp, Artificial Sequence
  ENSG00000112245_3 (sequence is synthesized)
taaccctattgagtgttttttaactaaattaacatggctcgaatgaaccgcccagctcctgtggaagtcacatacaagaacatgagatttcttattacacacaatccaaccaatgcgacc

SEQ ID NO: 189344 - DNA, 120 bp, Artificial Sequence
  ENSG00000112245_4 (sequence is synthesized)
ttaaacaaatttatagaggaacttaagaagtatggagttaccacaatagtaagagtatgtgaagcaacttatgacactactcttgtggagaaagaaggtatccatgttcttgattggcct

SEQ ID NO: 189345 - DNA, 120 bp, Artificial Sequence
  ENSG00000112245_5 (sequence is synthesized)
tttgatgatggtgcaccaccatccaaccagattgttgatgactggttaagtcttgtgaaaattaagtttcgtgaagaacctggttgttgtattgctgttcattgcgttgcaggccttggg

SEQ ID NO: 189346 - DNA, 120 bp, Artificial Sequence
  ENSG00000112245_6 (sequence is synthesized)
agagctccagtacttgttgccctagcattaattgaaggtggaatgaaatacgaagatgcagtacaattcataagacaaaagcggcgtggagcttttaacagcaagcaacttctgtatttg

SEQ ID NO: 189347 - DNA, 120 bp, Artificial Sequence
  ENSG00000112245_7 (sequence is synthesized)
gagaagtatcgtcctaaaatgcggctgcgtttcaaagattccaacggtcatagaaacaactgttgcattcaataaaattggggtgcctaatgctactggaagtggaacttgagatagggc

SEQ ID NO: 189348 - DNA, 120 bp, Artificial Sequence
  ENSG00000112245_8 (sequence is synthesized)
ctaatttgttatacatattagccaacatgttggcttagtaagtctaatgaagcttccataggagtattgaaaggcagttttaccaggcctcaagctagacagatttggcaacctctgtat

SEQ ID NO: 189349 - DNA, 120 bp, Artificial Sequence
  ENSG00000112245_9 (sequence is synthesized)
tgctgtcagcatataaaatgtgcttgtcatttgtatcaattgacctttccccaaatcatgcagtattgagttatgacttgttaaatctattcccatgccagaatcttatcaatacataag

SEQ ID NO: 189350 - DNA, 120 bp, Artificial Sequence
  ENSG00000112245_10 (sequence is synthesized)
aaatttaggaagattaggtgccaaaatacccagcacaatacttgtatatttttagtaccatacagaagtaaaatcccaggaactatgaacactagaccttatgtggtttattccttcaat

SEQ ID NO: 189351 - DNA, 120 bp, Artificial Sequence
  ENSG00000112245_11 (sequence is synthesized)
catttcaaacattgaaagtagggcctacatggttatttgcctgctcactttatgtttacatctcccacattcataccaatatacgtcaggtttgcttaaccattgatttttttttttttt

SEQ ID NO: 189352 - DNA, 120 bp, Artificial Sequence
  ENSG00000112245_12 (sequence is synthesized)
taccaagtcttacagtgattattttacgtgtttccatgtatctcactttgtgctgtattaaaaaaacctccattttgaaaatctacgttgtacagaagcacatgtctttaatgtcttcag

SEQ ID NO: 189353 - DNA, 120 bp, Artificial Sequence
  ENSG00000112245_13 (sequence is synthesized)
acaaaaaagccttacattaatttaatgtttgcactctgaggtgcaacttaacagggagggcctgagaaaagaatgggagggggctattaattatttttagcaaaatgttgcctttgtctt

SEQ ID NO: 189354 - DNA, 120 bp, Artificial Sequence
  ENSG00000112245_14 (sequence is synthesized)
gtgcaaacatgtagaatatgctctttaatttagtaaaatatttttttaaaaggtagagatgctttgttattgtaatcataaacttcctgaaattcttgtaatttttttcccatacttatc

SEQ ID NO: 189355 - DNA, 120 bp, Artificial Sequence
  ENSG00000112245_15 (sequence is synthesized)
agaagtgtgtttaccaacttatttttgtttgaaagtgtgattttttttttccttcccaacctctcttgcaaaaaaagaaatgggtttctgctaatgaattgagcagacatctaatatttt

SEQ ID NO: 189356 - DNA, 120 bp, Artificial Sequence
  ENSG00000112245_16 (sequence is synthesized)
atatgccttttgagctgtgtaacttaatatttggatacttgacaatttgttttattatgtaattgataaaatggtgatgtgtattaatgttagttcaaccatatatttatactgtctggg

SEQ ID NO: 189357 - DNA, 120 bp, Artificial Sequence
  ENSG00000112245_17 (sequence is synthesized)
gatgtgtggttatagttctgtgggagaaataattttgtcagtgttcaccagcttgtaaaaacttagtgcgagagctgaaacatctaaataaataatgacatgcatttatcatcattgaga

SEQ ID NO: 189358 - DNA, 120 bp, Artificial Sequence
  ENSG00000112245_18 (sequence is synthesized)
aggacttgagttgccttgtctggtatccttatgcagaatgaactgaaataatcatcaatctgaaaagctactcttaaacagagacttgcttcaacaccaggaagaacatgaaagggtgac

SEQ ID NO: 189359 - DNA, 120 bp, Artificial Sequence
  ENSG00000112245_19 (sequence is synthesized)
tcataattcccagcagcagtgccagttcatgtgctgggattctgaccacaagcctaacaatcaggtcagggagtcagatttctgttggatttagaaaagcatctatgtgtttatgaaaga

SEQ ID NO: 189360 - DNA, 120 bp, Artificial Sequence
  ENSG00000112245_20 (sequence is synthesized)
aacccactggatttttaatagttctgcagctcttggaggctctacatctaccctttctccccagccaagagcatggctatgggagaaggaaggcaggcagcaggcagattttccacagtt

SEQ ID NO: 189361 - DNA, 120 bp, Artificial Sequence
  ENSG00000112245_21 (sequence is synthesized)
tagcttctggattcatacctctcaaatcttgaatctcctctatgctcacatactaccagtaccagccacaggacctgctcatggctgcatacatcctatgtatgggtcagcacagcacag

SEQ ID NO: 189362 - DNA, 120 bp, Artificial Sequence
  ENSG00000112245_22 (sequence is synthesized)
tagtaaacttttagacaaaatttgttagggtcattcatgaaaactttaatactaaaagcactttccattatatactttttaaaggtctagataattttgaaccaatttattattgtgtac

SEQ ID NO: 189363 - DNA, 120 bp, Artificial Sequence
  ENSG00000112245_23 (sequence is synthesized)
tgaggagaaataatgtatagtagaggacagccttggtttgtaaagctcagttccactagttcatggttttgtgcaacttctgagcctcagttttctcctttgcaaattaataattacata

SEQ ID NO: 189364 - DNA, 120 bp, Artificial Sequence
  ENSG00000112245_24 (sequence is synthesized)
cctttatagattttgaaattaatttaaatattagtatttggtacatgaaggcttaatgttaagtttcctttaatgatccacaataatccctttgatcacgttaatctaaatctagatgtc

SEQ ID NO: 189365 - DNA, 120 bp, Artificial Sequence
  ENSG00000112245_25 (sequence is synthesized)
tttgtctaattttttttgaatagcagttataaatgtaaaggactcaaagtttaagtaaaaagtgatactccaccttgtgtttcaaagaatttagttccacctcttcataccagtttaaca

SEQ ID NO: 189366 - DNA, 120 bp, Artificial Sequence
  ENSG00000112245_26 (sequence is synthesized)
cttaatatatttcattggattttagacagggcaaaaggaagaacaggggcctctggaggcccttggttatttaaatcttggattatttgtgatagtaatcacaaatttttggctaatttt

SEQ ID NO: 189367 - DNA, 120 bp, Artificial Sequence
  ENSG00000112245_27 (sequence is synthesized)
taacctgaggttttgttttttttttaaaggaaatgcagcctagtcttgagaacataattttatataatcaattactaaatgttaaactattaccacacagcccataaaacagcatttgcg

SEQ ID NO: 189368 - DNA, 120 bp, Artificial Sequence
  ENSG00000112245_28 (sequence is synthesized)
tttattgagagagaggatgtgccatcatgattaatgaaaactatcttttgagtttgaaaagaaattaatttgcagtgtttggattgtatatatggtgctaaaaataaattaatttacttt

SEQ ID NO: 189369 - DNA, 120 bp, Artificial Sequence
  ENSG00000112245_29 (sequence is synthesized)
ataaaccttatctgtacattatacgatgtgatgaaatttgctttttatccaaatattttgtatcttgtaaatatggctaattataggaatgcctataatacatcttagattccttatatc

SEQ ID NO: 189370 - DNA, 120 bp, Artificial Sequence
  ENSG00000112245_30 (sequence is synthesized)
taataagagttcaaagagttatgagttgaagtcttgaatgcaggaaactatctgatagtgttctaaaatttggttacttgggtttggatacccttagtgggatgatgtaaatagaggcta

SEQ ID NO: 189371 - DNA, 120 bp, Artificial Sequence
  ENSG00000112245_31 (sequence is synthesized)
gctacctaggcttgtctatagcaaccataatgttgatgtaagtaatgcggttactgaatcataagaaaatgccatctctttttagttgaaggaaaactctggaagtaggtgccattggtc

SEQ ID NO: 189372 - DNA, 120 bp, Artificial Sequence
  ENSG00000112245_32 (sequence is synthesized)
attctgcagtgcactgcaaccattgtttcccctagtgccctcttttccctagggcattgctctcctattcccacgccttaacacagctctatacctagaagcagccagcccaggcatgca

SEQ ID NO: 189373 - DNA, 120 bp, Artificial Sequence
  ENSG00000112245_33 (sequence is synthesized)
gtcacatttaatcacatcccccttctagagtgcttcaaaatgatgtagtccctcaacttggctaaagaatctcaatctcttgaaatttatttttttaatgtcatattcatctggtaaata

SEQ ID NO: 189374 - DNA, 120 bp, Artificial Sequence
  ENSG00000112245_34 (sequence is synthesized)
tctactgtttgccaggcatttaagaatatggcaaagaacataaaagatggtgtcaccagattttggtcaccaatgagtacccgacccgttgccatgattaagagagaatgctttctattg

SEQ ID NO: 189375 - DNA, 120 bp, Artificial Sequence
  ENSG00000112245_35 (sequence is synthesized)
gagtttcaggaaatataatttgagaatactttaaagggaagtggaagtataagtgaatgatatttttcttttacatgtaaacaatgaagttatttcaaagttaagttttaaacaaaatac

SEQ ID NO: 189376 - DNA, 120 bp, Artificial Sequence
  ENSG00000112245_36 (sequence is synthesized)
atgaagtagtgtctgccatacatgttaatattctacattcttgcttccttaaattaatatgtttgtgtgtatatatgtgcctcacacctgaattgaaaattaaagactggtttaaaagtg

SEQ ID NO: 189377 - DNA, 120 bp, Artificial Sequence
  ENSG00000112245_37 (sequence is synthesized)
acaattgagccaactgcagttgcacgcgtacgtagtatagagaggtgtgatcaaaaaaagaatatagggagcatagggcttcgtctgcatcaaaagatactctccccatcttctatagcc

SEQ ID NO: 189378 - DNA, 120 bp, Artificial Sequence
  ENSG00000112245_38 (sequence is synthesized)
agaaagcggcgtggagcttttaacagcaagcaacttctgtatttggagaagtatcgtcctaaaatgcggctgcgtttcaaagattccaacggtcatagaaacaactgttgcattcaataa

SEQ ID NO: 189379 - DNA, 120 bp, Artificial Sequence
  ENSG00000112245_39 (sequence is synthesized)
actgcggagccggatacggggagggcgcggcggtggcgggttcgcctccagatccgggcgggcgtggggtaggccggacagccaggcacgggtggtaacgatctggttccagagcttctc

SEQ ID NO: 189380 - DNA, 120 bp, Artificial Sequence
  ENSG00000112245_40 (sequence is synthesized)
ggagctccggggtgggcgcgggacagccactgggtgcagctacactcttgtgctcgacggccgggacccgagcctcagacaaaatggcctcggcgcccgcgcctgactgaaggcgcggcg

SEQ ID NO: 189381 - DNA, 120 bp, Artificial Sequence
  ENSG00000112245_41 (sequence is synthesized)
gcgtgctcgggcgcacacagccgcgtgcgcggggcggcggccctctggggcattccgcgagctgcacccctgcccgggccagagtggggttctgctagcaattctgtggtgttcttggtc

SEQ ID NO: 189382 - DNA, 120 bp, Artificial Sequence
  ENSG00000112245_42 (sequence is synthesized)
ctctctttctggagtataaaaggagttgtgagaggcttgggtcaccatttggtgagctgagggtgaagctacaaaggttgaagcgttcttcagacgactctacctgagggtgaagctaca

SEQ ID NO: 189383 - DNA, 120 bp, Artificial Sequence
  ENSG00000112246_0 (sequence is synthesized)
cccgaattttcaaagaacatattttccgttcacccccgctggtcttttactgccatcaatacactgttcttggtgcaaatacttcagcctctttattcaaagtatgttttatgtttttgc

SEQ ID NO: 189384 - DNA, 120 bp, Artificial Sequence
  ENSG00000112246_1 (sequence is synthesized)
caaatatgatctctaattgaaagtttatttttggttttggatgaatctgcggagcttaagttgtgagaagaaagggggaacaagacacaatgaaagaaaagtccaaaaatgctgcgcgga

SEQ ID NO: 189385 - DNA, 120 bp, Artificial Sequence
  ENSG00000112246_2 (sequence is synthesized)
ctaggagggagaaggaaaacagtgaattttatgaactggctaaattactgcctttgccctcggctatcacctcgcagctggacaaagcatccataatcagactcacgaccagctatctca

SEQ ID NO: 189386 - DNA, 120 bp, Artificial Sequence
  ENSG00000112246_3 (sequence is synthesized)
aaatgagagtggtgttcccagaagggctcggcgaggcgtggggccactcaagtcggaccagccccctggacaacgttggccgagaactgggctcccatctgctccagaccctggatggct

SEQ ID NO: 189387 - DNA, 120 bp, Artificial Sequence
  ENSG00000112246_4 (sequence is synthesized)
tcatcttcgtggtagccccagatgggaagatcatgtacatctcagagacagcctcagtccacttgggtctttctcaggtagagctgaccggaaacagcatttatgaatacattcacccgg

SEQ ID NO: 189388 - DNA, 120 bp, Artificial Sequence
  ENSG00000112246_5 (sequence is synthesized)
cagaccacgacgagatgacggcggtgctcaccgcccatcaaccctaccactctcacttcgtgcaggagtatgagatcgagcgctccttcttcctgaggatgaagtgcgtcttggccaagc

SEQ ID NO: 189389 - DNA, 120 bp, Artificial Sequence
  ENSG00000112246_6 (sequence is synthesized)
gtaacgccggcctcacctgtggcggctacaaggtcatccactgcagcggctacttgaagatccgccagtacagcctggacatgtcccccttcgacggctgctaccaaaacgtgggcctgg

SEQ ID NO: 189390 - DNA, 120 bp, Artificial Sequence
  ENSG00000112246_7 (sequence is synthesized)
tggccgtgggccactcgctgcctcccagcgccgtcacggagatcaagctacacagcaatatgtttatgttccgcgccagcctggacatgaagctcatctttctggactccagggtggcgg

SEQ ID NO: 189391 - DNA, 120 bp, Artificial Sequence
  ENSG00000112246_8 (sequence is synthesized)
agctgacggggtacgaacctcaggacctgattgagaagactctgtaccaccatgtgcacggctgcgacaccttccacctgcgctgcgcgcaccatttgctgctggtgaagggacaggtga

SEQ ID NO: 189392 - DNA, 120 bp, Artificial Sequence
  ENSG00000112246_9 (sequence is synthesized)
ccaccaagtactacaggttcctggcgaaacacggcggctgggtatgggtgcagagctacgcgaccatcgtgcacaacagtcgctcctccaggccacactgtatcgtcagcgtcaactatg

SEQ ID NO: 189393 - DNA, 120 bp, Artificial Sequence
  ENSG00000112246_10 (sequence is synthesized)
tcctcacagacacagaatacaaagggctgcagctctccctggatcagatctcagcctccaaaccagccttctcctataccagcagctccacccccaccatgactgacaacagaaaggggg

SEQ ID NO: 189394 - DNA, 120 bp, Artificial Sequence
  ENSG00000112246_11 (sequence is synthesized)
ccaaatcccggctctccagctcaaagtcaaaatccaggacttccccataccctcagtattcgggatttcacacagaaagatcggaatctgatcatgacagccagtggggcggaagtccct

SEQ ID NO: 189395 - DNA, 120 bp, Artificial Sequence
  ENSG00000112246_12 (sequence is synthesized)
tgaccgacacggcctctccgcagcttctggaccccgccgataggcctggctcccagcacgacgcatcgtgcgcctacagacagttttcggaccgcagctctctctgctatggctttgcgc

SEQ ID NO: 189396 - DNA, 120 bp, Artificial Sequence
  ENSG00000112246_13 (sequence is synthesized)
ttgaccactcgaggctggtggaagagaggcatttccatacccaggcctgtgaaggaggccgatgtgaggcaggcaggtacttcctgggaacgccgcaggccgggagggagccctggtggg

SEQ ID NO: 189397 - DNA, 120 bp, Artificial Sequence
  ENSG00000112246_14 (sequence is synthesized)
gctctcgcgcagccttgcccctgacaaaggcctccccagaaagcagagaagcctatgaaaacagcatgcctcacatcgcttcagtccacaggatccatgggcgaggtcattgggatgaag

SEQ ID NO: 189398 - DNA, 120 bp, Artificial Sequence
  ENSG00000112246_15 (sequence is synthesized)
atagtgtggtcagttctccagaccctgggtcggccagtgaatcaggtgaccgatatcgtactgagcagtatcaaagtagcccacatgaacccagcaaaattgaaactcttataagagcca

SEQ ID NO: 189399 - DNA, 120 bp, Artificial Sequence
  ENSG00000112246_16 (sequence is synthesized)
taaggaaagccccctcagaccaactggcttccattaatggggctgggaaaaaacactccctgtgttttgcaaactaccaacagcccccaccaacaggtgaagtctgccatggctctgctc

SEQ ID NO: 189400 - DNA, 120 bp, Artificial Sequence
  ENSG00000112246_17 (sequence is synthesized)
ttgccaacacttcaccatgtgaccatatccagcagagagagggaaaaatgttgagcccccatgaaaatgactatgacaacagtcccaccgcactatctcggataagtagtcccaattcgg

SEQ ID NO: 189401 - DNA, 120 bp, Artificial Sequence
  ENSG00000112246_18 (sequence is synthesized)
atcgcatttcaaaatccagtttgatcctagctaaagactatctgcattcggatatatctcctcatcagacagcaggagaccaccctactgtctctccaaactgctttggctctcaccggc

SEQ ID NO: 189402 - DNA, 120 bp, Artificial Sequence
  ENSG00000112246_19 (sequence is synthesized)
agtattttgacaagcatgcttacacattaactggatatgccctggagcacttatatgacagcgaaaccattagaaactattccttgggctgtaatggctcacactttgatgtaacttccc

SEQ ID NO: 189403 - DNA, 120 bp, Artificial Sequence
  ENSG00000112246_20 (sequence is synthesized)
atctgaggatgcaaccagacccagcacaaggacacaagggaacatctgttataataaccaacggaagctgatgttttgctgaaatattttgttctttaaggatctctgaaacatatttat

SEQ ID NO: 189404 - DNA, 120 bp, Artificial Sequence
  ENSG00000112246_21 (sequence is synthesized)
agtttaataccccattaccagcatttactatgccacagattgttagagagtataacttaagttactgggtatttgatacgtgttcctataaaatcaaagaaaacatagcactagcattca

SEQ ID NO: 189405 - DNA, 120 bp, Artificial Sequence
  ENSG00000112246_22 (sequence is synthesized)
gggttatacacagaaaagggagctaaattgaatacacaaatttcccctctaattatatgggaaccagaatagataaattttgacttgaaaaatattcatgtagatcaagtgtgcatatat

SEQ ID NO: 189406 - DNA, 120 bp, Artificial Sequence
  ENSG00000112246_23 (sequence is synthesized)
actacatgagaggactgatgaatgacaacattgcattgtgactatccagtgatcctcaaacacacaaactattacttacaaactgcggtatacattttacatatggaaatataggctatg

SEQ ID NO: 189407 - DNA, 120 bp, Artificial Sequence
  ENSG00000112246_24 (sequence is synthesized)
taatgtaaatacatcaaaaatgggtaattttctttgactctgtcacactaaacttcttaacgaaatttccattcccaaaataactgagaaagagagagatacatcttataaactgacttc

SEQ ID NO: 189408 - DNA, 120 bp, Artificial Sequence
  ENSG00000112246_25 (sequence is synthesized)
tttgtggtttcaaatcagccagctcatttggttcaggcataaattagagaaatggttctggatatggtgcaaaaatgagttttcacctggtatccattataaacaatcaggaagaggtaa

SEQ ID NO: 189409 - DNA, 120 bp, Artificial Sequence
  ENSG00000112246_26 (sequence is synthesized)
tttttcaccttgcttttcagttagacaaggaccaggattgcactgacatggcgctgagggtttttctaagtaagaacactgagatattgggacacacatcaaaaacctggagtgctcaat

SEQ ID NO: 189410 - DNA, 120 bp, Artificial Sequence
  ENSG00000112246_27 (sequence is synthesized)
tggaagtagttctatgaatatggaaaggccagaggcagagtgaaataaaatgctatctcaaagtttaacacaatttaagggctcagcataagtaaacaacatatttggggtttgcttgta

SEQ ID NO: 189411 - DNA, 120 bp, Artificial Sequence
  ENSG00000112246_28 (sequence is synthesized)
aaaccaactaaataaaaaattcaaaccaattcacccagaaaaaagaccaataggtgcaaaaataaaaggaaaaccagtgaagtgccacatgacagcagtgttaagtgtttgaaaacgttt

SEQ ID NO: 189412 - DNA, 120 bp, Artificial Sequence
  ENSG00000112246_29 (sequence is synthesized)
caaagcacatatgtgccaatgtgacaacatgtggaaagcctcaggagagagtctaagataaaagcttaggctgatagacaagtagttaagagctaagagcagtactctgaaggaataggc

SEQ ID NO: 189413 - DNA, 120 bp, Artificial Sequence
  ENSG00000112246_30 (sequence is synthesized)
aaaatgtttattttccttattgtttgtaaacaacaaacttggtcttacatctgtgtggtatagtagaaaggccagctgactagatctctggattctaattttggccctacctgtaactta

SEQ ID NO: 189414 - DNA, 120 bp, Artificial Sequence
  ENSG00000112246_31 (sequence is synthesized)
attttgtgaccacagttgtaccattcaccgtgcctgggctctagtttcctggtttgtaaggcagccccagcgttcatgttctgtgatagagcagaactgaacttattacctaattaactc

SEQ ID NO: 189415 - DNA, 120 bp, Artificial Sequence
  ENSG00000112246_32 (sequence is synthesized)
tctgctatgagttgtcaagactgatcattctgttttttctgtacacagaagtttagatgctttgtgacttaagcaggtgtgtgggctcctttaggcaggttacagttaactttctagatt

SEQ ID NO: 189416 - DNA, 120 bp, Artificial Sequence
  ENSG00000112246_33 (sequence is synthesized)
aaacccttaagctataaagaagttacggggggcagttttcggcttccaattaggaataatagtgaactggcttcgtagcaactacggaggaccaggattctaaaatcacctcactcgtcc

SEQ ID NO: 189417 - DNA, 120 bp, Artificial Sequence
  ENSG00000112246_34 (sequence is synthesized)
caaagcttgcatcctcctctttctgccacgcacccctcctccaattcatgatccagaaaagggagccgggaatgctctgctcctctctgccggtgggaagcggagaggccggcggtgtcg

SEQ ID NO: 189418 - DNA, 120 bp, Artificial Sequence
  ENSG00000112246_35 (sequence is synthesized)
ctgggttggacggtaggcatgagaacagttaagagatgggcgcccccgaaacctctgccgcttgtggggactgaagggccttgaaagagttgtctggggttcctgctcttcccaaagggg

SEQ ID NO: 189419 - DNA, 120 bp, Artificial Sequence
  ENSG00000112246_36 (sequence is synthesized)
ctcggagataccttaaatgccgcgagactgaagagcaaacgtcagggattattatgtcgattttccgaggaccagggttcgcagctggcagtagaagaaaaggctggctcctcaggggtc

SEQ ID NO: 189420 - DNA, 120 bp, Artificial Sequence
  ENSG00000112246_37 (sequence is synthesized)
gtagaaatttatgacagagaagaaaaatagcaagatttatttaatgctctattctctagtaattaaagcaaaatgatataagtgattagagagatttcatagataatatttcctaggagt

SEQ ID NO: 189421 - DNA, 120 bp, Artificial Sequence
  ENSG00000112246_38 (sequence is synthesized)
cccgtgcccaaaactcttgccatatttaaggaagggaatgtactggcagaacttgacttacaattttggaaacagaacatgaaattgaatactcagggattagtagtatattttcatcat

SEQ ID NO: 189422 - DNA, 120 bp, Artificial Sequence
  ENSG00000112246_39 (sequence is synthesized)
ttaacacagttatttcacagtccataggtaggtgacaatctgaacgataatatgaaagatgagtactgggttgtttgtatatgaaaggagaggctacataaaattaaataatgttaacat

SEQ ID NO: 189423 - DNA, 120 bp, Artificial Sequence
  ENSG00000112246_40 (sequence is synthesized)
ttgtgctgtaaatgcaaaaaagtgcaagtaagtgagaaagttagtggttatatatattttcaaaaaattcaaagtgcagttgacccttgaataacatgggtttgaactgtgcagattcac

SEQ ID NO: 189424 - DNA, 120 bp, Artificial Sequence
  ENSG00000112246_41 (sequence is synthesized)
ttatgtgtggttttttttccaatcaaatgcagataaaaaacccagtatttggagaaatgtgaaacctgagtatacagagggcgatgttttgtataagtgagcgccacagggccaacaggc

SEQ ID NO: 189425 - DNA, 120 bp, Artificial Sequence
  ENSG00000112246_42 (sequence is synthesized)
aggacttgagtatgtgagaatttgattatatgggggtaatcctggaaccaactccctgtttataccaaggggtgaccatacaataaaaactaagttttgaattatacaaaaaagagtatt

SEQ ID NO: 189426 - DNA, 120 bp, Artificial Sequence
  ENSG00000112246_43 (sequence is synthesized)
tagtaattttgagaaaattatttatgagaaatcctggaatacataaaatggagttttgatcaatttgcaacatgaagtaatgtcttaagaatgctaaaggttttgtagaattctgtagat

SEQ ID NO: 189427 - DNA, 120 bp, Artificial Sequence
  ENSG00000112246_44 (sequence is synthesized)
tgatagatgtttggaagaaaaaatatttgatgaatatggtgtattttggaaaggtaattttcacagatgggtatttctggtggctatatattctaccaaatgtgccagggacagaagcta

SEQ ID NO: 189428 - DNA, 120 bp, Artificial Sequence
  ENSG00000112246_45 (sequence is synthesized)
aaagaaatggaaacttaagaaccagggaaaatgaactgatattaaagaaaaggctgtcactaaaggaatttcagtggaatttttatatggaagatagttaactggtgagaagaagaaatt

SEQ ID NO: 189429 - DNA, 120 bp, Artificial Sequence
  ENSG00000112246_46 (sequence is synthesized)
atgaatttcacagatgagagtaatcagaaggaataatgctctttaaaatgacatgaccaatatttttaagagaatacagaattaactaaattatatattgattcaaaattttggtagatt

SEQ ID NO: 189430 - DNA, 120 bp, Artificial Sequence
  ENSG00000112246_47 (sequence is synthesized)
gacccagttttaagtacataaccattttaaaatttactgaatgtcaataattttatagtagcagttttattacattacataaaatgtcatattgactcactatattgtatagcttacatt

SEQ ID NO: 189431 - DNA, 120 bp, Artificial Sequence
  ENSG00000112246_48 (sequence is synthesized)
ttttgcaatatggcatgattatcacaaaatgacccaaggtaagttaagacatttgatgacaatgtactttcttaatatacatgtgaatgtgttaaaatgtgtttataatctacattattt

SEQ ID NO: 189432 - DNA, 120 bp, Artificial Sequence
  ENSG00000112246_49 (sequence is synthesized)
tgttctgtgcagcaacatatttcctcataatgaagatgtcatctgtgtcttttaaaaatagtatataaaataactacgttcccgataatttaatcagttaaacttaatatggctttagtt

SEQ ID NO: 189433 - DNA, 120 bp, Artificial Sequence
  ENSG00000112246_50 (sequence is synthesized)
ttaattcttgatttccataactttgccaaatgttgagaaacatgaaacttgattgaaatagatacagaagtatgattttcatatcaccttggggatacataaaaatgtgctctatccaat

SEQ ID NO: 189434 - DNA, 120 bp, Artificial Sequence
  ENSG00000112246_51 (sequence is synthesized)
tactggtataatatgtatcaattcattagatgatacatagctcatggttttgtagaattctggtttctagtgataataagtatctttattgcccatttcacctgccatacctactttaaa

SEQ ID NO: 189435 - DNA, 120 bp, Artificial Sequence
  ENSG00000112246_52 (sequence is synthesized)
aatttggatgaccaaagaagtgaatgaagtttccccaatctttcttgggaaaattctgtttaaattgttattgggaatatatagatttgatgtgttattttgggatgtgtaatattaatg

SEQ ID NO: 189436 - DNA, 120 bp, Artificial Sequence
  ENSG00000112246_53 (sequence is synthesized)
tcacaatcactacaggtcagatatttaggtgtgcttcggtccacaagtcttttgtcatattgtgctcgcttacctaaactgtaattgcctgataaaagataatatgacagtgctgaggtg

SEQ ID NO: 189437 - DNA, 120 bp, Artificial Sequence
  ENSG00000112246_54 (sequence is synthesized)
acattcaaaatgagacgggatgcaataaatgattgccttcagtatttacacagaaaaaccacttgctctttcttggttatatttcatagggctagattgtttccatcgggcactattctt

SEQ ID NO: 189438 - DNA, 120 bp, Artificial Sequence
  ENSG00000112246_55 (sequence is synthesized)
aattcactctataccgtgttgtcacatgctgcctctgggcagagaatcccacttaaaataagctttaggggatcttctagaaaagggtagtgtgctccaatttttatttctccttcttat

SEQ ID NO: 189439 - DNA, 120 bp, Artificial Sequence
  ENSG00000112246_56 (sequence is synthesized)
gggggatgaggatcaattatagtacaagaccatttggaaaatatgcatatatattttaaaatgaaatacaagatttccgccctcaagatctaaaccaagtaagtttgatggatggcagca

SEQ ID NO: 189440 - DNA, 120 bp, Artificial Sequence
  ENSG00000112246_57 (sequence is synthesized)
cagataaagaaatcttctgaatacacatttgatttttatagctctctctttcaagagtaggatattactaagatattcagtgcaatctatcagtcctagtagtatttagaagtgacagag

SEQ ID NO: 189441 - DNA, 120 bp, Artificial Sequence
  ENSG00000112246_58 (sequence is synthesized)
tgaatgctgatatttggaaaattgagcatttgaccattttggggtcactcacctggcctagtggaatagcttacactttaatacaatcaaacacagtctttctgatataaaatgtttgaa

SEQ ID NO: 189442 - DNA, 120 bp, Artificial Sequence
  ENSG00000112246_59 (sequence is synthesized)
tgcccagatttggttccctagttcactcaaatcatagatgttgacatacatcctgttttcataatgattttaaaaagaatgtaaatcctatggtcctccaaataaatgattcaacgttta

SEQ ID NO: 189443 - DNA, 120 bp, Artificial Sequence
  ENSG00000112246_60 (sequence is synthesized)
tgtaaatgtcaagtttttgtgaatagggatttatgtctaagacagaaaaatctactgaactagttcttactgtggaactaattgtggataaaacattcgttatcatctaaattttaaatg

SEQ ID NO: 189444 - DNA, 120 bp, Artificial Sequence
  ENSG00000112246_61 (sequence is synthesized)
aatgacaacagttatggacacatgcaaaaggtatcagacatagaaaatattgttgggggaaatttctgtgtggtgctaatttcttgtaagggttgtacagatagtgcttaactcaaaaag

SEQ ID NO: 189445 - DNA, 120 bp, Artificial Sequence
  ENSG00000112246_62 (sequence is synthesized)
tgagagtgtggtcattgccaaataggggtttgctcagagttccttctctaggactgtatgcagaaagcatacacacacacatacgcacacagaaaaatatgatttttatatcatattcat

SEQ ID NO: 189446 - DNA, 89 bp, Artificial Sequence
  ENSG00000112246_63 (sequence is synthesized)
aataaatgatggttcacataagaaatcctaattgctaattttaaaccaaacatttgtagttttgtttattgcaactttgctgcatggga

SEQ ID NO: 189447 - DNA, 120 bp, Artificial Sequence
  ENSG00000112246_64 (sequence is synthesized)
acatttgtagttttgtttattgcaactttgctgcatgggactttgctttcataaatctatatggggttggggttaatttgccctaatttgctgacctgggacacatgtaatcactgttaa

SEQ ID NO: 189448 - DNA, 120 bp, Artificial Sequence
  ENSG00000112246_65 (sequence is synthesized)
acttacacccggtaaccctgatgtgtttacatttcaaaagaaatgaaattggcctggaaaaaaattttggaagtactgtaagtcttttttctttttttttccgaagggaaatatttcaaa

SEQ ID NO: 189449 - DNA, 120 bp, Artificial Sequence
  ENSG00000112246_66 (sequence is synthesized)
aaaggaaacattatgagtagacacttcaaaaaagataaaatattttacatttgttttttgactaatgtgctataaaaaggattatatttgtgagaaaagatactgatcgccaatatttca

SEQ ID NO: 189450 - DNA, 120 bp, Artificial Sequence
  ENSG00000112246_67 (sequence is synthesized)
aataccgtcttgcaatgtatagtttttagtgacattgtagtataaagctgtaatttgaaattttactttggaatgtaaagtagaaaatattagctatgtcaatgatatcttgcaaagtgt

SEQ ID NO: 189451 - DNA, 120 bp, Artificial Sequence
  ENSG00000112246_68 (sequence is synthesized)
tcccatttataattatttatattgtaaatagctttctgaagtaaattcgaagttaatgtgcataaaatgtatttattatgtgaggaattttttggtttaaaatatagttaccaatatgca

SEQ ID NO: 189452 - DNA, 120 bp, Artificial Sequence
  ENSG00000112246_69 (sequence is synthesized)
atgatgccaaagcaacggttattttgacgacctcaggacaatgagaccttaagggtgcttgtagagtaaataaaggctgttttttgtttgtttgttttctcttactgatcgattgatttt

SEQ ID NO: 189453 - DNA, 120 bp, Artificial Sequence
  ENSG00000112246_70 (sequence is synthesized)
tacatatttacatatatattttgcaaagggaagtttagctcggctgcttcactaaggtcctcactgaactcagaatttctgtcgcttttttgaggctccctctacctccccatcaatact

SEQ ID NO: 189454 - DNA, 120 bp, Artificial Sequence
  ENSG00000112246_71 (sequence is synthesized)
ttctcttcagtccatcagatatgtttggttgggaagcagcccaacagtccttttgtcaacacttcagatactaggctcaattgaaagtactactaatccaaacatgactttcttttttac

SEQ ID NO: 189455 - DNA, 120 bp, Artificial Sequence
  ENSG00000112246_72 (sequence is synthesized)
tcctcttgttagaattttgtccagtaaaaaccaggagcaccgcctaattctgtattttttttttgccaggtgtggatagacccatgtacctggagctagataggccagataataatttct

SEQ ID NO: 189456 - DNA, 120 bp, Artificial Sequence
  ENSG00000112246_73 (sequence is synthesized)
ctatatatctaaagatttgcaaatgagtaacatgcatatttgtgaacaagtatgcctgaatttactcaagttcttaaataaattctaagcaaatttattccgagttttcaagacattcgc

SEQ ID NO: 189457 - DNA, 120 bp, Artificial Sequence
  ENSG00000112246_74 (sequence is synthesized)
agattctgaaactaactctggagcttgatgatttgcaactgtgggcttgatgttatctgtaagataataggctagtcctaaaatacataagattgaattaagatggctagcccgcttaga

SEQ ID NO: 189458 - DNA, 120 bp, Artificial Sequence
  ENSG00000112249_0 (sequence is synthesized)
actctgtccctcctcgccgggtctgtgcgtctttgcgtctgtctgtctgactgatggtcctcacacgcggttccctgtgactgggcgcgaccccggcaagcgcggcttggagggcggacg

SEQ ID NO: 189459 - DNA, 120 bp, Artificial Sequence
  ENSG00000112249_1 (sequence is synthesized)
gggcgcggcgatacagctgcccgctcgcatctttggccctgcgctcagctcctcacccggcgtgggaagttaaagtaaaaccgaaagggaagaaggcgcggtggcaggagctgacagagt

SEQ ID NO: 189460 - DNA, 120 bp, Artificial Sequence
  ENSG00000112249_2 (sequence is synthesized)
gatgggaaacgcgtgagccaggccgagagtttcaggtttcttgctgtatggatcactgattgaataatagatggctttacctcgtctcacaggagccttgcgttccttttcaaatgtcac

SEQ ID NO: 189461 - DNA, 120 bp, Artificial Sequence
  ENSG00000112249_3 (sequence is synthesized)
caagcaagataattataatgaagaagtggctgacttaaagataaagcgatctaaacttcatgaacaagttttagatttgggcctgacatggaagaagataataaaatttttgaatgaaaa

SEQ ID NO: 189462 - DNA, 120 bp, Artificial Sequence
  ENSG00000112249_4 (sequence is synthesized)
actggagaagagtaaaatgcaaagtataaatgaagacttaaaagatatattacatgctgcaaagcagatagttggaactgataatgggagagaagcaattgaaagtggggctgcatttct

SEQ ID NO: 189463 - DNA, 120 bp, Artificial Sequence
  ENSG00000112249_5 (sequence is synthesized)
cttcatgacatttcacttgaaggactctgttggtcacaaggaaacaaaggctatcaaacagatgtttggcccctttccttcatcatctgccactgcagcttgtaatgctactaatcgaat

SEQ ID NO: 189464 - DNA, 120 bp, Artificial Sequence
  ENSG00000112249_6 (sequence is synthesized)
tatttctcattttagtcaagatgatcttactgctcttgtgcagatgacagaaaaagaacatggcgatagggttttttttggtaaaaatttagcattttcatttgacatgcatgatttgga

SEQ ID NO: 189465 - DNA, 120 bp, Artificial Sequence
  ENSG00000112249_7 (sequence is synthesized)
ccactttgacgaactgccaataaatggtgaaactcagaaaactataagcctagattataagaagtttctgaatgaacatctccaggaggcttgcaccccagaactcaagcctgtggaaaa

SEQ ID NO: 189466 - DNA, 120 bp, Artificial Sequence
  ENSG00000112249_8 (sequence is synthesized)
aacaaatggctcctttttgtggtgtgaagttgaaaagtacctaaattcaactttgaaggaaatgactgaagtgccaagagtagaagatctttgctgtactttatatgatatgcttgcttc

SEQ ID NO: 189467 - DNA, 120 bp, Artificial Sequence
  ENSG00000112249_9 (sequence is synthesized)
tattaaaagtggtgatgaacttcaggatgagctatttgaactgctgggacctgaaggacttgaacttattgagaaactcctccagaacagaattacaattgtggatagatttcttaattc

SEQ ID NO: 189468 - DNA, 120 bp, Artificial Sequence
  ENSG00000112249_10 (sequence is synthesized)
ttcaaatgatcataggtttcaggctcttcaagacaattgtaaaaaaattttaggagaaaatgctaaacccaattatggttgtcaagtcactattcagtctgaacaagaaaagcagttaat

SEQ ID NO: 189469 - DNA, 120 bp, Artificial Sequence
  ENSG00000112249_11 (sequence is synthesized)
gaaacaatatcgacgtgaagaaaaaagaattgccagacgagaaaaaaaggctggagaagatttagaagtttcagaaggacttatgtgctttgatcctaaggaattgcggatacaaagaga

SEQ ID NO: 189470 - DNA, 120 bp, Artificial Sequence
  ENSG00000112249_12 (sequence is synthesized)
acaggcacttctgaatgctagaagtgttccaattctgagcaggcagagagatgcagacgttgaaaaaatacattatccccatgtgtatgattcccaggctgaagccatgaaaacatcagc

SEQ ID NO: 189471 - DNA, 120 bp, Artificial Sequence
  ENSG00000112249_13 (sequence is synthesized)
atttattgctggtgcaaagatgattttgccagaaggaatccaaagagagaataacaagctttatgaagaagtaaggattccctacagcgaaccaatgccactcagctttgaggaaaagcc

SEQ ID NO: 189472 - DNA, 120 bp, Artificial Sequence
  ENSG00000112249_14 (sequence is synthesized)
agtttatatccaagacttagatgagatcggacagctggcttttaaaggaatgaagagactcaatagaatccagtcaatagtgtttgagactgcctacaacaccaatgagaacatgctgat

SEQ ID NO: 189473 - DNA, 120 bp, Artificial Sequence
  ENSG00000112249_15 (sequence is synthesized)
ttgtgcccctacaggagctggaaaaaccaacattgcaatgctgacagtcttgcatgaaattcgccaacattttcaacaaggtgttatcaaaaagaatgaatttaagattgtatatgttgc

SEQ ID NO: 189474 - DNA, 120 bp, Artificial Sequence
  ENSG00000112249_16 (sequence is synthesized)
tccaatgaaagccttggcagctgaaatgacagattacttcagcagacgtctagagccactaggcatcattgtgaaagaattgactggtgacatgcagttgtccaaaagtgaaattttacg

SEQ ID NO: 189475 - DNA, 120 bp, Artificial Sequence
  ENSG00000112249_17 (sequence is synthesized)
aactcagatgcttgtgaccacaccagaaaaatgggatgtagtgacaagaaagagtgttggggatgtagctctttcccagattgtaaggctccttattcttgatgaagttcatttgctgca

SEQ ID NO: 189476 - DNA, 120 bp, Artificial Sequence
  ENSG00000112249_18 (sequence is synthesized)
tgaagatagaggaccagtattagaaagcatagttgcccgtactttacggcaggtggaatccacacagagtatgataaggattctcggactgtctgcaactttacctaactacctcgatgt

SEQ ID NO: 189477 - DNA, 120 bp, Artificial Sequence
  ENSG00000112249_19 (sequence is synthesized)
tgccacatttttacatgttaatccatacattggacttttcttctttgatggccgttttcgaccagtacctcttggacagacatttttggggattaaatgtgcaaataagatgcagcagtt

SEQ ID NO: 189478 - DNA, 120 bp, Artificial Sequence
  ENSG00000112249_20 (sequence is synthesized)
gaataacatggatgaagtatgttatgaaaatgttttgaagcaagtaaaggctggacaccaggtgatggtgtttgtacatgctcgaaatgccactgtaagaacagctatgtctctaataga

SEQ ID NO: 189479 - DNA, 120 bp, Artificial Sequence
  ENSG00000112249_21 (sequence is synthesized)
aagagcaaaaaattgtggccatattcccttcttttttcctacccaaggacatgactatgtacttgcagaaaaacaggtacaaaggtcgagaaataagcaagtacgagaattattcccaga

SEQ ID NO: 189480 - DNA, 120 bp, Artificial Sequence
  ENSG00000112249_22 (sequence is synthesized)
tggttttagtattcatcatgcaggaatgcttcggcaggacagaaatttagttgaaaacttgttttctaatgggcatatcaaagtcctagtgtgtacagctacgttagcctggggtgtcaa

SEQ ID NO: 189481 - DNA, 120 bp, Artificial Sequence
  ENSG00000112249_23 (sequence is synthesized)
tcttcccgcccatgctgttattattaagggaacacaaatatatgctgcaaaaagaggctcctttgttgaccttggaattttagatgtcatgcagatatttggtcgagctggacgaccaca

SEQ ID NO: 189482 - DNA, 120 bp, Artificial Sequence
  ENSG00000112249_24 (sequence is synthesized)
atttgacaaatttggggaaggaataattataacaacgcatgataaactcagccattacctcactttgctcactcaacgaaacccaattgagagtcagtttctggaaagccttgcagataa

SEQ ID NO: 189483 - DNA, 120 bp, Artificial Sequence
  ENSG00000112249_25 (sequence is synthesized)
cctaaatgcagagattgctctgggaacagttactaatgtggaagaagcagtgaagtggataagttacacttatctttatgtacggatgagagcaaatccattagcatatggcatcagtca

SEQ ID NO: 189484 - DNA, 120 bp, Artificial Sequence
  ENSG00000112249_26 (sequence is synthesized)
caaggcttatcagattgacccaacattaagaaagcatcgagaacagttggtcattgaagttggacgaaaactagacaaagctcagatgattcgttttgaggagcgaactggatatttttc

SEQ ID NO: 189485 - DNA, 120 bp, Artificial Sequence
  ENSG00000112249_27 (sequence is synthesized)
ctcaactgatttgggtagaactgccagccattactatattaaatacaacaccattgagacctttaatgaactctttgatgctcacaaaacagaaggtgatatctttgccatagtctccaa

SEQ ID NO: 189486 - DNA, 120 bp, Artificial Sequence
  ENSG00000112249_28 (sequence is synthesized)
agctgaagaatttgatcaaattaaggtcagagaagaggaaatagaggagttagataccttattaagcaatttttgtgaactctccactcctggaggtgtagagaatagttatgggaaaat

SEQ ID NO: 189487 - DNA, 120 bp, Artificial Sequence
  ENSG00000112249_29 (sequence is synthesized)
aaacatcttacttcaaacttatatcagccgaggagaaatggacagtttctcccttatatcagattctgcatatgttgcacagaatgcagctagaattgtccgtgctctttttgaaattgc

SEQ ID NO: 189488 - DNA, 120 bp, Artificial Sequence
  ENSG00000112249_30 (sequence is synthesized)
tctgaggaaacgttggcctaccatgacctacaggctcctgaatcttagtaaagtcattgacaagaggctttggggttgggctagccctttgagacaattttcaatcctaccaccacacat

SEQ ID NO: 189489 - DNA, 120 bp, Artificial Sequence
  ENSG00000112249_31 (sequence is synthesized)
cctaacaagattagaagaaaaaaagcttactgtggataagctgaaagacatgaggaaagatgaaataggtcacattttacatcatgtgaatattggactgaaggtcaaacaatgtgttca

SEQ ID NO: 189490 - DNA, 120 bp, Artificial Sequence
  ENSG00000112249_32 (sequence is synthesized)
tcagattccttctgttatgatggaagcatccattcagcctatcacaaggactgtcctccgagtgacactcagcatctatgctgatttcacttggaatgatcaggtacatgggacagtagg

SEQ ID NO: 189491 - DNA, 120 bp, Artificial Sequence
  ENSG00000112249_33 (sequence is synthesized)
taaaaaaacaagtcattagtaaagaagcccaactactggtatttacaatccctatttttgagcctttgccttcccaatactacatccgagcagtgtctgatagatggttgggtgctgagg

SEQ ID NO: 189492 - DNA, 120 bp, Artificial Sequence
  ENSG00000112249_34 (sequence is synthesized)
cagtatgtattatcaactttcaacatctaattctaccagagagacatcctcctcatacagaattactggatcttcagcctttaccaatcacagctttgggatgtaaagcatatgaagccc

SEQ ID NO: 189493 - DNA, 120 bp, Artificial Sequence
  ENSG00000112249_35 (sequence is synthesized)
tgtacaacttcagccactttaaccctgtacagacacaaatatttcatacattgtatcacacggattgtaatgtcctacttggagcacctactggatcgggaaagactgttgcagctgaat

SEQ ID NO: 189494 - DNA, 120 bp, Artificial Sequence
  ENSG00000112249_36 (sequence is synthesized)
tagccattttcagagtcttcaacaaataccctacttcaaaggcggtatatattgcacccctaaaagccctagtacgtgaaagaatggatgattggaaagttagaatagaagaaaaacttg

SEQ ID NO: 189495 - DNA, 120 bp, Artificial Sequence
  ENSG00000112249_37 (sequence is synthesized)
gtaaaaaagttattgaactaacaggggatgtgactcctgatatgaaatccattgccaaggctgaccttatcgtcactacgccagagaagtgggatggagtcagcagaagctggcaaaata

SEQ ID NO: 189496 - DNA, 120 bp, Artificial Sequence
  ENSG00000112249_38 (sequence is synthesized)
ggaactatgttcagcaagtcactattctcatcatagatgagatccatctgcttggggaggaaagaggccctgttctagaggtcattgtatctcgaacaaattttatctcatcacacacag

SEQ ID NO: 189497 - DNA, 120 bp, Artificial Sequence
  ENSG00000112249_39 (sequence is synthesized)
aaaagcctgttagaatagttggactatctactgcattagctaatgccagagaccttgctgattggctcaatattaagcagatgggcttgtttaacttccgaccatcagtacgcccagttc

SEQ ID NO: 189498 - DNA, 120 bp, Artificial Sequence
  ENSG00000112249_40 (sequence is synthesized)
cactggaagttcacattcaaggctttccaggtcaacattactgtcctcgtatggctagtatgaacaagcctgcatttcaggcaattagaagccattctccagccaaacctgttttgatat

SEQ ID NO: 189499 - DNA, 120 bp, Artificial Sequence
  ENSG00000112249_41 (sequence is synthesized)
ttgtctcatcaagacgtcaaactcgtcttactgctttggaattgatcgccttcctggctactgaagaagatccaaagcagtggttaaacatggatgaaagagagatggagaacatcattg

SEQ ID NO: 189500 - DNA, 120 bp, Artificial Sequence
  ENSG00000112249_42 (sequence is synthesized)
caacagtaagagattccaacctcaagctgacccttgctttcgggataggaatgcatcatgctggactacatgagagggaccgaaaaacagtagaggaactatttgtaaactgtaaagttc

SEQ ID NO: 189501 - DNA, 120 bp, Artificial Sequence
  ENSG00000112249_43 (sequence is synthesized)
aggttcttattgctacaagcacattagcctggggtgtaaactttccagctcatttagtaattattaagggaacagaatactatgatggaaaaacaagacgttatgtggattttcccatta

SEQ ID NO: 189502 - DNA, 120 bp, Artificial Sequence
  ENSG00000112249_44 (sequence is synthesized)
cagatgtcctccagatgatggggcgtgctgggaggccgcagttcgatgaccaaggcaaagctgtaattctagttcatgacataaagaaagacttttataaaaaatttctttatgaacctt

SEQ ID NO: 189503 - DNA, 120 bp, Artificial Sequence
  ENSG00000112249_45 (sequence is synthesized)
tcccagtagaatcaagtttattaggagtgctctctgaccacttaaatgcagagattgctggtggtacaattacatctaagcaagatgcattggattatatcacctggacttactttttcc

SEQ ID NO: 189504 - DNA, 120 bp, Artificial Sequence
  ENSG00000112249_46 (sequence is synthesized)
gacgtcttatcatgaatcccagctattacaatttgggtgatgtgagccatgattctgtgaacaagtttctgtcccatctgattgagaagtccctgattgaattggaactttcctactgta

SEQ ID NO: 189505 - DNA, 120 bp, Artificial Sequence
  ENSG00000112249_47 (sequence is synthesized)
ttgaaattggagaggataatcgcagcattgaacctctaacttatggccgaattgcctcctattactatttgaagcatcaaacagttaaaatgttcaaggaccgcttgaagcctgaatgca

SEQ ID NO: 189506 - DNA, 120 bp, Artificial Sequence
  ENSG00000112249_48 (sequence is synthesized)
gtactgaagaactgctttcaattctaagtgatgcagaagaatatacagatttgccagtgagacacaatgaagatcatatgaatagtgaactggcaaaatgtcttcccattgaatcaaatc

SEQ ID NO: 189507 - DNA, 120 bp, Artificial Sequence
  ENSG00000112249_49 (sequence is synthesized)
ctcattcatttgacagccctcacaccaaagcacatctcctgctacaggcacatctcagccgagccatgctaccctgcccagattatgacactgataccaaaacagtcttggaccaagctc

SEQ ID NO: 189508 - DNA, 120 bp, Artificial Sequence
  ENSG00000112249_50 (sequence is synthesized)
tcagagtatgtcaggcaatgctggacgtggctgcaaaccagggctggctggtgactgtcctgaatatcaccaacctgattcagatggtgatccagggtcggtggttaaaggactcttctc

SEQ ID NO: 189509 - DNA, 120 bp, Artificial Sequence
  ENSG00000112249_51 (sequence is synthesized)
ttcttacactaccaaacatagaaaaccatcatcttcaccttttcaagaaatggaagccgattatgaagggcccacatgctaggggtcggacctccatcgagtcccttcctgaactgatcc

SEQ ID NO: 189510 - DNA, 120 bp, Artificial Sequence
  ENSG00000112249_52 (sequence is synthesized)
atgcctgtggagggaaagaccatgtatttagctccatggtagaaagtgagctacatgctgcaaaaacgaaacaggcatggaatttcttatctcacttgccagtgataaatgttggcataa

SEQ ID NO: 189511 - DNA, 120 bp, Artificial Sequence
  ENSG00000112249_53 (sequence is synthesized)
gtgttaaaggctcgtgggatgacttagttgaaggacataatgaactctctgtctcaactctgactgcagacaaacgagatgacaacaaatggatcaaattgcatgctgaccaagagtatg

SEQ ID NO: 189512 - DNA, 120 bp, Artificial Sequence
  ENSG00000112249_54 (sequence is synthesized)
tgcttcaagtgagcttgcagagagtccactttgggttccacaagggaaagccagagagctgtgcagttactcctcgatttcccaaatcaaaagacgaaggatggtttttgatattaggag

SEQ ID NO: 189513 - DNA, 120 bp, Artificial Sequence
  ENSG00000112249_55 (sequence is synthesized)
aagtggataagagagaacttattgctttgaaaagagtaggatatattcgaaatcatcatgttgcttccctttctttttatacccctgaaatacctggaaggtatatctacacattatatt

SEQ ID NO: 189514 - DNA, 120 bp, Artificial Sequence
  ENSG00000112249_56 (sequence is synthesized)
tcatgagtgactgctaccttggcctggaccagcagtatgacatctatctcaacgttacacaagcgagtctttctgcacaggtcaacaccaaggtctctgattccctgactgacctggcat

SEQ ID NO: 189515 - DNA, 120 bp, Artificial Sequence
  ENSG00000112249_57 (sequence is synthesized)
taaagtaacttgacctgaacaatccatttgaaaggagtggctaagaattctctctgttcagtcatctagacaaatcgaattacttgatgtttgccttgaaagaatcaacttctaacctca

SEQ ID NO: 189516 - DNA, 120 bp, Artificial Sequence
  ENSG00000112249_58 (sequence is synthesized)
accatccaggaaattgacagtggctgcagtattgactccagtgacataaagttaaccacagtggccttttaacaaatgttgccttttataatgttatctttatgagtttcttgatatgta

SEQ ID NO: 189517 - DNA, 120 bp, Artificial Sequence
  ENSG00000112249_59 (sequence is synthesized)
agatgaaaaagcatttagaataatcttttaatttgtgtatatttgggatgatatttaggagctatcaatcaaattttacatctcacaatgtactgtttacatggatattggctgcttttt

SEQ ID NO: 189518 - DNA, 120 bp, Artificial Sequence
  ENSG00000112249_60 (sequence is synthesized)
ttaaggaaaaccacattgagatgtgacaagtgttaggacttgtcacagatttctaactctgccgcataaactataaatctgtaaggtggtacacagcgtgtcttgttagcaaaatttata

SEQ ID NO: 189519 - DNA, 120 bp, Artificial Sequence
  ENSG00000112249_61 (sequence is synthesized)
ctttgatatgatcacatgtagaagtagcttcaagaatttcttgtagtcataaatgtttaataatatatgatgtaaaattatattatggagcctaatgatgataacaaagaaaacaatata

SEQ ID NO: 189520 - DNA, 120 bp, Artificial Sequence
  ENSG00000112249_62 (sequence is synthesized)
ctgatcttagaaaatgtagacatggttaactgggaaataaaatatagagtggcacttcaagacaagctgactcaatgttttcttctgcttcctttaaataatatccccttactcatctgt

SEQ ID NO: 189521 - DNA, 120 bp, Artificial Sequence
  ENSG00000112249_63 (sequence is synthesized)
tcttcttttctttcccttctacttcaaggctttatttctattatctttctgacatatttatttacagaagtagagaagtataatctaattcatgttgtagcacttacagatcatatagta

SEQ ID NO: 189522 - DNA, 120 bp, Artificial Sequence
  ENSG00000112249_64 (sequence is synthesized)
caattatttgtctttatgctctccaggaaaaatctgagacagaaaatttttcacccctatggataggttttcacctgtaataaagaaaatttctctatgtccaaacaaattccttcttga

SEQ ID NO: 189523 - DNA, 120 bp, Artificial Sequence
  ENSG00000112249_65 (sequence is synthesized)
aaaatactttttcaaactaaaaacttgttaaaattcaatgttcatataatatgcattctagtggaatgaaattctacctttgtgaaataatttcagttttcttagccctaaaatgaatta

SEQ ID NO: 189524 - DNA, 120 bp, Artificial Sequence
  ENSG00000112249_66 (sequence is synthesized)
ttttaaaacattttccaatgtcattgttacaaatactagaatttaagtgtttctgaaattggaatgtattgcttgtatatatccttttccatgcttaaataaaaaagaagaagaaataaa

SEQ ID NO: 189525 - DNA, 120 bp, Artificial Sequence
  ENSG00000112249_67 (sequence is synthesized)
tttgaagcaagtaaaggctggacaccaggtacacttattttatctgcttttacacttatttatctgcttttagagagtgcttaatgataaaaattattaatatttacgctcttcagaaga

SEQ ID NO: 189526 - DNA, 120 bp, Artificial Sequence
  ENSG00000112249_68 (sequence is synthesized)
aaatttttctttaattctgaggcaatgactcagaggttctaattcttaataactgctttagcccaatgggtaagtcataaaaatattcatagatattatcatcccagtattgataggtcg

SEQ ID NO: 189527 - DNA, 120 bp, Artificial Sequence
  ENSG00000112249_69 (sequence is synthesized)
tgctattttgtttgccatttttaattttaaatattatattcttactgttttcatgaagcaatatcaattgaaatgtaatatatataataaagttctgtattgtttgatggtgtttagaaa

SEQ ID NO: 189528 - DNA, 120 bp, Artificial Sequence
  ENSG00000112249_70 (sequence is synthesized)
ctgagaatcttgaagtaagttaaataattgcatatcaaagacaccaaaccagaatggaagaaaatttaaaacatctcagatagatatgctgaactatgtagatgtatggccttcaagtaa

SEQ ID NO: 189529 - DNA, 120 bp, Artificial Sequence
  ENSG00000112249_71 (sequence is synthesized)
gacaacgtagccttaaccacaaccaagtggtataggaagtctagatatttttaatgttgtatctttttttctggtttacagggaaagccagagagctgtgcagttactcctcgatttccc

SEQ ID NO: 189530 - DNA, 120 bp, Artificial Sequence
  ENSG00000112249_72 (sequence is synthesized)
ttctgacagattcagaggactaagatgacaaaaatgactaaaatggacaaaagaagaaatagaaaatctgaatatttgactattaaaggaatttaatctgtaattaaaaaccttaagtac

SEQ ID NO: 189531 - DNA, 120 bp, Artificial Sequence
  ENSG00000112249_73 (sequence is synthesized)
aaagaaatctatatgctatgatggctttaatggagaatgtcataatgtcatttaaaaaggtatgagagtactattgtagattaaaagaggttaaaggcatataataatcaaaatgtaatg

SEQ ID NO: 189532 - DNA, 120 bp, Artificial Sequence
  ENSG00000112249_74 (sequence is synthesized)
tatgatccttgattgactcttgaatcagaaaaaaattacgtatttttggggccgttggagaaatctgaatatgggctggacatcattaggtaatattagatctcaggtgtgataatgttg

SEQ ID NO: 189533 - DNA, 120 bp, Artificial Sequence
  ENSG00000112249_75 (sequence is synthesized)
tggctatgtaagaggatatcctaaatctcaggagaagcatactgcagtatatatagtggtatctcatgaagattaaaatgtactgtcaaatgtgtcagcaaaagaaatacacatgatgtg

SEQ ID NO: 189534 - DNA, 120 bp, Artificial Sequence
  ENSG00000112249_76 (sequence is synthesized)
tgtgtgtgatcaagtgtttataatgagtggattaataaatatgagaagatagggtgatttgttgtaaagtaataaaggtttaaaaattacatgattcagtagagaaaaagcattttatga

SEQ ID NO: 189535 - DNA, 120 bp, Artificial Sequence
  ENSG00000112249_77 (sequence is synthesized)
atatctaacattacttatgataaaaaatctcagcaaactaggaatagaaggggattttgttaatctgataagctgtagctataaaaaacttggagaaaacatacttaatgctacaaagtt

SEQ ID NO: 189536 - DNA, 120 bp, Artificial Sequence
  ENSG00000112249_78 (sequence is synthesized)
agaagcttccctgaggtacggaattagacacaaatgcctgttaccacttctgtttctcactgtattaaaaatccttgctaacataatatggcaagaaaaagtaagggcataaagactgga

SEQ ID NO: 189537 - DNA, 120 bp, Artificial Sequence
  ENSG00000112249_79 (sequence is synthesized)
aaaaaaaacttttccatttttcacatgactgtacctgtagaaaatgaatttaacaaggttaatataaaaatcaattttatttctacttactagaagcacattaaaaattacacttatctt

SEQ ID NO: 189538 - DNA, 120 bp, Artificial Sequence
  ENSG00000112249_80 (sequence is synthesized)
tatgtaacgtaatacattttaccttaaattttaaaattttaatttattttacgtttacaaaagcatcataaacatcaaatacgtaggagtaaatttaacaaaaaataagcaagacttcat

SEQ ID NO: 189539 - DNA, 120 bp, Artificial Sequence
  ENSG00000112249_81 (sequence is synthesized)
caagaattggaagactcactattataatgatatattttttacccaaattgatctgtagattcagtgctatcccaggcacagtcttatgtttgagggtgtgtgtgtgtgtgtgtgtgtatg

SEQ ID NO: 189540 - DNA, 120 bp, Artificial Sequence
  ENSG00000112249_82 (sequence is synthesized)
tggaaattgacaagggtaatatgaaagttatatggaaattcaaaggcaaagagcagcctggttaactttgaaaaataaaaagggagaacttactctagtagatcttaaaacttattataa

SEQ ID NO: 189541 - DNA, 120 bp, Artificial Sequence
  ENSG00000112249_83 (sequence is synthesized)
agataagtatacagtgtggtgttggtccaagaataggcaaatggactagtatgacagaatatagcccagaaacaaacctacggatagaaatatacttgatttataatgaaggccaaacaa

SEQ ID NO: 189542 - DNA, 120 bp, Artificial Sequence
  ENSG00000112249_84 (sequence is synthesized)
tagtgagacaaggctattttttcagtatatggtgctgggtcaactgcatatacagatgaaaaaaagtacctattttacaaataattttaaacagcctacagaattaagcatgatacacaa

SEQ ID NO: 189543 - DNA, 120 bp, Artificial Sequence
  ENSG00000112249_85 (sequence is synthesized)
aacaatacatcttctaaaagatgtaaaagagtgtcttcaggatctttgtatgtgcgaaaatttatcaaacagagaacaaaaagtacaaagggaatgattaagttggactgtagtaaaatt

SEQ ID NO: 189544 - DNA, 120 bp, Artificial Sequence
  ENSG00000112249_86 (sequence is synthesized)
aataccttctatttattaagagtaaaaaggcaaaacatggagtgggagaatatagcttcaagatatataaccaaaaagagagcttttatccaggttaaatacgagctcctacaaatcaat

SEQ ID NO: 189545 - DNA, 120 bp, Artificial Sequence
  ENSG00000112249_87 (sequence is synthesized)
aaggaaaggacagataatcctatatgaacatgagtaagagctttgaacaaggacttcacaagagatagttgaccagtaaacatgaaaagggcttcagcttcattggtagtcaaggatatg

SEQ ID NO: 189546 - DNA, 120 bp, Artificial Sequence
  ENSG00000112249_88 (sequence is synthesized)
ccactgcatgcccattagaatggttaaaatgtaaaagactgacatacctattgttaggatcaagaatgtgaactagaatttttgtctactgctgctagagtttacaattggtacaaccac

SEQ ID NO: 189547 - DNA, 120 bp, Artificial Sequence
  ENSG00000112249_89 (sequence is synthesized)
tttgagtaactgtttgacagtgtctactattacctactgtggttggacaagtgaaattttaaatcttaggacataaatatccaataaaaatgcttgtacatacatgtatatcaaaaatag

SEQ ID NO: 189548 - DNA, 120 bp, Artificial Sequence
  ENSG00000112249_90 (sequence is synthesized)
gtgcattcattgcaacattatttgtgatagccttaatgtagaaacaacccagttcattgttaaaaagcttaagttgtagtatgtagactgccttatagcagtaacggattacagctatgt

SEQ ID NO: 189549 - DNA, 120 bp, Artificial Sequence
  ENSG00000112249_91 (sequence is synthesized)
ataacattgtaagtgaatcttataatgttgacaaaagaagccatacaacacatattatgattccattaatatgaaactgaaaactaggcatgaccagtctctggttttagaagtcaggat

SEQ ID NO: 189550 - DNA, 120 bp, Artificial Sequence
  ENSG00000112249_92 (sequence is synthesized)
agtggctgcttttgaggaaggaggtagtgactaggagtgaatatgagggaggtttctggggagctgataatgttctgattcttgaagtagttaaccagattacacaggtgtgttcgtttt

SEQ ID NO: 189551 - DNA, 120 bp, Artificial Sequence
  ENSG00000112249_93 (sequence is synthesized)
tgaactgtatgtgtactgtatattttcttgttatattcaataaaaagaattactatgatttttatattacatagattaaataagaagtatttcagattgataagtaacacatgcttgtgt

SEQ ID NO: 189552 - DNA, 120 bp, Artificial Sequence
  ENSG00000112249_94 (sequence is synthesized)
acatgcttgtgtatttatttagcttaaggtttggctatcatggtgagaactcctatgtaccctgctcaggtcctggtaaacagtatcataagtataataaattggtgtttttcattctca

SEQ ID NO: 189553 - DNA, 120 bp, Artificial Sequence
  ENSG00000112249_95 (sequence is synthesized)
ttatattaatgtgaactatcctaatgaaatagtgttttttaaacatgggtggttagcaaagaaagttctttaatgttctgtatagtagttgaatctatagccaaatggtttcacatagca

SEQ ID NO: 189554 - DNA, 120 bp, Artificial Sequence
  ENSG00000112273_0 (sequence is synthesized)
agaaccagctatgtcggcctacggcatgcccatgtacaagagcggggacctggtgtttgccaagttaaagggctatgcccactggccggcgaggatagagcacatgacccagcccaaccg

SEQ ID NO: 189555 - DNA, 120 bp, Artificial Sequence
  ENSG00000112273_1 (sequence is synthesized)
ctaccaggtgtttttcttcgggacccacgagacggccttcctgagtcccaaacgcctgttcccgtacaaggagtgcaaggagaagttcggcaagcccaacaagaggcgcggcttcagcgc

SEQ ID NO: 189556 - DNA, 120 bp, Artificial Sequence
  ENSG00000112273_2 (sequence is synthesized)
ggggctgtgggaaatcgagaacaaccccacggtccaggcctccgactgcccattagcctcagagaagggcagcggagacgggccttggccggagcccgaggccgcagagggcgacgagga

SEQ ID NO: 189557 - DNA, 120 bp, Artificial Sequence
  ENSG00000112273_3 (sequence is synthesized)
caagccgacccacgctggtggcggcggcgacgaattggggaagccggacgacgacaagcccactgaggaggagaaggggccgctgaagaggagcgcgggggacccgccggaggacgcccc

SEQ ID NO: 189558 - DNA, 120 bp, Artificial Sequence
  ENSG00000112273_4 (sequence is synthesized)
caaacgacccaaggaggcagcccccgaccaagaggaggaggcggaggcggagagggcggcggaagcggagagggcggcggcggcggcggcggcgacggccgtcgacgaggagagtccgtt

SEQ ID NO: 189559 - DNA, 120 bp, Artificial Sequence
  ENSG00000112273_5 (sequence is synthesized)
cctcgtggcggtggagaacggcagcgcccctagcgagccgggcctggtctgcgagccgcctcagccagaggaggaggagctccgggaggaagaagtcgcggacgaggaggcctcccagga

SEQ ID NO: 189560 - DNA, 120 bp, Artificial Sequence
  ENSG00000112273_6 (sequence is synthesized)
gtggcatgccgaggcaccgggcggcggagatcgcgacagcctgtagttaccagcgtttccagaagagcccctgccccgttcctgctgcggcctggccgttcttggggaatctgaccacgg

SEQ ID NO: 189561 - DNA, 120 bp, Artificial Sequence
  ENSG00000112273_7 (sequence is synthesized)
cgtgcaaactgggactgcctttccctctcctcagcccgtcctcctccaacccgcgctcctttgccctgccgggccccaggatggcaggccacctgactctcacctctgtgcccccacgcc

SEQ ID NO: 189562 - DNA, 120 bp, Artificial Sequence
  ENSG00000112273_8 (sequence is synthesized)
cttccggctccctcttctcccccctctacccgccaccccaccccaccccacccccgcccactcgttgcctgattccgtttccgacttggggttcaggcaggctgttttcacctctagaca

SEQ ID NO: 189563 - DNA, 120 bp, Artificial Sequence
  ENSG00000112273_9 (sequence is synthesized)
cccctctccacccctcctgcttccccaggcattatgaacctctgcttaggaatatgggtaggagtgaaaggcctggcagataaagagcagagggcacttgcagggcctgggatgagcagt

SEQ ID NO: 189564 - DNA, 120 bp, Artificial Sequence
  ENSG00000112273_10 (sequence is synthesized)
cttcaagctgtggtagttagcgggcaggagagcgacatcttcctgagctcctgtccatgcctgccatacctgccagcttcagacatttagggaaaaggggcagcatgtggggaatgcccc

SEQ ID NO: 189565 - DNA, 120 bp, Artificial Sequence
  ENSG00000112273_11 (sequence is synthesized)
ccgccttccacaaatccttttgctgacccaggaagttctgggagttgccgtttttcatcaaaacgtttgggggcttccaagttgtttgtgagatctgaaaacttaactttgcccaatatc

SEQ ID NO: 189566 - DNA, 120 bp, Artificial Sequence
  ENSG00000112273_12 (sequence is synthesized)
ctggttggggaccgtgagaaatatctgtcccatttagatctctggggccactgatgggatgccctgggaagatccttggctgccgctttctctccccacagcctcaaggccaccctaccg

SEQ ID NO: 189567 - DNA, 120 bp, Artificial Sequence
  ENSG00000112273_13 (sequence is synthesized)
tcatatatatcactcaggcgtagaagaaaagacacatattttataaaatctttttaataaaaggaagttccaagaagaatttttaagaactacctctaggtgtgcctccacgctggccct

SEQ ID NO: 189568 - DNA, 120 bp, Artificial Sequence
  ENSG00000112273_14 (sequence is synthesized)
agctttcccattgctgttccattgctgagacaaactggaaggctccctttctgtttgaagttttatgacttgtagtcaggctttgctgttcgtcacagtgtcattttccattcaggtacc

SEQ ID NO: 189569 - DNA, 120 bp, Artificial Sequence
  ENSG00000112273_15 (sequence is synthesized)
atcacctggtcccatcaacaggtctagtatgtagctcactgataacagaggaagatgtgtctcctcccaccctcttcctaatggtcattatgcctttctccatctattgtctctttcacc

SEQ ID NO: 189570 - DNA, 120 bp, Artificial Sequence
  ENSG00000112273_16 (sequence is synthesized)
ccttcccctctcccttgggctctgatgaaaaattgttgactgcagtttcggaagtttgatctgagaaccaaccatagaatgtttcagttctaggaaataaaaccagttgattaaagcaaa

SEQ ID NO: 189571 - DNA, 120 bp, Artificial Sequence
  ENSG00000112276_0 (sequence is synthesized)
agtcaaagcggctgcgggcttggggacccggcccgggcagcggagcttccggacccgccgacccgccgaggagcgcgcgtcgggctcccgtcgagcagctgagcccgtgtgccccgcgtc

SEQ ID NO: 189572 - DNA, 120 bp, Artificial Sequence
  ENSG00000112276_1 (sequence is synthesized)
ccgcgccccgaagctgccgctccgaactttggtcggcgctgcccaggctccccgccagggaccagccgggaattttcaaaatgaattatacagagtccagcccattgagagaatcaactg

SEQ ID NO: 189573 - DNA, 120 bp, Artificial Sequence
  ENSG00000112276_2 (sequence is synthesized)
ccataggttttacacctgagttagaaagtatcatacctgtgccttccaataagaccacttgtgaaaactggagagagatacatcatctggtttttcatgtagcaaatatttgttttgcag

SEQ ID NO: 189574 - DNA, 120 bp, Artificial Sequence
  ENSG00000112276_3 (sequence is synthesized)
ttgggttggttattccaactactcttcaccttcatatgatatttcttaggggaatgttaactctaggatgtaccctttatatcgtctgggccactctctaccgatgtgccttggatataa

SEQ ID NO: 189575 - DNA, 120 bp, Artificial Sequence
  ENSG00000112276_4 (sequence is synthesized)
tgatctggaactctgtgttcttgggtgtcaacattttgcatctgtcgtatcttttatacaagaagagaccggtaaagattgaaaaggaactcagtggcatgtaccggcgattgtttgaac

SEQ ID NO: 189576 - DNA, 120 bp, Artificial Sequence
  ENSG00000112276_5 (sequence is synthesized)
cactccgtgtgcctccagatttgttcagaagactaactggacagttttgcatgatccaaaccttgaaaaagggccaaacttatgctgcagaggataaaacctcagttgatgaccgtctga

SEQ ID NO: 189577 - DNA, 120 bp, Artificial Sequence
  ENSG00000112276_6 (sequence is synthesized)
gtattctcttgaagggaaaaatgaaggtctcctatcgaggacattttctgcataacatttacccctgtgcctttatagattctcctgaatttagatcaactcagatgcacaaaggtgaaa

SEQ ID NO: 189578 - DNA, 120 bp, Artificial Sequence
  ENSG00000112276_7 (sequence is synthesized)
aattccaggtcaccattattgcagatgataactgcagatttttatgctggtcaagagaaagattaacatactttctggaatcagaacctttcttgtatgaaatctttaggtatcttattg

SEQ ID NO: 189579 - DNA, 120 bp, Artificial Sequence
  ENSG00000112276_8 (sequence is synthesized)
gaaaagacatcacaaataagctctactcattgaatgatcccaccttaaatgataaaaaagccaaaaagctggaacatcagctcagcctctgcacacagatctccatgttggaaatgagga

SEQ ID NO: 189580 - DNA, 120 bp, Artificial Sequence
  ENSG00000112276_9 (sequence is synthesized)
acagtatagccagctccagtgacagtgacgacggcttgcaccagtttcttcggggtacctccagcatgtcctctcttcatgtgtcatccccacaccagcgagcctctgccaagatgaaac

SEQ ID NO: 189581 - DNA, 120 bp, Artificial Sequence
  ENSG00000112276_10 (sequence is synthesized)
cgatagaagaaggagcagaagatgatgatgacgtttttgaaccggcatctccaaatacattgaaagtccatcagctgccttgatcagagagagaattcaggttaccaagacggaaggtgt

SEQ ID NO: 189582 - DNA, 120 bp, Artificial Sequence
  ENSG00000112276_11 (sequence is synthesized)
cttgaagagatcctgaaaaataccagcactttttcatggcttttaggttattctgctttagtgcatccagactggtggagtcggagggaggaagtgaggaagggtcaaggatggaagagt

SEQ ID NO: 189583 - DNA, 120 bp, Artificial Sequence
  ENSG00000112276_12 (sequence is synthesized)
tctttcacttaccctttttattagtcagcttttaaagtaattgttttactgagccttctgactatgccttgttctcttttgagatatatattttcacagtcttttctagatatattattg

SEQ ID NO: 189584 - DNA, 120 bp, Artificial Sequence
  ENSG00000112276_13 (sequence is synthesized)
ttttaacttaacaaatcttagcaatctctcaatgccttttcacttatttttttccaagttatgattctttttcctcacagtcttttttgttccatagcaatgaggttgtccatttgataa

SEQ ID NO: 189585 - DNA, 120 bp, Artificial Sequence
  ENSG00000112276_14 (sequence is synthesized)
tgaggttgtccatttgataattttaacaaacaatgtaagtttaaaattgaggctaaggtaacatgaaaaagcagggaatctcaaactttattccatatatacacacacacacacacacac

SEQ ID NO: 189586 - DNA, 120 bp, Artificial Sequence
  ENSG00000112276_15 (sequence is synthesized)
aatgggacattttagagaaaggtgtgatttgactggttttatttttctcccaggccagaagtattactccactagatcaccttacttaattgggcactgtgtggataacttgataatgaa

SEQ ID NO: 189587 - DNA, 120 bp, Artificial Sequence
  ENSG00000112276_16 (sequence is synthesized)
caaaactctcagattttactcacattacccttgtattatgccatttataaactgctctgaaacctgaagctggaaagataacagatgggtttctgagcacggggttaacctccagctaaa

SEQ ID NO: 189588 - DNA, 120 bp, Artificial Sequence
  ENSG00000112276_17 (sequence is synthesized)
ctcaacttccttgggatttggagtcaccatgttgtgcacactctggtgtgggaaacactttatgtagggtgggaggacaggggagttaaatggctgggcaggtgccacaggatgaggcca

SEQ ID NO: 189589 - DNA, 120 bp, Artificial Sequence
  ENSG00000112276_18 (sequence is synthesized)
ctgaaagatctgcttcattctttgatctgtattctgaagttccagattgttcatctagaggcagagacatctcttttaaaaaagtgccagatgccccagtgccagagctgcgaacgtgaa

SEQ ID NO: 189590 - DNA, 120 bp, Artificial Sequence
  ENSG00000112276_19 (sequence is synthesized)
cacagtggaaggcagagggtttactacaggccaggccatggacaccccacccaggtactgcagtgagggccttgattccagagctctttttcctactgaaatcatggtttagtaaacagt

SEQ ID NO: 189591 - DNA, 120 bp, Artificial Sequence
  ENSG00000112276_20 (sequence is synthesized)
gtcagtgtgtctggccagcgtggctgtggcacttggccaggacgctccgttgaatgaagctcattgattggccatgctggtcatgtctattttgcttcatccactagaaccaactttgag

SEQ ID NO: 189592 - DNA, 120 bp, Artificial Sequence
  ENSG00000112276_21 (sequence is synthesized)
tcagtctcctgttacgttaaatggctaagaaaagttccaaatgaagttgttctcaggtgaactgagccaaaagaagcaactcttaccatgaggtgatttctgttagaggagacatataaa

SEQ ID NO: 189593 - DNA, 120 bp, Artificial Sequence
  ENSG00000112276_22 (sequence is synthesized)
taagctcatctagggtcacctcattttcctaaatatgtttttaaagcaattattgtagtaatttcatttgagttaaatttacatgctcggtcactcattgagaaaatttacacagactct

SEQ ID NO: 189594 - DNA, 120 bp, Artificial Sequence
  ENSG00000112276_23 (sequence is synthesized)
gaatccagttcctgtcatcttcagatgttggtttattgacatcacagtaaaaaggctactgtcgactggacacagtggctcacacatgtaatcacagcactttggggggccaaggtgggt

SEQ ID NO: 189595 - DNA, 80 bp, Artificial Sequence
  ENSG00000112276_24 (sequence is synthesized)
ttcaagaccagcctgggcaacatggctaaaccccatctctacaaaaaaaattagctgggtgtggtggtacattcacttga

SEQ ID NO: 189596 - DNA, 72 bp, Artificial Sequence
  ENSG00000112276_25 (sequence is synthesized)
agctactcagaaggctgaggtgggaggttcacttgaacctgggaggttgaggttgcagtgagcattcaaaaa

SEQ ID NO: 189597 - DNA, 120 bp, Artificial Sequence
  ENSG00000112276_26 (sequence is synthesized)
tactgctgcagcagtctcttcaggtagctaaattaggagcttgttttggagaaatgaagcaaaggtgaatgacagcctaggcttgaaattataaagctctctcaggttgaactctctcgt

SEQ ID NO: 189598 - DNA, 120 bp, Artificial Sequence
  ENSG00000112276_27 (sequence is synthesized)
gcgctctcgctctcactttcgccctgtacctgagagcacaggtgtaactgtgatgtcatagtgccgagactactttcctttaaccattggggttaagttgggcagcccatttagtttaca

SEQ ID NO: 189599 - DNA, 120 bp, Artificial Sequence
  ENSG00000112276_28 (sequence is synthesized)
cgcgcataagactaatttacaaaatcactctatacagtcattagatgtaacatccttccctgagtagaaagtaatgcatgtgtttggagattattttctgtaatgctgggaacaaacctg

SEQ ID NO: 189600 - DNA, 120 bp, Artificial Sequence
  ENSG00000112276_29 (sequence is synthesized)
ttttaaaagcacactgctaaaagtaggtgatataagaccatttgctgtttttattaaagtatgtgtgtgtatcagtgtctcaatgtgaagattgtaacctcaagattaggaatcttaaaa

SEQ ID NO: 189601 - DNA, 120 bp, Artificial Sequence
  ENSG00000112276_30 (sequence is synthesized)
gagccacttagcctgaatgggaaacgtgagactatttttaaacacacacctctaaggaagaagcctcccatatagacttgatctcaaagaagcagataagaagacagaaaagtgttttaa

SEQ ID NO: 189602 - DNA, 120 bp, Artificial Sequence
  ENSG00000112276_31 (sequence is synthesized)
gtgtaagatctcctatggagtactttaaattcatttatacaaatgaataagtgtatctttgtataatgcataaatacatagataaaaacatgtttgctgccaaagttcccaataagatgc

SEQ ID NO: 189603 - DNA, 120 bp, Artificial Sequence
  ENSG00000112276_32 (sequence is synthesized)
ttcctgtgttttttggcctttacttagctgaatgatcaaagttcagaaaatggtctgcaaaagttactccatatacaaccccaaatctactactttaaatgtaacatcaactcagttgta

SEQ ID NO: 189604 - DNA, 120 bp, Artificial Sequence
  ENSG00000112276_33 (sequence is synthesized)
tgaatctggagtgtaatatttatattagaatgtatatgtcatttaaaatattttgaaagccctcataaatatttatatttactaaactaatagcatagacactatataaatccgcagtga

SEQ ID NO: 189605 - DNA, 120 bp, Artificial Sequence
  ENSG00000112276_34 (sequence is synthesized)
tgcttatatatcttaaattagtaataatgggtgctatataattattttcagttactatccctgacactctggaatcttctccatttctccctatcactcaatttcattttaatcattgga

SEQ ID NO: 189606 - DNA, 120 bp, Artificial Sequence
  ENSG00000112276_35 (sequence is synthesized)
cacctttgcgttttgctgctaacagtgtgtgtatgtcaccctctttatatctggttttcccacttgtctgaagctctcctgatcttagaacctggagctgcagattcctccatgtcagct

SEQ ID NO: 189607 - DNA, 120 bp, Artificial Sequence
  ENSG00000112276_36 (sequence is synthesized)
cccatcacggccccaaagacagagtcacttggttgctgagtcacttggttgctggaaaaatctttggggaaagctggtataagctacacactgacctgtccccagtgtttccaggtaatg

SEQ ID NO: 189608 - DNA, 120 bp, Artificial Sequence
  ENSG00000112276_37 (sequence is synthesized)
acttggcactccagagaaagtttcatgctgttgcgtgtggtggctccaagccaagcacctggcatgcaggtcagcccttcccagcgggcgtggcgtcgtcctcttcacagatgccacgtt

SEQ ID NO: 189609 - DNA, 120 bp, Artificial Sequence
  ENSG00000112276_38 (sequence is synthesized)
gcagccccaaggcctcaccattttgcgttttttagaaacccattttcttggtcatttataaagctgctttatagatatctttgatcctggcatgccttggtttcctctcccttccctctt

SEQ ID NO: 189610 - DNA, 120 bp, Artificial Sequence
  ENSG00000112276_39 (sequence is synthesized)
tccaatcctggtttcctaacctcctcttgtagtaattctcaactcaactcaaagtcccaagaatttggaatggtaggatgctgtgcggggagctcgaggctgaggcataatcactgcttc

SEQ ID NO: 189611 - DNA, 120 bp, Artificial Sequence
  ENSG00000112276_40 (sequence is synthesized)
ggttctgctcatcaggggacacgctcccttactcatggcagccatgtttgattgtcacagagccccccgaatactctgtctatagtgacacactgtaggtgtcataaattttaagaaacc

SEQ ID NO: 189612 - DNA, 120 bp, Artificial Sequence
  ENSG00000112276_41 (sequence is synthesized)
tgcttttaagtactatttataggtttttctgttatacttgcaacctagttttaaaatacatgaggattttatgaaagctttatacagacatttataggaaactcattctttgattttagg

SEQ ID NO: 189613 - DNA, 120 bp, Artificial Sequence
  ENSG00000112276_42 (sequence is synthesized)
tgccatttaaattgataacacttactttataaaaagatgctttttgtctggatagagccttatagtttaaaatatcttcatatattgccatttgatcaaataaatttcttacttagaaaa

SEQ ID NO: 189614 - DNA, 120 bp, Artificial Sequence
  ENSG00000112276_43 (sequence is synthesized)
gcggccgccgctcaggtcaggcagccccagcgtccccgggccctcggccccaccgagtgccggctcccgcgctctgcggcggcaagccccttggaattttcaaaatgaattatacagagt

SEQ ID NO: 189615 - DNA, 120 bp, Artificial Sequence
  ENSG00000112276_44 (sequence is synthesized)
ggagagcgccgatggctggggacccgaggtccgcgccacccacccgcaacctccttccccgagcctttgggaacgggttgttggccagacaagtcccagaaactgcctgctttgaagcat

SEQ ID NO: 189616 - DNA, 120 bp, Artificial Sequence
  ENSG00000112280_0 (sequence is synthesized)
cctttgcttttagccctcaccgggggcaggagggaccaaggctgggcccagaacacatagtcctagggtaacagtgaaggggtcgtgaggggacagtgactcccttccaaccccttcttc

SEQ ID NO: 189617 - DNA, 120 bp, Artificial Sequence
  ENSG00000112280_1 (sequence is synthesized)
atagggactgttggcaaacaaagaaaatcaactgggaaaatgaagacctgctggaaaattccagttttcttctttgtgtgcagtttcctggaaccctgggcatctgcagctgtcaagcgt

SEQ ID NO: 189618 - DNA, 120 bp, Artificial Sequence
  ENSG00000112280_2 (sequence is synthesized)
cgccccagattccctgtcaattccaattctaatggtggaaatgaactctgtccaaagatcaggattggccaagatgacttaccagggtttgatctgatctctcagttccaggtagataaa

SEQ ID NO: 189619 - DNA, 120 bp, Artificial Sequence
  ENSG00000112280_3 (sequence is synthesized)
gcagcatctagaagagctatccagagagtagtgggatcagctacattgcaggtggcttacaagttgggaaataatgtagacttcaggattccaactaggaatttatatcccagtggactg

SEQ ID NO: 189620 - DNA, 120 bp, Artificial Sequence
  ENSG00000112280_4 (sequence is synthesized)
cctgaagaatactccttcttgacgacgtttcgaatgactggaagcactctcaaaaagaactggaacatttggcagattcaggattcctctgggaaggagcaagttggcataaagattaat

SEQ ID NO: 189621 - DNA, 120 bp, Artificial Sequence
  ENSG00000112280_5 (sequence is synthesized)
ggccaaacacaatctgttgtattttcatacaagggactggatggaagtctccaaacagcagccttttcgaatttgtcctccttgtttgattcccagtggcataagatcatgattggcgtg

SEQ ID NO: 189622 - DNA, 120 bp, Artificial Sequence
  ENSG00000112280_6 (sequence is synthesized)
gagaggagtagtgctactctttttgttgactgcaacaggattgaatctttacctataaagccaagaggcccaattgacattgatggctttgctgtgctgggaaaacttgcagataatcct

SEQ ID NO: 189623 - DNA, 120 bp, Artificial Sequence
  ENSG00000112280_7 (sequence is synthesized)
caagtttctgttccatttgaacttcaatggatgctgatccattgtgaccccctgcggcccaggagagaaacttgccatgagctgccagccagaataacgcccagccagaccaccgacgag

SEQ ID NO: 189624 - DNA, 120 bp, Artificial Sequence
  ENSG00000112280_8 (sequence is synthesized)
agaggtcccccgggtgagcagggtcctcccgggcctccgggcccccctggagttccaggcatcgatggcatcgacggtgaccgaggtcctaagggccccccgggccccccgggtcctgca

SEQ ID NO: 189625 - DNA, 120 bp, Artificial Sequence
  ENSG00000112280_9 (sequence is synthesized)
ggtgaaccgggaaagccaggagctccaggcaagcctggcacacctggcgctgatggattaacaggacctgatggatcccctggctccattgggtcaaagggacaaaaaggagaacctggt

SEQ ID NO: 189626 - DNA, 120 bp, Artificial Sequence
  ENSG00000112280_10 (sequence is synthesized)
gtgcctggatcgcgtggatttccaggccgtggtattcctggaccccctggtcctcctgggacagcaggactccctggagagcttggccgtgtaggacctgttggtgaccctgggagaaga

SEQ ID NO: 189627 - DNA, 120 bp, Artificial Sequence
  ENSG00000112280_11 (sequence is synthesized)
ggaccacctggcccccctggccccccaggacccagaggaacaattggctttcatgatggagatccattgtgtcccaatgcctgtccaccaggtcgctcaggatatccaggcctaccaggc

SEQ ID NO: 189628 - DNA, 120 bp, Artificial Sequence
  ENSG00000112280_12 (sequence is synthesized)
atgaggggtcataaaggggctaaaggagaaattggtgaaccaggaagacaaggacacaagggtgaagaaggtgaccagggagaactcggagaagttggagctcaaggacctccaggagcc

SEQ ID NO: 189629 - DNA, 120 bp, Artificial Sequence
  ENSG00000112280_13 (sequence is synthesized)
cagggtttgcgaggcatcaccggcatagttggggacaaaggggaaaaaggtgctcggggcttagatggtgaacctgggcctcagggtcttcctggtgcacctggtgatcaaggacagcga

SEQ ID NO: 189630 - DNA, 120 bp, Artificial Sequence
  ENSG00000112280_14 (sequence is synthesized)
ggacctccaggagaagcaggtcccaaaggagatagaggggctgaaggtgctagaggaattcctggtctccctgggcccaaaggagacacgggtttgccaggtgtggatggccgtgatggg

SEQ ID NO: 189631 - DNA, 120 bp, Artificial Sequence
  ENSG00000112280_15 (sequence is synthesized)
atccctggaatgcctggaacaaagggtgaaccaggaaaacctgggcctcctggtgatgcaggattgcaggggttaccaggtgtacctggaattcctggtgcaaagggtgttgctggtgaa

SEQ ID NO: 189632 - DNA, 120 bp, Artificial Sequence
  ENSG00000112280_16 (sequence is synthesized)
aagggtagcacaggtgctccagggaagcctggtcagatgggaaattcaggcaaaccgggccaacaggggcctccaggagaggtgggaccccgaggaccccaggggcttcctggcagtaga

SEQ ID NO: 189633 - DNA, 120 bp, Artificial Sequence
  ENSG00000112280_17 (sequence is synthesized)
ggagaattaggaccagtgggatccccaggcctaccaggtaaactgggttctctgggtagccctggcctccctggcttgcctgggccccctggacttcctggaatgaaaggtgacaggggt

SEQ ID NO: 189634 - DNA, 120 bp, Artificial Sequence
  ENSG00000112280_18 (sequence is synthesized)
gtagtcggtgaaccgggtccaaagggtgaacagggtgcctctggtgaagaaggtgaagcaggagaaaggggggaacttggagatataggattacctggcccaaagggatctgcaggtaat

SEQ ID NO: 189635 - DNA, 120 bp, Artificial Sequence
  ENSG00000112280_19 (sequence is synthesized)
cggggtgtgcagggagaacagggtgccaccggcctgcctggtgtccagggccctccgggtagagcaccgacagatcagcacattaagcaggtttgcatgagagtcatacaagaacatttt

SEQ ID NO: 189636 - DNA, 120 bp, Artificial Sequence
  ENSG00000112280_20 (sequence is synthesized)
gctgagatggctgccagtcttaagcgtccagactcaggtgccactgggcttcctggaaggcctggccctcctggtccccccggccctcctggagagaatggtttcccaggccagatggga

SEQ ID NO: 189637 - DNA, 120 bp, Artificial Sequence
  ENSG00000112280_21 (sequence is synthesized)
attcgtggccttccgggcattaaggggccccctggtgctcttggtttgaggggacctaaaggtgacttgggagaaaagggggagcgtggccctccaggaagaggtcccaacggtttgcct

SEQ ID NO: 189638 - DNA, 120 bp, Artificial Sequence
  ENSG00000112280_22 (sequence is synthesized)
ggagctataggtctcccaggtgacccaggccctgccagctatggcagaaatggccgagacggtgagcgaggccccccaggggtggcaggaattcctggagtgcctggacccccgggacct

SEQ ID NO: 189639 - DNA, 120 bp, Artificial Sequence
  ENSG00000112280_23 (sequence is synthesized)
cctgggcttcccggtttctgtgagccagcctcctgcaccatgcaggctggtcagcgagcatttaacaaagggcctgacccttgaaaggcttactgctgcatggctgtctgcatgaaccac

SEQ ID NO: 189640 - DNA, 120 bp, Artificial Sequence
  ENSG00000112280_24 (sequence is synthesized)
gcctggtgaaggagcctgggtgagaaacaccatccaaagctggggcaaagatgattaccttcagcatgattacaatgtattaccttcagtatgattacagaagtcctacttgacaatcac

SEQ ID NO: 189641 - DNA, 120 bp, Artificial Sequence
  ENSG00000112280_25 (sequence is synthesized)
atatagaagaacggtgctattcagtaagttctctttcctttcccttggagggaagacagcagagtcatcagttaaaaaaaaaaaaagaaaaccaaacacctcccttgaataaatttatac

SEQ ID NO: 189642 - DNA, 120 bp, Artificial Sequence
  ENSG00000112280_26 (sequence is synthesized)
tcctgttcccaggatcttgagctttagtgtgctatacctatgtgtcttatcgtgggccactgtgccaataaacaaaaacaactgtttggtttacctcagttgcagtagttattttcattt

SEQ ID NO: 189643 - DNA, 120 bp, Artificial Sequence
  ENSG00000112280_27 (sequence is synthesized)
agaagttgttctcagattattgtttcagttatatagaggattactagactagttatgaagaaaccccactacattcaatggaattggtgcttaaaatctcatcgatgtgctgtctctgga

SEQ ID NO: 189644 - DNA, 120 bp, Artificial Sequence
  ENSG00000112280_28 (sequence is synthesized)
gtgataagaaagggctacatctcccgaaatgatttctttacgtcatgtattggtttccttcttcaccttgaacttttgttgaactgtatgtactttaccccaaacctgttaatattttga

SEQ ID NO: 189645 - DNA, 120 bp, Artificial Sequence
  ENSG00000112280_29 (sequence is synthesized)
gcgcttctatgtgaaagcaaagaaataattttaatactctggcattcataaattttattgatgagattatttattttaaaggtttgaggtaacatctctggttgtaccaaagaagaaata

SEQ ID NO: 189646 - DNA, 120 bp, Artificial Sequence
  ENSG00000112280_30 (sequence is synthesized)
aatatggtttcttaatctcttgcatgttttcttataaataatcatgttcaatgaaaagaagttactgagcttatttagatacattaaacattacttaactactggttctataggtgtatg

SEQ ID NO: 189647 - DNA, 120 bp, Artificial Sequence
  ENSG00000112280_31 (sequence is synthesized)
gttctataggtgtatgtttataatattagtgttttttctacataaagtaatttaaaaagctgttccacagagggtgttaccctgtgacagatgcgtatgtgtgtgtgtgtgtgtgtgtgt

SEQ ID NO: 189648 - DNA, 120 bp, Artificial Sequence
  ENSG00000112280_32 (sequence is synthesized)
ggagagagcttcatggaccttttcgaaatgttaattccctagaaagatgtgcagctgcatgcgcatctatatttttgtatagtatttcagagatttcgtggacttttttaagtctagcct

SEQ ID NO: 189649 - DNA, 120 bp, Artificial Sequence
  ENSG00000112280_33 (sequence is synthesized)
tgctttatttctaggttaagaaccactgccttcattccaatggcttgttagctccctcctactcagaactttattgtaaacatgatttatgtttcaccatttcttgtaaattttataaat

SEQ ID NO: 189650 - DNA, 120 bp, Artificial Sequence
  ENSG00000112280_34 (sequence is synthesized)
gcagctcagctaaagcactgtattcttaacaagtatttcctgaccacttaagcactttattattatctgtgtaatcatattggcttgctgtttcattaacatctacttaactatccaaca

SEQ ID NO: 189651 - DNA, 120 bp, Artificial Sequence
  ENSG00000112280_35 (sequence is synthesized)
gacttaatatattcattttatatcacagagcctgtgagtaacctgtgctggggcataaaacaatagctcaacatagtatctttagttagtttatggaactaaattctgtcaagtcaaagg

SEQ ID NO: 189652 - DNA, 120 bp, Artificial Sequence
  ENSG00000112280_36 (sequence is synthesized)
agagtgagccctaatataattttttatatatatttttctcgtgtgtacttttatacattttaaattctagtcctagttgtttggttaaatcaatcattatgtaatctgtatttggatttc

SEQ ID NO: 189653 - DNA, 120 bp, Artificial Sequence
  ENSG00000112280_37 (sequence is synthesized)
tttaaaactgcttacagcatctagttttatgcttctagcatgaattttgcttaagaagattccaactttgccatatagatcagtgctatttacatagactgaaagaatgttctttccctt

SEQ ID NO: 189654 - DNA, 120 bp, Artificial Sequence
  ENSG00000112280_38 (sequence is synthesized)
ttttcaaatatgacttttgaaaataaaggtctctgttatagctccctaaaacaatccttaaaaaaatggcaaactttttcaggagctgtgacacataattaaataaaggcatagaaatta

SEQ ID NO: 189655 - DNA, 120 bp, Artificial Sequence
  ENSG00000112280_39 (sequence is synthesized)
aatagattgtactggcttcggcttacctgctgtgagcccactggcaggctcctggaagctagccttcgcccttgctctttcaccggcactccctgcattaatttagaaaaagatcctgca

SEQ ID NO: 189656 - DNA, 120 bp, Artificial Sequence
  ENSG00000112280_40 (sequence is synthesized)
attttgtccctggaatatgaagtgaagtaagaaatggcgtctgttcttagcataccatggtgcatcactcaagttactcttcaagttaccactttatgtgttttccaaaaactaaagact

SEQ ID NO: 189657 - DNA, 120 bp, Artificial Sequence
  ENSG00000112280_41 (sequence is synthesized)
tttctaaatgaaagaaagcactcgaaaacctataattatgatttccaagaatttttgactacagtttaagacatatccttcattttgaaagaaaaataaataactggatttttactgtta

SEQ ID NO: 189658 - DNA, 120 bp, Artificial Sequence
  ENSG00000112280_42 (sequence is synthesized)
aattgccctgttgatgaaaggtgaaccaggaaaacctgggcctcctggtgatgcaggattgcaggggttaccaggtgtacctggaattcctggtgcaaagggtgttgctggtgaaaagca

SEQ ID NO: 189659 - DNA, 81 bp, Artificial Sequence
  ENSG00000112280_43 (sequence is synthesized)
tgatgcctagctaatttttgtagagacaggggtttgaccatgttggccaggctggtcccaaactcttgacctcaggtgatc

SEQ ID NO: 189660 - DNA, 120 bp, Artificial Sequence
  ENSG00000112280_44 (sequence is synthesized)
gttggccaggctggtcccaaactcttgacctcaggtgatccgtccgcatcagcctcttaaagtgctgggattataaggcatgagcccctgcgcctagccctgaatggcttcttaaaaaga

SEQ ID NO: 189661 - DNA, 120 bp, Artificial Sequence
  ENSG00000112280_45 (sequence is synthesized)
gatgagttggcagatgtgtctcaatttgttggggacgtatgtggcagcacagagcatccaagagaaatgtacagcctttggttatggttcatcattatttttggtttttgggatggagtc

SEQ ID NO: 189662 - DNA, 65 bp, Artificial Sequence
  ENSG00000112280_46 (sequence is synthesized)
gttatggttcatcattatttttggtttttgggatggagtctaacttttttgcctaggctggggct

SEQ ID NO: 189663 - DNA, 120 bp, Artificial Sequence
  ENSG00000112280_47 (sequence is synthesized)
cgcgcgcctcccgggcctggacgctttggcaaccgctactcccgggggtgctttttctgcagggacgaagtgccacctatgctagtggcgggtctggaagcctagaggggaaccaggctg

SEQ ID NO: 189664 - DNA, 120 bp, Artificial Sequence
  ENSG00000112280_48 (sequence is synthesized)
gaacagcaataagagagagagagagagtgcatcaaagccacgtctataatgcaaaggctgggttctgctcttgtaatgcaaggtgaatgataaattcaaggtctttttcaggtcttcaaa

SEQ ID NO: 189665 - DNA, 120 bp, Artificial Sequence
  ENSG00000112280_49 (sequence is synthesized)
gtatttttgtttcataaatgaagtaaaggaggtaaataaacctgagtaaatggcagaaccaagacccaccagtcttagctattacaacattgtaattgctatgttgcatttttttccaaa

SEQ ID NO: 189666 - DNA, 120 bp, Artificial Sequence
  ENSG00000112280_50 (sequence is synthesized)
gcagagacaaaaaacactgaattattgaaccctgtgataaacaatgcagttagcaggaagttaggagtatgatacaacttatcaagaagaaataatcacaacaggcagatcttctgttaa

SEQ ID NO: 189667 - DNA, 120 bp, Artificial Sequence
  ENSG00000112280_51 (sequence is synthesized)
atcatacttatgtaaccatcctgtagacaattaataaataaaatgaaagttttctacttagtggtttgcctaaggatgttatgatagttctaacatcattgtcttgctctattagggatt

SEQ ID NO: 189668 - DNA, 120 bp, Artificial Sequence
  ENSG00000112280_52 (sequence is synthesized)
aacaggacctgatggatcccctggctccattgggtcaaagggacaaaaaggagaacctggtgtgcctggatcgcgtggatttccagtaagtaaatgtaaagctacagaattgaaaatttc

SEQ ID NO: 189669 - DNA, 120 bp, Artificial Sequence
  ENSG00000112280_53 (sequence is synthesized)
atgtaaccaggttacatgccatgaaggaagtgggaatgatagtgtaagttctacatacaagttaaaaggtaagtcaaacatattatcacaatttctcttatgctggtatttacttttttt

SEQ ID NO: 189670 - DNA, 120 bp, Artificial Sequence
  ENSG00000112280_54 (sequence is synthesized)
gtcataagtgattttgtcaactccagttttgtgtaagacttcagaattttataaaaaggtttaccatcagaagaattctccttggactttctaaactagaaatgtttgtctatatatata

SEQ ID NO: 189671 - DNA, 120 bp, Artificial Sequence
  ENSG00000112280_55 (sequence is synthesized)
tagttactatttcttggtattacctttggttatgataatatccattgtctagatcagcttttgtgatgagatttttaaaaatctttgcttcaactaaaataattcacttctctttttcac

SEQ ID NO: 189672 - DNA, 120 bp, Artificial Sequence
  ENSG00000112282_0 (sequence is synthesized)
gtcttccgtacaggttcctgctgttggctgggctcgggagggaacgctccaggtaaagcgctgggggaggaagcgacgccgaggagctacggtttcctccagaggtctccgcccctctgc

SEQ ID NO: 189673 - DNA, 120 bp, Artificial Sequence
  ENSG00000112282_1 (sequence is synthesized)
ccctatattcccagagctcgagtctgatccgggccttgccgggcaccctggaaaggcgggggtgatagtacagatggagacgcaactgcagagcattttcgaagaggtggtgaaaacgga

SEQ ID NO: 189674 - DNA, 120 bp, Artificial Sequence
  ENSG00000112282_2 (sequence is synthesized)
agttatagaagaggcttttcctggcatgtttatggatactcctgaagatgagaaaacaaaactaattagctgtttgggggccttcagacagttttggggtggtctttctcaggagtctca

SEQ ID NO: 189675 - DNA, 120 bp, Artificial Sequence
  ENSG00000112282_3 (sequence is synthesized)
tgaacagtgtatccagtggattgttaagtttattcatggtcagcatagtcctaaaagaatttcttttctttatgactgcttagcaatggcagttgagactggtctccttccacccaggct

SEQ ID NO: 189676 - DNA, 120 bp, Artificial Sequence
  ENSG00000112282_4 (sequence is synthesized)
ggtttgtgaatccctgataaactctgacactcttgagtgggaaagaacacagctttgggccttaacatttaaactggttcggaaaataattgggggagtggattacaagggtgttcgaga

SEQ ID NO: 189677 - DNA, 120 bp, Artificial Sequence
  ENSG00000112282_5 (sequence is synthesized)
tctcttaaaagtgattttggagaagattttgacaattcctaatacagtgagctctgctgttgtacagcagcttctggcagcaagagaggttatagcatatatcttggaaagaaatgcctg

SEQ ID NO: 189678 - DNA, 120 bp, Artificial Sequence
  ENSG00000112282_6 (sequence is synthesized)
cttattaccagcctattttgcagtcactgagatcaggaaactgtatcctgaaggcaaacttccacactggttacttggaaacctagtatcagactttgtggataccttcaggcccacagc

SEQ ID NO: 189679 - DNA, 120 bp, Artificial Sequence
  ENSG00000112282_7 (sequence is synthesized)
aaggataaactccatttgtggtcgctgtagtcttctgccagttgtaaataattcgggtgccatttgtaattcatggaaactggatcctgctactcttcgttttcctttgaaaggcctttt

SEQ ID NO: 189680 - DNA, 120 bp, Artificial Sequence
  ENSG00000112282_8 (sequence is synthesized)
gccatatgataaggatctgtttgaaccacagactgctttgttgagatatgtattggagcagccttattccagggatatggtctgcaatatgctaggtttaaataagcagcacaagcagcg

SEQ ID NO: 189681 - DNA, 120 bp, Artificial Sequence
  ENSG00000112282_9 (sequence is synthesized)
ctgccctgtgctggaggaccagttggtggatctggttgtttatgccatggagcgatctgagaccgaggagaagtttgacgatgggggaacaagccaactcctgtggcagcatctctcaag

SEQ ID NO: 189682 - DNA, 120 bp, Artificial Sequence
  ENSG00000112282_10 (sequence is synthesized)
tcagctcattttctttgtgcttttccagtttgcaagttttccacatatggtgctttctcttcatcagaagttagcagggcgaggactgattaaaggcagagatcatcttatgtgggttct

SEQ ID NO: 189683 - DNA, 120 bp, Artificial Sequence
  ENSG00000112282_11 (sequence is synthesized)
cctgcaattcatttctggaagtattcagaaaaatgcactagctgattttctccctgtgatgaagctcttcgacttgctatacccagaaaaagaatatatcccagttcctgatattaacaa

SEQ ID NO: 189684 - DNA, 120 bp, Artificial Sequence
  ENSG00000112282_12 (sequence is synthesized)
accccagtcaacccatgcctttgcaatgacctgtatttggattcatctcaatagaaaagctcaaaatgacaactccaagctacagattccaatacctcattccctaagacttcaccatga

SEQ ID NO: 189685 - DNA, 120 bp, Artificial Sequence
  ENSG00000112282_13 (sequence is synthesized)
gttcctgcagcagagtctaagaaataaaagtttacagatgaatgactataagattgctctattgtgtaatgcatactctacaaattcagaatgttttacattacccatgggagctctggt

SEQ ID NO: 189686 - DNA, 120 bp, Artificial Sequence
  ENSG00000112282_14 (sequence is synthesized)
agaaactatttatggaaatggaattatgaggatacctctccctggaacaaactgtatggcttcaggatctattacccccttacctatgaacctcctggattcactgacagttcatgccaa

SEQ ID NO: 189687 - DNA, 120 bp, Artificial Sequence
  ENSG00000112282_15 (sequence is synthesized)
aatgagccttattcacagcattgcaaccagggtgataaaacttgctcatgcaaagtccagtgtggccttggctccagccctagtggaaacttacagtcgtttattggtctatatggaaat

SEQ ID NO: 189688 - DNA, 120 bp, Artificial Sequence
  ENSG00000112282_16 (sequence is synthesized)
agagtctttgggcatcaaaggatttatcagtcagcttttgccaactgttttcaaatcacatgcatgggggatcttacacacactccttgagatgtttagctaccggatgcatcatattca

SEQ ID NO: 189689 - DNA, 120 bp, Artificial Sequence
  ENSG00000112282_17 (sequence is synthesized)
gcctcattacagagttcagctcctgagtcatcttcatactttggctgcagttgcacaaacaaaccagaaccagctccatctttgtgtcgagagcactgctctcaggcttataacagcatt

SEQ ID NO: 189690 - DNA, 120 bp, Artificial Sequence
  ENSG00000112282_18 (sequence is synthesized)
aggtagctcagaggtacaaccgcagtttacacgcttccttagtgatcccaaaacagtgctctcagcagaatctgaagaactgaaccgagccttgatattgaccttggctagagcaactca

SEQ ID NO: 189691 - DNA, 120 bp, Artificial Sequence
  ENSG00000112282_19 (sequence is synthesized)
tgtaacagatttttttacaggctctgattcaattcagggaacttggtgtaaagacatacttcagaccatcatgagtttcactcctcataattgggcttcacacaccctgagctgttttcc

SEQ ID NO: 189692 - DNA, 120 bp, Artificial Sequence
  ENSG00000112282_20 (sequence is synthesized)
aggcccactacaggcattcttcaaacaaaataatgtgcctcaggaaagccgttttaatctgaaaaaaaatgtggaggaggagtataggaagtggaagtcaatgagcaacgaaaacgacat

SEQ ID NO: 189693 - DNA, 120 bp, Artificial Sequence
  ENSG00000112282_21 (sequence is synthesized)
gattggctatagagtattagagagaattggagccagggccttggtagcccatgtgaggacatttgcagatttcctggtatatgagttttctacatcagcagggggtcagcaactcaataa

SEQ ID NO: 189694 - DNA, 120 bp, Artificial Sequence
  ENSG00000112282_22 (sequence is synthesized)
atgcattgaaattcttaatgacatggtatggaagtataacattgttacactggacagattaattctctgcctggccatgcgtagtcacgaaggaaatgaagcccaggtttgttatttcat

SEQ ID NO: 189695 - DNA, 120 bp, Artificial Sequence
  ENSG00000112282_23 (sequence is synthesized)
aattcagttgctgttactcaaaccaaacgattttagaaatcgagtaagtgactttgtgaaggaaaattccccagagcactggttacagaatgactggcacaccaagcacatgaattatca

SEQ ID NO: 189696 - DNA, 120 bp, Artificial Sequence
  ENSG00000112282_24 (sequence is synthesized)
caagaaatatccagagaagttgtattttgagggcctcgcggaacaggtggatcctcctgtacagatccagtctccctatctgcccatctattttgggaatgtgtgtcttcgattccttcc

SEQ ID NO: 189697 - DNA, 120 bp, Artificial Sequence
  ENSG00000112282_25 (sequence is synthesized)
agtatttgatatagtaatccacagatttttagagttgcttccggtatccaaatcactggagactctactggatcatctaggaggcttatataaatttcatgatcgtccagtgacttatct

SEQ ID NO: 189698 - DNA, 120 bp, Artificial Sequence
  ENSG00000112282_26 (sequence is synthesized)
gtataacactctgcactattatgaaatgcacctgagagaccgcgcatttctcaaacgaaaactcgtccatgcgatcattggctctctgaaggataatcgaccgcagggctggtgtctaag

SEQ ID NO: 189699 - DNA, 120 bp, Artificial Sequence
  ENSG00000112282_27 (sequence is synthesized)
tgacacttacctgaaatgcgctatgaatgcacgagaggaaaatccttgggttccagatgacacctactattgcagattgattggcagactagtcgatacgatggctggcaaatctcctgg

SEQ ID NO: 189700 - DNA, 120 bp, Artificial Sequence
  ENSG00000112282_28 (sequence is synthesized)
tccctttccaaactgtgactggagattcaatgagtttcccaacccagctgcccatgctctccatgttacttgtgtggagctcatggccttggcagtttcaggcaaagaagttgggaatgc

SEQ ID NO: 189701 - DNA, 120 bp, Artificial Sequence
  ENSG00000112282_29 (sequence is synthesized)
ccttctaaatgttgtcctaaaaagtcagcctttagtgccaagagagaacattacagcatggatgaatgcaattggtttgatcatcactgccctaccagagccatattggattgttcttca

SEQ ID NO: 189702 - DNA, 120 bp, Artificial Sequence
  ENSG00000112282_30 (sequence is synthesized)
tgatcgaattgtgagtgtcatcagcagccccagcttgacgtctgaaacagagtgggttggctatccattccgcctctttgatttcactgcctgtcatcagtcctactctgagatgagttg

SEQ ID NO: 189703 - DNA, 120 bp, Artificial Sequence
  ENSG00000112282_31 (sequence is synthesized)
tagctatacgttagctcttgcacatgctgtgtggcaccattctagcatcggacaactttctctcattccaaagtttcttactgaagtacttcttcctatagtgaagaccgaattccagtt

SEQ ID NO: 189704 - DNA, 120 bp, Artificial Sequence
  ENSG00000112282_32 (sequence is synthesized)
gctttatgtataccatcttgttggaccatttttacaaagatttcagcaagagagaactcgttgtatgatagagattggtgtggcgttttatgacatgctgctgaatgttgaccagtgtag

SEQ ID NO: 189705 - DNA, 120 bp, Artificial Sequence
  ENSG00000112282_33 (sequence is synthesized)
cacccatttaaattacatggatcccatctgtgacttcctctatcacatgaagtatatgtttactggtgacagcgtgaaagagcaagtagagaagattatctgtaacttaaaaccagcttt

SEQ ID NO: 189706 - DNA, 120 bp, Artificial Sequence
  ENSG00000112282_34 (sequence is synthesized)
aaaacttcgtcttcgattcatcacacacattagcaagatggagccagctgcagtgcctccacaagccatgaacagtgggtctccagcacctcagtctaatcaggtgcccgtgtctttacc

SEQ ID NO: 189707 - DNA, 120 bp, Artificial Sequence
  ENSG00000112282_35 (sequence is synthesized)
agtaactcagtgaagccagactgtactgtggagaaagtagaaatatatccgtctttgagagtggactcaaaccttttaaatctgaatgcgatcacactgtagtgatatagtagaagcagt

SEQ ID NO: 189708 - DNA, 120 bp, Artificial Sequence
  ENSG00000112282_36 (sequence is synthesized)
gatgatattcagattgttttattttgattcaaatgatgaatctgttgacaccttataactcccatctccctatctatatttttgtctctaagagatcaagtaagatacatgttgttcata

SEQ ID NO: 189709 - DNA, 120 bp, Artificial Sequence
  ENSG00000112282_37 (sequence is synthesized)
ttcataacaacttattagagctatgtaggaacatagaggtatctgtgatcaaatgacttgtcattggcactttcagtctttcctattctagccgttgtttttgtttgtattttttattat

SEQ ID NO: 189710 - DNA, 120 bp, Artificial Sequence
  ENSG00000112282_38 (sequence is synthesized)
ttattaatgacatatttagtcttcagatatattattttaaaggcaccacacatgtaaaacagttattacaaatattttatacataaatctcttggtagattttcagaataatagagattt

SEQ ID NO: 189711 - DNA, 120 bp, Artificial Sequence
  ENSG00000112282_39 (sequence is synthesized)
caagaaaaggaatctagattttgttgcattgtaggagcaaacaaggcttcatattctttttaaaatgacttgaaattttattataaatttccatagtttctatcaaggtcaactggcagt

SEQ ID NO: 189712 - DNA, 120 bp, Artificial Sequence
  ENSG00000112282_40 (sequence is synthesized)
tttattacctttgctatggacttgaacttactgtataaaattagttggaagccatgtaagaaaataacatctgaaaattcttgaacttaaaatcatgcttaaatggttgattctccaatt

SEQ ID NO: 189713 - DNA, 120 bp, Artificial Sequence
  ENSG00000112282_41 (sequence is synthesized)
tctttttttaaaaataagttaattgcttttgcaggttgacactctcacctgacagatgatgtaattcttcaatttttataatcttaaaatttttaaattttatatttgtaaatacagtac

SEQ ID NO: 189714 - DNA, 120 bp, Artificial Sequence
  ENSG00000112282_42 (sequence is synthesized)
acattttatttcttggattttgagagacattgttaattttgggggaattggcattgcgaaagacttgaaaactaatgagtaaagtctgctgaatgaataaaccgtgtgattgtttcccga

SEQ ID NO: 189715 - DNA, 120 bp, Artificial Sequence
  ENSG00000112282_43 (sequence is synthesized)
gtagtttcaactcatacattgtcttgtttgattttgttctttgttttttatcctctttaagcacagatgcgtgttgaagtctaaggtgttctgtcatcacactctctttactagaataag

SEQ ID NO: 189716 - DNA, 120 bp, Artificial Sequence
  ENSG00000112282_44 (sequence is synthesized)
tgtgcccaggcagaaaaaaaagtgtattcaatgttgctggcatgtgtggattcacagctcgtggctgtaaggaaatctgggggtttcataaatccattaaaatccttttagagttgccaa

SEQ ID NO: 189717 - DNA, 120 bp, Artificial Sequence
  ENSG00000112282_45 (sequence is synthesized)
cagaagcttcttctttccatcaccttctctaaagcctattcattctttgctagcttagagcctcctttctcagtgaatgaagccttccctgacttttccagctcacatgaagactccttt

SEQ ID NO: 189718 - DNA, 120 bp, Artificial Sequence
  ENSG00000112282_46 (sequence is synthesized)
ctctgacctccacacatatttttttaaagtttattatttttaaataagtaataaagctatagatttattgtttgataaattaattgatttactgcatagtgtatatcaggtacctaaatg

SEQ ID NO: 189719 - DNA, 120 bp, Artificial Sequence
  ENSG00000112282_47 (sequence is synthesized)
gaagctggaaaaatagaaaactttaaagaatgagaaaacactattactttagactttggggtggaatgctggataagtgatatttttcactagctttcctccgattttaaaggagccata

SEQ ID NO: 189720 - DNA, 120 bp, Artificial Sequence
  ENSG00000112282_48 (sequence is synthesized)
caaggtactagtcctaattggtatttcaaatagtccttttaaagccatacttgagtatttgatgaagtgatttggccgttttctctctggttctaatgttttttctcttgtctatataga

SEQ ID NO: 189721 - DNA, 120 bp, Artificial Sequence
  ENSG00000112282_49 (sequence is synthesized)
agtaagttagctctctgaacttcttcaaggtttgagagtttctataatgttgagaataaattgaaactgcagttttagtggacataaggacttctataaaaagaagtaaagtataatcaa

SEQ ID NO: 189722 - DNA, 120 bp, Artificial Sequence
  ENSG00000112282_50 (sequence is synthesized)
aaatgttgtcctaaaaaggtatgtattctggttcatgcagtaagatttgttgtttatttgtaaatagaatggtattctatttcaaacttttaagacaaacctgttgccgcaaggctgatg

SEQ ID NO: 189723 - DNA, 120 bp, Artificial Sequence
  ENSG00000112282_51 (sequence is synthesized)
cacattggatgatgactgttttctggttccagatcttgtctttgtgatataggagttatggaatgagccctggacaggatcctaagatccgggtttgttcctacttctactcattaatag

SEQ ID NO: 189724 - DNA, 120 bp, Artificial Sequence
  ENSG00000112282_52 (sequence is synthesized)
cagtttgacatttaatataggaataatgttaacttgtcacttaaaacaagattctcttcatcttgttttcaagatttcaagattcttttaaaaattagcatgaagtatgggataatgatt

SEQ ID NO: 189725 - DNA, 120 bp, Artificial Sequence
  ENSG00000112282_53 (sequence is synthesized)
ggggaggaagtatttttaaaaagccttcttgagtttttatgcatattacatttttattcaataaaaaattccccattgttttattgaaatggattagttgtcgatcctctgaattagaca

SEQ ID NO: 189726 - DNA, 120 bp, Artificial Sequence
  ENSG00000112282_54 (sequence is synthesized)
tttactttcatgctgctcttaagatcttcctgagaagggagaaataaaattgttatcattttttattctggcttccatttgttttaatttgtatatttcagtggaaaacctgtgttgaga

SEQ ID NO: 189727 - DNA, 120 bp, Artificial Sequence
  ENSG00000112282_55 (sequence is synthesized)
agtcaagttgatactgcacagtgtgagatgtttaaaaaaaaaaacctcccctatgttagattaattgagatcattttcatcctattcggatttatttggtacacttgaaaacagatatgt

SEQ ID NO: 189728 - DNA, 120 bp, Artificial Sequence
  ENSG00000112282_56 (sequence is synthesized)
taagctttacttgtcaaggatacaaattccatttttctgctaaataaaggaattggcacagcattgatacaaagatgctacaataggaataccaagattctataataaggataggaaaat

SEQ ID NO: 189729 - DNA, 120 bp, Artificial Sequence
  ENSG00000112290_0 (sequence is synthesized)
agcagtgttctcttcgtccccctcccccaaactgaggattgggcaataccacagaacctcaggaaaggggggaagagcgagcttcggccccactaatgggggagtgggcggaggctggat

SEQ ID NO: 189730 - DNA, 120 bp, Artificial Sequence
  ENSG00000112290_1 (sequence is synthesized)
ttcccacctcggctgcacctgggcactggaggctgaagaggaaagtgagaatctgaagttttgagacctctgactggccaggaatagctcctggggcggggggcaaggatgggaccatag

SEQ ID NO: 189731 - DNA, 120 bp, Artificial Sequence
  ENSG00000112290_2 (sequence is synthesized)
gcggaaagagtctcgcggtcccccctgcttctggcgcgggtccctgcgcccggttgtggagcgtctcgcgcggggagggggcggggggaacggcagctcgcggtgttgttcactcgcgcg

SEQ ID NO: 189732 - DNA, 120 bp, Artificial Sequence
  ENSG00000112290_3 (sequence is synthesized)
gttgttcactcgcgcgtcgagcacacggtgggtccggcggcgggttggcgccccaggcggcgttccctgtggcctggcgcctgggccgctgccctgagcgggttccgccccagagcccga

SEQ ID NO: 189733 - DNA, 120 bp, Artificial Sequence
  ENSG00000112290_4 (sequence is synthesized)
aggcggagtcccgcgagccgagggggaccggcgaccgctgccgaagcatgaagaaggggtaaggcgtgagcccccaagatttcacgtgttggagaaatcagcatgttaaaacaactgttg

SEQ ID NO: 189734 - DNA, 120 bp, Artificial Sequence
  ENSG00000112290_5 (sequence is synthesized)
atgatagctgttggagtaaagttgcagtggaagctatggctgcaaaatcgttaaaatcttcaaggtgaactggcacaaaggttaatctcaagatgccgctagtgaaaagaaacatcgatc

SEQ ID NO: 189735 - DNA, 120 bp, Artificial Sequence
  ENSG00000112290_6 (sequence is synthesized)
ctaggcacttgtgccacacagcactgcctagaggcattaagaatgaactggaatgtgtaaccaatatttccttggcaaatataattagacaactaagtagcctaagtaaatatgctgaag

SEQ ID NO: 189736 - DNA, 120 bp, Artificial Sequence
  ENSG00000112290_7 (sequence is synthesized)
atatatttggagaattattcaatgaagcacatagtttttccttcagagtcaactcattgcaagaacgtgtggaccgtttatctgttagtgttacacagcttgatccaaaggaagaagaat

SEQ ID NO: 189737 - DNA, 120 bp, Artificial Sequence
  ENSG00000112290_8 (sequence is synthesized)
tgtctttgcaagatataacaatgaggaaagctttccgaagttctacaattcaagaccagcagcttttcgatcgcaagactttgcctattccattacaggagacgtacgatgtttgtgaac

SEQ ID NO: 189738 - DNA, 120 bp, Artificial Sequence
  ENSG00000112290_9 (sequence is synthesized)
agcctccacctctcaatatactcactccttatagagatgatggtaaagaaggtctgaagttttataccaatccttcgtatttctttgatctatggaaagaaaaaatgttgcaagatacag

SEQ ID NO: 189739 - DNA, 120 bp, Artificial Sequence
  ENSG00000112290_10 (sequence is synthesized)
aggataagaggaaggaaaagaggaagcagaagcagaaaaatctagatcgtcctcatgaaccagaaaaagtgccaagagcacctcatgacaggcggcgagaatggcagaagctggcccaag

SEQ ID NO: 189740 - DNA, 120 bp, Artificial Sequence
  ENSG00000112290_11 (sequence is synthesized)
gtccagagctggctgaagatgatgctaatctcttacataagcatattgaagttgctaatggcccagcctctcattttgaaacaagacctcagacatacgtggatcatatggatggatctt

SEQ ID NO: 189741 - DNA, 120 bp, Artificial Sequence
  ENSG00000112290_12 (sequence is synthesized)
cacatgaaccacctccacctccaccaatgcatggagcaggagatgcaaaaccgatacccacctgtatcagttctgctacaggtttgatagaaaatcgccctcagtcaccagctacaggca

SEQ ID NO: 189742 - DNA, 120 bp, Artificial Sequence
  ENSG00000112290_13 (sequence is synthesized)
gaacacctgtgtttgtgagccccactcccccacctcctccaccacctcttccatctgccttgtcaacttcctcattaagagcttcaatgacttcaactcctccccctccagtacctcccc

SEQ ID NO: 189743 - DNA, 120 bp, Artificial Sequence
  ENSG00000112290_14 (sequence is synthesized)
cacctccacctccagccactgctttgcaagctccagcagtaccaccacctccagctcctcttcagattgcccctggagttcttcacccagctcctcctccaattgcacctcctctagtac

SEQ ID NO: 189744 - DNA, 120 bp, Artificial Sequence
  ENSG00000112290_15 (sequence is synthesized)
agccctctccaccagtagctagagctgccccagtatgtgagactgtaccagttcatccactcccacaaggtgaagttcaggggctgcctccacccccaccaccgcctcctctgcctccac

SEQ ID NO: 189745 - DNA, 120 bp, Artificial Sequence
  ENSG00000112290_16 (sequence is synthesized)
ctggcattcgaccatcatcacctgtcacagttacagctcttgctcatcctccctctgggctacatccaactccatctactgccccaggtccccatgttccattaatgcctccatctcctc

SEQ ID NO: 189746 - DNA, 120 bp, Artificial Sequence
  ENSG00000112290_17 (sequence is synthesized)
catcacaagttatacctgcttctgagccaaagcgccatccatcaaccctacctgtaatcagtgatgccaggagtgtgctactggaagcaatacgaaaaggtattcagctacgcaaagtag

SEQ ID NO: 189747 - DNA, 120 bp, Artificial Sequence
  ENSG00000112290_18 (sequence is synthesized)
aagagcagcgtgaacaggaagctaagcatgaacgcattgaaaacgatgttgccaccatcctgtctcgccgtattgctgttgaatatagtgattcggaagatgattcagaatttgatgaag

SEQ ID NO: 189748 - DNA, 120 bp, Artificial Sequence
  ENSG00000112290_19 (sequence is synthesized)
tagattggttggagtaagaaaaatgcattgataaatattacaaaactgaatgcaaatgtcctttgtggtgcttgttccttgaaaatgtttggtcattctagtgttttgctttcttttcct

SEQ ID NO: 189749 - DNA, 120 bp, Artificial Sequence
  ENSG00000112290_20 (sequence is synthesized)
tataataaatgacccttttcctccataacttttgatttctaaggaaaatattagcatacatttcaaactaaatgttttacagtggcttatcttttttttccccctgaaaagactaatttg

SEQ ID NO: 189750 - DNA, 120 bp, Artificial Sequence
  ENSG00000112290_21 (sequence is synthesized)
gtcaaataaaccactaagtattaagcatggacagctgttgttagagtagcagattcagttttttgatatatcttaattgtgtactttgtgaattttaatttaaagaaagcaactgaaatt

SEQ ID NO: 189751 - DNA, 120 bp, Artificial Sequence
  ENSG00000112290_22 (sequence is synthesized)
gaaatcttgagggcagctgtgtctactaatgagccttattccatttcctgatgttttaaaagaagaaacactgccttgattatacgaatacactcagaaagtacatttagcttgtagtgt

SEQ ID NO: 189752 - DNA, 120 bp, Artificial Sequence
  ENSG00000112290_23 (sequence is synthesized)
tgaattctcttaaaggaatgcttgaattttttcattattgttttattgtttttatatacttgccttatttgaatgtttagcagtatccccttcccacttatatattgtgtgatatgattt

SEQ ID NO: 189753 - DNA, 120 bp, Artificial Sequence
  ENSG00000112290_24 (sequence is synthesized)
tgcttgcctataggagttaaaaacttttccatgtgaaatactctgacttaaacatacatgtaacttacataactgttaagaataacagtctgatttaataaatggttcattttaaaagtt

SEQ ID NO: 189754 - DNA, 120 bp, Artificial Sequence
  ENSG00000112290_25 (sequence is synthesized)
ccacctcggctgcacctgggcactggaggctgaagaggaaacatgccccctagcttcggtactctgacaccttctcttgcacttgcggatgatgaactggaataacgatgaaagaaagca

SEQ ID NO: 189755 - DNA, 120 bp, Artificial Sequence
  ENSG00000112290_26 (sequence is synthesized)
catccgatctcaacattcacgtcctgccctataaccgattaattaattgatccccagctagactaggtgttacaatccaaaatacatagttgtgatcatttataagtgttggagaaatca

SEQ ID NO: 189756 - DNA, 120 bp, Artificial Sequence
  ENSG00000112293_0 (sequence is synthesized)
gagtcccagtgctgctgcagctctgagcattcccacgtcaccagagaagccggtgggcaatgagatcatgtctgctttcaggttgtggcctggcctgctgatcatgttgggttctctctg

SEQ ID NO: 189757 - DNA, 120 bp, Artificial Sequence
  ENSG00000112293_1 (sequence is synthesized)
ccatagaggttcaccgtgtggcctttcaacacacgtagaaataggacacagagctctggagtttcttcagcttcacaatgggcgtgttaactacagagagctgttactagaacaccagga

SEQ ID NO: 189758 - DNA, 120 bp, Artificial Sequence
  ENSG00000112293_2 (sequence is synthesized)
tgcgtatcaggctggaatcgtgtttcctgattgtttttaccctagcatctgcaaaggaggaaaattccatgatgtgtctgagagcactcactggactccgtttcttaatgcaagcgttca

SEQ ID NO: 189759 - DNA, 120 bp, Artificial Sequence
  ENSG00000112293_3 (sequence is synthesized)
ttatatccgagagaactatccccttccctgggagaaggacacagagaaactggtagctttcttgtttggaattacttctcacatggcggcagatgtcagctggcatagtctgggccttga

SEQ ID NO: 189760 - DNA, 120 bp, Artificial Sequence
  ENSG00000112293_4 (sequence is synthesized)
acaaggattccttaggaccatgggagctattgattttcacggctcctattcagaggctcattcggctggtgattttggaggagatgtgttgagccagtttgaatttaattttaattacct

SEQ ID NO: 189761 - DNA, 120 bp, Artificial Sequence
  ENSG00000112293_5 (sequence is synthesized)
tgcacgacgctggtatgtgccagtcaaagatctactgggaatttatgagaaactgtatggtcgaaaagtcatcaccgaaaatgtaatcgttgattgttcacatatccagttcttagaaat

SEQ ID NO: 189762 - DNA, 120 bp, Artificial Sequence
  ENSG00000112293_6 (sequence is synthesized)
gtatggtgagatgctagctgtttccaagttatatcccacttactctacaaagtccccgtttttggtggaacaattccaagagtattttcttggaggactggatgatatggcattttggtc

SEQ ID NO: 189763 - DNA, 120 bp, Artificial Sequence
  ENSG00000112293_7 (sequence is synthesized)
cactaatatttaccatctaacaagcttcatgttggagaatgggaccagtgactgcaacctgcctgagaaccctctgttcattgcatgtggcggccagcaaaaccacacccagggctcaaa

SEQ ID NO: 189764 - DNA, 120 bp, Artificial Sequence
  ENSG00000112293_8 (sequence is synthesized)
aatgcagaaaaatgattttcacagaaatttgactacatccctaactgaaagtgttgacaggaatataaactatactgaaagaggagtgttctttagtgtaaattcctggaccccggattc

SEQ ID NO: 189765 - DNA, 120 bp, Artificial Sequence
  ENSG00000112293_9 (sequence is synthesized)
catgtcctttatctacaaggctttggaaaggaacataaggacaatgttcataggtggctctcagttgtcacaaaagcacgtctccagccccttagcatcttacttcttgtcatttcctta

SEQ ID NO: 189766 - DNA, 120 bp, Artificial Sequence
  ENSG00000112293_10 (sequence is synthesized)
tgcgaggcttggctgggcaatgacctcagctgacctcaaccaggatgggcacggtgacctcgtggtgggcgcaccaggctacagccgccccggccacatccacatcgggcgcgtgtacct

SEQ ID NO: 189767 - DNA, 120 bp, Artificial Sequence
  ENSG00000112293_11 (sequence is synthesized)
catctacggcaatgacctgggcctgccacctgttgacctggacctggacaaggaggcccacaggatccttgaaggcttccagccctcaggtcggtttggctcggccttggctgtgttgga

SEQ ID NO: 189768 - DNA, 120 bp, Artificial Sequence
  ENSG00000112293_12 (sequence is synthesized)
ctttaacgtggacggcgtgcctgacctggccgtgggagctccctcggtgggctccgagcagctcacctacaaaggtgccgtgtatgtctactttggttccaaacaaggaggaatgtcttc

SEQ ID NO: 189769 - DNA, 120 bp, Artificial Sequence
  ENSG00000112293_13 (sequence is synthesized)
ttcccctaacatcaccatttcttgccaggacatctactgtaacttgggctggactctcttggctgcagatgtgaatggagacagtgaacccgatctggtcatcggctccccttttgcacc

SEQ ID NO: 189770 - DNA, 120 bp, Artificial Sequence
  ENSG00000112293_14 (sequence is synthesized)
aggtggagggaagcagaagggaattgtggctgcgttttattctggccccagcctgagcgacaaagaaaaactgaacgtggaggcagccaactggacggtgagaggcgaggaagacttctc

SEQ ID NO: 189771 - DNA, 120 bp, Artificial Sequence
  ENSG00000112293_15 (sequence is synthesized)
ctggtttggatattcccttcacggtgtcactgtggacaacagaaccttgctgttggttgggagcccgacctggaagaatgccagcaggctgggccatttgttacacatccgagatgagaa

SEQ ID NO: 189772 - DNA, 120 bp, Artificial Sequence
  ENSG00000112293_16 (sequence is synthesized)
aaagagccttgggagggtgtatggctacttcccaccaaacggccaaagctggtttaccatttctggagacaaggcaatggggaaactgggtacttccctttccagtggccacgtactgat

SEQ ID NO: 189773 - DNA, 120 bp, Artificial Sequence
  ENSG00000112293_17 (sequence is synthesized)
gaatgggactctgaaacaagtgctgctggttggagcccctacgtacgatgacgtgtctaaggtggcattcctgaccgtgaccctacaccaaggcggagccactcgcatgtacgcactcac

SEQ ID NO: 189774 - DNA, 120 bp, Artificial Sequence
  ENSG00000112293_18 (sequence is synthesized)
atctgacgcgcagcctctgctgctcagcaccttcagcggagaccgccgcttctcccgatttggtggcgttctgcacttgagtgacctggatgatgatggcttagatgaaatcatcatggc

SEQ ID NO: 189775 - DNA, 120 bp, Artificial Sequence
  ENSG00000112293_19 (sequence is synthesized)
agcccccctgaggatagcagatgtaacctctggactgattgggggagaagacggccgagtatatgtatataatggcaaagagaccacccttggtgacatgactggcaaatgcaaatcatg

SEQ ID NO: 189776 - DNA, 120 bp, Artificial Sequence
  ENSG00000112293_20 (sequence is synthesized)
gataactccatgtccagaagaaaaggcccaatatgtattgatttctcctgaagccagctcaaggtttgggagctccctcatcaccgtgaggtccaaggcaaagaaccaagtcgtcattgc

SEQ ID NO: 189777 - DNA, 120 bp, Artificial Sequence
  ENSG00000112293_21 (sequence is synthesized)
tgctggaaggagttctttgggagcccgactctccggggcacttcacgtctatagccttggctcagattgaagatttcactgcatttccccactctgcccacctctctcatgctgaatcac

SEQ ID NO: 189778 - DNA, 120 bp, Artificial Sequence
  ENSG00000112293_22 (sequence is synthesized)
atccatggtgagcattttgatggacaaagtggcacatccagtggagcggtggtagatcctgatagacatggggctcctgggagtagagagacacactaacagccacaccctctggaaatc

SEQ ID NO: 189779 - DNA, 120 bp, Artificial Sequence
  ENSG00000112293_23 (sequence is synthesized)
tgatacagtaaatatatgactgcaccagaaatatgtgaaatagcagacattctgcttactcatgtctccttccacagtttacttcctcgctccctttgcatctaaacctttcttctttcc

SEQ ID NO: 189780 - DNA, 120 bp, Artificial Sequence
  ENSG00000112293_24 (sequence is synthesized)
acaacctatttcctcttcctcttgaatgtctttccaatggctggaaaggtccctctgtggttatctgttagaacagtctctgtacacaattcctcctaaaaacatccttttttaaaaaaa

SEQ ID NO: 189781 - DNA, 83 bp, Artificial Sequence
  ENSG00000112293_25 (sequence is synthesized)
cataaactattgcaggaacagaaaaccaaacactccatattctcacttgtaagtgggagctaaatgagaacacgtggacacat

SEQ ID NO: 189782 - DNA, 120 bp, Artificial Sequence
  ENSG00000112293_26 (sequence is synthesized)
cacttgtaagtgggagctaaatgagaacacgtggacacatagagggaaacaacacacactggggcctatgagagggcggaaggtgggaggagggagagatcaggaaaaataactaatgga

SEQ ID NO: 189783 - DNA, 120 bp, Artificial Sequence
  ENSG00000112293_27 (sequence is synthesized)
ataactaatggatacttagggtgatgaaataatctgtgtaacaaacccccatgacacacctttatgtatgtaacaaaccagcacttcctgcgcatgtacccctgaacttaaaagttaaaa

SEQ ID NO: 189784 - DNA, 120 bp, Artificial Sequence
  ENSG00000112293_28 (sequence is synthesized)
taaaaataacagattggcccatgccaatcaaagtataatagaaagcatagtatacagaaaaaaaaaaaaaaaagaaactgagggaggaaaaatagtacagagtaaagcatgggggtgagg

SEQ ID NO: 189785 - DNA, 120 bp, Artificial Sequence
  ENSG00000112293_29 (sequence is synthesized)
gataacctcacattccaaatcacttgtgacttagtcctttttaacttttattttaggttcagtggtacatgtgaaggttttatcttttctgttcctcccaccttccccactcaagtagac

SEQ ID NO: 189786 - DNA, 120 bp, Artificial Sequence
  ENSG00000112293_30 (sequence is synthesized)
cccagtgtgtgttgttttgtgttcataagttcttttaacttagcacccacttgtgagaacatgctatacttggtatttggttttctgttcctggtcgtgtgttagtttgctaaggatgat

SEQ ID NO: 189787 - DNA, 120 bp, Artificial Sequence
  ENSG00000112293_31 (sequence is synthesized)
aaagtgctgggattacatgtgtgagccacaggacctggccgataatcctttcttaatgaggattaataccttttcaatgtttatatagtgaaggacaaatataaaaaccaagactatcac

SEQ ID NO: 189788 - DNA, 120 bp, Artificial Sequence
  ENSG00000112293_32 (sequence is synthesized)
ggacaaatataaaaaccaagactatcacccttctgtgccctccaatacttttgtagagttggctgttctaacacctaaagagcctagcgacactgctagttttaagccatctcatgaggg

SEQ ID NO: 189789 - DNA, 120 bp, Artificial Sequence
  ENSG00000112293_33 (sequence is synthesized)
acctttgtcgcattaggttacaacttgtgccaaaagaactagagggaaaagatgtggcctgagccacacgctactgtaagggccggagaggaaagcaggccttggcctcgcttgttcctg

SEQ ID NO: 189790 - DNA, 120 bp, Artificial Sequence
  ENSG00000112293_34 (sequence is synthesized)
ggctgtttttcgtaggatggatttcatttgtcagtcctgcagcgtggcacacttaagggaatggaatgtatcatagggtttcagtttcagtaaacattagcgggcattatctgtaaacag

SEQ ID NO: 189791 - DNA, 120 bp, Artificial Sequence
  ENSG00000112293_35 (sequence is synthesized)
taactagtttattttgtgttaaattgggaagaacctctttcttctgccacgggtgagatgatactaaaagcaggagaaaataacaaatgagaagagcccttctcttctcagcttctctca

SEQ ID NO: 189792 - DNA, 120 bp, Artificial Sequence
  ENSG00000112293_36 (sequence is synthesized)
agagtagagactggtgaaaaggggacaggaagaggaatccagctgaagagtggaaagttaacaagaacatcaagaggtacatccctagagagcatctctgggtcactcccaggatgacct

SEQ ID NO: 189793 - DNA, 120 bp, Artificial Sequence
  ENSG00000112293_37 (sequence is synthesized)
catttttctggaagaggtacatgtgctagctgcatagtaacctatggcacagcaaaagcacaaggaagcgccatttggttttgtttagggacaattattggtagcccaacctatctgaag

SEQ ID NO: 189794 - DNA, 120 bp, Artificial Sequence
  ENSG00000112293_38 (sequence is synthesized)
aattacttttaattaaaaggatggttatttttaggggaccagaaattacttagttgtattcacttatgagttgagcagttagagcactctgacatctgacacttgagtaaagggatgttt

SEQ ID NO: 189795 - DNA, 120 bp, Artificial Sequence
  ENSG00000112293_39 (sequence is synthesized)
ttctcagtactgggtcttttcattagacggatgcatttatatagtgtcagtttttatgcttcactaaatgataaggcctctgtttaaacatgaccattatttacctcacgatttatattt

SEQ ID NO: 189796 - DNA, 120 bp, Artificial Sequence
  ENSG00000112293_40 (sequence is synthesized)
ttctcaatgcctgaatacacccaatagcaagcaccaggtggaggttaagacccacaaaaatggaagcaagcttcaagtttataggacatttaaccatactaaccccaatgtcaaaaacaa

SEQ ID NO: 189797 - DNA, 120 bp, Artificial Sequence
  ENSG00000112293_41 (sequence is synthesized)
tgtaaattatactcctactgtaaaaggtcaactgatatggcacgtatgtaaaaaacctggcatacaggaaaaaattaatgcatgacagtctaatatattatcctgatacatggattaaat

SEQ ID NO: 189798 - DNA, 120 bp, Artificial Sequence
  ENSG00000112293_42 (sequence is synthesized)
tttctttccactaagtattaactatagttttaagcattgattctgcttaataactaaaatgtaaagaccttaccttgtagggttgtaatttctcattaacagaaatctgaacttatacaa

SEQ ID NO: 189799 - DNA, 120 bp, Artificial Sequence
  ENSG00000112293_43 (sequence is synthesized)
gtttaactgaaatttatctttatttcaagatatcagaagacatttacatatttgcattttctgtcttgctactatctgcgtatatgtaacagcttttctcaaggcttcaagataggaatt

SEQ ID NO: 189800 - DNA, 120 bp, Artificial Sequence
  ENSG00000112293_44 (sequence is synthesized)
gttttatgcctttgtatcacagacctaagagaccaaaattatttgaagatggagtggggacaaaactagggtctctgcagtccctactccatgtaccatccattagctcacctctgtagg

SEQ ID NO: 189801 - DNA, 120 bp, Artificial Sequence
  ENSG00000112293_45 (sequence is synthesized)
tattactaaagtcatgagagttaaatccaacgtgcaactttaatattgcaattccaaaaaataaagctgtatacaactcttggaataactcaccaaaataaatagctttttaatataaaa

SEQ ID NO: 189802 - DNA, 120 bp, Artificial Sequence
  ENSG00000112293_46 (sequence is synthesized)
atatgtgtgtctttaatattttgctggttgcatgtattttctatttaatgttgcagttcatttagagtagagatgtacctcatttaacatagagatgtatttctaaaaacttgtgtctat

SEQ ID NO: 189803 - DNA, 80 bp, Artificial Sequence
  ENSG00000112293_47 (sequence is synthesized)
agccagcggccgcccacgaagctgtcggtgcgcagcagcgccgcagagaggcccgccaggcgcccagcgtagcagcggag

SEQ ID NO: 189804 - DNA, 120 bp, Artificial Sequence
  ENSG00000112293_48 (sequence is synthesized)
ccgccggcgcgggggcggaggcggcagcctggaaacgtcgacccgaggcgccgggccccacagctccgcagccaaatgcaggtcgccatggcccgggcaacgacggcgacaggaaacagg

SEQ ID NO: 189805 - DNA, 120 bp, Artificial Sequence
  ENSG00000112293_49 (sequence is synthesized)
aaaaaaaaaaaaaaaaaagtagaaatgagggtataagggtataattaaaattgattttaaaaagccacacaaacagtaataacattgtctctctcctcaatttttttcttcaggcccaat

SEQ ID NO: 189806 - DNA, 120 bp, Artificial Sequence
  ENSG00000112293_50 (sequence is synthesized)
tcatcggttttcttccaaatcagcgacgggagtaacatttttattcctatcaccaaaccacctgaaaaatggactcctaaacttcctcatatgacatcacattaggctaatcatgtaccc

SEQ ID NO: 189807 - DNA, 120 bp, Artificial Sequence
  ENSG00000112293_51 (sequence is synthesized)
tcaatatcatcagggtaagtgtatttattctgttattattacatttgtagtgcaagagctggacactctagaatcttccatgcacactactttgggaggcttaacaaatgttctagtgcc

SEQ ID NO: 189808 - DNA, 120 bp, Artificial Sequence
  ENSG00000112293_52 (sequence is synthesized)
taactgtacttaacctccagaaaatattttaaaaggtaggtaggatgttaaagaggatggcagctttcaggcttacaaatattagccatttgttttaaacccaaatctctgtggaaatga

SEQ ID NO: 189809 - DNA, 120 bp, Artificial Sequence
  ENSG00000112293_53 (sequence is synthesized)
ctttcctaatactttagctttaaactagtaaactccaccttttgcctgtagtagtaaattgcttttaaatatttaaactaggtggtgaatggtgtttattaaacccttatggtcgatatt

SEQ ID NO: 189810 - DNA, 120 bp, Artificial Sequence
  ENSG00000112293_54 (sequence is synthesized)
tccttaaagtaaaacaaaaaacacctttggttatatggccagttctttcttaatttatatgtttcactaactaagatttttaaaagataattttttcttaaaaaaaaaaaaaaaaaaaaa

SEQ ID NO: 189811 - DNA, 120 bp, Artificial Sequence
  ENSG00000112294_0 (sequence is synthesized)
gtttcctgtcgccgtcgttgcccgggccatggcgacctgcatttggctgcggagctgtggggcccggcgcctcgggtcgacgtttccaggctgccgcctccgcccccgcgccggcggcct

SEQ ID NO: 189812 - DNA, 120 bp, Artificial Sequence
  ENSG00000112294_1 (sequence is synthesized)
ccggcccagctccgctgctacgctgggcgcctggcgggcctctctgcggcgctgctgcgcaccgacagcttcgtgggcggccgctggctcccggccgccgccaccttccccgtgcaagac

SEQ ID NO: 189813 - DNA, 120 bp, Artificial Sequence
  ENSG00000112294_2 (sequence is synthesized)
ggccgccgccaccttccccgtgcaagacccggccagcggcgccgctctgggcatggtagccgactgcggggtgcgagaggcccgcgccgccgtgcgcgctgcctacgaggctttctgccg

SEQ ID NO: 189814 - DNA, 120 bp, Artificial Sequence
  ENSG00000112294_3 (sequence is synthesized)
ctggagggaggtctccgccaaggagaggagttcattacttcggaagtggtacaatttaatgatacaaaataaggatgaccttgccagaataatcacagctgaaagtggaaagccactgaa

SEQ ID NO: 189815 - DNA, 120 bp, Artificial Sequence
  ENSG00000112294_4 (sequence is synthesized)
ggaggcacatggagaaattctctattccgcctttttcctagagtggttctctgaggaagcccgccgtgtttacggagacattatccacaccccggcaaaggacaggcgggccctggtcct

SEQ ID NO: 189816 - DNA, 120 bp, Artificial Sequence
  ENSG00000112294_5 (sequence is synthesized)
caagcagcccataggcgtggctgcagtcatcaccccgtggaatttccccagtgccatgatcacccggaaggtgggggccgccctggcagccggctgtactgtcgtggtgaagcctgccga

SEQ ID NO: 189817 - DNA, 120 bp, Artificial Sequence
  ENSG00000112294_6 (sequence is synthesized)
agacacgcccttctccgccctggccctggctgaggtaaatcagggatttcttcttgatttggatccattgttgcttgcaagccaggctgggattccttcaggtgtatacaatgttattcc

SEQ ID NO: 189818 - DNA, 120 bp, Artificial Sequence
  ENSG00000112294_7 (sequence is synthesized)
ctgttctcgaaagaatgccaaggaagtaggggaggcaatttgtactgatcctctggtgtccaaaatttcctttactggttcaacaactacaggaaagatcctgttgcaccacgcagcaaa

SEQ ID NO: 189819 - DNA, 120 bp, Artificial Sequence
  ENSG00000112294_8 (sequence is synthesized)
ctctgtgaaaagggtctctatggagctgggcggccttgctccatttatagtatttgacagtgccaacgtggaccaggctgtagcaggggccatggcatctaaatttaggaacactggaca

SEQ ID NO: 189820 - DNA, 120 bp, Artificial Sequence
  ENSG00000112294_9 (sequence is synthesized)
tttgaggaaggaactactcagggcccattaattaatgaaaaagcggtagaaaaggtggagaaacaggtgaatgatgccgtttctaaaggtgccaccgttgtgacaggtggaaaacgacac

SEQ ID NO: 189821 - DNA, 120 bp, Artificial Sequence
  ENSG00000112294_10 (sequence is synthesized)
caacttggaaaaaatttctttgagcctaccctgctgtgcaatgtcacccaggacatgctgtgcactcatgaagagactttcgggcctctggcaccagttatcaagttcgatacagaggag

SEQ ID NO: 189822 - DNA, 120 bp, Artificial Sequence
  ENSG00000112294_11 (sequence is synthesized)
gaggctatagcaatcgctaacgcagctgatgttgggttagcaggttatttttactctcaagacccagcccagatctggagagtggcagagcagctggaagtgggcatggttggcgtcaac

SEQ ID NO: 189823 - DNA, 120 bp, Artificial Sequence
  ENSG00000112294_12 (sequence is synthesized)
gaaggattaatttcctctgtggagtgcccttttggtggagtgaagcagtccggccttgggcgagaggggtccaagtatggcattgatgagtatctggaactcaagtatgtgtgttacggg

SEQ ID NO: 189824 - DNA, 120 bp, Artificial Sequence
  ENSG00000112294_13 (sequence is synthesized)
ggcttgtaggattctttggttctttaaaaaaatttaaaaggagacttatctacatatataggtacatgccatccattattttaaataaactaataggttttcagaattatgaatttttca

SEQ ID NO: 189825 - DNA, 120 bp, Artificial Sequence
  ENSG00000112294_14 (sequence is synthesized)
gaactcatccagtccttgtaatcttaaacagatgcaaatcctacccctgcccttaatgtaactagggaccaatatgtgccacgtgcctgtggctgcagactcccagagaaccagcactgg

SEQ ID NO: 189826 - DNA, 120 bp, Artificial Sequence
  ENSG00000112294_15 (sequence is synthesized)
gtttacagaatgaggccctggctccccaccacagccccagctgcctcagagcaggcacagcacaaggcaggcccagccccatgggccgtcacaaaggcttgatcactgcctgggcagtgg

SEQ ID NO: 189827 - DNA, 120 bp, Artificial Sequence
  ENSG00000112294_16 (sequence is synthesized)
cacaaccatcccccatgtcgctacagaacatgggcccagagcaccttgaaggagacccttgactgtgactggcaggcaggtgaggggcacagcacccctccccggcatctgccagctcag

SEQ ID NO: 189828 - DNA, 120 bp, Artificial Sequence
  ENSG00000112294_17 (sequence is synthesized)
cacagaagacaccgaatgtgcatctggaggtgttgcggcagaggtttgagtgaaccctctttcaaagacaataaatagcacagaattgtccgtgcttctgtgaggcacgaaggagcacct

SEQ ID NO: 189829 - DNA, 120 bp, Artificial Sequence
  ENSG00000112294_18 (sequence is synthesized)
cacttaaagaattctattttcatttctgtcctgtttgccacttcatttcatttccttgagtaaatgagctgaagtgtaaagcaaagaatagcagaagcagcttggtaggatggaaggcac

SEQ ID NO: 189830 - DNA, 120 bp, Artificial Sequence
  ENSG00000112294_19 (sequence is synthesized)
gcagtggcatggcctggctccttccctgagtggccttgttgccttgggcgtgtgttcagcacctcccatcccatggatacagtggagattccatacaggccttacttagctccttgcgat

SEQ ID NO: 189831 - DNA, 120 bp, Artificial Sequence
  ENSG00000112294_20 (sequence is synthesized)
gcccttccttgcctactgtcagtggctttgccaagatgggaggaggccagtgcccacttgcccaccgacctgagcctgagtaagtggctgtcacctgagcctgttctttctgtcctggtg

SEQ ID NO: 189832 - DNA, 120 bp, Artificial Sequence
  ENSG00000112294_21 (sequence is synthesized)
tggtgctgctccctcacctccaaaagagcaaaagtactttcaccacagtcaacccaaaagggaaagaatttctgtaattgccaacccactttgtagaagaggcatgagcccttgaatttc

SEQ ID NO: 189833 - DNA, 120 bp, Artificial Sequence
  ENSG00000112294_22 (sequence is synthesized)
aggcaccttttatctaatgagagtttttacagctcatcattcaaataacgcacaaaaaacaaaagccgctatgaccggcgttgcctctcactttgaaagaaagactccgtaatcttaaac

SEQ ID NO: 189834 - DNA, 120 bp, Artificial Sequence
  ENSG00000112294_23 (sequence is synthesized)
agatgcaaatccaattaggcggccaagtaggtggagacgaagcaccttcctttccccatctctgtctgtgtagactccacttacatcttgtggttattctgggttgtggaaggaaaatgt

SEQ ID NO: 189835 - DNA, 120 bp, Artificial Sequence
  ENSG00000112294_24 (sequence is synthesized)
gaatgaaagtagtgctggatgcaattactcctgaaccccacctaggatttaacatccctcattgagccactgggaagctatggttgagtaactaaaggtctggcaagaccctgggcacac

SEQ ID NO: 189836 - DNA, 120 bp, Artificial Sequence
  ENSG00000112294_25 (sequence is synthesized)
agggagctgcctagcatctggcctggagtgtactagccacattcccaaggtcccaaggagaaggaagagctgaaattcatctcctagtgacagtgccccggccctgtcaagaatcacata

SEQ ID NO: 189837 - DNA, 120 bp, Artificial Sequence
  ENSG00000112294_26 (sequence is synthesized)
ctcagcattttgacagttaatgtcttctctttatttgtgtagtttttaggtggttttatataacattttaattacttgtgatttagatgtatccatcctttttctattaagaatacaaat

SEQ ID NO: 189838 - DNA, 120 bp, Artificial Sequence
  ENSG00000112294_27 (sequence is synthesized)
cagcctggatgacagagcgagactccgcctcaaaaaaagaatacaaatgctccaacattattttttataactctggattaccgatgctgagatgtgtgcaggaatacttccaaataaatt

SEQ ID NO: 189839 - DNA, 120 bp, Artificial Sequence
  ENSG00000112294_28 (sequence is synthesized)
tacttccaaataaatttttaacattgtaagccagtagattctttggctgggtggcaaattttgagtcttcttgcatatttggctcatgggttcataaattgaggccagagactcattgta

SEQ ID NO: 189840 - DNA, 120 bp, Artificial Sequence
  ENSG00000112294_29 (sequence is synthesized)
tatccttgatcaattttctaattaaaggaaatagcttattgtttagtaaaatggcccttggttgtgggaagaaagagaattatttttaactgaacgtttttgttgttttttaaataaagt

SEQ ID NO: 189841 - DNA, 120 bp, Artificial Sequence
  ENSG00000112294_30 (sequence is synthesized)
agccatatgtaacgggattttaaaaatatatacattttacaacatggactagaaaaggaccattagatcaggggttggcaaactatggcccacgaatcaaacctggcctgccacctgttt

SEQ ID NO: 189842 - DNA, 120 bp, Artificial Sequence
  ENSG00000112294_31 (sequence is synthesized)
ttatacaacctgtgagctaagaatggtttatatgttttcaaatgattgggcagaaaatcaaaagaagaacaatatttcatgacacctgaaaattctatgaaattcagatttcagtgtcca

SEQ ID NO: 189843 - DNA, 120 bp, Artificial Sequence
  ENSG00000112294_32 (sequence is synthesized)
taaacaaaatgttattagagcatagccacacccattcatttatggtattgtctgggactgctttcttggcagagttgaatagttgggacagggacagtatagcctgcaaagcctaaaaga

SEQ ID NO: 189844 - DNA, 120 bp, Artificial Sequence
  ENSG00000112294_33 (sequence is synthesized)
tttactacttgtctccttaaagaaaaagtttgccagctcctgatctagaccaagagggagatattgaccttacttgcatttatccggcattatttcaacacctcctgtgaagaaagtact

SEQ ID NO: 189845 - DNA, 120 bp, Artificial Sequence
  ENSG00000112294_34 (sequence is synthesized)
tttctggcatagctaccgtgagttctcagcaggaacttcccagcgatgataatgtacatgaaattagccacgtaacaagagtctatttgccttgaaaaaacaattatccttgaacttcct

SEQ ID NO: 189846 - DNA, 120 bp, Artificial Sequence
  ENSG00000112294_35 (sequence is synthesized)
ccagctatgcagggattctcattaaagagctgatctgcatctgtttatccattttagtagcttttaaatatgattttatgtgaagtgccatttctttattctactaaagagagacagcag

SEQ ID NO: 189847 - DNA, 120 bp, Artificial Sequence
  ENSG00000112294_36 (sequence is synthesized)
aaataaagatcagaagcaaatgtgagcaaatctgttttactgttaacttcaattatgaacttgaaattgtgccacatgactttttcctctaaaaactggatcctagtgttttaattacct

SEQ ID NO: 189848 - DNA, 120 bp, Artificial Sequence
  ENSG00000112294_37 (sequence is synthesized)
gtgtgcagctattttaaatagcattttacttgaataatatgtatgttgtcattgtttcatgctatactttgtgggataaaacttgggaatgagtgtggtaagaaatttataaagttttgc

SEQ ID NO: 189849 - DNA, 120 bp, Artificial Sequence
  ENSG00000112294_38 (sequence is synthesized)
ttttaaaacgtggacataactcatttttctagtttttgacaattgtgtgttttagtgtctagtctgcagagagctgtgtgattaataaacgtggaattaacagaatttcctctccctgta

SEQ ID NO: 189850 - DNA, 120 bp, Artificial Sequence
  ENSG00000112294_39 (sequence is synthesized)
actctgatttactccttgtgattatttgggaaacaaatcagaagaaaacaaaactggtttcctttcctctcccccttacattttttatgacctatcttaactttggcaggttcgatacag

SEQ ID NO: 189851 - DNA, 120 bp, Artificial Sequence
  ENSG00000112294_40 (sequence is synthesized)
taatgaaaaagcggtagaaaagcaattaggatcttgagacaaagttcattcatcttttggaacacctatggaatggaagactggcttggttttgagatggtttgcgtttcggctgtaatg

SEQ ID NO: 189852 - DNA, 120 bp, Artificial Sequence
  ENSG00000112294_41 (sequence is synthesized)
ctgatgttgtcctgttctttcttctcttgatgacaaaatccctgtctaaaacagtccttcatgaaagtatcccagccgggggtgcagaatcacagatgccgcgttcaggatttagagata

SEQ ID NO: 189853 - DNA, 120 bp, Artificial Sequence
  ENSG00000112294_42 (sequence is synthesized)
ttgaggggaaactgcttttaggaaagatttgtttgtttaaaaaaatgttataatccatactactagctatatgagacttctctccttattctactgttttaaaaaaatccattttggagt

SEQ ID NO: 189854 - DNA, 120 bp, Artificial Sequence
  ENSG00000112294_43 (sequence is synthesized)
aggaatttttacactaaacttgggaaagccgctgacttcccttcactgctggctgtagctgaagaatatgtgattccttctctactgatcaaataccaaatcattattgtgccaggggaa

SEQ ID NO: 189855 - DNA, 120 bp, Artificial Sequence
  ENSG00000112294_44 (sequence is synthesized)
tggcagtttgagcacatgacaaccaccgagggaagtgttttcacagagaggcggtagcagccacacgttcactggtcaggtctgcagcttctgacagactgtgtgggtttgtttttgtct

SEQ ID NO: 189856 - DNA, 120 bp, Artificial Sequence
  ENSG00000112297_0 (sequence is synthesized)
agatgccaccaccactgccaagcagctgcattcctcgccgggaaattcctccaggcaagagaacgcagagacgcccgcccgcagtccgggggaggacgcttcaccaggtgctggccacga

SEQ ID NO: 189857 - DNA, 120 bp, Artificial Sequence
  ENSG00000112297_1 (sequence is synthesized)
acaggaggctttcctgggtgtgaggggtgcgccagggtcgcccacccaggagcggcccgcgggaggactaggcgaggcccctaacggagcccccagtgtgtgtgccgaagaaggctccct

SEQ ID NO: 189858 - DNA, 120 bp, Artificial Sequence
  ENSG00000112297_2 (sequence is synthesized)
ggggccccgcaacgcccgcagccagccccccaagggcgcgtctgatttgccaggtgagcctccggccgagggcgcagcgcacacggccagctccgcgcaggcagactgcacagcccgccc

SEQ ID NO: 189859 - DNA, 120 bp, Artificial Sequence
  ENSG00000112297_3 (sequence is synthesized)
caagggtcacgcccaccctgctaaggtgctaactttggacatctacttgagtaagactgagggggcacaagtggacgagccggtcgtgattactcccagagcggaagattgcggtgactg

SEQ ID NO: 189860 - DNA, 120 bp, Artificial Sequence
  ENSG00000112297_4 (sequence is synthesized)
ggacgacatggagaagaggtccagcggccgtaggtcggggaggcggagggggtcgcagaaatccaccgactcccccggcgcggacgccgagctccctgagagcgctgccagggacgacgc

SEQ ID NO: 189861 - DNA, 120 bp, Artificial Sequence
  ENSG00000112297_5 (sequence is synthesized)
ggtgttcgacgacgaggtggcgccaaacgcggccagcgataacgcctcggcggaaaagaaagtgaaatctccgcgggcagccctcgacgggggcgttgcctccgctgcgagcccagagtc

SEQ ID NO: 189862 - DNA, 120 bp, Artificial Sequence
  ENSG00000112297_6 (sequence is synthesized)
caagcccagccccggtaccaaagggcagctccgaggggagtcggaccggagcaaacagccacccccggcttcgtcccccacgaagaggaagggcaggagccgtgccctcgaggccgtgcc

SEQ ID NO: 189863 - DNA, 120 bp, Artificial Sequence
  ENSG00000112297_7 (sequence is synthesized)
ccgcccgccagcggcccccgggctcccgccaaggagtccccacccaagagggtgcccgatcccagcccagtcaccaagggcactgcggccgagagcggggaggaggcggcgcgggccatc

SEQ ID NO: 189864 - DNA, 120 bp, Artificial Sequence
  ENSG00000112297_8 (sequence is synthesized)
catcccccgcgagctcccggtcaagagcagctcgctgctgccggagatcaagcccgagcacaagaggggcccgctccccaaccacttcaacggccgggcagagggaggtcgaagcagaga

SEQ ID NO: 189865 - DNA, 120 bp, Artificial Sequence
  ENSG00000112297_9 (sequence is synthesized)
gctgggcagagcggccggagcgcctggagcttctgacgccgacggcttgaagcccaggaaccatttcggcgtgggcaggtcgacagtgaccactaaagtgaccctccctgccaagcccaa

SEQ ID NO: 189866 - DNA, 120 bp, Artificial Sequence
  ENSG00000112297_10 (sequence is synthesized)
acatgtggaactaaatcttaaaacccctaagaatcttgacagtttgggaaatgagcacaatccatttagccagccagttcacaaaggcaacactgccaccaaaatctccttatttgaaaa

SEQ ID NO: 189867 - DNA, 120 bp, Artificial Sequence
  ENSG00000112297_11 (sequence is synthesized)
caaacggacaaacagtagcccaagacacactgacattcgaggccaaaggaatactcctgcctctagtaaaacgtttgttgggagggcaaagctgaatttagccaaaaaagccaaagaaat

SEQ ID NO: 189868 - DNA, 120 bp, Artificial Sequence
  ENSG00000112297_12 (sequence is synthesized)
ggagcaacctgaaaagaaagtaatgccaaacagtccccagaatggtgtgctggttaaggaaactgctatagaaaccaaagttaccgtctcggaagaagagattctgccagcaaccagagg

SEQ ID NO: 189869 - DNA, 120 bp, Artificial Sequence
  ENSG00000112297_13 (sequence is synthesized)
aatgaatggagactcttctgagaatcaagctcttggtcctcagcctaaccaagatgataaagcagatgtacaaacagatgctggctgcctttcagaaccagtggcttctgctctgattcc

SEQ ID NO: 189870 - DNA, 120 bp, Artificial Sequence
  ENSG00000112297_14 (sequence is synthesized)
tgtcaaggatcataagctcttagagaaggaggactcagaggctgcagacagcaaaagccttgtacttgaaaatgtaaccgatacagcacaagacatccccaccactgtggataccaaaga

SEQ ID NO: 189871 - DNA, 120 bp, Artificial Sequence
  ENSG00000112297_15 (sequence is synthesized)
tttacctccaacggccatgccaaagccacagcatacattttctgactcacagtcccctgctgagtcatctcctgggccttctctttcactgtctgcacccgctcctggggatgttcccaa

SEQ ID NO: 189872 - DNA, 120 bp, Artificial Sequence
  ENSG00000112297_16 (sequence is synthesized)
agacacatgtgttcaatcacccataagcagtttcccatgcactgatctaaaagtgtcagaaaaccataaaggatgtgttttgcctgtgtctcgtcagaacaatgagaaaatgccactttt

SEQ ID NO: 189873 - DNA, 120 bp, Artificial Sequence
  ENSG00000112297_17 (sequence is synthesized)
agaacttggaggagaaacaacccctcctttgtccacagagcgtagtccagaagctgtgggaagtgagtgtccatccagagtcctcgtccaggtcaggtccttcgtgctccccgtggagag

SEQ ID NO: 189874 - DNA, 120 bp, Artificial Sequence
  ENSG00000112297_18 (sequence is synthesized)
cacccaggatgtgagctcccaggtcatcccagagagctctgaagttagagaagtgcagttgccaacttgtcacagtaatgaacctgaagtggtttccgttgcaagttgtgctcccccaca

SEQ ID NO: 189875 - DNA, 120 bp, Artificial Sequence
  ENSG00000112297_19 (sequence is synthesized)
agaggaagtactgggcaatgaacactctcattgcacagcagagctcgcggcaaaatctggcccacaagtcataccgccagcatcagagaaaactctgcctattcaggctcaaagtcaggg

SEQ ID NO: 189876 - DNA, 120 bp, Artificial Sequence
  ENSG00000112297_20 (sequence is synthesized)
cagcagaacacccctgatggctgaatccagtcccaccaactctcccagcagcggaaatcacttagccactcctcaaaggccagatcagactgttacaaatggccaggatagccctgccag

SEQ ID NO: 189877 - DNA, 120 bp, Artificial Sequence
  ENSG00000112297_21 (sequence is synthesized)
ccttttgaacatttctgctggtagtgatgatagtgtatttgattcttcttctgatatggaaaaattcactgaaattataaaacagatggatagcgcagtttgtatgcccatgaaaagaaa

SEQ ID NO: 189878 - DNA, 120 bp, Artificial Sequence
  ENSG00000112297_22 (sequence is synthesized)
gaaggccaggatgccaaactctcctgctcctcactttgccatgcctcctattcacgaagaccatttagaaaaggtgtttgatcccaaagtgtttacctttggtttggggaagaagaagga

SEQ ID NO: 189879 - DNA, 120 bp, Artificial Sequence
  ENSG00000112297_23 (sequence is synthesized)
aagtcagccagaaatgtcaccggctttacatttgatgcagaaccttgacacaaaatccaaactgagacccaaacgtgcatctgctgaacagagcgtcctcttcaagtccctgcacaccaa

SEQ ID NO: 189880 - DNA, 120 bp, Artificial Sequence
  ENSG00000112297_24 (sequence is synthesized)
cactaatgggaacagtgagcctctggtgatgccggaaatcaatgacaaagagaacagggacgtcacaaatggtggcattaagagatcgagactagaaaaaagtgcacttttctcaagctt

SEQ ID NO: 189881 - DNA, 120 bp, Artificial Sequence
  ENSG00000112297_25 (sequence is synthesized)
gttatcttctttaccacaagacaaaatcttttctccttctgtgacatcagtcaacactatgaccacggctttcagtacttctcagaacggttccctatctcagtcttcagtgtcacagcc

SEQ ID NO: 189882 - DNA, 120 bp, Artificial Sequence
  ENSG00000112297_26 (sequence is synthesized)
cacgactgagggtgccccgccctgtggtttgaacaaagaacagtcaaatcttctgcccgacaactccttaaaggtcttcaatttcaactcgtcaagtacatcacactccagtttgaaaag

SEQ ID NO: 189883 - DNA, 120 bp, Artificial Sequence
  ENSG00000112297_27 (sequence is synthesized)
tccaagccacatggaaaaatacccgcaaaaagagaaaaccaaagaagatctggattcacgaagcaacctacacttgccagaaactaaattttctgaattgtcaaaactgaagaatgatga

SEQ ID NO: 189884 - DNA, 120 bp, Artificial Sequence
  ENSG00000112297_28 (sequence is synthesized)
tatggaaaaggctaatcatattgaaagtgttattaaatcaaacttgccaaactgtgcaaacagtgacaccgacttcatgggtcttttcaaatcaagccggtatgacccaagcatttcttt

SEQ ID NO: 189885 - DNA, 120 bp, Artificial Sequence
  ENSG00000112297_29 (sequence is synthesized)
ttctggaatgtcattatcagacacaatgacacttagaggaagtgtccaaaataaactcaatccccgacctggaaaggtagtgatatatagtgaacccgacgtctctgagaagtgcattga

SEQ ID NO: 189886 - DNA, 120 bp, Artificial Sequence
  ENSG00000112297_30 (sequence is synthesized)
agttttcagtgacattcaggattgcagttcttggagcctctctccagtgatactcataaaagttgttagaggatgttggattttgtatgagcaaccaaattttgaagggcactccatccc

SEQ ID NO: 189887 - DNA, 120 bp, Artificial Sequence
  ENSG00000112297_31 (sequence is synthesized)
tggttcaggattacagagttagtcacattgacttatttactgaaccagaagggttaggaatcctaagttcctactttgatgatactgaagaaatgcagggatttggtgtaatgcagaaga

SEQ ID NO: 189888 - DNA, 120 bp, Artificial Sequence
  ENSG00000112297_32 (sequence is synthesized)
cttgttccatgaaagtacattggggcacgtggctgatttatgaagaacctggatttcagggtgttcctttcatcctggaacctggtgaataccctgacttgtccttctgggatacagaag

SEQ ID NO: 189889 - DNA, 120 bp, Artificial Sequence
  ENSG00000112297_33 (sequence is synthesized)
aagcgtacattggatccatgcggcctctgaaaatgggtggccgtaaagttgaattccctacagatccaaaggtagttgtttatgaaaagcctttctttgaaggaaaatgtgtggaactag

SEQ ID NO: 189890 - DNA, 120 bp, Artificial Sequence
  ENSG00000112297_34 (sequence is synthesized)
aaacaggaatgtgtagttttgtcatggagggaggtgaaacagaagaggcgactggagacgatcatttgccgtttacgtcagtggggtctatgaaagttctaagaggcatttgggttgcat

SEQ ID NO: 189891 - DNA, 120 bp, Artificial Sequence
  ENSG00000112297_35 (sequence is synthesized)
atgagaaacctggatttaccggtcatcagtatttgctagaagaaggagaatacagggactggaaagcctggggaggttacaatggagagcttcagtctttacgacctatattaggtgatt

SEQ ID NO: 189892 - DNA, 120 bp, Artificial Sequence
  ENSG00000112297_36 (sequence is synthesized)
tttcaaatgctcacatgataatgtacagtgaaaaaaactttggatccaaaggttccagtattgatgtattgggaattgttgctaatttaaaggagactggatatggagtgaagacacagt

SEQ ID NO: 189893 - DNA, 120 bp, Artificial Sequence
  ENSG00000112297_37 (sequence is synthesized)
ctattaatgtactgagtggagtatgggtagcctatgaaaatcctgacttcacaggagaacagtatatactggataaaggattttataccagttttgaggactggggaggcaaaaattgta

SEQ ID NO: 189894 - DNA, 120 bp, Artificial Sequence
  ENSG00000112297_38 (sequence is synthesized)
agatctcttctgttcaacctatatgtttggattctttcactggcccaaggagacgaaatcagattcacttgttttcagaaccacagtttcaaggtcacagtcaaagttttgaagaaacaa

SEQ ID NO: 189895 - DNA, 120 bp, Artificial Sequence
  ENSG00000112297_39 (sequence is synthesized)
caagtcaaattgatgattcattttctaccaagtcttgcagagtttcaggaggcagctgggttgtatatgatggagaaaatttcactggtaatcaatacgtgttggaagaaggccattatc

SEQ ID NO: 189896 - DNA, 120 bp, Artificial Sequence
  ENSG00000112297_40 (sequence is synthesized)
cttgtctgtctgcaatgggatgcccgcctggagcaactttcaagtctcttcgttttatagatgttgaattttctgaaccaacaattattctctttgaaagagaagacttcaaaggaaaaa

SEQ ID NO: 189897 - DNA, 120 bp, Artificial Sequence
  ENSG00000112297_41 (sequence is synthesized)
agattgaacttaatgcagaaactgtcaatctccgatccctgggattcaacacacaaatacgctctgttcaggttattggtggcatatgggttacttatgaatatggcagttacagagggc

SEQ ID NO: 189898 - DNA, 120 bp, Artificial Sequence
  ENSG00000112297_42 (sequence is synthesized)
gacagttcctattgtcacctgcagaagtacctaattggtatgaattcagtggctgtcgccaaataggttctctacgaccttttgttcagaagcgaatttatttcagacttcgaaacaaag

SEQ ID NO: 189899 - DNA, 120 bp, Artificial Sequence
  ENSG00000112297_43 (sequence is synthesized)
caacagggttattcatgtcaaccaatggaaacttagaggatctgaagcttctgaggatacaggtcatggaggatgtcggggccgatgatcagatttggatctatcaagaaggatgtatca

SEQ ID NO: 189900 - DNA, 120 bp, Artificial Sequence
  ENSG00000112297_44 (sequence is synthesized)
aatgcaggatagcagaagactgctgcctgacgattgtgggcagcctggtaacatctggctccaagctaggcctggccctggaccagaatgctgacagccagttctggagcttgaagtccg

SEQ ID NO: 189901 - DNA, 120 bp, Artificial Sequence
  ENSG00000112297_45 (sequence is synthesized)
atggcaggatttacagcaagttgaagccaaatttagttttagacattaaagggggcacacagtatgatcaaaatcacattatcctcaacactgtcagcaaagagaagtttacacaagtgt

SEQ ID NO: 189902 - DNA, 120 bp, Artificial Sequence
  ENSG00000112297_46 (sequence is synthesized)
gggaagccatggtcctatatacctgaacaaagaaggaagaagaatcttctggaggtccttccagccaccttatttcttaaaaaggacaatgctgatggaagaccagactggaaagtggat

SEQ ID NO: 189903 - DNA, 120 bp, Artificial Sequence
  ENSG00000112297_47 (sequence is synthesized)
cgactcctccttcattgattctaaattcaaccttaaatcatgctgccatgactcagagaacttactcatcgtttcaaaagactatcatagctttaaaccaataatttgtcctcctttcat

SEQ ID NO: 189904 - DNA, 120 bp, Artificial Sequence
  ENSG00000112297_48 (sequence is synthesized)
ttcttgcctttcatttttggtagctgcttaaacaggttgcctaattagcagcttttgggtgattttgtaaaatgttatatcaagatttcaagactgtgtacattttaaattatttccaaa

SEQ ID NO: 189905 - DNA, 120 bp, Artificial Sequence
  ENSG00000112297_49 (sequence is synthesized)
gatagtgacaggagagaactggaacaaatttaccaactttgtggacctacaaagcccttacactttaaagggtaagacaaaggcttaagtttgaaaggtagagaactgtttagcatctga

SEQ ID NO: 189906 - DNA, 120 bp, Artificial Sequence
  ENSG00000112297_50 (sequence is synthesized)
gaagaaatactttattaggcctgtaattttggttcttggccttaaacactttctggaacctttaaatatgctgcatagcacaatgggaaagccttaggtattcacacatttaaggaactc

SEQ ID NO: 189907 - DNA, 120 bp, Artificial Sequence
  ENSG00000112297_51 (sequence is synthesized)
taaacaaaatactattttcctttagttcatattaaaaattaatacattttaaaaatttaatgtcaaagtctggtaacatttgttagtaggatttgagttattattttttgagacaggatc

SEQ ID NO: 189908 - DNA, 120 bp, Artificial Sequence
  ENSG00000112297_52 (sequence is synthesized)
agcccagccaaattttgttttttttttgtagagatggggtttcatcacgttgcccaggctgatctcgaacctctgggctcaagcaattcactcgcctcggcctcccaaaatgctgggatt

SEQ ID NO: 189909 - DNA, 120 bp, Artificial Sequence
  ENSG00000112297_53 (sequence is synthesized)
gcctgagccactgcgcccagccaggatttgaattattttaactcatccatgggctgccctagaatgtcacaaatgagggttgtttaatgcctttcttatagctgctactggaacactatt

SEQ ID NO: 189910 - DNA, 120 bp, Artificial Sequence
  ENSG00000112297_54 (sequence is synthesized)
atgacctaatttatgagccatccttactcatctacaagtgctgaagcaatgttacatacttttttgctaaactcagattttttagcctaatttcttgtcctcctatccacctgcatccac

SEQ ID NO: 189911 - DNA, 120 bp, Artificial Sequence
  ENSG00000112297_55 (sequence is synthesized)
acatggcctgcatggggctgccttccctgcagtgttctgcagccatgcttcagggtatagctgttggtggacagcctcaggtcttgggggcactatagccactaaacgaggtgtgaaagg

SEQ ID NO: 189912 - DNA, 120 bp, Artificial Sequence
  ENSG00000112297_56 (sequence is synthesized)
ctcaagaggatgaccagcaattaattatccccagaaagtgaaggaaaagagacctttagggatgttgctggtcaagtcttgatttgaccggagtcaaatcaatcttcaagcaatcttgga

SEQ ID NO: 189913 - DNA, 120 bp, Artificial Sequence
  ENSG00000112297_57 (sequence is synthesized)
atcctcaactgcagtaagcatttcaaaatgcaaacaaactgcttaacaactgacaagacaccagcccatacgctgctcttccaacagtgggttctagctttgaacaaaagtgctaaacat

SEQ ID NO: 189914 - DNA, 120 bp, Artificial Sequence
  ENSG00000112297_58 (sequence is synthesized)
ttccttgaatatattcttcctctttttgtcctcatcactcaatactggtgctcttgtcacaggtagaacagcttgtttcttttccatctattcaagtgtgtttctaattctaaaatgctg

SEQ ID NO: 189915 - DNA, 120 bp, Artificial Sequence
  ENSG00000112297_59 (sequence is synthesized)
atcttctctggagtctatggtaggcaattatggtcactggaatagtttgtcttgttttaaaatattattggtgcatgtacaacagcatccaacatatctgtcttgttcctagatatatag

SEQ ID NO: 189916 - DNA, 120 bp, Artificial Sequence
  ENSG00000112297_60 (sequence is synthesized)
ctctgattttaggccttttgtgcataccattacaatatggtggggtaagacattctacagtagcctgtgctgaactgatctcttaaataaacttgcttctggttaactatgttgatgaaa

SEQ ID NO: 189917 - DNA, 120 bp, Artificial Sequence
  ENSG00000112297_61 (sequence is synthesized)
gagaaaggcgggcgagctggcgctcaggtgtgttcttccatagggcccgggcggcagagaggaccgcgtcccggcagtcggagcgggaggaggacaagacgatgccgctgtccccgccag

SEQ ID NO: 189918 - DNA, 120 bp, Artificial Sequence
  ENSG00000112297_62 (sequence is synthesized)
cccagggcgaccccggggagcccagcccgtgcaggccccctaagaagcacaccaccttccacctctggcgctccaaaaagaagcagcagccggcgccgcctgactgtggggtgttcgttc

SEQ ID NO: 189919 - DNA, 120 bp, Artificial Sequence
  ENSG00000112297_63 (sequence is synthesized)
cgcacccgctcccggcgcctgccggagaggccagagctttggatgtagtcgatggaaaatatgtggttcgagactcccaggaatttccactgcactgtggggaatcccagttcttccaca

SEQ ID NO: 189920 - DNA, 120 bp, Artificial Sequence
  ENSG00000112297_64 (sequence is synthesized)
ccaccagtgaggcgcttggttccttacttctagagtctggaatatttaaaaagtccagagcacaacctccagaagacaacagaaggaagccagttttggggaaacttggcactctattca

SEQ ID NO: 189921 - DNA, 120 bp, Artificial Sequence
  ENSG00000112297_65 (sequence is synthesized)
ctgcaggaaggagaagaaacagtagaaacgggttagagagtcccaccagatcaaatgccaaaccactctctcccaaagatgtggtagcctctcctaagctcccagagagagagagtgaga

SEQ ID NO: 189922 - DNA, 120 bp, Artificial Sequence
  ENSG00000112297_66 (sequence is synthesized)
ggagcagatctcagagcagccaactgaagcaaacggacacaagcgaggagggctccccgcgggagaatccccgagaggcagagggcgagctccccgagagcggtggccccgcagcccccc

SEQ ID NO: 189923 - DNA, 120 bp, Artificial Sequence
  ENSG00000112297_67 (sequence is synthesized)
ggatgaagcaggtttgaggggtgctggtataatagcaagaaagatttgctgaccactctctttccaaactccatagtttctgagtggaaacgaggatgagtgaggtcctggctcaagtat

SEQ ID NO: 189924 - DNA, 120 bp, Artificial Sequence
  ENSG00000112297_68 (sequence is synthesized)
tttactcccactaccacctgggagccctccaggaaaagagctgaggctgctccagatggaagtcaagagcagctggtatttacacctggaaaatcagatttttttttcttttgcaataac

SEQ ID NO: 189925 - DNA, 120 bp, Artificial Sequence
  ENSG00000112297_69 (sequence is synthesized)
tcggtagtaagaccagaccaacaattttagagaaaagcctacatctaacatacatgctaccaaacgagtgtctaacaggaataaaccaagcagaaatctcaaaacaggtctacatcaaaa

SEQ ID NO: 189926 - DNA, 120 bp, Artificial Sequence
  ENSG00000112297_70 (sequence is synthesized)
gttacaagcaagcatatcaggtgcaatactgaggatgagtatattaggaagtaaaaacacttaccgtaaatgaatattcgaagtgcacactgcaatgggttgattggagagatatctaaa

SEQ ID NO: 189927 - DNA, 120 bp, Artificial Sequence
  ENSG00000112297_71 (sequence is synthesized)
tgtaaacatttgacatcaaagtggcaagctttgggctccattggaaggctgcaatttccatggaaaagccctcagagaagcatgtttcaattgccgaaacaggcctaatccttatgcaag

SEQ ID NO: 189928 - DNA, 120 bp, Artificial Sequence
  ENSG00000112297_72 (sequence is synthesized)
atgtaagggttttaaaaagttagaaactctgctctcacctttcaatattaagagcataaacaaatgaatcaccaggcagatttttatatatgacactaagagatttagaactttaagagc

SEQ ID NO: 189929 - DNA, 120 bp, Artificial Sequence
  ENSG00000112297_73 (sequence is synthesized)
tgtggtgaccacattatggtggaggaacaaaaaaggaaaccttggcagttagaaagctgctcagtgatgaattcaagaaggaaccagctttaaattatctcttcatgccaacatccatct

SEQ ID NO: 189930 - DNA, 120 bp, Artificial Sequence
  ENSG00000112297_74 (sequence is synthesized)
atacactgaaagttttagtattgtacattaagacgatcaggcccagcagggtggttcacgcctgtaatcccagaactttgggagactgacatggtggatcacttaagcccaggagtttga

SEQ ID NO: 189931 - DNA, 87 bp, Artificial Sequence
  ENSG00000112297_75 (sequence is synthesized)
aaaacaaaaaagacaataaagtagtttaagctagtaaaacagaaggtgccacaacaacctgcaaagccagtgtgaaggaacagcttg

SEQ ID NO: 189932 - DNA, 120 bp, Artificial Sequence
  ENSG00000112297_76 (sequence is synthesized)
gccacaacaacctgcaaagccagtgtgaaggaacagcttgaaaaaacttcgaatttctactgactacagacaaatccaagtgctgatatttttatatcaattactggccaaaatggtgtg

SEQ ID NO: 189933 - DNA, 120 bp, Artificial Sequence
  ENSG00000112297_77 (sequence is synthesized)
tttattttttaaagcttgtatcatggaatgtataatctaatctggaaaaatgtttgaaagggatggctagaaaaaaatttgggctcacaggcactcaccaaataagaacgtcaacaatca

SEQ ID NO: 189934 - DNA, 120 bp, Artificial Sequence
  ENSG00000112297_78 (sequence is synthesized)
atgctcacttgtgtttctgaggccattgagagaggatcttatcatcattttgactggagagatgaaaacttgggggtttgtcttcttttgagttgttatagggtctttcctaatcgtgat

SEQ ID NO: 189935 - DNA, 120 bp, Artificial Sequence
  ENSG00000112297_79 (sequence is synthesized)
agaatatttgttttggtcagaaatccctcactgggggaactcccttctattgccaagaaaaaaggccactggctgcagtgactcacttgggactattggcaccatattggggtgcacatg

SEQ ID NO: 189936 - DNA, 120 bp, Artificial Sequence
  ENSG00000112297_80 (sequence is synthesized)
tagctccggacactccagctctcctacaaaacttcctgttctctctcgggaaaaataggaaggctgatccgatccagagcctccatggggggttcaacctgctgtgggtgtggctgtggc

SEQ ID NO: 189937 - DNA, 120 bp, Artificial Sequence
  ENSG00000112297_81 (sequence is synthesized)
aggtgcaatgggtgtgctaataatcgcagcaggaacattgactctcggcataggcgtcctgactcctggaatcgacatgaaaatcccagaaacaggtactatgaccgggatcttgagtcc

SEQ ID NO: 189938 - DNA, 120 bp, Artificial Sequence
  ENSG00000112297_82 (sequence is synthesized)
tcttctgttcaacctatatgtttggtaaggagttatatttttgtatgagaatatttaactgaattctggatttccttaatgtgtgttcctggttcatgtaatagtaattgctatggaaaa

SEQ ID NO: 189939 - DNA, 120 bp, Artificial Sequence
  ENSG00000112297_83 (sequence is synthesized)
tattctgagtttatttttagcagtaattgctaataatctagaagaaaaaaactttttcaatgtgtttgttctattcatttccttttctccttcctttaaaaatttttaggattctttcac

SEQ ID NO: 189940 - DNA, 120 bp, Artificial Sequence
  ENSG00000112297_84 (sequence is synthesized)
tggcccaaggagacgaaatcaggtaactttaaaaatattcttttatattaatatataaagggccttccattgaaaagctgaacttatgtttcaaatgtcagacatttggggccgggtgtg

SEQ ID NO: 189941 - DNA, 120 bp, Artificial Sequence
  ENSG00000112297_85 (sequence is synthesized)
gagagttaaaccgaagggaatggtagagacggcaaccccgggcctgtgcccagctgaaggatgaactgagggcaggatcgttaaatgcagaagccgaagacagtggcctgggagaatctg

SEQ ID NO: 189942 - DNA, 120 bp, Artificial Sequence
  ENSG00000112299_0 (sequence is synthesized)
agcactcattggacttcagcatgactactcagttgccagcttacgtggcaattttgcttttctatgtctcaagagccagctgccaggacactttcactgcagctgtttatgagcatgcag

SEQ ID NO: 189943 - DNA, 120 bp, Artificial Sequence
  ENSG00000112299_1 (sequence is synthesized)
cgatattgcccaatgccaccctaacaccagtgtctcgtgaggaggctttggcattaatgaatcggaatctggacattttggaaggagcgatcacatcagcagcagatcagggtgcgcata

SEQ ID NO: 189944 - DNA, 120 bp, Artificial Sequence
  ENSG00000112299_2 (sequence is synthesized)
ttattgtgactccagaagatgctatttatggctggaacttcaacagggactctctctacccatatttggaggacatcccagaccctgaagtaaactggatcccctgtaataatcgtaaca

SEQ ID NO: 189945 - DNA, 120 bp, Artificial Sequence
  ENSG00000112299_3 (sequence is synthesized)
gatttggccagaccccagtacaagaaagactcagctgcctggccaagaacaactctatctatgttgtggcaaatattggggacaagaagccatgcgataccagtgatcctcagtgtcccc

SEQ ID NO: 189946 - DNA, 120 bp, Artificial Sequence
  ENSG00000112299_4 (sequence is synthesized)
ctgatggccgttaccaatacaacactgatgtggtatttgattctcaaggaaaactggtggcacgctaccataagcaaaaccttttcatgggtgaaaatcaattcaatgtacccaaggagc

SEQ ID NO: 189947 - DNA, 120 bp, Artificial Sequence
  ENSG00000112299_5 (sequence is synthesized)
ctgagattgtgactttcaataccacctttggaagttttggcattttcacatgctttgatatactcttccatgatcctgctgttaccttggtgaaagatttccacgtggacaccatagtat

SEQ ID NO: 189948 - DNA, 120 bp, Artificial Sequence
  ENSG00000112299_6 (sequence is synthesized)
tcccaacagcttggatgaatgttttgccacatttgtcagctgttgaattccactcagcttgggctatgggcatgagggtcaatttccttgcatccaacatacattacccctcaaagaaaa

SEQ ID NO: 189949 - DNA, 120 bp, Artificial Sequence
  ENSG00000112299_7 (sequence is synthesized)
tgacaggaagtggcatctatgcacccaattcttcaagagcatttcattatgatatgaagacagaagagggaaaactcctcctctcgcaactggattcccacccatcccattctgcagtgg

SEQ ID NO: 189950 - DNA, 120 bp, Artificial Sequence
  ENSG00000112299_8 (sequence is synthesized)
tgaactggacttcctatgccagcagtatagaagcgctctcatcaggaaacaaggaatttaaaggcactgtctttttcgatgaattcacttttgtgaagctcacaggagttgcaggaaatt

SEQ ID NO: 189951 - DNA, 120 bp, Artificial Sequence
  ENSG00000112299_9 (sequence is synthesized)
atacagtttgtcagaaagatctctgctgtcatttaagctacaaaatgtctgagaacataccaaatgaagtgtacgctctaggggcatttgacggactgcacactgtggaagggcgctatt

SEQ ID NO: 189952 - DNA, 120 bp, Artificial Sequence
  ENSG00000112299_10 (sequence is synthesized)
atctacagatttgtaccctgttgaaatgtaaaacgactaatttaaacacttgcggtgactcagctgaaacagcttctaccaggtttgaaatgttctccctcagtggcactttcggaaccc

SEQ ID NO: 189953 - DNA, 120 bp, Artificial Sequence
  ENSG00000112299_11 (sequence is synthesized)
agtatgtctttcctgaggtgttgctgagtgaaaatcagcttgcacctggagaatttcaggtgtcaactgacggacgcttgtttagtctgaagccaacatccggacctgtcttaacagtaa

SEQ ID NO: 189954 - DNA, 120 bp, Artificial Sequence
  ENSG00000112299_12 (sequence is synthesized)
ctctgtttgggaggttgtatgagaaggactgggcatcaaatgcttcatcaggcctcacagcacaagcaagaataataatgctaatagttatagcacctattgtatgctcattaagttggt

SEQ ID NO: 189955 - DNA, 120 bp, Artificial Sequence
  ENSG00000112299_13 (sequence is synthesized)
agaatattgactttttctcttttttatttgggataatttaaaaaatgatggatgagaaaagaaagattggtccgggttaatattatcctctagtataagtgaattactagtttctcttta

SEQ ID NO: 189956 - DNA, 120 bp, Artificial Sequence
  ENSG00000112299_14 (sequence is synthesized)
tttagacaaacacacacacaccagataatataaacttaataaattatctgttaatgtagattttatttaaaaaactatatttgaacattggtctttcttggacgtgagctaattatatca

SEQ ID NO: 189957 - DNA, 120 bp, Artificial Sequence
  ENSG00000112299_15 (sequence is synthesized)
aataagtatcacaaatcttttacgcagaagaaataaaaactacgggtagaaaacataagaactatcataaaatttacttacaaggaggctgctcttgttaccacttttattatattacgt

SEQ ID NO: 189958 - DNA, 120 bp, Artificial Sequence
  ENSG00000112299_16 (sequence is synthesized)
ctctgctgaaaatttccaatgactttgtttgtttgctctttttgttttttacctaaacaatacattttgattctcttgtgggttgataatgtctccccaaaatttacatgttgaagcacc

SEQ ID NO: 189959 - DNA, 120 bp, Artificial Sequence
  ENSG00000112299_17 (sequence is synthesized)
tcagaatgtgactgtatttggagacagggtctttaaagaggtaaaataaggtcattaggatagaccctaattcaatatgactgatgatcataaaagaagaggcgagtagggcacaacagg

SEQ ID NO: 189960 - DNA, 120 bp, Artificial Sequence
  ENSG00000112299_18 (sequence is synthesized)
cacaaagggagaccataaggagacacagaggaaggacaactctttacaagctaagaagagagggcctcagaagaaaccaaccctgccaacaccttgatcttggacttccagcctccaaaa

SEQ ID NO: 189961 - DNA, 120 bp, Artificial Sequence
  ENSG00000112299_19 (sequence is synthesized)
ctatgagaaataaatttctattgtttaagtcacccagtccatggtactttgttaggcagccctggcaaatgaatcaaagacccattcctgttcctctccccaccactactgttttctact

SEQ ID NO: 189962 - DNA, 120 bp, Artificial Sequence
  ENSG00000112299_20 (sequence is synthesized)
gtaatctgaagcttcaacaaaaggcttacctggtaagaatattcagctggtctgggtcctcaagactccaatagacactcttagagaaggattgctgatggattgatagtgaaaccatta

SEQ ID NO: 189963 - DNA, 120 bp, Artificial Sequence
  ENSG00000112299_21 (sequence is synthesized)
gatcattgaattcctctggaattagaaaaccagagagtcccattttaagaaattagatatttaatatagcattgtgtgttctattttagtaacagcagaatctcttgacattacacaact

SEQ ID NO: 189964 - DNA, 120 bp, Artificial Sequence
  ENSG00000112299_22 (sequence is synthesized)
cagtgaaacaacatcatttaagccaaaatatctcccaactgactgatagactctgagcactaatatcatagtgctgtgatgatggacaattacatagtaccgataacagccatgcactgt

SEQ ID NO: 189965 - DNA, 120 bp, Artificial Sequence
  ENSG00000112299_23 (sequence is synthesized)
gcaaagcatgcccttctgcacaggagagcaaggcacttgcagtagtgatctatgccagcaaaacatcattttgagacaaacatttttgtggcagatgtttttcctaaaaagtactatatc

SEQ ID NO: 189966 - DNA, 120 bp, Artificial Sequence
  ENSG00000112299_24 (sequence is synthesized)
atccaagaaatatttgagtaaaatcccttgttcttttgggtgacattaactgacatttgctttttttcaagacctaatagaaaataagaaagcccataatgtatttagaaacaggaatcc

SEQ ID NO: 189967 - DNA, 120 bp, Artificial Sequence
  ENSG00000112299_25 (sequence is synthesized)
tcagagcaattctctgtattctcatataatttcaatgtaaaacagaaaacatattgatgtgttggtgataggcttgaattattaaaaacttcaaaaacatcctaagtgtttcttttttgc

SEQ ID NO: 189968 - DNA, 120 bp, Artificial Sequence
  ENSG00000112299_26 (sequence is synthesized)
tcaacgttgtcaactatagtaggtctcccttgtggtgtaatgaattgcccccaaactattatcttaaaacaacaaacatttattatcttatagcatttctgagggtcaggatctgggact

SEQ ID NO: 189969 - DNA, 120 bp, Artificial Sequence
  ENSG00000112299_27 (sequence is synthesized)
ggcttagtggagttgttctggatcagggcctttggaaagttgtagttaacttgtccccagggctgccatcatctcaaggctcgggtggggctggagaaaatctgcttctcagctcactca

SEQ ID NO: 189970 - DNA, 120 bp, Artificial Sequence
  ENSG00000112299_28 (sequence is synthesized)
cggcggttgccaggcctccattctttaggatgctagaaaaactttcataaaatgtcatctggcttctcctagagcaatgatactgagagagaaagcacatgagagaaagagcgagggaac

SEQ ID NO: 189971 - DNA, 120 bp, Artificial Sequence
  ENSG00000112299_29 (sequence is synthesized)
ttggatgtaagccacagtctttgaaaacctaatcacagaagtgacatctcttcttccacatgatgttggtcacatggaccaacaatggcacaacgtggacagaatcaaacagagttgaga

SEQ ID NO: 189972 - DNA, 120 bp, Artificial Sequence
  ENSG00000112299_30 (sequence is synthesized)
atatcaggaggtggggcttcatgggggccattttggatgctatcatagtgaatatatgtatttatatttatatctgtatatattgcaatgtaatttaaaaaataggattgttttcctttt

SEQ ID NO: 189973 - DNA, 120 bp, Artificial Sequence
  ENSG00000112299_31 (sequence is synthesized)
ctttttgctatatgtgatatgtatttcaaaatacactcccaatagttacgtctgaaaagcactacactaaaaaactttctatacattgaataattaaattaaataatctaataatctcta

SEQ ID NO: 189974 - DNA, 120 bp, Artificial Sequence
  ENSG00000112303_0 (sequence is synthesized)
agaaatcactaaaccttggccatggtcacttcctcttttccaatctctgtggcagtttttgccctaataaccctgcaggttggtactcaggacagttttatagctgcagtgtatgaacat

SEQ ID NO: 189975 - DNA, 120 bp, Artificial Sequence
  ENSG00000112303_1 (sequence is synthesized)
gctgtcattttgccaaataaaacagaaacaccagtttctcaggaggatgccttgaatctcatgaacgagaatatagacattctggagacagcgatcaagcaggcagctgagcagggtgct

SEQ ID NO: 189976 - DNA, 120 bp, Artificial Sequence
  ENSG00000112303_2 (sequence is synthesized)
cgaatcattgtgactccagaagatgcactttatggatggaaatttaccagggaaactgttttcccttatctggaggatatcccagaccctcaggtgaactggattccgtgtcaagacccc

SEQ ID NO: 189977 - DNA, 120 bp, Artificial Sequence
  ENSG00000112303_3 (sequence is synthesized)
cacagatttggtcacacaccagtacaagcaagactcagctgcctggccaaggacaactctatctatgtcttggcaaatttgggggacaaaaagccatgtaattcccgtgactccacatgt

SEQ ID NO: 189978 - DNA, 120 bp, Artificial Sequence
  ENSG00000112303_4 (sequence is synthesized)
cctcctaatggctactttcaatacaataccaatgtggtgtataatacagaaggaaaactcgtggcacgttaccataagtaccacctgtactctgagcctcagtttaatgtccctgaaaag

SEQ ID NO: 189979 - DNA, 120 bp, Artificial Sequence
  ENSG00000112303_5 (sequence is synthesized)
ccggagttggtgactttcaacaccgcatttggaaggtttggcattttcacgtgctttgatatattcttctatgatcctggtgttaccctggtgaaagatttccatgtggacaccatactg

SEQ ID NO: 189980 - DNA, 120 bp, Artificial Sequence
  ENSG00000112303_6 (sequence is synthesized)
tttcccacagcttggatgaacgttttgccccttttgacagctattgaattccattcagcttgggcaatgggaatgggagttaatcttcttgtggccaacacacatcatgtcagcctaaat

SEQ ID NO: 189981 - DNA, 120 bp, Artificial Sequence
  ENSG00000112303_7 (sequence is synthesized)
atgacaggaagtggtatttatgcaccaaatggtcccaaagtgtatcattatgacatgaagacagagttgggaaaacttctcctttcagaggtggattcacatcccctatcctcgcttgcc

SEQ ID NO: 189982 - DNA, 120 bp, Artificial Sequence
  ENSG00000112303_8 (sequence is synthesized)
ggttcaacttcacagaactttttgaaaatgcaggaaaccttacagtctgtcaaaaggagctttgctgtcatttaagctacagaatgttacaaaaagaagagaatgaagtatacgttctag

SEQ ID NO: 189983 - DNA, 120 bp, Artificial Sequence
  ENSG00000112303_9 (sequence is synthesized)
gagcttttacaggattacatggccgaaggagaagagagtactggcaggtctgcacactgctgaagtgcaaaactactaatttgacaacttgtggacggccagtagaaactgcttctacaa

SEQ ID NO: 189984 - DNA, 120 bp, Artificial Sequence
  ENSG00000112303_10 (sequence is synthesized)
gatttgaaatgttctccctcagtggcacatttggaacagagtatgtttttcctgaagtgctacttaccgaaattcatctgtcacctggaaaatttgaggtgctgaaagatgggcgtttgg

SEQ ID NO: 189985 - DNA, 120 bp, Artificial Sequence
  ENSG00000112303_11 (sequence is synthesized)
taaacaagaatggatcatctgggcctatactaacagtgtcactctttgggaggtggtacacaaaggactcactttacagctcatgtgggaccagcaattcagcaataacttacctgctaa

SEQ ID NO: 189986 - DNA, 120 bp, Artificial Sequence
  ENSG00000112303_12 (sequence is synthesized)
tattcatattattaatgatcatagctttgcaaaatattgtaatgttatagggcgtctctttatcactcagcttctgcatcatatgcttggctgaatgtgtttatcggcttcccaagttta

SEQ ID NO: 189987 - DNA, 120 bp, Artificial Sequence
  ENSG00000112303_13 (sequence is synthesized)
ctaagaaactttgaagggctatttcagtagtatagaccagtgagtcctaaatattttttctcatcaataattattttttaagtattatgataatgttgtccatttttttggctactctga

SEQ ID NO: 189988 - DNA, 120 bp, Artificial Sequence
  ENSG00000112303_14 (sequence is synthesized)
aatgttgcagtgtggaacaatggaaagagcctgggtgtttgggtcagataaatgaagatcaaactccagctccagcctcatttgcttgagactttgtgtgtatgggggacttgtatgtat

SEQ ID NO: 189989 - DNA, 120 bp, Artificial Sequence
  ENSG00000112303_15 (sequence is synthesized)
gggagtgaggagtttcagggccattgcaaacatagctgtgcccttgaagagaatagtaatgatgggaatttagaggtttatgactgaattccctttgacattaaagactatttgaattca

SEQ ID NO: 189990 - DNA, 120 bp, Artificial Sequence
  ENSG00000112303_16 (sequence is synthesized)
aaagcagctgagatccagaggagtggaaggctcccccttgactaaagctccaaggacagagaaaaacatccagatttgggaacacaataacagatatgattgtccccacttctactgcca

SEQ ID NO: 189991 - DNA, 72 bp, Artificial Sequence
  ENSG00000112303_17 (sequence is synthesized)
caatgtggtgtataatacagaaggaaaactcgtggcacgttaccataaggcagagtctggctctgtcatccc

SEQ ID NO: 189992 - DNA, 120 bp, Artificial Sequence
  ENSG00000112303_18 (sequence is synthesized)
tgggattacagactaagtttttttttagtttacctagaaggaatcgggaaattaaatacatttctatggtaattttgaaaggtgggcaagagtcactgagattactttggatgggacact

SEQ ID NO: 189993 - DNA, 120 bp, Artificial Sequence
  ENSG00000112303_19 (sequence is synthesized)
ttaccataaggtgggcaagagtcactgagattactttggatgggacactaaagagagagatgacatctctcacctgacttacagtaccacctgtactctgagcctcagtttaatgtccct

SEQ ID NO: 189994 - DNA, 120 bp, Artificial Sequence
  ENSG00000112304_0 (sequence is synthesized)
agtgagcaaatcgcggaccaccggggctgccagctcgcctgactcccggcctcttgcgctcctaggggcggagaagggtgcgggctcttcgccctttgtgtcctccttctttcactaact

SEQ ID NO: 189995 - DNA, 120 bp, Artificial Sequence
  ENSG00000112304_1 (sequence is synthesized)
tctggactttccagctcttccgaagttcgttcttgcgcaaagcccaaaggctggaaaaccgtccacgatgaccagcatgactcagtctctgcgggaggtgataaaggccatgaccaaggc

SEQ ID NO: 189996 - DNA, 120 bp, Artificial Sequence
  ENSG00000112304_2 (sequence is synthesized)
tcgcaattttgagagagttttgggaaagattactcttgtctctgctgctcctgggaaagtgatttgtgaaatgaaagtagaagaagagcataccaatgcaataggcactctccacggcgg

SEQ ID NO: 189997 - DNA, 120 bp, Artificial Sequence
  ENSG00000112304_3 (sequence is synthesized)
tttgacagccacgttagtagataacatatcaacaatggctctgctatgcacggaaaggggagcacccggagtcagtgtcgatatgaacataacgtacatgtcacctgcaaaattaggaga

SEQ ID NO: 189998 - DNA, 120 bp, Artificial Sequence
  ENSG00000112304_4 (sequence is synthesized)
agatatagtgattacagcacatgttctgaagcaaggaaaaacacttgcatttacctctgtggatctgaccaacaaggccacaggaaaattaatagcacaaggaagacacacaaaacacct

SEQ ID NO: 189999 - DNA, 120 bp, Artificial Sequence
  ENSG00000112304_5 (sequence is synthesized)
gggaaactgagagaacagcagaatgacctaaagaaacccaacaatgaatatcaagtatagatttgactcaaacaattgtaatttttgaaataaactagcaaaaccagaagcagctagaaa

SEQ ID NO: 190000 - DNA, 120 bp, Artificial Sequence
  ENSG00000112304_6 (sequence is synthesized)
tattcttggaggaaaaggacctggatatcaagtagggtaaaggtgggggtgtcttttttcactttaagcatcttgttttctaatcatgtgtgataattgggtgaaaaattcttagctcaa

SEQ ID NO: 190001 - DNA, 120 bp, Artificial Sequence
  ENSG00000112304_7 (sequence is synthesized)
agtgttttaaaaacaggtaaagcaaagaaactagcaggaccactctcagttaagattaaaactaaagtccagtgttaagctaaaggagaaatagaaattaatggttctaattctgtttgg

SEQ ID NO: 190002 - DNA, 120 bp, Artificial Sequence
  ENSG00000112304_8 (sequence is synthesized)
gctgctaggaacaacagaaatttttcatggttctagaagctggaaagtcctgggtcaaggcccagcagatcctgttaggtgagggcccgcttcctggctcatagatggtgccttctcact

SEQ ID NO: 190003 - DNA, 77 bp, Artificial Sequence
  ENSG00000112304_9 (sequence is synthesized)
gagggcccgcttcctggctcatagatggtgccttctcactgtgtggtggaaggggcaagtgagccctctgggttctc

SEQ ID NO: 190004 - DNA, 65 bp, Artificial Sequence
  ENSG00000112304_10 (sequence is synthesized)
gtagctgggactataggcatgtgccatcacacctagctaatttttgtagttttttgtagaagcct

SEQ ID NO: 190005 - DNA, 79 bp, Artificial Sequence
  ENSG00000112304_11 (sequence is synthesized)
agcctgggttctcttttgtaagggcacttactccaatcttgagggttctgccctcgtgatctaataacttcccaaagac

SEQ ID NO: 190006 - DNA, 120 bp, Artificial Sequence
  ENSG00000112304_12 (sequence is synthesized)
tgagggttctgccctcgtgatctaataacttcccaaagacccccacctgctaatatcaccttgggggttgggattttaacatacaaatttaggggaaacacatggagaccacagcaatgg

SEQ ID NO: 190007 - DNA, 120 bp, Artificial Sequence
  ENSG00000112304_13 (sequence is synthesized)
ccaatccttagcgaatcttaggtccttcccagatctaaaatgccaagctacacttgcatttcctttttttaagattatgaaacttcaaaatatatgaactacagcccatattgaaaaata

SEQ ID NO: 190008 - DNA, 120 bp, Artificial Sequence
  ENSG00000112304_14 (sequence is synthesized)
aaatagattgagccatatgcctaaaaaagacctcaagaaaagtttgaggctaagcatgttagtgttacaggaaatggtccaatagagggggaagaaaaaaagcatgctactagccccttt

SEQ ID NO: 190009 - DNA, 120 bp, Artificial Sequence
  ENSG00000112304_15 (sequence is synthesized)
tcttgtaccgagaataaaaccatgcagatctcaaacctccaagtctatagtattgaaaagaccaagttcacttctcagaagtctccaagttcagttgactgtggcactctgagacagctt

SEQ ID NO: 190010 - DNA, 79 bp, Artificial Sequence
  ENSG00000112304_16 (sequence is synthesized)
tagctggaactacaggcgtgtgccaccacgcctaattttatttttgtagaaacaaggtctcactgttgcccagcctccc

SEQ ID NO: 190011 - DNA, 120 bp, Artificial Sequence
  ENSG00000112304_17 (sequence is synthesized)
ttggccccccaagtactggacttacaggtgtgaaccactgcacccagctgactcttacttgatttctgtcagggaatcttaatgaacatttcatgactaaagactaaaaaggatgcagct

SEQ ID NO: 190012 - DNA, 120 bp, Artificial Sequence
  ENSG00000112304_18 (sequence is synthesized)
ttaagtaaatttaagtcaagttaacagttaaagacaaatcctttccctacattagatcgcctgctgatctgtccactgtgaaagggcagaagactccacagtagcaatagcagcagtgag

SEQ ID NO: 190013 - DNA, 120 bp, Artificial Sequence
  ENSG00000112304_19 (sequence is synthesized)
catacaggagtcccagatgtttacttctagtatttcccactaaaaggaagctgggctccttggagaaacagctgactccagggcttgaggctgggacagaaaggttacagtatcttatgc

SEQ ID NO: 190014 - DNA, 120 bp, Artificial Sequence
  ENSG00000112304_20 (sequence is synthesized)
atgaaaggagatgctcaaaataataaaggcatgcaaattatgatttggagggaaaaaatatgaggccatagtgtttaggtagataataaatggcagagatagaacactctcttacaacaa

SEQ ID NO: 190015 - DNA, 120 bp, Artificial Sequence
  ENSG00000112304_21 (sequence is synthesized)
atgctgtaaatggacaaagcattagatttggaaaatcactattttgtaaccatcatagttaaagactggtttgggttttagtctggaaagaatcgccaagggagctcctgataaaggaac

SEQ ID NO: 190016 - DNA, 120 bp, Artificial Sequence
  ENSG00000112304_22 (sequence is synthesized)
agggtatttgcacattgcttcccagagattgctagtagtaagtaccacacatagggcaaaaccaggacaccttgaccaggcgctcaaaagtaacatcaatgaagagcagatggagagtat

SEQ ID NO: 190017 - DNA, 120 bp, Artificial Sequence
  ENSG00000112304_23 (sequence is synthesized)
acttgagaagggcgttaagcatgaataaacaattcaaatgcaaaatgagtaacaatttacaagaaaaattgccctgtactccaaaaaacatagaggtcatggaacacataaaggctaagg

SEQ ID NO: 190018 - DNA, 120 bp, Artificial Sequence
  ENSG00000112304_24 (sequence is synthesized)
aactgttccacattaaagacaactgagaacaactaaattcaatgatcctgtactctagagggggggatctaaaacaagctaccaaggatactgggacaacaaaacgaatatggatgataa

SEQ ID NO: 190019 - DNA, 120 bp, Artificial Sequence
  ENSG00000112304_25 (sequence is synthesized)
agagtatcaacattccctgagtttggtaattttactctagttatatgaaatattcttgtacttggaacatatgccgaagtactaaggaaggggtaaggaagcacaaagtgtgcaacaaac

SEQ ID NO: 190020 - DNA, 120 bp, Artificial Sequence
  ENSG00000112304_26 (sequence is synthesized)
tcaaatagctcacaggtataagtgtacagagaaaatgaaaaaaatgtggcaaaataataaaaatgagggtaaagattacacaacagctttcatattactctggtaacttttctaaattat

SEQ ID NO: 190021 - DNA, 120 bp, Artificial Sequence
  ENSG00000112304_27 (sequence is synthesized)
tccaaaataaaaacgtaaacaatggctgccaaaatgcctaacttggtgaacataagtgtaattcaatatggtaaattaattcaacatggtaaattaagagcataggccttaagagccagc

SEQ ID NO: 190022 - DNA, 120 bp, Artificial Sequence
  ENSG00000112304_28 (sequence is synthesized)
cagcctggttttaaatcctccactacttatgatctgagcttgagcaagttacttaacctctgcatctatttccaccaaaggttgagaggttaagacaagagcttagaagagtacctggtt

SEQ ID NO: 190023 - DNA, 120 bp, Artificial Sequence
  ENSG00000112304_29 (sequence is synthesized)
ataataaacattcaaaatgttatttcaaatagattctaatttttaaataagaggacacatgaaagcattttgaaatttaagaatggccctttcccatgaagcaaggcataaggccaggtt

SEQ ID NO: 190024 - DNA, 120 bp, Artificial Sequence
  ENSG00000112304_30 (sequence is synthesized)
gctaactgttgaaagctgacagtatgttcttgattcctgttcttgttgaagttacacactcaattgccaggtatttttcttctgaatttactatttagccacagactatgaaataattct

SEQ ID NO: 190025 - DNA, 120 bp, Artificial Sequence
  ENSG00000112304_31 (sequence is synthesized)
ctaaggtgaccagtaacatcagtgaaatggaaagaaaaagttaacacttcaaactttgtgtattcacctgaatagtcagggaactttcacctattttatttaggttttctttttcttttt

SEQ ID NO: 190026 - DNA, 120 bp, Artificial Sequence
  ENSG00000112304_32 (sequence is synthesized)
ttctttttttttcaaattccaaccagaagctaaatacaattggaaactggtaagcactagttttactccaaaggagtaggatcattcagatttactccaataaaagtatgcaacccttaa

SEQ ID NO: 190027 - DNA, 120 bp, Artificial Sequence
  ENSG00000112304_33 (sequence is synthesized)
taggatctagaaataccatgtggactccaacacacatagaaataaggaagtggaattccaaaggaaggcaaagtgtaaagtcatctttatggaaatgagtgatgaaggtgaatacctgaa

SEQ ID NO: 190028 - DNA, 120 bp, Artificial Sequence
  ENSG00000112304_34 (sequence is synthesized)
tgagatgtcaagaggaggaacacactggagagaagcagtaaagatttaggactgaaccttaaagacatacaggcttgagagaaagaaagcatgtaaagaagacagaaatggttagaaaga

SEQ ID NO: 190029 - DNA, 120 bp, Artificial Sequence
  ENSG00000112305_0 (sequence is synthesized)
agtccccctccccctcccctcgccggctagggtggtgcgtgccggcaggccggtcaaggaggcgggacacgtcggcgctaccaccgccaccgccgccgccgcccctcctcccgttccagc

SEQ ID NO: 190030 - DNA, 120 bp, Artificial Sequence
  ENSG00000112305_1 (sequence is synthesized)
gttccagctgccgctgccgcttcctgggctgagtccgcccgcggtcccggcggcgccaggtgcgttcactctgcccggctccagccagcgtccgccgccgccgtagctgccccaggctcc

SEQ ID NO: 190031 - DNA, 120 bp, Artificial Sequence
  ENSG00000112305_2 (sequence is synthesized)
ctgccgagatggcgacgcgctcctgtcgggagaaggctcagaagctgaacgagcagcaccagctcatcctatccaagcttctgagggaggaggacaacaagtactgcgccgactgcgagg

SEQ ID NO: 190032 - DNA, 120 bp, Artificial Sequence
  ENSG00000112305_3 (sequence is synthesized)
ccaaaggtcctcgatgggcttcctggaatattggtgtgtttatttgcatcagatgtgctggaattcatagaaatcttggggttcatatatccagggtcaaatcagtcaacctagaccaat

SEQ ID NO: 190033 - DNA, 120 bp, Artificial Sequence
  ENSG00000112305_4 (sequence is synthesized)
ggacagcagaacagatacagtgcatgcaagatatgggaaatactaaagcaagactactctatgaagccaatcttccagagaactttcgaagaccacagacagatcaagcagtggaatttt

SEQ ID NO: 190034 - DNA, 120 bp, Artificial Sequence
  ENSG00000112305_5 (sequence is synthesized)
tcatcagagataaatatgaaaagaagaaatactacgataaaaatgccatagctattacaaataaagaaaaggaaaaaaaaaaggaagagaaaaagagagaaaaggagccagaaaagccgg

SEQ ID NO: 190035 - DNA, 120 bp, Artificial Sequence
  ENSG00000112305_6 (sequence is synthesized)
caaaaccacttacagctgaaaagctgcagaagaaagatcagcaactggagcctaaaaaaagtaccagccctaaaaaagctgcggagcccactgtggatcttttaggacttgatggccctg

SEQ ID NO: 190036 - DNA, 120 bp, Artificial Sequence
  ENSG00000112305_7 (sequence is synthesized)
ctgtggcaccagtgaccaacgggaacacaacggtgccacccctgaacgatgatctggacatctttggaccgatgatttctaatcccttacctgcaactgtcatgcccccagctcagggga

SEQ ID NO: 190037 - DNA, 120 bp, Artificial Sequence
  ENSG00000112305_8 (sequence is synthesized)
caccctctgcaccagcagctgcaaccctgtctacagtaacatctggggatctagatttattcactgagcaaactacaaaatcagaagaagtggcaaagaaacaactttccaaagactcca

SEQ ID NO: 190038 - DNA, 120 bp, Artificial Sequence
  ENSG00000112305_9 (sequence is synthesized)
tcttatctctgtatggcacaggaaccattcaacagcaaagtactcctggtgtatttatgggacccacaaatataccatttacctcacaagcaccagctgcatttcagggctttccatcga

SEQ ID NO: 190039 - DNA, 120 bp, Artificial Sequence
  ENSG00000112305_10 (sequence is synthesized)
gcgtgcctgtgcctgcagctcctggccttataggaaatgtgatgggacagagtccaagcatgatggtgggcatgcccatgcccaatgggtttatgggaaatgcacaaactggtgtgatgc

SEQ ID NO: 190040 - DNA, 120 bp, Artificial Sequence
  ENSG00000112305_11 (sequence is synthesized)
cacttcctcagaacgttgttggcccccaaggaggaatggtgggacaaatgggtgcaccccagagtaagtttggcctgccgcaagctcagcagccccagtggagcctctcacagatgaatc

SEQ ID NO: 190041 - DNA, 120 bp, Artificial Sequence
  ENSG00000112305_12 (sequence is synthesized)
agcagatggctggcatgagtatcagtagtgcaacccctactgcaggttttggccagccctccagcacaacagcaggatggtctggaagctcatcaggtcagactctcagcacacaactgt

SEQ ID NO: 190042 - DNA, 120 bp, Artificial Sequence
  ENSG00000112305_13 (sequence is synthesized)
ggaaatgaaaactgcaatacaagtttcatccagaactaccacctgacattccttgctgaaacgcatctagttcccctgtttattcatatgcatattttttttctttttacccatttgttc

SEQ ID NO: 190043 - DNA, 120 bp, Artificial Sequence
  ENSG00000112305_14 (sequence is synthesized)
atattaagaatgatctgattgaccgtgttggtctgtactgattcaatttgatgtggtgaaaagcaggttgataaatcattttatgtcaagggcagctttgctcatatttcccatgatttc

SEQ ID NO: 190044 - DNA, 120 bp, Artificial Sequence
  ENSG00000112305_15 (sequence is synthesized)
atgtactgcattatttgagaagctgctcaacttgcaaaatcagttttcctctcaataaaattatagctctaatgtttgcatataagggaagtagttatcatgttagtaatacctctaata

SEQ ID NO: 190045 - DNA, 120 bp, Artificial Sequence
  ENSG00000112305_16 (sequence is synthesized)
gtataaaccccaccccaaaattagccagtaatcctgtaggaaggtactgtatgatcaaatgtttaatcatataaatagaatgtaaatgtctcactgagcactgttttctagtgtatcaaa

SEQ ID NO: 190046 - DNA, 120 bp, Artificial Sequence
  ENSG00000112305_17 (sequence is synthesized)
atgctcttatttcatcattcacttcactgtgctgttgttatgatgtgcttaacagggaacgtgattagtgaaaggaagataaacgtggatgttactccaaaacttcgtttaatgaatgct

SEQ ID NO: 190047 - DNA, 120 bp, Artificial Sequence
  ENSG00000112305_18 (sequence is synthesized)
taaagaattcaaattttatctgcctctcttgtaatttggatctcttcttaatgtacatagtgctaacatgaagacctttttctgcactatatgcaaacagggtaactaactaaaacaaag

SEQ ID NO: 190048 - DNA, 120 bp, Artificial Sequence
  ENSG00000112305_19 (sequence is synthesized)
ccactttcaatcttcaatccttgaaggtatatctaggtttatgacagtaattgtgtttacattttatggtgcctagtattgacaaaatgttatttccctacattaaacatgactccatag

SEQ ID NO: 190049 - DNA, 120 bp, Artificial Sequence
  ENSG00000112305_20 (sequence is synthesized)
tctgttttaaaaacctgttcaagtctaccaacctgttcaagtctaccaattataagggcaaattggagaaaaagaaaaaatatatactcaagagtggtatcttgcagtatcggcactgta

SEQ ID NO: 190050 - DNA, 120 bp, Artificial Sequence
  ENSG00000112305_21 (sequence is synthesized)
caaaaaaatcttccaatttagttgttgtagagaaaacatgcagaacaaatgaagacaaaacatacattttgtaccaaccatccaattagcttatgttaactgacaagctccatttaaaca

SEQ ID NO: 190051 - DNA, 120 bp, Artificial Sequence
  ENSG00000112305_22 (sequence is synthesized)
gatgtccatcagatgacaagaaaggctgctgtactgaagtaaaacaaacaatacctgaatgctctgtagcctaaactccaaacatcctcttccatatggatccactggctggacaaactg

SEQ ID NO: 190052 - DNA, 120 bp, Artificial Sequence
  ENSG00000112305_23 (sequence is synthesized)
caccagttgctgcttcaatttatacctcaattttcactgtgtccaggtggtactttggctcgttggctagattaaccttctctgtccgagtgtgccacacgagaacctgaaggggaagga

SEQ ID NO: 190053 - DNA, 120 bp, Artificial Sequence
  ENSG00000112305_24 (sequence is synthesized)
aatagcttgggtagcgcactcttcatggtgacactcgaggtcgggcagcacaagtgtaatgaataccttagtgcagttatttgctttcggttccagttcttcgactgttgttatctgttt

SEQ ID NO: 190054 - DNA, 120 bp, Artificial Sequence
  ENSG00000112305_25 (sequence is synthesized)
gagaaagtcagattcttgcatccctggctgggatccacgacgcttaaatacagcttttggattggacaaaatgacttgaagacttacagcaaatcctttgtgaaaaataaaaaaaaaaaa

SEQ ID NO: 190055 - DNA, 120 bp, Artificial Sequence
  ENSG00000112305_26 (sequence is synthesized)
gaaatactacgataaaaatgccatagctattacaaatatttcctcctctgatgctcctcttcagcctttggtatcctctccttctctgcaagctgctgttgacaaaaataaattggagaa

SEQ ID NO: 190056 - DNA, 120 bp, Artificial Sequence
  ENSG00000112305_27 (sequence is synthesized)
ttgagaaggaaaagagtgaaaggcagttagttgaagtggaagagttgaccttcatgtactgctttccaaaaaattgatcctagttgttattgaataaattgttgtctgttttaagaatta

SEQ ID NO: 190057 - DNA, 120 bp, Artificial Sequence
  ENSG00000112305_28 (sequence is synthesized)
ttaaaggacccaaagtatgtacagcatatatagtataggatgtctggctcagtgtgggtacttgcatagatgttaatttcttataccaaaaaccccaaatgaacctgaattgaatttaaa

SEQ ID NO: 190058 - DNA, 120 bp, Artificial Sequence
  ENSG00000112305_29 (sequence is synthesized)
gtgtggtgatgcattgatagtggtggtggtgatgtaggaattaagaattgtcatttacttttctttctagaattagtttggatgagttttgttcagtgagaaaatttcctgaaagaggta

SEQ ID NO: 190059 - DNA, 120 bp, Artificial Sequence
  ENSG00000112305_30 (sequence is synthesized)
tcccagctttgtggagtggcgtgaataaagggaagtgtacatatcactgaattcatgcttttccttaagttatctgttttcagagcagtggaatttttcatcagagataaatatgaaaag

SEQ ID NO: 190060 - DNA, 120 bp, Artificial Sequence
  ENSG00000112305_31 (sequence is synthesized)
atctctgtgggtggggccgcgcttaggtctggatcccctcctctaccctccggtgtgaccacgtcctcccactccgggctcggattcttggtctcctagatggagccctacctgcctgcc

SEQ ID NO: 190061 - DNA, 120 bp, Artificial Sequence
  ENSG00000112306_0 (sequence is synthesized)
ctctttccctgccgccgccgagtcgcgcggaggcggaggcttgggtgcgttcaagattcaacttcacccgtaacccaccgccatggccgaggaaggcattgctgctggaggtgtaatgga

SEQ ID NO: 190062 - DNA, 120 bp, Artificial Sequence
  ENSG00000112306_1 (sequence is synthesized)
cgttaatactgctttacaagaggttctgaagactgccctcatccacgatggcctagcacgtggaattcgcgaagctgccaaagccttagacaagcgccaagcccatctttgtgtgcttgc

SEQ ID NO: 190063 - DNA, 120 bp, Artificial Sequence
  ENSG00000112306_2 (sequence is synthesized)
atgtcaagttggtggaggccctttgtgctgaacaccaaatcaacctaattaaggttgatgacaacaagaaactaggagaatgggtaggcctttgtaaaattgacagagaggggaaacccc

SEQ ID NO: 190064 - DNA, 120 bp, Artificial Sequence
  ENSG00000112306_3 (sequence is synthesized)
gtaaagtggttggttgcagttgtgtagtagttaaggactatggcaaggagtctcaggccaaggatgtcattgaagagtatttcaaatgcaagaaatgaagaaataaatctttggctcaca

SEQ ID NO: 190065 - DNA, 120 bp, Artificial Sequence
  ENSG00000112306_4 (sequence is synthesized)
aggcatggagttcatggtgttagcgcaaaagttctgaatggcatccgtcctaccggaaacctaggaaaaggcgccaagcccatctttgtgtgcttgcatccaactgtgatgagcctatgt

SEQ ID NO: 190066 - DNA, 120 bp, Artificial Sequence
  ENSG00000112308_0 (sequence is synthesized)
gaaagcaaggatcacacttccccctccctgttccttaatcccttttctaaaaaggggggaaaatccggatggattttagggattggtctggtgtcagctgtgttttattgcacacctaaa

SEQ ID NO: 190067 - DNA, 120 bp, Artificial Sequence
  ENSG00000112308_1 (sequence is synthesized)
tcctgattataggcttttcatttctccgcaaagcctttattttggcagttaagccaaatgtgttttccagaaagttagttattttctcctctttctttcctttctttcctccctttttcc

SEQ ID NO: 190068 - DNA, 120 bp, Artificial Sequence
  ENSG00000112308_2 (sequence is synthesized)
cgtctgaccccaaacgttattgtccaaacatgactggacagcagcttttgtttcttgaccctgtaatatgacagtctgctaatattgacagaaggtgcagtttttgggttatagtcgtga

SEQ ID NO: 190069 - DNA, 120 bp, Artificial Sequence
  ENSG00000112308_3 (sequence is synthesized)
ttttcgctaatcaatcatattagcaggaaaaaaaatgacttgtttctgttgtacttgagtcttaagaaaaagtgcccatagtttagtgacaatttccaaaggctttagtaccacctgtat

SEQ ID NO: 190070 - DNA, 120 bp, Artificial Sequence
  ENSG00000112308_4 (sequence is synthesized)
ttcaaaatgggggacccaaactcccggaagaaacaagctctgaacagactacgtgctcagcttagaaagaaaaaagaatctctagctgaccagtttgacttcaagatgtatattgccttt

SEQ ID NO: 190071 - DNA, 120 bp, Artificial Sequence
  ENSG00000112308_5 (sequence is synthesized)
gtattcaaggagaagaagaaaaagtcagcactttttgaagtgtctgaggttataccagtcatgacaaataattatgaagaaaatatcctgaaaggtgtgcgagattccagctattccttg

SEQ ID NO: 190072 - DNA, 120 bp, Artificial Sequence
  ENSG00000112308_6 (sequence is synthesized)
gaaagttccctagagcttttacagaaggatgtggtacagctccatgctcctcgatatcagtctatgagaagggatgtaattggctgtactcaggagatggatttcattctttggcctcgg

SEQ ID NO: 190073 - DNA, 120 bp, Artificial Sequence
  ENSG00000112308_7 (sequence is synthesized)
aatgatattgaaaaaatcgtctgtctcctgttttctaggtggaaagaatctgatgagccttttaggcctgttcaggccaaatttgagtttcatcatggtgactatgaaaaacagtttctg

SEQ ID NO: 190074 - DNA, 120 bp, Artificial Sequence
  ENSG00000112308_8 (sequence is synthesized)
catgtactgagccgcaaggacaagactggaatcgttgtcaacaatcctaaccagtcagtgtttctcttcattgacagacagcacttgcagactccaaaaaacaaagctacaatcttcaag

SEQ ID NO: 190075 - DNA, 120 bp, Artificial Sequence
  ENSG00000112308_9 (sequence is synthesized)
ttatgcagcatctgcctctacctgccacaggaacagctcacccactgggcagttggcaccatagaggatcacctccgtccttatatgccagagtagagtactgaccagcaaaatggagaa

SEQ ID NO: 190076 - DNA, 120 bp, Artificial Sequence
  ENSG00000112308_10 (sequence is synthesized)
tttcagagtttaaagaaaatggactcatgcacagaacactatgcattttgaaacttgttcatcctggatttttttaaatcatttttatctcagaacttaaacaaaaattagatgtcgtgc

SEQ ID NO: 190077 - DNA, 120 bp, Artificial Sequence
  ENSG00000112308_11 (sequence is synthesized)
acggactgtgtgaaagaagatgctttgcatatttgctgcactgcatcagtatcttactaaaaatgtgaaatgaaaggactattgtacactgaaatgcttaaatgtatctgaaagcacaag

SEQ ID NO: 190078 - DNA, 120 bp, Artificial Sequence
  ENSG00000112308_12 (sequence is synthesized)
gtgatactcatttttatggtcttcccatttgtgctggtttttgcctctttgacatctgtcatcagtatttagagggtgagaagtgaatgtaacaggtataaataacatttttaaaaacaa

SEQ ID NO: 190079 - DNA, 120 bp, Artificial Sequence
  ENSG00000112308_13 (sequence is synthesized)
taactttgctataatcacagttgttccagagcactgtcagatacattctaatgaccagaactggtttaaaaaaagaaaatacaaccatgggaaagaaatcttaaatgaaaaacgcatctc

SEQ ID NO: 190080 - DNA, 120 bp, Artificial Sequence
  ENSG00000112308_14 (sequence is synthesized)
attgtaggcatttttgcctcatattttactgggccatgtttgtttcctggtactcatgtattttttttttccagatctctttccccaagttgctattgtaagagtattctgctgcgtgtg

SEQ ID NO: 190081 - DNA, 120 bp, Artificial Sequence
  ENSG00000112308_15 (sequence is synthesized)
gatgcagttatacacattaaagcagatctggagtctgaagtagctataaagcagctataaaacagaaatacatgcatagctgcagaaaccatgataggtagaggacttttcttttggttt

SEQ ID NO: 190082 - DNA, 120 bp, Artificial Sequence
  ENSG00000112308_16 (sequence is synthesized)
tgttttgttttgttttgttttgtttttggttttacagagaagagatttttattacaaagaaaaaaattccagtgaattgtgcagaaatgctggtttttacaccatcctaaagaaaaactt

SEQ ID NO: 190083 - DNA, 120 bp, Artificial Sequence
  ENSG00000112308_17 (sequence is synthesized)
tacaagggtgttttggagtagaaaaaaggttataaagttggaatcttaaattgtaaaattaaccattgagtgtcaaagttctaaaagcagaactcattttgtgcaatgaacataaggaaa

SEQ ID NO: 190084 - DNA, 120 bp, Artificial Sequence
  ENSG00000112308_18 (sequence is synthesized)
gactactgtataggtttttttttttttctccttttaaatgaagaaaagctttgcttaagggttgcatacttttattggagtaaatctgaatgatcctactcctttggagtaaaactagtg

SEQ ID NO: 190085 - DNA, 88 bp, Artificial Sequence
  ENSG00000112308_19 (sequence is synthesized)
taaatctgaatgatcctactcctttggagtaaaactagtgcttaccagtttccaattgtatttagcttctggttggaatttaaataaa

SEQ ID NO: 190086 - DNA, 120 bp, Artificial Sequence
  ENSG00000112308_20 (sequence is synthesized)
atattaacacaattattttctttttttcccccactgaaccttcccatttaccctctcccgcccactccacccgggcgggaattgtttccacgatgaaatgagtgaaaacctgagtgatcc

SEQ ID NO: 190087 - DNA, 120 bp, Artificial Sequence
  ENSG00000112309_0 (sequence is synthesized)
gctgctggatccggagaggttctgagaagacaagagcaagggactgagagcaggcttccgctgcggcgcgcgaacacagccgggacacaacccccagcgtctccacccgctcctcgccac

SEQ ID NO: 190088 - DNA, 120 bp, Artificial Sequence
  ENSG00000112309_1 (sequence is synthesized)
cccggcgggaatgtgaggaaggaaagcccccagcgccgccgcccgccctcgaaggcgtcccagagagcgtcctgggggcccgcggctggagcccttgtgcccgcagcaccgccggactgg

SEQ ID NO: 190089 - DNA, 120 bp, Artificial Sequence
  ENSG00000112309_2 (sequence is synthesized)
agcggcgaggcgcaccgggtgccgcttctcggcttccactcttcagaaagagcgcggtggggatcagcgcctttcccgcactcggcacaactccgggaccggcggcgcgcggctggaccg

SEQ ID NO: 190090 - DNA, 120 bp, Artificial Sequence
  ENSG00000112309_3 (sequence is synthesized)
agtcccgcttcccgccagctcacctggagtcgggggcagcccctgcccgcccgcctgcaccccttgtcgctctagcttgcgcgaacctgccgctcctccacgcccaggtagtgagccccg

SEQ ID NO: 190091 - DNA, 120 bp, Artificial Sequence
  ENSG00000112309_4 (sequence is synthesized)
cggctccaggtctctgcagcgccctcggccccatggacagcgcacccatcaccactccctaagtgctggcgccgccgctgtccaagctgcgcactggggtccctcggctcgcccctctct

SEQ ID NO: 190092 - DNA, 120 bp, Artificial Sequence
  ENSG00000112309_5 (sequence is synthesized)
ggggtgtccgagaggccagggagcgtgcaccatgaagtccgcgcttttcacccgcttctttatcctcctgccctggatcctaattgtcatcatcatgctcgacgtggacacgcgcaggcc

SEQ ID NO: 190093 - DNA, 120 bp, Artificial Sequence
  ENSG00000112309_6 (sequence is synthesized)
agtgcccccgctcaccccgcgcccctacttctctccctacgcggtgggccgcgggggcgcccgactcccgctccgcaggggcggcccggctcacgggacccaaaagcgcaaccagtctcg

SEQ ID NO: 190094 - DNA, 120 bp, Artificial Sequence
  ENSG00000112309_7 (sequence is synthesized)
gccgcagccacagccggagccgcagctgcccaccatctatgccatcacgcccacctacagccgcccggtgcagaaagcggagctgacccgcctggccaacacgttccgccaggtggcgca

SEQ ID NO: 190095 - DNA, 120 bp, Artificial Sequence
  ENSG00000112309_8 (sequence is synthesized)
gctgcactggatcctggtggaggacgcggcggcgcgcagcgagctggtgagccgcttcctggcgcgggccgggctgcccagcactcacctgcacgtgcccacgccgcggcgctacaagcg

SEQ ID NO: 190096 - DNA, 120 bp, Artificial Sequence
  ENSG00000112309_9 (sequence is synthesized)
gcccgggctgccgcgcgccactgagcagcgcaacgcgggcctcgcctggctgcgccagaggcaccagcaccagcgcgcgcagcccggcgtgctcttcttcgctgacgacgacaacaccta

SEQ ID NO: 190097 - DNA, 120 bp, Artificial Sequence
  ENSG00000112309_10 (sequence is synthesized)
tagtctggagctcttccaggagatgcgaaccacccgcaaggtctccgtctggcctgtgggcctggttggtgggcggcgctacgaacgtccgctggtggaaaacggcaaagttgttggctg

SEQ ID NO: 190098 - DNA, 120 bp, Artificial Sequence
  ENSG00000112309_11 (sequence is synthesized)
gtacaccggctggagagcagacaggccttttgccatcgacatggcaggatttgctgtaagtcttcaagtcattttgtccaatccaaaagctgtatttaagcgtcgtggatcccagccagg

SEQ ID NO: 190099 - DNA, 120 bp, Artificial Sequence
  ENSG00000112309_12 (sequence is synthesized)
gatgcaagaatctgactttctcaaacagataacaacagtcgaagaactggaaccgaaagcaaataactgcactaaggttctcgtgtggcacactcggacagagaaggttaatctagccaa

SEQ ID NO: 190100 - DNA, 120 bp, Artificial Sequence
  ENSG00000112309_13 (sequence is synthesized)
cgagccaaagtaccacctggacacagtgaaaattgaggtataaattgaagcagcaactggtgcagtttgtccagccagtggatccatatggaagaggatgtttggagtttaggctacaga

SEQ ID NO: 190101 - DNA, 120 bp, Artificial Sequence
  ENSG00000112309_14 (sequence is synthesized)
gcattcaggtattgtttgttttacttcagtacagcagcctttcttgtcatctgatggacatctgtttaaatggagcttgtcagttaacataagctaattggatggttggtacaaaatgta

SEQ ID NO: 190102 - DNA, 120 bp, Artificial Sequence
  ENSG00000112309_15 (sequence is synthesized)
tgttttgtcttcatttgttctgcatgttttctctacaacaactaaattggaagatttttttgtacagtgccgatactgcaagataccactcttgagtatatattttttctttttctccaa

SEQ ID NO: 190103 - DNA, 120 bp, Artificial Sequence
  ENSG00000112309_16 (sequence is synthesized)
tttgcccttataattggtagacttgaacaggttggtagacttgaacaggtttttaaaacagacaagtattttgtcagctaaacgttcctgatgattcctgactttgcaatactaagtaat

SEQ ID NO: 190104 - DNA, 120 bp, Artificial Sequence
  ENSG00000112309_17 (sequence is synthesized)
ttttggaaggttagtggcagtatacatcataggaaataaaaacccacaaatgaaaaggtctatggagtcatgtttaatgtagggaaataacattttgtcaatactaggcaccataaaatg

SEQ ID NO: 190105 - DNA, 120 bp, Artificial Sequence
  ENSG00000112309_18 (sequence is synthesized)
taaacacaattactgtcataaacctagatataccttcaaggattgaagattgaaagtggctttgttttagttagttaccctgtttgcatatagtgcagaaaaaggtcttcatgttagcac

SEQ ID NO: 190106 - DNA, 120 bp, Artificial Sequence
  ENSG00000112309_19 (sequence is synthesized)
tatgtacattaagaagagatccaaattacaagagaggcagataaaatttgaattctttaagcattcattaaacgaagttttggagtaacatccacgtttatcttcctttcactaatcacg

SEQ ID NO: 190107 - DNA, 120 bp, Artificial Sequence
  ENSG00000112309_20 (sequence is synthesized)
ttccctgttaagcacatcataacaacagcacagtgaagtgaatgatgaaataagagcattttgatacactagaaaacagtgctcagtgagacatttacattctatttatatgattaaaca

SEQ ID NO: 190108 - DNA, 120 bp, Artificial Sequence
  ENSG00000112309_21 (sequence is synthesized)
tttgatcatacagtaccttcctacaggattactggctaattttggggtggggtttatactattagaggtattactaacatgataactacttcccttatatgcaaacattagagctataat

SEQ ID NO: 190109 - DNA, 120 bp, Artificial Sequence
  ENSG00000112309_22 (sequence is synthesized)
tttattgagaggaaaactgattttgcaagttgagcagcttctcaaataatgcagtacatgaaatcatgggaaatatgagcaaagctgcccttgacataaaatgatttatcaacctgcttt

SEQ ID NO: 190110 - DNA, 120 bp, Artificial Sequence
  ENSG00000112309_23 (sequence is synthesized)
tcaccacatcaaattgaatcagtacagaccaacacggtcaatcagatcattcttaatatgaacaaatgggtaaaaagaaaaaaaatatgcatatgaataaacaggggaactagatgcgtt

SEQ ID NO: 190111 - DNA, 120 bp, Artificial Sequence
  ENSG00000112309_24 (sequence is synthesized)
tcagcaaggaatgtcaggtggtagttctggatgaaacttgtattgcagttttcatttccacagttgtgtgctgagagtctgacctgatgagcttccagaccatcctgctgttgtgctgga

SEQ ID NO: 190112 - DNA, 120 bp, Artificial Sequence
  ENSG00000112309_25 (sequence is synthesized)
gggctggccaaaacctgcagtaggggttgcactactgatactcatgccagccatctgctgattcatctgtgaaacatataaaaggcttagttcaagaggcttacttcacttttaattctt

SEQ ID NO: 190113 - DNA, 120 bp, Artificial Sequence
  ENSG00000112309_26 (sequence is synthesized)
gtttctttagccacacagttggtcattttttcattaatgtgacaactagtccaagcactggaataaaaacagagtaccatacaaatatttcttaaagcaaatagctactttgttcccttc

SEQ ID NO: 190114 - DNA, 120 bp, Artificial Sequence
  ENSG00000112309_27 (sequence is synthesized)
tttcacctacactaggatattgtgctttaactactaaggagtaagaaaattttaggaagtaaaatagtctaaaattatcctataaactttgtatgatagatattattctctattaaaatc

SEQ ID NO: 190115 - DNA, 120 bp, Artificial Sequence
  ENSG00000112309_28 (sequence is synthesized)
ttatatacttcctaaatatttttaaagtggtcataaagcatttatttctctcgctgatctaacaacataaacatctaaaatttattttcattgtatgcaataaagcataagattacatgt

SEQ ID NO: 190116 - DNA, 120 bp, Artificial Sequence
  ENSG00000112309_29 (sequence is synthesized)
atttttcttcaagactggagtcaaatatatatatatataagcatcttaaccctgtgattctcttacttccaaaattggtgataagagaaggaaaggcaagatttaccatatagtgagtgg

SEQ ID NO: 190117 - DNA, 120 bp, Artificial Sequence
  ENSG00000112309_30 (sequence is synthesized)
gtttaaaacttacactcagagttagactgtgttcttaatttaatacatttgacttgacttatttacagtttcaaagacactaacataaactacatcactaatcaggcataagtgtctgaa

SEQ ID NO: 190118 - DNA, 120 bp, Artificial Sequence
  ENSG00000112309_31 (sequence is synthesized)
gaagcagatcacgtcttcatacctactaaaggacattttaaccaccttgtcattggccagtagattgcactgatggagtgctggagaacagcatcacccttctgcattatctggaagtaa

SEQ ID NO: 190119 - DNA, 120 bp, Artificial Sequence
  ENSG00000112309_32 (sequence is synthesized)
gagccagtattaactccttcctggttcatctagcaccttaacctgagctgggtgtgcttcagcatgttgaccatgtgactgacacttagcacatacaattttttagattcccagcgggta

SEQ ID NO: 190120 - DNA, 120 bp, Artificial Sequence
  ENSG00000112309_33 (sequence is synthesized)
gagaccaatgttttacctatattcttgtaaatggtggtagcaaaattaactgtgatatatagtgattgtgctaatgttagaaatcactctagactattccctgaatgctctaaaggtaaa

SEQ ID NO: 190121 - DNA, 120 bp, Artificial Sequence
  ENSG00000112309_34 (sequence is synthesized)
acaagtgaccaaacagaaaccaagattgccaaaatgctggaggaacatcaatgggaagtgtaaaaggaagaagagtgggagcatgaacctctctaagagcctttgtctgtgcagctagag

SEQ ID NO: 190122 - DNA, 120 bp, Artificial Sequence
  ENSG00000112309_35 (sequence is synthesized)
aaaagtcagaacacagcacctgaaatagaaatgttctatctcagctctaacttaggtagaaataggattttataatatgaggggatgtctggttcacaccttatgggaattgaatctttt

SEQ ID NO: 190123 - DNA, 120 bp, Artificial Sequence
  ENSG00000112309_36 (sequence is synthesized)
tgtactctttttaaacataaaagtcattatagggtatgtaaaaagaaaatacaactttacaaaggtttctcaacaaaaagaatttttacagagccatggggcagtaatcatccgacctga

SEQ ID NO: 190124 - DNA, 120 bp, Artificial Sequence
  ENSG00000112309_37 (sequence is synthesized)
aaaatagccttagatccctcataaaatagtgctttgagaatatgaggctagatttttattttctaataaaagatcctaaaattattagtgaagctaagttgtctaagtggactgtaaaaa

SEQ ID NO: 190125 - DNA, 120 bp, Artificial Sequence
  ENSG00000112309_38 (sequence is synthesized)
tgtcccaccagcaagctggataaagcttagtgctaatctcagaggtgacagagagggagtctcatgatgcctgagataatttctggccattagtggtgttcacgttacagttacattaca

SEQ ID NO: 190126 - DNA, 120 bp, Artificial Sequence
  ENSG00000112309_39 (sequence is synthesized)
atttgaaatgaaagatgtttaaccttttttttacagaatactctaaaatagcgataataacacatcatttgtctatctgatacaacttcataatatttatagatacttttgaccctataa

SEQ ID NO: 190127 - DNA, 78 bp, Artificial Sequence
  ENSG00000112309_40 (sequence is synthesized)
taaatctggtttgatttgggagaagctagaaagtaaatgacccctacctgtgagaggctccactggggctgctgagct

SEQ ID NO: 190128 - DNA, 120 bp, Artificial Sequence
  ENSG00000112309_41 (sequence is synthesized)
gacccctacctgtgagaggctccactggggctgctgagcttgcggcaggccaaacttactctggggtgcacccatttgtcccaccattcctccttgggggccaacaacgttctgaggaag

SEQ ID NO: 190129 - DNA, 120 bp, Artificial Sequence
  ENSG00000112309_42 (sequence is synthesized)
tggcatcacaccagtttgtgcatttcccataaacccattgggcatgggcatgcccaccatcatgcttggactctgtcccatcacatttcctataaggccaggagctgcaggcacaggcac

SEQ ID NO: 190130 - DNA, 120 bp, Artificial Sequence
  ENSG00000112309_43 (sequence is synthesized)
gcccatcgatggaaagccctgaaatgcagctggtgcttgtgaggtaaatggtatatttgtgggtcccataaatacacctgcaccacaaaaagaaaatgaatgaagacagagctatcacgt

SEQ ID NO: 190131 - DNA, 120 bp, Artificial Sequence
  ENSG00000112309_44 (sequence is synthesized)
gtagttgcactcatctctataatcacagaaaaattgcctttctgaactactcacagcaaacattttaattccagtttggctgctcctactactcagaccaacccacacctaaaccctgag

SEQ ID NO: 190132 - DNA, 120 bp, Artificial Sequence
  ENSG00000112309_45 (sequence is synthesized)
agctggttgtttctaggatgcagacaaatcagttattaacctgagtaaatttaattaagaaatgtaaatcatatgcaacagccacacaaaatatcttccactgtgaagaccaaactatgt

SEQ ID NO: 190133 - DNA, 120 bp, Artificial Sequence
  ENSG00000112309_46 (sequence is synthesized)
agcatgacatcatacactgttttattgctgatttgtaccactggtcccccagtacgaaacagggaagtgagagctgactatatctcgcttcaataggtgtagtgggctgcccaacaattt

SEQ ID NO: 190134 - DNA, 120 bp, Artificial Sequence
  ENSG00000112309_47 (sequence is synthesized)
tagctcacatgtgaaatgcagctcattattttaaaggaaatggtgtgaaagattaaaactctgtaaacaataaggcttatgctaatattttgttatgattacaaaaaaattcatagattt

SEQ ID NO: 190135 - DNA, 120 bp, Artificial Sequence
  ENSG00000112309_48 (sequence is synthesized)
tttttaatccatgtggtaactcaagactgtttacctgcagagaaaatacactgtacgcagtcataaacttcatgcaaatcgtttcaataattcatcaaagataatccatgttctataagc

SEQ ID NO: 190136 - DNA, 120 bp, Artificial Sequence
  ENSG00000112309_49 (sequence is synthesized)
ttgtgaaacaacatttagtgatctatgaacagcttgttaattccaaataaagttctgtgaatcctgtacatgcctcttaattttttaattctaatgctcattcatttcggcttcatagtt

SEQ ID NO: 190137 - DNA, 120 bp, Artificial Sequence
  ENSG00000112309_50 (sequence is synthesized)
gtataaactgcaacaacaaaagcactcactacatggaacaataaaagatatataattgatcttattatataattacaaaggatgtacttctagtaatgtcactgaaagcagatatcaaaa

SEQ ID NO: 190138 - DNA, 120 bp, Artificial Sequence
  ENSG00000112309_51 (sequence is synthesized)
ttcattaccaggagtactttgctgttgaatggttcctgtgccatacagagataagatggagtctttggaaagttgtttctttgccacttcttctgattttgtagtttgctcagtgaataa

SEQ ID NO: 190139 - DNA, 120 bp, Artificial Sequence
  ENSG00000112309_52 (sequence is synthesized)
atctagatccccagatgttactgtagacagggttgcagctgctggtgcagagggtgtcccctgagacaaacaccaaaataagctatcaaattctgcatagtaaagcgcagcttatccatt

SEQ ID NO: 190140 - DNA, 120 bp, Artificial Sequence
  ENSG00000112309_53 (sequence is synthesized)
acttaaaatccaaataaagttataaaattagataggaatcaaacaattgtagaaggtaaaatggtgccattcaagaggatcacttacaagcccaagcccatataaaaacatctacaatca

SEQ ID NO: 190141 - DNA, 120 bp, Artificial Sequence
  ENSG00000112312_0 (sequence is synthesized)
gtcagttggtcacgtggttgttcggagcgggcgagcggagttagcagggctttactgcagagcgcgccgggcactccagcgaccgtggggatcagcgtaggtgagctgtggccttttgcg

SEQ ID NO: 190142 - DNA, 120 bp, Artificial Sequence
  ENSG00000112312_1 (sequence is synthesized)
aggtgctgcagccatagctacgtgcgttcgctacgaggattgagcgtctccacccagtaagtgggcaagaggcggcaggaagtgggtacgcaggggcgcaaggcgcacagcctctagacg

SEQ ID NO: 190143 - DNA, 120 bp, Artificial Sequence
  ENSG00000112312_2 (sequence is synthesized)
actcgctttccctccggccaacctctgaagccgcgtcctactttgacagctgcagggccgcggcctggtcttctgtgcttcaccatctacataatgaatcccagtatgaagcagaaacaa

SEQ ID NO: 190144 - DNA, 120 bp, Artificial Sequence
  ENSG00000112312_3 (sequence is synthesized)
gaagaaatcaaagagaatataaagaatagttctgtcccaagaagaactctgaagatgattcagccttctgcatctggatctcttgttggaagagaaaatgagctgtccgcaggcttgtcc

SEQ ID NO: 190145 - DNA, 120 bp, Artificial Sequence
  ENSG00000112312_4 (sequence is synthesized)
aaaaggaaacatcggaatgaccacttaacatctacaacttccagccctggggttattgtcccagaatctagtgaaaataaaaatcttggaggagtcacccaggagtcatttgatcttatg

SEQ ID NO: 190146 - DNA, 120 bp, Artificial Sequence
  ENSG00000112312_5 (sequence is synthesized)
tatgaagcacttaaggaaaatgagaaacttcataaagaaattgaacaaaaggacaatgaaattgcccgcctgaaaaaggagaataaagaactggcagaagtagcagaacatgtacagtat

SEQ ID NO: 190147 - DNA, 120 bp, Artificial Sequence
  ENSG00000112312_6 (sequence is synthesized)
atggcagagctaatagagagactgaatggtgaacctctggataattttgaatcactggataatcaggaatttgattctgaagaagaaactgttgaggattctctagtggaagactcagaa

SEQ ID NO: 190148 - DNA, 120 bp, Artificial Sequence
  ENSG00000112312_7 (sequence is synthesized)
attggcacgtgtgctgaaggaactgtatcttcctctacggatgcaaagccatgtatatgaaatgcattaatatttgactgttgagaattttactgccgaagtttacctccactagttctt

SEQ ID NO: 190149 - DNA, 120 bp, Artificial Sequence
  ENSG00000112312_8 (sequence is synthesized)
tgtagcagagtacataactacataatgccaactctggaatcaaatttccttgtttgaatcctgggaccctattgcattaaagtacaaatactatgtatttttaatctatgatggtttatg

SEQ ID NO: 190150 - DNA, 120 bp, Artificial Sequence
  ENSG00000112312_9 (sequence is synthesized)
tgaataggattttctcagttgtcagccatgacttatgtttattactaaataaacttcaaactcctgttgaacattgtgtataacttagaataatgaaatataaggagtatgtgtagaaaa

SEQ ID NO: 190151 - DNA, 120 bp, Artificial Sequence
  ENSG00000112312_10 (sequence is synthesized)
gacgcgcggggccacactgcccgccccctagcctggcgctgggcctccgggacaagttggctgggtccgggcttggggactgcaacgcggtcttctgtgcttcaccatctacataatgaa

SEQ ID NO: 190152 - DNA, 120 bp, Artificial Sequence
  ENSG00000112312_11 (sequence is synthesized)
gatgctgctctttaggatggacctgggcataccctagtatctgtttattttgctttttctggtgactatttaatccaggacaatatgtttagaaattttaaaccagttttagaaattggt

SEQ ID NO: 190153 - DNA, 120 bp, Artificial Sequence
  ENSG00000112312_12 (sequence is synthesized)
ttaaaatacattaatttcattttttcagctataattattatgtgtgtatatatgtaaaatatagatatcaagagtcattaactttagtcaccttagtcattgacagggctgagtttggat

SEQ ID NO: 190154 - DNA, 120 bp, Artificial Sequence
  ENSG00000112312_13 (sequence is synthesized)
agcctggctataatttctgtaagccttgagttagtcagaggatgagtaacaatagagaacatttttaaaaaactaattacggttgaatattaagtctgacccaagaatatgggttgtctc

SEQ ID NO: 190155 - DNA, 120 bp, Artificial Sequence
  ENSG00000112312_14 (sequence is synthesized)
tcttattttggtctttcaacagtattttgtagttttcagagcatgaattttacactatttatgttaaattttttcctaagtattctttttgaggttactgtgaatggaattgtttcctta

SEQ ID NO: 190156 - DNA, 120 bp, Artificial Sequence
  ENSG00000112312_15 (sequence is synthesized)
atttcattctcatttggtcattgctactgtataggaaaataattgacttttgtgtcttgattttgtgtcctgaaaccttgctgaacttaatagttctaattgttttttagtagattcttc

SEQ ID NO: 190157 - DNA, 120 bp, Artificial Sequence
  ENSG00000112312_16 (sequence is synthesized)
agttggctgggtccgggcttggggactgcaacgcgggtaagggactcagcctgggcttgccagctgtggggatgaggcgaagcatccatcctcttggcagttaagtggctggtcctgatc

SEQ ID NO: 190158 - DNA, 120 bp, Artificial Sequence
  ENSG00000112312_17 (sequence is synthesized)
tgagggatctgcaaatttggctcatggaaagaggtggctgaattctgcgtctcccattaaacggatactggcgttgttgatacgggtttcgcatggaccctgtcctgtgccagggttttt

SEQ ID NO: 190159 - DNA, 120 bp, Artificial Sequence
  ENSG00000112319_0 (sequence is synthesized)
gcaaaacttccatcctgtccacgtgaagttgtcgctgccttagagagggggaaagagctgcgggaaaagccggggagtgacgactgcggcggctgggcgcgctctctcattttcttttct

SEQ ID NO: 190160 - DNA, 120 bp, Artificial Sequence
  ENSG00000112319_1 (sequence is synthesized)
tctcctttcccccctgtcgcagtccggagttttggctcctctcctttcctcctccccctcggagccggcttctccctccgccccgcttctcccccgcttgtgtacgctatttgttgtggg

SEQ ID NO: 190161 - DNA, 120 bp, Artificial Sequence
  ENSG00000112319_2 (sequence is synthesized)
gtggccgaaggggatgtcctgttttcaccagaggcacagcgcgaaggggaaacttcgacactggaaggaacgagaataaatacttaattacggacgcactgaaccgcggctgggacagac

SEQ ID NO: 190162 - DNA, 120 bp, Artificial Sequence
  ENSG00000112319_3 (sequence is synthesized)
acttcgggaacccgaggcggaccgggcgacgagatagtcatttttacttgaaggaagctgcttctacttgggagtggcaggagaagtgagaaaaccacatggaagactcccaggatttaa

SEQ ID NO: 190163 - DNA, 120 bp, Artificial Sequence
  ENSG00000112319_4 (sequence is synthesized)
atgaacaatcagtaaagaaaacgtgcacagaatcagatgtttcacaatctcagaattccaggtctatggaaatgcaggacctagcaagtcctcatactcttgttggaggtggtgatactc

SEQ ID NO: 190164 - DNA, 120 bp, Artificial Sequence
  ENSG00000112319_5 (sequence is synthesized)
caggtagctccaaactggaaaaatctaatctcagcagcacatcagttactacaaatgggacaggaggggaaaacatgactgttttaaacacagcagactggttgctgagttgcaacaccc

SEQ ID NO: 190165 - DNA, 120 bp, Artificial Sequence
  ENSG00000112319_6 (sequence is synthesized)
cctcttctgcaacaatgtctcttcttgcagtcaaaacagagcccttgaacagcagtgaaaccacagccacgactggagatggagcgcttgacacttttactgggtcagtaattacaagta

SEQ ID NO: 190166 - DNA, 120 bp, Artificial Sequence
  ENSG00000112319_7 (sequence is synthesized)
gtggctacagccccagatcagcacatcagtattccccacagctgtatccttccaagccctatccacacattctttctacaccagcagctcaaacaatgtctgcctatgcaggccagactc

SEQ ID NO: 190167 - DNA, 120 bp, Artificial Sequence
  ENSG00000112319_8 (sequence is synthesized)
agtattcggggatgcagcagccagccgtctacacagcctactcacagacaggacagccctacagcttgcccacttacgatttgggtgtgatgttgccagccatcaagacagagagtggac

SEQ ID NO: 190168 - DNA, 120 bp, Artificial Sequence
  ENSG00000112319_9 (sequence is synthesized)
tttcccaaactcagtccccattacagagtggctgcctcagttacagcccagggttctctaccccacagccaggccagacaccttattcttaccaaatgccaggttctagttttgcaccat

SEQ ID NO: 190169 - DNA, 120 bp, Artificial Sequence
  ENSG00000112319_10 (sequence is synthesized)
catctactatttatgcaaataattcagtttccaattcaacgaatttcagtggttcacaacaggattatccatcctatacagcctttggccaaaaccagtatgcacagtattattcagcat

SEQ ID NO: 190170 - DNA, 120 bp, Artificial Sequence
  ENSG00000112319_11 (sequence is synthesized)
caacgtatggagcgtatatgacatcgaataacacagccgatggcacaccctcttcaacctctacttatcagttgcaggaatctctcccaggactgactaaccaaccaggagagttcgata

SEQ ID NO: 190171 - DNA, 120 bp, Artificial Sequence
  ENSG00000112319_12 (sequence is synthesized)
ccatgcagagtccctccacacccatcaaagatcttgatgagagaacctgtaggagttctgggtcaaagtccagaggaagaggccggaaaaataatccctccccgcctcctgatagtgacc

SEQ ID NO: 190172 - DNA, 120 bp, Artificial Sequence
  ENSG00000112319_13 (sequence is synthesized)
tggagcgtgtgtttgtctgggatttggatgaaaccatcattgtttttcactcactgctcaccgggtcttatgcacagaagtatggcaaggatccccccatggctgtaacccttggactcc

SEQ ID NO: 190173 - DNA, 120 bp, Artificial Sequence
  ENSG00000112319_14 (sequence is synthesized)
gcatggaagaaatgatttttaatcttgctgatactcatttgttttttaatgatttagaggagtgtgatcaagttcatatagatgatgtttcctctgatgataatgggcaggacttaagta

SEQ ID NO: 190174 - DNA, 120 bp, Artificial Sequence
  ENSG00000112319_15 (sequence is synthesized)
cctacagttttgcaactgatggcttccatgcagctgcaagtagtgcaaacctttgtttgccaacaggtgtaagaggaggggttgactggatgaggaagttggcttttcgttacagaagag

SEQ ID NO: 190175 - DNA, 120 bp, Artificial Sequence
  ENSG00000112319_16 (sequence is synthesized)
taaaagaattatataacacctacaagaacaacgttggaggactccttggccctgccaagagggatgcctggctacagttaagggcagagattgaaggtctgacagattcctggctaacaa

SEQ ID NO: 190176 - DNA, 120 bp, Artificial Sequence
  ENSG00000112319_17 (sequence is synthesized)
atgcacttaagtctttatcaattattagcactaggagtaactgcataaatgtcttggtaacgacaactcaactgatcccagcacttgcgaaggttctactctatagtttaggaggtgctt

SEQ ID NO: 190177 - DNA, 120 bp, Artificial Sequence
  ENSG00000112319_18 (sequence is synthesized)
tccccattgagaatatttacagtgcaactaaaataggaaaagaaagttgctttgaacgaataatgcaaaggtttggcagaaaagtagtgtatgttgtaattggggatggtgtagaagaag

SEQ ID NO: 190178 - DNA, 120 bp, Artificial Sequence
  ENSG00000112319_19 (sequence is synthesized)
aacaggcagcaaaaaagcacaacatgcccttctggaggatatccagtcactcagacctcctggctctccaccaagcactggaattagagtatttgtaactgtgttctttagccggagatc

SEQ ID NO: 190179 - DNA, 120 bp, Artificial Sequence
  ENSG00000112319_20 (sequence is synthesized)
cattttttatatttcaagtacactgaatttttatgtgtgattcaatgcctctggctctacacatataaattgtcttaatggatgaaatcatatttggaataaaaattccagaatgaagaa

SEQ ID NO: 190180 - DNA, 120 bp, Artificial Sequence
  ENSG00000112319_21 (sequence is synthesized)
ttcagattgctgaatggagttaaactttagtgctacagaaaagaaactctatggtcttatatttacaacactttaatgggttttttaaaaatctgtggaggttgctggtacacaccaaat

SEQ ID NO: 190181 - DNA, 120 bp, Artificial Sequence
  ENSG00000112319_22 (sequence is synthesized)
gagtccaaactggaatgagcagctttagcaaagaactcttaccctggcaaagcagcaacacacatgctccgtctgacaaggtggtcaacaacattcctcaaaatgggagatcttctcagc

SEQ ID NO: 190182 - DNA, 120 bp, Artificial Sequence
  ENSG00000112319_23 (sequence is synthesized)
agactgtataaggacagtcctatttagacatgtaatttgtgtaaattattgatgaaaataatttactgtgactttattagcagctgactttcaaagtggatgcaatttttctttcttttg

SEQ ID NO: 190183 - DNA, 120 bp, Artificial Sequence
  ENSG00000112319_24 (sequence is synthesized)
ttggggaggggaatgggaggggaaatgggaatataatattgtctcttttttaagtttggcaaacagaatgttcatactgatgtgttgtgccttaaagacaagacagcatttgtgtgttac

SEQ ID NO: 190184 - DNA, 120 bp, Artificial Sequence
  ENSG00000112319_25 (sequence is synthesized)
aatgtaactttggttaaaatctctgtagataatgaaaaaaaacaaaaaaaaaaacctttgtgatgattcttaacatgaccaaatttaaaagtcaagctctcagagcttaattaccgcatc

SEQ ID NO: 190185 - DNA, 120 bp, Artificial Sequence
  ENSG00000112319_26 (sequence is synthesized)
agcaagaaactgagtattttttgcaataagaaaacaacaataataaaggaaagcttgtgtttcatttgggttcttaataattccaataattgtatgaggcaactatttgcgcatccaacc

SEQ ID NO: 190186 - DNA, 120 bp, Artificial Sequence
  ENSG00000112319_27 (sequence is synthesized)
atgagtggaaggtttgggaaagactgtgggacctttacttagaaagtgaaatgtatgtagaagtctcaagtaccccttctacagttttactggagaaaactaagagccatattcatgaca

SEQ ID NO: 190187 - DNA, 120 bp, Artificial Sequence
  ENSG00000112319_28 (sequence is synthesized)
acttgcacagttttgaggttgagacttttgatatgtgtaagttgcatagaggaggatattatcatgcaaatcatgagcaattatcacataaacttttttagaatgtgccatgaacatggc

SEQ ID NO: 190188 - DNA, 120 bp, Artificial Sequence
  ENSG00000112319_29 (sequence is synthesized)
ataaaattcacattgagtgcacagggcttaaaataaagctaagtatgtttattcccaatgccatggcaaaaatgataatatcatcagaaatggaaggcagttctcccagatggtgtctaa

SEQ ID NO: 190189 - DNA, 120 bp, Artificial Sequence
  ENSG00000112319_30 (sequence is synthesized)
tgaaagcaatgagtctatgaaaattttacctagaatatcatcataaattaaattagcaagtgcgctggatcttggcagcgctgctgaaatgacaacagtaaaataatacctggttctcca

SEQ ID NO: 190190 - DNA, 120 bp, Artificial Sequence
  ENSG00000112319_31 (sequence is synthesized)
tctgaatacatcaatgcaggttctcctcgtaacagacttgcatatgtttgttagtttctgcctgtattgtcactgcgcaacggatggcattcattacaagaagagcccatcatcgttgtg

SEQ ID NO: 190191 - DNA, 120 bp, Artificial Sequence
  ENSG00000112319_32 (sequence is synthesized)
tttgcatggtttttttccttgtgtgtagcccatgttgggaacacgatacaggttctcctcttatttcctatgacacgatttcccttgtggaaatttaagactttaagaactagagtattt

SEQ ID NO: 190192 - DNA, 120 bp, Artificial Sequence
  ENSG00000112319_33 (sequence is synthesized)
ttatggtgtctgcacctgcagttctgtgtttaaaatgtcataatgtggatcctggagtcaggctactagtcagtgcccctagccagaggctggttcatgagttcatcaactgaggcctct

SEQ ID NO: 190193 - DNA, 120 bp, Artificial Sequence
  ENSG00000112319_34 (sequence is synthesized)
gtggcttcaataaagtctacattttgctcacagatcacaacattcactgtggaaatatgatttcatttctttaggctacaaacctgtatttctttactgaatgctaaggccatgtttata

SEQ ID NO: 190194 - DNA, 120 bp, Artificial Sequence
  ENSG00000112319_35 (sequence is synthesized)
ttgggtagaaagatattgagatcccaattttgtacaagattgtgatttcattatctaaaccttaaacttaatcctttaaattttgtagcttttggctgcatctgccccaagtactattcc

SEQ ID NO: 190195 - DNA, 120 bp, Artificial Sequence
  ENSG00000112319_36 (sequence is synthesized)
aggcaaattaaagttggaatacctttaataatataaaaataatgatagtaaatcttatacttctgttggcccttagcttgaaaatagcagttaaaaaaatttaaatgttgccttgattat

SEQ ID NO: 190196 - DNA, 120 bp, Artificial Sequence
  ENSG00000112319_37 (sequence is synthesized)
cagtacttaattatgttgtgcactaaaaccttaaatatttattactgtgaataaaaacaaattatctttactgtatagctggtttctttaaatgttgatagaattgtggcattacatcta

SEQ ID NO: 190197 - DNA, 120 bp, Artificial Sequence
  ENSG00000112319_38 (sequence is synthesized)
aatttgtaagtcttttcatatcaaacaagcaaggctttttatgctgctaagtctgtgggtgcagaaagaaacaccccttggaagggcaaagagaagccggctggttgcatcaccccgtgc

SEQ ID NO: 190198 - DNA, 120 bp, Artificial Sequence
  ENSG00000112319_39 (sequence is synthesized)
agtttctcacacacatctctttttctgattctgtgttcagaagaggctgccggcataaaacctaaatgcaaggttgacggagaacagcttgtctggcacaacaatggtgcaggcccacga

SEQ ID NO: 190199 - DNA, 120 bp, Artificial Sequence
  ENSG00000112319_40 (sequence is synthesized)
gccagcatcacagcttggccatgggacgttgagtatgcacaaactagaactcttcccttcccaccttaggaatagaaaatcctcttcctttctaatctgaaaaacgaaaactgaacaaac

SEQ ID NO: 190200 - DNA, 120 bp, Artificial Sequence
  ENSG00000112319_41 (sequence is synthesized)
acaaaaccaaccccttggcagttcccacctcctattgacatatggaatattgtgccttattgtaaaccagtttgaaaaatgttctgtaactaaagtgggttttcggctattatgtataca

SEQ ID NO: 190201 - DNA, 120 bp, Artificial Sequence
  ENSG00000112319_42 (sequence is synthesized)
gcttggtatattactacgaaagataaccaccttgtgttgcaccttaaaaatatcaagaccatgtaatttccataacaaaataggtggcctggctatggtattatagcatacaattaggac

SEQ ID NO: 190202 - DNA, 120 bp, Artificial Sequence
  ENSG00000112319_43 (sequence is synthesized)
actatgcccctgcaaaattttgtaaatcaaattcagaggcaaaaacatattttagaatcatacagtttgcacacgacaagtaggtaataactgtctctaaaaatgttttctccttagtcc

SEQ ID NO: 190203 - DNA, 120 bp, Artificial Sequence
  ENSG00000112319_44 (sequence is synthesized)
gcaatgagctaagattcagaatagtgtcaacagcatgctcctatatgaagttgttttttttaaagcacatttgtttatgacaagcctacattctcagtgaatatggcatttagtatttct

SEQ ID NO: 190204 - DNA, 120 bp, Artificial Sequence
  ENSG00000112319_45 (sequence is synthesized)
tttgaaaacaaacttaagcatcatgagccaaagttgcactttgactcccaactacggtagcattatggacatctcacaatgtcaagggtttctgttatgtattagtaaagtatagattat

SEQ ID NO: 190205 - DNA, 120 bp, Artificial Sequence
  ENSG00000112319_46 (sequence is synthesized)
tggggcctacataatttaaaagaaatgtaaattaatattaaaagcttgtaaaaatatgtatatctttactatttctcaataaatacctttgcaattgttttcatttccttcaccctccca

SEQ ID NO: 190206 - DNA, 120 bp, Artificial Sequence
  ENSG00000112319_47 (sequence is synthesized)
gcggaccgggcgacgaggtaaatgcaagaacactggacattctgtaaaaacaggcccctctttataaggagtttattcaccatagttctgtattgcagctgctgatcatatttcatggag

SEQ ID NO: 190207 - DNA, 120 bp, Artificial Sequence
  ENSG00000112319_48 (sequence is synthesized)
ctgttaaagcacttaaaacctaaaattagataaggaagctgagacccagtcatgcagcacagtggagccaggatcctaactccccagtatgaggccagcacccttatccttaagcgtgtg

SEQ ID NO: 190208 - DNA, 120 bp, Artificial Sequence
  ENSG00000112319_49 (sequence is synthesized)
ctgggctcttgcttccatcagtcatataccaccatttttaggtggtacctgaacattttgttttaataatacttatattttatgtaaggataactagatattagaaaaatttgttaaatt

SEQ ID NO: 190209 - DNA, 120 bp, Artificial Sequence
  ENSG00000112319_50 (sequence is synthesized)
ttgtattaaacctgtaacttcatgggcaatattgtttgagacaagaccaaacaaagtattgaagtcaaagaaaaaaaattaagtatctgaagaaacgtattaagtaacagtgaacaagaa

SEQ ID NO: 190210 - DNA, 120 bp, Artificial Sequence
  ENSG00000112319_51 (sequence is synthesized)
tatggcctaaataaccacagtcatgaaggctggacagcaaatgactgaatttggagaaatgctgtattttgtaatgtttcccaattatcaagaacttatgaccagatcttttaaatattt

SEQ ID NO: 190211 - DNA, 120 bp, Artificial Sequence
  ENSG00000112319_52 (sequence is synthesized)
aactaacatgtggaatcttcctttgctcttcaagccttatccaaattggttaaatgttatcaactttgtattttctttgtttttgttttttgttgttttaatgctggttttgaatctcaa

SEQ ID NO: 190212 - DNA, 120 bp, Artificial Sequence
  ENSG00000112319_53 (sequence is synthesized)
atctgcacatttatgttgaaccaactaataaggcttgaagagttaaagagtgcatgatggacttctggaggcaggtttaaattataatggagctgcccatattttggaaatacattcaat

SEQ ID NO: 190213 - DNA, 120 bp, Artificial Sequence
  ENSG00000112319_54 (sequence is synthesized)
gttttcatttttttatttacttatatactcagccacggatcctttcatttaaatggaaactgatgatatgcccagtagagaaatgtgccactgctctaggtgaagcaggatgtaggtagc

SEQ ID NO: 190214 - DNA, 120 bp, Artificial Sequence
  ENSG00000112319_55 (sequence is synthesized)
ctgagaatgactcaccaacagtaccctctcacggtggccgccgcctctggagttctctctaagtgtcttcaatgtatggaaactgctgcaaaaaaattcaagtcttctgacaaaaggggt

SEQ ID NO: 190215 - DNA, 120 bp, Artificial Sequence
  ENSG00000112319_56 (sequence is synthesized)
taattcagagtacctgccctaacatgttcatgtggcatcactaaaaaacagactgtcagatacggtaaaatatctcccagtgtgacatatcagcagaaaggtgtgtctactctcccttct

SEQ ID NO: 190216 - DNA, 120 bp, Artificial Sequence
  ENSG00000112319_57 (sequence is synthesized)
ataacttgagtatccgtattaaccagtcttcaaattcgatttagcactgagaaaattaaaactgatcaaaatgttccctgtgtgtagttacaggtctgaatgaggcacaaaggacttgta

SEQ ID NO: 190217 - DNA, 120 bp, Artificial Sequence
  ENSG00000112319_58 (sequence is synthesized)
cctgcaaaggttgactttattaattagaacatctttcctcctttaaagactgtaagaagaaacaccagcagtggcctaacttgacatgactttagattttcacgtaaattattgctacta

SEQ ID NO: 190218 - DNA, 120 bp, Artificial Sequence
  ENSG00000112319_59 (sequence is synthesized)
tttctgttatcctttccccctttctttttaaaatgaaagggacatttcttgtgaaagactacaattaaatcataaaaatttacattcatgtgccattaagtttaattctactcacaaaag

SEQ ID NO: 190219 - DNA, 120 bp, Artificial Sequence
  ENSG00000112319_60 (sequence is synthesized)
caacagtacagagtttgaaattctatccctaatcaagtaggtgtaccacataccgggagggctcattatgcacaaggtcatatatacaattcacagacctctgcatatacccaacggagt

SEQ ID NO: 190220 - DNA, 120 bp, Artificial Sequence
  ENSG00000112319_61 (sequence is synthesized)
gatctattcattacatttcacctctgactttgaactccctaatgttaaaagatttgaaaagaaccgaatgttctgattaagagattgaatatttctaacttaatgttttcagtatgttga

SEQ ID NO: 190221 - DNA, 120 bp, Artificial Sequence
  ENSG00000112319_62 (sequence is synthesized)
aagtgatgatgacttgggggaatcagcagatctctacattacctaattcttttctcttacatttgaatgcaaatgtatattcatgtgcggttatgactcaagtcattcttgctaaattta

SEQ ID NO: 190222 - DNA, 120 bp, Artificial Sequence
  ENSG00000112319_63 (sequence is synthesized)
atgacgttgtaggtgaatcacattcagatttccttttgcaggttttccagtaatctaaaacaatgcttctagtaggtaacttaagcatgcaaacctcaataaacctgtcaagaacggcaa

SEQ ID NO: 190223 - DNA, 120 bp, Artificial Sequence
  ENSG00000112319_64 (sequence is synthesized)
tccccattgagaatatttacagtgcaactaaaataggcaaggaaagctgttttgagcgtatagtgtccagatttggcactaacataacttatgttgtgattggagatggccgagatgagg

SEQ ID NO: 190224 - DNA, 120 bp, Artificial Sequence
  ENSG00000112319_65 (sequence is synthesized)
gtaatcttctaaagccagctggcacatttataggatgccaggctagcccatcagatgaagtgtccattgtggcagccacagatccacatcagatgggaagagtgtgatcagtgctgcatg

SEQ ID NO: 190225 - DNA, 120 bp, Artificial Sequence
  ENSG00000112319_66 (sequence is synthesized)
aacatttacaagtaaagaaattgagtgtcagattctacaacaaccattttttgagcatttatgataagccagtctctgtgaatacagtggtgaacagggataccacaagaaagtggcatt

SEQ ID NO: 190226 - DNA, 120 bp, Artificial Sequence
  ENSG00000112319_67 (sequence is synthesized)
tcaacacagcttcccctgctgaattgtagatgactgtactatggatgtttatgaagtccagaggggagtctcctgaccaggaagagttgcaagtacagaagtgcttcttcctttggggcc

SEQ ID NO: 190227 - DNA, 120 bp, Artificial Sequence
  ENSG00000112319_68 (sequence is synthesized)
gttgctgcctgacctttgggcgtctgggacggatgcctatacctgcacccagcagcactggaaggggcccaggcccttcgcagcacagcctatccccagaccgcttagtccttcataaca

SEQ ID NO: 190228 - DNA, 120 bp, Artificial Sequence
  ENSG00000112319_69 (sequence is synthesized)
tatatctccacggaaaagggtatttcctcccgtcagaaaaagcgccccagtctggtctgggttggtttttatttcacgttgttgcaagtaggcgaagtcccttctgtctcctcccttggg

SEQ ID NO: 190229 - DNA, 120 bp, Artificial Sequence
  ENSG00000112319_70 (sequence is synthesized)
ggagtttaaatcatttgtctatggtcactagattggcttgtagcagagcctgagctcctgacattcagactgttgctttttcctatattgttaaaattatattgtggataaagaggatta

SEQ ID NO: 190230 - DNA, 120 bp, Artificial Sequence
  ENSG00000112320_0 (sequence is synthesized)
gctctcccgggctcacacacagccgcgcacgcacgcccggggccgctctccgcgccggcccttgctccccgcgcccatgcggacggaccgagcgacggaagatggctgacgactccacgg

SEQ ID NO: 190231 - DNA, 80 bp, Artificial Sequence
  ENSG00000112320_1 (sequence is synthesized)
ggaagatggctgacgactccacggggccccgaggatgcggcccggcggcggcggcggcgggagcggcagcggcagcgagg

SEQ ID NO: 190232 - DNA, 120 bp, Artificial Sequence
  ENSG00000112320_2 (sequence is synthesized)
ccggagcgacggcggcggcatccccgagactctccgcactatccttacccgtgacagccactgacgtcctccgccgctagaagagaccccgcttctcggcgcctgccctccccctcgcgg

SEQ ID NO: 190233 - DNA, 120 bp, Artificial Sequence
  ENSG00000112320_3 (sequence is synthesized)
ctcggtccggccccgccagcaccgctacctccgccagcctcgccaccatcagcaccacctccaccgccgccgccgccgccaccaccaccgccggcggcggcagcagccatttcatctcca

SEQ ID NO: 190234 - DNA, 120 bp, Artificial Sequence
  ENSG00000112320_4 (sequence is synthesized)
cagaaaccagacacaaaaacatggcagaaatggagaaagaagggagacctcccgaaaataaacggagcaggaagccggctcacccagtgaaaagggagatcaatgaggagatgaagaact

SEQ ID NO: 190235 - DNA, 120 bp, Artificial Sequence
  ENSG00000112320_5 (sequence is synthesized)
ttgcagaaaacaccatgaatgaactccttggctggtatggctatgataaggttgaattaaaagatggtgaggatattgaattcaggagctaccctacagatggggagagccggcagcaca

SEQ ID NO: 190236 - DNA, 120 bp, Artificial Sequence
  ENSG00000112320_6 (sequence is synthesized)
tttctgttctcaaagaaaattctttgccaaaaccaaaattacccgaggacagtgttatttcaccatacaatataagcacaggctattcagggcttgccactggaaatggactcagtgact

SEQ ID NO: 190237 - DNA, 120 bp, Artificial Sequence
  ENSG00000112320_7 (sequence is synthesized)
cacctgcagggtcaaaggatcatggcagtgtgcccattattgtacctttaattccaccacctttcataaagccaccagcagaagatgatgtgtcaaatgtacaaataatgtgtgcctggt

SEQ ID NO: 190238 - DNA, 120 bp, Artificial Sequence
  ENSG00000112320_8 (sequence is synthesized)
gccagaaagtgggaatcaagcgctattccctgagtatgggaagtgaggtgaaaagcttctgcagcgagaagtgctttgcggcctgccgacgagcctacttcaagagaaataaggctagag

SEQ ID NO: 190239 - DNA, 120 bp, Artificial Sequence
  ENSG00000112320_9 (sequence is synthesized)
atgaagatggacatgctgaaaattttccccagcagcactatgctaaggaaactccaaggcttgccttcaagaataactgcgaactacttgtatgtgactggtgtaagcacataagacaca

SEQ ID NO: 190240 - DNA, 120 bp, Artificial Sequence
  ENSG00000112320_10 (sequence is synthesized)
caaaagaatacctggattttggggacggggaaagaaggcttcagttctgcagtgcaaaatgtctcaatcaatacaaaatggacattttctacaaagagacccaggccaatcttccagctg

SEQ ID NO: 190241 - DNA, 120 bp, Artificial Sequence
  ENSG00000112320_11 (sequence is synthesized)
ggctgtgcagcacattacaccctcccatggaaaataaagcagaaggcaccggggtgcagctgctcactccagactcttggaatatcccgctaacagatgctcggaggaaggccccctccc

SEQ ID NO: 190242 - DNA, 120 bp, Artificial Sequence
  ENSG00000112320_12 (sequence is synthesized)
cggtggctacagctggccaaagccagggccctggcccgtcggcgtccaccaccgtctctccatctgacactgccaactgctctgtcactaaaatccccacgccagtgcccaagtccatcc

SEQ ID NO: 190243 - DNA, 120 bp, Artificial Sequence
  ENSG00000112320_13 (sequence is synthesized)
ccatcagcgagactccaaatatccctcctgtctccgtccagccacctgctagcatcgggcctccccttggcgtcccgcctcggagccctcccatggtgatgaccaaccgcggcccggtgc

SEQ ID NO: 190244 - DNA, 120 bp, Artificial Sequence
  ENSG00000112320_14 (sequence is synthesized)
cgctgcccatcttcatggagcagcagatcatgcagcagatccgcccgcccttcatccgcgggcctccgcaccatgcctccaaccccaacagccccctgtccaaccccatgcttcccggca

SEQ ID NO: 190245 - DNA, 120 bp, Artificial Sequence
  ENSG00000112320_15 (sequence is synthesized)
tcgggcccccgcccggtggccccagaaacctgggccccacttccagccccatgcaccggcccatgctatcgccccacatccaccccccgagcacccccaccatgcccgggaaccccccag

SEQ ID NO: 190246 - DNA, 120 bp, Artificial Sequence
  ENSG00000112320_16 (sequence is synthesized)
gcctgctgcccccgccgcctccgggcgccccgctgccgagtcttcccttcccgccagtgagcatgatgccaaatggcccgatgccggtgccccagatgatgaatttcgggctgccgtcgc

SEQ ID NO: 190247 - DNA, 120 bp, Artificial Sequence
  ENSG00000112320_17 (sequence is synthesized)
ttgccccgctggtgccgcccccgaccctgctcgtgccgtaccccgtgatcgtgcccctaccggtgcccatccccatccccatccctatccctcacgtcagcgactccaagccccccaacg

SEQ ID NO: 190248 - DNA, 120 bp, Artificial Sequence
  ENSG00000112320_18 (sequence is synthesized)
ggttctccagcaacggggagaacttcattccgaacgcccctggcgactccgcggcggcgggcggcaagccaagcggacactccctgtccccccgggactccaagcagggctcgtccaagt

SEQ ID NO: 190249 - DNA, 120 bp, Artificial Sequence
  ENSG00000112320_19 (sequence is synthesized)
caagcagggctcgtccaagtccgcggactcgccccccggctgctcgggccaggccctgagcctggcgcccacgcccgccgagcatggccggagcgaggtggtggacctgacgcggcgcgc

SEQ ID NO: 190250 - DNA, 120 bp, Artificial Sequence
  ENSG00000112320_20 (sequence is synthesized)
cgggcgcgggcggccagctcggcttcccaggcgtgctgcagggcccgcaggacggcgtcatcgacctgaccgtgggccaccgagcccggctgcacaacgtgatccaccgcgcgctgcacg

SEQ ID NO: 190251 - DNA, 120 bp, Artificial Sequence
  ENSG00000112320_21 (sequence is synthesized)
gctgcacaacgtgatccaccgcgcgctgcacgcgcacgtcaaggcggagcgcgagccgagcgccgcggagcgcaggacctgcggcggctgcagggacggccactgcagcccgcccgccgc

SEQ ID NO: 190252 - DNA, 120 bp, Artificial Sequence
  ENSG00000112320_22 (sequence is synthesized)
ctgcaacgtcatcgtgaacggcacgcgcggcgccgccgccgagggcgctaagagcgcggagccgcctcccgagcagccgccgccgccgccgccgcccgcgccccccaagaagctgctgtc

SEQ ID NO: 190253 - DNA, 120 bp, Artificial Sequence
  ENSG00000112320_23 (sequence is synthesized)
ccaagaagctgctgtcgcctgaggaaccggcggtgagcgagctagagtcggtcaaggagaataactgtgcttccaactgccacctggacggggaggcggccaaaaagctgatgggcgagg

SEQ ID NO: 190254 - DNA, 120 bp, Artificial Sequence
  ENSG00000112320_24 (sequence is synthesized)
aggccctggcggggggcgacaagtcagacccgaaccttaataaccccgcggacgaggaccatgcctatgctctgcggatgctgcccaagaccggctgcgtgatccagcctgtgccaaaac

SEQ ID NO: 190255 - DNA, 120 bp, Artificial Sequence
  ENSG00000112320_25 (sequence is synthesized)
gaaatcagaataagtaaaaggaacgttcactcacagggtacgctcatggagagagggcgcagagcaaaccatgtcacgccatccaatgacaccagctggtcagctcaccaccccctctgg

SEQ ID NO: 190256 - DNA, 120 bp, Artificial Sequence
  ENSG00000112320_26 (sequence is synthesized)
ctaaaactcaagcaaataaagccgcttcctgtcattaagcatctcagaggaagcagccctccctcgatggcctctagcccagagaagcccgcgcatcttggacccaccaagcaggcccag

SEQ ID NO: 190257 - DNA, 120 bp, Artificial Sequence
  ENSG00000112320_27 (sequence is synthesized)
ccttcctgctgccaccatctctgcttctccccagaggaacttagggatttcacccctggcttttaaaaaaaacgaaataccgacaagccacaaggaccaatgtaggtattctccccgccc

SEQ ID NO: 190258 - DNA, 120 bp, Artificial Sequence
  ENSG00000112320_28 (sequence is synthesized)
catcttcaaggctcagcgactgaggctggaagatgatatggattggaacacaaaaaatctttttttaatctttttaaaaactgctgtggttttgctgctacactaagaattgtgatttgc

SEQ ID NO: 190259 - DNA, 120 bp, Artificial Sequence
  ENSG00000112320_29 (sequence is synthesized)
attgtacggttttggacctatattgttcacgttttgatggcggagaggggtggtcctggaggcccaatgcttcagagtcatctctgtcctgcccgggatgcacttttaaatgaagagtta

SEQ ID NO: 190260 - DNA, 120 bp, Artificial Sequence
  ENSG00000112320_30 (sequence is synthesized)
gaatattttattggctaatatacttttcttgttatttttacaaaggccacctttatcctttttgatgccatattttcagtgttacacttttatggcttttaattttcgatttgacagatg

SEQ ID NO: 190261 - DNA, 120 bp, Artificial Sequence
  ENSG00000112320_31 (sequence is synthesized)
taagaagcagcatgaatagtttatactgtggtttttcagagactgaatgccaagagaactcggtaaatgtttattcttctcagctttctctttaaattcccctaaatagcgccccatttg

SEQ ID NO: 190262 - DNA, 120 bp, Artificial Sequence
  ENSG00000112320_32 (sequence is synthesized)
ggaacagagcaagagtgttgaactgaagaccaaaatgccctcaaggtgtaaaataatccgagggggaatatttgctgggcgtcaggaaagactcagatgaaatttcaaccctgatggttt

SEQ ID NO: 190263 - DNA, 120 bp, Artificial Sequence
  ENSG00000112320_33 (sequence is synthesized)
tcggtgatccaggaagtcagtgagacaatctctctatatgcagagccctttcatgataattagaatggtatggacaaaccaatgaaaacaagagggaaagtgagaaagatcacccatgat

SEQ ID NO: 190264 - DNA, 120 bp, Artificial Sequence
  ENSG00000112320_34 (sequence is synthesized)
tctgtttcactgtttgctttctcctgtcatggttaagagaaatgtgcaattcgatcctcaatcagtgggtggaggataacagggtagattcacttgtgtgcacttgtacagttgtagctg

SEQ ID NO: 190265 - DNA, 120 bp, Artificial Sequence
  ENSG00000112320_35 (sequence is synthesized)
tgtagctgcgagtccagaagtcctctagagcatgtgtactggcactgagttggtgagacagttgtggagtatcccattctgatgagtacagaaaaaaaaagaaaaagaaaagaagagaaa

SEQ ID NO: 190266 - DNA, 120 bp, Artificial Sequence
  ENSG00000112320_36 (sequence is synthesized)
aaaggaagaaaactaaaaaaaaaaaaaatcaaatcaccttgtgattcagtgtatctgtttactaactcaaataaagcaattgttccctctggaggggtccaggtgcccccgccccacaag

SEQ ID NO: 190267 - DNA, 120 bp, Artificial Sequence
  ENSG00000112320_37 (sequence is synthesized)
ccgccccacaaggccgcggagcctcagcaggaggggtggcgagttgcgggtgggcagggccaggacggtgtggcgccagccttgaagcaccacggcccaaggatgcggtgtacatactgt

SEQ ID NO: 190268 - DNA, 120 bp, Artificial Sequence
  ENSG00000112320_38 (sequence is synthesized)
atttctagattctcctttgtacagagtcacttcacaagtcaagctactgttttacaggtgctccttatttattagagctgtgagagcttgggggacacacctggcgagcaagctcgcttt

SEQ ID NO: 190269 - DNA, 120 bp, Artificial Sequence
  ENSG00000112320_39 (sequence is synthesized)
ttaaaaatgaaatttgggggcaggggaaggggaggcgggagggaggggaagctcgcaagcccggggagagatttataaaagtaaacaaaagaaaaccttccagcaacaaattaaaaaata

SEQ ID NO: 190270 - DNA, 120 bp, Artificial Sequence
  ENSG00000112320_40 (sequence is synthesized)
ataacaaatcaaccccagcaccaaacccacccaggcaggaagaagccgcccctcctctggggccatatttttctgctgggtcacaacattctcctctccctgactggtgtcagattcatc

SEQ ID NO: 190271 - DNA, 120 bp, Artificial Sequence
  ENSG00000112320_41 (sequence is synthesized)
tgactggtgtcagattcatcaaacaaaaaataaatctcgaagaaaaaaaatgcacttacatgtgcttatttggcttttctcattattatgactactgtttttttttgttttttgtttttt

SEQ ID NO: 190272 - DNA, 120 bp, Artificial Sequence
  ENSG00000112320_42 (sequence is synthesized)
atttttctccccctgggaaacattttaaaaaatagaactaaggagttttaaaagatggtaagctactgggatggcactgtctcttcctgacctgctagaccacgcttgtctgcagacaag

SEQ ID NO: 190273 - DNA, 120 bp, Artificial Sequence
  ENSG00000112320_43 (sequence is synthesized)
agcccactccgtccgttccagggcctgcttcctaaccatgcccatcactgacagcacacagtgcatgggaagtgagtgtttaggctgtagacccaggtgtggtgtcccttccaagtgctc

SEQ ID NO: 190274 - DNA, 120 bp, Artificial Sequence
  ENSG00000112320_44 (sequence is synthesized)
ttcaagtcctgatcttttttggctccaagggttcaggcctgaggttcaagaagcaccatcaaatggaggcaaacatgctccacgggttccactcacatccacacaccatctcaccccact

SEQ ID NO: 190275 - DNA, 120 bp, Artificial Sequence
  ENSG00000112320_45 (sequence is synthesized)
gactagagagacttttatttcagccttatgtgaatggggtgggtccgtttggctctttgatacctgagttaaatatcagaaagttcctaaggtggaaagtatgctaatatctagttctag

SEQ ID NO: 190276 - DNA, 120 bp, Artificial Sequence
  ENSG00000112320_46 (sequence is synthesized)
tcattgtaaatctagttcagttctcttgttctacatatgaaaaaacagaagcctagaaaagcaactcgacctgttcagagtctcgcacttagttgatttagcttctcaaaaaaatgaatg

SEQ ID NO: 190277 - DNA, 120 bp, Artificial Sequence
  ENSG00000112320_47 (sequence is synthesized)
ttcattaaaatctgaggcaccacgagcagctcccttgaagtgatcatcctgtggattccggagacctgattttcttctcccatggagcccgagagaatcttggaggcttcctggtgcaga

SEQ ID NO: 190278 - DNA, 120 bp, Artificial Sequence
  ENSG00000112320_48 (sequence is synthesized)
gttatatttatggcggtgactccgtctgaactctgccgaggcaagcccagccaaggacgtgccagcggccgaggcacccggctgtggttgtcctgatagcattattcatctggtcttggc

SEQ ID NO: 190279 - DNA, 120 bp, Artificial Sequence
  ENSG00000112320_49 (sequence is synthesized)
catggagacagtcatccaggatattgattttgcttttgtctgtagtccaagattgtcaagcaaacattttgacccttctggaaacaaaaggtacctttgttccagcatagaaagattctg

SEQ ID NO: 190280 - DNA, 120 bp, Artificial Sequence
  ENSG00000112320_50 (sequence is synthesized)
tggcatctcataagccatcagcaccccttttcctcctcttccttctcacgatcttactgctgtctgaatgcacaattctcttgggatatcaaaaccatatataaagagaaatagaaacaa

SEQ ID NO: 190281 - DNA, 120 bp, Artificial Sequence
  ENSG00000112320_51 (sequence is synthesized)
ctgtttttctgcctgtattctcccatgttatattgccattcattgtatctagagtgtaaaatttaaacattttagacttagaatgttgatccacaagattaatcctgacatgcttctgag

SEQ ID NO: 190282 - DNA, 120 bp, Artificial Sequence
  ENSG00000112320_52 (sequence is synthesized)
actgatgtgaaaaaaattacaaagttaaatttctacaaaatttatgattataagatgtaggctgtattgatttttagtcttttcatttgatcttccttgcaaacttggttctgagtactt

SEQ ID NO: 190283 - DNA, 120 bp, Artificial Sequence
  ENSG00000112320_53 (sequence is synthesized)
actgatacacttagattgtccaagaaatcaacttcagatgagagaacataaaatactttggaaatgagtttgtgtttctactattttcataaagatctagttcttttttttccccccccg

SEQ ID NO: 190284 - DNA, 120 bp, Artificial Sequence
  ENSG00000112320_54 (sequence is synthesized)
acacagatactgagtggcagagctgatatttgaacctatacattatgtctccttagcctatatccttaaccactggattatccaaaacactatggcagtatttcagtcagttaagtattt

SEQ ID NO: 190285 - DNA, 120 bp, Artificial Sequence
  ENSG00000112320_55 (sequence is synthesized)
actgaatgttccttacattgtgctagacaatacagatgtatgtcatcatccttgactaccaagaacttaatagtactgttggcatatgatcaaaacatcattctagttttaccttggaat

SEQ ID NO: 190286 - DNA, 120 bp, Artificial Sequence
  ENSG00000112320_56 (sequence is synthesized)
tacagttgaggggaaatggcacctgaaacttaatataggctagaagatagcaattgaaaactcaaattcaaagtgataaaaaaagatccaaaatgaaacctgaaaatgttagatactatg

SEQ ID NO: 190287 - DNA, 120 bp, Artificial Sequence
  ENSG00000112320_57 (sequence is synthesized)
atatgggtcctgctttattgttctctttacaattaagggttcttaaaaatgtgtaaggcacattttagtgtgttctatcatttttaatgccagatgaaatgtataatttgaatggtagca

SEQ ID NO: 190288 - DNA, 120 bp, Artificial Sequence
  ENSG00000112320_58 (sequence is synthesized)
tgaggtggtgaagactgccagagcaagaaccaggagacctgggttgctaatgccagctctgccatttattggccatgtaatcttgaataaggtagtttctctaagccttagtttccttgt

SEQ ID NO: 190289 - DNA, 120 bp, Artificial Sequence
  ENSG00000112320_59 (sequence is synthesized)
ctgcaaaatgatgtggttagcttacatgatctgttatttccctatatttataaaatccttattttgtgacttgtatggttagttgctctcctgattttatgatttgagagggtatgtttt

SEQ ID NO: 190290 - DNA, 120 bp, Artificial Sequence
  ENSG00000112320_60 (sequence is synthesized)
aatgtgctttaacaggtacttgttaattgaacagatataaagcaaactgcatatatgtatagttataacagccagaagtctgatgaaagatttatactgcttgggacaagttttaatgat

SEQ ID NO: 190291 - DNA, 120 bp, Artificial Sequence
  ENSG00000112320_61 (sequence is synthesized)
tgttaatttttactttgaacaaatagtgaatgaaataatagatttgacattttttaagataacaagtgctaggaaatatgaaatgtgagtaaataaaaaggttcatatgttattagaact

SEQ ID NO: 190292 - DNA, 120 bp, Artificial Sequence
  ENSG00000112320_62 (sequence is synthesized)
ccgaattagaaatcagaataagtaaaaggtaatgggaggcttcgatagggaagagggtggcattgctaaagtgagtgacactgcacatctctgacctcatagacagactcctgcctaatg

SEQ ID NO: 190293 - DNA, 120 bp, Artificial Sequence
  ENSG00000112333_0 (sequence is synthesized)
ggagatattacaggggacccagcccgcagcgacaggcacaaagtcacggggtaatgaacttcggggacccttcgccgctgcgtgcgcggctctccccggaaacccggacctggccgcctc

SEQ ID NO: 190294 - DNA, 120 bp, Artificial Sequence
  ENSG00000112333_1 (sequence is synthesized)
ttccctcggaagatttcccagcaatctagttttcccactctgcgcttgggttccggcagcgcggagcccgtctgcctctgagactgcggtagtgttttccttctttccttgggagaccag

SEQ ID NO: 190295 - DNA, 120 bp, Artificial Sequence
  ENSG00000112333_2 (sequence is synthesized)
cggtcggcagagattgcccacactctgcatgcctatgtagagggagagatcgaagactgagtgacaggaatggggaaaaagagggatttcgctccgtaggaaggccattttcgtgtctcc

SEQ ID NO: 190296 - DNA, 120 bp, Artificial Sequence
  ENSG00000112333_3 (sequence is synthesized)
atctctgtctttcaacatccctctcttgctgttcttccttcttcctcagtcttcctgtccatctctccatctgtctgtccatgtgtgtgtccatatcaagcagcattcccagcagctgcg

SEQ ID NO: 190297 - DNA, 120 bp, Artificial Sequence
  ENSG00000112333_4 (sequence is synthesized)
gttttgcaagagccgggaagaaacttaaggatgcttaaatttccactgttggacgaattctgagcgcccagggagcagcgcagcgcgcgactgacacccacctgtcccgcccaggagcct

SEQ ID NO: 190298 - DNA, 120 bp, Artificial Sequence
  ENSG00000112333_5 (sequence is synthesized)
gagagcggcggcgcccggcggcgaggcgggcgctgccggccgggactcgggcagcgcccaccaaccgctccgccccgggacagccagcatgagcaagccagccggatcaacaagccgcat

SEQ ID NO: 190299 - DNA, 120 bp, Artificial Sequence
  ENSG00000112333_6 (sequence is synthesized)
gccggatcaacaagccgcattttagatatcccctgcaaagtgtgtggcgaccgcagctcggggaagcactacggggtctacgcctgcgacggctgctcaggttttttcaaacggagcatc

SEQ ID NO: 190300 - DNA, 120 bp, Artificial Sequence
  ENSG00000112333_7 (sequence is synthesized)
cgaaggaataggacctatgtctgcaaatctggaaaccagggaggctgtccggtggacaagacgcacagaaaccagtgcagggcgtgtcggctgaagaagtgtttggaagtcaacatgaac

SEQ ID NO: 190301 - DNA, 120 bp, Artificial Sequence
  ENSG00000112333_8 (sequence is synthesized)
aaagacgccgtgcagcacgagcgggggcctcggacgtccaccatccgcaagcaagtggccctctacttccgtggacacaaggaggagaacggggccgccgcgcactttccctcggcggcg

SEQ ID NO: 190302 - DNA, 120 bp, Artificial Sequence
  ENSG00000112333_9 (sequence is synthesized)
ctccctgcgccggccttcttcaccgcggtcacgcagctggagccgcacggcctggagctggccgcggtgtccaccactccagagcggcagaccctcgtgagcctggctcagcccacgccc

SEQ ID NO: 190303 - DNA, 120 bp, Artificial Sequence
  ENSG00000112333_10 (sequence is synthesized)
aagtacccccatgaagtgaatgggaccccaatgtatctctatgaagtggccacggagtcggtgtgtgaatcagctgccagacttctcttcatgagcatcaagtgggctaagagtgtgcca

SEQ ID NO: 190304 - DNA, 120 bp, Artificial Sequence
  ENSG00000112333_11 (sequence is synthesized)
gccttctccacgctgtctttgcaagaccagctgatgcttttggaagatgcttggagagaactgtttgttctaggaatagcacaatgggccattccggttgatgctaacactctactggct

SEQ ID NO: 190305 - DNA, 120 bp, Artificial Sequence
  ENSG00000112333_12 (sequence is synthesized)
gtatctggcatgaacggtgacaacacagattcccagaagctgaacaagatcatatctgaaatacaggctttacaagaggtggtggctcgatttagacaactccggttagatgctactgaa

SEQ ID NO: 190306 - DNA, 120 bp, Artificial Sequence
  ENSG00000112333_13 (sequence is synthesized)
agcccttcaagatgaggctcagctaacgctcaacagctacatccataccagatatcccactcaaccctgtcgctttggaaaactcctgttgcttttgccagctttacgttctattagccc

SEQ ID NO: 190307 - DNA, 120 bp, Artificial Sequence
  ENSG00000112333_14 (sequence is synthesized)
atcaactatagaagaagtgtttttcaaaaaaaccatcggcaatgtgccaattacaagactgctttcagatatgtacaaatccagtgatatctaagctcacaagatacccacttttcagga

SEQ ID NO: 190308 - DNA, 120 bp, Artificial Sequence
  ENSG00000112333_15 (sequence is synthesized)
tgggacagtatcagatgaacttcaacccatggagaacaagcctcaactaacaaacccttcaggaagcatataccggggaatgtgtagccttcaggaaaaaaatgccaattgacacaaagc

SEQ ID NO: 190309 - DNA, 120 bp, Artificial Sequence
  ENSG00000112333_16 (sequence is synthesized)
attccagtagctatgacctgccgccctgaccaggatagggcgggtgggaaggagaggggtgcaacaggaccgcctgcactgaaaactcactgctgccatgccctgggagggggcaaactg

SEQ ID NO: 190310 - DNA, 120 bp, Artificial Sequence
  ENSG00000112333_17 (sequence is synthesized)
ggggttgccacaggccgtgccattctgcctcttacctggaagatcaggctgaacgatcaaaagctgaaacataagtagtgctttctcttcctttttagcatacaaagtttggtaaccaaa

SEQ ID NO: 190311 - DNA, 120 bp, Artificial Sequence
  ENSG00000112333_18 (sequence is synthesized)
tatagctctgtgtataacatcgtactgcggccttcaaaactacgttatgttggagcatttattttaaaaataatggtaggttttaaattaaaagtgttatcaaaagtttcccctctattg

SEQ ID NO: 190312 - DNA, 120 bp, Artificial Sequence
  ENSG00000112333_19 (sequence is synthesized)
taatacattattaagtggccttcagaactgagttaataagtgaaaagtagcttatgccatgtgatttgctttttctctatcttcttttttcttttctttctctttcttttgttctttctt

SEQ ID NO: 190313 - DNA, 120 bp, Artificial Sequence
  ENSG00000112333_20 (sequence is synthesized)
cttcttttttaataccataggccaggcaaccttgtcaaaggaattgatggacaaaatgagattctcaccaggacttcaggttggataacatgtcaaaaagagaagagctttactaaaaga

SEQ ID NO: 190314 - DNA, 120 bp, Artificial Sequence
  ENSG00000112333_21 (sequence is synthesized)
acataagtcaagggaggatgaataaaaacagcaaaaccaaataaagtggagatgagtgattgagtgaggtagattgctgtcccgttaacatagtgctgaaaccaaaggcagtgggggtcc

SEQ ID NO: 190315 - DNA, 120 bp, Artificial Sequence
  ENSG00000112333_22 (sequence is synthesized)
aaactcgtggtgcagcaagtcacaccagacaggaaacgaatatggacgtaattgcagaaggaacttcaaggagatgaatgaatgctaaaagggttcttgactgatccattgctaacagcc

SEQ ID NO: 190316 - DNA, 87 bp, Artificial Sequence
  ENSG00000112333_23 (sequence is synthesized)
aatgctaaaagggttcttgactgatccattgctaacagcctgagactcttcaatgcctttccgaaaactggtttctagtaaagcctt

SEQ ID NO: 190317 - DNA, 120 bp, Artificial Sequence
  ENSG00000112333_24 (sequence is synthesized)
tgctcctttggtatgactctatacttatggaaatgtagaaacaaacatttttaaatagctgctgtacttttcacattttgatttattaggtactagcactgaggaaaaaaaattcagcac

SEQ ID NO: 190318 - DNA, 120 bp, Artificial Sequence
  ENSG00000112333_25 (sequence is synthesized)
ttggactatcataggatgagtaaaacttttcttgtacaaagtgaattaactgatttgtgaagttaaaaggttgtactcattgtatttacaaagaataaaaatatattgaatttaaatgaa

SEQ ID NO: 190319 - DNA, 120 bp, Artificial Sequence
  ENSG00000112333_26 (sequence is synthesized)
aggactgggtcgagcagacagagctgcagcccccgccttgcccggcttctcgcggctggagagcagagcgatgtcacccggagccccgcctgggtggtaacgagaccctggccagtcacc

SEQ ID NO: 190320 - DNA, 120 bp, Artificial Sequence
  ENSG00000112333_27 (sequence is synthesized)
agaaatgtttcgagctggggcagagggagcagagaaggagccctcaccgcggccggaatgcagagcggaccctggcccaggactgggtttccctttaggctcgggcctaccctggccctc

SEQ ID NO: 190321 - DNA, 120 bp, Artificial Sequence
  ENSG00000112333_28 (sequence is synthesized)
ggcgtgcgcgacgctccctctcttttggatgggggcgaggatacctggctactccagcccagagggtctctggtttccctgcgaacccccttccctggtggggaggagccctggaccgaa

SEQ ID NO: 190322 - DNA, 120 bp, Artificial Sequence
  ENSG00000112335_0 (sequence is synthesized)
cgggcagcagcggcggcggcggcggctgaacgcggagggggcggagggagcccgcggcggcggcagcagctacagcgaaatggcggagaccgtggctgacacccggcggctgatcaccaa

SEQ ID NO: 190323 - DNA, 120 bp, Artificial Sequence
  ENSG00000112335_1 (sequence is synthesized)
tggcggagaccgtggctgacacccggcggctgatcaccaagccgcagaacctgaatgacgcctacggaccccccagcaacttcctcgagatcgatgtgagcaacccgcaaacggtggggg

SEQ ID NO: 190324 - DNA, 120 bp, Artificial Sequence
  ENSG00000112335_2 (sequence is synthesized)
tcggccggggccgcttcaccacttacgaaatcagggtcaagacaaatcttcctattttcaagctgaaagaatctactgttagaagaagatacagtgactttgaatggctgcgaagtgaat

SEQ ID NO: 190325 - DNA, 120 bp, Artificial Sequence
  ENSG00000112335_3 (sequence is synthesized)
tagaaagagagagcaaggtcgtagttcccccgctccctgggaaagcgtttttgcgtcagcttccttttagaggagatgatggaatatttgatgacaattttattgaggaaagaaaacaag

SEQ ID NO: 190326 - DNA, 120 bp, Artificial Sequence
  ENSG00000112335_4 (sequence is synthesized)
ggctggagcagtttataaacaaggtcgctggtcatcctctggcacagaacgaacgttgtcttcacatgtttttacaagatgaaataatagataaaagctatactccatctaaaataagac

SEQ ID NO: 190327 - DNA, 120 bp, Artificial Sequence
  ENSG00000112335_5 (sequence is synthesized)
atgcctgaaatttggcaagaaggggcaaaaacgtgactattaatgattgataagcaccagtgaagaagttctaacttttagcatgctgcacagaaactggtataacatgccttcagtata

SEQ ID NO: 190328 - DNA, 120 bp, Artificial Sequence
  ENSG00000112335_6 (sequence is synthesized)
atagctctttcttgctgttttaatgtggtgcacactatagcctcacaaacctgttattccagtgtaatctgcagtgtcgtaactaaagttactggcttggtcttatttgcacagtttttg

SEQ ID NO: 190329 - DNA, 120 bp, Artificial Sequence
  ENSG00000112335_7 (sequence is synthesized)
cgtcttgtttgcttcttgcatctgattaactagaatatttctctttcccccttttaatttgtgatgtcacttgaccccatttatgtgtaggagcactacaccattggtttccaatactgc

SEQ ID NO: 190330 - DNA, 120 bp, Artificial Sequence
  ENSG00000112335_8 (sequence is synthesized)
acacataagatacatacttgtgtgcagaaagtatcttcctccaggcttgtaatacccttcacatggaagattaatgagggaaatctttatattctgtataaaaacaaaagcaaatttata

SEQ ID NO: 190331 - DNA, 120 bp, Artificial Sequence
  ENSG00000112335_9 (sequence is synthesized)
tactaaaatcatttgtctaaaaatttaagttgttttcaaataaaaattaaaatgcatttctgatatgcactgattgtgttgcctccagctttttttgctctctatgagtgactacttaag

SEQ ID NO: 190332 - DNA, 120 bp, Artificial Sequence
  ENSG00000112335_10 (sequence is synthesized)
tcacttgttgagagggattatttactaattatatacttctcattcctgtaactccattccctttaaacagtggtgatatcaaatatacttccatccattgaatggggtatttttaacaac

SEQ ID NO: 190333 - DNA, 120 bp, Artificial Sequence
  ENSG00000112335_11 (sequence is synthesized)
aacaaaagtgatatactaaaaaatgtattgcttaaggcttattgaatcattttgaagcactttgtgtatttgaaaactgctttataatctcatttattaaaaggactttcaaagataaaa

SEQ ID NO: 190334 - DNA, 120 bp, Artificial Sequence
  ENSG00000112335_12 (sequence is synthesized)
ctgtttgcgaccccgagtcccatgacaccgcttctcctcacaccccagtccgcagtgcccctccccagcctcggccgggcctcccgggagccgggcgtggcgttccagctagtgagccgt

SEQ ID NO: 190335 - DNA, 120 bp, Artificial Sequence
  ENSG00000112337_0 (sequence is synthesized)
aaaaccaagccgaggctttctgagaaagtggggccaaacctgttgccgtctgactgccacgtggctcactatttatccctgtaaaaatctgcaaaagtatttgaaagggaagaagggaca

SEQ ID NO: 190336 - DNA, 120 bp, Artificial Sequence
  ENSG00000112337_1 (sequence is synthesized)
gaaaactccctccttttccaagttagccttatagtctagggcttaaaatactggtttaatggtgaaggtaagtgcttttcttctttttgggtagaaggattattactaacttaccaaagg

SEQ ID NO: 190337 - DNA, 120 bp, Artificial Sequence
  ENSG00000112337_2 (sequence is synthesized)
tccattaaggggagggaacagttttaggagaagtcagagaaaagacattaacagcaacataaggatctccatctggtaatattgcctaattccaaaatgaagagactctctgaaaaagat

SEQ ID NO: 190338 - DNA, 120 bp, Artificial Sequence
  ENSG00000112337_3 (sequence is synthesized)
aactgattcaatgaagaccctagggcaaggcttgagaagccactggtaccaatggacactgtggacaatggtcatttctccaaggacgctataaaagactgtcgtagtaaaagagattca

SEQ ID NO: 190339 - DNA, 120 bp, Artificial Sequence
  ENSG00000112337_4 (sequence is synthesized)
gggcacagggaaactccaccacaaagcgtggtaccatttcccacagaagctaaatggacgggaagcctgccaccaggaaaggtccagatttctgttcattacgctatgggctggctctta

SEQ ID NO: 190340 - DNA, 120 bp, Artificial Sequence
  ENSG00000112337_5 (sequence is synthesized)
tcatgcacttctcaaacttcaccatgataacgcagcgtgtgagtctgagcattgcgatcatcgccatggtgaacaccactcagcagcaaggtctatctaatgcctccactgaggggcctg

SEQ ID NO: 190341 - DNA, 120 bp, Artificial Sequence
  ENSG00000112337_6 (sequence is synthesized)
ttgcagatgccttcaataactccagcatatccatcaaggaatttgatacaaaggcctctgtgtatcaatggagcccagaaactcagggtatcatctttagctccatcaactatgggataa

SEQ ID NO: 190342 - DNA, 120 bp, Artificial Sequence
  ENSG00000112337_7 (sequence is synthesized)
tactgactctgatcccaagtggatatttagcagggatatttggagcaaaaaaaatgcttggtgctggtttgctgatctcttcccttctcaccctctttacaccactggctgctgacttcg

SEQ ID NO: 190343 - DNA, 120 bp, Artificial Sequence
  ENSG00000112337_8 (sequence is synthesized)
gagtgattttggtcatcatggttcggacagtccagggcatggcccagggaatggcatggacaggtcagtttactatttgggcaaagtgggctcctccacttgaacgaagcaagctcacca

SEQ ID NO: 190344 - DNA, 120 bp, Artificial Sequence
  ENSG00000112337_9 (sequence is synthesized)
ccattgcaggatcagggtcagcatttggatccttcatcatcctctgtgtggggggactaatctcacaggccttgagctggccttttatcttctacatctttggtagcactggctgtgtct

SEQ ID NO: 190345 - DNA, 120 bp, Artificial Sequence
  ENSG00000112337_10 (sequence is synthesized)
tctcctatggttcacagtgatttatgatgaccccatgcatcacccgtgcataagtgttagggaaaaggagcacatcctgtcctcactggctcaacagcccagttctcctggacgagctgt

SEQ ID NO: 190346 - DNA, 120 bp, Artificial Sequence
  ENSG00000112337_11 (sequence is synthesized)
ccccataaaggcgatggtcacatgcctaccactttgggccattttcctgggttttttcagccatttctggttgtgcaccatcatcctaacatacctaccaacgtatatcagtactctgct

SEQ ID NO: 190347 - DNA, 120 bp, Artificial Sequence
  ENSG00000112337_12 (sequence is synthesized)
ccatgttaacatcagagatagtggagttctgtcctccctgccttttattgctgctgcaagctgtacaattttaggaggtcagctggcagatttccttttgtccaggaatcttctcagatt

SEQ ID NO: 190348 - DNA, 120 bp, Artificial Sequence
  ENSG00000112337_13 (sequence is synthesized)
gatcactgtgcgaaagctcttttcatctcttgggctcctccttccatcaatatgtgctgtggccctgccctttgtggcctccagttacgtgataaccattattttgctgatacttattcc

SEQ ID NO: 190349 - DNA, 120 bp, Artificial Sequence
  ENSG00000112337_14 (sequence is synthesized)
tgggaccagtaacctatgtgactcagggtttatcatcaacaccttagatatcgcccccagatatgcaagtttcctcatgggaatctcaaggggatttgggctcatcgcaggaatcatctc

SEQ ID NO: 190350 - DNA, 120 bp, Artificial Sequence
  ENSG00000112337_15 (sequence is synthesized)
ttccactgccactggattcctcatcagtcaggattttgagtctggttggaggaatgtctttttcctgtctgctgcagtcaacatgtttggcctggtcttttacctcacgtttggacaagc

SEQ ID NO: 190351 - DNA, 120 bp, Artificial Sequence
  ENSG00000112337_16 (sequence is synthesized)
agaacttcaagactgggccaaagagaggacccttacccgcctctgaggacataaagttacaaacttaaatgtggtactgagcatgaactttttaaacattttttacttctctccatattc

SEQ ID NO: 190352 - DNA, 120 bp, Artificial Sequence
  ENSG00000112337_17 (sequence is synthesized)
ctgaccatagactcagcagttcttaactctggctgtgtgttagtcttccctggggagcctttataagacactgatacttgggacccactccagagattctgaatgaattggtctggggtg

SEQ ID NO: 190353 - DNA, 120 bp, Artificial Sequence
  ENSG00000112337_18 (sequence is synthesized)
gaacccagatactactaatttttagatactccttagaggtttctagcatgcgcccggggttgacaacagctggacaaacttgaaaagtcaattcatgtggcctttgaattttcctcattg

SEQ ID NO: 190354 - DNA, 120 bp, Artificial Sequence
  ENSG00000112337_19 (sequence is synthesized)
gaaagtactaaataaataaaaattcatgtgaaaatgatcactgataaatatcttcatggtggggcaggttattggatgcagagaagatctgctcggaattgtagccatatgttacagatc

SEQ ID NO: 190355 - DNA, 120 bp, Artificial Sequence
  ENSG00000112337_20 (sequence is synthesized)
tcagcaccgatcggaactgtaaagctataatccccagaattaaagtttttattattttttatacattgtaaaacatagacgtttatttatgtgattaaattctattaaaatttacatgct

SEQ ID NO: 190356 - DNA, 120 bp, Artificial Sequence
  ENSG00000112339_0 (sequence is synthesized)
ggcgcagaggcctgcgggaagccaagatggcgcataggggttctccaggctgcagttggcgccttatcagtatctaagcggagtgttttggaaggagttaaggggctgtggcaaacgccc

SEQ ID NO: 190357 - DNA, 120 bp, Artificial Sequence
  ENSG00000112339_1 (sequence is synthesized)
tctccgccgtcatggcccggcatcggaatgttcgaggctataactacgatgaagattttgaagatgatgatctctacggccagtctgtagaggatgattattgtatttcgccgtcaacag

SEQ ID NO: 190358 - DNA, 120 bp, Artificial Sequence
  ENSG00000112339_2 (sequence is synthesized)
ctgctcagtttatttattcacggcgtgacaaaccttccgttgagcctgtggaagaatatgattatgaagatctgaaagaatcttccaattctgtttcaaaccatcagctcagtggatttg

SEQ ID NO: 190359 - DNA, 120 bp, Artificial Sequence
  ENSG00000112339_3 (sequence is synthesized)
atcaagctcgtctttattcatgccttgatcacatgagagaggtacttggagatgctgtgccagatgaaatattaattgaagcagttctgaagaacaagtttgatgtgcagaaggctttgt

SEQ ID NO: 190360 - DNA, 120 bp, Artificial Sequence
  ENSG00000112339_4 (sequence is synthesized)
caggggttctggaacaagatagagtgcagagtttgaaggacaagaatgaggcaacagtatctacaggaaagatagcaaaaggaaaaccagtagattcccagacatcgcgaagtgaatctg

SEQ ID NO: 190361 - DNA, 120 bp, Artificial Sequence
  ENSG00000112339_5 (sequence is synthesized)
aaattgtgccaaaagttgctaaaatgactgtatctggaaagaagcaaactatgggatttgaagtgcctggagtatcttctgaagaaaatggtcatagtttccacacacctcaaaaaggac

SEQ ID NO: 190362 - DNA, 120 bp, Artificial Sequence
  ENSG00000112339_6 (sequence is synthesized)
cgcccattgaagatgccattgcttcttccgatgttcttgagactgcttctaaatctgctaatccaccccacacgattcaagcatcagaagagcagagttcaaccccagcaccggtgaaaa

SEQ ID NO: 190363 - DNA, 120 bp, Artificial Sequence
  ENSG00000112339_7 (sequence is synthesized)
agtctggcaagctgaggcagcaaatagatgtgaaggcggaactggagaagcggcaaggagggaagcagctactcaacttagtggtcattggtcatgttgatgctgggaaaagtactctga

SEQ ID NO: 190364 - DNA, 120 bp, Artificial Sequence
  ENSG00000112339_8 (sequence is synthesized)
tgggccatatgctttatcttctgggtaatataaacaaaagaactatgcataagtatgaacaggagtctaaaaaggctggcaaagcttcgtttgcatatgcatgggtcttggatgaaactg

SEQ ID NO: 190365 - DNA, 120 bp, Artificial Sequence
  ENSG00000112339_9 (sequence is synthesized)
gcgaagaaagggaaaggggagtaaccatggatgttggtatgacaaagtttgaaaccacaaccaaagttattacattaatggatgctccaggccataaggacttcattccaaatatgatta

SEQ ID NO: 190366 - DNA, 120 bp, Artificial Sequence
  ENSG00000112339_10 (sequence is synthesized)
caggagcagcccaggcggatgtagctgttttagttgtagatgccagcaggggagagtttgaagctggatttgagactggaggacaaacacgagagcatggactcttggtccgttctctgg

SEQ ID NO: 190367 - DNA, 120 bp, Artificial Sequence
  ENSG00000112339_11 (sequence is synthesized)
gagtgacgcagcttgcagttgcagttaataaaatggatcaggttaattggcaacaagaaaggtttcaagagattactggaaaacttgggcactttcttaagcaagcaggttttaaggaga

SEQ ID NO: 190368 - DNA, 120 bp, Artificial Sequence
  ENSG00000112339_12 (sequence is synthesized)
gtgatgtaggttttattcctacaagtggtctcagtggtgaaaatctaatcacaagatctcagtcaagtgaactcacaaaatggtataaaggactatgtttattagaacaaattgattcct

SEQ ID NO: 190369 - DNA, 120 bp, Artificial Sequence
  ENSG00000112339_13 (sequence is synthesized)
ttaagcctccccagcgatctattgacaaaccttttagattatgtgtgtccgatgttttcaaagatcaaggatctggattttgcataactggtaaaatagaagctggttatatccaaactg

SEQ ID NO: 190370 - DNA, 120 bp, Artificial Sequence
  ENSG00000112339_14 (sequence is synthesized)
gtgaccgactactggcaatgcctcctaatgaaacttgtaccgtgaaaggaatcactctgcatgatgaacctgtcgactgggcggcagcaggcgatcatgttagtcttactttggttggga

SEQ ID NO: 190371 - DNA, 120 bp, Artificial Sequence
  ENSG00000112339_15 (sequence is synthesized)
tggatatcatcaaaatcaatgttggctgcatattttgtggccccaaagtacccattaaagcttgcactcgtttcagagcccgaatcctcatctttaatattgaaattcctatcactaaag

SEQ ID NO: 190372 - DNA, 120 bp, Artificial Sequence
  ENSG00000112339_16 (sequence is synthesized)
gatttcctgtgctgttacactaccaaactgtcagtgaacccgccgttattaaacgattgattagtgtcttaaacaaaagcacgggtgaagtcacaaagaaaaagcctaagtttttgacta

SEQ ID NO: 190373 - DNA, 120 bp, Artificial Sequence
  ENSG00000112339_17 (sequence is synthesized)
aaggccagaatgcattggtagagctacagacacaaagaccaatagctcttgagctatataaagactttaaagagctggggaggttcatgctacgttacggtggttctacaatagctgctg

SEQ ID NO: 190374 - DNA, 120 bp, Artificial Sequence
  ENSG00000112339_18 (sequence is synthesized)
gtgttgtcactgagataaaagaatgatgggtcagaatttctaccacgtttctggatacagtgaaatagctaacctctgtttcaagaatgcagttattaagtcaaaggaacaatgtgcaat

SEQ ID NO: 190375 - DNA, 120 bp, Artificial Sequence
  ENSG00000112339_19 (sequence is synthesized)
tgatatgtttttagatgagagagaaaaattaaagctaaaattagctgcaaagaagtattaataatcacctctgcaaaaattctaagttgccaactggcaaagaaagtctaatgttaaaaa

SEQ ID NO: 190376 - DNA, 120 bp, Artificial Sequence
  ENSG00000112339_20 (sequence is synthesized)
caactttgcctttgaaacgttaataaatggatttactttgctaagatttatggcaagtgtcaaaaatagtatctgaagatactgaatcatcatgaaatgaactctacttctggccaaagc

SEQ ID NO: 190377 - DNA, 120 bp, Artificial Sequence
  ENSG00000112339_21 (sequence is synthesized)
acaatgtatttgcagttttctcttttgattcaattatactgcacatgttttaaggaaaagtaacttaattgggtttttcaggcagttgatatttgacctaagcttttttttttttttttt

SEQ ID NO: 190378 - DNA, 120 bp, Artificial Sequence
  ENSG00000112339_22 (sequence is synthesized)
ttccagttaatgctaagaaaagatttggggaaggttataataaaagtattttgtggtgaccataagaatgtccctccccaaacaagtaaacttgtgaaagtttaatttggaattagtgga

SEQ ID NO: 190379 - DNA, 120 bp, Artificial Sequence
  ENSG00000112339_23 (sequence is synthesized)
agctgttcctttgaaagccaagatattatttaagttgtaaagccagctaataaaatgccttagtttgagcataatacaaactgtgttttgttctttagacatttatgagattctctgcca

SEQ ID NO: 190380 - DNA, 120 bp, Artificial Sequence
  ENSG00000112339_24 (sequence is synthesized)
ctaacagtaaatatgatttaggggttttgtgggatctttttcacctaagagtttcctagctctgtcacatgaattcttttttatcctaatggcagatccaatttcatctcattcattttt

SEQ ID NO: 190381 - DNA, 120 bp, Artificial Sequence
  ENSG00000112339_25 (sequence is synthesized)
ttaaccataacttgcttttcccattctcacttttagaattatacctatgatggccctttctttatcttgcttaccttatagattataagtcccctgtgagtaagtaagagtcatgttttt

SEQ ID NO: 190382 - DNA, 120 bp, Artificial Sequence
  ENSG00000112339_26 (sequence is synthesized)
ctttaaagtttcaacaacaaaccccaaggtttatttatttaacaacaggtattcgttgaggtgccttctgggtgcaaggagctttagagtagattttgacctcagctgaacctggaactc

SEQ ID NO: 190383 - DNA, 120 bp, Artificial Sequence
  ENSG00000112339_27 (sequence is synthesized)
tgatctgatagactgtttatgataagcttttttttttattagcagcgtgatttgtatatcgatggcttaacatatacaacagcatttcttctccctgcaccttttcgtgaacctgacatt

SEQ ID NO: 190384 - DNA, 120 bp, Artificial Sequence
  ENSG00000112339_28 (sequence is synthesized)
ttgaacataagcaataacatctgtatggtaaagtaggcagattatacatgtgttgcttagtgaatgattaccaagtgaacacacttggtatattgctttaccaaaatacatgtgtagttg

SEQ ID NO: 190385 - DNA, 120 bp, Artificial Sequence
  ENSG00000112339_29 (sequence is synthesized)
agattcactgagttaagaaagttttatttaaatattaatattaatcaagaatttaacagatatatgtgacagaaatctaacttcaagtgactgaagcagaaagaaaaatttttgaatgac

SEQ ID NO: 190386 - DNA, 120 bp, Artificial Sequence
  ENSG00000112339_30 (sequence is synthesized)
ataactgagaaaattagaggtagctctagctttgattccatttagatcgagcagctcacacaatgttagcaaggactcatctccactctgccttccctggtgctggttttgctctcaaac

SEQ ID NO: 190387 - DNA, 120 bp, Artificial Sequence
  ENSG00000112339_31 (sequence is synthesized)
gggcgcggtggctcacacctgtaatcaaaacactttgggaggctgagtcgggaggatagcgtgagcccaggagtttgagaccagctaaggcaatatagtgagaccatgtctctacagaaa

SEQ ID NO: 190388 - DNA, 120 bp, Artificial Sequence
  ENSG00000112339_32 (sequence is synthesized)
gcccaggagtttgagaccagctaaggcaatatagtgagaccatgtctctacagaaaaaatttaaaaacagatcagctgggtgtggtgccacatgcctgtagtcccagcttctcaggaggc

SEQ ID NO: 190389 - DNA, 120 bp, Artificial Sequence
  ENSG00000112339_33 (sequence is synthesized)
cagtccagcctgggtgacagagcaagacctgtcaccctgccacccataaaaaacctcttctgtaatgccaggttcttgacaagatgtgataattccacacttacatcctcagatctccca

SEQ ID NO: 190390 - DNA, 120 bp, Artificial Sequence
  ENSG00000112339_34 (sequence is synthesized)
ttccacacttacatcctcagatctcccatccagggcaaggacagactaaaagagcatatcttctccagaagtcctagaaacatctcatcattgactatgattgaattttatttattaata

SEQ ID NO: 190391 - DNA, 120 bp, Artificial Sequence
  ENSG00000112339_35 (sequence is synthesized)
cttccctaggatatcctgtgtttgagtgtgaagttaatatcacacaaagcatgtagctaacagttgtgtgagggttggaaattcagggtgctgttaggaaggggaaatggattggggttt

SEQ ID NO: 190392 - DNA, 120 bp, Artificial Sequence
  ENSG00000112339_36 (sequence is synthesized)
aaggtagggggagtaaaaacaagaaaccatccactctgtatattatataagactgtgatcgaattaagaattttagtttacagtttagcataaacaaatagtagtagaaatgaatgcatt

SEQ ID NO: 190393 - DNA, 120 bp, Artificial Sequence
  ENSG00000112339_37 (sequence is synthesized)
tattcattccttccttctccaatagtgtttaagtacaatctttttatttgcattttattgatgattgattgtggttgaaaggagtggtgatattatttcgaggatccactgtgtaagaag

SEQ ID NO: 190394 - DNA, 120 bp, Artificial Sequence
  ENSG00000112339_38 (sequence is synthesized)
actgttggcagtggaaggctcgagttgattaagtgacaaagaggtaaagcagacatgcccaagcttggttatgctctgatttcctaccctgttactttcatccataatttatagtacatc

SEQ ID NO: 190395 - DNA, 120 bp, Artificial Sequence
  ENSG00000112339_39 (sequence is synthesized)
cattttgtgtcattttgcttcaggtatttcttgtcctgactgtcttcttttttatgattttactgtttcttcacactaatggctttgtcctctgactttgactctttgtgagattcttct

SEQ ID NO: 190396 - DNA, 120 bp, Artificial Sequence
  ENSG00000112339_40 (sequence is synthesized)
gagcagttaacctctaggataatgtggcttgaacacattacagaactatgttttgacttgttagtattattcacacattcatgacaattgagcctctctactgtgagaaatgttttagag

SEQ ID NO: 190397 - DNA, 120 bp, Artificial Sequence
  ENSG00000112339_41 (sequence is synthesized)
gccagtttctaggcatagctgtttttctcccatgagtatgcaaatcaatagttttaaccattgttaaaatgcaatcatagtgacttcagaaaatttggaaaatacagaaaatatagggaa

SEQ ID NO: 190398 - DNA, 120 bp, Artificial Sequence
  ENSG00000112339_42 (sequence is synthesized)
gaataaaattaacccacagttctgtcacctaaaggtaactgctgccaatgttttcatgtatttcttttctgtctctccaatgcatttttttacatagttgtgagcgttagccaagttatt

SEQ ID NO: 190399 - DNA, 120 bp, Artificial Sequence
  ENSG00000112339_43 (sequence is synthesized)
cgttagccaagttattttcatgttgttatgtaatcaatatttttcaatagaagtattagaggttttttttattgatataaaaataacaattacagatcctgatatatagaagttattcaa

SEQ ID NO: 190400 - DNA, 120 bp, Artificial Sequence
  ENSG00000112339_44 (sequence is synthesized)
aaaaatcaagacaagtaggcccaatacaaactactgaatcatcttctaatttccctctaaaatatttatagaaatatgtaagtagaaaaacattcatcctttcctcgtctaattatgatc

SEQ ID NO: 190401 - DNA, 120 bp, Artificial Sequence
  ENSG00000112339_45 (sequence is synthesized)
ctgccatattccaggcacaagagaaagctctggggcttgagtcttaatagggctgatagtccaaccaggggacagggtatcataaagagataattcaaaactttaagattggagggtagg

SEQ ID NO: 190402 - DNA, 120 bp, Artificial Sequence
  ENSG00000112339_46 (sequence is synthesized)
tgatggtagaaaattctgcggcaaacatttgttgatgctcatcatttgttgatgtcatcaaagatcaccagggcataattataatcaaaattagttttattgatgcttgctgcagcaaga

SEQ ID NO: 190403 - DNA, 120 bp, Artificial Sequence
  ENSG00000112339_47 (sequence is synthesized)
gagactgcacaccactggggtctatgggtgcttctcagtgggaaggtgtaaggaggggcttgctaagaatttgagcacatgtagctaattttaaggagggctcaagtgagcaagggtttc

SEQ ID NO: 190404 - DNA, 120 bp, Artificial Sequence
  ENSG00000112339_48 (sequence is synthesized)
ttctggattgagtgctgtcagaaagtggattgagtgctgtcagaaagtgggagtgattttgcaactgggtatcttaatttttatgttgtgggtgggaggaaaggaaagaagcaacagtca

SEQ ID NO: 190405 - DNA, 120 bp, Artificial Sequence
  ENSG00000112339_49 (sequence is synthesized)
cccatgttagccacaagaagaggttggctgtttatggtttgcacagtgactttgtttttatctgtgctcaggcatgattacagtatctcattttatccggattacagtgacctcatctga

SEQ ID NO: 190406 - DNA, 120 bp, Artificial Sequence
  ENSG00000112339_50 (sequence is synthesized)
tgttagagatttgagaattgttaaatgttcagcaggagaacgccaccgcctagtgtgaatgctaggtcagaagctgctttttcacactgaaaccatttaagtatgtacaaataagttaat

SEQ ID NO: 190407 - DNA, 120 bp, Artificial Sequence
  ENSG00000112339_51 (sequence is synthesized)
agtgtaaatgtaggtgtaaaatacaatgcaaaacaaaataatgaagtaagtgaattaaattattgcaccaaatatggggatatgaaatagggaaagaaaagcattaagttacttatagtc

SEQ ID NO: 190408 - DNA, 120 bp, Artificial Sequence
  ENSG00000112339_52 (sequence is synthesized)
cataaagggactacattattttgttactctgataatcccataaaacaaagttttaagaatgtttacagtaaccatgaatggaattagtgaaactattcatatcaatgcaaaaaaaaaaaa

SEQ ID NO: 190409 - DNA, 120 bp, Artificial Sequence
  ENSG00000112339_53 (sequence is synthesized)
aaaaaaagcaaagaaactaagtctgtacagcaaaagatggaaaggaaacaagaaaattaaatgaagacaaaggttgtgattattacagtaaatgaaaataggtttttatctttaaaatgt

SEQ ID NO: 190410 - DNA, 120 bp, Artificial Sequence
  ENSG00000112339_54 (sequence is synthesized)
agactcaaactgcaaagctaatgatatgctatctgcaaaatattcctattttgtaaataaataaaaccatagatttaaagaagaaagggcacagatgtactggggagacaaaaataactg

SEQ ID NO: 190411 - DNA, 120 bp, Artificial Sequence
  ENSG00000112339_55 (sequence is synthesized)
atccgttgggtgtataccatgtgccaagcaattttcatatactcatttaacatgacatatctataattatatgaggcagatattattaacctcagtctatagatgagaagactaaagctc

SEQ ID NO: 190412 - DNA, 120 bp, Artificial Sequence
  ENSG00000112339_56 (sequence is synthesized)
agagggattgctaaaaactagtaaataaattatggaaccatgatttgaatttagatttaagtctgactgaggcatgttcagagacactacactgcctctccagaaatcaggagtagcaat

SEQ ID NO: 190413 - DNA, 120 bp, Artificial Sequence
  ENSG00000112339_57 (sequence is synthesized)
attaacactggacaaagaatttaaagcaagtaaaaaaaaattaagagaatttcatattaataacaagtataatgcacaataaaactgtaccaaatgacataaaaatgcataatgaaattt

SEQ ID NO: 190414 - DNA, 120 bp, Artificial Sequence
  ENSG00000112339_58 (sequence is synthesized)
attagaaattaaaaattaaagggcatagttacaattattgaggaattctcatagctctgccttatagatcatgtaaacaaacaaggtcatagaggacttaaatagcaaagcagaaaaaaa

SEQ ID NO: 190415 - DNA, 120 bp, Artificial Sequence
  ENSG00000112339_59 (sequence is synthesized)
atctacaggaaagatagcaaaaggagtcttattttcttcttctgaagtttcagctgataatgttcaaagttcttatcctcagtcagcaaatcatttggattatagtagcaaaccctttga

SEQ ID NO: 190416 - DNA, 120 bp, Artificial Sequence
  ENSG00000112339_60 (sequence is synthesized)
ttttgctagctcagtaggaaaatacggattatctcataattcttcagttccaactcactgtttactccatagaaaaaagaaacttgacacacgtaaaagtgaaaagaaactagaatcatg

SEQ ID NO: 190417 - DNA, 120 bp, Artificial Sequence
  ENSG00000112339_61 (sequence is synthesized)
taagttaacaaaagaactttcactagctaacctaattcatgatatgtcaagagattcctgtgaaagtcagccatcagtcagattatcatctacagacagtctggaaagtctgctttcaaa

SEQ ID NO: 190418 - DNA, 120 bp, Artificial Sequence
  ENSG00000112339_62 (sequence is synthesized)
gaacctagatgccgatttgttgagacctcatgcatctgaatgcatttccaaagatgattctgcattcaaagaaataccagatttaaagaccataatcataaagggcacaacaccgaataa

SEQ ID NO: 190419 - DNA, 120 bp, Artificial Sequence
  ENSG00000112339_63 (sequence is synthesized)
ttctttatatattcaaaataattcactgtctgattttcaaaacattccagtacaggacagtttaggaagttcaaataatcctttgtacttaactagctcgttggaaaatatgactgttga

SEQ ID NO: 190420 - DNA, 120 bp, Artificial Sequence
  ENSG00000112339_64 (sequence is synthesized)
taatttaaatgctagtaaagaaactgaagttggaaatgtttctttagttgaacaaagtgccaagaatcacacttttaaaaatgataatttgcagttttctcagtgtgaaagtccatccct

SEQ ID NO: 190421 - DNA, 120 bp, Artificial Sequence
  ENSG00000112339_65 (sequence is synthesized)
tataagccagtgctttactttatctgacctttgtaaccagtcatctgccagtttcacagatctaagtttgggatcctttcccctgtcacaattagcaaatcgctgtcagtcttcacccgg

SEQ ID NO: 190422 - DNA, 120 bp, Artificial Sequence
  ENSG00000112339_66 (sequence is synthesized)
aatatcagaattaacaggatctctgtcgtcattggcatttcataaagcttctcccacaagagaccttgagaatttgtcactttctgaattgattgcagaaacaattgatgtagacaactc

SEQ ID NO: 190423 - DNA, 120 bp, Artificial Sequence
  ENSG00000112339_67 (sequence is synthesized)
tcagattaagaaagagtcctttgaggtcagtttatctgaagtgaggtctcctggaatagattcaaatattgatcttagtgtccttataaaaaacccagattttgttccaaagcctgtagt

SEQ ID NO: 190424 - DNA, 120 bp, Artificial Sequence
  ENSG00000112339_68 (sequence is synthesized)
agacccatccattgctccatcatcacgaactaaagttctaagttcaaagctagggaagaattccaattttgctaaggataataagaaaaacaacaaaggctctctgactaggaaaccacc

SEQ ID NO: 190425 - DNA, 120 bp, Artificial Sequence
  ENSG00000112339_69 (sequence is synthesized)
tttttctctctcttggaccaaggcccttgctgctagaccttcagcttttgcctcaacactgtgtcttcgttacccactgaaaagctgcaagcgacgcacccttgacctctataagacttt

SEQ ID NO: 190426 - DNA, 120 bp, Artificial Sequence
  ENSG00000112339_70 (sequence is synthesized)
tctttatagtagacaagttcaagatgtaaaggacaaagaaataagtccacttgtagcaataacaccatttgacttcaaatcagcatcacctgatgacattgtaaaagctaatcaaaaaaa

SEQ ID NO: 190427 - DNA, 120 bp, Artificial Sequence
  ENSG00000112339_71 (sequence is synthesized)
agcatttactagagaatagtaacaaaaggaaaacttgattgctgttgtagagctttttatttttaattaaagtcttcagaggatcactttatattatgggattcaaattctgatttttat

SEQ ID NO: 190428 - DNA, 120 bp, Artificial Sequence
  ENSG00000112339_72 (sequence is synthesized)
gaaaattgtcgtaggtcagttgattagttgatacgtatttttgcactgattttttttttaactatgtcttctttcagtgataactggctttatttaagttggtaacctatactgagtata

SEQ ID NO: 190429 - DNA, 120 bp, Artificial Sequence
  ENSG00000112339_73 (sequence is synthesized)
tgtttacaaagtggatatggaaacttgatgttgtgaaatcagacctcatatatttttgtttgaagcattcaactttctatgttttttataatgaaatatttttttctatgaaatattttt

SEQ ID NO: 190430 - DNA, 120 bp, Artificial Sequence
  ENSG00000112339_74 (sequence is synthesized)
gtgctttgttcttaaacgaaaatgccagcacttgggattattatagtttagtgtgaagattattcttatgtggcacagcataactgagatgttatattttaaaatatgatataattccta

SEQ ID NO: 190431 - DNA, 120 bp, Artificial Sequence
  ENSG00000112339_75 (sequence is synthesized)
cctagtttcattatttttctgtaaatactaaaatttttctattagaaaatcttaaaattcctgacttttgagagtactgtggagattgttgaaatacatttttgataataataaaatgaa

SEQ ID NO: 190432 - DNA, 120 bp, Artificial Sequence
  ENSG00000112339_76 (sequence is synthesized)
agcagtctacagcaggcttcaggaagtgatgagggggggccatggaaagaccagccccttggacgctctgggtcactacgtcatggtggtacatctgggcacttaggtcctcagtgacct

SEQ ID NO: 190433 - DNA, 62 bp, Artificial Sequence
  ENSG00000112339_77 (sequence is synthesized)
ggcctcagtctcccgaatatctgggattacaggtgcctgcaatcacatctggctaatttttt

SEQ ID NO: 190434 - DNA, 87 bp, Artificial Sequence
  ENSG00000112339_78 (sequence is synthesized)
tcacatatcttgccactttacctatgctggtctcgaactcctgggctcaagtggtctacccgtctcggcctcccaaagtgctaggat

SEQ ID NO: 190435 - DNA, 120 bp, Artificial Sequence
  ENSG00000112339_79 (sequence is synthesized)
aagtgctaggattacaggcctgagccaccccacccggcctgttcattattcttataatctgtttttttttttggattggcaataggctgagtgtggaaaaccagtagattcccagacatc

SEQ ID NO: 190436 - DNA, 120 bp, Artificial Sequence
  ENSG00000112339_80 (sequence is synthesized)
acagcagatttttaaaaagtggtttagttacaactccaaagtaagtaacctcttactgaaattgtaactgactgtcaaaatgatactgactgttgaagattaaaatgtgaaaacattaaa

SEQ ID NO: 190437 - DNA, 120 bp, Artificial Sequence
  ENSG00000112339_81 (sequence is synthesized)
ctacaggaaagatagcaaaaggcccttgctgctagaccttcagcttttgcctcaacactgtgtcttcgttacccactgaaaagctgcaagcgacgcacccttgacctctataagactttt

SEQ ID NO: 190438 - DNA, 120 bp, Artificial Sequence
  ENSG00000112339_82 (sequence is synthesized)
ctgcatgtgtgtgtctcatagacacttcagatttaccaagcctaaaatggatcttgtccttagtttcatatctcacagttaatgcatcatcatctcacattttcccctttctgtcattag

SEQ ID NO: 190439 - DNA, 120 bp, Artificial Sequence
  ENSG00000112339_83 (sequence is synthesized)
tcttcactttccttaccactccaaacttgttattccttattcccgaattcttgagtttattccctttctgtagtaagtttgtgcatttgtatcagcctctactctaagacagaaatacca

SEQ ID NO: 190440 - DNA, 120 bp, Artificial Sequence
  ENSG00000112339_84 (sequence is synthesized)
tcaccttacttctccggtcacaatatttactggcttcctattacttaactgcaggatgaaatttaaaccctaagcgtgatttatgagacccctttattatttctcccttgcctatctctg

SEQ ID NO: 190441 - DNA, 120 bp, Artificial Sequence
  ENSG00000112339_85 (sequence is synthesized)
ttgcctcctgtcttaccttttcttcattattctatatggtcccctccccatggcccccacaagtgacacatgactcttagcccatcccacatttggttatgcctttgcccacacagtttc

SEQ ID NO: 190442 - DNA, 120 bp, Artificial Sequence
  ENSG00000112339_86 (sequence is synthesized)
ctggggcagcagtgtcttcctttttctccctactcatgcatacaagctacctaataaacacttattccttcttcagagtgccagatgtctattctcaccatcatggattctttggtgcac

SEQ ID NO: 190443 - DNA, 120 bp, Artificial Sequence
  ENSG00000112339_87 (sequence is synthesized)
ctttgtgtttctattgtatattttacatattatttgtctcaggacaatgtaattgtttccatctttctcttcactagtataatatctttatgggcagggacttacatttttatttttttt

SEQ ID NO: 190444 - DNA, 120 bp, Artificial Sequence
  ENSG00000112339_88 (sequence is synthesized)
tatccccagagtttagtataatatctggtactacgtatttattatttctcaataaatatttgagaaaggaatgaacctttctttggtaatatgagtatttttatttgcaaaaaaaaaaag

SEQ ID NO: 190445 - DNA, 120 bp, Artificial Sequence
  ENSG00000112339_89 (sequence is synthesized)
taaagtgtggtatgccatatttagtagagatgttaattctgaaatgattattatttaatgtccattgaactactagttttatatgactacttgagaactaagtatagttaacggtattaa

SEQ ID NO: 190446 - DNA, 120 bp, Artificial Sequence
  ENSG00000112339_90 (sequence is synthesized)
cgcctcctgggttcaagctgttctccggcctcagtctcccgaatatctgggattacaggaaaaccagtagattcccagacatcgcgaagtgaatctgaaattgtgccaaaagttgctaaa

SEQ ID NO: 190447 - DNA, 120 bp, Artificial Sequence
  ENSG00000112339_91 (sequence is synthesized)
tgcctgggtaagactttgagtacctccctcatccccacccccacccccaagtttttgaaatcactgttgcttctgtaagaaagagactgtttcaatttcgcataatatatcattagcact

SEQ ID NO: 190448 - DNA, 120 bp, Artificial Sequence
  ENSG00000112343_0 (sequence is synthesized)
gttaacttcctgacccaggaagtggcagcaacagaggggactagcagcgaatatactttacaccaaatctcagaagattcagaacttagatgagtggggcccaggacaggaaccctggag

SEQ ID NO: 190449 - DNA, 120 bp, Artificial Sequence
  ENSG00000112343_1 (sequence is synthesized)
ccttggaaggaggggagccccatctccccagaagagcagtgaccccagcagagaggggcctggtgtatcactggaggaaatagcctgccaaggaatacacgtcttcagaagaaattctgt

SEQ ID NO: 190450 - DNA, 120 bp, Artificial Sequence
  ENSG00000112343_2 (sequence is synthesized)
gtggcttcaagagactgatcaaattgtgagaggaaaacagcctacccggtcctcttttcttcaatacaaaatgagataataggggttggaaggaaaaccttcaagacctatggaagtcag

SEQ ID NO: 190451 - DNA, 120 bp, Artificial Sequence
  ENSG00000112343_3 (sequence is synthesized)
ttgcagccagctcatcacatagaggtgcaggtgaggtgtattttcatcacggtggaaaattctggctgcttcatctccatctctagagccaatattggagcttttcaataaaagctatgg

SEQ ID NO: 190452 - DNA, 120 bp, Artificial Sequence
  ENSG00000112343_4 (sequence is synthesized)
cctcaaccaccagcaccaagaagatgatggaggaagccacctgctccatctgcctgagcctgatgacgaacccagtaagcatcaactgtggacacagctactgccacttgtgtataacag

SEQ ID NO: 190453 - DNA, 120 bp, Artificial Sequence
  ENSG00000112343_5 (sequence is synthesized)
acttctttaaaaacccaagccaaaagcaactgaggcaggagacattctgctgtccccagtgtcgggctccatttcatatggatagcctccgacccaacaagcagctgggaagcctcattg

SEQ ID NO: 190454 - DNA, 120 bp, Artificial Sequence
  ENSG00000112343_6 (sequence is synthesized)
aagccctcaaagagacggatcaagaaatgtcatgtgaggaacacggagagcagttccacctgttctgcgaagacgaggggcagctcatctgctggcgctgtgagcgggcaccacagcaca

SEQ ID NO: 190455 - DNA, 120 bp, Artificial Sequence
  ENSG00000112343_7 (sequence is synthesized)
aagggcacaccacagctcttgttgaagacgtatgccagggctacaaggaaaagctccagaaagctgtgacaaaactgaagcaacttgaagacagatgtacggagcagaagctgtccacag

SEQ ID NO: 190456 - DNA, 120 bp, Artificial Sequence
  ENSG00000112343_8 (sequence is synthesized)
caatgcgaataactaaatggaaagagaaggtacagattcagagacaaaaaatccggtctgactttaagaatctccagtgtttcctacatgaggaagagaagtcttatctctggaggctgg

SEQ ID NO: 190457 - DNA, 120 bp, Artificial Sequence
  ENSG00000112343_9 (sequence is synthesized)
agaaagaagaacaacagactctgagtagactgagggactatgaggctggtctggggctgaagagcaatgaactcaagagccacatcctggaactggaggaaaaatgtcagggctcagccc

SEQ ID NO: 190458 - DNA, 120 bp, Artificial Sequence
  ENSG00000112343_10 (sequence is synthesized)
agaaattgctgcagaatgtgaatgacactttgagcaggagttgggctgtgaagctggaaacatcagaggctgtctccttggaacttcatactatgtgcaatgtttccaagctttacttcg

SEQ ID NO: 190459 - DNA, 120 bp, Artificial Sequence
  ENSG00000112343_11 (sequence is synthesized)
atgtgaagaaaatgttaaggagtcatcaagttagtgtgactctggatccagatacagctcatcacgaactaattctctctgaggatcggagacaagtgactcgtggatacacccaggaga

SEQ ID NO: 190460 - DNA, 120 bp, Artificial Sequence
  ENSG00000112343_12 (sequence is synthesized)
atcaggacacatcttccaggagatttactgccttcccctgtgtcttgggttgtgaaggcttcacctcaggaagacgttactttgaagtggatgttggcgaaggaaccggatgggatttag

SEQ ID NO: 190461 - DNA, 120 bp, Artificial Sequence
  ENSG00000112343_13 (sequence is synthesized)
gagtttgtatggaaaatgtgcagaggggcactggcatgaagcaagagcctcagtctggattctggaccctcaggctgtgcaaaaagaaaggctatgtagcacttacttctcccccaactt

SEQ ID NO: 190462 - DNA, 120 bp, Artificial Sequence
  ENSG00000112343_14 (sequence is synthesized)
cccttcatctgcatgagcagcccctgcttgtgggaatttttctggactatgaggccggagttgtatccttttataacgggaatactggctgccacatctttactttcccgaaggcttcct

SEQ ID NO: 190463 - DNA, 120 bp, Artificial Sequence
  ENSG00000112343_15 (sequence is synthesized)
tctctgatactctccggccctatttccaggtttatcaatattctcctttgtttctgcctcccccaggtgactaaggaaaagagcagaagctccttggtttaaccagcacagagaaaataa

SEQ ID NO: 190464 - DNA, 120 bp, Artificial Sequence
  ENSG00000112343_16 (sequence is synthesized)
tataaatcccataagggcagacgtttggtctgttttcttcgctgtcatttccttagtagttagactagtgctgagattttagtggatatataattgatttatgttgaatatatggactta

SEQ ID NO: 190465 - DNA, 120 bp, Artificial Sequence
  ENSG00000112343_17 (sequence is synthesized)
gcaactaaaaataccacagatggttaacctggactggggcaaagcaagataatagtgatgatcgtatgttgctgtctccatccgtctttaatgggtcagggctttgatttccaagggtct

SEQ ID NO: 190466 - DNA, 120 bp, Artificial Sequence
  ENSG00000112343_18 (sequence is synthesized)
tcaggtgatgagtaggggtacccacaagtcagaaggtctgcgttctcctagtttgtttgctgccatttgaactcatgtagggaatgaaagaaagctgcaattatccgccaactgcattta

SEQ ID NO: 190467 - DNA, 120 bp, Artificial Sequence
  ENSG00000112343_19 (sequence is synthesized)
aaacaaaacaaaacagaaaaatcaaaataacattgactcttccaaccactgacatgttgtttaataatctaagcggcagtcctggaggctaccagacttactgagttctacctgagaaac

SEQ ID NO: 190468 - DNA, 120 bp, Artificial Sequence
  ENSG00000112343_20 (sequence is synthesized)
agccaagcaaagtgtgagagaagggttaagactggcttacaatgagatgcttcaaatgaaaagggaattatgagtaaaattgaactttgatgggggattcagttctggaaaagaatttgg

SEQ ID NO: 190469 - DNA, 120 bp, Artificial Sequence
  ENSG00000112343_21 (sequence is synthesized)
tattttccagtctgctaggaccaattaccttgaaatattttaaaatctcagtaaatagttattgctgaaatggctgttggcagttcttattatgattcagagaagagcaaatagacctta

SEQ ID NO: 190470 - DNA, 120 bp, Artificial Sequence
  ENSG00000112343_22 (sequence is synthesized)
acttcattttgaaaaagaccaaattaccatacccgagtgagtaatgacaggactacaactaaaacataaacaacattaatgatgaccataaaaagtcacaaaattgctaaatgttataat

SEQ ID NO: 190471 - DNA, 80 bp, Artificial Sequence
  ENSG00000112343_23 (sequence is synthesized)
gatgaccataaaaagtcacaaaattgctaaatgttataatttagagttgacataaaaattgatgtgaggctgaggcaggt

SEQ ID NO: 190472 - DNA, 120 bp, Artificial Sequence
  ENSG00000112343_24 (sequence is synthesized)
tacaaaaattagccgggcatggtggtaggggcctgtaacccagctactcgtgaggccaaggcaggagaattgcttgagcctgcagcagctgcagtaagccaagatcatgctgtgcctcaa

SEQ ID NO: 190473 - DNA, 120 bp, Artificial Sequence
  ENSG00000112343_25 (sequence is synthesized)
agtaagccaagatcatgctgtgcctcaaggaaaaaaaaaattaatgtttactgatatttgttgaagtcctacaacatcacctctgagaataggagaaatgaagcaacagttgtgtctaga

SEQ ID NO: 190474 - DNA, 120 bp, Artificial Sequence
  ENSG00000112343_26 (sequence is synthesized)
tgtcagaggcatggctgggcctccatctctgcctaagggagatataaaagagttcaaactattgcccatgttccccagggtcagaagttctaattatgatgatagaggctgggttgtaag

SEQ ID NO: 190475 - DNA, 120 bp, Artificial Sequence
  ENSG00000112343_27 (sequence is synthesized)
tagtaagtgaagggtagcagaatatgccatctttggcataagaagtattttgagttgaagacaattgagaaaaaaaatagattaaaaacaaacaaacacctctgccctctccctatttgc

SEQ ID NO: 190476 - DNA, 120 bp, Artificial Sequence
  ENSG00000112343_28 (sequence is synthesized)
ctaaaagcaggatatgaaattgtgaaggtgtcttcttactcggggaagaacaaaagttagtcaccagagactttagactcttatcagcctggacatagcaccagagaagtcttttttttt

SEQ ID NO: 190477 - DNA, 120 bp, Artificial Sequence
  ENSG00000112343_29 (sequence is synthesized)
aaaaaaaaaaaaaaagggaaagaaaaagttgccttcccacaatttactgcactagaaactcaaagtccttttcgtcttccttgtcacttaaaaaatgtattcttttcttaaaatgctata

SEQ ID NO: 190478 - DNA, 120 bp, Artificial Sequence
  ENSG00000112343_30 (sequence is synthesized)
tatataagcccaagttctaaatcctcttttgagtattcatctcagtactcccctgtgtttgtacaatgcacatgctttgtttctgtcttgtcaatctgtcttttgttagtctacttgata

SEQ ID NO: 190479 - DNA, 120 bp, Artificial Sequence
  ENSG00000112343_31 (sequence is synthesized)
gggccacagatggagaacctaagatgaatagaaaaaaaagatttttctccccaacagaaggattatcgccagttgcacttgttctatatacccgtagtctcggtatgctgacccagactt

SEQ ID NO: 190480 - DNA, 120 bp, Artificial Sequence
  ENSG00000112343_32 (sequence is synthesized)
gggtaataggacccagtgggtaaccgaggaaccccacctttgtgcaggatcagtgaagatgtaatctggatattcataagctcttctctacctcttggcatcccacagtcctgtgttaat

SEQ ID NO: 190481 - DNA, 120 bp, Artificial Sequence
  ENSG00000112343_33 (sequence is synthesized)
gtaagtgtggtcttccccagaaaggggaggcctccctaacattgttaaagcctagcatatgctgcttagaggaaattctatatccctaagcacttagattgctgaataagaaagaatgat

SEQ ID NO: 190482 - DNA, 120 bp, Artificial Sequence
  ENSG00000112343_34 (sequence is synthesized)
aataaaataaacaattaaataaaagttttaaaaaatgaataaaataaacctgtggaaactataaggaaggccagaagaaatataaaattggagattaattggggtgcaggaaagttatgg

SEQ ID NO: 190483 - DNA, 120 bp, Artificial Sequence
  ENSG00000112343_35 (sequence is synthesized)
aaagaatataagtcctgctagataaatcattagctattttaataaagaatacagaagaaaataggaacaaaagaatatatactggaataattttgagagtaatttgaagaattagatgca

SEQ ID NO: 190484 - DNA, 120 bp, Artificial Sequence
  ENSG00000112343_36 (sequence is synthesized)
aataaatttgaaaacctttaaaaagaaaccaatggcctaactgacccaagaagggaaagaaaatctaaacagactgataaatacaaaatgaaattcagacacttacagagcagccaggca

SEQ ID NO: 190485 - DNA, 120 bp, Artificial Sequence
  ENSG00000112343_37 (sequence is synthesized)
gctgagatgggaggatcacttgaggctaggagtttgagactagcctgggcaaggctcccatctctaaaagaaaagaaattagctgggcatggtggcatgtgccttagtttcagctactca

SEQ ID NO: 190486 - DNA, 120 bp, Artificial Sequence
  ENSG00000112343_38 (sequence is synthesized)
gggcatggtggcatgtgccttagtttcagctactcaggaggctgagacgaggattgcttgagcctaggagggcaaggctgcagtgagccatggtcatgccactgaattccagcctaagtg

SEQ ID NO: 190487 - DNA, 120 bp, Artificial Sequence
  ENSG00000112343_39 (sequence is synthesized)
ataatgtggggaacaaaagaaaaaagaagatgattttatggctgattttttttttaaggaaaagcaattcatgtacccttgaagattagattaagttctataaaatagcccaaaatgaca

SEQ ID NO: 190488 - DNA, 120 bp, Artificial Sequence
  ENSG00000112343_40 (sequence is synthesized)
gtggctgaaacaagtttatttctctcccatttaaagcaagtctagatgtggaagtctgggaagcccagaaaatccaggtcttgtttgtgtatggaaactccagaaaatcacagattcctt

SEQ ID NO: 190489 - DNA, 120 bp, Artificial Sequence
  ENSG00000112343_41 (sequence is synthesized)
ccagccacccctcaattacccctgggatccaagagagccactaaagttccagccatcatactcacaacccaagttgtaggatggaaaaaaggacacaaaagtagggtgaagagcatgtgt

SEQ ID NO: 190490 - DNA, 120 bp, Artificial Sequence
  ENSG00000112343_42 (sequence is synthesized)
gcaacagctctcttttactctagtgtcctaaaacctatcataaaacctttggcttgccttgcattagccagaatttagtacatggccacacttaagaagtcagaaagattagcttttttt

SEQ ID NO: 190491 - DNA, 120 bp, Artificial Sequence
  ENSG00000112343_43 (sequence is synthesized)
ccagggtagttggctgaaaatcaggagttctcatattaaaaaacagagaagggacatcgaatagatgaccaacaatctccttcacactcatactatttaaactgtcctagtcaatgacca

SEQ ID NO: 190492 - DNA, 120 bp, Artificial Sequence
  ENSG00000112343_44 (sequence is synthesized)
aaaaagaaaagcctacaaactcattgatataaaagcttaacaaaggtactccccgccccccgcccgccacacaccatccccaaaaggaaatttctaatccaattaacagtcttaggttgg

SEQ ID NO: 190493 - DNA, 120 bp, Artificial Sequence
  ENSG00000112343_45 (sequence is synthesized)
gctgctgaaacaaaataccacagcctgagtgacttaaacaacgacaatttatctctcactgttctgaggtctgagttgattctttgtgaaggccctttcctagcttgcagatggctacct

SEQ ID NO: 190494 - DNA, 120 bp, Artificial Sequence
  ENSG00000112343_46 (sequence is synthesized)
tcctgctatgtcttcacatggcaaagagagagctagctttctggtcttttcttataagggaccagtcccatcatgcccatcatgaagactcgatctgctaggatctcaactaaacctaac

SEQ ID NO: 190495 - DNA, 120 bp, Artificial Sequence
  ENSG00000112343_47 (sequence is synthesized)
tatcacccaaagagcccacctccaaagaccatcacattgaatgtgagagtttctacatatgcattgtgggaaacacaaacatttacttcaactgtaactattgaagcaaaaatgtccccc

SEQ ID NO: 190496 - DNA, 120 bp, Artificial Sequence
  ENSG00000112343_48 (sequence is synthesized)
caccatagacatccagcaccacagtagtacatttattacaattgaacttacattgacacgtcattatcaacgaaagtctgtaatttacattagggtttattcttggtgttgtgctttcta

SEQ ID NO: 190497 - DNA, 120 bp, Artificial Sequence
  ENSG00000112343_49 (sequence is synthesized)
tgggttttgacaaatgtataatgtcatgtattcaccattatagtatcacagaagtttcactgccctaaaaatcctgtgttctgccttttcaacacttcctgtcacccaatttctatcaac

SEQ ID NO: 190498 - DNA, 120 bp, Artificial Sequence
  ENSG00000112343_50 (sequence is synthesized)
taatcttttgactgtgtccatagttactgtcttttctagagtgtcatacagttgtgaagcaggaagcaggagtgaactccggaggcagggactttactccggaccagattgaagactagc

SEQ ID NO: 190499 - DNA, 120 bp, Artificial Sequence
  ENSG00000112343_51 (sequence is synthesized)
cgaaacagggacgaggttaaagcacctctccataagacacgcccaccagcgccatgtcagtttttcgttgccatggcaacaacaggacattatcgacttctttcctctgtacctactccg

SEQ ID NO: 190500 - DNA, 120 bp, Artificial Sequence
  ENSG00000112343_52 (sequence is synthesized)
aagttaccactctttttctagaaatttctgcataatcccccttaacatgcacttaactaaaagcaggtatattactgcagaactgcccctgagctgctactctgggcacattacttatgg

SEQ ID NO: 190501 - DNA, 120 bp, Artificial Sequence
  ENSG00000112343_53 (sequence is synthesized)
gttagccctgctcagcaaggagcagtacctgttctgctgttgtacactgctgcttcagtaaaagttgctaacaccaccacttcacccttgaattcttcccgggctaagccctaatttttg

SEQ ID NO: 190502 - DNA, 120 bp, Artificial Sequence
  ENSG00000112343_54 (sequence is synthesized)
gcttgcttgccctgcatcagttggagtcatatagtatgcagtcttttcaggttggctttttagtaacatacatttaagtttccttcatgtgttttcatggcttgatcgtttcttttcttt

SEQ ID NO: 190503 - DNA, 79 bp, Artificial Sequence
  ENSG00000112343_55 (sequence is synthesized)
atctcccaggttcaaacgattctcatatatgcccggctaattggggttttcccatgttgaccaggctggtctcaaactc

SEQ ID NO: 190504 - DNA, 120 bp, Artificial Sequence
  ENSG00000112343_56 (sequence is synthesized)
aatccacccacttcggcctcccaaagtgaatgcatttctttttaactctaaataacattccattattcagaagtaccacagttatccacttacctactgaaagacatcttgtttccaagt

SEQ ID NO: 190505 - DNA, 120 bp, Artificial Sequence
  ENSG00000112343_57 (sequence is synthesized)
tttggataaattatgaataaagctgctataaacatctatgtgcaggtttttgtgtggagataagttttcaattcctttggataaatactaaggagtgtgattggtgaatcttatggtaaa

SEQ ID NO: 190506 - DNA, 120 bp, Artificial Sequence
  ENSG00000112343_58 (sequence is synthesized)
agtatggttacttttgtaagaaaccaccaaactgtcttccaaagtgattgcacattttgcattctcaccagtaatgaacaagttactattgctacatatctttgcaacctttggtgctga

SEQ ID NO: 190507 - DNA, 120 bp, Artificial Sequence
  ENSG00000112343_59 (sequence is synthesized)
cagtgttctaaattttggtcattctactaggtatgcagtggtatctacttgttttaatttgcagttccctaatgacatgatgtcaagcatcttttcatatgcatacttgcatctgtgtat

SEQ ID NO: 190508 - DNA, 120 bp, Artificial Sequence
  ENSG00000112343_60 (sequence is synthesized)
cttctttggtgaacagatgttcaggtcattggcctgctttaaatcaggttattttcttactgttgagttttaagtattctttgtatattctaaaaatattgttcttcatcagatctgtct

SEQ ID NO: 190509 - DNA, 120 bp, Artificial Sequence
  ENSG00000112343_61 (sequence is synthesized)
tttgcaaacattacctgccaatgtgtggcttttcttcaacacttctttgtaaatttgcaagtcctttgagaaaagaaatgcacccaaagtattaatttggcaatctcatatcacgagagt

SEQ ID NO: 190510 - DNA, 120 bp, Artificial Sequence
  ENSG00000112343_62 (sequence is synthesized)
ttggcaatctcatatcacgagagtactctaaagctaaataaattacagtttttcaaattttgaattaattgatctttgctattgttagcaaggtcttgtattcttttttttttttttttt

SEQ ID NO: 190511 - DNA, 120 bp, Artificial Sequence
  ENSG00000112343_63 (sequence is synthesized)
ctacagtgcccaggctggtctcgaactccaggcctaaaatgatcctcctgccttggccttccaaagtactgggattacaggcataagtcaccacgctcagccatctggtattctttagca

SEQ ID NO: 190512 - DNA, 120 bp, Artificial Sequence
  ENSG00000112343_64 (sequence is synthesized)
actgtttggtaacttaatctttcactttttgaaaacaaaaaatagtttttttctcatagttttctaacaaaatcttcataactgaaataatttctctttatcacctcttcttataaatat

SEQ ID NO: 190513 - DNA, 120 bp, Artificial Sequence
  ENSG00000112343_65 (sequence is synthesized)
ggttttctttttttaaataaaaatttaagacattttataactggccaaatttactagcttagatactattagatagtcaatattttttgttggatatttgatttttatttcaggcaacta

SEQ ID NO: 190514 - DNA, 120 bp, Artificial Sequence
  ENSG00000112343_66 (sequence is synthesized)
atatctattcatttttgcactgttggaagaaaattactgatcaaattcactatgtatttgcagaaaatggctttcaatattgtctactttatcatcctttttttttttttctttcttcct

SEQ ID NO: 190515 - DNA, 120 bp, Artificial Sequence
  ENSG00000112343_67 (sequence is synthesized)
tatgttgcccaggctggtctccaacttctgggctcaaacaatcctccctccttggccttccaaagggttggatatgttttatctacagttttgttgttttgttctgctacaggatatttg

SEQ ID NO: 190516 - DNA, 120 bp, Artificial Sequence
  ENSG00000112343_68 (sequence is synthesized)
gttctgctacaggatatttgcaattgccatttatcatgaaattcatgacataccttcttccactctcctttttatctttattgttctggttataggactagctttgcatctctactcaat

SEQ ID NO: 190517 - DNA, 120 bp, Artificial Sequence
  ENSG00000112343_69 (sequence is synthesized)
tctggttataggactagctttgcatctctactcaattctgtatcagtagtatgctttcattttaaattttaagtttgtccatatgtatattgacacagggtcttgctctgttgcccagac

SEQ ID NO: 190518 - DNA, 90 bp, Artificial Sequence
  ENSG00000112343_70 (sequence is synthesized)
ctgcctaagaatggctgggactacaggcacgcaccaccacacatggctcatttttttgtattgagacagggtttctccatgttgcccagg

SEQ ID NO: 190519 - DNA, 120 bp, Artificial Sequence
  ENSG00000112343_71 (sequence is synthesized)
tataattcacagttatccttgtaactcctaatgtctatataaaagatttttatattttttaattcttaaaattttattatttatttcacaccaggccatcactgtgatacattttttaaa

SEQ ID NO: 190520 - DNA, 120 bp, Artificial Sequence
  ENSG00000112343_72 (sequence is synthesized)
acacattaaattatcaccagaaaagtgctgtgatggaaaatataaattgaaataccttttctggttaggagagtaattctgtttttctgatagagaatagaagagtccttcaggcccctc

SEQ ID NO: 190521 - DNA, 120 bp, Artificial Sequence
  ENSG00000112343_73 (sequence is synthesized)
caaactgtcatattccgggcatcgggtgtccccatcctcacttcagtccacaggcagggtcctcagtcttcagcgctccttctctttcccctttgtcttgtgtctccttgggtctctttt

SEQ ID NO: 190522 - DNA, 120 bp, Artificial Sequence
  ENSG00000112343_74 (sequence is synthesized)
ctccaagacctaaactccctgaggacaggactattttttacatcttgatgtcactcctgagcacttgctttaatgtgttggacactgggtccattaaagattgtatgtgaaattataaaa

SEQ ID NO: 190523 - DNA, 120 bp, Artificial Sequence
  ENSG00000112357_0 (sequence is synthesized)
cagtgtgcctccgactcggaacggcttccgcggccggggcagcgagggccgggggcggcgggcgggatgagtgcggtgtgcggtggagcggcgcggatgctgcggacgccgggacgccac

SEQ ID NO: 190524 - DNA, 120 bp, Artificial Sequence
  ENSG00000112357_1 (sequence is synthesized)
gacgccacggctacgccgccgagttctccccgtacctgccgggccgcctggcctgcgccaccgcgcagcactacggcatcgcgggctgtggaaccctactaatattggatccagatgaag

SEQ ID NO: 190525 - DNA, 120 bp, Artificial Sequence
  ENSG00000112357_2 (sequence is synthesized)
ctgggctaaggctttttagaagctttgactggaatgatggtttgtttgatgtgacttggagtgagaacaacgaacatgtcctcatcacctgtagtggcgatggctcgctgcagctctggg

SEQ ID NO: 190526 - DNA, 120 bp, Artificial Sequence
  ENSG00000112357_3 (sequence is synthesized)
acactgccaaagctgcagggccactgcaagtctataaagaacacgctcaggaggtgtatagtgttgattggagccaaaccagaggtgaacagcttgtggtgtctggctcatgggatcaaa

SEQ ID NO: 190527 - DNA, 120 bp, Artificial Sequence
  ENSG00000112357_4 (sequence is synthesized)
ctgtcaaattgtgggatccaactgttggaaagtctctgtgcacctttagaggccatgaaagtattatttatagcacaatctggtctccccacatccctggttgttttgcttcagcctcag

SEQ ID NO: 190528 - DNA, 120 bp, Artificial Sequence
  ENSG00000112357_5 (sequence is synthesized)
gtgatcagactctgagaatatgggatgtgaaggcagcaggagtaagaatcgtgattcctgcacatcaggcagaaatcttgagttgtgactggtgtaaatacaatgagaatttgctggtga

SEQ ID NO: 190529 - DNA, 120 bp, Artificial Sequence
  ENSG00000112357_6 (sequence is synthesized)
tgtagtttgagaggctgggacttaaggaatgtacgacaaccagtgtttgaacttcttggtcatacctatgctattaggagggtgaaattttcaccatttcatgcttctgtgctggcctct

SEQ ID NO: 190530 - DNA, 120 bp, Artificial Sequence
  ENSG00000112357_7 (sequence is synthesized)
tgctcgtatgattttactgtaagattctggaacttttcaaagcctgactctcttcttgaaacagtggagcatcatacagagtttacttgtggtttagacttcagtcttcagagccccact

SEQ ID NO: 190531 - DNA, 120 bp, Artificial Sequence
  ENSG00000112357_8 (sequence is synthesized)
caggtggctgactgttcttgggatgaaacaataaagatctatgaccctgcttgtcttactattcctgcttgagatacactactttggtcagaaacagaggatgttggctgaagaactgcc

SEQ ID NO: 190532 - DNA, 120 bp, Artificial Sequence
  ENSG00000112357_9 (sequence is synthesized)
taacagcaaataaattaactatggaaaacatagacattatgcttttatatgctattcagatttcaaatctttccaatttaccctggaatcagttttgagggagctgataaagactttagc

SEQ ID NO: 190533 - DNA, 120 bp, Artificial Sequence
  ENSG00000112357_10 (sequence is synthesized)
tgactcgttaagcctgatacataagccatatttaaaattctaagaaataattaatgttatgatatatcttgtagtatctattaaaatgtctctgggtcataaaatggattaaaatatggg

SEQ ID NO: 190534 - DNA, 120 bp, Artificial Sequence
  ENSG00000112357_11 (sequence is synthesized)
tgggagatcagtaggttatacttatatagatagtgatatatttcatttttaatttgtcatttttgatgtaaaatataatcactgctgtgataaataaactatctattgatcatttatcat

SEQ ID NO: 190535 - DNA, 89 bp, Artificial Sequence
  ENSG00000112357_12 (sequence is synthesized)
aaggaatgtacgacaaccagtgtttgaacttcttggtcatacctatgctattaggagggtgaaaatggagtcttgccctgtcacccaga

SEQ ID NO: 190536 - DNA, 120 bp, Artificial Sequence
  ENSG00000112357_13 (sequence is synthesized)
ctgtgttgtgaaatagaagagcaactaatgggtcattttcttctgtggaagagagtatataataaagacgtatagcatggttttagtcaatcttggatttgaatcccagctttgtaagtt

SEQ ID NO: 190537 - DNA, 120 bp, Artificial Sequence
  ENSG00000112357_14 (sequence is synthesized)
acctgttgtgagaccttgcgtatgtcacatatttttcctaaacttgagtgtttttatttgcaaactaagtttattagtagtctgtatcacagaccagcattgaataaatatgagctagta

SEQ ID NO: 190538 - DNA, 120 bp, Artificial Sequence
  ENSG00000112365_0 (sequence is synthesized)
ggcggcggcgcaggagcagaaaccggtgcggcgcagaagccccagaggcgggcggggcggagcggagggccagcgggccccggcgtgggtctcccgccaggccgccggatttaaccctta

SEQ ID NO: 190539 - DNA, 120 bp, Artificial Sequence
  ENSG00000112365_1 (sequence is synthesized)
gtctcccgccaggccgccggatttaacccttagtggcttctgaagaaaatggcagaaacatcgccagagccttctgggcagcttgttgtacactcagacgctcacagtgacactgtgctg

SEQ ID NO: 190540 - DNA, 120 bp, Artificial Sequence
  ENSG00000112365_2 (sequence is synthesized)
gccagttttgaggatcagaggaagaaaggcttcctctgtgacattactttaatcgtggagaatgtacatttccgggcccacaaagccttacttgctgccagtagtgaatacttctcaatg

SEQ ID NO: 190541 - DNA, 120 bp, Artificial Sequence
  ENSG00000112365_3 (sequence is synthesized)
atgtttgcagaagagggggaaatcggccaatccatttatatgctggaaggcatggttgcagacacctttggtatcctgctggaatttatctacacaggttatctccatgccagtgagaaa

SEQ ID NO: 190542 - DNA, 120 bp, Artificial Sequence
  ENSG00000112365_4 (sequence is synthesized)
agtacagaacaaatcctggctactgctcagttcttaaaagtctatgacctggtaaaggcttacacagacttccaaaataatcatagctccccaaagccaacaactttgaacactgctggt

SEQ ID NO: 190543 - DNA, 120 bp, Artificial Sequence
  ENSG00000112365_5 (sequence is synthesized)
gccccagtggttgttatctctaataagaaaaacgatcctccaaagcggaaacggggaagaccaaaaaaagtcaatacattgcaggaggagaaatcagaactggctgcagaggaagaaata

SEQ ID NO: 190544 - DNA, 120 bp, Artificial Sequence
  ENSG00000112365_6 (sequence is synthesized)
cagttaagagtgaacaattcagttcagaatagacaaaactttgtggttaaaggagacagtggtgtactgaatgagcaaattgcagcaaaagaaaaggaagaatcggagcctacttgtgag

SEQ ID NO: 190545 - DNA, 120 bp, Artificial Sequence
  ENSG00000112365_7 (sequence is synthesized)
ccaagtagagaggaggaaatgccagttgaaaaagatgagaactatgatcccaagaccgaggatggccaggcaagccagagtcgatacagcaagcggaggatttggagatccgtcaaactt

SEQ ID NO: 190546 - DNA, 120 bp, Artificial Sequence
  ENSG00000112365_8 (sequence is synthesized)
aaagattacaaacttgttggggatcaagaggaccatggttcagccaagaggatctgtggaaggagaaagcgccctggaggccctgaggcccgctgtaaagactgtggcaaggtctttaag

SEQ ID NO: 190547 - DNA, 120 bp, Artificial Sequence
  ENSG00000112365_9 (sequence is synthesized)
tacaatcactttttagcaatccaccagaggagccacacaggggagcgacctttcaaatgtaatgagtgtggaaaaggctttgcccagaagcactcgctacaggtccacaccaggatgcac

SEQ ID NO: 190548 - DNA, 120 bp, Artificial Sequence
  ENSG00000112365_10 (sequence is synthesized)
acaggcgagcggccgtacacctgcaccgtgtgcagcaaggctctgaccaccaagcactcactgctggagcacatgagcctgcactcaggacagaagtcttttacctgtgatcaatgcgga

SEQ ID NO: 190549 - DNA, 120 bp, Artificial Sequence
  ENSG00000112365_11 (sequence is synthesized)
aaatatttcagccagaacagacagctaaagagccattaccgagttcatacaggccactcattaccggaatgcaaagactgccatcgcaaattcatggatgtgtctcagctaaagaaacat

SEQ ID NO: 190550 - DNA, 120 bp, Artificial Sequence
  ENSG00000112365_12 (sequence is synthesized)
ctgcgaacacacacaggtgagaagccatttacttgtgaaatctgtggcaaatctttcacagcaaagagttctcttcagacccacatcagaatccatcgaggagaaaagccatactcctgt

SEQ ID NO: 190551 - DNA, 120 bp, Artificial Sequence
  ENSG00000112365_13 (sequence is synthesized)
ggcatttgtggcaaatccttctctgactccagtgccaaaaggagacactgcattctacacactggcaagaagcctttctcctgccctgagtgtaacttacagtttgctcgcttagacaac

SEQ ID NO: 190552 - DNA, 120 bp, Artificial Sequence
  ENSG00000112365_14 (sequence is synthesized)
ttgaaggctcacttgaaaattcatagcaaggagaagcatgcttcagatgccagcagcatttctggcagtagtaatacagaagaggtcaggaatattcttcagctacagccatatcaactc

SEQ ID NO: 190553 - DNA, 120 bp, Artificial Sequence
  ENSG00000112365_15 (sequence is synthesized)
tctacctcgggagagcaggaaattcagcttctcgtaaccgattctgtacataacatcaatttcatgcccggtcctagccagggaatcagcattgtgactgcagagagttcccaaaacatg

SEQ ID NO: 190554 - DNA, 120 bp, Artificial Sequence
  ENSG00000112365_16 (sequence is synthesized)
actgcagaccaggctgctaatcttaccctgctcacgcagcagccagagcaactgcagaatttaattctttcagctcaacaggagcaaacagaacacattcagagcctcaatatgattgaa

SEQ ID NO: 190555 - DNA, 120 bp, Artificial Sequence
  ENSG00000112365_17 (sequence is synthesized)
agccagatggggccctcacaaacagagccagtgcacgtgatcactctgtccaaggaaacactggaacatcttcatgcccatcaagagcaaacagaggagctccatttagctacaagtact

SEQ ID NO: 190556 - DNA, 120 bp, Artificial Sequence
  ENSG00000112365_18 (sequence is synthesized)
tcagatccagctcagcacctgcagctgacacaggagcctggtccgccaccacccactcaccacgtgccccagccaacgccacttggccaggagcagagctgacctgtaaacacgtttgac

SEQ ID NO: 190557 - DNA, 120 bp, Artificial Sequence
  ENSG00000112365_19 (sequence is synthesized)
tgcttgattgggctcttcttataagccagctctgactggattttgaacgcttgaaatcaggctctccacaccattgacttgcagatgcttctgtgagagctgtgatggctaactgatgtt

SEQ ID NO: 190558 - DNA, 120 bp, Artificial Sequence
  ENSG00000112365_20 (sequence is synthesized)
tataatgccctccatccaggtagcaagatgtgtgtatgtcttgtctaaggtactgatttgtattgagcatttcaatattattgaatggttttcattttaatctgcaatgtctcataaaga

SEQ ID NO: 190559 - DNA, 120 bp, Artificial Sequence
  ENSG00000112365_21 (sequence is synthesized)
ctcgggtagtttttctttgggggcattgatctcagtttttctgtaaggtttaaatgttcacagccataggttatggtcttgccaacctccccagttatgtttttttgttttctaggacaa

SEQ ID NO: 190560 - DNA, 120 bp, Artificial Sequence
  ENSG00000112365_22 (sequence is synthesized)
gggaatttgcccttttaataatttccagtcccctaagacaaagtaaccctcaacgttttatctttatgcagtacagtgggcttattgtgttaacacttcagaaagattcaaactcataaa

SEQ ID NO: 190561 - DNA, 120 bp, Artificial Sequence
  ENSG00000112365_23 (sequence is synthesized)
ctcagtattttaactcaaaattcatgtaacaagatagccaaaagcataggatttcttaaaattctgaattcgtcttttctgagaaacataaatttacatatttttcaacagaaggctatc

SEQ ID NO: 190562 - DNA, 120 bp, Artificial Sequence
  ENSG00000112365_24 (sequence is synthesized)
aaaattttaattaagtttaaaatacaaaattggatcaagacattcaccctaaattctgaatttttgtcagaaaagagatttgattttcatgaaggtaaagctttcttcactattctggaa

SEQ ID NO: 190563 - DNA, 120 bp, Artificial Sequence
  ENSG00000112365_25 (sequence is synthesized)
cataaaactttattcagtgtaatttaagtcttatatatactctactgaattctaactgatctcctgaaaatgttgatctacgtgttgtgtctgataactttctggagatggaagcttata

SEQ ID NO: 190564 - DNA, 120 bp, Artificial Sequence
  ENSG00000112365_26 (sequence is synthesized)
attcatttttattgcagactagttaaatcccacaaagtgaatatcttctcctaatctttccttttttagagacagggtctcactgtatcacccaggccagagtgtagtggcacaatcatt

SEQ ID NO: 190565 - DNA, 90 bp, Artificial Sequence
  ENSG00000112365_27 (sequence is synthesized)
ccaggatgtaccaccacacccagctaatcttcatctaatcttaaaactttgagcctcagagactttgtagccagcatgtgtctgtaattg

SEQ ID NO: 190566 - DNA, 120 bp, Artificial Sequence
  ENSG00000112365_28 (sequence is synthesized)
gagcctcagagactttgtagccagcatgtgtctgtaattgtatgatttttaaatcatcatcaaaagattaaattatgtttgggttaggttttcaagctaagcttattgaattcttttacc

SEQ ID NO: 190567 - DNA, 120 bp, Artificial Sequence
  ENSG00000112365_29 (sequence is synthesized)
actttcatgtaagctggtaggggatttttgagaaaagaaggtgggcactagtatatctaaattaacaatgctgatggggagtagggggtaatctactctaaaattaatagagcctttcca

SEQ ID NO: 190568 - DNA, 120 bp, Artificial Sequence
  ENSG00000112365_30 (sequence is synthesized)
tcaattgttttgttttagacatccttgatttctccctaaatcaaataagttatttggaggttagagtaatagagaattcttcaggtttgagagaagataaaaacattttggttgcatatt

SEQ ID NO: 190569 - DNA, 120 bp, Artificial Sequence
  ENSG00000112365_31 (sequence is synthesized)
tgctaagctatattttattatatgtaattcacaaaacttccaaaatgatatatatcttatatgtatcaaccaaactaatgttaaatcaggcctgactagagcaaagataacaatttttta

SEQ ID NO: 190570 - DNA, 120 bp, Artificial Sequence
  ENSG00000112365_32 (sequence is synthesized)
caaacactgttaagccctaagtattatttcaggttctcgtttaaactgtttaattttattcttaaaacacaaagtttttaccaacttttcaaagcccaccaatccacattttctccagga

SEQ ID NO: 190571 - DNA, 120 bp, Artificial Sequence
  ENSG00000112365_33 (sequence is synthesized)
aattaaatatttaagtaagtgagtgtttactcactctggatagctaggtgattattcagaaaatacggttacatagctatttataagtcaagtttcactggctctataacagtctacctc

SEQ ID NO: 190572 - DNA, 120 bp, Artificial Sequence
  ENSG00000112365_34 (sequence is synthesized)
tacactaagagaactataacatgaacaacataggtcactttaaatgttctagtagcaacttttaaaaacataaaaagaagcaggtgaaaatgttaataaaagtttatttaatccaacatt

SEQ ID NO: 190573 - DNA, 120 bp, Artificial Sequence
  ENSG00000112365_35 (sequence is synthesized)
tgccaaatatttcaacatataaaaatatattagtgagacattttacattctctttttcatactaagctttcgaaatctggtgtgtattttacactttctgcacatctccatttggatgct

SEQ ID NO: 190574 - DNA, 120 bp, Artificial Sequence
  ENSG00000112365_36 (sequence is synthesized)
aatgttcattggacatacttgatctgtatttagatttcatacaacttacagttgaaaacagattctcatatcaagtagctaagacaaaagtttttttcaagaattgaaataagtatcagt

SEQ ID NO: 190575 - DNA, 120 bp, Artificial Sequence
  ENSG00000112365_37 (sequence is synthesized)
ttaaaaatttatattaaatttattaaaattaaaatccagttccttgttgcatgggacacagtgcaaatgcttgataagcacatgtggctagtggctgctatattggacagcatgggccac

SEQ ID NO: 190576 - DNA, 120 bp, Artificial Sequence
  ENSG00000112365_38 (sequence is synthesized)
ctgtttctaacttgagcatcagtcctagctatgcctgaattatttgaccagctgtcaaagagaaacaaggaaatgatagctttgttaatctagcctctttctttgtcccacatatacatt

SEQ ID NO: 190577 - DNA, 73 bp, Artificial Sequence
  ENSG00000112365_39 (sequence is synthesized)
tttgttaatctagcctctttctttgtcccacatatacattctacccctttgaataaaaaagttcaatgacgcc

SEQ ID NO: 190578 - DNA, 81 bp, Artificial Sequence
  ENSG00000112365_40 (sequence is synthesized)
ttaaatgacttgagtacccaaaagaaatgtcgtgaacatgaaagtacttctcatgtgtccttgagaaatgatgttgctagt

SEQ ID NO: 190579 - DNA, 120 bp, Artificial Sequence
  ENSG00000112365_41 (sequence is synthesized)
aagtacttctcatgtgtccttgagaaatgatgttgctagtgcagtgtttcacaattcattttctactaaatgtgtaccattttttaaattgttttaacagaaatatagagtgtgtttctt

SEQ ID NO: 190580 - DNA, 120 bp, Artificial Sequence
  ENSG00000112365_42 (sequence is synthesized)
aggaaatagaatgttatgctttggggctcctgaaacacctcgttttgaaggtgaatctttggttttctcccagaagagggtctgccttgggatgattggagctcttaccatcaaaatcag

SEQ ID NO: 190581 - DNA, 120 bp, Artificial Sequence
  ENSG00000112365_43 (sequence is synthesized)
ttattcaagtgcttgcccagtgcttcttgaaactcacctctactctgtattttctacagttggttcttgtgttataaatgttgtgagcaacagattaaatgatgctgaggaatgaaaaaa

SEQ ID NO: 190582 - DNA, 120 bp, Artificial Sequence
  ENSG00000112367_0 (sequence is synthesized)
agtgcctaatgggtgttgttcctggctggacttgatgtccagggcctgaggggttttctcgccgagtctcctggggcggtccggaggctcgtgccctgttgtggggcccccatttgccgc

SEQ ID NO: 190583 - DNA, 120 bp, Artificial Sequence
  ENSG00000112367_1 (sequence is synthesized)
cgccatgcccacggccgccgcccccatcatcagctcggtccagaagctggttctgtatgagactagagctagatactttctagttgggagcaataatgcagaaacgaaatatcgtgtctt

SEQ ID NO: 190584 - DNA, 120 bp, Artificial Sequence
  ENSG00000112367_2 (sequence is synthesized)
gaagattgatagaacagaaccaaaagatttggtcataattgatgacaggcatgtctatactcaacaagaagtaagggaacttcttggccgcttggatcttggaaatagaacaaagatggg

SEQ ID NO: 190585 - DNA, 120 bp, Artificial Sequence
  ENSG00000112367_3 (sequence is synthesized)
acagaaaggatcctcgggcttatttcgagcggtttcagcttttggtgttgtgggttttgtcaggttcttagaaggctattatattgtgttaataactaaaaggaggaagatggcggatat

SEQ ID NO: 190586 - DNA, 120 bp, Artificial Sequence
  ENSG00000112367_4 (sequence is synthesized)
tggaggtcatgcaatctataaggtcgaagatacaaatatgatctatatacccaatgattctgtacgggttactcatcctgatgaagctaggtatctacgaatatttcaaaatgtggacct

SEQ ID NO: 190587 - DNA, 120 bp, Artificial Sequence
  ENSG00000112367_5 (sequence is synthesized)
atctagcaatttttactttagttacagctatgatttgtcccactcacttcaatataatctcactgtcttgcgaatgcccctggagatgttaaagtcagaaatgacccagaatcgccaaga

SEQ ID NO: 190588 - DNA, 120 bp, Artificial Sequence
  ENSG00000112367_6 (sequence is synthesized)
gagctttgacatctttgaagatgaaggattaattacacaaggtggaagcggggtatttgggatctgtagtgagccttatatgaaatatgtatggaatggtgaacttctggatataattaa

SEQ ID NO: 190589 - DNA, 120 bp, Artificial Sequence
  ENSG00000112367_7 (sequence is synthesized)
aagtactgtgcatcgtgactggcttttgtatattattcatgggttctgtgggcagtcaaagctgttgatctatggacgaccagtgtatgtcactctaatagctagaagatccagtaaatt

SEQ ID NO: 190590 - DNA, 120 bp, Artificial Sequence
  ENSG00000112367_8 (sequence is synthesized)
tgctggcacccgttttcttaaaagaggtgcaaactgtgagggtgatgttgcaaatgaagtggagactgaacaaatactctgcgatgcttctgtgatgtctttcactgcaggaagttattc

SEQ ID NO: 190591 - DNA, 120 bp, Artificial Sequence
  ENSG00000112367_9 (sequence is synthesized)
ttcatatgtacaagttagaggatctgtgcccttatactggtctcaggacatttcaactatgatgcctaaaccacctattacattggatcaggcagatccatttgcacatgtggctgccct

SEQ ID NO: 190592 - DNA, 120 bp, Artificial Sequence
  ENSG00000112367_10 (sequence is synthesized)
tcactttgaccagatgttccagaggtttggctctcccatcatcatcttgaatttagtgaaggaacgagagaaaagaaagcatgaaagaattctgagtgaagaacttgttgctgctgtgac

SEQ ID NO: 190593 - DNA, 120 bp, Artificial Sequence
  ENSG00000112367_11 (sequence is synthesized)
ctatctcaaccaatttttgcctcctgagcacactattgtttatattccctgggacatggccaagtataccaaaagcaagctgtgtaatgttcttgatcgactaaatgtgattgcagaaag

SEQ ID NO: 190594 - DNA, 120 bp, Artificial Sequence
  ENSG00000112367_12 (sequence is synthesized)
aaacaggtttctttgtaaaccgccctgattcttactgtagcattttgcggccagatgaaaagtggaatgaactaggaggatgtgtgattcccactggtcgcctgcagactggcatccttc

SEQ ID NO: 190595 - DNA, 120 bp, Artificial Sequence
  ENSG00000112367_13 (sequence is synthesized)
gaaccaactgtgtggactgtttagatcgcaccaacacagcacagtttatggtgggaaaatgtgctctggcctatcagctgtattcactgggactgattgacaaacctaatctacagtttg

SEQ ID NO: 190596 - DNA, 120 bp, Artificial Sequence
  ENSG00000112367_14 (sequence is synthesized)
atacagatgcagttaggttatttgaggaactctatgaagatcatggtgataccctatcccttcagtatggtggttctcaacttgttcatcgtgtgaaaacctacagaaagatagcaccat

SEQ ID NO: 190597 - DNA, 120 bp, Artificial Sequence
  ENSG00000112367_15 (sequence is synthesized)
ggacccagcactccaaagacatcatgcaaaccctgtctagatattacagcaatgctttttcagatgccgatagacaagattccattaatctcttcctgggagttttccatcccactgaag

SEQ ID NO: 190598 - DNA, 120 bp, Artificial Sequence
  ENSG00000112367_16 (sequence is synthesized)
ggaaacctcatctctgggagctcccaacagatttttatttgcatcacaaaaataccatgagacttttgccaacaagaagaagttatacttactggtggacaccagaggtgataaagcatt

SEQ ID NO: 190599 - DNA, 120 bp, Artificial Sequence
  ENSG00000112367_17 (sequence is synthesized)
taccattgccctatgatgaagttatctgtgctgtgaacttaaagaagttgatagtgaagaaattccacaaatatgaagaagagattgatatccacaatgagttctttcggccatatgagt

SEQ ID NO: 190600 - DNA, 120 bp, Artificial Sequence
  ENSG00000112367_18 (sequence is synthesized)
tgagcagctttgatgataccttttgcttggctatgacaagctcagcacgtgactttatgcctaagaccgttggaattgatccaagtccatttactgtgcgtaaaccagatgaaactggaa

SEQ ID NO: 190601 - DNA, 120 bp, Artificial Sequence
  ENSG00000112367_19 (sequence is synthesized)
aatcagtattgggaaacaaaagcaatagagaagaagctgtattacagcggaaaacggcagccagcgccccgccgccccccagcgaggaggctgtgtccagcagctctgaggatgactctg

SEQ ID NO: 190602 - DNA, 120 bp, Artificial Sequence
  ENSG00000112367_20 (sequence is synthesized)
ggactgatcgggaagaagagggctctgtgtctcagcgctccactcccgtgaagatgactgatgcaggagacagtgccaaagtgaccgagaatgtggtccaacccatgaaggagctatatg

SEQ ID NO: 190603 - DNA, 120 bp, Artificial Sequence
  ENSG00000112367_21 (sequence is synthesized)
gaattaacctctcagatggcctctcagaagaagatttctccatttattcaagatttgttcagctggggcagagtcaacataaacaagacaagaatagccagcagccctgttctaggtgct

SEQ ID NO: 190604 - DNA, 120 bp, Artificial Sequence
  ENSG00000112367_22 (sequence is synthesized)
cagatggagttataaaactaacacccatctcggctttctcgcaagataacatctatgaagttcagcccccaagagtagacagaaaatctacagagatcttccaagcccacatccaggcca

SEQ ID NO: 190605 - DNA, 120 bp, Artificial Sequence
  ENSG00000112367_23 (sequence is synthesized)
gccaaggtatcatgcagcccctaggaaaagaggactcctccatgtaccgagagtacatcaggaaccgctacctgtgaaaagagcgcaggtccacctggtggacacgtctgattagcttag

SEQ ID NO: 190606 - DNA, 120 bp, Artificial Sequence
  ENSG00000112367_24 (sequence is synthesized)
aacctgtcttgtctcatcttcaaaaggtaacttattaaaagtcctttgcgtctgaagcctttctccttttctgtcacttgcaaattccaaattatagctaataaagatgactagataatt

SEQ ID NO: 190607 - DNA, 120 bp, Artificial Sequence
  ENSG00000112367_25 (sequence is synthesized)
ttcaactatgatgcctaaaccacctattacatgtgtgtggagccatgtttttaataataactcctgtcctcacatttagagataatgaactgttgtcacagaaatctcataaatgcttag

SEQ ID NO: 190608 - DNA, 120 bp, Artificial Sequence
  ENSG00000112367_26 (sequence is synthesized)
gttttcaggaggttttagtcctggaaggtagataatttagaagaggaatttccgttattcttatgtaataaatttatgtttaattttgactgttaaataaattatttttattttgcttca

SEQ ID NO: 190609 - DNA, 120 bp, Artificial Sequence
  ENSG00000112367_27 (sequence is synthesized)
gagcaaaaaggaatttaaagaacctcctctaaataactgcctgctcccattggacttcctgaggccctcctggctccttagagcttgttgaactcagctttgcattgtattttctatgca

SEQ ID NO: 190610 - DNA, 120 bp, Artificial Sequence
  ENSG00000112367_28 (sequence is synthesized)
tctatctcatctcctttctaactgtgtaagtgttggaggcaggagcttaccctcggtcagggctgtatcccccacagagcttatcacagtgctgtctgtgaacacagttaatattatgga

SEQ ID NO: 190611 - DNA, 120 bp, Artificial Sequence
  ENSG00000112378_0 (sequence is synthesized)
actctctgctgtcgcccgtcccgcgcgctcctccgacccgctccgctccgctccgctcggccccgcgccgcccgtcaacatgatccgctgcggcctggcctgcgagcgctgccgctggat

SEQ ID NO: 190612 - DNA, 120 bp, Artificial Sequence
  ENSG00000112378_1 (sequence is synthesized)
cctgcccctgctcctactcagcgccatcgccttcgacatcatcgcgctggccggccgcggctggttgcagtctagcgaccacggccagacgtcctcgctgtggtggaaatgctcccaaga

SEQ ID NO: 190613 - DNA, 120 bp, Artificial Sequence
  ENSG00000112378_2 (sequence is synthesized)
gggcggcggcagcgggtcctacgaggagggctgtcagagcctcatggagtacgcgtggggtagagcagcggctgccatgctcttctgtggcttcatcatcctggtgatctgtttcatcct

SEQ ID NO: 190614 - DNA, 120 bp, Artificial Sequence
  ENSG00000112378_3 (sequence is synthesized)
ctccttcttcgccctctgtggaccccagatgcttgtcttcctgagagtgattggaggtctccttgccttggctgctgtgttccagatcatctccctggtaatttaccccgtgaagtacac

SEQ ID NO: 190615 - DNA, 120 bp, Artificial Sequence
  ENSG00000112378_4 (sequence is synthesized)
ccagaccttcacccttcatgccaaccctgctgtcacttacatctataactgggcctacggctttgggtgggcagccacgattatcctgattggctgtgccttcttcttctgctgcctccc

SEQ ID NO: 190616 - DNA, 120 bp, Artificial Sequence
  ENSG00000112378_5 (sequence is synthesized)
caactacgaagatgaccttctgggcaatgccaagcccaggtacttctacacatctgcctaacttgggaatgaatgtgggagaaaatcgctgctgctgagatggactccagaagaagaaac

SEQ ID NO: 190617 - DNA, 120 bp, Artificial Sequence
  ENSG00000112378_6 (sequence is synthesized)
tgtttctccaggcgactttgaacccattttttggcagtgttcatattattaaactagtcaaaaatgctaaaataatttgggagaaaatattttttaagtagtgttatagtttcatgttta

SEQ ID NO: 190618 - DNA, 120 bp, Artificial Sequence
  ENSG00000112378_7 (sequence is synthesized)
tcttttattatgttttgtgaagttgtgtcttttcactaattacctatactatgccaatatttccttatatctatccataacatttatactacatttgtaagagaatatgcacgtgaaact

SEQ ID NO: 190619 - DNA, 120 bp, Artificial Sequence
  ENSG00000112378_8 (sequence is synthesized)
taacactttataaggtaaaaatgaggtttccaagatttaataatctgatcaagttcttgttatttccaaatagaatggactcggtctgttaagggctaaggagaagaggaagataaggtt

SEQ ID NO: 190620 - DNA, 120 bp, Artificial Sequence
  ENSG00000112378_9 (sequence is synthesized)
aaaagttgttaatgaccaaacattctaaaagaaatgcaaaaaaaaagtttattttcaagccttcgaactatttaaggaaagcaaaatcatttcctaaatgcatatcatttgtgagaattt

SEQ ID NO: 190621 - DNA, 120 bp, Artificial Sequence
  ENSG00000112378_10 (sequence is synthesized)
ctcattaatatcctgaatcattcattttagctaaggcttcatgttgactcgatatgtcatctaggaaagtactatttcatggtccaaacctgttgccatagttggtaaggctttccttta

SEQ ID NO: 190622 - DNA, 120 bp, Artificial Sequence
  ENSG00000112378_11 (sequence is synthesized)
agtgtgaaatatttagatgaaattttctcttttaaagttctttatagggttagggtgtgggaaaatgctatattaataaatctgtagtgttttgtgtttatatgttcagaaccagagtag

SEQ ID NO: 190623 - DNA, 120 bp, Artificial Sequence
  ENSG00000112378_12 (sequence is synthesized)
actggattgaaagatggactgggtctaatttatcatgactgatagatctggttaagttgtgtagtaaagcattaggagggtcattcttgtcacaaaagtgccactaaaacagcctcagga

SEQ ID NO: 190624 - DNA, 120 bp, Artificial Sequence
  ENSG00000112378_13 (sequence is synthesized)
gaataaatgacttgcttttctaaatctcaggtttatctgggctctatcatatagacaggcttctgatagtttgcaactgtaagcagaaacctacatatagttaaaatcctggtctttctt

SEQ ID NO: 190625 - DNA, 120 bp, Artificial Sequence
  ENSG00000112378_14 (sequence is synthesized)
ggtaaacagattttaaatgtctgatataaaacatgccacaggagaattcggggatttgagtttctctgaatagcatatatatgatgcatcggataggtcattatgattttttaccatttc

SEQ ID NO: 190626 - DNA, 120 bp, Artificial Sequence
  ENSG00000112378_15 (sequence is synthesized)
gacttacataatgaaaaccaattcattttaaatatcagattattattttgtaagttgtggaaaaagctaattgtagttttcattatgaagttttcccaataaaccaggtattctaaactt

SEQ ID NO: 190627 - DNA, 120 bp, Artificial Sequence
  ENSG00000112378_16 (sequence is synthesized)
gtttccagtttgtagtttttccatttttcaaatctggggaaaggaattaaaaaaaaaatgggtaataagaacatgggatataatgaaaagtggtttttgtttgtttttttgtttgaagtt

SEQ ID NO: 190628 - DNA, 120 bp, Artificial Sequence
  ENSG00000112378_17 (sequence is synthesized)
caatttctctgcagtgctatcaaccagaggaaaatggactaagagatttctggcaggttcagacacccgggggacatgtgtgcagtgtagctgaagcctcctccttgtgctggggtcccc

SEQ ID NO: 190629 - DNA, 120 bp, Artificial Sequence
  ENSG00000112378_18 (sequence is synthesized)
ttccattcaggtggtggggtagcagtctctctattttccccttgccctccttcccattttatcatttgttattttttttcccaccataagtcatatgttacttccactatggtgtatgtc

SEQ ID NO: 190630 - DNA, 120 bp, Artificial Sequence
  ENSG00000112378_19 (sequence is synthesized)
attgtgaggatgggtgcagagaggctgggtgggagaacggaaatatatctccctagggctactgttggccagctagtccttggcagtgaatttttctatgcttttcaaaatgcgaggtga

SEQ ID NO: 190631 - DNA, 120 bp, Artificial Sequence
  ENSG00000112378_20 (sequence is synthesized)
atgtttctcatagagaaatgtaatctgggtgattataccaaaattgaaaagaaaaacccacacaactatgccgtggctggtggagaatttgaagtggtcattaaaaatgttaaaaatccc

SEQ ID NO: 190632 - DNA, 120 bp, Artificial Sequence
  ENSG00000112378_21 (sequence is synthesized)
atcttttaaagtgataccacagctcattcaagaagatactggatatctagagattaagaaacgtggtctcctgttaaacatgaaaatgactccgtttataagcttctctaccacatgcac

SEQ ID NO: 190633 - DNA, 120 bp, Artificial Sequence
  ENSG00000112378_22 (sequence is synthesized)
ttgtctttgcatgatttcccatccagccttcttcccctcctcaatcacacaataccttaacggcgcacatttaggaaaaatgcaacctcctgggaccaacgagcctgatataatagaacc

SEQ ID NO: 190634 - DNA, 120 bp, Artificial Sequence
  ENSG00000112378_23 (sequence is synthesized)
atgtcaacctaaagtatttatgacaaagataaactcttattttgcagaaatggtctgcttccttcagccttgttctagtatagagatctgccattccttgttgatccagattcaccaaga

SEQ ID NO: 190635 - DNA, 120 bp, Artificial Sequence
  ENSG00000112378_24 (sequence is synthesized)
cagatacctttatgtcataacagaagggaagttccagaggattctggagagtaatgaagaattgggctgagaaaccacctgaaggctaacagtgcattgcatgagatttcccacagtaaa

SEQ ID NO: 190636 - DNA, 120 bp, Artificial Sequence
  ENSG00000112378_25 (sequence is synthesized)
gctgaggtgctttttggttcagtaattaaatattgagttcccaccctttaaataagcagttctaggttcctaagcaattatttcactctgtaagtagccagacatgctaagtggcactta

SEQ ID NO: 190637 - DNA, 120 bp, Artificial Sequence
  ENSG00000112378_26 (sequence is synthesized)
ctgctgattgtaacaaagaagtaatatatcaaggtctttccatgttcacacaaggtagcttgtgtgtaataacttagcttcaaaaccatagactgcagaactcacaagttcaacagcctt

SEQ ID NO: 190638 - DNA, 120 bp, Artificial Sequence
  ENSG00000112378_27 (sequence is synthesized)
tccttttttaaggaaatgaaaacaatggaaaatatagtcatcataacttaattcggtttattttttttttctgtaaactccccctgaaagacattcctattaatacagtaaatgtgaaca

SEQ ID NO: 190639 - DNA, 120 bp, Artificial Sequence
  ENSG00000112378_28 (sequence is synthesized)
ctgacttgtttttataagcacatctgaaagggcatatttgagtctcatcccaactttggtccttgctatctgtgcaggcttgggcaggtcatctccctgctggtctcaatatcctcacct

SEQ ID NO: 190640 - DNA, 120 bp, Artificial Sequence
  ENSG00000112378_29 (sequence is synthesized)
gtaaaatgattgtaaatgatccccctaccttcaagattctctgattgatagaattttttctttaattaaaaaattttaaatattccttgagttggaagcactgatcaataagtggattgc

SEQ ID NO: 190641 - DNA, 120 bp, Artificial Sequence
  ENSG00000112378_30 (sequence is synthesized)
ttagggaggttggaacgaatagattcagtcccaacttcctcttttaaattccctcttcctcactcttcctgcaacacttatttttacagttgagttttaaaaataagtaatatataaaat

SEQ ID NO: 190642 - DNA, 120 bp, Artificial Sequence
  ENSG00000112378_31 (sequence is synthesized)
aatttctgtagtgtggtttcagatttaaaaattcctgcagacaggctgggcttgcaaccccatcagtcgatggtcagagccctttgctttttgagaccatttttaggtgagcttggcttg

SEQ ID NO: 190643 - DNA, 120 bp, Artificial Sequence
  ENSG00000112378_32 (sequence is synthesized)
cctggatacagtgtgcagtgcattcttcctgaattttgcaattctggtatctgggtgtattttctaggtgtgtcagggtgagtgtaatccacctagggtgtggaaaaagccaagaaaggg

SEQ ID NO: 190644 - DNA, 120 bp, Artificial Sequence
  ENSG00000112378_33 (sequence is synthesized)
aaattaaaagaggttcctatccagtcatgttaatgatcttccacttgtactatcctgtgcttcgttgttaacctcgaaaacatactttgttggctgcaaaaataaacaaagggaaactca

SEQ ID NO: 190645 - DNA, 120 bp, Artificial Sequence
  ENSG00000112379_0 (sequence is synthesized)
gcgcggcggccgcctaggcgcccagggccaggcagcggcggcttccccggcccggctcgcccgcgcttctctccctgtgggcggcggcccggcgcctggaaggtcaagatggaagaaatc

SEQ ID NO: 190646 - DNA, 120 bp, Artificial Sequence
  ENSG00000112379_1 (sequence is synthesized)
gcggcggcccggcgcctggaaggtcaagatggaagaaatcctgaggaagctgcagaaggaggcgtccgggagcaagtacaaagccatcaaggagagctgcacctgggccctggaaactct

SEQ ID NO: 190647 - DNA, 120 bp, Artificial Sequence
  ENSG00000112379_2 (sequence is synthesized)
aggtggtctggataccattgtcaagatccctccacatgtactgagggagaaatgcctgctgcctctccagttggctttggaatccaagaatgtgaagctggcccaacatgctttggcagg

SEQ ID NO: 190648 - DNA, 120 bp, Artificial Sequence
  ENSG00000112379_3 (sequence is synthesized)
gatgcagaagcttctgtcggaagagaggtttgtatccatggaaacagattctgatgagaagcagctgctcaatcagatactgaatgccgtgaaagtgacgccttcgctcaacgaggacct

SEQ ID NO: 190649 - DNA, 120 bp, Artificial Sequence
  ENSG00000112379_4 (sequence is synthesized)
gcaggtggaagtgatgaaggttttactatgcatcacctacacgccaacatttgatctgaatgggagtgccgtgctgaagatcgcggaggtgtgcattgagacgtacataagcagctgtca

SEQ ID NO: 190650 - DNA, 120 bp, Artificial Sequence
  ENSG00000112379_5 (sequence is synthesized)
ccagcgtagcataaacactgctgtgcgggcaactctcagtcaaatgctgagtgacttgactttacagttacgacagaggcaggagaatacgataattgaaaacccagatgtcccacagga

SEQ ID NO: 190651 - DNA, 120 bp, Artificial Sequence
  ENSG00000112379_6 (sequence is synthesized)
tttcgggaatcaagggtcaacagtagagtccctctgtgatgatgttgtctctgtactcaccgtcctgtgtgagaagctgcaagccgccataaatgacagccagcagctgcagcttctcta

SEQ ID NO: 190652 - DNA, 120 bp, Artificial Sequence
  ENSG00000112379_7 (sequence is synthesized)
cctggagtgcatcctgtctgtgctcagcagctcctcctcctccatgcacctgcacaggcgcttcacggacctgatctggaaaaacctctgccctgctctcatcgtgatcttggggaatcc

SEQ ID NO: 190653 - DNA, 120 bp, Artificial Sequence
  ENSG00000112379_8 (sequence is synthesized)
aattcatgacaaaaccatcacctctgctcacaccagcagcaccagtaccagcctggagtcggactctgcgtctccgggagtgtctgaccacggccgaggatcaggctgctcctgcactgc

SEQ ID NO: 190654 - DNA, 120 bp, Artificial Sequence
  ENSG00000112379_9 (sequence is synthesized)
gccggccctgagcggacctgtggctcggactatctattacatcgcagccgagctggtccggctggtggggtctgtggactccatgaagcccgtgctccagtccctctaccaccgagtgct

SEQ ID NO: 190655 - DNA, 120 bp, Artificial Sequence
  ENSG00000112379_10 (sequence is synthesized)
gctctaccccccaccccagcaccgggtggaagccatcaaaataatgaaagagatacttgggagcccacagcgtctctgtgacttggcaggacccagctccactgaatcagagtccagaaa

SEQ ID NO: 190656 - DNA, 120 bp, Artificial Sequence
  ENSG00000112379_11 (sequence is synthesized)
aagatcaatttcaaaaagaaagtctcatctggatctcctcaaactcatcatggatggcatgaccgaagcatgcatcaagggtggcatcgaagcttgctatgcagccgtgtcctgtgtctg

SEQ ID NO: 190657 - DNA, 120 bp, Artificial Sequence
  ENSG00000112379_12 (sequence is synthesized)
caccttgctgggtgccctggatgagctcagccaggggaagggcttgagcgaaggtcaggtgcaactgctgcttctgcgccttgaggagctgaaggatggggctgagtggagccgagattc

SEQ ID NO: 190658 - DNA, 120 bp, Artificial Sequence
  ENSG00000112379_13 (sequence is synthesized)
catggagatcaatgaggctgacttccgctggcagcggcgagtgctgtcctcagaacacacgccgtgggagtcagggaacgagaggagccttgacatcagcatcagtgtcaccacagacac

SEQ ID NO: 190659 - DNA, 120 bp, Artificial Sequence
  ENSG00000112379_14 (sequence is synthesized)
aggccagaccactctcgagggagagttgggtcagactacacccgaggaccattcgggaaaccacaagaacagtctcaagtcgccagccatcccagagggtaaggagacgctgagcaaagt

SEQ ID NO: 190660 - DNA, 120 bp, Artificial Sequence
  ENSG00000112379_15 (sequence is synthesized)
attggaaacagaggcggtagaccagccagatgtcgtgcagagaagccacacggtcccttaccctgacataactaacttcctgtcagtagactgcaggacaaggtcctatggatctaggta

SEQ ID NO: 190661 - DNA, 120 bp, Artificial Sequence
  ENSG00000112379_16 (sequence is synthesized)
tagtgagagcaattttagcgttgatgaccaagacctttctaggacagagtttgattcctgtgatcagtactctatggcagcagaaaaggactcgggcaggtccgacgtgtcagacattgg

SEQ ID NO: 190662 - DNA, 120 bp, Artificial Sequence
  ENSG00000112379_17 (sequence is synthesized)
gtcggacaactgttcactagccgatgaagagcagacaccccgggactgcctaggccaccggtccctgcgaactgccgccctgtctctaaaactgctgaagaaccaggaggcggatcagca

SEQ ID NO: 190663 - DNA, 120 bp, Artificial Sequence
  ENSG00000112379_18 (sequence is synthesized)
cagcgccaggctgttcatacagtccctggaaggcctcctccctcggctcctgtctctctccaatgtagaggaggtggacaccgctctgcagaactttgcctctactttctgctcaggcat

SEQ ID NO: 190664 - DNA, 120 bp, Artificial Sequence
  ENSG00000112379_19 (sequence is synthesized)
gatgcactctcctggctttgacgggaatagcagcctcagcttccagatgctgatgaacgcagacagcctctacacagctgcacactgcgccctgctcctcaacctgaagctctcccacgg

SEQ ID NO: 190665 - DNA, 120 bp, Artificial Sequence
  ENSG00000112379_20 (sequence is synthesized)
tgactactacaggaagcggccgaccctggcgccaggcgtgatgaaggacttcatgaagcaggtgcagaccagcggcgtgctgatggtcttctctcaggcctggattgaggagctctacca

SEQ ID NO: 190666 - DNA, 120 bp, Artificial Sequence
  ENSG00000112379_21 (sequence is synthesized)
tcaggtgctcgacaggaacatgcttggagaggctggctattggggcagcccagaagataacagccttcccctcatcacaatgctgaccgatattgacggcttagagagcagtgccattgg

SEQ ID NO: 190667 - DNA, 120 bp, Artificial Sequence
  ENSG00000112379_22 (sequence is synthesized)
tggccagctgatggcctcggctgctacagagtctcctttcgcccagagcaggagaattgatgactccacagtggcaggcgtggcatttgctcgctatattctggtgggctgctggaagaa

SEQ ID NO: 190668 - DNA, 120 bp, Artificial Sequence
  ENSG00000112379_23 (sequence is synthesized)
cttgatcgatactttatcaaccccactgactggtcgaatggcggggagctccaaagggctggccttcattctgggagctgaaggcatcaaagagcagaaccagaaggagcgggacgccat

SEQ ID NO: 190669 - DNA, 120 bp, Artificial Sequence
  ENSG00000112379_24 (sequence is synthesized)
ctgcatgagcctcgacgggctgcggaaagccgcacggctgagctgcgctctaggcgttgctgctaactgcgcctcagcccttgcccagatggcagctgcctcctgtgtccaagaagaaaa

SEQ ID NO: 190670 - DNA, 120 bp, Artificial Sequence
  ENSG00000112379_25 (sequence is synthesized)
agaagagagggaggcccaagaacccagtgatgccatcacacaagtgaaactaaaagtggagcagaaactggagcagattgggaaggtgcagggggtgtggctgcacactgcccacgtctt

SEQ ID NO: 190671 - DNA, 120 bp, Artificial Sequence
  ENSG00000112379_26 (sequence is synthesized)
gtgcatggaggccatcctcagcgtaggcctggagatgggaagccacaacccggactgctggccacacgtgttcagggtgtgtgaatacgtgggcaccctggagcacaaccacttcagcga

SEQ ID NO: 190672 - DNA, 120 bp, Artificial Sequence
  ENSG00000112379_27 (sequence is synthesized)
tggtgcctcgcagccccctctgaccatcagccagccccagaaggccactggaagcgctggcctccttggggaccccgagtgtgagggctcgccccccgagcacagcccggagcaggggcg

SEQ ID NO: 190673 - DNA, 120 bp, Artificial Sequence
  ENSG00000112379_28 (sequence is synthesized)
ctccctgagcacggcccctgtcgtccagcccctgtccatccaggacctcgtccgggaaggcagccggggtcgggcctccgacttccgcggcgggagcctcatgagcgggagcagcgcggc

SEQ ID NO: 190674 - DNA, 120 bp, Artificial Sequence
  ENSG00000112379_29 (sequence is synthesized)
caaggtggtgctcaccctctccacgcaagccgacaggctctttgaagatgctacggataagttgaacctcatggccttgggaggttttctttaccagctgaagaaagcatcgcagtctca

SEQ ID NO: 190675 - DNA, 120 bp, Artificial Sequence
  ENSG00000112379_30 (sequence is synthesized)
gcttttccattctgttacagatacagttgattactctctggcaatgccaggagaagttaaatccactcaagaccgaaaaagcgccctccacctgttccgcctggggaatgccatgctgag

SEQ ID NO: 190676 - DNA, 120 bp, Artificial Sequence
  ENSG00000112379_31 (sequence is synthesized)
gattgtgcggagcaaagcacggcccctgctccacgtgatgcgctgctggagccttgtggccccacacctggtggaggctgcttgccataaggaaagacatgtgtctcagaaggctgtttc

SEQ ID NO: 190677 - DNA, 120 bp, Artificial Sequence
  ENSG00000112379_32 (sequence is synthesized)
cttcatccatgacatactgacagaagtcctcactgactggaatgagccacctcattttcacttcaatgaagcactcttccgacctttcgagcgcattatgcagctggaattgtgtgatga

SEQ ID NO: 190678 - DNA, 120 bp, Artificial Sequence
  ENSG00000112379_33 (sequence is synthesized)
ggacgtccaagaccaggttgtcacatccattggtgagctggttgaagtgtgttccacgcagatccagtcgggatggagacccttgttcagtgccctggaaacagtgcatggcgggaacaa

SEQ ID NO: 190679 - DNA, 120 bp, Artificial Sequence
  ENSG00000112379_34 (sequence is synthesized)
gtcagagatgaaggagtacctggttggtgactactccatgggaaaaggccaagctccagtgtttgatgtatttgaagcttttctcaatactgacaacatccaggtctttgctaatgcagc

SEQ ID NO: 190680 - DNA, 120 bp, Artificial Sequence
  ENSG00000112379_35 (sequence is synthesized)
cactagctacatcatgtgccttatgaagtttgtcaaaggactgggggaggtggactgtaaagagattggagactgtgccccagcacccggagccccgtccacagacctgtgcctcccggc

SEQ ID NO: 190681 - DNA, 120 bp, Artificial Sequence
  ENSG00000112379_36 (sequence is synthesized)
cctggattacctcaggcgctgctctcagttattggccaaaatctacaaaatgcccttgaagccaatattccttagtgggagacttgccggcttgcctcgaagacttcaggaacagtcagc

SEQ ID NO: 190682 - DNA, 120 bp, Artificial Sequence
  ENSG00000112379_37 (sequence is synthesized)
cagcagtgaggatggaattgaatcagtcctgtctgattttgatgatgacaccggtctgatagaagtctggataatcctgctggagcagctgacagcggctgtgtccaattgtccacggca

SEQ ID NO: 190683 - DNA, 120 bp, Artificial Sequence
  ENSG00000112379_38 (sequence is synthesized)
gcaccaaccaccaactctggatttactctttgagctgttgagagatgtgacgaaaacaccaggaccagggtttggtatctatgcagtggttcacctcctccttcctgtgatgtccgtttg

SEQ ID NO: 190684 - DNA, 120 bp, Artificial Sequence
  ENSG00000112379_39 (sequence is synthesized)
gctccgccggagccataaagaccattcctactgggatatggcctctgccaatttcaagcacgctattggtctgtcctgtgagctggtggtggagcacattcaaagctttctacattcaga

SEQ ID NO: 190685 - DNA, 120 bp, Artificial Sequence
  ENSG00000112379_40 (sequence is synthesized)
tatcaggtacgagagcatgatcaataccatgctgaaggacctctttgagttgctggtcgcctgtgtggccaagcccactgaaaccatctccagagtgggctgctcctgtattagatacgt

SEQ ID NO: 190686 - DNA, 120 bp, Artificial Sequence
  ENSG00000112379_41 (sequence is synthesized)
ccttgtgacagcgggccctgtgttcactgaggagatgtggaggcttgcctgctgtgccctgcaagatgcgttctctgccacactcaagccagtgaaggacctgctgggctgcttccacag

SEQ ID NO: 190687 - DNA, 120 bp, Artificial Sequence
  ENSG00000112379_42 (sequence is synthesized)
cggcacggagagcttcagcggggaaggctgccaggtgcgagtggcggccccgtcctcctccccaagtgccgaggccgagtactggcgcatccgagccatggcccagcaggtgtttatgct

SEQ ID NO: 190688 - DNA, 120 bp, Artificial Sequence
  ENSG00000112379_43 (sequence is synthesized)
ggacacccagtgctcaccaaagacaccaaacaactttgaccacgctcagtcctgccagctcattattgagctgcctcctgatgaaaaaccaaatggacacaccaagaaaagcgtgtcttt

SEQ ID NO: 190689 - DNA, 120 bp, Artificial Sequence
  ENSG00000112379_44 (sequence is synthesized)
cagggaaattgtggtgagcctgctgtctcatcaggtgttactccagaacttatatgacatcttgttagaagagtttgtcaaaggcccctctcctggagaggaaaagacgatacaagtgcc

SEQ ID NO: 190690 - DNA, 120 bp, Artificial Sequence
  ENSG00000112379_45 (sequence is synthesized)
agaagccaagctggctggcttcctcagatacatctctatgcagaacttggcagtcatattcgacctgctgctggactcttataggactgccagggagtttgacaccagccccgggctgaa

SEQ ID NO: 190691 - DNA, 120 bp, Artificial Sequence
  ENSG00000112379_46 (sequence is synthesized)
gtgcctgctgaagaaagtgtctggcatcgggggcgccgccaacctctaccgccagtctgcgatgagctttaacatttatttccacgccctggtgtgtgctgttctcaccaatcaagaaac

SEQ ID NO: 190692 - DNA, 120 bp, Artificial Sequence
  ENSG00000112379_47 (sequence is synthesized)
catcacggccgagcaagtgaagaaggtcctttttgaggacgacgagagaagcacggattcttcccagcagtgttcatctgaggatgaagacatctttgaggaaaccgcccaggtcagccc

SEQ ID NO: 190693 - DNA, 120 bp, Artificial Sequence
  ENSG00000112379_48 (sequence is synthesized)
cccgagaggcaaggagaagagacagtggcgggcacggatgcccttgctcagcgtccagcctgtcagcaacgcagattgggtgtggctggtcaagaggctgcacaagctgtgcatggaact

SEQ ID NO: 190694 - DNA, 120 bp, Artificial Sequence
  ENSG00000112379_49 (sequence is synthesized)
gtgcaacaactacatccagatgcacttggacctggagaactgtatggaggagcctcccatcttcaagggcgacccgttcttcatcctgccctccttccagtccgagtcatccaccccatc

SEQ ID NO: 190695 - DNA, 120 bp, Artificial Sequence
  ENSG00000112379_50 (sequence is synthesized)
caccgggggcttctctgggaaagaaaccccttccgaggatgacagaagccagtcccgggagcacatgggcgagtccctgagcctgaaggccggtggtggggacctgctgctgccccccag

SEQ ID NO: 190696 - DNA, 120 bp, Artificial Sequence
  ENSG00000112379_51 (sequence is synthesized)
ccccaaagtggagaagaaggatcccagccggaagaaggagtggtgggagaatgcggggaacaaaatctacaccatggcagccgacaagaccatttcaaagttgatgaccgaatacaaaaa

SEQ ID NO: 190697 - DNA, 120 bp, Artificial Sequence
  ENSG00000112379_52 (sequence is synthesized)
gaggaaacagcagcacaacctgtccgcgttccccaaagaggtcaaagtggagaagaaaggagagccactgggtcccaggggccaggactccccgctgcttcagcgtccccagcacttgat

SEQ ID NO: 190698 - DNA, 120 bp, Artificial Sequence
  ENSG00000112379_53 (sequence is synthesized)
ggaccaagggcaaatgcggcattccttcagcgcaggccccgagctgctgcgacaggacaagaggccccgctcaggctccaccgggagctccctcagtgtctcggtgagagacgcagaagc

SEQ ID NO: 190699 - DNA, 120 bp, Artificial Sequence
  ENSG00000112379_54 (sequence is synthesized)
acagatccaggcatggaccaacatggtgctaacagttctcaatcagattcagattctcccagaccagaccttcacggccctccagcccgcagtgttcccgtgcatcagtcagctgacctg

SEQ ID NO: 190700 - DNA, 120 bp, Artificial Sequence
  ENSG00000112379_55 (sequence is synthesized)
tcacgtgaccgacatcagagttcgccaggctgtgagggagtggctgggcagggtgggccgtgtctatgacatcattgtgtagccgactcctgttctactctcccaccaaataacagtagt

SEQ ID NO: 190701 - DNA, 120 bp, Artificial Sequence
  ENSG00000112379_56 (sequence is synthesized)
gagggttagagtcctgccaatacagctgttgcattttccccaccactagccccacttaaactactactactgtctcagagaacagtgtttcctaatgtaaaaagcctttccaaccactga

SEQ ID NO: 190702 - DNA, 120 bp, Artificial Sequence
  ENSG00000112379_57 (sequence is synthesized)
tcagcattggggccatactaaggtttgtatctagatgacacaaacgatattctgattttgcacattattatagaagaatctataatccttgatatgtttctaactcttgaagtatatttc

SEQ ID NO: 190703 - DNA, 120 bp, Artificial Sequence
  ENSG00000112379_58 (sequence is synthesized)
ccagtgcttttgcttacagtgttgtccccaaatgggtcattttcaaggattactcatttgaaaacactatattgatccatttgatccatcatttaaaaaataaatacaattcctaaggca

SEQ ID NO: 190704 - DNA, 120 bp, Artificial Sequence
  ENSG00000112379_59 (sequence is synthesized)
atatctgctggtaagtcaagctgataaacactcagacatctagtaccagggattattaattggaggaagatttatggttatgggtctggctgggaagaagacaactataaatacatattc

SEQ ID NO: 190705 - DNA, 120 bp, Artificial Sequence
  ENSG00000112379_60 (sequence is synthesized)
ttgggtgtcataatcaagaaagaggtgacttctgttgtaaaataatccagaacacttcaaaattattcctaaatcattaagattttcaggtattcaccaatttccccatgtaaggtactg

SEQ ID NO: 190706 - DNA, 120 bp, Artificial Sequence
  ENSG00000112379_61 (sequence is synthesized)
aaagtggctggtacgtagattgtcaagagacataagaccgaccagccaccctggctgttcttgtggtgtttgtttccatccccaaggcaaacaaggaaaggaaaggaaagaagaaaaggt

SEQ ID NO: 190707 - DNA, 120 bp, Artificial Sequence
  ENSG00000112379_62 (sequence is synthesized)
gccttagtcctttgttgcacttccatttccatgccccacaattgtctgaacataaggtatagcatttggtttttaagaaaacaaaacattaagacgcaactcattttatatcaacacgct

SEQ ID NO: 190708 - DNA, 120 bp, Artificial Sequence
  ENSG00000112379_63 (sequence is synthesized)
tggaggaaagggactcagggaagggagcagggagtgtggggtggggatggattatgatgaaatcattttcaatcttaaaatataatacaacaatcttgcaaaattatggtgtcagttaca

SEQ ID NO: 190709 - DNA, 120 bp, Artificial Sequence
  ENSG00000112379_64 (sequence is synthesized)
caagctctagtctcaaaatgaaagtaatggagaaagacactgaaatttagaaaattttgtcgatttaaaatatttctcctatctaccaagtaaagttaccctatgtttgatgtctttgca

SEQ ID NO: 190710 - DNA, 120 bp, Artificial Sequence
  ENSG00000112379_65 (sequence is synthesized)
ttcagaccaatatttcaggtggatatttctaagtattactagaaaatacgtttgaaagctttatcttattatttacagtatttttatatttcttacattatcctaatgattgaaaactcc

SEQ ID NO: 190711 - DNA, 120 bp, Artificial Sequence
  ENSG00000112379_66 (sequence is synthesized)
tcaatcaagcttacttacacacattctacagagttatttaaggcatacattataatctcccagccccattcataatgaataagtcaccctttaaatataagacacaaattctacagtatt

SEQ ID NO: 190712 - DNA, 120 bp, Artificial Sequence
  ENSG00000112379_67 (sequence is synthesized)
gaaataaggatttaaaggggtatttgtaaactttgccctccttgagaaatatggaactaccttagaggttaagaggaaggcagtgttctgacttctttaggtgatctgaaaaaaacaccc

SEQ ID NO: 190713 - DNA, 120 bp, Artificial Sequence
  ENSG00000112379_68 (sequence is synthesized)
ttatcatccagtgtaccatctagagatcaccacagaatccatttttttcccagttccacaaaacactctgtttgccttcagtttttactcactagacaataattcaagtttagaaacagg

SEQ ID NO: 190714 - DNA, 120 bp, Artificial Sequence
  ENSG00000112379_69 (sequence is synthesized)
taatcagctatttgatcttaaaaggcaatgaattgttgggatatcagtgaactatgttgtatacttttgaatttttacattttataaatggaattgaaagttggataactgcttttttta

SEQ ID NO: 190715 - DNA, 120 bp, Artificial Sequence
  ENSG00000112379_70 (sequence is synthesized)
aattttccaacagaagtaacaccacagttgctttgtttctttttatagcttacctgaggttcagttcttctttgtgaacctgtgagtactccacagtttactgggggaaaaggcttcagt

SEQ ID NO: 190716 - DNA, 120 bp, Artificial Sequence
  ENSG00000112379_71 (sequence is synthesized)
cagtaaagcagaggctagaattacagtatttatacatagcaacttttcataaagtagaaaaattcaaaggaagctgtctcaatttgagaataccagctgggcacggtggctcacgcctgt

SEQ ID NO: 190717 - DNA, 78 bp, Artificial Sequence
  ENSG00000112379_72 (sequence is synthesized)
gctcacgcctgtaatcccagcacttactttgggaggccaaggtgggcagataacctgcggtcaggagtttgagaccag

SEQ ID NO: 190718 - DNA, 67 bp, Artificial Sequence
  ENSG00000112379_73 (sequence is synthesized)
cacctgtaatcccagctacttaggaggccgagacaggagaatcgctcactgggtgacaagagtgaaa

SEQ ID NO: 190719 - DNA, 120 bp, Artificial Sequence
  ENSG00000112379_74 (sequence is synthesized)
ctccatctaaaaaaaaaaaaaaaaaaaagtgaatactgtatcccaaagtatgttagttgtttgtttggaaatcagcattctccccgatgctctattatgggatccaaaattcttgaacat

SEQ ID NO: 190720 - DNA, 120 bp, Artificial Sequence
  ENSG00000112379_75 (sequence is synthesized)
ttgaacataagtttaccctgtactgtgtccaaacactgttctagttctagcctgattatgggtcccaagaataaaaggatgagtaggtgtacagagctcttgacctacaattttttaaga

SEQ ID NO: 190721 - DNA, 120 bp, Artificial Sequence
  ENSG00000112379_76 (sequence is synthesized)
gtgttttggtaccttcccattgtcttctctataactcagtcctaacatactctgcactcgagttaccagccatccacactgacatcagatttcaaccagaaccatcactgagtgacagca

SEQ ID NO: 190722 - DNA, 120 bp, Artificial Sequence
  ENSG00000112379_77 (sequence is synthesized)
gtacttctcagaggtatttgcagcttgatgcaaagtagtctctaatgagtaggcattcaggtggttcttcccagcaggtggagaagaaagggaggagatgaagaacactgagaggggagt

SEQ ID NO: 190723 - DNA, 120 bp, Artificial Sequence
  ENSG00000112379_78 (sequence is synthesized)
ggcaccttcccaggctgcccagctcagtctcttgccctgttcctgtgactcagctgcccactcccccaactttgtttccctccctcccagtctctgaaagtgtcaggtgtttctctcctc

SEQ ID NO: 190724 - DNA, 120 bp, Artificial Sequence
  ENSG00000112379_79 (sequence is synthesized)
acagtctcttttgcagcaacagtaagacaaaattcaaggcagccttttaaagttacgaacagttattagcatgtatttacagacctaagcagaatgagagtttatacattgtttttagtt

SEQ ID NO: 190725 - DNA, 120 bp, Artificial Sequence
  ENSG00000112379_80 (sequence is synthesized)
gcctgtatttatagccaaaagtatattaccttaaagttgagatctttctcttcttttcctaaattttggtaaagtgtgcttcatgaaacaaacatctggaaaactccaagtataagagac

SEQ ID NO: 190726 - DNA, 120 bp, Artificial Sequence
  ENSG00000112379_81 (sequence is synthesized)
cctggactgatgatggcccagccaagtatatggagggacagagttctctctgtcattaatgaggacatcggttttcacaattgaacctcatgcactgtccacagcatctcacctagctcc

SEQ ID NO: 190727 - DNA, 120 bp, Artificial Sequence
  ENSG00000112379_82 (sequence is synthesized)
tgtatctcctgatctgcttttaaaaatagttagttaggctgcctttttacaccaccttctctctctccccttgtggtaattttccagccttccccatagatataaaactagaacaccttt

SEQ ID NO: 190728 - DNA, 120 bp, Artificial Sequence
  ENSG00000112379_83 (sequence is synthesized)
atgatttggggtctatgtaatgactgaccgataagaacccaggcagatgctaacatacttaacagctcgcattaaaatactttaaatcaggcgtgatggctcattcctgtaatctcaagc

SEQ ID NO: 190729 - DNA, 120 bp, Artificial Sequence
  ENSG00000112379_84 (sequence is synthesized)
aggagaattgcttgaacctgggaggtggggattgcagtcagccaagattgttctgcagcatgggtgacaaagtgagacttcgtctcaagtaaataaaactaaaatttttaaatcaaacat

SEQ ID NO: 190730 - DNA, 120 bp, Artificial Sequence
  ENSG00000112379_85 (sequence is synthesized)
gtaaataaaactaaaatttttaaatcaaacatgacaaaaatgttaatataattcagaagtaccttgaaattgaaacatatttgtgcaatgatcattaggctttttgtccttgttgtttta

SEQ ID NO: 190731 - DNA, 120 bp, Artificial Sequence
  ENSG00000112379_86 (sequence is synthesized)
aaatgaggcttatacagagtgagttgagagtcaagtagccttcgctgtgagacggtaatgcagttatataatagatacccttgactttgccagattcatcacaatactgcttatacagga

SEQ ID NO: 190732 - DNA, 120 bp, Artificial Sequence
  ENSG00000112379_87 (sequence is synthesized)
aagttttctcagaaaggaaaatccattagtatcagtcccatcaagccaaacagaatgaagacctttgatagtaatagcaagaggttacaaatagcagggaggaggcgagtagtgaatgtc

SEQ ID NO: 190733 - DNA, 120 bp, Artificial Sequence
  ENSG00000112379_88 (sequence is synthesized)
actgtgattgcaaacccttacctgtattatcacacgtagtcctcacaacaaccttgtgagacaagtgttgtgttcctcattttttcagaggggaacacagacccagagaggttaagaaat

SEQ ID NO: 190734 - DNA, 120 bp, Artificial Sequence
  ENSG00000112379_89 (sequence is synthesized)
ttgcccaagataacaagtaaaaggcaaagttggttgcaaaagaggtgtttctgaattcaagggccatactctctctctgacaacatgctctaagtccatagagtaagcactctagtatga

SEQ ID NO: 190735 - DNA, 120 bp, Artificial Sequence
  ENSG00000112379_90 (sequence is synthesized)
aaaaaagtttcaaggaacgaggccatgaaaatgagactatttgacatctcagatctgtctgggatgttatggaggtttttaaaaataaagttgaaaaaagaaaatgaatcatgtttatac

SEQ ID NO: 190736 - DNA, 120 bp, Artificial Sequence
  ENSG00000112379_91 (sequence is synthesized)
ataaaaaaatcacatgtaacacatttcaagtgtttgaaaataaaaccaaaatctaaactttagtcttcaagcagacattcagtgttactttagaaaactcactgaattaggtggaaatga

SEQ ID NO: 190737 - DNA, 120 bp, Artificial Sequence
  ENSG00000112379_92 (sequence is synthesized)
tggaataatactattcatggccagctattaacacagaagaacatggcagtgtgtgtctggaacggcatgcacaatttgtaaacctttttcaaatatcatttaatcaactcagaataaagt

SEQ ID NO: 190738 - DNA, 120 bp, Artificial Sequence
  ENSG00000112379_93 (sequence is synthesized)
gccctgtagccaacagtgcctctttacttgcttctctgggaaatacatggtactaaattagtagcacaaagtttgggaatatgcaaaataatggataaccatttttcaaaatgtacattc

SEQ ID NO: 190739 - DNA, 120 bp, Artificial Sequence
  ENSG00000112379_94 (sequence is synthesized)
tctgaagaggaagcagctggttggacaggatttcttgaagagccaggtgctaagggcatcaggtcgacatccatagtaaccatgtgccataacatctacacatttccacttgttttacag

SEQ ID NO: 190740 - DNA, 120 bp, Artificial Sequence
  ENSG00000112379_95 (sequence is synthesized)
acaaggtaacaggcagaaggaaaatccagagtcttgcagtaagcagatgacaaaacttcaatatgcttgggcaccacttaggtgaccccagggagatttagtgtggccttaggaaagcaa

SEQ ID NO: 190741 - DNA, 120 bp, Artificial Sequence
  ENSG00000112379_96 (sequence is synthesized)
aagagcactttttattggaaatatgagcttgtcactgggaaagatttgtaaaattgatcaagaacttgatttataattatgcctcaaaaaaaaaagttctcatttagtagtggagcaatc

SEQ ID NO: 190742 - DNA, 120 bp, Artificial Sequence
  ENSG00000112379_97 (sequence is synthesized)
tagaaaacataccttttttgtttgtttggaagatcctctttccctggctgtattgtagtgtttgctatttgatgtggaaataactaataacttaagattttggaacagaacaccctttag

SEQ ID NO: 190743 - DNA, 120 bp, Artificial Sequence
  ENSG00000112379_98 (sequence is synthesized)
atttccaaaacacaattcttatttcagggaagacagaccaaaaatatctcctgagatcattggtttctttataaattgtggtaccactccatcattgaagagaaaccactaccacaccac

SEQ ID NO: 190744 - DNA, 120 bp, Artificial Sequence
  ENSG00000112379_99 (sequence is synthesized)
tagcaccatacagaaccttttctctgtatctttgtacaatactacaaaggggtaccagggaggagagagtggctgaccactttagtgacaaaacagcactccactgctggtgaatcccat

SEQ ID NO: 190745 - DNA, 120 bp, Artificial Sequence
  ENSG00000112379_100 (sequence is synthesized)
ctaattatggtccttccacccttttcaaccaccaacaactgttcgtactgttaattcctatcctgaaggtttaaccagtggttgtctagtatcttctgtctttagaacagtggttctcaa

SEQ ID NO: 190746 - DNA, 120 bp, Artificial Sequence
  ENSG00000112379_101 (sequence is synthesized)
actttagtacacatcagcatcacctggagggcctttttttaaaataagacacagattgctgggctcatggtcagagttcccagttaagtaaatcaggaaatttgtatttctaacaagttt

SEQ ID NO: 190747 - DNA, 120 bp, Artificial Sequence
  ENSG00000112379_102 (sequence is synthesized)
ataggtgaggccaatactgctgttttgggaactatgctttgagaaccactgccttgaaaaaatttccaacttctacctttaagatcagcctgacttatcaaacgctagagaaaaactgaa

SEQ ID NO: 190748 - DNA, 120 bp, Artificial Sequence
  ENSG00000112379_103 (sequence is synthesized)
tctacccttgggcagatgacttgggattggattctatacagcagtcttgctcaatcttcccagtttccagttttattataccaacaattggtttttacaagctagaagacaatgaatgta

SEQ ID NO: 190749 - DNA, 120 bp, Artificial Sequence
  ENSG00000112379_104 (sequence is synthesized)
taagttctatggaacagtgagataaatctaagcttcttgtctttgtatttagaaacattgattctatggatgatcatttgtatcatgttgaccctttgacttgtactgaaggtgatttta

SEQ ID NO: 190750 - DNA, 120 bp, Artificial Sequence
  ENSG00000112379_105 (sequence is synthesized)
aatttaagtatgtagtgtttgaatttcttccatccatgtcgttttaatgagatgtttccatgtcagctcctttacagccttggctcctggcttacagatttttgaatagttgtttgcttg

SEQ ID NO: 190751 - DNA, 120 bp, Artificial Sequence
  ENSG00000112379_106 (sequence is synthesized)
ccagttgttttacatctttcattggccaccaaaatattagccatttgagatgagatgagactacttgttgtaccttcatctttcatttaattttctggcgtaaattaacattttaatttc

SEQ ID NO: 190752 - DNA, 120 bp, Artificial Sequence
  ENSG00000112379_107 (sequence is synthesized)
atatatatctgtaaagagtctacccaaaggcttcacggaaatttgcaaaatgaactaattcccttttaagcagcaggtgtgcctgtttttgacttttcagtaaatatgttgtttgtgcac

SEQ ID NO: 190753 - DNA, 120 bp, Artificial Sequence
  ENSG00000112379_108 (sequence is synthesized)
atatctacatggtggagaccatattcattatttcatcttccaaataatgggaaaaatataaaagtgaatcagtgtgctttgggaattcagtgaaatcatgttaactcatatagagggggc

SEQ ID NO: 190754 - DNA, 120 bp, Artificial Sequence
  ENSG00000112379_109 (sequence is synthesized)
cttagtttatctcttctttactgaattaattagttttggaaattcttttaccattaaaaaaaattaaggaccatacagagaatgatttaagaaaaaacaagtcacttaaaaatcatcacc

SEQ ID NO: 190755 - DNA, 120 bp, Artificial Sequence
  ENSG00000112379_110 (sequence is synthesized)
tatttataaactgtattaattacacataatgcttattgattcaatgaggtttctctaaagacttctgcttaataaatatgctgacttcatttaaattagtttagactattgtaggaatgg

SEQ ID NO: 190756 - DNA, 120 bp, Artificial Sequence
  ENSG00000112379_111 (sequence is synthesized)
aaggaaatgattatatttactagaattagtgagatcagaaagcatatcagaatgttgatgatatcaaggagacaatctacagagtttttgcctctgtggatggaaataagggtgtttttt

SEQ ID NO: 190757 - DNA, 120 bp, Artificial Sequence
  ENSG00000112379_112 (sequence is synthesized)
tttggttttttttttactttagtttcccataatttttggaaattatgtgtgcatttagttcttttagtaacactgattttaaaattaaatttcaaaagtcaatctctaagagtaatttat

SEQ ID NO: 190758 - DNA, 120 bp, Artificial Sequence
  ENSG00000112379_113 (sequence is synthesized)
ttttgttttaccaaccagtgccaaaaaggagaggagggaatccaaaagccaatcttttgaaccaatgtgtaaaagattatgttttttcttaaagttagggaggctcgggccctgacactg

SEQ ID NO: 190759 - DNA, 120 bp, Artificial Sequence
  ENSG00000112379_114 (sequence is synthesized)
ccagccccagtgagcatccctggctacctcgggattatgtgcaagctgctttgtcctacatttctttcatctggttcttattgggagtgcttctctctaataaaaattgatttcccacaa

SEQ ID NO: 190760 - DNA, 120 bp, Artificial Sequence
  ENSG00000112379_115 (sequence is synthesized)
aataggcaaagctgaacaaagatgaatgcttttgataagttgggtttcacttcagttgaaacaatgtgatagaatatccaggtgtggcatgatggggcaggaggaggtgcctagagggaa

SEQ ID NO: 190761 - DNA, 120 bp, Artificial Sequence
  ENSG00000112379_116 (sequence is synthesized)
aagttatttttgtttcttagtgttgtgttgtggggatgggacagataagaataagatgtttattgccctaatcatgctaagagactattattcaatatgcttttcccgcttttctaagag

SEQ ID NO: 190762 - DNA, 120 bp, Artificial Sequence
  ENSG00000112379_117 (sequence is synthesized)
gaataaacttagacaaattacattataaacagttcccctactactatctcccactctagataaagccagtgggtggtatgggtccttttattccttatagtattatgccaaagaatcaac

SEQ ID NO: 190763 - DNA, 120 bp, Artificial Sequence
  ENSG00000112379_118 (sequence is synthesized)
ttattttcattgaagattataaataaatgaagcttgttatagccataatgatttgagtcagtataccattttacctataaaatgcaaaattcatccttgcaaccccattcaccaggagcc

SEQ ID NO: 190764 - DNA, 120 bp, Artificial Sequence
  ENSG00000112379_119 (sequence is synthesized)
ttgaagcattttgtttactccaaaggccttgtcaaggaagcataattttttgttttgccttcttatttagtcagtttggtcatatttacttaaaaaaacaaactgaaaatcacactcctt

SEQ ID NO: 190765 - DNA, 120 bp, Artificial Sequence
  ENSG00000112379_120 (sequence is synthesized)
tatatgttgatataactgattttatagaatctgtctgttctttgtttaacaggtctctgtaagcaagcttgcaagtgtattttgtgtacattttatctgaggtggaaatgaaaattctaa

SEQ ID NO: 190766 - DNA, 120 bp, Artificial Sequence
  ENSG00000112379_121 (sequence is synthesized)
ctaaagagaaaatattttaaaagatattgtatttatgttgcttgtgttgtagaataaagattcaaatgcattaaaaatctggtacatgaaacaattgtgtttactgaataaatatatata

SEQ ID NO: 190767 - DNA, 120 bp, Artificial Sequence
  ENSG00000112394_0 (sequence is synthesized)
agtcgggggtgcggggctgtgacctagaggcttcagtgtcgatccccgaggtgttcgcgcgcgccagctgtcctcgcggccgcctgcgcgctggccgcctgcgcgctgccagcccgcccg

SEQ ID NO: 190768 - DNA, 120 bp, Artificial Sequence
  ENSG00000112394_1 (sequence is synthesized)
cccgccaggggctccgccgccctcgcctcggcctcgttagcccgccaggagccccgcagctcctccgggagcccgctggtaactcgcgtccctcgcgcttctccggcgcctgaggggccc

SEQ ID NO: 190769 - DNA, 80 bp, Artificial Sequence
  ENSG00000112394_2 (sequence is synthesized)
gcctcgggccatggtgctctcccaggaggagccggactccgcgcggggcacgagcgaggcgcagccgctcggccccgcgc

SEQ ID NO: 190770 - DNA, 120 bp, Artificial Sequence
  ENSG00000112394_3 (sequence is synthesized)
cagccccgaggcggctgtcgagaaggtggaggtggagctggcggggccggcgaccgcggagccccatgagccccccgaaccccccgagggcggctggggctggctggtgatgctggcggc

SEQ ID NO: 190771 - DNA, 120 bp, Artificial Sequence
  ENSG00000112394_4 (sequence is synthesized)
catgtggtgcaacgggtcggtgttcggcatccagaacgcttgcggggtgctcttcgtgtccatgctggaaaccttcggctccaaagacgatgacaagatggtctttaagacagcatgggt

SEQ ID NO: 190772 - DNA, 120 bp, Artificial Sequence
  ENSG00000112394_5 (sequence is synthesized)
aggttctctctccatggggatgattttcttttgctgcccaatagtcagcgtcttcacagacctatttggttgtcggaaaacagctgtcgtgggtgctgctgttggatttgttgggctcat

SEQ ID NO: 190773 - DNA, 120 bp, Artificial Sequence
  ENSG00000112394_6 (sequence is synthesized)
gtccagttcttttgtaagttccatcgagcctctgtaccttacctatggaatcatatttgcctgcggctgctcctttgcataccagccttcattggtcattttgggacactatttcaagaa

SEQ ID NO: 190774 - DNA, 120 bp, Artificial Sequence
  ENSG00000112394_7 (sequence is synthesized)
gcgccttggactggtgaatggcattgtcactgctggcagcagtgtcttcacaatcctgctgcctttgctcttaagggttctgattgacagcgtgggcctcttttacacattgagggtgct

SEQ ID NO: 190775 - DNA, 120 bp, Artificial Sequence
  ENSG00000112394_8 (sequence is synthesized)
ctgcatcttcatgtttgttctctttctggctggctttacttaccgacctcttgctaccagtaccaaagataaagagagtggaggtagcggatcctccctcttttccaggaaaaagttcag

SEQ ID NO: 190776 - DNA, 120 bp, Artificial Sequence
  ENSG00000112394_9 (sequence is synthesized)
tcctccaaaaaaaattttcaattttgccatcttcaaggtgacagcttatgcagtgtgggcagttggaataccacttgcactttttggatactttgtgccttatgttcacttgatgaaaca

SEQ ID NO: 190777 - DNA, 120 bp, Artificial Sequence
  ENSG00000112394_10 (sequence is synthesized)
tgtaaatgaaagatttcaagatgaaaaaaataaagaggttgttctcatgtgcattggcgtcacttcaggagttggacgactgctctttggccggattgcagattatgtgcctggtgtgaa

SEQ ID NO: 190778 - DNA, 120 bp, Artificial Sequence
  ENSG00000112394_11 (sequence is synthesized)
gaaggtttatctacaggtactctcctttttcttcattggtctgatgtccatgatgattcctctgtgtagcatctttggggccctcattgctgtgtgcctcatcatgggtctcttcgatgg

SEQ ID NO: 190779 - DNA, 120 bp, Artificial Sequence
  ENSG00000112394_12 (sequence is synthesized)
atgcttcatttccattatggctcccatagcctttgagttagttggtgcccaggatgtctcccaagcaattggatttctgctcggattcatgtctatacccatgactgttggcccacccat

SEQ ID NO: 190780 - DNA, 120 bp, Artificial Sequence
  ENSG00000112394_13 (sequence is synthesized)
tgcagggttacttcgtgacaaactgggctcctatgatgtggcattctacctcgctggagtccctccccttattggaggtgctgtgctttgttttatcccgtggatccatagtaagaagca

SEQ ID NO: 190781 - DNA, 120 bp, Artificial Sequence
  ENSG00000112394_14 (sequence is synthesized)
aagagagatcagtaaaaccactggaaaagaaaagatggagaaaatgttggaaaaccagaactctctgctgtcaagttcatctggaatgttcaagaaagaatctgactctattatttaata

SEQ ID NO: 190782 - DNA, 120 bp, Artificial Sequence
  ENSG00000112394_15 (sequence is synthesized)
tcttacatacctccaccagactggacttgctttttgaattttaagcaagtttcctttccttttatacaaattgcaaatttcatatttttttaatcacatcctaggaatagcacaataatt

SEQ ID NO: 190783 - DNA, 120 bp, Artificial Sequence
  ENSG00000112394_16 (sequence is synthesized)
gggaaatagaacccttatcactagaagaaccattttctgccactaaatatctctgatgtttccatgagtctgagggcagagactctggtatatgaaaacgtctgaaagtcacatattgtg

SEQ ID NO: 190784 - DNA, 120 bp, Artificial Sequence
  ENSG00000112394_17 (sequence is synthesized)
aaaatttgaagctatctcagtaaaaagcagctttggaaactgtgaatgatctttagcttgtacaaatgtttaaaaatacctcaggctatactgaaagggttgcagtttggttaggagtgg

SEQ ID NO: 190785 - DNA, 120 bp, Artificial Sequence
  ENSG00000112394_18 (sequence is synthesized)
aaatattttgtttgttaatgatgtcttcagttctggtacctctgttttactttcttatgctctttggaaactttttgcaaaatttaagcctgggttctagataataccagatctacctaa

SEQ ID NO: 190786 - DNA, 120 bp, Artificial Sequence
  ENSG00000112394_19 (sequence is synthesized)
acctcaagtctatgttaaagttgctttcctgctgttaaataagctatgatattaagatattctgacttgctccagtgtcaagggaccttctgggagcaggtgctaacatagtgttcagaa

SEQ ID NO: 190787 - DNA, 120 bp, Artificial Sequence
  ENSG00000112394_20 (sequence is synthesized)
tcaatatgtgagatgaaaaggatcccctccaggaggatcctgagctgttcagaaatcatttaagtttacagcgttgttccctttgcgtttgcagtgcgttttactcaagtagccagaaac

SEQ ID NO: 190788 - DNA, 120 bp, Artificial Sequence
  ENSG00000112394_21 (sequence is synthesized)
accccacgtttctgaatttgtttaaactgtaacaataaagtaaaatagaatgcatgaaagatattctggcgattgtaacttagaatttttctgacttctggatttgttggcactagaacc

SEQ ID NO: 190789 - DNA, 120 bp, Artificial Sequence
  ENSG00000112394_22 (sequence is synthesized)
tgatatttaaagtcttactgagcagctatcaagtggcagttacaggcacaaattggtggaggctggaggatggggaggggagcaaaaccctttatatttgtgaagaaaatatctgtagct

SEQ ID NO: 190790 - DNA, 120 bp, Artificial Sequence
  ENSG00000112394_23 (sequence is synthesized)
gatagaaataattgcttaaattggtttatgaaattaatgagtctgaaaaggttaaaagcacttataaaaagaaccaagtcctacatttccagaactttctggcaaaaatttgcactcata

SEQ ID NO: 190791 - DNA, 120 bp, Artificial Sequence
  ENSG00000112394_24 (sequence is synthesized)
ttatttatcctatgaacattcccattgtttttttttgctatttatatacagattatcataagaaagctctcagtttgaggacccaaaataaaaccaaagtcatgccatgacccatactca

SEQ ID NO: 190792 - DNA, 120 bp, Artificial Sequence
  ENSG00000112394_25 (sequence is synthesized)
tttacaaaaacaagaacactttcctctatccctaaaattatgctttagtacttgaggcctttaaaagttagtgcttttgattgtgaagacattcagcaacttactttgtcatacatgcag

SEQ ID NO: 190793 - DNA, 120 bp, Artificial Sequence
  ENSG00000112394_26 (sequence is synthesized)
ttgcaccttaccacttctaatagtgtcatatttcatattcaggggacttagataatttgcctgtggatggttcttttgcaggaaaaaaaatctacattttgaccatactaccctttcatg

SEQ ID NO: 190794 - DNA, 120 bp, Artificial Sequence
  ENSG00000112394_27 (sequence is synthesized)
tccttattataagcttttagaaaatgatttcattcagtcatgtccagttatataaaacgttactttctcatttttgagaagttcaacaaaacatactactaagaccaatcatcaaaccca

SEQ ID NO: 190795 - DNA, 82 bp, Artificial Sequence
  ENSG00000112394_28 (sequence is synthesized)
gttcaacaaaacatactactaagaccaatcatcaaacccactattataaatgttaattttggctgggtaaggtggcttgaga

SEQ ID NO: 190796 - DNA, 85 bp, Artificial Sequence
  ENSG00000112394_29 (sequence is synthesized)
ggcaacatagcaagatcctgtctctactaaaaataaaaaaaaaaattaggccaagtagtccaaggcagggggatcacttgagccc

SEQ ID NO: 190797 - DNA, 120 bp, Artificial Sequence
  ENSG00000112394_30 (sequence is synthesized)
aaaaatttaaaaattagccaggcatgatggtgcccacctgtagccccagctactcagaggctgaggtagtggaaggattgcttgagccttgagatggaggctgcagtgagctatgccact

SEQ ID NO: 190798 - DNA, 120 bp, Artificial Sequence
  ENSG00000112394_31 (sequence is synthesized)
cttgagccttgagatggaggctgcagtgagctatgccactgtactctagcctgttcaactgagcagaaccctgtctgtaaaagaaaatcaaaaacaaaaaataaatgttaaattttgttt

SEQ ID NO: 190799 - DNA, 120 bp, Artificial Sequence
  ENSG00000112394_32 (sequence is synthesized)
taagttttagcacagactcccctcaaaacaccttctccccaattttacagaaagtaatttaaaaatgaaaactttactctgtaaagacctctacagtgtttttcttttcaaaatttggct

SEQ ID NO: 190800 - DNA, 120 bp, Artificial Sequence
  ENSG00000112394_33 (sequence is synthesized)
gattttaggaaaaaagtgatcatctgaaactaaaagaaattgcttggttagtttccatattaaaacagcagtgacaagtatatataacttagatctcagcatatgtgtttgtatattaaa

SEQ ID NO: 190801 - DNA, 120 bp, Artificial Sequence
  ENSG00000112394_34 (sequence is synthesized)
cttcacatatgtagttttcagtttaatggaatgaatcaaactggatctataacactgaaaaagttctattgtaatagactcatacggagaatactctgctataataatataaaattaaga

SEQ ID NO: 190802 - DNA, 120 bp, Artificial Sequence
  ENSG00000112394_35 (sequence is synthesized)
agaaaaagtataaacgtaagatgctaaattccataaatgcatatttagtactatgttttttgtgggaaaagttctaaaagtttaaaatgcacaaagaaaatgaaaaatactaatataaaa

SEQ ID NO: 190803 - DNA, 120 bp, Artificial Sequence
  ENSG00000112394_36 (sequence is synthesized)
atttgtgctttaatctagtcaaactaaatcctttctaatttctgaatgaagtgttactgctgcaataaagtgacctgataagcctaaattttttgtgttcaatccagacacttttctgag

SEQ ID NO: 190804 - DNA, 120 bp, Artificial Sequence
  ENSG00000112394_37 (sequence is synthesized)
agtctgaaaagaatacagagtcagaactctgtttttatctcctcatcctgtttttgataagactcagaaaattctcaaattcgaaaggttctggcatttgaggccaaaaaaagcatgaaa

SEQ ID NO: 190805 - DNA, 120 bp, Artificial Sequence
  ENSG00000112394_38 (sequence is synthesized)
gggagtaacattcctttttatagatactctagattggatactattgtaacagatggccaagaaacttccagaaacattttggttaaattttattgcaatggatattgctgggatccatcc

SEQ ID NO: 190806 - DNA, 120 bp, Artificial Sequence
  ENSG00000112394_39 (sequence is synthesized)
atttaagcagtaatataccacccagattattgatactttatgcaagatgtgttcatctctttgatcatatttacaatgcttactccatagccctgctacaagacttaaaatttccactga

SEQ ID NO: 190807 - DNA, 73 bp, Artificial Sequence
  ENSG00000112394_40 (sequence is synthesized)
tactccatagccctgctacaagacttaaaatttccactgaaaattgcatagttcttgtattaagattcaaatt

SEQ ID NO: 190808 - DNA, 67 bp, Artificial Sequence
  ENSG00000112394_41 (sequence is synthesized)
aagtacacacagtttaaaagtaaacatgtttacttcggataattctaatccttttagctgcatttaa

SEQ ID NO: 190809 - DNA, 120 bp, Artificial Sequence
  ENSG00000112394_42 (sequence is synthesized)
gtttacttcggataattctaatccttttagctgcatttaagaatattttaatttatacgaatgttacttgaaattggcctatgtccagatgacttttgatgttaaatcaatggaaaactg

SEQ ID NO: 190810 - DNA, 120 bp, Artificial Sequence
  ENSG00000112394_43 (sequence is synthesized)
gcactttcatgccctttcttatgtaccttttgtcttactcttcttacattattcttatcctcatcattttttcatttccctttacttcctcctatccttcaaaaacctcctgaagagtcc

SEQ ID NO: 190811 - DNA, 120 bp, Artificial Sequence
  ENSG00000112394_44 (sequence is synthesized)
attaacatccatgcttagttccactggttgcatggctgtatttcctactgatccctgtagtttcactgaatggatccccacccaatttcgtgtatcctggtgaatggctttctctcagcc

SEQ ID NO: 190812 - DNA, 120 bp, Artificial Sequence
  ENSG00000112394_45 (sequence is synthesized)
ttcgacttagttctaatgatctacattgaatttaaattacatgactgaaatatttaagggaagaaataaatttcatacaaattagtatcttttatgctaacatttaaaactgtatttaaa

SEQ ID NO: 190813 - DNA, 120 bp, Artificial Sequence
  ENSG00000112394_46 (sequence is synthesized)
tttttaaggtaaatgctttggggaaaaaaaaaaccattgccaagtctttagcatattttcagagagcgtaattttttactttgatttccagtttcactaaggtttcattaaatcttagtt

SEQ ID NO: 190814 - DNA, 120 bp, Artificial Sequence
  ENSG00000112394_47 (sequence is synthesized)
ccgagagcccagcatgaagggtgactgggaatgtagtgtgcctctctgatgcagttcctaatgattgttcttcagggaccttccttaggttaggttacattttctggtgaatggtgttag

SEQ ID NO: 190815 - DNA, 120 bp, Artificial Sequence
  ENSG00000112394_48 (sequence is synthesized)
agtaaattcccagagtttagagatacaagtagaaatgcataagctaattagctccaattttataatatgtaaacaatttaaacaagtatttaaaactttttaggaagtctctaacactga

SEQ ID NO: 190816 - DNA, 120 bp, Artificial Sequence
  ENSG00000112394_49 (sequence is synthesized)
aaaaaaggtcattgttgctggtataaacattaaggagcaacttttacattaggtcaaagattgttgcttttccagtgtgttgtcttaaaaatagaaggaaataaaactattaccttcttt

SEQ ID NO: 190817 - DNA, 120 bp, Artificial Sequence
  ENSG00000112394_50 (sequence is synthesized)
ttacatctatatgtttttataatttgaaaggcaagtagtatcttggtgaataagaaatgcatcatccataacaatttaattaactcttaaaaagaccagctttttgtcttgttatgaaaa

SEQ ID NO: 190818 - DNA, 120 bp, Artificial Sequence
  ENSG00000112394_51 (sequence is synthesized)
caaaacgcaatttgtcattcataatggtaatgtggaataagaatacatcgtagaaggaagacttgctactttactgacttaatcattagttctaaggccatgtgtggcggctcacgcctg

SEQ ID NO: 190819 - DNA, 120 bp, Artificial Sequence
  ENSG00000112394_52 (sequence is synthesized)
cccagcactttgggagtccaaggcggtaggatcaccagagcccagggttcaagactcagcctgggcaacatagtgagatttcgtctctacaaaaaaaatttagccagcttggtggcacat

SEQ ID NO: 190820 - DNA, 65 bp, Artificial Sequence
  ENSG00000112394_53 (sequence is synthesized)
ggctgaggcaagaggattgcttgagcatagcaggtcaagtcttgtctacaaaaaggaaaaaaaaa

SEQ ID NO: 190821 - DNA, 120 bp, Artificial Sequence
  ENSG00000112394_54 (sequence is synthesized)
gaccttgtctacaaaaaggaaaaaaaaatttgttctgctctactatacatgctgacttttgttgatagcttggtctaaaaagactgtctagagctgaatttaagaatggttctggagcaa

SEQ ID NO: 190822 - DNA, 120 bp, Artificial Sequence
  ENSG00000112394_55 (sequence is synthesized)
ataataacaaggtagacaagcaggccctgggctcactataatttcatagccacgacctgtttattattagttggcagagattaatgctttgtgttataaatatactatagaacaataggt

SEQ ID NO: 190823 - DNA, 120 bp, Artificial Sequence
  ENSG00000112394_56 (sequence is synthesized)
cacgattctcaagaacaaagccgaatgctcgcagttaagtgtgaagcttgcataagtgtcggaaccacaattatggacccaccatcaatgtgcattttatcagatgactcctcctgagac

SEQ ID NO: 190824 - DNA, 120 bp, Artificial Sequence
  ENSG00000112394_57 (sequence is synthesized)
agtaaagactcctggaaaattcatgacatctttgaatcactcagaaaaatcttgaaactcaggacgtagtttacttagcttgccttttttaaaattatcaaattttaaatcgtaaacttt

SEQ ID NO: 190825 - DNA, 120 bp, Artificial Sequence
  ENSG00000112394_58 (sequence is synthesized)
gtcttcacttccacacgttcaaggacacctcttttaaagttcagtgttccatactaaaggggtgtaatcttgctttctggggaaataaaattccccatggtactatattcctgacagata

SEQ ID NO: 190826 - DNA, 120 bp, Artificial Sequence
  ENSG00000112394_59 (sequence is synthesized)
taaaataacatgaggctacctcatttttgaaatagatttcaatatttttattagtaagttggaaagacagtaggaacaaaatgaaacctttctaagtacttgatgacacccacttgatca

SEQ ID NO: 190827 - DNA, 120 bp, Artificial Sequence
  ENSG00000112394_60 (sequence is synthesized)
tgacaattcatctacctccgctttccgtgtccagctgaaagcccagctgagtcaactcctgcttcatcagaagggagctaatggtgattctgggattaaaaagcaaggggggtgcaaatt

SEQ ID NO: 190828 - DNA, 120 bp, Artificial Sequence
  ENSG00000112394_61 (sequence is synthesized)
gttagtggggtcaaaatatcagtaaaatttcttaagtgctttgttctgataaacggatgtaaaagtaacaaaaaaggaataacaactaatatggcctgtggatctgacaaagaaaaacct

SEQ ID NO: 190829 - DNA, 120 bp, Artificial Sequence
  ENSG00000112394_62 (sequence is synthesized)
gaagaaattcagaatctagatacacttagattctaaattagacacactcagattctaatgaacacttagaatgcttcgccagtggcttttcaagttacactggaagcttgattatgaaaa

SEQ ID NO: 190830 - DNA, 120 bp, Artificial Sequence
  ENSG00000112394_63 (sequence is synthesized)
agttttgttttcattggcaagagggtagatgatcagtgatgacagattgtacagctgtgcccaaacctgacaacttacacattaaactcctgtaagagacactccttcctagtagaacaa

SEQ ID NO: 190831 - DNA, 120 bp, Artificial Sequence
  ENSG00000112394_64 (sequence is synthesized)
ggactgggacaatgaatttttgactcactggagttttttaaaatgctgttcttgagtgtggcaatagtgtaggagttaacccagtctacccaaagaagttgctttgcctttcaatatgag

SEQ ID NO: 190832 - DNA, 120 bp, Artificial Sequence
  ENSG00000112394_65 (sequence is synthesized)
tgctataaaaagagtattttggagttcaatgtccctaaacatgtatgcgataggaactaccaatataaaataacacttagaactcaaattagattggtaatactattttggagcctgtga

SEQ ID NO: 190833 - DNA, 120 bp, Artificial Sequence
  ENSG00000112394_66 (sequence is synthesized)
tgtatgacttttattctttactagatatttttcagtatccgtcattagaagagtcagtttgttaaatattttaaatgtgtaaacacaaaacctttctactgtgatcttccctaatgagtc

SEQ ID NO: 190834 - DNA, 120 bp, Artificial Sequence
  ENSG00000112394_67 (sequence is synthesized)
gtgatcttccctaatgagtcaaagtatctttcataattcagtctatattgaaatgttatttcaggaatggagggtttgttattaatagtgctgggccgggcacggtgactcatgcctgta

SEQ ID NO: 190835 - DNA, 120 bp, Artificial Sequence
  ENSG00000112394_68 (sequence is synthesized)
aaaaaaaaaaaaaaatagtgctgcattttgaccctggactatgaacagactgtatagttggtgcctcttttttttctaccaaagattattagatcaagattggtgctatacttcatgttc

SEQ ID NO: 190836 - DNA, 120 bp, Artificial Sequence
  ENSG00000112394_69 (sequence is synthesized)
ctttcaaaattatttttcttttaaaaatattaatatacaacacaatagaaaatgtatacagccagcaacgttatgcatgttgcatgttatatacatgactgaggaaaaaagctcacctat

SEQ ID NO: 190837 - DNA, 120 bp, Artificial Sequence
  ENSG00000112394_70 (sequence is synthesized)
acagtgattattgagttccagtatctagttagaggtatgcaatttttgttaacatataagactttaaattacgaaactcacaagaaaatgatcaccaaatgagaatgttctaatgaacac

SEQ ID NO: 190838 - DNA, 120 bp, Artificial Sequence
  ENSG00000112394_71 (sequence is synthesized)
aacctcccaaggtaataattttaaagaaaaagtcccttgtcaatgtttctagcacaaagtgagggatttaaatatattctgtaactttgaggcaatgtgaaaaagttatatataatagct

SEQ ID NO: 190839 - DNA, 120 bp, Artificial Sequence
  ENSG00000112394_72 (sequence is synthesized)
tcctattgagctggcttatgtagacatttggacatttgaaactatttcgcaactttcaggctaaaatcagagttttgagagtcatcaatcttaaaacatggataatgagttatttgcaca

SEQ ID NO: 190840 - DNA, 120 bp, Artificial Sequence
  ENSG00000112394_73 (sequence is synthesized)
gttatatttttataattatttgaaatttatcactgaaagtatcattgtttgtctttcagatttaacataaacaataagtactgcggctgggtcactgtcagcaaatctcaggtctatgat

SEQ ID NO: 190841 - DNA, 120 bp, Artificial Sequence
  ENSG00000112394_74 (sequence is synthesized)
gcaaatctcaggtctatgatttatcaagggctctcagcaccatcgttggtctgattgtgtaacacctaagtaaaataacatatgggtctccttggccaggcgccgtggctcacacctgta

SEQ ID NO: 190842 - DNA, 120 bp, Artificial Sequence
  ENSG00000112394_75 (sequence is synthesized)
caaggcaggcggattgcttgaggccaggagttcgagacatacgggtctctttaatgttctgtaggtaggattcagatgaattgagaatgacaggtttctttttctttctttgtttctttt

SEQ ID NO: 190843 - DNA, 63 bp, Artificial Sequence
  ENSG00000112394_76 (sequence is synthesized)
tctgagtagctgggactacaggtgcccactaccacgccttaagtgatccacctgcctcagcct

SEQ ID NO: 190844 - DNA, 120 bp, Artificial Sequence
  ENSG00000112394_77 (sequence is synthesized)
tacaggcatgagccaccatgcccggctagagaatgacaggtttcagttgaattcttctcttttaaaagaccctgacttaactgtattttatgaggattttataaatgtaaattaagaaga

SEQ ID NO: 190845 - DNA, 120 bp, Artificial Sequence
  ENSG00000112394_78 (sequence is synthesized)
aaattaagaagacaatacacactctcattttcctaattagaaagactatgcattcacaatccagtacactggatttgctctggtaactaatgataacacttttctacgttaacatgagtt

SEQ ID NO: 190846 - DNA, 120 bp, Artificial Sequence
  ENSG00000112394_79 (sequence is synthesized)
atatttggcagagagaatggaagcttgctaatcagaagttacattagggtgagattaaacatcactctaataataacttctgatgtaacttaatgtggtttgagatgtgtaagattgtag

SEQ ID NO: 190847 - DNA, 120 bp, Artificial Sequence
  ENSG00000112394_80 (sequence is synthesized)
aggcattgcacaatgcttgataaaagttgcattttgcttttgttcttccaccagtttattttagccttaaagttatagctacaacaaattgaaccctgtagttattactgaaagagagtg

SEQ ID NO: 190848 - DNA, 120 bp, Artificial Sequence
  ENSG00000112394_81 (sequence is synthesized)
ttactgaaagagagtgtggatattttaagtatctcctagtataatatgacattgttcatgtggacttattttaatgtttatttgaaaattaattttttaattattttgtatattttgagt

SEQ ID NO: 190849 - DNA, 120 bp, Artificial Sequence
  ENSG00000112394_82 (sequence is synthesized)
atcttagacaccaaagccaaattattccaagtgtatgctatacaccgcagtgcagctctgcttctctcccaacctaccctggggccatttttggcacaatagttgttcaaatgtagatca

SEQ ID NO: 190850 - DNA, 120 bp, Artificial Sequence
  ENSG00000112394_83 (sequence is synthesized)
ctatgctgaatgctcatgctggatttgaccagtatgcagtattttagtactttttaaaaaatgtatgcttctttttgaagactataatttacaatttttttaataatgtgcaatttaata

SEQ ID NO: 190851 - DNA, 120 bp, Artificial Sequence
  ENSG00000112394_84 (sequence is synthesized)
tagataaccaaaatctttttaatgaaaagatctttacaattgcttggaggataagattattttactgtggaaaaatgtgatactcttagtaaatgcaataaaaactttttagcaaattcc

SEQ ID NO: 190852 - DNA, 120 bp, Artificial Sequence
  ENSG00000112394_85 (sequence is synthesized)
atcccaccactttggggggctgatgcaggagttcaagaccagcgtgggcaacataaggagacttcatccctacctggggaaggaaaaaaaaaaaagaaggaagaagcagtgtctaaagta

SEQ ID NO: 190853 - DNA, 120 bp, Artificial Sequence
  ENSG00000112394_86 (sequence is synthesized)
tctgcccctggcaacgtttgttcaaaagtgttcattatgtttcttccttttttcttttgtggctgaaaatgtatttacaattcaccgtaaatgataaaaatggcattggcacacatattt

SEQ ID NO: 190854 - DNA, 120 bp, Artificial Sequence
  ENSG00000112406_0 (sequence is synthesized)
agtgcagccgaatcaaaacaagccggagacccgccttttccctccggctcgggagcgtctcgcttgcgccccgggcccgcggcgcccgcgcggctgcgagcctcgggtggccgcgtgccg

SEQ ID NO: 190855 - DNA, 120 bp, Artificial Sequence
  ENSG00000112406_1 (sequence is synthesized)
gctccaggaagccggagagggcgcggcggccaggatggcgcggcacgggccgtgcggctagacgggagccgagggaaccgccggctcgcgccctccgttctttcccggagccggcttcac

SEQ ID NO: 190856 - DNA, 120 bp, Artificial Sequence
  ENSG00000112406_2 (sequence is synthesized)
gcagggccgggaacggccgtgcctctgggatccgccttcgctgacgccgggcacctacctggacgcgagcgagcgagatgcccaaccccaaaaacagcaaaggcggccgcaaaaacaagc

SEQ ID NO: 190857 - DNA, 120 bp, Artificial Sequence
  ENSG00000112406_3 (sequence is synthesized)
aacagcaaaggcggccgcaaaaacaagcgcgccaacagcagcggcgacgagcaggaaaatggagccggggccctggcagcggcgggcgcggcgggagcggcggccgggggggccctggcg

SEQ ID NO: 190858 - DNA, 120 bp, Artificial Sequence
  ENSG00000112406_4 (sequence is synthesized)
cggcgggcgccggaggcgcggggactggcgccgcgaacgctgcggccgccgcgggggctgcggccgcgggcgatgccaaaaacgaagccccatgtgccactcccctgatctgcagcttcg

SEQ ID NO: 190859 - DNA, 120 bp, Artificial Sequence
  ENSG00000112406_5 (sequence is synthesized)
ccactcccctgatctgcagcttcggtaggccggtggacctggagaaggacgactaccagaaggtggtgtgcaacaacgagcactgcccctgcagcacctggatgcacctgcagtgcttct

SEQ ID NO: 190860 - DNA, 120 bp, Artificial Sequence
  ENSG00000112406_6 (sequence is synthesized)
acgagtgggagagcagcatcctcgtccagttcaactgcatcggccgcgcgcgcagctggaacgagaagcaatgccgccagaacatgtggacaaagaagggctacgacctggccttccgct

SEQ ID NO: 190861 - DNA, 120 bp, Artificial Sequence
  ENSG00000112406_7 (sequence is synthesized)
tctgctcttgccgctgtggccagggccacttgaagaaggacacagactggtatcaggtgaagcggatgcaggacgagaaaaagaagaagtctggctccgagaagaacacagggaggcctc

SEQ ID NO: 190862 - DNA, 120 bp, Artificial Sequence
  ENSG00000112406_8 (sequence is synthesized)
ctggtgaggcggcggaggaggcaaaaaagtgcaggcccccaaataagccccagaaaggcccaagccacgacctcccccgccggcattccatggaccggcagaactcccaggagaaggcag

SEQ ID NO: 190863 - DNA, 120 bp, Artificial Sequence
  ENSG00000112406_9 (sequence is synthesized)
tgggtgccgcagcctacggtgcccgttcccccggtggctccccgggccagtccccacccacgggctactccatcctctctcctgcccacttcagcggcccccgctcctccagatacctcg

SEQ ID NO: 190864 - DNA, 120 bp, Artificial Sequence
  ENSG00000112406_10 (sequence is synthesized)
gggagttcttaaagaacgccatccatctggagcctcacaagaaggccatggctgggggccatgtgttcagaaatgcccactttgattacagccctgcggggttggcagttcacagggggg

SEQ ID NO: 190865 - DNA, 120 bp, Artificial Sequence
  ENSG00000112406_11 (sequence is synthesized)
gacacttcgacacccccgtgcagttccttcggcggctggacctctccgaactcctcactcacatccccaggcataagctgaacactttccacgtgcgcatggaagacgatgcccaagtgg

SEQ ID NO: 190866 - DNA, 120 bp, Artificial Sequence
  ENSG00000112406_12 (sequence is synthesized)
gccagggggaagacttgcggaagttcattctggccgcgctcagtgccagccacagaaacgtggtaaactgtgccctgtgccaccgggcgctcccggtgttcgaacagttcccactggtgg

SEQ ID NO: 190867 - DNA, 120 bp, Artificial Sequence
  ENSG00000112406_13 (sequence is synthesized)
atggaactttgttcctaagcccgtcgagacatgatgagatcgaatatgatgttccttgtcaccttcaagggagactcatgcatctgtatgccgtgtgcgtggactgcctggaaggggttc

SEQ ID NO: 190868 - DNA, 120 bp, Artificial Sequence
  ENSG00000112406_14 (sequence is synthesized)
acaagatcatctgcatcaagtgtaagtcacggtgggatggcagctggcaccagctgggcactatgtacacctacgacatcctggctgcctctccatgttgtcaggcccgcctgaactgta

SEQ ID NO: 190869 - DNA, 120 bp, Artificial Sequence
  ENSG00000112406_15 (sequence is synthesized)
agcactgtgggaagccggtgatcgacgtgaggatcgggatgcagtacttctccgaatatagcaacgtccagcagtgtccacactgtgggaacctggactaccacttcgtgaagccatttt

SEQ ID NO: 190870 - DNA, 120 bp, Artificial Sequence
  ENSG00000112406_16 (sequence is synthesized)
cctccttcaaagttctcgaagcttattgatgaaagctttgctttagtaatagctattttattgatattattactttattacatatcttttatagggaaacattctgtgacattaatttcc

SEQ ID NO: 190871 - DNA, 120 bp, Artificial Sequence
  ENSG00000112406_17 (sequence is synthesized)
tttctaatttaaaggagagttactttgttgtatgtgtgccactaaaataggggctgcccttgccctgtcttgattcccgagtgttaatctgtggttttgaccagagcccagatgggtaat

SEQ ID NO: 190872 - DNA, 120 bp, Artificial Sequence
  ENSG00000112406_18 (sequence is synthesized)
cctgtgcatttgggttggggttcactcttaccaagaatctttgatgcagctttaagatggtggggaggatggggtgaatttaggaaaggaatttgtggttataaactaagagcttgatag

SEQ ID NO: 190873 - DNA, 120 bp, Artificial Sequence
  ENSG00000112406_19 (sequence is synthesized)
gagttggaaggaaactcttactaaaatgttaactttctaaaaaccttcttttagatcttccttgggcctttggaaaaatatgtgacaagtgaatgtaagtctgtgcctggagagctaata

SEQ ID NO: 190874 - DNA, 120 bp, Artificial Sequence
  ENSG00000112406_20 (sequence is synthesized)
gtgcattagtctatctcagcctagtgttctgcagcacacatgggcaggcagtttactcacactgacaggtgacctgaaagtggcacaagtgctgtttctatcactattgtaatttgccag

SEQ ID NO: 190875 - DNA, 120 bp, Artificial Sequence
  ENSG00000112406_21 (sequence is synthesized)
ttcatttttcatgctgaaagtaatatccaaattgtaagacatatgaaagatattagtgttgcaaatatgtttaggtaaactgacctataacagaatatgtgaaatgaatttggaaataat

SEQ ID NO: 190876 - DNA, 120 bp, Artificial Sequence
  ENSG00000112406_22 (sequence is synthesized)
gcaagaaggcagaactcaatcatttaaattgtgtctttgaagttggtaatatagcttttaaggagaacccatgaataacctgatttgggcagtgatgatttattacaggttgcactgttg

SEQ ID NO: 190877 - DNA, 120 bp, Artificial Sequence
  ENSG00000112406_23 (sequence is synthesized)
catttggtgtcaggttcttctcacaggtaaatctttcagccacagaatctaactggtgagcttcagaaccaataattgccacatttattgtcctcaaaattgcttatggccatgtataac

SEQ ID NO: 190878 - DNA, 120 bp, Artificial Sequence
  ENSG00000112406_24 (sequence is synthesized)
caattaattctgagtttccaaaatcaaagatttgaccttaagagggaagggaaaaaagtgtgaaaggatgatgaagaaaataattttactatttcttttaaaagtatgttttggaaaatc

SEQ ID NO: 190879 - DNA, 120 bp, Artificial Sequence
  ENSG00000112406_25 (sequence is synthesized)
aatgattttaatgcatagcagtatgtttgaaaaatagaccattctaaaaagcccatgataccttactgttgatgaaaaaggatgatcatatatatagaacttgattagtcagagcattgg

SEQ ID NO: 190880 - DNA, 120 bp, Artificial Sequence
  ENSG00000112406_26 (sequence is synthesized)
gcattccaaaatacagcctttggttcagtagattttaatgctttaaatagactgacgtcgcatacccttatagaattggaatatgatttctcaaaaattaatttgataatttcatgtatg

SEQ ID NO: 190881 - DNA, 120 bp, Artificial Sequence
  ENSG00000112406_27 (sequence is synthesized)
catgtatgatgtgcatatatgctaaaagaatgcagaaaatcattttatgaatagccaaatttggggttgatgtgaacattttatgttactcatttggtttatactttttttttttttttt

SEQ ID NO: 190882 - DNA, 90 bp, Artificial Sequence
  ENSG00000112406_28 (sequence is synthesized)
ctcaaactgtgtggtttttcttttcagaagtatttaggcaatattgcacgtgagtttcagttctttttttcttttttttgagatggagtc

SEQ ID NO: 190883 - DNA, 120 bp, Artificial Sequence
  ENSG00000112406_29 (sequence is synthesized)
ttctatatgaagtatttgatgttttgtttgaaacaatacagcattaaagaaccaatgttattcactaatatcattcatctttcagtttggatgatttggtttgctgcatctaggttggtg

SEQ ID NO: 190884 - DNA, 120 bp, Artificial Sequence
  ENSG00000112406_30 (sequence is synthesized)
tttgatcatctgaaaaaacatttcagtgggaagaaatgcataaaatgcctataagaagtagaaagtcattgaactgacagtgtttgatgcaactaaaagaggattgtaagacatagcttt

SEQ ID NO: 190885 - DNA, 120 bp, Artificial Sequence
  ENSG00000112406_31 (sequence is synthesized)
ctgcaaacttgtctttaatgcacaaagctgtagtggtgaattaactatctccttattgattctctcctgtacccagatgcaaaaagtgctaagtttctcttgtcctcgtaataccatttg

SEQ ID NO: 190886 - DNA, 120 bp, Artificial Sequence
  ENSG00000112406_32 (sequence is synthesized)
gattttatttctgaatttaaatagtaaaatatttatgatgctgatctttaacccacctaaaattttatagtgaaacctgctttatattgttgttctgaagcttacaattgacctatacat

SEQ ID NO: 190887 - DNA, 120 bp, Artificial Sequence
  ENSG00000112406_33 (sequence is synthesized)
tgcattcagcaagctcctgaatttagaactgccgtcagtgtagtgtatgctgtgttccatgttgcctttttagatggctttctaccccctgaacaataaataggatgaggttttactgta

SEQ ID NO: 190888 - DNA, 120 bp, Artificial Sequence
  ENSG00000112406_34 (sequence is synthesized)
attgggtaaagtttactcttggacattatttcgatgctaaagtaaggattctgtggatgttacttaaagagaaaagcataagagcatgaagcatatctgggaatatcttttgcctttaag

SEQ ID NO: 190889 - DNA, 120 bp, Artificial Sequence
  ENSG00000112406_35 (sequence is synthesized)
acgattcattcttgtctagagggaaaatctggctgatttgggaataaaatataatcgaatattcaacaccatgaagataaatcttattttggaaatctactgaccttaataccccaagct

SEQ ID NO: 190890 - DNA, 120 bp, Artificial Sequence
  ENSG00000112406_36 (sequence is synthesized)
tgccctgaatactttgattggaattggaatatatcaaaaaaggttagtatttttgttgtagttaggatactaaaaggatattagttacccaagagatccaatttgtttttctgatgaata

SEQ ID NO: 190891 - DNA, 120 bp, Artificial Sequence
  ENSG00000112406_37 (sequence is synthesized)
gtgttcagtaaaatgaagcagtcttaagagtgactaataatttcaaagtgatttttcgtctattcttaatattttttaattatttatttttaagagttttataccttgagcagatacaat

SEQ ID NO: 190892 - DNA, 120 bp, Artificial Sequence
  ENSG00000112406_38 (sequence is synthesized)
gatctgctttagtgagaggacaatttctgattgattgttttctcttcaggccatctcacctcttcattctcttgttacatttgaagcagttgatataatgggtttatactttaaaagata

SEQ ID NO: 190893 - DNA, 120 bp, Artificial Sequence
  ENSG00000112406_39 (sequence is synthesized)
gacatggtgccatgaagttggggagttgggtgaattatcccattctagttacagaggagctttccttaaatgccctttaacttctaggttttgttcaagaagttcattttctgagtaaaa

SEQ ID NO: 190894 - DNA, 120 bp, Artificial Sequence
  ENSG00000112406_40 (sequence is synthesized)
ggtattttcatatatgttgggggaaaattaactcatctaaaaagaatcttattaggtatttgaactctaaaactaacagataagacagatatgtaccttattagagcaccagaactaatt

SEQ ID NO: 190895 - DNA, 120 bp, Artificial Sequence
  ENSG00000112406_41 (sequence is synthesized)
tgctaagtcttttgtttagtcctgcaagactgatgcttaatacacagtctgttctcctgtgtctaggtcaggaactccagtttgcttttctgttttgtgtcctggtagcagctgttgagt

SEQ ID NO: 190896 - DNA, 120 bp, Artificial Sequence
  ENSG00000112406_42 (sequence is synthesized)
aactttcattggaggttgggaaggaagtgaggagaaagtgttcttgtttagtgttttatttcctataataggatgctgcctaacccagttcatctctatgtcctgttcactgaatattcc

SEQ ID NO: 190897 - DNA, 120 bp, Artificial Sequence
  ENSG00000112406_43 (sequence is synthesized)
gggtaattgaaagaaaatataatggatgggctccattaaaaccagctcaaaaataaattcttgtcagtaaagatttcttgtcaagatgtcttggattgcacttttgttgaggaaagacag

SEQ ID NO: 190898 - DNA, 120 bp, Artificial Sequence
  ENSG00000112406_44 (sequence is synthesized)
tgtaaatagttaaagaatgttgataaaattgaaacatttggttgtggaattgtgtgtggttttagagggtttctgtttgtgaaatgtatgtattaaaaataataaaattccagaaactaa

SEQ ID NO: 190899 - DNA, 120 bp, Artificial Sequence
  ENSG00000112414_0 (sequence is synthesized)
ccggtctcctcagcaccagccccacgcacaccctacttcctcagcttctcgccctcaccctgccaacttccctgcgaggagggacctgccgccagcctgcttcctcgtccgcaggccctg

SEQ ID NO: 190900 - DNA, 120 bp, Artificial Sequence
  ENSG00000112414_1 (sequence is synthesized)
cgctgaacgctgccgcgcccagggttcaccttgcgccgtcgggaaagcccatgaactctccagaaacggcgtaaaggagggtcccgccgcggcgcagggctggggcgcctgggttccccc

SEQ ID NO: 190901 - DNA, 120 bp, Artificial Sequence
  ENSG00000112414_2 (sequence is synthesized)
tgggtggagcagcggcagcagagcgggaaagtggtggaggatgatcttgcggccaaaggggacctcggcgcagtaatgtcaacatgatgtttcgctcagatcgaatgtggagctgccatt

SEQ ID NO: 190902 - DNA, 120 bp, Artificial Sequence
  ENSG00000112414_3 (sequence is synthesized)
ggaaatggaagcccagtcctctcctgttcttatttgctttatatatcatgtgtgttcctcactcagtgtggggatgtgccaactgccgagtggttttgtccaacccttctgggaccttta

SEQ ID NO: 190903 - DNA, 120 bp, Artificial Sequence
  ENSG00000112414_4 (sequence is synthesized)
cttctccatgctaccctaacgactacccaaacagccaggcttgcatgtggacgctccgagcccccaccggttatatcattcagataacatttaacgactttgacattgaagaagctccca

SEQ ID NO: 190904 - DNA, 120 bp, Artificial Sequence
  ENSG00000112414_5 (sequence is synthesized)
attgcatttatgactcattatcccttgataatggagagagccagactaaattttgtggagcaactgccaaaggcctatcatttaactcaagtgcgaatgagatgcatgtgtccttttcaa

SEQ ID NO: 190905 - DNA, 120 bp, Artificial Sequence
  ENSG00000112414_6 (sequence is synthesized)
gtgactttagcatccagaagaaaggtttcaatgccagctacatcagagttgccgtgtccttaaggaatcaaaaggtcattttaccccagacatcagatgcttaccaggtatctgttgcaa

SEQ ID NO: 190906 - DNA, 120 bp, Artificial Sequence
  ENSG00000112414_7 (sequence is synthesized)
aaagcatctctattccagagctcagtgctttcacactctgctttgaagcaaccaaagttggccatgaagacagtgattggacagctttctcctactcaaatgcatccttcacacaattgc

SEQ ID NO: 190907 - DNA, 120 bp, Artificial Sequence
  ENSG00000112414_8 (sequence is synthesized)
tcagttttggaaaggccaagagtggctactttctatccatttctgattcaaaatgtttgttgaataatgcattacctgtcaaagaaaaagaagacatttttgcagaaagctttgaacagc

SEQ ID NO: 190908 - DNA, 120 bp, Artificial Sequence
  ENSG00000112414_9 (sequence is synthesized)
tctgccttgtttggaataattctttgggctctattggtgtaaatttcaaaagaaactatgaaacagttccatgtgattctaccattagtaaagttattcctgggaatgggaaattgttgt

SEQ ID NO: 190909 - DNA, 120 bp, Artificial Sequence
  ENSG00000112414_10 (sequence is synthesized)
tgggctccaatcaaaatgaaattgtctctctaaaaggggacatttataactttcgactttggaattttaccatgaatgccaaaatcctctccaacctcagctgtaatgtgaaagggaatg

SEQ ID NO: 190910 - DNA, 120 bp, Artificial Sequence
  ENSG00000112414_11 (sequence is synthesized)
tagtcgactggcaaaatgacttctggaatatcccaaacctagctctgaaagctgaaagcaacctaagctgtggttcctacctgatcccgctcccagcagcagaactggccagctgtgcag

SEQ ID NO: 190911 - DNA, 120 bp, Artificial Sequence
  ENSG00000112414_12 (sequence is synthesized)
acctggggaccctctgtcaagctactgtaaactctcctagtactacaccacccactgtcaccactaacatgcctgttactaacagaatcgataaacaaaggaatgatggaattatctata

SEQ ID NO: 190912 - DNA, 120 bp, Artificial Sequence
  ENSG00000112414_13 (sequence is synthesized)
gaatatccgtagtgattcagaacatccttcgtcaccctgaggtaaaagtacagagcaaggtggcagaatggctcaattcaaccttccaaaattggaactacacggtttatgtcgttaata

SEQ ID NO: 190913 - DNA, 120 bp, Artificial Sequence
  ENSG00000112414_14 (sequence is synthesized)
tcagttttcacctgagtgctggagaggacaagattaaagtcaagagaagccttgaggatgagccaaggttggtgctttgggcccttctagtttacaatgctaccaacaatactaatttgg

SEQ ID NO: 190914 - DNA, 120 bp, Artificial Sequence
  ENSG00000112414_15 (sequence is synthesized)
aaggaaaaatcattcagcagaagctcctaaaaaataatgagtccttggatgaaggcttgaggctacatacagtgaatgtgagacaactgggtcattgtcttgccatggaggaacccaaag

SEQ ID NO: 190915 - DNA, 120 bp, Artificial Sequence
  ENSG00000112414_16 (sequence is synthesized)
gctactactggccatctatccaaccttctgaatacgttcttccttgtccagacaagcctggcttttctgcttctcggatatgtttttacaatgctaccaacccattggtaacctactggg

SEQ ID NO: 190916 - DNA, 120 bp, Artificial Sequence
  ENSG00000112414_17 (sequence is synthesized)
gacctgttgatatctccaactgtttaaaagaagcaaatgaagttgctaaccagattttaaatttaactgctgatgggcagaacttaacctcagccaatattaccaacattgtggaacagg

SEQ ID NO: 190917 - DNA, 120 bp, Artificial Sequence
  ENSG00000112414_18 (sequence is synthesized)
tcaaaagaattgtgaataaagaagaaaacattgatataacacttggctcaactctaatgaatatattttctaatatcttaagcagttcagacagtgacttgcttgagtcatcttctgaag

SEQ ID NO: 190918 - DNA, 120 bp, Artificial Sequence
  ENSG00000112414_19 (sequence is synthesized)
ctttaaaaacaattgatgaattggccttcaagatagacctaaatagcacatcacatgtgaatattacaactcggaacttggctctcagcgtatcatccctgttaccagggacaaatgcaa

SEQ ID NO: 190919 - DNA, 120 bp, Artificial Sequence
  ENSG00000112414_20 (sequence is synthesized)
tttcaaattttagcattggtcttccaagcaataatgaatcgtatttccagatggattttgagagtggacaagtggatccactggcatctgtaattttgcctccaaacttacttgagaatt

SEQ ID NO: 190920 - DNA, 120 bp, Artificial Sequence
  ENSG00000112414_21 (sequence is synthesized)
taagtccagaagattctgtattagttagaagagcacagtttactttcttcaacaaaactggacttttccaggatgtaggaccccaaagaaaaactttagtgagttatgtgatggcgtgca

SEQ ID NO: 190921 - DNA, 120 bp, Artificial Sequence
  ENSG00000112414_22 (sequence is synthesized)
gtattggaaacattactatccagaatctgaaggatcctgttcaaataaaaatcaaacatacaagaactcaggaagtgcatcatcccatctgtgccttctgggatctgaacaaaaacaaaa

SEQ ID NO: 190922 - DNA, 120 bp, Artificial Sequence
  ENSG00000112414_23 (sequence is synthesized)
gttttggaggatggaacacgtcaggatgtgttgcacacagagattcagatgcaagtgagacagtctgcctgtgtaaccacttcacacactttggagttctgatggaccttccaagaagtg

SEQ ID NO: 190923 - DNA, 120 bp, Artificial Sequence
  ENSG00000112414_24 (sequence is synthesized)
cctcacagttagatgcaagaaacactaaagtcctcactttcatcagctatattgggtgtggaatatctgctattttttcagcagcaactctcctgacatatgttgcttttgagaaattgc

SEQ ID NO: 190924 - DNA, 120 bp, Artificial Sequence
  ENSG00000112414_25 (sequence is synthesized)
gaagggattatccctccaaaatcttgatgaacctgagcacagccctgctgttcctgaatctcctcttcctcctagatggctggatcacctccttcaatgtggatggactttgcattgctg

SEQ ID NO: 190925 - DNA, 120 bp, Artificial Sequence
  ENSG00000112414_26 (sequence is synthesized)
ttgcagtcctgttgcatttcttccttctggcaacctttacctggatggggctagaagcaattcacatgtacattgctctagttaaagtatttaacacttacattcgccgatacattctaa

SEQ ID NO: 190926 - DNA, 120 bp, Artificial Sequence
  ENSG00000112414_27 (sequence is synthesized)
aattctgcatcattggctggggtttgcctgccttagtggtgtcagttgttctagcgagcagaaacaacaatgaagtctatggaaaagaaagttatgggaaagaaaaaggtgatgaattct

SEQ ID NO: 190927 - DNA, 120 bp, Artificial Sequence
  ENSG00000112414_28 (sequence is synthesized)
tctgtgggaggaatggcaagagaagcaaccggaccctgagagaagaagtgttaaggaacctgcgcagtgtggttagcttgacctttctgttgggcatgacatggggttttgcattctttg

SEQ ID NO: 190928 - DNA, 120 bp, Artificial Sequence
  ENSG00000112414_29 (sequence is synthesized)
cctggggacccttaaatatccccttcatgtacctcttctccatcttcaattcattacaaggcttatttatattcatcttccactgtgctatgaaggagaatgttcagaaacagtggcggc

SEQ ID NO: 190929 - DNA, 120 bp, Artificial Sequence
  ENSG00000112414_30 (sequence is synthesized)
agcatctctgctgtggtagatttcggttagcagataactcagattggagtaagacagctaccaatatcatcaagaaaagttctgataatctaggaaaatctttgtcttcaagctccattg

SEQ ID NO: 190930 - DNA, 120 bp, Artificial Sequence
  ENSG00000112414_31 (sequence is synthesized)
gttccaactcaacctatcttacatccaaatctaaatccagctctaccacctatttcaaaaggaatagccacacagacagtgcttccatggacaagtccttgtcaaaactggcccatgctg

SEQ ID NO: 190931 - DNA, 120 bp, Artificial Sequence
  ENSG00000112414_32 (sequence is synthesized)
atggagatcaaacatcaatcatccctgtccatcaggtcattgataaggtcaagggttattgcaatgctcattcagacaacttctataaaaatattatcatgtcagacaccttcagccaca

SEQ ID NO: 190932 - DNA, 120 bp, Artificial Sequence
  ENSG00000112414_33 (sequence is synthesized)
gcacaaagttttaatgtctttaagaaaaagaaatcaatctgcagaaatgtgaagatttgcaagcagtgtaaactgcaactagtgatgtaaatgtgctattacctaggtaactgcatatat

SEQ ID NO: 190933 - DNA, 120 bp, Artificial Sequence
  ENSG00000112414_34 (sequence is synthesized)
ataaggaatgtattttgttaagaaggcttttgtgaaattcagaatttttctttttaatatatttcttccatggaagagttgtcatcactaaaacttcagtactgagagtaacatgactca

SEQ ID NO: 190934 - DNA, 120 bp, Artificial Sequence
  ENSG00000112414_35 (sequence is synthesized)
gtagccacagaagctatgatttgtaaaatatataattgaatcagagtaatcataatgcaggggagacattcaaattagagacaagggagaagcaatgctgaggaagaccctagatagagc

SEQ ID NO: 190935 - DNA, 120 bp, Artificial Sequence
  ENSG00000112414_36 (sequence is synthesized)
tcattttactccacctaatcgttatatctggatatacccattttctgcatcttctttctcaacaataaaaaatgtaactattttgaatgcccacaaatcccattccagtgttactttctg

SEQ ID NO: 190936 - DNA, 120 bp, Artificial Sequence
  ENSG00000112414_37 (sequence is synthesized)
tgaatgcagtaccatattctcattttcaatgacatttcaaccacaggcagaaaagactgtttactccttgacccaaagattaaaaaggattttttattattttaaatattacaccttcag

SEQ ID NO: 190937 - DNA, 120 bp, Artificial Sequence
  ENSG00000112414_38 (sequence is synthesized)
aaccataacatgcttaagaaaactttcccaaaatgttgacctagttaaatgaggctatataaatttctaatattttacttattctattcaaggcatagggccaaagcattaagtataatt

SEQ ID NO: 190938 - DNA, 120 bp, Artificial Sequence
  ENSG00000112414_39 (sequence is synthesized)
taatcccatacattcgagttaagtttagtgttgatgttccatcattctggacctcccaggagttgtttaagaatgaatctcttacacctctacttttgcccctctactgtatattaagcc

SEQ ID NO: 190939 - DNA, 120 bp, Artificial Sequence
  ENSG00000112414_40 (sequence is synthesized)
cataggcttgtgggaggaaggagaatttccattaggcaagctgtatgcagtggaattttccttttaggagacacacaattaagactctctggttctgtccttgctttggagactttaaga

SEQ ID NO: 190940 - DNA, 120 bp, Artificial Sequence
  ENSG00000112414_41 (sequence is synthesized)
catttcctaaagcacaaataaaagcctcgtatttccccattgagagttttgttccaaggaatatgaagtgagacatatgggtgagtcataataatcaaaataatttatgaagagctgggt

SEQ ID NO: 190941 - DNA, 120 bp, Artificial Sequence
  ENSG00000112414_42 (sequence is synthesized)
ctgcaatagctagtctaaaaactacttgtgtgtcagtcctctggttatagtatataagagcctgaggaggtctggcaagatagatggtgtattatttatggatcaggctgctgcatacaa

SEQ ID NO: 190942 - DNA, 120 bp, Artificial Sequence
  ENSG00000112414_43 (sequence is synthesized)
accttgcatactattatgcagcttacctaactctcagactattctgagtaatgcttgcttgctaatgaatgtataggagaccacattgtaattgttcttagatgatggagtccatgcagt

SEQ ID NO: 190943 - DNA, 120 bp, Artificial Sequence
  ENSG00000112414_44 (sequence is synthesized)
ttcttagaaatcggtctcagtgcatgctgtgctttttcacatttgctctgggttatctgggaagtatcaggttctgggaggcaacagcattaagtgataagaaaaggagacattctggca

SEQ ID NO: 190944 - DNA, 120 bp, Artificial Sequence
  ENSG00000112414_45 (sequence is synthesized)
aagccaatctgcttaaaggcaaagtccagaacctggaacctagaggcctttctctctgcacgaaaaacaggtagtttgcagtctgagatatgggagagcttttaggctacacagcaaccc

SEQ ID NO: 190945 - DNA, 120 bp, Artificial Sequence
  ENSG00000112414_46 (sequence is synthesized)
aagggacctctcaccttttgctgagcttcaatcaggaagctatttgcctggctccagcagatgatgagataatgaggtagtgggttttttattactgttccattttgcaacatcctgcaa

SEQ ID NO: 190946 - DNA, 120 bp, Artificial Sequence
  ENSG00000112414_47 (sequence is synthesized)
caccatcctgggagacaagagcattacccagcttggctttcacgggggagggttgtattcagtaaaaaagaatagtaaatataaggtcactgagattctaagtaagatagtaaatctaag

SEQ ID NO: 190947 - DNA, 120 bp, Artificial Sequence
  ENSG00000112414_48 (sequence is synthesized)
gtcactgagccaaatccttttcaataggcatatattaacaggctgcttattttggcggaggttacatatggatgaaaatgaatcttagtcactgaatattcatatacatttcccccaaaa

SEQ ID NO: 190948 - DNA, 120 bp, Artificial Sequence
  ENSG00000112414_49 (sequence is synthesized)
ccttagacattcatagtagattttaattagttagctttctaactagtcagatttctgcccaaagtgcttagtcaatagtaattaagatatagcttcaaaaatggctttgcttttgatttc

SEQ ID NO: 190949 - DNA, 120 bp, Artificial Sequence
  ENSG00000112414_50 (sequence is synthesized)
tactcatattcgtatggctccagaaaaatatttttttcatatttgacaatgtcagctccactttagaaattttcaataaccagatgagaaaaaaattaagaaattgctcaagggaaacat

SEQ ID NO: 190950 - DNA, 120 bp, Artificial Sequence
  ENSG00000112414_51 (sequence is synthesized)
ttgtaaatggatttgaaagattgagccaaattctgttgtcagttctaagcatgcagttctcacctccatttagtcccccatcagaacagaggtcaggaatttagctggggagcctaaatt

SEQ ID NO: 190951 - DNA, 120 bp, Artificial Sequence
  ENSG00000112414_52 (sequence is synthesized)
tagttcagcttacctttgagaatagcatcaattcagactctcttttcattatgttttcttttctttttccctctttttaaactacattgtgttagagtcatagtctaggatcctgagaga

SEQ ID NO: 190952 - DNA, 120 bp, Artificial Sequence
  ENSG00000112414_53 (sequence is synthesized)
ttttccattcttgtcaccattcacttgcattgtaaagattttctttgtctgttgttggcatagattcttttgtacatatttatttatttgtgtttatatatgtcaattggtttcctttct

SEQ ID NO: 190953 - DNA, 120 bp, Artificial Sequence
  ENSG00000112414_54 (sequence is synthesized)
tagcttgatattgcctagctttgttgttttaattaactttctattagagagactgtatatattttttctaaatactttgtgaaatcatttttggtagcaatatctttgaatatgatgaat

SEQ ID NO: 190954 - DNA, 120 bp, Artificial Sequence
  ENSG00000112414_55 (sequence is synthesized)
aaaagtgactgtgagtgcaaatagaattagcagtaagaagctactctagctaatttgccattttacttaaatggaaaatgtttttcaaataaatacttatgttgttcatgttccaagtta

SEQ ID NO: 190955 - DNA, 120 bp, Artificial Sequence
  ENSG00000112414_56 (sequence is synthesized)
ccagctccagtcacgccggaagcgcgggcggagcgcacgggtccggggagagtcgcctgcgcccgcgagggggacccaagtacctagggtggtggccgagtcccgcctcccgccagcggg

SEQ ID NO: 190956 - DNA, 120 bp, Artificial Sequence
  ENSG00000112414_57 (sequence is synthesized)
cacctatttcaaaaggaatagccacacagataatgtctcctatgagcattccttcaacaaaagtggatcactcagacagtgcttccatggacaagtccttgtcaaaactggcccatgctg

SEQ ID NO: 190957 - DNA, 120 bp, Artificial Sequence
  ENSG00000112414_58 (sequence is synthesized)
aaattatcaatatcctcttattgtttacatgtcagtctcttctctgagccattgccagcatatcagaaaatcagatgctccagataaataatgcagtgatgattttttcagagcagttca

SEQ ID NO: 190958 - DNA, 120 bp, Artificial Sequence
  ENSG00000112414_59 (sequence is synthesized)
acgtgcagcacggtagttcttaggcattatattgattgcaaagaagggcaggaatctctgtgtatgcctgtatcattcactcctggggaataaagataacataagtggatgactcagaaa

SEQ ID NO: 190959 - DNA, 120 bp, Artificial Sequence
  ENSG00000112414_60 (sequence is synthesized)
gttaaccaagttgccatttctaagaagtttgaatctgggatatggaatgttggcttgcttgcatttctcttcttttcatttcttttctttacatttcattagcagtcttatgaagcagtt

SEQ ID NO: 190960 - DNA, 120 bp, Artificial Sequence
  ENSG00000112414_61 (sequence is synthesized)
ttattctatgaatatgattgtcaacaaagaattatacatacacacaaatgtacctgtatgtatattcacacatatagacatatatatatatgttgtcattaaaaagctcttttaattttt

SEQ ID NO: 190961 - DNA, 120 bp, Artificial Sequence
  ENSG00000112414_62 (sequence is synthesized)
aaaacgtgttttcaattcaaattaaacaaggagtaacaggcaccgctcctcagtccagaggcctggccctgccaagaaggcgctctccggaatcaacacctgggggcttggaaggatgtt

SEQ ID NO: 190962 - DNA, 120 bp, Artificial Sequence
  ENSG00000112414_63 (sequence is synthesized)
ctctttctctctcccttgcccctttctcccatagttattatctttcactacgtgttttgagaaaacctcaaaatctgctgctggtaaatctaattcttatacttgaaaatgttgactgat

SEQ ID NO: 190963 - DNA, 120 bp, Artificial Sequence
  ENSG00000112414_64 (sequence is synthesized)
ttatagatttcttcctatgtcttaattaaaatcaatgcattttctcctttggcacacatgtaaaacccaaatgagatctacagctctgtctgtaggggtttatccaggagttgcagtgac

SEQ ID NO: 190964 - DNA, 120 bp, Artificial Sequence
  ENSG00000112414_65 (sequence is synthesized)
attagttagacatataaaaacttgctgatcacttagcagttgctgcttccaagaggtcttggtccatgaagtggcaaggtctgaatgttggctaagtttaactagagcagtagccataaa

SEQ ID NO: 190965 - DNA, 120 bp, Artificial Sequence
  ENSG00000112414_66 (sequence is synthesized)
gtattgtgggagctcagagtgggtatgctttcataatctgggtgacaggggtggtcagcttaccttctacaagaggggttactggagctaagcatgagtaggggccaccatacttggggt

SEQ ID NO: 190966 - DNA, 120 bp, Artificial Sequence
  ENSG00000112419_0 (sequence is synthesized)
atgaagtatgctcagtgtgccagcaagggctgataatcagcagaaggacagggtgcttcgttagtcagaagagccagggcttcccggctgccaggctacagaactcgcctcgccactcct

SEQ ID NO: 190967 - DNA, 120 bp, Artificial Sequence
  ENSG00000112419_1 (sequence is synthesized)
gagacatggacaacgccgttgacggactggacaaagcttctatagcaaactcagatggccccacagcaggttcccaaacacctcccttcaaaagaaaggggaaactatccaccattggta

SEQ ID NO: 190968 - DNA, 120 bp, Artificial Sequence
  ENSG00000112419_2 (sequence is synthesized)
aaatctttaagccttggaaatggaggaaaaagaagaccagcgacaaatttagagaaacctcggcagtattagaaaggaagatatccacacgacaaagtagagaggagctgataagaaggg

SEQ ID NO: 190969 - DNA, 120 bp, Artificial Sequence
  ENSG00000112419_3 (sequence is synthesized)
gagtgcttaaggaattgcctgatcaagatggagatgtaacagttaactttgaaaattcaaacgggcacatgatacccatcggagaggaatctacccgagaggaaaatgtagtaaagtctg

SEQ ID NO: 190970 - DNA, 120 bp, Artificial Sequence
  ENSG00000112419_4 (sequence is synthesized)
aagaaggtaatggctctgtatctgaaaaaacaccacctctggaggaacaggcagaagataagaaagctggctcctctcattcaaaaaaaacaactggctctaaagcatcagcttcgccat

SEQ ID NO: 190971 - DNA, 120 bp, Artificial Sequence
  ENSG00000112419_5 (sequence is synthesized)
ccacttcatccacctcatctcgtcccaaagcttcaaaggagacagtttctagcaaagcagggacagtggggaccaccaagggcaagagaaaaactgacaagcagccaataacttctcacc

SEQ ID NO: 190972 - DNA, 120 bp, Artificial Sequence
  ENSG00000112419_6 (sequence is synthesized)
tgtcctcagacacaacaacttctggcacatccgacctgaaaggagagcctgcagagaccagagtggagagtttcaaactcgaacagactgtccctggagctgaggagcagaacacaggca

SEQ ID NO: 190973 - DNA, 120 bp, Artificial Sequence
  ENSG00000112419_7 (sequence is synthesized)
tggccccccctctccctcttgaggatcagtgcattactgcctcagacactccagttgtcctcgtcagcgttggagctgacctgcccgtctctgccttagacccaagtcagcttctttggg

SEQ ID NO: 190974 - DNA, 120 bp, Artificial Sequence
  ENSG00000112419_8 (sequence is synthesized)
ctgaagagccgacgaacagaaccactctctactcaggcactggcttaagtgttaacagagaaaatgcaaaatgtttcacaaccaaagaggagctggggaagacagtgcctcagctactga

SEQ ID NO: 190975 - DNA, 120 bp, Artificial Sequence
  ENSG00000112419_9 (sequence is synthesized)
ctcctgggctgatgggcgaatcttcagaatcctttagtgcctcagaagatgaaggccacagggaataccaagccaatgactctgactcggacgggcctatcttgtacaccgatgatgagg

SEQ ID NO: 190976 - DNA, 120 bp, Artificial Sequence
  ENSG00000112419_10 (sequence is synthesized)
acgaagacgaagatgaggatggcagtggagaaagtgctttggcaagtaaaatacgccggagggatactcttgctatcaaacttggcaacagaccatctaagaaagaactagaggacaaaa

SEQ ID NO: 190977 - DNA, 120 bp, Artificial Sequence
  ENSG00000112419_11 (sequence is synthesized)
acatcttgcagcgtacatctgaagaagagaggcaggaaatccgacaacaaattggaaccaagttagtcaggaggctgagccagaggcccacaactgaagaattagagcaaagaaacatcc

SEQ ID NO: 190978 - DNA, 120 bp, Artificial Sequence
  ENSG00000112419_12 (sequence is synthesized)
taaaacaaaagaatgaagaagaggaacaagaagcaaaaatggaacttaaacgcagactcagcagaaagctcagcctgagacccacagtggcagagctacaagctcgaaggatcctgcgat

SEQ ID NO: 190979 - DNA, 120 bp, Artificial Sequence
  ENSG00000112419_13 (sequence is synthesized)
ttaacgagtatgtagaagtcacggattctcctgactatgaccgccgagcagacaagccctgggccaggttaacacctgcagacaaggcagcaataaggaaagaactaaatgaatttaaaa

SEQ ID NO: 190980 - DNA, 120 bp, Artificial Sequence
  ENSG00000112419_14 (sequence is synthesized)
gcacagaaatggaagttcatgaagagagtcgacagtttacaaggtttcatcgtccataacgaagagtgagactatttggaaacagagactgatcatctttgggggaagccctgcttcctg

SEQ ID NO: 190981 - DNA, 120 bp, Artificial Sequence
  ENSG00000112419_15 (sequence is synthesized)
cgccggctgcggccggccgggctgggagacccgcgcggggtagaaggtgaggggacccggcgggccgctcggcacaggccgggacatgaacgcctggaagtctggctgggagcggaccca

SEQ ID NO: 190982 - DNA, 120 bp, Artificial Sequence
  ENSG00000112419_16 (sequence is synthesized)
cccatgatcgaaggaccaaaggagccgcttgatcgctggacctggccctgcgaccccagtcatgggccagacctcggtgtccacgctgtccccgcagcccggcagcgttgacggactgga

SEQ ID NO: 190983 - DNA, 120 bp, Artificial Sequence
  ENSG00000112419_17 (sequence is synthesized)
gtgtggcccagatggctccaacaagcaaaaggaaggatgcagtgactcttgctgcccagaatgcacagcgatggtaagagacaccgtggatattcttcatcagaagctttaatcaaagaa

SEQ ID NO: 190984 - DNA, 120 bp, Artificial Sequence
  ENSG00000112419_18 (sequence is synthesized)
tttataatgcgggtgaaagaaaaatatagattaaaattgctgggcactgaaaaggggtgggagttggaaatcagaaagaaagagaaatatttcattatgttaatgaagaaaagagaaaat

SEQ ID NO: 190985 - DNA, 120 bp, Artificial Sequence
  ENSG00000112419_19 (sequence is synthesized)
tgaagcataaatgtatttttgaagtagttattcggtagctgagaacttattaagggatttaggaatttaacctcctgatgtggattcctcaaagacttgatcggagaatactcttgtttc

SEQ ID NO: 190986 - DNA, 120 bp, Artificial Sequence
  ENSG00000112419_20 (sequence is synthesized)
accattatgttggtacagtatagtaccattattttatgttgtgccagtgaatccagttgccagaaataagtctgaatgttttcatgcatctttttcttaaatgcaagagcttctactgac

SEQ ID NO: 190987 - DNA, 120 bp, Artificial Sequence
  ENSG00000112419_21 (sequence is synthesized)
tcttaacaagcatgcttacccaaattttgttgcatgcttttaagtagcattagctatgcacacttgacatttttaaatatccctttcctagtgtaccagccttcacaggataagaggact

SEQ ID NO: 190988 - DNA, 120 bp, Artificial Sequence
  ENSG00000112419_22 (sequence is synthesized)
gggaataaagtcagatgtaatgtgaccctagaaaactgtagcaagcttcagaaataaatcttttgatctttccctatcttgattagatccaaagtcaaagcaaccatacttcacctagag

SEQ ID NO: 190989 - DNA, 120 bp, Artificial Sequence
  ENSG00000112419_23 (sequence is synthesized)
aagacagtattggcaatcatgacacctgtaataaaaacttgaatccaaagtcaaaacttaagcaagatacaaatgtgctgcctgcagttagtcctgcatgggaataaggactagttattt

SEQ ID NO: 190990 - DNA, 120 bp, Artificial Sequence
  ENSG00000112419_24 (sequence is synthesized)
ttttagtgctgcatttttttaaagttggattgctgctatttaaaaaaaaaaaaaggacacagatcaaaaaaacacccaaaggcttaacagaacatggaaagttcccactaagttgtgtgt

SEQ ID NO: 190991 - DNA, 120 bp, Artificial Sequence
  ENSG00000112419_25 (sequence is synthesized)
gaggaaatcctcatcttgtattttaagaatctgcagatggcatccatagatacagtacagtatttactgtcaatgcaaaagaatcagtgaggttaaagtagtggaagttttccctatgag

SEQ ID NO: 190992 - DNA, 120 bp, Artificial Sequence
  ENSG00000112419_26 (sequence is synthesized)
cctacagtctgtattgtttacattaagaaactctctattattgtgttgctattttccatggagtcacaggcacactatgacttctgctcccaaatacatatgaccatatgtaaataccac

SEQ ID NO: 190993 - DNA, 120 bp, Artificial Sequence
  ENSG00000112419_27 (sequence is synthesized)
cttgcatttcattgttcttcacaagtgctttgtgcccctttaattaaaaacacatgaaatgaataacaaaacaagacccaaatagagtttattttattctcagagtttggactacaattt

SEQ ID NO: 190994 - DNA, 120 bp, Artificial Sequence
  ENSG00000112419_28 (sequence is synthesized)
tctaagatgtttctggttcaagactgtcattttctatttcaaccgaaaagtaagcatttaacccggtgaataaatgtagatcctgccattcattggtattttaaagaaccacttgaaatc

SEQ ID NO: 190995 - DNA, 120 bp, Artificial Sequence
  ENSG00000112419_29 (sequence is synthesized)
ggatcattttatttaaaaataaaaaatgttaatgccagttggcctactataaaaagccaggaccatgttagaattaggaaaagtaaccagcattactgcacctcttgttagactctgtgc

SEQ ID NO: 190996 - DNA, 120 bp, Artificial Sequence
  ENSG00000112419_30 (sequence is synthesized)
attaataaaacacacctagagtctgttgtcatttcactaataggataagacaaattttttgctttgaaaaaatttttctgcatgcccaggtgtctgtctctggctgaggttttgtctatt

SEQ ID NO: 190997 - DNA, 120 bp, Artificial Sequence
  ENSG00000112419_31 (sequence is synthesized)
ttacagtgtttcaatccagccataaaaattaacttgtgattttttttttcccaaagtcatgcttttccttaattatatttttattttattattttagtgtcttgagaaaaataccaagag

SEQ ID NO: 190998 - DNA, 120 bp, Artificial Sequence
  ENSG00000112419_32 (sequence is synthesized)
atataatgtttcttttaattgtctatgcttaatcatctttaaacactttttaaatttctaaccacaagacctctctataatggtaaatgtaagacatcaccattttatcactcaaagtat

SEQ ID NO: 190999 - DNA, 120 bp, Artificial Sequence
  ENSG00000112419_33 (sequence is synthesized)
gttattgaaagtttctatttggttgataaaaggaacaattttttcccacttttgatgcctgtgatgcaattttttattgcctacaatgagatacacttagtacaaaaaatgaaaatctgg

SEQ ID NO: 191000 - DNA, 120 bp, Artificial Sequence
  ENSG00000112419_34 (sequence is synthesized)
tatttcaaaattgcatttcttgtataataggtcagatttattaactactcatactttttctttacactaatcgatacatttagaaaaaattttctaagttagagacaagtttaaaagtaa

SEQ ID NO: 191001 - DNA, 120 bp, Artificial Sequence
  ENSG00000112419_35 (sequence is synthesized)
aaaaaaaaaaaaattagccactgctagtctactgtttaggtaatcggaatcaccaattattttattagaatgatggcttgagtaaaaagctgtggaaagaattaaaggattatgagctaa

SEQ ID NO: 191002 - DNA, 120 bp, Artificial Sequence
  ENSG00000112419_36 (sequence is synthesized)
ttctgctcctcctaagcctagacccaaacctaaacccaaaaaatcacctgtgcctccgaaaggggccactgctggggccagccacaaaggtgatgaagtgcctcccattaaaaaaaatac

SEQ ID NO: 191003 - DNA, 120 bp, Artificial Sequence
  ENSG00000112419_37 (sequence is synthesized)
caaggctcctggtaagcaggcccccgtccctccacccaagccagcaagccgaaacacgacccgagaggctgctggctcctctcattcaaaaaaaacaactggctctaaagcatcagcttc

SEQ ID NO: 191004 - DNA, 120 bp, Artificial Sequence
  ENSG00000112419_38 (sequence is synthesized)
cagagatgagacatatccccaccggccacccagccagaggtctcctacctgggggccctaaagggatgcagaggtctggcccaccctccgtgcataggcacctctgtccaccaccagcgt

SEQ ID NO: 191005 - DNA, 120 bp, Artificial Sequence
  ENSG00000112419_39 (sequence is synthesized)
tgggaattggatttcttttgttgtaacacaattccaggtttttggctatttaaagtttgacattaggctgacatcgaggaagtaagtgggttttcctgagttcccaagatatgattaagg

SEQ ID NO: 191006 - DNA, 120 bp, Artificial Sequence
  ENSG00000112419_40 (sequence is synthesized)
aagaaaacaaacccatctccaggaagatcccaggcaggaaagaactagacagatgtagaaaccaaagtgaccattttagtttttttattggagaataaaacattaatattagggtattaa

SEQ ID NO: 191007 - DNA, 120 bp, Artificial Sequence
  ENSG00000112419_41 (sequence is synthesized)
gaagatgctcagcaagcttgatcagaatcttcatggtcattaccaatcagtctgacaaaatagttctctggtagtcagcattcatttaaggcagcttgcctgataatttcctgtgttatg

SEQ ID NO: 191008 - DNA, 120 bp, Artificial Sequence
  ENSG00000112419_42 (sequence is synthesized)
tgaagtgtcttgcactttcacatgttagctataattccttaaattacttaactgaaatctgtaatagagaaccattttggcatttgaacagctattttacatggagaaaaagcaaacaca

SEQ ID NO: 191009 - DNA, 120 bp, Artificial Sequence
  ENSG00000112419_43 (sequence is synthesized)
tctgtttgctttacccagaaaaactgactttctggtttcatcttcatattgtttagtagcataatgagagtagtcctttatctttctctaatgttagtaaatatattctgttagtaggaa

SEQ ID NO: 191010 - DNA, 120 bp, Artificial Sequence
  ENSG00000112419_44 (sequence is synthesized)
gttctgaaattgaagggaaaatatatttaaggaaataaaggaattcaatacacccttcaaaagtcaccaaatactgaaaataagagatgagtccttaaaacctgagtcaaaaaaggtcca

SEQ ID NO: 191011 - DNA, 84 bp, Artificial Sequence
  ENSG00000112419_45 (sequence is synthesized)
taagagatgagtccttaaaacctgagtcaaaaaaggtccagttttacagcctgcaattaattcagggctgcgttggcattaaaa

SEQ ID NO: 191012 - DNA, 120 bp, Artificial Sequence
  ENSG00000112419_46 (sequence is synthesized)
cttaaaagaggaaaaatttgcattaacattgcatattctgatatgtaccatattaacacataacaggcattttatttatgcttcatagaatcagacagacacaactttcaaaaatcttac

SEQ ID NO: 191013 - DNA, 120 bp, Artificial Sequence
  ENSG00000112419_47 (sequence is synthesized)
tgtattcacaatagaaaagggtagtcttgtctaccacagaggagtatgtccacacttaataatgaaaactttcttcctttcctgcccaaaaatttcttcagtctgttattatttttaagt

SEQ ID NO: 191014 - DNA, 120 bp, Artificial Sequence
  ENSG00000112419_48 (sequence is synthesized)
gccccttgctgcaaatttcaaacagagcaagaaatcttcctcagagtaggtggtatgaaattaaactagtacaatatatatgaattcatgtcatttacccctgagtatggtagaattgtt

SEQ ID NO: 191015 - DNA, 120 bp, Artificial Sequence
  ENSG00000112419_49 (sequence is synthesized)
aaagcattcttaaattccaattatatgaagcctatcattactaggaaaagtatattctttgggataagaattaatttcttcacactattagagcatgttgtgagtagtaaggaactactt

SEQ ID NO: 191016 - DNA, 120 bp, Artificial Sequence
  ENSG00000112419_50 (sequence is synthesized)
agatgcaatttatttacagaattgtcccttgacctcttgaaatggctagatctttcactactgtgtaggtagtctctacttactggtaggatagattacattgctttactggacaaagca

SEQ ID NO: 191017 - DNA, 85 bp, Artificial Sequence
  ENSG00000112419_51 (sequence is synthesized)
tactggtaggatagattacattgctttactggacaaagcagaatgaacttatataactaaaatatgtcctatattggctgggtgc

SEQ ID NO: 191018 - DNA, 77 bp, Artificial Sequence
  ENSG00000112419_52 (sequence is synthesized)
tgccactctaataatagtaataatgaataaaataaaataaaatatgtcctccagggaaaagcaatgacagagtaatc

SEQ ID NO: 191019 - DNA, 120 bp, Artificial Sequence
  ENSG00000112419_53 (sequence is synthesized)
taaaatatgtcctccagggaaaagcaatgacagagtaatcaccaaattaataggaacatctttctagagaaagtacatgcccagttagttcaaacccaggtttcaaagaagtagcactgg

SEQ ID NO: 191020 - DNA, 120 bp, Artificial Sequence
  ENSG00000112419_54 (sequence is synthesized)
gctctactgtaaaggcaggcagtgaccaagaggtggtggggagagaggtagagtaccctcaaatcattcccattttcacttccaatttcccttttgtaatcattaagcttaagctatgta

SEQ ID NO: 191021 - DNA, 120 bp, Artificial Sequence
  ENSG00000112419_55 (sequence is synthesized)
tggaaatgcaaagcaccattagcatttctagaaagcagctggaaccttacccaccaatgcttttttgaagacagtatcatcccaaatttaaaaatcctattgtatatgttgtaaaatttc

SEQ ID NO: 191022 - DNA, 120 bp, Artificial Sequence
  ENSG00000112419_56 (sequence is synthesized)
tggcaaagaaatggaggatcctgtggcagctattcccacctaaagccaaccctataaggatgggtcattttttagccatgctaggatttactgcacacacaaaaaatgtcatttagcttg

SEQ ID NO: 191023 - DNA, 120 bp, Artificial Sequence
  ENSG00000112419_57 (sequence is synthesized)
tcacattgctagcacagctgcacatatgagcaaagcactgttggtctgtgtttctcagtgggggtactcttggcatttggagctggataggtctttgctgtacagaatcatcccatgcat

SEQ ID NO: 191024 - DNA, 120 bp, Artificial Sequence
  ENSG00000112419_58 (sequence is synthesized)
tgccagatgtttaatatcccaggcccctgctgactaaatgtcagtagcattctcagtcattgtaaacaccaagaataaaaagcattcccccaggttcaaatgccctccctgggaggttgg

SEQ ID NO: 191025 - DNA, 120 bp, Artificial Sequence
  ENSG00000112419_59 (sequence is synthesized)
tatcacctcccctgaatgccactgtctactgcattttgaggacacagggagaaaaagtgcctatcctcaaacattgtctctgctgccttgcatttctttgggccctgaatggtttttctc

SEQ ID NO: 191026 - DNA, 120 bp, Artificial Sequence
  ENSG00000112419_60 (sequence is synthesized)
ccttcatttttcgagcctttctctcagtgcagctgttcttcagggaggaggttactgggcagccttggccattcagtgggcatggggacttggcctagtccctatatatatatacttaaa

SEQ ID NO: 191027 - DNA, 120 bp, Artificial Sequence
  ENSG00000112419_61 (sequence is synthesized)
gtccctatatatacttaaaggagagatcatacatgaagaaagcttttttttttttttttttttttgccttacaacttttctttagaaccacattattggtcataatccttgttactgtca

SEQ ID NO: 191028 - DNA, 120 bp, Artificial Sequence
  ENSG00000112419_62 (sequence is synthesized)
tgaggattgttgcatgggttaaacacaaacacagactagcaatgcacttgaacaaacctggtggtctttggaaataaatcaccattagatttcacctggttatgctgcatcccataagtt

SEQ ID NO: 191029 - DNA, 120 bp, Artificial Sequence
  ENSG00000112419_63 (sequence is synthesized)
ccaaatgaatcacctgcttatcctattaacgaagcatttaattcacacacaaatgcttgaatttcccctgtataaatgtagtcatgcgattcaacttttctaataagatttgtgaatgct

SEQ ID NO: 191030 - DNA, 120 bp, Artificial Sequence
  ENSG00000112419_64 (sequence is synthesized)
gcatcatgatgaaaatgtggattaactgtgggttgcatgcctgttgttcatacttcagtgatggtcacacacaaaacaagatgagttttacttaggtgaaacattattaaactgtactaa

SEQ ID NO: 191031 - DNA, 120 bp, Artificial Sequence
  ENSG00000112419_65 (sequence is synthesized)
caatacagaaacatattctctttgtcgctttttatcaccaaaactgaatggcaaatatgtcttgacattacttggatgaactgtggctagcaaaatggaattaacttagccactataatt

SEQ ID NO: 191032 - DNA, 120 bp, Artificial Sequence
  ENSG00000112419_66 (sequence is synthesized)
ttttaaaacattaaagtttctaaattgtttttggggccgagtaacgcagagtcaataaaggtggttatattgtaagcttttagatggtgcttaagaattcttatctttttaaatagcagt

SEQ ID NO: 191033 - DNA, 120 bp, Artificial Sequence
  ENSG00000112419_67 (sequence is synthesized)
attttttttttaagaataaattgtaaggagcaaataaggcagaatgccactctaccctcaggtcaattttatggtatatgaaaatgccagtaatatttgtgccacttgccaactcggggg

SEQ ID NO: 191034 - DNA, 120 bp, Artificial Sequence
  ENSG00000112419_68 (sequence is synthesized)
aggaggggcttttcccttactggatacttttgttatagtttgactatgtcattatgttgtttagagagcctccacaatgagaagttgccactgcagggctaactcgccttcagaaataat

SEQ ID NO: 191035 - DNA, 120 bp, Artificial Sequence
  ENSG00000112419_69 (sequence is synthesized)
cagaatgattcaagggtcaaaccactttcatcccttaaaatatagggactaatatttctttttcttttttttaaaaaaaacatttcttctgtggcttagaaatgtgccagtgtgttcaaa

SEQ ID NO: 191036 - DNA, 120 bp, Artificial Sequence
  ENSG00000112419_70 (sequence is synthesized)
acatttacaccaatttcaccagatttaggacctattaaaaattcaaacaagtttcttttttttttttttttttctgtgtaacagggatttttaaataacggactatatgcattcttttgt

SEQ ID NO: 191037 - DNA, 120 bp, Artificial Sequence
  ENSG00000112419_71 (sequence is synthesized)
tatttcacacttcagttaaagtgataacaatggtaaactgtgatcattatcagactgactgaatgctttctgatttccagtgagtgatctagttctacgtattacacaggtgtaatatct

SEQ ID NO: 191038 - DNA, 120 bp, Artificial Sequence
  ENSG00000112419_72 (sequence is synthesized)
gtgagtgtaaataactggaactgtacactgattaacatgacagtttctcttttgttgttcttatctgtactgtattatagtatgtgggtataaatatctacaagtatacacacatatgta

SEQ ID NO: 191039 - DNA, 120 bp, Artificial Sequence
  ENSG00000112419_73 (sequence is synthesized)
cttgtattccactattgtaacctgaaagaaagactatgtattcccttttttaattccgtactggtatttgtgttatttaaaaagcaaaattctgctctatttagttgtataatattagag

SEQ ID NO: 191040 - DNA, 120 bp, Artificial Sequence
  ENSG00000112419_74 (sequence is synthesized)
gatactttgctgtgcacaattccaagtgccttagaacattgtttagctttcctaagtatatataaatgcatatatgtataaaattgggaaaagttacctcaataaaatcattgggaaatc

SEQ ID NO: 191041 - DNA, 120 bp, Artificial Sequence
  ENSG00000112419_75 (sequence is synthesized)
cccagttttagtttgttccagtttctcttatatttggatagtgctcagcctttttaaatgaaaaaagaaaaaagagtaagacaacttccctaattgcctgttatttcagcttcacctaag

SEQ ID NO: 191042 - DNA, 120 bp, Artificial Sequence
  ENSG00000112419_76 (sequence is synthesized)
tttttaacacctctttgtatgtaaggtcttgagacatgtaaggcctggtactttttatttaaaatgtctgtctaaagaattactgctcttaaaagaaacttccagtattttttttaactt

SEQ ID NO: 191043 - DNA, 120 bp, Artificial Sequence
  ENSG00000112419_77 (sequence is synthesized)
gctatctttttatgtctgaggtatttgatattgatgtttttattgccattattatatgtaaacataaaagatagtccatttagagtttataatatagaaaataaacagacttcctcatta

SEQ ID NO: 191044 - DNA, 80 bp, Artificial Sequence
  ENSG00000112419_78 (sequence is synthesized)
gctcctcggcgcccggcgtccacctccccgcccttctcgctgcctccgggtcgcggcgcgcggggcagagccgggcagca

SEQ ID NO: 191045 - DNA, 120 bp, Artificial Sequence
  ENSG00000112419_79 (sequence is synthesized)
ggcggcgcctgccctgcgctggcttcccggggacccgagcccccgcggccgctcacagagcgacctctcgtcgtcctcgagcaggggccgcccgctccgggtccacatctccggctcagt

SEQ ID NO: 191046 - DNA, 120 bp, Artificial Sequence
  ENSG00000112419_80 (sequence is synthesized)
atcttaccaaatattacaacagttttctgcctctgattatttaagccacttaagtgatacatttagtgatatcaatgtagttctttcaactaagtctcagagaaaagtagttatttacca

SEQ ID NO: 191047 - DNA, 120 bp, Artificial Sequence
  ENSG00000112419_81 (sequence is synthesized)
tataacctacctgctttcatacctggatgaggagggctttctcacatccaggatttatccttactcttagaaaatataacttatacaacttatcattttaaagggatatgttaatagaaa

SEQ ID NO: 191048 - DNA, 120 bp, Artificial Sequence
  ENSG00000112419_82 (sequence is synthesized)
ggtttaatcttcgtcgagactggcacacttttaatagaaatgacaagacagcaaatagtttaggctatgtgggccatacaatctttgttgcaactgcccagttctgccattgtagcatga

SEQ ID NO: 191049 - DNA, 120 bp, Artificial Sequence
  ENSG00000112419_83 (sequence is synthesized)
aaattgtaaaacgttttaaaaggtagaaaattatgttttacagtgtgttttttcccagaaaaaaattaatccgtatttgaaatgaaattctttattttaagaataaaataaggatgaaac

SEQ ID NO: 191050 - DNA, 120 bp, Artificial Sequence
  ENSG00000112419_84 (sequence is synthesized)
ctgaaaaaacaccacctctggaggaacaggcagaagataagaaagactgttgaatttcaaatccatctgtggtttgtccctggcagccttctcacatccaagaatcgcatcctgcattac

SEQ ID NO: 191051 - DNA, 120 bp, Artificial Sequence
  ENSG00000112419_85 (sequence is synthesized)
gtaacagtgccatctctggtgcctggtccgtgcagggtattcgtcactggactggccagacatcaaaggaagtgtttcccttatcaacataataaaaagttcctgacagttttatatgaa

SEQ ID NO: 191052 - DNA, 120 bp, Artificial Sequence
  ENSG00000112419_86 (sequence is synthesized)
agaagataagaaaggtaaaataaagacaaacccatattatttactttagtatatagctcaatgtctagaaccagcacttaggctccaactagtgactctaaaaccagcagtctgcagagg

SEQ ID NO: 191053 - DNA, 120 bp, Artificial Sequence
  ENSG00000112419_87 (sequence is synthesized)
agaggtttacaaatagaaaaaagaaagaaatgataactagtaaagtgaaatcggatgattttctcaggtagatgcatccattttataagcacagtatttgttttttcaattattaaaaat

SEQ ID NO: 191054 - DNA, 80 bp, Artificial Sequence
  ENSG00000112425_0 (sequence is synthesized)
cgccgccgcccgccatgcgcttccgctttggggtggtggtgccacccgccgtggccggcgcccggccggagctgctggtg

SEQ ID NO: 191055 - DNA, 80 bp, Artificial Sequence
  ENSG00000112425_1 (sequence is synthesized)
gcgacggggccctggccctgcaggagccgggcctgtggctcggggaggtggagctggcggccgaggaggcggcgcaggac

SEQ ID NO: 191056 - DNA, 120 bp, Artificial Sequence
  ENSG00000112425_2 (sequence is synthesized)
ggacggggcggagccgggccgcgtggacacgttctggtacaagttcctgaagcgggagccgggaggagagctctcctgggaaggcaatggacctcatcatgaccgttgctgtacttacaa

SEQ ID NO: 191057 - DNA, 120 bp, Artificial Sequence
  ENSG00000112425_3 (sequence is synthesized)
tgaaaacaacttggtggatggtgtgtattgtctcccaataggacactggattgaggccactgggcacaccaatgaaatgaagcacacaacagacttctattttaatattgcaggccacca

SEQ ID NO: 191058 - DNA, 120 bp, Artificial Sequence
  ENSG00000112425_4 (sequence is synthesized)
agccatgcattattcaagaattctaccaaatatctggctgggtagctgccctcgtcaggtggaacatgtaaccatcaaactgaagcatgaattggggattacagctgtaatgaatttcca

SEQ ID NO: 191059 - DNA, 120 bp, Artificial Sequence
  ENSG00000112425_5 (sequence is synthesized)
gactgaatgggatattgtacagaattcctcaggctgtaaccgctacccagagcccatgactccagacactatgattaaactatatagggaagaaggcttggcctacatctggatgccaac

SEQ ID NO: 191060 - DNA, 120 bp, Artificial Sequence
  ENSG00000112425_6 (sequence is synthesized)
accagatatgagcaccgaaggccgagtacagatgctgccccaggcggtgtgcctgctgcatgcgctgctggagaagggacacatcgtgtacgtgcactgcaacgctggggtgggccgctc

SEQ ID NO: 191061 - DNA, 120 bp, Artificial Sequence
  ENSG00000112425_7 (sequence is synthesized)
caccgcggctgtctgcggctggctccagtatgtgatgggctggaatctgaggaaggtgcagtatttcctcatggccaagaggccggctgtctacattgacgaagaggccttggcccgggc

SEQ ID NO: 191062 - DNA, 120 bp, Artificial Sequence
  ENSG00000112425_8 (sequence is synthesized)
acaagaagattttttccagaaatttgggaaggttcgttcttctgtgtgtagcctgtagctggtcagcctgcttctgccccctcctgatttccctaaggagcctgggatgatgttggtcaa

SEQ ID NO: 191063 - DNA, 120 bp, Artificial Sequence
  ENSG00000112425_9 (sequence is synthesized)
atgacctagaaacaaggattctacctgaactgaaaggactgtgtgacctcccccaagccaaccactttcacctgggatgactttcgattatgctttgttttggggctgtatttttgaaat

SEQ ID NO: 191064 - DNA, 120 bp, Artificial Sequence
  ENSG00000112425_10 (sequence is synthesized)
actctacaagaaagctgtggctcaacacatgagaagaagcacgaagcagttaggctgtacatcagacagaagggtaatgcgtgcagttcctgctgcctgcaggcagacgaggcctttgct

SEQ ID NO: 191065 - DNA, 120 bp, Artificial Sequence
  ENSG00000112425_11 (sequence is synthesized)
ttacagcactgtatgtgttgcacgatggatccgtgacagcactttcctgttgcactgaaactcttggccatgtagaggaaaagatatggagttatgtggatttcatcactagtatgtgtg

SEQ ID NO: 191066 - DNA, 120 bp, Artificial Sequence
  ENSG00000112425_12 (sequence is synthesized)
cgtgagctggtcagttgccaaaggaggaaataaggttagaagcctgaaccgttacaaaagaagagctcactatggtcaaaaagtgatggctttcaggacttgttttttatcctgcctcac

SEQ ID NO: 191067 - DNA, 120 bp, Artificial Sequence
  ENSG00000112425_13 (sequence is synthesized)
agtctgttccaaggcatcaccttccttctctacccaacaaccctgtgtaacaactaaagtagaattatctctcatttgttgttgtttttcctcaaaattaccaaacaaagcaaaaaatac

SEQ ID NO: 191068 - DNA, 120 bp, Artificial Sequence
  ENSG00000112425_14 (sequence is synthesized)
ccttgttttttatagttgagatgtcaagaagttaaattgaggcttaatgagcataggtagcttgtccaaggtctcatgaccagtcaagggcaagctggagttaataatctatatttattt

SEQ ID NO: 191069 - DNA, 120 bp, Artificial Sequence
  ENSG00000112425_15 (sequence is synthesized)
gactcagcactgttttcatcacaacttgttttcccagcatcatgtagtgcatttagttttgtctttctcagggtatagtcaatatgcctgcaggagtttctatagcgagacatagaatag

SEQ ID NO: 191070 - DNA, 120 bp, Artificial Sequence
  ENSG00000112425_16 (sequence is synthesized)
tattctgatcagttgccaaagaatctaggaaattagttgtattttgtgcaagctaatttaaaaacatgatgggctgttttaagaccagagtggaaattcatgagaggaactatactacca

SEQ ID NO: 191071 - DNA, 120 bp, Artificial Sequence
  ENSG00000112425_17 (sequence is synthesized)
aaagagcccaaatgaccaaatccatggataattgcttcacagccttggccatcctggctcagctctcaatttagtataatatgcagttcctgtgcctccagactatgcagctcatcaccc

SEQ ID NO: 191072 - DNA, 120 bp, Artificial Sequence
  ENSG00000112425_18 (sequence is synthesized)
taggttctacaggaaatacagagatgaacaactttgccttcaaaaatgtgctgcctagaaacagacctgcattcaaccaactgtaatgcaggattggaccatgaatgatatgctagaata

SEQ ID NO: 191073 - DNA, 120 bp, Artificial Sequence
  ENSG00000112425_19 (sequence is synthesized)
gaagaaagagaagtgtttttttaattgagagcctctatgtgcaaggtgatatataatcatatccagtttaatcttcacaatatccaatgaagaaggtctcattatctccatgataaagat

SEQ ID NO: 191074 - DNA, 120 bp, Artificial Sequence
  ENSG00000112425_20 (sequence is synthesized)
ggggaaactaaggtcagaagggttaactcaactgtctattgtcacatgatgaataaatagatgaagtgagatacaaagctgggtttgattcaaagcccttactttcctaattaaactatg

SEQ ID NO: 191075 - DNA, 120 bp, Artificial Sequence
  ENSG00000112425_21 (sequence is synthesized)
atgcgtatttatttttctgcaccttcctttcttccacaaacacatattgatagatgcaagagactcttatttagaaggcgtgggggacaagaaggatacaaggtaagtttcagtggagct

SEQ ID NO: 191076 - DNA, 120 bp, Artificial Sequence
  ENSG00000112425_22 (sequence is synthesized)
cagaggacggggagatagaactgtggcacttaggggagatgacatttgctttgggcagaggcagctagccaggacacatttccactataattttacaaagttaaatttataagctagcat

SEQ ID NO: 191077 - DNA, 120 bp, Artificial Sequence
  ENSG00000112425_23 (sequence is synthesized)
taagtaaagtgaagtccagctcccttgctaaaaataactagaggtaataattggtattcaggtaactcatttacagtcataatgtgttgtgaaaatttaatcttaaaaattaaattttta

SEQ ID NO: 191078 - DNA, 120 bp, Artificial Sequence
  ENSG00000112425_24 (sequence is synthesized)
aactatgtgggtctgtgaatttctttaatgtctaagaaatccagcttcataatttccatgatacaaagatcttttttcaggtggatttttacctttgttccttttgctctgatagacaaa

SEQ ID NO: 191079 - DNA, 120 bp, Artificial Sequence
  ENSG00000112425_25 (sequence is synthesized)
atcagtttaggactattaaagaatgttttggaataaactgtctttttcctcaatgaatgggatgtctaatgtatttcaaaatcacccaaaacttttggcaaataaaagcatttaaaaaga

SEQ ID NO: 191080 - DNA, 120 bp, Artificial Sequence
  ENSG00000112425_26 (sequence is synthesized)
tagtagaaatggggtttcgccatgttgcccaggcctgtctcgaactcctgaagcacaagtgatccacctgcctaggtgacccaaagtaatgggattacaggcaatggacctcatcatgac

SEQ ID NO: 191081 - DNA, 120 bp, Artificial Sequence
  ENSG00000112425_27 (sequence is synthesized)
aagatggtgctttccctcatttttgtagctcaagacgtacattcaactcaagagtccagctctacagcagctatatttggaaatacacatattttatggccagtatataaatgattttta

SEQ ID NO: 191082 - DNA, 120 bp, Artificial Sequence
  ENSG00000112425_28 (sequence is synthesized)
gagaactggacgatcgcctggcttagaagttttcctccctccccgaaccccgttttctcttccatttcttccggtcgcgtgtccccagcgcccacaggtggaaatcaaccgcccgcgggg

SEQ ID NO: 191083 - DNA, 120 bp, Artificial Sequence
  ENSG00000112425_29 (sequence is synthesized)
ttgcggggcacaaagaggcagctagcggctccgctgaccccttcccgccggcctggacgaagtctgggctcgggagccgcgtgatgcatcccaaagaaggcgcagaacagcacgtgttct

SEQ ID NO: 191084 - DNA, 120 bp, Artificial Sequence
  ENSG00000112425_30 (sequence is synthesized)
gagcacagagtgttgcaaaaactgaaagaccaatgtggcttggatcagagaacgaggaaagatgatcctgcaggatttgagcgacaaaaaggactttagacgctatcctatagcaggaag

SEQ ID NO: 191085 - DNA, 120 bp, Artificial Sequence
  ENSG00000112425_31 (sequence is synthesized)
tgacctcagtttaacttgatcacctctgtagagaccctgtctccaaatacagtcacattctgagttcctaagcgttaggactttaacataggagtttggggagggggacacaagtcaaca

SEQ ID NO: 191086 - DNA, 120 bp, Artificial Sequence
  ENSG00000112425_32 (sequence is synthesized)
taataggcctttataattaatgatatggcatttcataatatggaaaataaaagagcattttgtcaaaaattatttgctttcatatggctctaaactacacagtacatccccaaaatgtaa

SEQ ID NO: 191087 - DNA, 120 bp, Artificial Sequence
  ENSG00000112425_33 (sequence is synthesized)
gaaatgaactggacttacagaaattaacttgtgctctatatacatagtgtatgactcataaaaaactataataaaactatggtttaataaagaagctaattagtatcactttctaaattg

SEQ ID NO: 191088 - DNA, 120 bp, Artificial Sequence
  ENSG00000112425_34 (sequence is synthesized)
gaatttgtctttgagtagttattcagccttaactggagcctgttataagcacccttttggggtagaagtttggcattaataacttaacactggatgctagaggacaaattttcagcagaa

SEQ ID NO: 191089 - DNA, 120 bp, Artificial Sequence
  ENSG00000112425_35 (sequence is synthesized)
ggagctgtatgtgctactgaagcctggagcttactagaggttgattttaatgtttctcttgctttcccactaatgagatctaaattataggacggatagactttttttccctttactcat

SEQ ID NO: 191090 - DNA, 120 bp, Artificial Sequence
  ENSG00000112425_36 (sequence is synthesized)
tatttaagagccagttcatattttaatttctcattgaattgcccgtaaaatattaaataagataaatgcaacacaattatccaacttaggaaatgtgcttttttttctttccttttaaat

SEQ ID NO: 191091 - DNA, 120 bp, Artificial Sequence
  ENSG00000112425_37 (sequence is synthesized)
tcttagctgggttttgttaagagcttcagcaaaatcgattttctctattttttgaaatggtgctccgtttgtatggctaggaagagggcactgcagttcaacagttggagtctttaggtg

SEQ ID NO: 191092 - DNA, 120 bp, Artificial Sequence
  ENSG00000112425_38 (sequence is synthesized)
tgataaataaacaaaagctggttccattattcctgtggttttcctcatctttttttctttcgatggacacaaaataatgctgattttcacctttaggaaaaggttattctgccatttctc

SEQ ID NO: 191093 - DNA, 120 bp, Artificial Sequence
  ENSG00000112425_39 (sequence is synthesized)
atggccattagtgatggaagctgtaatgtgaagtccattgaatggacttgtctcccaataccttttgtcttttagacacccacttctcctgtcgataccctgtggtgatttttacaaagt

SEQ ID NO: 191094 - DNA, 120 bp, Artificial Sequence
  ENSG00000112425_40 (sequence is synthesized)
gcttggatggtcattctgtctgatgtgccagtgaggcttcctttgactgacagttgagcgtctgattcatacgcttcagtagctgttggaccacaggcccaagcctgatgggtgaaacaa

SEQ ID NO: 191095 - DNA, 120 bp, Artificial Sequence
  ENSG00000112425_41 (sequence is synthesized)
atactgtagtattatgatatggttacctggaaccacaaatccagattcactcaaatgagttaaattgattttgatttgcagtctaagaaaataaggttccagaatgtcagccatctattc

SEQ ID NO: 191096 - DNA, 120 bp, Artificial Sequence
  ENSG00000112425_42 (sequence is synthesized)
tttcccctggtctttagctaagttgtaatactactagggtagattttatttatgtataatctgattatagcacagcagaaatagtcaaaaccctagttaataattttttttctacaaaag

SEQ ID NO: 191097 - DNA, 120 bp, Artificial Sequence
  ENSG00000112425_43 (sequence is synthesized)
tacattcttatgcataggactatattaaatatttgtcgtggctcagaagtagatttagttttgaccagttagaaggtactgtgcattaaacacatggatatacattgtctctcataacaa

SEQ ID NO: 191098 - DNA, 120 bp, Artificial Sequence
  ENSG00000112425_44 (sequence is synthesized)
ataatttctcactctaggaattatttgtagtcttgacactattttttggacaaagataagaactcaccttaatttgtagatatgtcagactgaggaagcccattttttctcatctccata

SEQ ID NO: 191099 - DNA, 120 bp, Artificial Sequence
  ENSG00000112425_45 (sequence is synthesized)
ttttttactgatatttaaaaaagatattgggctctatatattaagcttctcttacatgcatatggagaccttggactggtggtccaaggtggtggttctggaatctgctgcttacacaat

SEQ ID NO: 191100 - DNA, 120 bp, Artificial Sequence
  ENSG00000112425_46 (sequence is synthesized)
ctagttaatttctaaacagaccaaaaatcaaagaacctacagaattataggcctaactcccaagcctctctataagtatctctgagatggatcctggtaatagatgtttttataaaagta

SEQ ID NO: 191101 - DNA, 120 bp, Artificial Sequence
  ENSG00000112425_47 (sequence is synthesized)
cctcatgtgacttgaatgcatagccaggtttgaaaacttctgtcctgagctgactgagtgtcaataccctgttggtttagttggcgtctctttacctccaaatagtctatagtggagctg

SEQ ID NO: 191102 - DNA, 120 bp, Artificial Sequence
  ENSG00000112425_48 (sequence is synthesized)
ccagaaatctcttgagttcatgattgatagtggattatttatgaaacaagtctctggaagttttatgatataacttataattgtaagctataacttctattccattatatctttgaattt

SEQ ID NO: 191103 - DNA, 120 bp, Artificial Sequence
  ENSG00000112425_49 (sequence is synthesized)
tggtatgccttgcattaaaactactcttacagagaatttttattctctaatctcatatgtcaacaggcttcttttcaccctaaaaatcctgatgttaaaaattgtttaaaataacattga

SEQ ID NO: 191104 - DNA, 120 bp, Artificial Sequence
  ENSG00000112425_50 (sequence is synthesized)
taccaaaagaagactaaaactgagatgagatgagtaaaaatgaatttttaatggtatcaaattatcctcttttgaatggatgagtaaaagtttaattactttttagaaagcatatcatgt

SEQ ID NO: 191105 - DNA, 120 bp, Artificial Sequence
  ENSG00000112425_51 (sequence is synthesized)
atcttgttacccccagtgaatcctataactagaaatatatcacctacttttggaaaacaaactgaaataggatgcacatgaagggcactttagctgtctgattaagcagaatccattgat

SEQ ID NO: 191106 - DNA, 120 bp, Artificial Sequence
  ENSG00000112425_52 (sequence is synthesized)
gtgtttgtttccaacaggcccagtctttgtctctgcatcccatacaatgattcagtacaaatcactttataaccttacttttctatctttcaatatagtgtttgttttcagagtttatct

SEQ ID NO: 191107 - DNA, 120 bp, Artificial Sequence
  ENSG00000112425_53 (sequence is synthesized)
ttagttatctgtctctaggtttagaacatcttgttttaaagtagcagaaattagttcatactcatttcttaaatatggactctgacttccaccatgtctggatgtatattttaagggctt

SEQ ID NO: 191108 - DNA, 120 bp, Artificial Sequence
  ENSG00000112425_54 (sequence is synthesized)
atttccatcagaaatgttatgtgtgagatatatgtgttaagctactggctttgggcctgtttatctttgacttgttctgagtttccctatcaccttaaaaacatttgaaggccagggctg

SEQ ID NO: 191109 - DNA, 120 bp, Artificial Sequence
  ENSG00000112425_55 (sequence is synthesized)
aaggatatgatagaataacacctcttttagcaacaacatgtgactctatagactgactctgatttgggatatgctgactctgatttcttatattgcaggctcaaatgtcctaatttaccc

SEQ ID NO: 191110 - DNA, 120 bp, Artificial Sequence
  ENSG00000112425_56 (sequence is synthesized)
tttgtgtatctctatgaactattcttgagcttttatgcaatcctgtgtgaaaaatcagccagccattttattttggcatttaccgactagcgaaatactaactagtacccactcaaagag

SEQ ID NO: 191111 - DNA, 120 bp, Artificial Sequence
  ENSG00000112425_57 (sequence is synthesized)
tgcaatattcaagaaaatgctgagtggtatttggattttagcttgcctgtcatgaaattctctttaatattttaccagtcctctttaaaattttgccagttgaaaaaaacaaacaaacaa

SEQ ID NO: 191112 - DNA, 120 bp, Artificial Sequence
  ENSG00000112425_58 (sequence is synthesized)
ataaaaattactgtcttataatagtttctatttcttggttatgtaacggaagtgtccacttccctcttttccagcttaggagctttagtgtgctcagttgaaccccaaagtatacatacg

SEQ ID NO: 191113 - DNA, 120 bp, Artificial Sequence
  ENSG00000112425_59 (sequence is synthesized)
ctagttagaggcaggtctcactcaacagccagagggaaggggcaatcagcaagtgggtgtgacatttcccccgaatactcagctatccaggtcctgatgaagctcggctcttgggcaccc

SEQ ID NO: 191114 - DNA, 120 bp, Artificial Sequence
  ENSG00000112425_60 (sequence is synthesized)
tgcaagtgtccttgctcaaggtctttctctcagtacactgggtccagtggaatatctaagaattatctggatccagggataagatgaaggccttggatttcatgcctctctttccatcac

SEQ ID NO: 191115 - DNA, 120 bp, Artificial Sequence
  ENSG00000112425_61 (sequence is synthesized)
cattaagtcttttgccatttctaacttttcttttatcatttttttcccataataatcctcaataaggatttctgcaaggaaattcctaataaccctttagacaagaacacaagtagaaaa

SEQ ID NO: 191116 - DNA, 120 bp, Artificial Sequence
  ENSG00000112425_62 (sequence is synthesized)
aaaaaaaaagttgttcttctcctgcaggggaagcagggctcaggctttagacagatagtgccagatcttatgagataattttcactgattatgggtcatgaccacattagaggattagtt

SEQ ID NO: 191117 - DNA, 120 bp, Artificial Sequence
  ENSG00000112425_63 (sequence is synthesized)
aattggcttctcctgttaacatcaacaatgacaaccaccaccaaaaggaaaaaagcaaaaaacaaaaaaagctagctttcatacaaaaaaatagggtatcttctactctgtagcattcaa

SEQ ID NO: 191118 - DNA, 120 bp, Artificial Sequence
  ENSG00000112425_64 (sequence is synthesized)
atgaagaatataggaaacaatgaagaattaactgaataatctttacaatgcaatgcaaagtaaattacaaaaataagtaaatcactatagctacacatgaaatccgcttgcacttactgt

SEQ ID NO: 191119 - DNA, 120 bp, Artificial Sequence
  ENSG00000112425_65 (sequence is synthesized)
gcatccacggtttcagtccaattcaggtacattaattgtatttattccttacaagatttttatgagttatttttagacccattctaaagatgagtacaccaacaggttagagttgataaa

SEQ ID NO: 191120 - DNA, 84 bp, Artificial Sequence
  ENSG00000112425_66 (sequence is synthesized)
attctaaagatgagtacaccaacaggttagagttgataaataacttggcctaacatcatacaattgttactaaatgttatacga

SEQ ID NO: 191121 - DNA, 64 bp, Artificial Sequence
  ENSG00000112425_67 (sequence is synthesized)
cctctgtctcctgggttcaagcaattcttaggcctcagcctttcactagagacgaggtttctgc

SEQ ID NO: 191122 - DNA, 120 bp, Artificial Sequence
  ENSG00000112425_68 (sequence is synthesized)
actagagacgaggtttctgccatgttggctgggctggtctggaacttctggcctcaagcaatccccgcctcagccatccaaagtgccagactacaggcgtgagccactgcgccagcttct

SEQ ID NO: 191123 - DNA, 120 bp, Artificial Sequence
  ENSG00000112425_69 (sequence is synthesized)
tttttggtttttacatttttccttttggctgttgttgtcaacattgttaacatgagaagccaattgcccagttccctaatgaagatccaccactgtctttctaaaacttcagttctgctt

SEQ ID NO: 191124 - DNA, 89 bp, Artificial Sequence
  ENSG00000112425_70 (sequence is synthesized)
gaagatccaccactgtctttctaaaacttcagttctgcttaccctacaggagagaataaactttttttttttttaaaagtgcagtggtg

SEQ ID NO: 191125 - DNA, 120 bp, Artificial Sequence
  ENSG00000112425_71 (sequence is synthesized)
ccaaagtcctgggattacaggtgtgaaccactgcatccggccagataagcgtgttttatgttttttctccttgggttcttgtctaaagggttattaaaatttttctgagtttttaacttt

SEQ ID NO: 191126 - DNA, 120 bp, Artificial Sequence
  ENSG00000112425_72 (sequence is synthesized)
ttttctgagtttttaactttttcatttcattatttttttctataataaacctcaatgataatttccaaaaggaaactatattgctatttctccttcttaccttgcagcattagatgaaac

SEQ ID NO: 191127 - DNA, 120 bp, Artificial Sequence
  ENSG00000112425_73 (sequence is synthesized)
ctatagaacactgctaggtactaatggaattaatgttgattctgatcttattaaaagaagtctgttgttttttagcttctgttctttagcatatgttaaaagtctcatactatttgaaat

SEQ ID NO: 191128 - DNA, 120 bp, Artificial Sequence
  ENSG00000112425_74 (sequence is synthesized)
atttgcatagacttttaaaccggaatgcctgctgaaatttgtttttcagaatttatttatataattacaggaattttcacctctaatttgttagcatttgaagtctattgatggattttt

SEQ ID NO: 191129 - DNA, 120 bp, Artificial Sequence
  ENSG00000112425_75 (sequence is synthesized)
atcatgtggaaccatatatgcattcatggaataagtacaacttggtagacttattttaatatattgcttgatttggtttgcaaatgtccatttcctggcgttctagttaattgaaatact

SEQ ID NO: 191130 - DNA, 120 bp, Artificial Sequence
  ENSG00000112425_76 (sequence is synthesized)
tgctttccccaaagcagcaacaccagtactttttctttcaataataacattggtgttcatattctaaaatatctagcttttcctgtgccagacttaaaggttagttatattttaatacta

SEQ ID NO: 191131 - DNA, 120 bp, Artificial Sequence
  ENSG00000112425_77 (sequence is synthesized)
acgccagaaaggtgggggactaggagaggcaggtgctactagctccgcactactagttttgtgaccttgggcaagctagttaatctctgcaatggacctcatcatgaccgttgctgtact

SEQ ID NO: 191132 - DNA, 120 bp, Artificial Sequence
  ENSG00000112425_78 (sequence is synthesized)
cttaaaacaaaagtaagacacaaatatctccctaaccttattatatctcgtagaagatggcagatgggtgacgactggtgcaagctcacacaggaaagaaaaatttcataagcattgaat

SEQ ID NO: 191133 - DNA, 120 bp, Artificial Sequence
  ENSG00000112425_79 (sequence is synthesized)
agttgtgttactaattagtgggacaatcttcgtaactccttcttcccccacttctgcccaatatgtaataataggcatgctctgaataattgtactcaaataagaaattactcctccaaa

SEQ ID NO: 191134 - DNA, 120 bp, Artificial Sequence
  ENSG00000112425_80 (sequence is synthesized)
catgaagtcctcagctacccctctgttgtcaaagtctgacttcctttcccttgctcaacacactgatttcggctctcccattgcacggaaatgctgaccttggagccaagacaactgggc

SEQ ID NO: 191135 - DNA, 120 bp, Artificial Sequence
  ENSG00000112425_81 (sequence is synthesized)
taaagccttgtcaccactgggtagctgggaggatatcggcaggctagttcctgcattaagaaaatgaggatagtaatttccaccttacaggactataacagtagaataagataattgata

SEQ ID NO: 191136 - DNA, 120 bp, Artificial Sequence
  ENSG00000112425_82 (sequence is synthesized)
tgaaagggctttgaaaatcacaaagttggaattgtaggattagttccaagtctttaagtttctaccaaaggatgttatagataatgtagatcctatctatattacacttcaaagatggaa

SEQ ID NO: 191137 - DNA, 120 bp, Artificial Sequence
  ENSG00000112425_83 (sequence is synthesized)
tgtagatcctatctatattacacttcaaagatggaaaaaaatatgccccccacataatatattcatcatatatctgctcctggagtaagaaaggaaagtgtgtgtgtgtgtgtgtgtgtg

SEQ ID NO: 191138 - DNA, 120 bp, Artificial Sequence
  ENSG00000112425_84 (sequence is synthesized)
tgaaagctgcagatttctttcaggatcaaccttggataaagcatatctttagggccttttgacccctctcttttatctcaggccctaatacctcaggctacttgacttacctgcccaaat

SEQ ID NO: 191139 - DNA, 120 bp, Artificial Sequence
  ENSG00000112425_85 (sequence is synthesized)
gctctacctctccctctcctcacaaccttggctggctcaatagtgctttcaggaagcttttggttggtccagagtcagattagcctggagctggtgtgaaccacaggttaggctagaagt

SEQ ID NO: 191140 - DNA, 120 bp, Artificial Sequence
  ENSG00000112425_86 (sequence is synthesized)
gcttagtagtgtctcagatcaaataggcttttattgctgtttttctagtcttgtgtttattcatggacttaatgagtgtgtatggagcatctactgagaactagggcctgtattaaatta

SEQ ID NO: 191141 - DNA, 120 bp, Artificial Sequence
  ENSG00000112425_87 (sequence is synthesized)
cagagtcagaaactcagagggtagaatgtcttgtttgacctgcaaaggatttacagtttttcaacttagttgtcagcatttaaagtttggaatactttatgttaaaagatctggatttct

SEQ ID NO: 191142 - DNA, 120 bp, Artificial Sequence
  ENSG00000112425_88 (sequence is synthesized)
gtcttttcttgaggttttattgtttttaagaatggaaatgtcttatcaaattaaattctatgtggagcctatctatagctgctctggttgacactggctttgttgagctgggtacatcaa

SEQ ID NO: 191143 - DNA, 120 bp, Artificial Sequence
  ENSG00000112425_89 (sequence is synthesized)
gatgaaccttcctggggaccctctttttattccttagtgggtcacatattaggttagacttcctagaatgggtttcaagcagagagacatggtcctcttgagagggctcctctagggtgg

SEQ ID NO: 191144 - DNA, 120 bp, Artificial Sequence
  ENSG00000112425_90 (sequence is synthesized)
ggcagaggtgttaatcctcaaggaggacattattctcacccagggtaagagcagcagcatgggctggtaagtgagtgcagagggactgactgagaatccagattgacaagatgggggcca

SEQ ID NO: 191145 - DNA, 120 bp, Artificial Sequence
  ENSG00000112425_91 (sequence is synthesized)
acaaataccattaaccaggtggattagggaaggaccacagtacagtggttaagacctgcggcttcagagtcacactggctgagtttgagtggccacttaaggaataaccttgggcaaatg

SEQ ID NO: 191146 - DNA, 120 bp, Artificial Sequence
  ENSG00000112425_92 (sequence is synthesized)
tctgtgctcaatttgttcatatataaattgaagatcacaacagtgctgacctcatagttgttaagaggtggttgtaaatgggctagtgcatgtaaaatgcttacgagagtgctgggaagg

SEQ ID NO: 191147 - DNA, 120 bp, Artificial Sequence
  ENSG00000112425_93 (sequence is synthesized)
tagaaagggctcaataaatgttatctaccatcaaccaaagcgggtgatttgtagtcacaggagatcaaaataaaccaggcctccagctgtggccaggctgagatgagtgggcaccctgga

SEQ ID NO: 191148 - DNA, 120 bp, Artificial Sequence
  ENSG00000112425_94 (sequence is synthesized)
gtggccaggctgagatgagtgggcaccctggaccagctacttctctggtacccttcttttttagatggagtcttgctctctcccagaggctggtgtgcagtggcacaatctcggctcaca

SEQ ID NO: 191149 - DNA, 72 bp, Artificial Sequence
  ENSG00000112425_95 (sequence is synthesized)
accaccatgcctggcttttttttttttaattttagtagaaatgaggttttaccatgttggccagactggtct

SEQ ID NO: 191150 - DNA, 86 bp, Artificial Sequence
  ENSG00000112425_96 (sequence is synthesized)
ctgatacccttcttaagtatttattctttatgttgattaaacatttgctcattcttcagtgcaatggttgagtgattccgggagaa

SEQ ID NO: 191151 - DNA, 120 bp, Artificial Sequence
  ENSG00000112425_97 (sequence is synthesized)
gctcattcttcagtgcaatggttgagtgattccgggagaagatcactgatggctgtgcccaatgctgaaatctgtgtgaggctgggagccttgggagcttctgcatgttagctgacatgt

SEQ ID NO: 191152 - DNA, 120 bp, Artificial Sequence
  ENSG00000112425_98 (sequence is synthesized)
acctttcaggagtgtgtgcctgagatcacagaacctcaaactaacacatgcccctttttaacttctaaactgtgtacatacctcttgaagaatgttttacacataaaatgaaaaggggaa

SEQ ID NO: 191153 - DNA, 120 bp, Artificial Sequence
  ENSG00000112425_99 (sequence is synthesized)
tgtattgcatcatttgtgctatttggtgcagacccatcctaggggaacctctggccagagaacaggtctggggaagggatcttgactgggaccagggaagatcttgtttgcaggctggtt

SEQ ID NO: 191154 - DNA, 120 bp, Artificial Sequence
  ENSG00000112425_100 (sequence is synthesized)
acactgatgttgtatgcaccgagtgccaggggctgggattctgagtccagcagctcctactgcaaatgaccactgtgggctattcacatactgggcatctgaggcaagcctgaacctacg

SEQ ID NO: 191155 - DNA, 120 bp, Artificial Sequence
  ENSG00000112425_101 (sequence is synthesized)
ttaaatgattcttttttgtttcctgccaaggcacatagtatctggagagacaggcacagcagggagcttgccatgtgatgctagctgtggcaggagcaggaagaacctacgcttccagct

SEQ ID NO: 191156 - DNA, 120 bp, Artificial Sequence
  ENSG00000112425_102 (sequence is synthesized)
cgagcagcagagttctcctcccacccagctttccctggagtgaacccctcataccctcagcagaacagaagccccacagtggagcaggcctctccattctcagcagggctgatccatcat

SEQ ID NO: 191157 - DNA, 120 bp, Artificial Sequence
  ENSG00000112425_103 (sequence is synthesized)
tggtcctctgatcccccagcgcaaatagtggatctgccatgcagtgctctccctgagacatgctgagacatcttgctgtcacacatgatgctctcaccatcctgttgcatctccagtgat

SEQ ID NO: 191158 - DNA, 120 bp, Artificial Sequence
  ENSG00000112425_104 (sequence is synthesized)
attttagtgcctctaggagggcaccatgagtaactgagtggcagacccacctcgctgtaatctcacggtgccgtggaatcaggtgtggtggtttagatgggttaaagttcatggttcagt

SEQ ID NO: 191159 - DNA, 120 bp, Artificial Sequence
  ENSG00000112425_105 (sequence is synthesized)
ttggactatgaggaatcagatatacatagaagctggtaactctaatacaaatgcccttggggaccaggcagggaacaacagtgtatggcaacaggccagagaaggatggagctcaaggaa

SEQ ID NO: 191160 - DNA, 120 bp, Artificial Sequence
  ENSG00000112425_106 (sequence is synthesized)
ctgaaaccgtgtcctccctgccggaaggcattccaggtacaaacgttctaaactgctgtgtggagcatgcagtcttagatctcttcactagggggttaacagagctccagcaacaaaatt

SEQ ID NO: 191161 - DNA, 120 bp, Artificial Sequence
  ENSG00000112425_107 (sequence is synthesized)
agaatattatcctggcttccatgtggactctgctccttctcagagcttgatgagcctgaagctgaggatgatgcctggctgggtggaatggccagtgagaggcctttcaagccacactgt

SEQ ID NO: 191162 - DNA, 120 bp, Artificial Sequence
  ENSG00000112425_108 (sequence is synthesized)
ggtccttggtaaactctgtccttctcaggtgctgatgcctcatctcagtgtgttgtgttggctccttcaggggcacttgtatttcaccaaaggacatctaaagagggaagtctaaacatg

SEQ ID NO: 191163 - DNA, 120 bp, Artificial Sequence
  ENSG00000112425_109 (sequence is synthesized)
ggagtggctgtcatgggagaattctgggcctcacggcagatccccaggtgaaatctttcgagggaggggtgttcccatctctttggtcatccaataaggatggcaacgtgaaagccacaa

SEQ ID NO: 191164 - DNA, 120 bp, Artificial Sequence
  ENSG00000112425_110 (sequence is synthesized)
agaactcttgtgtgtgaccgtcggaggatcctttcgggccactgtgttcctgtagctagagaatgccaagtcatgagccctcaaaagagggctttctcatttccctcttcctttcccttt

SEQ ID NO: 191165 - DNA, 120 bp, Artificial Sequence
  ENSG00000112425_111 (sequence is synthesized)
gaaataatttacattgatcacccgctgaaaacaaacaaaaaacccaacttacaaaatatctctgtactgagaacctgtgagcaggagaaacttcaggcatccaggagctcaaggaagtga

SEQ ID NO: 191166 - DNA, 120 bp, Artificial Sequence
  ENSG00000112425_112 (sequence is synthesized)
ctgtggggcgcttctctgtcccacgggatgagagagcggagcagagtctaccaggcctcagcagggcataacgtgtcctctcctggcgtgttgagaagatatttgaataatctaataatc

SEQ ID NO: 191167 - DNA, 120 bp, Artificial Sequence
  ENSG00000112425_113 (sequence is synthesized)
aaaatggtaaccttgaagtaaaccccaaattataaaatttcctgaaaatatagaaattaaatcagttttagtattcattgtaactcgagggaataaatgaacaattggttatccatctgt

SEQ ID NO: 191168 - DNA, 120 bp, Artificial Sequence
  ENSG00000112425_114 (sequence is synthesized)
atcgaatgatgttagccattccattgaacaaatgaaaatgagtgtatgttgaatgaacagattgattcctttaactattatgggccgcttctgtgttttacatttagctggaagatactt

SEQ ID NO: 191169 - DNA, 120 bp, Artificial Sequence
  ENSG00000112425_115 (sequence is synthesized)
ttggatttactgaaattcaggtggccagacctgacaactatttttttttttgaatcctctaaaattctgaccaatctctgcaaaaacttcatgtgaaagtgcattctgatgacaggcgat

SEQ ID NO: 191170 - DNA, 120 bp, Artificial Sequence
  ENSG00000112425_116 (sequence is synthesized)
aggtcacttttctttggagggatatttgcatggatggcgaagtcacccaaaggagcagcaatacccagggaaggattagagagagcctctggcctctggaatgctctttccactttgcta

SEQ ID NO: 191171 - DNA, 120 bp, Artificial Sequence
  ENSG00000112425_117 (sequence is synthesized)
ttagcagattgtaaaatggtctcactttttccttcacaatgcagaaagaaagcaaactctcgtatccctgcctggccctgtgcagccctgtgatttcaggctgtgctggaggagacctca

SEQ ID NO: 191172 - DNA, 120 bp, Artificial Sequence
  ENSG00000112425_118 (sequence is synthesized)
tttatggcctgagctactgtaatggtgttgccacttactgagatggggaagactaggagatgagcaatttgaagtagggattgagcccatcttgagtgctggaccatcaataatggagag

SEQ ID NO: 191173 - DNA, 120 bp, Artificial Sequence
  ENSG00000112425_119 (sequence is synthesized)
acatgatccttgctctcatggaacttatgctgtagtggaagacaacatgtaaacagctgcaatacagttaaatatttgctgtaatgaagttatatatgtagtgtaaaaagggacaggaaa

SEQ ID NO: 191174 - DNA, 120 bp, Artificial Sequence
  ENSG00000112425_120 (sequence is synthesized)
agaaaggaccaatgctatggatattatgaacagcaacctcaatttctgtcatgactacaaggaatggacagcattaataaaatgtaaccttgtcattatttaatgacaacattaagaatc

SEQ ID NO: 191175 - DNA, 120 bp, Artificial Sequence
  ENSG00000112425_121 (sequence is synthesized)
tatcaacatgatttaacagatctatatgttaaaggagaaaaagatatgtggatgctatcaatagtagctgaaaagcattttcagaaatctgtaagtagaggaaatgtattcatatgtttc

SEQ ID NO: 191176 - DNA, 120 bp, Artificial Sequence
  ENSG00000112425_122 (sequence is synthesized)
tatgttctagaatagatattttgactagacaaaagttgaaatcttgtgtcttatgtttttatttaaatgatagactcaatacgtaagtagtcacaagacatatgatattgtctggatctg

SEQ ID NO: 191177 - DNA, 120 bp, Artificial Sequence
  ENSG00000112425_123 (sequence is synthesized)
gcgttggaggtagggcctgctgggaagtgattgaatcattggggtggatccttcataaatattttagcaccatccctttggtgctgttctcgtgatagagttctcacaagatctggttgt

SEQ ID NO: 191178 - DNA, 120 bp, Artificial Sequence
  ENSG00000112425_124 (sequence is synthesized)
atgtaagatgtatctgcttcccctttgcttccaccatgatcaaaagtttcctgaggcccccctggaagctgagtagctgcggccatgcttcctgtagtctgtggaactgtgaaacaatta

SEQ ID NO: 191179 - DNA, 120 bp, Artificial Sequence
  ENSG00000112425_125 (sequence is synthesized)
aaactttttcctttataaattacccagtctcagatatttctttataggggggcaagaatgaacaaatacaacacatgaaagagaagggtggaaatgcatggaaggatatatcccaggtgt

SEQ ID NO: 191180 - DNA, 120 bp, Artificial Sequence
  ENSG00000112425_126 (sequence is synthesized)
atcagacaattttgctcctcacctagatgccccggatcctttggtagctctgtgcacccatcccagctccagcatgctttgtgctgagatccacctgtgacactggaagattactttgga

SEQ ID NO: 191181 - DNA, 120 bp, Artificial Sequence
  ENSG00000112425_127 (sequence is synthesized)
tactggagctaactcattcttaagatagttggaaatacctgggagctgtggcttttgtagtggactgagtacaaagccctagcgtctaagcagagacgttcccaaagcattacatatact

SEQ ID NO: 191182 - DNA, 120 bp, Artificial Sequence
  ENSG00000112425_128 (sequence is synthesized)
acagagctttctgagggacttgaaattacatgcttgcctgactccttccccatttctgtcctttctcctccattccctctgcttgctcctgggagtaaatctttaataaatcatttgctt

SEQ ID NO: 191183 - DNA, 120 bp, Artificial Sequence
  ENSG00000112425_129 (sequence is synthesized)
ctgaaacattgtttcagggtttgcttctggaagaattcaacctaagccaccaggctagccttggttaccttcagggataaggaatgtacgaattattacttatatatgtttgcattgttg

SEQ ID NO: 191184 - DNA, 120 bp, Artificial Sequence
  ENSG00000112425_130 (sequence is synthesized)
cattaattacactaaatcttacttttcatttaaaaagcaattcaaacattttaagagaaataacttattttcaatatcatttacttgccatgctttgtttgagatagccaagagagattt

SEQ ID NO: 191185 - DNA, 120 bp, Artificial Sequence
  ENSG00000112425_131 (sequence is synthesized)
tctcagttatagcttctcatttatcatttataaagataaatgcatgtaactctatttctgaagcagaactcgatgttatattgctgtattttcatttatgattttatgccagagtacatc

SEQ ID NO: 191186 - DNA, 120 bp, Artificial Sequence
  ENSG00000112425_132 (sequence is synthesized)
gaggagagctctcctgggaaggtattgccagcagacgcctgcccccggcgcagagcgggagctccggcccgcacccccaaccggggcctcggcctcgggcaggccccgcaggccccggcg

SEQ ID NO: 191187 - DNA, 120 bp, Artificial Sequence
  ENSG00000112425_133 (sequence is synthesized)
ccgggcgacctgggctgaccctgctctgccggccacgctgtcgccgccagccgcgcctccggcttcctactgattccctagacccgtatagcgctcccggccgccttcccgcccactctg

SEQ ID NO: 191188 - DNA, 120 bp, Artificial Sequence
  ENSG00000112425_134 (sequence is synthesized)
ttgcctgcccctctgacctggtttccgcacatccagtcctcagcttctttccaaccgcgcctgcgtcacgggccagtgcccttcgtctcccgcccggggctcccttcgccctccgagtgc

SEQ ID NO: 191189 - DNA, 120 bp, Artificial Sequence
  ENSG00000112425_135 (sequence is synthesized)
ccctcgacctccgagtcccccccttcgcgggtcccttggctgcccggccgcgcgccgctgatggcttcaacagcccaactccgccttggttgggttttgtgtcctcattttcctgctcta

SEQ ID NO: 191190 - DNA, 120 bp, Artificial Sequence
  ENSG00000112425_136 (sequence is synthesized)
attcactaaaaaaaacccaaaacgatccaaccaacgaaactagcgttttcgctaatcctagacagcaatgtgctacttagatttttttcatagatattgagaatgaactaatggaaaaac

SEQ ID NO: 191191 - DNA, 71 bp, Artificial Sequence
  ENSG00000112425_137 (sequence is synthesized)
gagccgggccgcgtggacacgttctggtacaagttcctgaagcgggagccgggaggagagctctcctggga

SEQ ID NO: 191192 - DNA, 120 bp, Artificial Sequence
  ENSG00000112425_138 (sequence is synthesized)
ttcataatttgctacttaacttcagatccagggaccaaaggcctgaattccagttgtgcctcaagatggtgctttccctcatttttgtagctcaagacgtacattcaactcaagagtcca

SEQ ID NO: 191193 - DNA, 120 bp, Artificial Sequence
  ENSG00000112425_139 (sequence is synthesized)
tatgaagcttctccctgcattcttacacagacgcttcaggcaggttcttcagacccatgcaatttcaaccccttatgttcatgatcatctggagttaggcagagcctacaaattgcaagg

SEQ ID NO: 191194 - DNA, 120 bp, Artificial Sequence
  ENSG00000112425_140 (sequence is synthesized)
agaaacccttgctgtctgtctgtctatctataatttaatatcttaaaaatgaatggtagaaatggaataaatataagattttagatttaatatatataatacatatgttttgacactgtg

SEQ ID NO: 191195 - DNA, 120 bp, Artificial Sequence
  ENSG00000112425_141 (sequence is synthesized)
taatgctcatgtgtttgagatgtgagagtgaatgtgtttgagatatgagaatgaattgtgaatgaatgagagtgaatgctcatgtgtttgagatgtgagaatgaattgtgcttgcagaaa

SEQ ID NO: 191196 - DNA, 120 bp, Artificial Sequence
  ENSG00000112425_142 (sequence is synthesized)
gccagtaaacagatagttcaatgagataagagctgtcttaggagattgtacctttttctgaaagagctgtggtaaggctgacaggtcaagattgactgactggctgggccttcaccaggt

SEQ ID NO: 191197 - DNA, 120 bp, Artificial Sequence
  ENSG00000112425_143 (sequence is synthesized)
gtgagaagtcttagtaccattgttggtcccaggacttctcttccagtaagctcattaaaatgttttatttttccaacaccatcaccaatttgagtttcattatctggaatatcttctaag

SEQ ID NO: 191198 - DNA, 120 bp, Artificial Sequence
  ENSG00000112425_144 (sequence is synthesized)
ttttttgctctgatgctggcatcctgggcaaagtccagatagctcaggcctgtagtgccgccagtacatacaggagtgagaagcccaacagtttcaattccgtgatctttatggttttaa

SEQ ID NO: 191199 - DNA, 120 bp, Artificial Sequence
  ENSG00000112425_145 (sequence is synthesized)
atggtaaattgtaatgccacatgaatgtagcgttttatcctgaattttagctaagtaaaacttcagagaattaagggaatgatttttttctcttttttatttgacagggtctggctctgt

SEQ ID NO: 191200 - DNA, 120 bp, Artificial Sequence
  ENSG00000112462_0 (sequence is synthesized)
agcaatggagaatgtcactacaatgaatgagtttcttctacttggcctgactggtgttcaggagctgcagcctttcttctttgggattttcttaatcatttacctgataaacttgattgg

SEQ ID NO: 191201 - DNA, 120 bp, Artificial Sequence
  ENSG00000112462_1 (sequence is synthesized)
aaatggatctatattggtgatggttgttttggaaccacaactccactcccctatgtatttttttctgggaaacctttcttgtctggatatttcttattcttcagtgacactgcccaagct

SEQ ID NO: 191202 - DNA, 120 bp, Artificial Sequence
  ENSG00000112462_2 (sequence is synthesized)
gctcgtaaacctcgtgtgcagtcgcagggctatatcttttctaggctgtatcacccagctacacttcttccactttttgggaagcacagaggccattttactggctatcatggcctttga

SEQ ID NO: 191203 - DNA, 120 bp, Artificial Sequence
  ENSG00000112462_3 (sequence is synthesized)
ccgttttgttgccatctgcaatcctcttcgctacactgtcatcatgaacccccaggtgtgtattctgttggcagctgcggcctggctcatcagcttcttttacgctctgatgcattctgt

SEQ ID NO: 191204 - DNA, 120 bp, Artificial Sequence
  ENSG00000112462_4 (sequence is synthesized)
catgactgcacacctgagtttttgtggctctcagaaactcaatcacttcttctacgatgtcaagccgctcttagaattggcctgtagtgacacattactcaatcaatggcttctttccat

SEQ ID NO: 191205 - DNA, 120 bp, Artificial Sequence
  ENSG00000112462_5 (sequence is synthesized)
tgtcacaggcagcatatccatgggagctttctttctgactcttctctcctgcttctatgtaattggcttccttctgtttaagaacaggtcctgcagaatactccacaaggctctgtccac

SEQ ID NO: 191206 - DNA, 120 bp, Artificial Sequence
  ENSG00000112462_6 (sequence is synthesized)
ttgtgcctcccattttatggtggtatgtcttttctatggacctgtgggcttcacatatattcgtcctgcttcagccacctccatgattcaggaccggataatggccatcatgtatagcgc

SEQ ID NO: 191207 - DNA, 120 bp, Artificial Sequence
  ENSG00000112462_7 (sequence is synthesized)
aatctttggtaggaagttgtttaaagactggcagcaacaccactaggactaatgagggatatctgatttctattaagactgatttccatcacttcactgtaagaaatgatttgtttacct

SEQ ID NO: 191208 - DNA, 120 bp, Artificial Sequence
  ENSG00000112462_8 (sequence is synthesized)
ggtttatatttttctttcaaaaattttgagcacatattatattaggcagtgtagtaggttcaagaaacacaggagcaagcaaaacaaattccataatgtcatcaaacataaagtttaatg

SEQ ID NO: 191209 - DNA, 120 bp, Artificial Sequence
  ENSG00000112462_9 (sequence is synthesized)
tgatggaggccccaaataaccaaacgcgtaagtacatatgtcaggataattcggtggcaaggagaactaaggaggtaggaagtatggggagggttagagtaggaatctgctgtgtaaaaa

SEQ ID NO: 191210 - DNA, 120 bp, Artificial Sequence
  ENSG00000112462_10 (sequence is synthesized)
agaatgtggcatttctcctaggacaaaaacctttggaattttccaagtaatagaagtatcttactgaaattccatatgagataatctttatttttgcctattttttttccttttgtgttt

SEQ ID NO: 191211 - DNA, 120 bp, Artificial Sequence
  ENSG00000112462_11 (sequence is synthesized)
ccttcagcaggaaagtactgatgataatttttctcacaacagtttttatctagaatatcatttttgttaatcttaattcttgaagagaatttttaatgggtatttaattttagggagaga

SEQ ID NO: 191212 - DNA, 120 bp, Artificial Sequence
  ENSG00000112462_12 (sequence is synthesized)
tttttctagccattgaaaatatcttgtttttccccagcttattgaagtataattaacaaataaaaattgcatatatttaggcttcacaacatgatgctttagtatatgtatacattgtga

SEQ ID NO: 191213 - DNA, 120 bp, Artificial Sequence
  ENSG00000112462_13 (sequence is synthesized)
agagactaccacaatcaagctaaacctacattactgtccctgcattagtttactgttgaatactagaagttcttcattctatctaactgcattttcatacccattaagccaatgtgacaa

SEQ ID NO: 191214 - DNA, 120 bp, Artificial Sequence
  ENSG00000112462_14 (sequence is synthesized)
gctctttgtttcagttggagtgtttgcacaatttaaatttgataaatttttgatagaattaaatttaaatttatcctccaactaaatttttgatagaattaaatttaaatttgtcctcca

SEQ ID NO: 191215 - DNA, 120 bp, Artificial Sequence
  ENSG00000112473_0 (sequence is synthesized)
atattggtaaaggcattagggcgaaggtggaacggaacttcctgttctcgcgggatctaaaggcgggactgccacgtccaagcaaaccgggaaaggagaggatcccggagccgcgtgatg

SEQ ID NO: 191216 - DNA, 120 bp, Artificial Sequence
  ENSG00000112473_1 (sequence is synthesized)
gccagaggcctgggggccccccactgggtggccgtgggactgctgacctgggcgaccttggggcttctggtggctggactcgggggtcatgacgacctgcacgacgatctgcaagaggac

SEQ ID NO: 191217 - DNA, 120 bp, Artificial Sequence
  ENSG00000112473_2 (sequence is synthesized)
ttccatggccacagccacaggcactcacatgaagatttccaccatggccacagccatgcccatggccatggccacactcacgagagcatctggcatggacatacccacgatcacgaccat

SEQ ID NO: 191218 - DNA, 120 bp, Artificial Sequence
  ENSG00000112473_3 (sequence is synthesized)
ggacattcacatgaggatttacaccatggccatagccatggctactcccatgagagcctctaccacagaggacatggacatgaccatgagcatagccatggaggctatggggagtctggg

SEQ ID NO: 191219 - DNA, 120 bp, Artificial Sequence
  ENSG00000112473_4 (sequence is synthesized)
gctccaggcatcaagcaggacctggatgctgtcactctctgggcttatgcactgggggccacagtgctgatctcagcagctccattttttgtcctcttccttatccccgtggagtcgaac

SEQ ID NO: 191220 - DNA, 120 bp, Artificial Sequence
  ENSG00000112473_5 (sequence is synthesized)
tctccccggcatcgctctctacttcagatcttgctcagttttgcttccggtgggctcctgggagatgctttcctgcacctcattcctcatgctcttgaacctcattctcaccacactctg

SEQ ID NO: 191221 - DNA, 120 bp, Artificial Sequence
  ENSG00000112473_6 (sequence is synthesized)
gagcaacccggacatggacactcccacagtggccagggccccattctgtctgtgggactgtgggttctcagtggaattgttgcctttcttgtcgtggagaaatttgtgagacatgtgaaa

SEQ ID NO: 191222 - DNA, 120 bp, Artificial Sequence
  ENSG00000112473_7 (sequence is synthesized)
ggaggacatggtcacagtcatggacatggacacgctcacagtcatacacgtggaagtcatggacatggaagacaagagcgttctaccaaggagaagcagagctcagaggaagaagaaaag

SEQ ID NO: 191223 - DNA, 120 bp, Artificial Sequence
  ENSG00000112473_8 (sequence is synthesized)
gtacctgaatctggctgctgacttggcacacaacttcactgatggtctggccattggggcttcctttcgagggggccggggactagggatcctgaccacaatgactgtcctgctacatga

SEQ ID NO: 191224 - DNA, 120 bp, Artificial Sequence
  ENSG00000112473_9 (sequence is synthesized)
agtgccccacgaggtcggagactttgccatcttggtccagtctggctgcagcaaaaagcaggcgatgcgtctgcaactactgacagcagtaggggcactggcaggcacagcctgtgccct

SEQ ID NO: 191225 - DNA, 120 bp, Artificial Sequence
  ENSG00000112473_10 (sequence is synthesized)
tctcactgaaggaggagcagtgggcagtgaaattgcaggtggtgcaggtcctggctgggtcctgccatttactgcaggtggctttatctacgtagcaacagtgtctgtgttgcccgagct

SEQ ID NO: 191226 - DNA, 120 bp, Artificial Sequence
  ENSG00000112473_11 (sequence is synthesized)
gctgagggaggcatcaccattgcaatcacttctggaggtgctggggctgctggggggagttatcatgatggtgctgattgcccaccttgagtgaggggtggataaactacccctgcccca

SEQ ID NO: 191227 - DNA, 120 bp, Artificial Sequence
  ENSG00000112473_12 (sequence is synthesized)
aacctctacccctaactccaggtcaggggtgcgtagaggttgggggccctggccagggacatctgccaaaggaaggaactgtagcctgggagaatggttactttggcattagggccttca

SEQ ID NO: 191228 - DNA, 120 bp, Artificial Sequence
  ENSG00000112473_13 (sequence is synthesized)
agggctggcagtcttacagaggctggagcggtgagaatgagaggccagagggaccatagtgttgggcactgtctgaccatgttgcatttggaaggctaaatggggccatgaagaaggctg

SEQ ID NO: 191229 - DNA, 120 bp, Artificial Sequence
  ENSG00000112473_14 (sequence is synthesized)
gaagggacagggggtgatggcagcctacctggtgtcccctaccccacctgttctcggagaaccaagttgctacacaggaagttctccaaggtccagtttcctttctcccaccagttggtg

SEQ ID NO: 191230 - DNA, 120 bp, Artificial Sequence
  ENSG00000112473_15 (sequence is synthesized)
gaggcttcagggaagaccagagtcctggacagagagggtaacaggaggagtcggggataaacatcaaacatcaatcgtgtgtcctgatttgggagtgattggggggatggggtgggagag

SEQ ID NO: 191231 - DNA, 120 bp, Artificial Sequence
  ENSG00000112473_16 (sequence is synthesized)
ggttagttggtattctcatggcctgattttttttgtttctattccttttatatcactgtgtttgaatcgagggggaggggtggtaaccggaaataaagacctccgatcttccgccccaca

SEQ ID NO: 191232 - DNA, 120 bp, Artificial Sequence
  ENSG00000112473_17 (sequence is synthesized)
ctgttctcgcgggatctaaaggcgggactgccacgtccaagcaaaccgggaaaggagaggatcccggagccggtgagaattctctgttttttctctaccatcctttccaggccttttcct

SEQ ID NO: 191233 - DNA, 120 bp, Artificial Sequence
  ENSG00000112473_18 (sequence is synthesized)
cacctaatgagtcgtagagacgagggcccagagagtctgtaaagtggctggtgaaagattagtgtcccagggccctacatccgggaggtggttcgggataaagagaactagtcttgggaa

SEQ ID NO: 191234 - DNA, 120 bp, Artificial Sequence
  ENSG00000112473_19 (sequence is synthesized)
caatgtaggtgggaacttaagggaatgggagagcggcccatagaggtggacggagggcgcgattggagtaaagcggaccctgtgtaggtatagagttgagtcaagtggagtcactgcctc

SEQ ID NO: 191235 - DNA, 120 bp, Artificial Sequence
  ENSG00000112473_20 (sequence is synthesized)
gggaggaagggcgggcgagcggcccaagacatgatccctggctgagagtagggataccgaagaggtcccagggattcccaaggattgatcggaggattagctgagcacgaggaagcccct

SEQ ID NO: 191236 - DNA, 120 bp, Artificial Sequence
  ENSG00000112473_21 (sequence is synthesized)
gagagaaagactctggcctggattgggtcgaattaagcccgtcgctctgctcagtaccaaaatgacagcgccaatgtggcagccatctttgtacagacgggaagtctcggcgcgagttcc

SEQ ID NO: 191237 - DNA, 120 bp, Artificial Sequence
  ENSG00000112473_22 (sequence is synthesized)
cgccccctcgtctagttggaaaccgaggaggcggtctcctccggcctgttagcccgcctcgcccaccctcccctcaaatcacctccacactcgcgcatgcgtgtcagtgcaggatggatt

SEQ ID NO: 191238 - DNA, 120 bp, Artificial Sequence
  ENSG00000112473_23 (sequence is synthesized)
cgtcgctaccggagtgccgccatattggtaaaggcattagggcgaaggtggaacggaacttcctgttctcgcgggatctaaaggcgggactgccacgtccaagcaaaccgggaaaggaga

SEQ ID NO: 191239 - DNA, 120 bp, Artificial Sequence
  ENSG00000112486_0 (sequence is synthesized)
tgcaaacgttcccaaatcttcccagtcggcttgcagagactccttgctcccaggagataaccaggtaaaggagtatgaaagtttgggtacaaactcattgctgcaaattgaaaaccatgc

SEQ ID NO: 191240 - DNA, 120 bp, Artificial Sequence
  ENSG00000112486_1 (sequence is synthesized)
aaaggctgtcttcctctggggagttcaatgcctctctttttcttatcactttaccattggttggactttgattccagggatcctacgattactcaataccctacaggatatacatggtta

SEQ ID NO: 191241 - DNA, 120 bp, Artificial Sequence
  ENSG00000112486_2 (sequence is synthesized)
accatttgcatttgggcaaataggcgttacttttcaataggaagtggcaatccagaacttgcttttgggcaattctagtagctcaccgcttttttcttaatgactgctagaagctgcatc

SEQ ID NO: 191242 - DNA, 120 bp, Artificial Sequence
  ENSG00000112486_3 (sequence is synthesized)
ttattgacagatggtcatcacattggtgagctggagtcatcagattgtggggcccggagtgaggctgaagggagtggatcagagcactgcctgagagtcacctctactttcctgctaccg

SEQ ID NO: 191243 - DNA, 120 bp, Artificial Sequence
  ENSG00000112486_4 (sequence is synthesized)
ctgcctgtgagctgaaggggctgaaccatacactcctttttctacaaccagcttgcattttttctgcccacaatgagcggggaatcaatgaatttcagcgatgttttcgactccagtgaa

SEQ ID NO: 191244 - DNA, 120 bp, Artificial Sequence
  ENSG00000112486_5 (sequence is synthesized)
gattattttgtgtcagtcaatacttcatattactcagttgattctgagatgttactgtgctccttgcaggaggtcaggcagttctccaggctatttgtaccgattgcctactccttgatc

SEQ ID NO: 191245 - DNA, 120 bp, Artificial Sequence
  ENSG00000112486_6 (sequence is synthesized)
tgtgtctttggcctcctggggaatattctggtggtgatcacctttgctttttataagaaggccaggtctatgacagacgtctatctcttgaacatggccattgcagacatcctctttgtt

SEQ ID NO: 191246 - DNA, 120 bp, Artificial Sequence
  ENSG00000112486_7 (sequence is synthesized)
cttactctcccattctgggcagtgagtcatgccaccggtgcgtgggttttcagcaatgccacgtgcaagttgctaaaaggcatctatgccatcaactttaactgcgggatgctgctcctg

SEQ ID NO: 191247 - DNA, 120 bp, Artificial Sequence
  ENSG00000112486_8 (sequence is synthesized)
acttgcattagcatggaccggtacatcgccattgtacaggcgactaagtcattccggctccgatccagaacactaccgcgcagcaaaatcatctgccttgttgtgtgggggctgtcagtc

SEQ ID NO: 191248 - DNA, 120 bp, Artificial Sequence
  ENSG00000112486_9 (sequence is synthesized)
atcatctccagctcaacttttgtcttcaaccaaaaatacaacacccaaggcagcgatgtctgtgaacccaagtaccagactgtctcggagcccatcaggtggaagctgctgatgttgggg

SEQ ID NO: 191249 - DNA, 120 bp, Artificial Sequence
  ENSG00000112486_10 (sequence is synthesized)
cttgagctactctttggtttctttatccctttgatgttcatgatattttgttacacgttcattgtcaaaaccttggtgcaagctcagaattctaaaaggcacaaagccatccgtgtaatc

SEQ ID NO: 191250 - DNA, 120 bp, Artificial Sequence
  ENSG00000112486_11 (sequence is synthesized)
atagctgtggtgcttgtgtttctggcttgtcagattcctcataacatggtcctgcttgtgacggctgcaaatttgggtaaaatgaaccgatcctgccagagcgaaaagctaattggctat

SEQ ID NO: 191251 - DNA, 120 bp, Artificial Sequence
  ENSG00000112486_12 (sequence is synthesized)
acgaaaactgtcacagaagtcctggctttcctgcactgctgcctgaaccctgtgctctacgcttttattgggcagaagttcagaaactactttctgaagatcttgaaggacctgtggtgt

SEQ ID NO: 191252 - DNA, 120 bp, Artificial Sequence
  ENSG00000112486_13 (sequence is synthesized)
gtgagaaggaagtacaagtcctcaggcttctcctgtgccgggaggtactcagaaaacatttctcggcagaccagtgagaccgcagataacgacaatgcgtcgtccttcactatgtgatag

SEQ ID NO: 191253 - DNA, 120 bp, Artificial Sequence
  ENSG00000112486_14 (sequence is synthesized)
aaagctgagtctccctaaggcatgtgtgaaacatactcatagatgttatgcaaaaaaaagtctatggccaggtatgcatggaaaatgtgggaattaagcaaaatcaagcaagcctctctc

SEQ ID NO: 191254 - DNA, 120 bp, Artificial Sequence
  ENSG00000112486_15 (sequence is synthesized)
ctgcgggacttaacgtgctcatgggctgtgtgatctcttcagggtggggtggtctctgataggtagcattttccagcactttgcaaggaatgttttgtagctctagggtatatatccgcc

SEQ ID NO: 191255 - DNA, 120 bp, Artificial Sequence
  ENSG00000112486_16 (sequence is synthesized)
gtaaacattttcagaaatattcatgaagcggtcacagatcacagtgtcttttggttacagcacaaaatgatggcagtggtttgaaaaactaaaacagaaaaaaaaatggaagccaacaca

SEQ ID NO: 191256 - DNA, 120 bp, Artificial Sequence
  ENSG00000112486_17 (sequence is synthesized)
tcactcattttaggcaaatgtttaaacatttttatctatcagaatgtttattgttgctggttataagcagcaggattggccggctagtgtttcctctcatttccctttgatacagtcaac

SEQ ID NO: 191257 - DNA, 120 bp, Artificial Sequence
  ENSG00000112486_18 (sequence is synthesized)
aagcctgaccctgtaaaatggaggtggaaagacaagctcaagtgttcacaacctggaagtgcttcgggaagaaggggacaatggcagaacaggtgttggtgacaattgtcaccaattgga

SEQ ID NO: 191258 - DNA, 120 bp, Artificial Sequence
  ENSG00000112486_19 (sequence is synthesized)
taaagcagctcaggttgtagtgggccattaggaaactgtcggtttgctttgatttccctgggagctgttctctgtcgtgagtgtctcttgtctaaacgtccattaagctgagagtgctat

SEQ ID NO: 191259 - DNA, 120 bp, Artificial Sequence
  ENSG00000112486_20 (sequence is synthesized)
gaagacaggatctagaataatcttgctcacagctgtgctctgagtgcctagcggagttccagcaaacaaaatggactcaagagagatttgattaatgaatcgtaatgaagttggggttta

SEQ ID NO: 191260 - DNA, 120 bp, Artificial Sequence
  ENSG00000112486_21 (sequence is synthesized)
ttgtacagtttaaaatgttagatgtttttaattttttaaataaatggaatactttttttttttttttaaagaaagcaactttactgagacaatgtagaaagaagttttgttccgtttctt

SEQ ID NO: 191261 - DNA, 120 bp, Artificial Sequence
  ENSG00000112486_22 (sequence is synthesized)
taatgtggttgaagagcaatgtgtggctgaagacttttgttatgaggagctgcagattagctaggggacagctggaattatgctggcttctgataattattttaaaggggtctgaaattt

SEQ ID NO: 191262 - DNA, 120 bp, Artificial Sequence
  ENSG00000112486_23 (sequence is synthesized)
gtgatggaatcagattttaacagctctcttcaatgacatagaaagttcatggaactcatgtttttaaagggctatgtaaatatatgaacattagaaaaatagcaacttgtgttacaaaaa

SEQ ID NO: 191263 - DNA, 71 bp, Artificial Sequence
  ENSG00000112486_24 (sequence is synthesized)
tatatgaacattagaaaaatagcaacttgtgttacaaaaatacaaacacatgttaggaaggtactgtcata

SEQ ID NO: 191264 - DNA, 120 bp, Artificial Sequence
  ENSG00000112486_25 (sequence is synthesized)
acatgtttaaacctgacaatggtgttatttgaaactttatattgttcttgtaagctttaactatatctctctttaaaatgcaaaataatgtcttaagattcaaagtctgtatttttaaag

SEQ ID NO: 191265 - DNA, 120 bp, Artificial Sequence
  ENSG00000112486_26 (sequence is synthesized)
catggctttggctttgcaaaataaaaaatgtgttttgtacatgaagtaggaatcgtatttcagcttcaaggttcagattgaggggcccactgtttggagaggatggtattcaggctttct

SEQ ID NO: 191266 - DNA, 120 bp, Artificial Sequence
  ENSG00000112486_27 (sequence is synthesized)
catgtccttcaaatctgttagcgtttgactctagaaatcaaagcaaaggagtggttacccagacacttcttttggtgtgatcaatgcgctgatgtgatctatgaagatgattcatgcttg

SEQ ID NO: 191267 - DNA, 120 bp, Artificial Sequence
  ENSG00000112486_28 (sequence is synthesized)
aaaactagcacagaaacatcttgcttatttgccaaagctgggagatgagcttctctgcataatttaaatgttcagataaatgaagctgacttatttaagcaataaccttttaaacatttt

SEQ ID NO: 191268 - DNA, 120 bp, Artificial Sequence
  ENSG00000112486_29 (sequence is synthesized)
agctaagatgtataaaaatgtttccaaaatataccacatactttatttcttcttaaatgtagtacattaggttacatcatttttcttgctgtcttgggcatcaaaacaggtgccatggta

SEQ ID NO: 191269 - DNA, 120 bp, Artificial Sequence
  ENSG00000112486_30 (sequence is synthesized)
acctgacactctcaggagacattaagatagaaggggctgttcttcagtggttcccattgattctccccatatctttttgctctcaggctctggccgtctcttcctgagccttaactgtgt

SEQ ID NO: 191270 - DNA, 120 bp, Artificial Sequence
  ENSG00000112486_31 (sequence is synthesized)
agtgtatgggtgaaggaggcagcagtgtggccggagaggagagctgggctgggagcacaggaaggtccccaggactctgtggtcatcagtaagagagggcccacgtgtatatgctggtga

SEQ ID NO: 191271 - DNA, 120 bp, Artificial Sequence
  ENSG00000112486_32 (sequence is synthesized)
gcatttttagagagctaaaaaccaaataggtctcagctttctcagggtgacatataatttagatttgacttggaactacagaaggaatatggggcaaaggacatgagaaacattgcagag

SEQ ID NO: 191272 - DNA, 120 bp, Artificial Sequence
  ENSG00000112494_0 (sequence is synthesized)
attaacgagtgacagtcttaatgactaacacacctctaacatttcacctctagctcagatgagagagagaatgggacttcttggtactgattgtttttcccatgcctcaattggtttctt

SEQ ID NO: 191273 - DNA, 120 bp, Artificial Sequence
  ENSG00000112494_1 (sequence is synthesized)
ttagggagctacaaatttacgtgttcactggtgattgatcttttcatccagcacaatggacagaagtctaaggaacgtccttgtggtttcctttgggttcctgcttctctttacagccta

SEQ ID NO: 191274 - DNA, 120 bp, Artificial Sequence
  ENSG00000112494_2 (sequence is synthesized)
tggaggtctgcagagcctgcagagcagcctgtacagcgaggagggcctgggtgtcacagcgctcagcaccctctatggaggcatgctcctgtcctccatgttcctcccaccgctcctcat

SEQ ID NO: 191275 - DNA, 120 bp, Artificial Sequence
  ENSG00000112494_3 (sequence is synthesized)
cgagaggctgggctgcaaggggaccatcatcctctccatgtgtggctacgtggccttctccgtgggcaacttcttcgccagctggtacactttgatccccacctccatactgctgggact

SEQ ID NO: 191276 - DNA, 120 bp, Artificial Sequence
  ENSG00000112494_4 (sequence is synthesized)
cggggccgccccgctgtggtctgcacagtgcacatacctcacgatcacgggaaacacacatgcagagaaggcgggaaagcgtggcaaagacatggtgaaccagtattttggcatcttctt

SEQ ID NO: 191277 - DNA, 120 bp, Artificial Sequence
  ENSG00000112494_5 (sequence is synthesized)
cctcatattccagtcatccggtgtgtggggcaacttgatctcatcgctggtatttggccagactcccagccaagagacccttccagaagagcagctcacgtcctgtggggccagtgactg

SEQ ID NO: 191278 - DNA, 120 bp, Artificial Sequence
  ENSG00000112494_6 (sequence is synthesized)
cctgatggccaccacaaccaccaacagcacccagaggccctcccagcagctggtctacaccctcctgggcatctacactgggagtggtgtcctggctgtcctgatgatagctgcgttcct

SEQ ID NO: 191279 - DNA, 120 bp, Artificial Sequence
  ENSG00000112494_7 (sequence is synthesized)
ccaacccatacgagatgttcagcgggaaagtgaaggagagaagaaatcagtacctttctggtccactttactgtcgactttcaagctatatagagataaacgtctgtgcctcttaattct

SEQ ID NO: 191280 - DNA, 120 bp, Artificial Sequence
  ENSG00000112494_8 (sequence is synthesized)
ccctgggcatccagttcgtcggctacgtgatgatctgcttctcggccactgacgcgctgtgctccgtgttgtatggaaaggtctcgcagtacacgggcagggctgtgctgtacgtgctgg

SEQ ID NO: 191281 - DNA, 120 bp, Artificial Sequence
  ENSG00000112494_9 (sequence is synthesized)
gcgcggtgacccacgtgtcctgcatgattgccctactgctgtggagacctcgtgctgaccatctggcagtgttcttcgtattctctggcctgtggggcgtggcagatgccgtctggcaga

SEQ ID NO: 191282 - DNA, 120 bp, Artificial Sequence
  ENSG00000112494_10 (sequence is synthesized)
cacaaaacaatgctctctacggcgttctgtttgagaagagcaaggaagctgccttcgccaattaccgcctgtgggaggccctgggcttcgtcattgccttcgggtacagcatgtttttgt

SEQ ID NO: 191283 - DNA, 120 bp, Artificial Sequence
  ENSG00000112494_11 (sequence is synthesized)
gcgtgcacgtcaagctctacattctgctgggggtcctgagcctgaccatggtggcgtatgggcttgtggagtgcgtggagtccaagaacccgatcagaccccacgctccaggacaggtca

SEQ ID NO: 191284 - DNA, 120 bp, Artificial Sequence
  ENSG00000112494_12 (sequence is synthesized)
accaggcagaggatgaagaaatacaaacaaaaatgtgagagcagtgaggtccgaggaggatgaactcagaaagcaccagccagagaattttcttagaagatgcctcaggacatagagcgg

SEQ ID NO: 191285 - DNA, 120 bp, Artificial Sequence
  ENSG00000112494_13 (sequence is synthesized)
ctcctcatcaccatctcagcacaatttggccattctgaagagatcatgttatttcactcttcatgtattttttttctattctaacaaatttttcgtccaccatcttaacagagatcaagt

SEQ ID NO: 191286 - DNA, 120 bp, Artificial Sequence
  ENSG00000112494_14 (sequence is synthesized)
gtatacatgaaggtatcagttcatttaattttagatgcaaaagaaaaaggtctaacgtacaatcagccaattagaatttgcctgaaatcatagactcaccctagttttattgctgtagtt

SEQ ID NO: 191287 - DNA, 120 bp, Artificial Sequence
  ENSG00000112494_15 (sequence is synthesized)
gtttttaagaattggaagcctgcttaaaaaatgtagttgagccccataattttacaaatgggcgaacttttaaacttctaactctacttggatcaaaacctcatacattttacaaagggg

SEQ ID NO: 191288 - DNA, 120 bp, Artificial Sequence
  ENSG00000112494_16 (sequence is synthesized)
tcctgacaagtcagctgactcaacctcacagagtcagggggtgacaaagccagactggggctcaggattcctgaaacgtgtggggtctgcgtttctaaataaagacggttatttaatgga

SEQ ID NO: 191289 - DNA, 120 bp, Artificial Sequence
  ENSG00000112494_17 (sequence is synthesized)
ccttcctgggctgacaaagactgtctctcccaatgtaaaagtaatctctcttcttctgaaatatccttgcaaaatgtattggtctggattatatgcaggcggtgttcttatgaatcaaat

SEQ ID NO: 191290 - DNA, 120 bp, Artificial Sequence
  ENSG00000112494_18 (sequence is synthesized)
gcagtacacccgtgctgtctaacagaggatcctggggtgatgagattgttatacatctccagagcccaacacagcagccattaagcactgtggttgtttacatcttaactgattaaagtt

SEQ ID NO: 191291 - DNA, 120 bp, Artificial Sequence
  ENSG00000112494_19 (sequence is synthesized)
gagggccagagttaagacagagcttaagacagagaacctcaacaggaggcctgaaggaaagcacctgggagtcattaggcagcaagggagggaattgcaattctgggcggggctcagctg

SEQ ID NO: 191292 - DNA, 120 bp, Artificial Sequence
  ENSG00000112494_20 (sequence is synthesized)
tgcagagtttagcaaggtctccaggtgcttctgctgagggccagagttaagaaagagcgagaacctcatcaggaggactgaaggaaaggagccaggctgcagccctctgcctgcccttcc

SEQ ID NO: 191293 - DNA, 120 bp, Artificial Sequence
  ENSG00000112499_0 (sequence is synthesized)
gcagccgctctcagcctcgctccgggcacgtcgggcagcctcgggccctcctgcctgcaggatcatgcccaccaccgtggacgatgtcctggagcatggaggggagtttcactttttcca

SEQ ID NO: 191294 - DNA, 120 bp, Artificial Sequence
  ENSG00000112499_1 (sequence is synthesized)
gaagcaaatgtttttcctcttggctctgctctcggctaccttcgcgcccatctacgtgggcatcgtcttcctgggcttcacccctgaccaccgctgccggagccccggagtggccgagct

SEQ ID NO: 191295 - DNA, 120 bp, Artificial Sequence
  ENSG00000112499_2 (sequence is synthesized)
gagtctgcgctgcggctggagtcctgcagaggaactgaactacacggtgccgggcccaggacctgcgggcgaagcctccccaagacagtgtaggcgctacgaggtggactggaaccagag

SEQ ID NO: 191296 - DNA, 120 bp, Artificial Sequence
  ENSG00000112499_3 (sequence is synthesized)
caccttcgactgcgtggaccccctggccagcctggacaccaacaggagccgcctgccactgggcccctgccgggacggctgggtgtacgagacgcctggctcgtccatcgtcaccgagtt

SEQ ID NO: 191297 - DNA, 120 bp, Artificial Sequence
  ENSG00000112499_4 (sequence is synthesized)
taacctggtatgtgccaactcctggatgttggacctattccagtcatcagtgaatgtaggattctttattggctctatgagtatcggctacatagcagacaggtttggccgtaagctctg

SEQ ID NO: 191298 - DNA, 120 bp, Artificial Sequence
  ENSG00000112499_5 (sequence is synthesized)
cctcctaactacagtcctcataaatgctgcagctggagttctcatggccatttccccaacctatacgtggatgttaatttttcgcttaatccaaggactggtcagcaaagcaggctggtt

SEQ ID NO: 191299 - DNA, 120 bp, Artificial Sequence
  ENSG00000112499_6 (sequence is synthesized)
aataggctacatcctgattacagaatttgttgggcggagatatcggagaacagtggggattttttaccaagttgcctatacagttgggctcctggtgctagctggggtggcttacgcact

SEQ ID NO: 191300 - DNA, 120 bp, Artificial Sequence
  ENSG00000112499_7 (sequence is synthesized)
tcctcactggaggtggttgcagttcacagtttctctgcccaacttcttcttcttgctctattactggtgcatacctgagtctcccaggtggctgatctcccagaataagaatgctgaagc

SEQ ID NO: 191301 - DNA, 120 bp, Artificial Sequence
  ENSG00000112499_8 (sequence is synthesized)
catgagaatcattaagcacatcgcaaagaaaaatggaaaatctctacccgcctcccttcagcgcctgagacttgaagaggaaactggcaagaaattgaacccttcatttcttgacttggt

SEQ ID NO: 191302 - DNA, 120 bp, Artificial Sequence
  ENSG00000112499_9 (sequence is synthesized)
cagaactcctcagataaggaaacatactatgatattgatgtacaactggttcacgagctctgtgctctaccagggcctcatcatgcacatgggccttgcaggtgacaatatctacctgga

SEQ ID NO: 191303 - DNA, 120 bp, Artificial Sequence
  ENSG00000112499_10 (sequence is synthesized)
ctctgccctggttgaattcccagctgccttcatgatcatcctcaccatcgaccgcatcggacgccgttacccttgggctgcatcaaatatggttgcaggggcagcctgtctggcctcagt

SEQ ID NO: 191304 - DNA, 120 bp, Artificial Sequence
  ENSG00000112499_11 (sequence is synthesized)
ttttatacctggtgatctacaatggctaaaaattattatctcatgcttgggaagaatggggatcacaatggcctatgagatagtctgcctggtcaatgctgagctgtaccccacattcat

SEQ ID NO: 191305 - DNA, 120 bp, Artificial Sequence
  ENSG00000112499_12 (sequence is synthesized)
taggaatcttggcgtccacatctgttcctcaatgtgtgacattggtggcatcatcacgccattcctggtctaccggctcactaacatctggcttgagctcccgctgatggttttcggcgt

SEQ ID NO: 191306 - DNA, 120 bp, Artificial Sequence
  ENSG00000112499_13 (sequence is synthesized)
gcttggcttggttgctggaggtctggtgctgttgcttccagaaactaaagggaaagctttgcctgagaccatcgaggaagccgaaaatatgcaaagaccaagaaaaaataaagaaaagat

SEQ ID NO: 191307 - DNA, 120 bp, Artificial Sequence
  ENSG00000112499_14 (sequence is synthesized)
gatttacctccaagttcagaaactagacattccattgaactaagaagagagaccgttgctgctgtcatgacctagctttgatggcagcaagaccaaaagtagaaatccctgcactcatca

SEQ ID NO: 191308 - DNA, 120 bp, Artificial Sequence
  ENSG00000112499_15 (sequence is synthesized)
caaagcccatacaactcaaccaaacttacccctgagccctatcaacctaggtctacagccagtggagtctattgtacactgtggaaaaatacccatgggaccagatcctgccaaattctt

SEQ ID NO: 191309 - DNA, 120 bp, Artificial Sequence
  ENSG00000112499_16 (sequence is synthesized)
ccagctcactttattctcagcattcctaggacattggacattggttttctggagggttttttttccatctttgtatttttttaaatttgattcttttctttgcaatgctatctaaccaga

SEQ ID NO: 191310 - DNA, 120 bp, Artificial Sequence
  ENSG00000112499_17 (sequence is synthesized)
atacataggggaactgtgggctaggcaaacaaaatagaaaaaagtgtgaaaaacagtaaagttgggagaggagcatctattttcttaaagaaataaaacacccaaaacaatataaagttg

SEQ ID NO: 191311 - DNA, 120 bp, Artificial Sequence
  ENSG00000112499_18 (sequence is synthesized)
tccagaatgtatgtcaagaattttagataggcctttcagtaacacaggtgaagaaatttttaaaaatacattgattattatctaggttagacttaaagtgaatctcaaataaaagaatca

SEQ ID NO: 191312 - DNA, 120 bp, Artificial Sequence
  ENSG00000112499_19 (sequence is synthesized)
ggaatacaacttaagtgatcatgaggtccttccatatttagattgggtaagcatgaatgtgtattttctacaaaagaccttgagaagagttcaataaaaaatgttagcattataaaacca

SEQ ID NO: 191313 - DNA, 120 bp, Artificial Sequence
  ENSG00000112499_20 (sequence is synthesized)
ttcatataaaatcatttggggctggagatcatgctatggcactattattttgttaaaaactacagatgacatcaaaagctatttgtgaagcctgattccaataaatataatagaaaaaaa

SEQ ID NO: 191314 - DNA, 120 bp, Artificial Sequence
  ENSG00000112499_21 (sequence is synthesized)
ctgtcttcagtatccatcaaatgctgatgtttctccctctccagacatgagctcaagccccaaagccatctcccaccacccattggacatctttgctcaaactcaacaagtcctggacaa

SEQ ID NO: 191315 - DNA, 120 bp, Artificial Sequence
  ENSG00000112499_22 (sequence is synthesized)
gattcatcatttcttccttcccagcttttgccaactggaactgctgaactctgctcttttattcttatccacaaggcctgatcctttctaaagatttaatatcattttcttattttgttt

SEQ ID NO: 191316 - DNA, 120 bp, Artificial Sequence
  ENSG00000112499_23 (sequence is synthesized)
tggtctgttttcccccactagaaagtaacttctctgagggcggaggttttttggtttttcttttgtttttaatttactgttgaatcctcattaactaagacagtgcctgacacataacag

SEQ ID NO: 191317 - DNA, 120 bp, Artificial Sequence
  ENSG00000112499_24 (sequence is synthesized)
gctgaacagtgctctcgctgaggtcagggggagaagatggcaggggtgaatccttgacgatcacggagtaaggacgagaatgcagtttgcttcccacaggcccctccctcaacatgccaa

SEQ ID NO: 191318 - DNA, 120 bp, Artificial Sequence
  ENSG00000112499_25 (sequence is synthesized)
gattcctacctggggcatcaagactgcaggtggggccaagaaaagacatggacactcaaagtcaagctctttgacggggaacaggtgcagacagagcagccttggcttccggctcatgca

SEQ ID NO: 191319 - DNA, 120 bp, Artificial Sequence
  ENSG00000112499_26 (sequence is synthesized)
ctcacgatgctggctgcgaatgggaagtccctaaacagaactgagccccctcattcagctcagagcaaacggggctggcagcagcccagggcaccacgaagcagagtgcctctgtgtgcc

SEQ ID NO: 191320 - DNA, 120 bp, Artificial Sequence
  ENSG00000112499_27 (sequence is synthesized)
caacacagccgcagtggaggtcaatggatgtccttgccggcgccctgctttttgcttttttaagaaaataagaagcctgcagctgcggcaaggagaaagaccccgtgggtcgctcctttt

SEQ ID NO: 191321 - DNA, 120 bp, Artificial Sequence
  ENSG00000112499_28 (sequence is synthesized)
agactacgctattacacctgctgactatccaatagaaaaaagaaggagaaggaaaatcgggttaactttctggtatttagtttgcagatatgtcagcaggccaccttctctacttggcag

SEQ ID NO: 191322 - DNA, 120 bp, Artificial Sequence
  ENSG00000112499_29 (sequence is synthesized)
gatcacgatgtattaagaatccttttgtccaccaggaaagacaaatttcctgtttgtcttgcatttagatgcaacaacatcatcctaaagagatgcccctgatgtgtgagagcagaaagg

SEQ ID NO: 191323 - DNA, 120 bp, Artificial Sequence
  ENSG00000112499_30 (sequence is synthesized)
ggtgatccctttcttccttatcctaaggctcacggccaacacccctataacaaaagacaggttaacaagagaaaagcatgacaaatttatttgatcacgttttacatgacacaggagcct

SEQ ID NO: 191324 - DNA, 120 bp, Artificial Sequence
  ENSG00000112499_31 (sequence is synthesized)
tcattcagaatgaagacccacagatacagggaaaactggatggcagtatagaactgtagttggacaaaaagggcagcagcccatgttcgcaggctgaggggaaaacccagcaaggcctgt

SEQ ID NO: 191325 - DNA, 120 bp, Artificial Sequence
  ENSG00000112499_32 (sequence is synthesized)
ctgttcagatccgtcttggcccctctgtgcagcactccttcctccaggcaccggggacaagactcctctggaatgcgggtctggatttctttacggcccactgttacacagaaaggcagc

SEQ ID NO: 191326 - DNA, 120 bp, Artificial Sequence
  ENSG00000112499_33 (sequence is synthesized)
ggggaagttacagtggtatttctaggctttctggctggctttggggagaaaagagtctggtttccacgagctgctttgaggaagaaggattctcagttctatggcttgccccgggggaga

SEQ ID NO: 191327 - DNA, 120 bp, Artificial Sequence
  ENSG00000112499_34 (sequence is synthesized)
atgatgggtgagagaagagacaggagggcaggagaaggtcagagagagagactttgcttctgaggcctccaccttggggcatggatttctgagccccaacagaccttgacagaaaaatct

SEQ ID NO: 191328 - DNA, 120 bp, Artificial Sequence
  ENSG00000112499_35 (sequence is synthesized)
aggacacaaagatagtggcttggacacacctgcctgcatttacacttgacctgtctgcgacgtaaacactttcctctttccctccagatgggttaaggggaaggacacttcagggttgaa

SEQ ID NO: 191329 - DNA, 120 bp, Artificial Sequence
  ENSG00000112499_36 (sequence is synthesized)
ccatagtaaggaagggaagaaaacatgacctcatcccggtattagcgctgacggtgggcagcaatgtgggttgtgtctggtaggttttcctgatcgtgtttttcttgggcaaatattaag

SEQ ID NO: 191330 - DNA, 120 bp, Artificial Sequence
  ENSG00000112499_37 (sequence is synthesized)
atcggtgtagcccctaagcacagatcaaggcaatggcaacctcggcttcacattggaatcacctgggagcttacaaaataccaaagccaaaacccccagaaatactgatttaattgttct

SEQ ID NO: 191331 - DNA, 120 bp, Artificial Sequence
  ENSG00000112499_38 (sequence is synthesized)
agggtagggcttggaaaccaatagttttttaattctccaggtgattcaaatgcatagcccaactagagaactattggtataacttaattgatgatgcatgtagatctctattgtagtaca

SEQ ID NO: 191332 - DNA, 120 bp, Artificial Sequence
  ENSG00000112499_39 (sequence is synthesized)
gaactggcaaaaaacaaacaaacaaaaaacagggttgtggggggattgccttttctttcctttttttcttttctacctggagaaaaaataaatttctgaacaagaataattccagtggct

SEQ ID NO: 191333 - DNA, 120 bp, Artificial Sequence
  ENSG00000112499_40 (sequence is synthesized)
tcacagcccagtgacttgatctttattgtgtttgctacctacaggctgctctcagagcttcaagccatgctttctctagtggggaatgcatcttttcagggcacattggatctccaccca

SEQ ID NO: 191334 - DNA, 120 bp, Artificial Sequence
  ENSG00000112499_41 (sequence is synthesized)
ggcaaatggagatttacaatcactgacaaaagcaaagctcatgaggaattactttagcaacctttacaatagtgcacaggagaggcagctttgaaatttggcctcattatccttctttcc

SEQ ID NO: 191335 - DNA, 120 bp, Artificial Sequence
  ENSG00000112499_42 (sequence is synthesized)
ttttctgagtaatcgtgacttttgttgattatcctcatattttccattacatgtaatgactatgtttagttaataaactagaaacattgtccaaatgttgttcgtaacaggccaggagag

SEQ ID NO: 191336 - DNA, 120 bp, Artificial Sequence
  ENSG00000112499_43 (sequence is synthesized)
aagtcaccaagaagggaggccgtactcacttggtcttctggtttcctaaaatttgaattaagtagtcagttctttcgatcccaattgcactagaataccccaaagagagaaataactcac

SEQ ID NO: 191337 - DNA, 120 bp, Artificial Sequence
  ENSG00000112499_44 (sequence is synthesized)
ccaattgcactagaataccccaaagagagaaataactcacaaccactaataacttgatatagttttactaaataaatcattccattggccaggcacagtggctcacacctggaatcccag

SEQ ID NO: 191338 - DNA, 120 bp, Artificial Sequence
  ENSG00000112499_45 (sequence is synthesized)
gatcacatgaagccaggagttcaagaccagcctggttaacatggcaaaaccccatgtctactaaaagcacaaaaattagcaggtggtacacgtctgtaatcccaactactagggaggctg

SEQ ID NO: 191339 - DNA, 120 bp, Artificial Sequence
  ENSG00000112499_46 (sequence is synthesized)
cagagagaccagaggagctcaactgacttgattttacctccccatctggagctttagagaattccaaaaccatagggtgatttgggaacaggtccaaagggcatggctgggaacaacaaa

SEQ ID NO: 191340 - DNA, 120 bp, Artificial Sequence
  ENSG00000112499_47 (sequence is synthesized)
atgaagaaagcagcatttctacgatgaatatcagcaatgtcctggcattcacgaagacaagatgattgagaaaacttgcaatttgaacaaatgttttaattgcagtcttcatttatcaag

SEQ ID NO: 191341 - DNA, 120 bp, Artificial Sequence
  ENSG00000112511_0 (sequence is synthesized)
caccctcccccccaaccggtccgtccctcccctccctccctcccccccgccgcctcctcctcctgccgctgccgctgctttggctgctgcgtcatacgccccagagccgccgggacggag

SEQ ID NO: 191342 - DNA, 120 bp, Artificial Sequence
  ENSG00000112511_1 (sequence is synthesized)
tgcacgcccccccacgcccggacgtgccctctccgcgcgggggactcgcctaggtctcctacgtctgcccctgcccggctcccggcggccccagctgtcaccggcccccccaggatgcaa

SEQ ID NO: 191343 - DNA, 120 bp, Artificial Sequence
  ENSG00000112511_2 (sequence is synthesized)
ccccagctgtcaccggcccccccaggatgcaatggcgcagcccccccggctgagccgctctggtgcctcctcactttgggacccagcttctcctgctcccacctctggccccaggcctcg

SEQ ID NO: 191344 - DNA, 120 bp, Artificial Sequence
  ENSG00000112511_3 (sequence is synthesized)
gctttgggagggtcaagatgtgctggccagatggactgatgggctgctatacttgggtaccatcaaaaaggtggacagtgctagggaggtgtgtctggtccagtttgaggatgattcgca

SEQ ID NO: 191345 - DNA, 120 bp, Artificial Sequence
  ENSG00000112511_4 (sequence is synthesized)
gtttctggttctatggaaagacattagccctgctgccctccctggagaggaactcctctgttgtgtctgtcgctctgagactgtggtccctgggaaccggctggtcagctgtgagaagtg

SEQ ID NO: 191346 - DNA, 120 bp, Artificial Sequence
  ENSG00000112511_5 (sequence is synthesized)
tcgccatgcttatcaccaggactgccatgttcccagggctccagcccctggagagggagagggcacatcctgggtatgccgccagtgtgtctttgcgatcgccaccaagaggggaggtgc

SEQ ID NO: 191347 - DNA, 120 bp, Artificial Sequence
  ENSG00000112511_6 (sequence is synthesized)
cctgaagaagggcccctatgcccgggccatgctgggtatgaagctttctctgccatatggactgaaggggctggactgggatgctggacatctgagcaaccgacagcagagttactgtta

SEQ ID NO: 191348 - DNA, 120 bp, Artificial Sequence
  ENSG00000112511_7 (sequence is synthesized)
ctgtggtggccctggggagtggaacctgaaaatgctgcagtgccggagctgcctgcagtggttccatgaggcctgcacccagtgtctgagcaagcccctcctctatggggacaggttcta

SEQ ID NO: 191349 - DNA, 120 bp, Artificial Sequence
  ENSG00000112511_8 (sequence is synthesized)
tgaatttgaatgctgtgtgtgtcgcgggggccctgagaaagtccggagactacagcttcgctgggtggatgtggcccatcttgtcctgtatcacctcagtgtttgctgtaagaagaaata

SEQ ID NO: 191350 - DNA, 120 bp, Artificial Sequence
  ENSG00000112511_9 (sequence is synthesized)
gtttgctcctgggggagctttcagacacccccaaaggagaacgttcttccaggctcctctctgctcttaacagccacaaggaccgtttcatttcagggagagagattaagaagaggaaat

SEQ ID NO: 191351 - DNA, 120 bp, Artificial Sequence
  ENSG00000112511_10 (sequence is synthesized)
gtttgtttggtctccatgctcggatgcctccccctgtggagccccctactggagatggagcactcaccagcttcccttcagggcagggccctgggggaggggtctcacgtcccctgggga

SEQ ID NO: 191352 - DNA, 120 bp, Artificial Sequence
  ENSG00000112511_11 (sequence is synthesized)
agcgccggaggccggagccagagcccctgaggaggaggcagaaggggaaagtggaggagctggggccaccctcagcagtgcgcaatcagcccgagccccaggagcagagggagcgggctc

SEQ ID NO: 191353 - DNA, 120 bp, Artificial Sequence
  ENSG00000112511_12 (sequence is synthesized)
atctgcagagggcactgcaggcctcagtgtctccaccatcccccagccctaaccagagttaccagggcagcagcggctacaacttccggcccacagatgcccgctgcctgcccagcagcc

SEQ ID NO: 191354 - DNA, 120 bp, Artificial Sequence
  ENSG00000112511_13 (sequence is synthesized)
ccatccggatgtttgcttccttccacccttctgccagcaccgcagggacctctggggacagtggacccccagacaggtcacccctggaacttcacattggtttccccacagacatcccta

SEQ ID NO: 191355 - DNA, 120 bp, Artificial Sequence
  ENSG00000112511_14 (sequence is synthesized)
aaagtgccccccactcgatgactgcctcatcttcctcagtttcatccccatccccaggtcttcctagacgctcagcacccccttctcccctgtgccgtagtttgtctcctgggactgggg

SEQ ID NO: 191356 - DNA, 120 bp, Artificial Sequence
  ENSG00000112511_15 (sequence is synthesized)
gaggagtccgaggtggggttggttacctgtcccgaggggaccctgtccgggtccttgctcggagagtacggcctgatggctctgtgcagtacctggttgagtggggaggagggggcatct

SEQ ID NO: 191357 - DNA, 120 bp, Artificial Sequence
  ENSG00000112511_16 (sequence is synthesized)
tctgaacagcctgcctctgcccagctccccattcacacacaccggcactttcataccctgacctctgacctcacctacagctgggatgtacctggagagatagggggtagttctccctac

SEQ ID NO: 191358 - DNA, 120 bp, Artificial Sequence
  ENSG00000112511_17 (sequence is synthesized)
tgcccaggctggaatccaagagtggggagtggggaagaggccctcttctctaccctccttcatgattcctgacccctcccatccttcccatttcctttgatgttattttgttacagcttt

SEQ ID NO: 191359 - DNA, 120 bp, Artificial Sequence
  ENSG00000112511_18 (sequence is synthesized)
ttaaatattttttaaaattatttaacccctgggggcagagactgaggagggaggatgataagggatcccggactctgtatgattgaaataaagagaaataaacaaatctagcagctctga

SEQ ID NO: 191360 - DNA, 120 bp, Artificial Sequence
  ENSG00000112511_19 (sequence is synthesized)
aagcacggggcgggacgtccacgggaagcggcgcgcacgcccgccgactccctcgcgccaaccgccgacggccgccgcccggtgaaggaggggctcagtcctcccaggtctcctacgtct

SEQ ID NO: 191361 - DNA, 120 bp, Artificial Sequence
  ENSG00000112511_20 (sequence is synthesized)
ttccctcgtgccccaagggcgaatctcaggtcggaggaaggggctgaggggattccctctcccaccgggtccgactcttcgctccccaagccgcggagggccagcctcttcttcggcgcc

SEQ ID NO: 191362 - DNA, 120 bp, Artificial Sequence
  ENSG00000112511_21 (sequence is synthesized)
gtgtctccaccatcccccagccctaaccagagttaccagggcagcagcggctacaacttccggcccacagatgcccgctgcctgcccaggtcagtgctcctctgcccctcccccacaaaa

SEQ ID NO: 191363 - DNA, 120 bp, Artificial Sequence
  ENSG00000112511_22 (sequence is synthesized)
tatgctcccaattattcacatcttctggactttatcacccagaattcttttccctctcccccttggctacccacttcttggcctagaccgacttctagaactagtgtctggtagccagta

SEQ ID NO: 191364 - DNA, 120 bp, Artificial Sequence
  ENSG00000112511_23 (sequence is synthesized)
gtgttagtcctggggggtatatgtatagagatggggaggtcttgggggtgtccgggagggggctggggggataaggaggcctcttacagcttcccttcagggcagggccctgggggaggg

SEQ ID NO: 191365 - DNA, 120 bp, Artificial Sequence
  ENSG00000112511_24 (sequence is synthesized)
agatggtttaaatgcatccttttctaaccatatgacctcggacaagtcccttaacctctaggagcctcagttccctgacttgtaaaataaggataatgcaccccctcatcaagaccatgg

SEQ ID NO: 191366 - DNA, 120 bp, Artificial Sequence
  ENSG00000112511_25 (sequence is synthesized)
ggaatgaatgatgtggtggtggatcccaggaaatgaaggaaaaagaacaggatgagggtagcactcagggggataggaggtaagtttagggtttgggacagttatggggaagggggtttc

SEQ ID NO: 191367 - DNA, 120 bp, Artificial Sequence
  ENSG00000112511_26 (sequence is synthesized)
tggaggccagaagtcctgtgttccccctcaggtggaacctgaaaatgctgcagtgccggagctgcctgcagtggttccatgaggcctgcacccagtgtctgagcaagcccctcctctatg

SEQ ID NO: 191368 - DNA, 120 bp, Artificial Sequence
  ENSG00000112511_27 (sequence is synthesized)
gggacaggtgagaccaaggcagactctctaggagccaaggatgccctctttcttcgtgttccaccctcagttctcccacgcccttctccactccagtctcttcccaacctctgcagcgtt

SEQ ID NO: 191369 - DNA, 120 bp, Artificial Sequence
  ENSG00000112514_0 (sequence is synthesized)
cttcctggggttgtttctccgtgtgacgtgtggcctttgagatcaactctcctgtaccagcgtaggccgcatgagtggggggcgggctcccgcggtcctgctcggcggagtggggcattc

SEQ ID NO: 191370 - DNA, 120 bp, Artificial Sequence
  ENSG00000112514_1 (sequence is synthesized)
ttcgggggtgcatcagagggagggcagagcctgaggatctaagcgaaggcttccccgggtgtaatttcctgggctgtttgtgaggagagatcgaattcgcctcctgctctcaggcctctc

SEQ ID NO: 191371 - DNA, 120 bp, Artificial Sequence
  ENSG00000112514_2 (sequence is synthesized)
tgctcctgtcttttgtttggatgccggcgctgctgcctgtggcctcccgccttttgttgctaccccgagtcttgctgaccatggcctctggaagccctccgacccagccctcgccggcct

SEQ ID NO: 191372 - DNA, 120 bp, Artificial Sequence
  ENSG00000112514_3 (sequence is synthesized)
cctttgttacttgccccaacgagaaggtcgccaaggagatcgccagggccgtggtggagaagcgcctagcagcctgcgtcaacctcatccctcagattacatccatctatgagtggaaag

SEQ ID NO: 191373 - DNA, 120 bp, Artificial Sequence
  ENSG00000112514_4 (sequence is synthesized)
ggaagatcgaggaagacagtgaggtgctgatgatgattaaaacccaaagttccttggtcccagctttgacagattttgttcgttctgtgcacccttacgaagtggccgaggtaattgcat

SEQ ID NO: 191374 - DNA, 120 bp, Artificial Sequence
  ENSG00000112514_5 (sequence is synthesized)
tgcctgtggaacaggggaactttccgtacctgcagtgggtgcgccaggtcacagagtcagtttctgactctatcacagtcctgccatgatgagccctgttcctgctcatcatgaagatcc

SEQ ID NO: 191375 - DNA, 120 bp, Artificial Sequence
  ENSG00000112514_6 (sequence is synthesized)
acggaaacgggcgtgccatttccgcgcacgtctgcagatgcggtagtcgattggtcaagtctcccatggctcctccttcatcaggaggtgggcaaaccgcgccatgatagggtcgggatt

SEQ ID NO: 191376 - DNA, 120 bp, Artificial Sequence
  ENSG00000112514_7 (sequence is synthesized)
ggctggctctggaggcgcaggtggtccttcttctactgtcacatggtgcgcgctgttttctaatcacgtggctgccacccaggtaagaagaggccgctcttcctggggttgtttctccgt

SEQ ID NO: 191377 - DNA, 120 bp, Artificial Sequence
  ENSG00000112514_8 (sequence is synthesized)
gtgacgtgtggcctttgagatcaactctcctgtaccagcgtaggccgcatgagtggggggcgggctcccgcggtcctgctcggcggagtggtgagtgaccggccccgccccgccccttcc

SEQ ID NO: 191378 - DNA, 120 bp, Artificial Sequence
  ENSG00000112514_9 (sequence is synthesized)
ggtcctcgaagcctcgaccgctacccgcaccctaaatcccagaggttggccccctgaggtgtgagtgaaatgagcttttgctttattttccaagtttctctctcaccttcaggggcattc

SEQ ID NO: 191379 - DNA, 120 bp, Artificial Sequence
  ENSG00000112514_10 (sequence is synthesized)
catgtgagtcataggagttggggggttaacctaactgtaggagctgactgggaacctctttcctgggggaaattctttgctccccacaactctccccctctgacctttcagctatgagtg

SEQ ID NO: 191380 - DNA, 120 bp, Artificial Sequence
  ENSG00000112514_11 (sequence is synthesized)
cttacccctcttctgagaaactgaactcaatcccactccttgattcaaccatgtttatctttgtcccttagatgattaaaacccaaagttccttggtcccagctttgacagattttgttc

SEQ ID NO: 191381 - DNA, 120 bp, Artificial Sequence
  ENSG00000112514_12 (sequence is synthesized)
ggtgagaactttgagatggatggggtgagggtgtgtactgtgtgggtgtgacttgctgggcagtctagggcttgcgtgtaagggagtgggttcttttgggtaaatctttgagtgatcccc

SEQ ID NO: 191382 - DNA, 120 bp, Artificial Sequence
  ENSG00000112514_13 (sequence is synthesized)
cgtctttgggtctctctgccttttgcctgttttttgtcatgtatgcaaatttgttgggagaatataagtgcttctagtccctgtattctctacatctttcagaatgactcagagctgcta

SEQ ID NO: 191383 - DNA, 120 bp, Artificial Sequence
  ENSG00000112514_14 (sequence is synthesized)
cagcctttgttacttgccccaacgagaaggtcgccaaggagatcgccaggtagggacctcgatgtgcagcgagaaaggatgatcatgaagggacagttgggggtggggcagaagagtgct

SEQ ID NO: 191384 - DNA, 120 bp, Artificial Sequence
  ENSG00000112514_15 (sequence is synthesized)
ctttctcctttctccagctctggaagcctgtctctgggctgccagtacaaaaactggggttatggggtactctgaatgggactgtctcttcactccagggccgtggtggagaagcgccta

SEQ ID NO: 191385 - DNA, 120 bp, Artificial Sequence
  ENSG00000112514_16 (sequence is synthesized)
gtggccgagtcctgccatgatgagccctgttcctgctcatcatgaagatccccgcgatacttcaacgccttctgacttccaggtgatgactgggcccccaataaatcccgtctttgggtc

SEQ ID NO: 191386 - DNA, 120 bp, Artificial Sequence
  ENSG00000112514_17 (sequence is synthesized)
gggtcgggattggctggctctggaggcgcaggtggtccttcttctactgtcacatggtgcgcgctgttttctaatcacgtggctgccacccagcgtaggccgcatgagtggggggcgggc

SEQ ID NO: 191387 - DNA, 120 bp, Artificial Sequence
  ENSG00000112530_0 (sequence is synthesized)
gtgttgaccagtcgcttagcaaccgggaggcttacctttggaagcttgttgcagctctagccaaggtcctgccctcttcccgccccgcccctagggtccagctcccttcacctaggagct

SEQ ID NO: 191388 - DNA, 120 bp, Artificial Sequence
  ENSG00000112530_1 (sequence is synthesized)
gccaaacatctggatcaacctgggcactacgaggggttgaatttctaccattatcgcgccttttgatatttttttccagacctcctgctcacatccgtaaagcccactgattcttttact

SEQ ID NO: 191389 - DNA, 120 bp, Artificial Sequence
  ENSG00000112530_2 (sequence is synthesized)
acactttttatgagaacaagacattttctaggaagatggtggcagaaaaagagaccctgagcttaaacaaatgcccagacaagatgccgaagaggaccaagctgctggcacaacagccgc

SEQ ID NO: 191390 - DNA, 120 bp, Artificial Sequence
  ENSG00000112530_3 (sequence is synthesized)
tcccggtgcaccagcctcactctctggtttctgagggtttcacagtcaaagccatgatgaaaaactcagtcgtgagaggccctccagctgcaggggcatttaaagaaagaccaaccaagc

SEQ ID NO: 191391 - DNA, 120 bp, Artificial Sequence
  ENSG00000112530_4 (sequence is synthesized)
ccacagcatttcgaaaattctatgagcgaggtgacttcccaattgcccttgagcatgattcgaaaggaaacaaaatcgcctggaaggtagaaattgagaagctggattaccatcattatc

SEQ ID NO: 191392 - DNA, 120 bp, Artificial Sequence
  ENSG00000112530_5 (sequence is synthesized)
gctcggcaaggaatccacgacatgctggaacacggtgggaacaagatcctacctgtccttccacagctcattatcccgataaaaaatgccttgaacctccgaaaccgacaggtcatctgt

SEQ ID NO: 191393 - DNA, 120 bp, Artificial Sequence
  ENSG00000112530_6 (sequence is synthesized)
gtcactctcaaggtcctccagcatctggttgtgtcagctgagatggtgggcaaggccttggtgccttattaccgtcaaatcctccctgtcctgaacatctttaagaatatgaatgtgaac

SEQ ID NO: 191394 - DNA, 120 bp, Artificial Sequence
  ENSG00000112530_7 (sequence is synthesized)
tccggagacggcattgactacagccagcagaagagggagaacattggggacttgatccaggagacactggaggccttcgagcgctacggaggagaaaatgcctttatcaacattaagtac

SEQ ID NO: 191395 - DNA, 120 bp, Artificial Sequence
  ENSG00000112530_8 (sequence is synthesized)
gtggtcccaacctacgagtcttgcttgctaaactaacagtggcagcagctgggacttgaaacctcccgttggtgttgggatcatctgtctctgttgcttttagcatctcattccttgtga

SEQ ID NO: 191396 - DNA, 120 bp, Artificial Sequence
  ENSG00000112530_9 (sequence is synthesized)
cttccacagctttcttttctacagctgctaaaatagtggcttatgggccattggactgttagccctattgagagcaaggctttccaatacataaatagtgtctgtttcttagattacaat

SEQ ID NO: 191397 - DNA, 120 bp, Artificial Sequence
  ENSG00000112530_10 (sequence is synthesized)
agtgtactgtgcttatttgttctaagagaagaattgcttctttatacagctccgacagaagcaggagtccgagttaaaccttcagttgtatagacaataaactataattttcatatgcaa

SEQ ID NO: 191398 - DNA, 120 bp, Artificial Sequence
  ENSG00000112530_11 (sequence is synthesized)
agatctatctggaggagtttctgtggagccagccaccctcaccaggtgccttccattagagtttaatgctttgctgcggtttcctgaaagagccccacagagagtgggtctcgatgggtc

SEQ ID NO: 191399 - DNA, 120 bp, Artificial Sequence
  ENSG00000112530_12 (sequence is synthesized)
gagtttatgctgactgcttactaggtgtttgtcatggaagagaagcatgggttcagcagtgcctctctagcagctgtgcggaataatgtgctttgacattcaataaaactgttgaatcta

SEQ ID NO: 191400 - DNA, 75 bp, Artificial Sequence
  ENSG00000112530_13 (sequence is synthesized)
tcatggctcgttgcaacctcgaccagattatagtgaactccggagacggcattgactacagccagcagaagaggg

SEQ ID NO: 191401 - DNA, 120 bp, Artificial Sequence
  ENSG00000112530_14 (sequence is synthesized)
tcagccttccttcccaccacacctgcaccttgctgagccactgctcccaagacgaggcacagaattcccagagcagcctggcttcaacctactcatttggtgttctttaaattaaaaaaa

SEQ ID NO: 191402 - DNA, 120 bp, Artificial Sequence
  ENSG00000112530_15 (sequence is synthesized)
aatcttcattttaagtcagtttatgcttcccagactaaactctgcaacaaataatatgaatgtcacacatttcatcatttgtaattaattccaaactaaataaaacaaggagttgtgaaa

SEQ ID NO: 191403 - DNA, 120 bp, Artificial Sequence
  ENSG00000112530_16 (sequence is synthesized)
cgcctggaagattctaggaatgaaaaattacaaaaccacatcaccttggcccttaagtaacagatgaaaactactgacagacggcagcgaatcatgtcttccaatgaatagcagaataat

SEQ ID NO: 191404 - DNA, 80 bp, Artificial Sequence
  ENSG00000112531_0 (sequence is synthesized)
gcagtcggagcgcggcggcagcggcagaggcgccgcggcggggaccagcccagagagaccccccgagcccgcggcacagg

SEQ ID NO: 191405 - DNA, 80 bp, Artificial Sequence
  ENSG00000112531_1 (sequence is synthesized)
ctcgtgagggacgcgccgagccgggcggccgagagcggcggcggctgggagcgcgtcgggcccgggcggaaagtgcctgc

SEQ ID NO: 191406 - DNA, 120 bp, Artificial Sequence
  ENSG00000112531_2 (sequence is synthesized)
ccgagcggcccgcggccggggctcgcccccgcccctccctcctctccggcggcggcggcggcggcggcgggcggagtgagctgcggagcctggaatatggtcggggaaatggaaacgaag

SEQ ID NO: 191407 - DNA, 120 bp, Artificial Sequence
  ENSG00000112531_3 (sequence is synthesized)
tcggggaaatggaaacgaaggagaagccgaagcccaccccagattacctgatgcagctgatgaacgacaagaagctcatgagcagcctgcccaacttctgcgggatcttcaaccacctcg

SEQ ID NO: 191408 - DNA, 120 bp, Artificial Sequence
  ENSG00000112531_4 (sequence is synthesized)
agcggctgctggacgaagaaattagcagagtacggaaagacatgtacaatgacacattaaatggcagtacagagaaaaggagtgcagaattgcctgatgctgtgggacctattgttcagt

SEQ ID NO: 191409 - DNA, 120 bp, Artificial Sequence
  ENSG00000112531_5 (sequence is synthesized)
tacaagagaaactttatgtgcctgtaaaagaatacccagattttaattttgttgggagaatccttggacctagaggacttacagccaaacaacttgaagcagaaaccggatgtaaaatca

SEQ ID NO: 191410 - DNA, 120 bp, Artificial Sequence
  ENSG00000112531_6 (sequence is synthesized)
tggtccgaggcaaaggctcaatgagggataaaaaaaaggaggagcaaaatagaggcaagcccaattgggagcatctaaatgaagatttacatgtactaatcactgtggaagatgctcaga

SEQ ID NO: 191411 - DNA, 120 bp, Artificial Sequence
  ENSG00000112531_7 (sequence is synthesized)
acagagcagaaatcaaattgaagagagcagttgaagaagtgaagaaattattggtacctgcagcagaaggagaagacagcctgaagaagatgcagctgatggagcttgcgattctgaatg

SEQ ID NO: 191412 - DNA, 120 bp, Artificial Sequence
  ENSG00000112531_8 (sequence is synthesized)
gcacctacagagatgccaacattaaatcaccagcccttgccttttctcttgcagcaacagcccaggctgctccaaggatcattactgggcctgcgccggttctcccaccagctgccctgc

SEQ ID NO: 191413 - DNA, 120 bp, Artificial Sequence
  ENSG00000112531_9 (sequence is synthesized)
gtactcctacgccagctggccctaccataatgcctttgatcagacaaatacagaccgctgtcatgccaaacggaactcctcacccaactgctgcaatagttcctccagggcccgaagctg

SEQ ID NO: 191414 - DNA, 120 bp, Artificial Sequence
  ENSG00000112531_10 (sequence is synthesized)
gtttaatctatacaccctatgagtacccctacacattggcaccagctacatcaatccttgagtatcctattgaacctagtggtgtattaggtgcggtggctactaaagttcgaaggcacg

SEQ ID NO: 191415 - DNA, 120 bp, Artificial Sequence
  ENSG00000112531_11 (sequence is synthesized)
atatgcgtgtccatccttaccaaaggattgtgaccgcagaccgagccgccaccggcaactaacctatgaccttctgacctctgaactcttcacccaatgatgacctgaccatgcctgcct

SEQ ID NO: 191416 - DNA, 120 bp, Artificial Sequence
  ENSG00000112531_12 (sequence is synthesized)
gctgatcagttaactggtaatcgcctttgcttgcctgtcgtcagtgcagcgagctgaggcacttgtccgttcgtcttaccatctaaccaaacaaaagacaaagaaattgttgtcctccaa

SEQ ID NO: 191417 - DNA, 120 bp, Artificial Sequence
  ENSG00000112531_13 (sequence is synthesized)
ctcagctttttttttttttttttcctgtttgggtgaaagtggttctagaaactgcactgaatagtagtaaagcaataaggcccaattcatcccacagcactgatcatcttttaatatccc

SEQ ID NO: 191418 - DNA, 120 bp, Artificial Sequence
  ENSG00000112531_14 (sequence is synthesized)
accctaagcgaacggtaagaaggcctctcttaagaaggggagacagatggtccttaactactcaatgacagaggcagttactgtgagagacttctaggaatctttttcttctcatagcga

SEQ ID NO: 191419 - DNA, 120 bp, Artificial Sequence
  ENSG00000112531_15 (sequence is synthesized)
agtcaaagctctctctgaatgtactgtgtgatgatgcatcatgcatgaaccttcggtcagggatatcattggtgaagtgatttcaaaaagtattcaaaatttgatatgctgtttagtcac

SEQ ID NO: 191420 - DNA, 120 bp, Artificial Sequence
  ENSG00000112531_16 (sequence is synthesized)
tacagtgccctcaaagggcagaagttgcagccttttttatattgcctgccaaaatttgaagtattagaagaaagtgtgccatgagagaaaaacttaaggagttttgaaaagtaatgcaaa

SEQ ID NO: 191421 - DNA, 120 bp, Artificial Sequence
  ENSG00000112531_17 (sequence is synthesized)
taacaaaactgcaacactatttttaaaaagataaatatctgagttaaaattactgaatctttattttacacctaaaaaaatatgagaacaaggtacatgcattatgtgtcacattactgg

SEQ ID NO: 191422 - DNA, 120 bp, Artificial Sequence
  ENSG00000112531_18 (sequence is synthesized)
gcaaactgttcaagtatttttttttaaacctccctgtatagaaaaaaatcattaaggatgtaaaagccatgcttgcctatttgctgtatacatgtaatgaaattgtagataaagtgtagt

SEQ ID NO: 191423 - DNA, 120 bp, Artificial Sequence
  ENSG00000112531_19 (sequence is synthesized)
gcattgaaacaaatgaacaaaaagtagatacttttactatacaagggtgctggtgcagaaaaaaatatatatatttttggaaatgtagcattttatactttcaagtgttataaaaaaaaa

SEQ ID NO: 191424 - DNA, 120 bp, Artificial Sequence
  ENSG00000112531_20 (sequence is synthesized)
gaaaaagaacaaagaaaccctttatttcattaaatgattttttctggtggttgtcaagaaacaaaagaccaaaagagcctttttgtctttcttttttattttttaagtattggaataagt

SEQ ID NO: 191425 - DNA, 120 bp, Artificial Sequence
  ENSG00000112531_21 (sequence is synthesized)
ctaaagaaaagaaagtgccttattttccttcatggtcattcagtcaagtgtctcataaagatcagctcctccctcagaatacaagttaatgcatgttactcagtcgcccagtatgtgaaa

SEQ ID NO: 191426 - DNA, 120 bp, Artificial Sequence
  ENSG00000112531_22 (sequence is synthesized)
gaagatatgagggagacaaatgagttgatagtttgaattataggatttttgccacgttaccttgatgcaaatttgccaaatctgatactgtgaaaagatttgataacttttctaatgcct

SEQ ID NO: 191427 - DNA, 120 bp, Artificial Sequence
  ENSG00000112531_23 (sequence is synthesized)
gactagtaagttttaaaacatcattctttaaaagaatagtttaatacttttggttattccaatcttcaatgttaacccaaaggattctgagataaaaattatgtgtcatctaaacttcag

SEQ ID NO: 191428 - DNA, 120 bp, Artificial Sequence
  ENSG00000112531_24 (sequence is synthesized)
tttacagacaaaattagagctttgttttatttggagaagggggatgcattcatttgattttgttttttgtttttaattaattgaatataataggatacctagcaaatgttttcacaaaag

SEQ ID NO: 191429 - DNA, 120 bp, Artificial Sequence
  ENSG00000112531_25 (sequence is synthesized)
tgaatctttgtgattttcattctagaaaacaatgttttaaatcacccaaatttaatcacatgtctttatatcataccagataactggtgtagtgtatccttttactgtttcaataacctc

SEQ ID NO: 191430 - DNA, 120 bp, Artificial Sequence
  ENSG00000112531_26 (sequence is synthesized)
tgcctcccccaccccttaactttaaaagaatgtgaaaaactagcatcatagtgcatataaatactcaaccacatttcagcttaagcttctaatttctcaagaagttgaaacagttagtta

SEQ ID NO: 191431 - DNA, 120 bp, Artificial Sequence
  ENSG00000112531_27 (sequence is synthesized)
tgtagttgaagcaatttgtgtgcaaagcctacatctaaacacttgagtgaataatcattaactgctcagtaccagacgtggcaaatctcaagtgacagtggacccccccccccgcccagc

SEQ ID NO: 191432 - DNA, 120 bp, Artificial Sequence
  ENSG00000112531_28 (sequence is synthesized)
ttatcaactcgtcccctcttccacaccttcccagcatcacagtcagaggtcagcaggaagctgagtcattaccttcttggtgacctcccccaccatcttgtctcacttggaaaccgttgt

SEQ ID NO: 191433 - DNA, 120 bp, Artificial Sequence
  ENSG00000112531_29 (sequence is synthesized)
cagtttatttactatgcaatagacattcattgttttgtatccagctagctttggtttaatatgccactgctttgtctttctgttacacatacagttttgatttatttacaatatatgctg

SEQ ID NO: 191434 - DNA, 120 bp, Artificial Sequence
  ENSG00000112531_30 (sequence is synthesized)
tgccattttgatttttatattgtttggttggttgaataaatttgcgacactcaaacacttgaggtgatagttgttaaaaacaataccagtatttgatccagtttcatctcaactatgtta

SEQ ID NO: 191435 - DNA, 120 bp, Artificial Sequence
  ENSG00000112531_31 (sequence is synthesized)
tacctggacattttagatgtttatcaaaggtcttttatggggaagaaagtaaatgtatgaaataataaatgtgtgacatttatagggaatgttggctctgaacaaacttttgaaaacttg

SEQ ID NO: 191436 - DNA, 120 bp, Artificial Sequence
  ENSG00000112531_32 (sequence is synthesized)
gttgacaaaattttggatcaactgaaaaaagcatgacttttgaaatctctgaatgccttggttctcagtattatcattctttattgaatttatttcttattaaaatatgtagtttttaag

SEQ ID NO: 191437 - DNA, 120 bp, Artificial Sequence
  ENSG00000112531_33 (sequence is synthesized)
actttttttctgacagtattatgtaattttttagcgtgggtagatgggagtgtcgcttgtatgttatcgtacagctgacatgtatttttgtctattctttattatcttagtttcatgcta

SEQ ID NO: 191438 - DNA, 120 bp, Artificial Sequence
  ENSG00000112531_34 (sequence is synthesized)
tgtatgtaccataaccaacctattgcctatgagaaacatgtaagataatgtatttacagccattgttacaagtttataatgtatttttctatcttgttttatatgtatgttatataacat

SEQ ID NO: 191439 - DNA, 120 bp, Artificial Sequence
  ENSG00000112531_35 (sequence is synthesized)
tcaaaaagaatttttttcttgattgagaaaaggatacaaaatgcaaaatccacaattttgataactgaaaattgccaattgttttgcagtactttattatattgggtgtcttgtcttttt

SEQ ID NO: 191440 - DNA, 120 bp, Artificial Sequence
  ENSG00000112531_36 (sequence is synthesized)
tgggcttttagttagctaatgaatgaatacattagacacttttgggttttagttgggattttacatagcttgcattttaattctttggttctttgctgtttctattaacccacagcatta

SEQ ID NO: 191441 - DNA, 120 bp, Artificial Sequence
  ENSG00000112531_37 (sequence is synthesized)
ttttaataaatgttataataccaacctactaactctggactttgtctgtttattaacctttatatgtttaattaaaataaacaaataaagacaaaagaatgtaaagtcttgagttactgg

SEQ ID NO: 191442 - DNA, 120 bp, Artificial Sequence
  ENSG00000112531_38 (sequence is synthesized)
agataacatagtgtgacttgtttttatgttgtttgtcagctgacagttttgcacactactgttaaaatggctttggttattctggtcttttagcttgggggccggggcgggtgtgggtgt

SEQ ID NO: 191443 - DNA, 120 bp, Artificial Sequence
  ENSG00000112531_39 (sequence is synthesized)
aggtgcagtagagatgggaacaaagtagcctttgtttgaggcattcttctcttgccacttgcctttcagcatctgcattactaattccacaccttatttttccttctccaaaataatcac

SEQ ID NO: 191444 - DNA, 120 bp, Artificial Sequence
  ENSG00000112531_40 (sequence is synthesized)
tgtctgctcacagcatcgagtaaaaagatacattgtcatggtatatacctggagaaaccagtttgattctttgttgaaccatttcttttaatttctgtaaataagtaattttatggtcac

SEQ ID NO: 191445 - DNA, 120 bp, Artificial Sequence
  ENSG00000112531_41 (sequence is synthesized)
attgtaaagcagagaaactgttgatattttacctttatttagatttttgttttaacttgacctttttcctttggaaagcgttgaacttgtttagctaactactcctattaggggagctta

SEQ ID NO: 191446 - DNA, 120 bp, Artificial Sequence
  ENSG00000112531_42 (sequence is synthesized)
acttgggtaaagtcaaaggcccactggctgtttctcatggtggcctgaagccccgctgctttccagtgaggaaaagaaccctcagcacgttactgagctttcctcaggtatttttttctc

SEQ ID NO: 191447 - DNA, 120 bp, Artificial Sequence
  ENSG00000112531_43 (sequence is synthesized)
tgtcacctactttacaaatacagtcagactaaaacattaaacaagaagtttaagggggaataacattgggatttgaaaagttgtatgtgattaatttcttgcatgcaaatcaatttaaga

SEQ ID NO: 191448 - DNA, 120 bp, Artificial Sequence
  ENSG00000112531_44 (sequence is synthesized)
tttcttaaatatcttcatgcttttcttggctggaacttgggtaaattaacctgtaattatgaattatttagtttaactcaaggtgcatttttatttcacagattgatacttgcttttttc

SEQ ID NO: 191449 - DNA, 120 bp, Artificial Sequence
  ENSG00000112531_45 (sequence is synthesized)
tgtgaaacagttctcctagataccaaaatcctcaggatgaatttttgcatttgtaaataacaatttatctttgtaaattacattttatttatttagagttctaaaattgagggctgaaat

SEQ ID NO: 191450 - DNA, 120 bp, Artificial Sequence
  ENSG00000112531_46 (sequence is synthesized)
gaatgacatgtaatagaagacaaaactgtaccaatacgctgttaaccaatcagactgtccaggtattctcatttcataaatatgtatacacacatataaatacacagagtagtgttagct

SEQ ID NO: 191451 - DNA, 120 bp, Artificial Sequence
  ENSG00000112531_47 (sequence is synthesized)
gatgtgagtgataacagcgaatcaccattgagatggtcatttggatcatgtaaacaaaccgtgtcatgtctctgatgggagcggtgggtagtgtactgttaggtggacaggtcttttaac

SEQ ID NO: 191452 - DNA, 120 bp, Artificial Sequence
  ENSG00000112531_48 (sequence is synthesized)
atgctactatttgtaaaagtttccgttgccataacagttcatgtagtagtctgtgaaaattcgaagctgtctgtcaagctgctaatatacaagttgtcatggtaccatgtaacttaaatt

SEQ ID NO: 191453 - DNA, 120 bp, Artificial Sequence
  ENSG00000112531_49 (sequence is synthesized)
gatgaatttctatgcaatttactattctctgaagcctatgaatgcagcctcatctcattttcagttaagggtactttatgtataattatgtcattgctgccttttatgtaggaaatgtaa

SEQ ID NO: 191454 - DNA, 120 bp, Artificial Sequence
  ENSG00000112531_50 (sequence is synthesized)
aaaagttttaaaaggcgaaaataacattacagatttcatttttatacaggttacaatattaaacatgaaactaccaaattccaagaatagtaaaattctagagtcagttgattgattgaa

SEQ ID NO: 191455 - DNA, 120 bp, Artificial Sequence
  ENSG00000112531_51 (sequence is synthesized)
actatttgacaaaacagttgaaagctgagctttcagtcaagaagttggtgaaattaatgtccttaaacttttcctttaggcaaaatgtcagggaaaacttaacatgaaagtagttactcc

SEQ ID NO: 191456 - DNA, 120 bp, Artificial Sequence
  ENSG00000112531_52 (sequence is synthesized)
catacgcaccagtgcagtagctccaggtgtaagaggtcacgaaggcaccctgcccataaaaccaggatgtgcatacgtacacacaatcggtgtctggttatggttttctaaacactacat

SEQ ID NO: 191457 - DNA, 120 bp, Artificial Sequence
  ENSG00000112531_53 (sequence is synthesized)
aaggatctgaattttttagtgtgccaaaagcaaacgataggtttaaatgaaattgctcactaccaaatcaagactcttcatatatatacgtgtgtgtatatatatatgtcataacacttt

SEQ ID NO: 191458 - DNA, 120 bp, Artificial Sequence
  ENSG00000112531_54 (sequence is synthesized)
cacgtgtgacagcctaaggtttctttagttttaggatggggtggggtgggagtggttttgcatgtttgaccaggatgtgatgcctgtctttattccttgataagaagtagctgttacagc

SEQ ID NO: 191459 - DNA, 120 bp, Artificial Sequence
  ENSG00000112531_55 (sequence is synthesized)
atttcaagcaaattattttaggtagaatagaacttactgccaaatgattatttatttagcaaaaattattctccaacttttcgaattcacaatttttctaagtgcatagagtagtttttt

SEQ ID NO: 191460 - DNA, 120 bp, Artificial Sequence
  ENSG00000112531_56 (sequence is synthesized)
acattgtcacgaattccttaatacctttatttaaaatggaaaaaatatggacaatattttagaaatatgtgctacacatctaattttatctgtagtttaagtgatctaaattgagatgcc

SEQ ID NO: 191461 - DNA, 120 bp, Artificial Sequence
  ENSG00000112531_57 (sequence is synthesized)
tttgatatgaagagatttaccaacattatatgcactcgtgccttcaatgtggaatcaaactggttaacctcagcacagtcctctcgtttctgtgtttctgctgcactaattgccaggggg

SEQ ID NO: 191462 - DNA, 120 bp, Artificial Sequence
  ENSG00000112531_58 (sequence is synthesized)
tgggggagaaggcgaatgaattaattcatagtagaaggaggcgataggtgcagcaaagggcagccacagtgttgattccacattataatgttgttgcctcttcttggcaaaagacaccac

SEQ ID NO: 191463 - DNA, 120 bp, Artificial Sequence
  ENSG00000112531_59 (sequence is synthesized)
attgtgggaagatctcagcttccagggtaaaagttaatttataacttaaaagtgctattaagtttttattaccaaatatatcttttatggtttatattgtagtggtatgtatgaaacatt

SEQ ID NO: 191464 - DNA, 120 bp, Artificial Sequence
  ENSG00000112531_60 (sequence is synthesized)
taaaattttactgtggaaattgtgtatatatatatatatagtcgaaataggtgttcacaggtcacatgtgaacggagaactgcatgaccgtacatgaaatgcaataaaccaactggaaaa

SEQ ID NO: 191465 - DNA, 120 bp, Artificial Sequence
  ENSG00000112531_61 (sequence is synthesized)
agtgcatgtgcttcatcctctcaagccaactgcagctggaaagtgctgcttatcctccacccccagaaaatgcatgtatcaatatgagaataaagaacgcacactttcaattttattgag

SEQ ID NO: 191466 - DNA, 120 bp, Artificial Sequence
  ENSG00000112531_62 (sequence is synthesized)
gctttcaacactatttaaaagaaaatgtaagaatttgacattctggagttattataacattagaaaatgagcataacattcactctgattttagccattaagggagattagtaaacagac

SEQ ID NO: 191467 - DNA, 120 bp, Artificial Sequence
  ENSG00000112531_63 (sequence is synthesized)
tgctacagtgttccatagttggactgtgcatccaaaacatttttttatctttaataaatggtacagtttttatgtagttttcgaatgtaagaagaaaggaatgctgaccaaaacttgatt

SEQ ID NO: 191468 - DNA, 120 bp, Artificial Sequence
  ENSG00000112531_64 (sequence is synthesized)
tcatcagcttcatgaaaaggactagtgtcattaacctgttgaacagaattggtttattaaaaaaatcatttccagtagtgtgaaacctttacgagtctttaacatctaaatgttatgact

SEQ ID NO: 191469 - DNA, 120 bp, Artificial Sequence
  ENSG00000112531_65 (sequence is synthesized)
ccttgtaccttaagttttccagtctttcttatttatatcatctccaagtacctctggctcctttcctcttgctcaccggaaccttagttttcctcaacagaatgctttgttaaagtagcc

SEQ ID NO: 191470 - DNA, 120 bp, Artificial Sequence
  ENSG00000112531_66 (sequence is synthesized)
cacagttgcaggatccatagcaccgtcgtgcagactagcagcccaaaggtgtgtttggtttggcttatacggtgttttgctttttaaactacttgccataatttaaaagtggcaacacta

SEQ ID NO: 191471 - DNA, 120 bp, Artificial Sequence
  ENSG00000112531_67 (sequence is synthesized)
gacttaaaaaaaaaaaagtctgattgcccatattagattttttttttaattcttcacaaaatctgctcttcctgaaagatcaaagtgtctagaaagcccaaacatgtattcttaacatag

SEQ ID NO: 191472 - DNA, 120 bp, Artificial Sequence
  ENSG00000112531_68 (sequence is synthesized)
taggcaccagctgaaactgagtaattaaacggtcccctgaagccaagtattccctggttagtcgccaccccaccactccttcctgtctctagtgtcacacttgggctgttgattttctta

SEQ ID NO: 191473 - DNA, 120 bp, Artificial Sequence
  ENSG00000112531_69 (sequence is synthesized)
ctcttctcttgctttaatccttccccccggctctctggctcctgtggatatctgtgcttgtttcctggtccaggatggtgatctgactttcaaaccagcttctcaaaaggggtgacataa

SEQ ID NO: 191474 - DNA, 120 bp, Artificial Sequence
  ENSG00000112531_70 (sequence is synthesized)
aatcagttttgatgtttttcctcctgaaaaatcagatgaatattttagtcactgttactcatgcacattgtgttcttatgtttacagaagtgcttaagtgaatggaagcactagacattt

SEQ ID NO: 191475 - DNA, 120 bp, Artificial Sequence
  ENSG00000112531_71 (sequence is synthesized)
ggatttccttcctaacgtaatttttaatgattaccccttttatacagtaatttgtggtctttagaaagcagttaaactaattgaccatctaatagttgtactatacatatgtctaaaata

SEQ ID NO: 191476 - DNA, 120 bp, Artificial Sequence
  ENSG00000112531_72 (sequence is synthesized)
atagtcatggtaagtttggcatcatatcttccccaaaaaatgtttattaaaattagattattccagtttaatgctattttgtgaactgtataccctctgaaagcgcttatttttacatgc

SEQ ID NO: 191477 - DNA, 120 bp, Artificial Sequence
  ENSG00000112531_73 (sequence is synthesized)
tacacaacagttccaattttaaggagtgtctcctaaaattgggatgaaaatctactgtagtctgttttaaagtatgctatactatgttcattggttacttaactggatattaatataaag

SEQ ID NO: 191478 - DNA, 120 bp, Artificial Sequence
  ENSG00000112531_74 (sequence is synthesized)
gttattacaagaaaaatgatgaagagcaaaaggagaagaaaatatttgcaagtgaatccacaattcttgcagaactatttgagttgatactaaagattttatgttcactcctttacctta

SEQ ID NO: 191479 - DNA, 120 bp, Artificial Sequence
  ENSG00000112531_75 (sequence is synthesized)
gaactgtcaagcttgggaatgaggaaagtgccttggctgtgcttgaaacctgaattttagtgcttcccttattacattcattgttttcaatgattgatttataaaattaagacatactgg

SEQ ID NO: 191480 - DNA, 120 bp, Artificial Sequence
  ENSG00000112531_76 (sequence is synthesized)
tagtacaagttgaaagttggtttgaatacattttaattaaatgataatatgttaatatgcttttgttcattgctttctcactgaggtaaaacagcattaaaaagttgtccagaatttaaa

SEQ ID NO: 191481 - DNA, 75 bp, Artificial Sequence
  ENSG00000112531_77 (sequence is synthesized)
caaataaaatttggaaccttttttgtaaactcttcaatgtcatagttttacagggtctcaaacttactttgcaga

SEQ ID NO: 191482 - DNA, 120 bp, Artificial Sequence
  ENSG00000112531_78 (sequence is synthesized)
aatgtcatagttttacagggtctcaaacttactttgcagattatatcagagaattgtgttttagagctgcaggggacctgagagttgggagtatatgttcatttcataggtgcaaagaca

SEQ ID NO: 191483 - DNA, 120 bp, Artificial Sequence
  ENSG00000112531_79 (sequence is synthesized)
catgaaatactgtaacttggggattgtaaatgaatggatacaataggttaaggcccaagatgtttgaaatgaatgcaatattaatagatgcatatatacatgacatattgtggttaattt

SEQ ID NO: 191484 - DNA, 120 bp, Artificial Sequence
  ENSG00000112531_80 (sequence is synthesized)
taaaactactgtgccttaacgtgtttcttaaacttttgtagtaaatgaacatttgaaatccattttgataaacctgctgttaatgttttttccccccttgtgaatgttttctaactttgt

SEQ ID NO: 191485 - DNA, 120 bp, Artificial Sequence
  ENSG00000112531_81 (sequence is synthesized)
agagaaaaggagtgcagaattgcctgatgctgtgggacctattgttcagttacaagagaaactttatgtgcctgtaaaagaatacccagatgaggagcaaaatagaggcaagcccaattg

SEQ ID NO: 191486 - DNA, 120 bp, Artificial Sequence
  ENSG00000112531_82 (sequence is synthesized)
gggcggagcgaccctcggaaggggcgtggcgaccgggctcgacgcgcgcacgcgctctggagccccacggctacgtgtcgggccacgtgatgcccaccccgaaagtcccccgtgaagcaa

SEQ ID NO: 191487 - DNA, 120 bp, Artificial Sequence
  ENSG00000112531_83 (sequence is synthesized)
caggacgttaaaaaaaaatttctcttctgcggggtggataagaggttctgaaaaaactatagtaacgggaggcgaggcggaggcagcgctggcgcgtcccgctggaattcctctcgcctg

SEQ ID NO: 191488 - DNA, 80 bp, Artificial Sequence
  ENSG00000112531_84 (sequence is synthesized)
gaattcctctcgcctgccgcgccagccccgaccgcgcccgcagccccacccgccccgtgccgtggaaagccccgcgcccc

SEQ ID NO: 191489 - DNA, 80 bp, Artificial Sequence
  ENSG00000112531_85 (sequence is synthesized)
cggcgacccagtccttgcgcccaggcccgccgagcgccgcagtccgtcacactcccgttgcccccgtcgcccgccccgcc

SEQ ID NO: 191490 - DNA, 120 bp, Artificial Sequence
  ENSG00000112531_86 (sequence is synthesized)
aagaacggtcttaactgaaccctcatcagatctgaatttaacaaatgcttagtctcagcagcctccgggggaaaaaagcttagcctagcagtcagtgacttacttgcactttttgcacat

SEQ ID NO: 191491 - DNA, 120 bp, Artificial Sequence
  ENSG00000112531_87 (sequence is synthesized)
agatataaagtaaaattatgttattaatttggtttagtctgtaatattacacagtaatggtaatttataaaggagtgtatagtagtatactgactgctaagtgtactatactgtttgctt

SEQ ID NO: 191492 - DNA, 120 bp, Artificial Sequence
  ENSG00000112531_88 (sequence is synthesized)
tactaatcacctaattcattgcagttcatacttattgactcagagtttaaaaccacaatctgtaggctttaagaattgcttttaaacctttttaagtgataaactcttgaagtggtctta

SEQ ID NO: 191493 - DNA, 120 bp, Artificial Sequence
  ENSG00000112531_89 (sequence is synthesized)
aggttagcaaataattgtctgtattaaacatggcgttatttaagtagtcctgctgcaagaaaggcacttcagtgaatatgtgactagtaaagcttaaatatgtttggatctaatagagct

SEQ ID NO: 191494 - DNA, 120 bp, Artificial Sequence
  ENSG00000112531_90 (sequence is synthesized)
gtgaccgcagaccgagtcacaatggcaacagtacagaaaattctatcaaacctcagaatatagtagaaataattaagctgttgaatgagtcttaaaaattatactactgttaagtggacc

SEQ ID NO: 191495 - DNA, 120 bp, Artificial Sequence
  ENSG00000112531_91 (sequence is synthesized)
agtacctgaagtattaatttctagtagctgtgggtttctgtggacgcctagagaaaaaaaagaccacaaaaaaagtctgtttcgaaaatcgactggccaggagtttgtttgttttttttt

SEQ ID NO: 191496 - DNA, 120 bp, Artificial Sequence
  ENSG00000112531_92 (sequence is synthesized)
atggcatttgtcttgatcggtgattctcaaaacacagtccttggaccatagtatctacgctttctgggaactgtaaatgttcaagcccctttccatacttattgaatcagaaactctggg

SEQ ID NO: 191497 - DNA, 120 bp, Artificial Sequence
  ENSG00000112531_93 (sequence is synthesized)
ttatcagttttagagaggcaagacaagtttgcattagggaagaccgaaaactaaattttgttttatttcagcctctcataagggttcccctttgaaataattgcaccttaaatttattca

SEQ ID NO: 191498 - DNA, 120 bp, Artificial Sequence
  ENSG00000112531_94 (sequence is synthesized)
gatccactttggtaactgaggttcagtttggttgggtaaatctgttgtgtacatttcaacaaatacttttacatttgacattactgaggtcattctgagttttaggtcccaccccattgg

SEQ ID NO: 191499 - DNA, 120 bp, Artificial Sequence
  ENSG00000112531_95 (sequence is synthesized)
cccgtcacctccatcagctccacttctcaaactttatttgagatttattttatctcacaggtttgtgtaattgttggaaaatttttaaacttctaagtgaaagtagtctgagcgctttat

SEQ ID NO: 191500 - DNA, 120 bp, Artificial Sequence
  ENSG00000112531_96 (sequence is synthesized)
aaaattcatattattgtgtgtgttttgtaatatttgcgatcacttaaaatatcagataaatacagtcatgcatcgcttaacaacggggatacagtctaagaattgccttgtctggcagtt

SEQ ID NO: 191501 - DNA, 120 bp, Artificial Sequence
  ENSG00000112531_97 (sequence is synthesized)
tcatcatttggtgtacatcatagagtgtacttacacagacatagatgatatcgtttactacacacctaggctgtgtggtatagccattataatcttatgggaccacatagtataagtggt

SEQ ID NO: 191502 - DNA, 120 bp, Artificial Sequence
  ENSG00000112531_98 (sequence is synthesized)
ccgttgttgaccaaaatgttgttatgcaggcatgactgtagttgtattcttaagatttttcagttcttgtgttttggagtcctagtcatattaaacatgagagatactcttaatttcagt

SEQ ID NO: 191503 - DNA, 120 bp, Artificial Sequence
  ENSG00000112531_99 (sequence is synthesized)
agtacagtatggaatagttaaataaatagcaaatcactgaattcagaatctcacttaaggcagaaattaaaatcataatataaacgcttggttttacatgaacaaaaagtggtgtgctcg

SEQ ID NO: 191504 - DNA, 120 bp, Artificial Sequence
  ENSG00000112531_100 (sequence is synthesized)
aaaaagacattactgatgccttttttttatagagtggattgaaatgccagtcatgcctgatatttcagcccattgacttgctggatgaaggactagaatacagcagctgttataacacga

SEQ ID NO: 191505 - DNA, 120 bp, Artificial Sequence
  ENSG00000112531_101 (sequence is synthesized)
ccagtcaatgtggaacaaactgtttctgtgcaacccctttgttttaccagacaaaatttgaatactttttttcctgaattgtatatgaccttggtgctgcatgcatgctgttgactttta

SEQ ID NO: 191506 - DNA, 120 bp, Artificial Sequence
  ENSG00000112531_102 (sequence is synthesized)
ggactttgatcttttaaggttttttttccccagcattaatattgatttataaagatttgaaaatctttaatgaactggagaacactaagatttaaactcgaaaattcgttgttcaagtaa

SEQ ID NO: 191507 - DNA, 120 bp, Artificial Sequence
  ENSG00000112531_103 (sequence is synthesized)
agaaagccatgatgctctgtatgttatctgtgtgtgtgcatgcactcaggtgccctttgtttcatgaacaaatacatttcattgtacatgttttctgtttaaatcattgtataaagtaat

SEQ ID NO: 191508 - DNA, 120 bp, Artificial Sequence
  ENSG00000112531_104 (sequence is synthesized)
tgcaggtcagaattataccacagaactgtttatgagaggcttgtgtctgttgcacatttcttgaagcatttttaaaataacatgtaacctgtaaccttgttgtttaagttttcttttcta

SEQ ID NO: 191509 - DNA, 120 bp, Artificial Sequence
  ENSG00000112531_105 (sequence is synthesized)
ttaatactctgtcctgtggtcccgtgcatgctccttttcccagaactcctctctgctgcacccacagcatctgttcccgaggagttatgactcttgacttcctgcagggctggggctctt

SEQ ID NO: 191510 - DNA, 120 bp, Artificial Sequence
  ENSG00000112531_106 (sequence is synthesized)
agccaccagctgctgttccagcactttcagcgcaagatctccctgattttgccacgtggaattgtacttgtatatgattaccttatctaaaatgaataagaggtgatggaccagtttact

SEQ ID NO: 191511 - DNA, 120 bp, Artificial Sequence
  ENSG00000112531_107 (sequence is synthesized)
gcttagaaatagcaagaggcactgcagtaaaacttgtttctcattgtaaagcttcatgtcttttgtttgttggaaaatttttacttatagaaacttaattattagactggtaaaataaag

SEQ ID NO: 191512 - DNA, 120 bp, Artificial Sequence
  ENSG00000112531_108 (sequence is synthesized)
accaaaatatgcagatttctaattggcattcataaggtgaataataataagtgcccaatgaaaaaatctattatggttaatttcatttcttgctttgccacctaagcagtaaaacatgat

SEQ ID NO: 191513 - DNA, 120 bp, Artificial Sequence
  ENSG00000112531_109 (sequence is synthesized)
attgaccacttggagaactcagaaaattattttaaatttctaagttataataaatttgcacacagataacatgcatgctatttatgtcacatctcacattaaattattttaaaataagca

SEQ ID NO: 191514 - DNA, 120 bp, Artificial Sequence
  ENSG00000112531_110 (sequence is synthesized)
gtgcccttcaaaacagatgcagacatgtgtgttggtagtagtgaggagattggtattagcatcaagtcttcattgatgactaatttttaattcccttccttttatctttaggtatggctt

SEQ ID NO: 191515 - DNA, 120 bp, Artificial Sequence
  ENSG00000112531_111 (sequence is synthesized)
gcagaccgaggttagtttagttctgcagttcttgtctataagaaatgcgttgggtgtccataaaatttgcaacaccacacctgatggaaaaatgtaattgcttacctgcacacagttttt

SEQ ID NO: 191516 - DNA, 120 bp, Artificial Sequence
  ENSG00000112531_112 (sequence is synthesized)
tttccttttctaaatttgtttgtgatcattgacagatttaagggttgggttttttgttttggtttggttttttctcccttcatattttaacttattaaatcttctattattatgtactat

SEQ ID NO: 191517 - DNA, 120 bp, Artificial Sequence
  ENSG00000112531_113 (sequence is synthesized)
gatttattcctactaaaacataaattagtcaatttggggagctattaaattttgatgttgcctcagttattttcattaataacttttgctaaaatttaccttttaaaagttctgaaattt

SEQ ID NO: 191518 - DNA, 120 bp, Artificial Sequence
  ENSG00000112531_114 (sequence is synthesized)
ggggttggtattgcaaaatgaattgaacggatggtgctttaatgagagaagtaaaggaatatatgcctcctgtgtacttttggagaaaactgaagatttagtttccatttttctttataa

SEQ ID NO: 191519 - DNA, 120 bp, Artificial Sequence
  ENSG00000112531_115 (sequence is synthesized)
taaaatatttgagccactgtataaacatgagggtgcacatgtcaagtacttagctaaaatcaacaaagtgaggactgtgaagataactttcatgtagttggatttttttatataaattag

SEQ ID NO: 191520 - DNA, 120 bp, Artificial Sequence
  ENSG00000112531_116 (sequence is synthesized)
agcgtcaattcccttttattcttacattctcttgccaaaatggatcctttgatttttgtcatttgctgctaaaatatattatctgaaggtaaactgtctcttgaagttctgtggtggtat

SEQ ID NO: 191521 - DNA, 120 bp, Artificial Sequence
  ENSG00000112531_117 (sequence is synthesized)
gagatccagctgtgtgaatataatttttgactaacctgtgactggaaaataagtcttcatttttctcctttacaacttttataatttgtgtcctgtatatgcccttggacccttttataa

SEQ ID NO: 191522 - DNA, 120 bp, Artificial Sequence
  ENSG00000112531_118 (sequence is synthesized)
attatttttgcttattgaggaatggtattttcggtttattgacattgaattgttttctaagtttttccatcacaagataggaatatcaagcatggtagtaaaaaaggattttttacaagt

SEQ ID NO: 191523 - DNA, 120 bp, Artificial Sequence
  ENSG00000112531_119 (sequence is synthesized)
ttctattatggcacatttgtttcctacaaattaaattgatcaaagtctcaaatattagtggaggaaaaagtgctggatttgtacttcaattgtacatcttctatgaatttatgaaggacc

SEQ ID NO: 191524 - DNA, 120 bp, Artificial Sequence
  ENSG00000112531_120 (sequence is synthesized)
tacctgctttatgtgattaccttgagtactgatgataaatactagacacagctgttgtccacatcagaaataacatgcctttcccaaagacattgttaatatttgtttagcataatccat

SEQ ID NO: 191525 - DNA, 120 bp, Artificial Sequence
  ENSG00000112531_121 (sequence is synthesized)
aaagaacgttgaagacttttaaactaatgtattcatcactaacagtgattgttcagtgaacaaaatagaccccagctccgtggtcgtctatgaggatggtattccttgtaagtgttctgt

SEQ ID NO: 191526 - DNA, 120 bp, Artificial Sequence
  ENSG00000112531_122 (sequence is synthesized)
atgagcacgtctcatagggatggggaagttttttggaaagtcacttgagttttaaagaaactggacaattccatgaataatttgaggttttattcatattgctaatgtctacaattgttc

SEQ ID NO: 191527 - DNA, 120 bp, Artificial Sequence
  ENSG00000112531_123 (sequence is synthesized)
taaagagtattttaaagtagtttttttcccccagctaatctttccctatgtatgcccccttttaggagatttctcaccattttgctttaacacaataattattggcctacttaatactcc

SEQ ID NO: 191528 - DNA, 120 bp, Artificial Sequence
  ENSG00000112531_124 (sequence is synthesized)
agtgccttgagatagttggacatattttaggaagattttattgtatttggaaaattacgacacattccatgcatggatcttttgtagttacgtgttttgattagtcctgtcactgttttt

SEQ ID NO: 191529 - DNA, 120 bp, Artificial Sequence
  ENSG00000112531_125 (sequence is synthesized)
atttaaaatgcagtgtcagcaaaccgaaatgctcatttcttttttagtaacagagtactcgtatacttatcactgtatgcactcattgggtctaagggagatgtctgaagtccttcactt

SEQ ID NO: 191530 - DNA, 120 bp, Artificial Sequence
  ENSG00000112531_126 (sequence is synthesized)
aaattattttatgatactactgttttctctatttttgaggttaaaattattttaaaaaaatattttgaagagaagtttattagtataagcattcatttaatgcaaaaaaactcagccctt

SEQ ID NO: 191531 - DNA, 120 bp, Artificial Sequence
  ENSG00000112531_127 (sequence is synthesized)
ggacatataaccatgtaattctatatgaacgtttagagtactacatggttgaccaatatctagttctttactaaaagtaaactcacctctttatatatatttcaaaactgaatttgaagc

SEQ ID NO: 191532 - DNA, 120 bp, Artificial Sequence
  ENSG00000112531_128 (sequence is synthesized)
ctattagagaccaactgaccttttagttgtaatgaactgtatggtcttgcatggtgacacacctgtgtaggaggccaagacttggcagaggatgtagtctaggtgtcctggtatatataa

SEQ ID NO: 191533 - DNA, 120 bp, Artificial Sequence
  ENSG00000112531_129 (sequence is synthesized)
atggtcactcacttcgtttatatattccacactcagaaaagaagtcagagttttttctgagtaatacaaaaaccatcacttacataatttgtataagaaactttaaacagttttaatcaa

SEQ ID NO: 191534 - DNA, 120 bp, Artificial Sequence
  ENSG00000112531_130 (sequence is synthesized)
aactatgagtaacatcaaaaatgctttaagattctatattttggaatacctgtgaagtagtatgactacatcatgttaaatatttattttcttctatgattttggagcagcaatttttat

SEQ ID NO: 191535 - DNA, 120 bp, Artificial Sequence
  ENSG00000112531_131 (sequence is synthesized)
tttaaataaaattccacttttaagaaattcagggaagatttggtcacattgaagatacagtatttttgtagtatttataaactgttctaaatgatagactatagaaaacatttttgtcat

SEQ ID NO: 191536 - DNA, 120 bp, Artificial Sequence
  ENSG00000112531_132 (sequence is synthesized)
atgaaggtaaatcagtccattattttggatcatttaaactgaacattacaccttctgggctttgatttatgaagtggcacagaatctaactttgcactgaatatcttttcattcacatct

SEQ ID NO: 191537 - DNA, 120 bp, Artificial Sequence
  ENSG00000112531_133 (sequence is synthesized)
cctctgccttagtcacaatggcaacagtacagaaaattctatcaaacctcagaatatagtagaaataattaagctgttgaatgagtcttaaaaattatactactgttaagtggaccaagt

SEQ ID NO: 191538 - DNA, 120 bp, Artificial Sequence
  ENSG00000112531_134 (sequence is synthesized)
ttggtgaagcagaatgtgacaaaggttgattaaggaaggaacaactcaaggacattgggaatgataacttttccacttgagaactactttatgttttactgtaatttttaaagttttttt

SEQ ID NO: 191539 - DNA, 120 bp, Artificial Sequence
  ENSG00000112531_135 (sequence is synthesized)
gtcctttttgttattttgcaaaagaaaatagtatttacaggtggcttcttttaaaatataaaaatataaagcaggaatgtatatgaaatgtcagattttattgtatttgcagagtattag

SEQ ID NO: 191540 - DNA, 120 bp, Artificial Sequence
  ENSG00000112531_136 (sequence is synthesized)
ctttgaaattgaataaagaaagctgtttgtagttttaaaatgccttattggtatcaattagaaatttcttctattttttgatgtacttagagctttttgagtgtagaattttaaatggca

SEQ ID NO: 191541 - DNA, 120 bp, Artificial Sequence
  ENSG00000112531_137 (sequence is synthesized)
ggattttacagtgtttacatgcaagtgcattttataagtgttctatatgtgtaaaatagtattttcaactggaaagtgttggctagtgcaaaaggcctggccattttctggttcccatga

SEQ ID NO: 191542 - DNA, 120 bp, Artificial Sequence
  ENSG00000112531_138 (sequence is synthesized)
tgttgcctacactgctagactacagtttagtatcgctttgtatcatgaggccaagaaattccatgttgtttgtaaatagaataattgaaaaagcaataaacatttattgaacaaaagaaa

SEQ ID NO: 191543 - DNA, 120 bp, Artificial Sequence
  ENSG00000112531_139 (sequence is synthesized)
agattacctgatgcagctgatgaacgacaagaagctcatgagcagcctgcccaacttctgcgggatcttcaaccacctcgagcggctgctggacgaagtttaattttgttgggagaatcc

SEQ ID NO: 191544 - DNA, 120 bp, Artificial Sequence
  ENSG00000112539_0 (sequence is synthesized)
agctggagggaaggaagcgatggcggaggagcgggagcctgaattgtacctgaagtggaagcactgcgagacgccaggcgtgaagaccctgtgtaatctgaagcactgcgagacgccagg

SEQ ID NO: 191545 - DNA, 120 bp, Artificial Sequence
  ENSG00000112539_1 (sequence is synthesized)
agtgaagaccctgtgtaatctgaagaaacttctgaatcggcttcagaaagaccaccgggaggacgtctacctctacatctctggacacctgaaccccaacaagctctaccagcctccgga

SEQ ID NO: 191546 - DNA, 120 bp, Artificial Sequence
  ENSG00000112539_2 (sequence is synthesized)
gacgatcttacagcactggcccaatgcccaccggcccaagggggagcgcgcctctgaggtgggagagccgcccgcagggaaggtggcgaggatgaaggaggccctggcccacttcaccat

SEQ ID NO: 191547 - DNA, 120 bp, Artificial Sequence
  ENSG00000112539_3 (sequence is synthesized)
ccacacggccctggtccccagtgaggcccaggacaccccgctgttcaggtacctgaacccccaggcctctctttcccacacttcagaggaggatttccttccagtggaggctgtcagaga

SEQ ID NO: 191548 - DNA, 120 bp, Artificial Sequence
  ENSG00000112539_4 (sequence is synthesized)
ggggaaggaagaaaagaaaggaggccctcctggacggggccctcctggatggcgcaggagggaagaactccggctgcccgacttgaaggtgctgtgctaccaggaggccgggtccagagg

SEQ ID NO: 191549 - DNA, 120 bp, Artificial Sequence
  ENSG00000112539_5 (sequence is synthesized)
caccagggaccggcaccactatgtcagctcctacctggccggagccaccagcgcagacaggtacaggatgttcctgcgtttccagaaggaagtgctcgccaagcaagatctcctgaagaa

SEQ ID NO: 191550 - DNA, 120 bp, Artificial Sequence
  ENSG00000112539_6 (sequence is synthesized)
tgacttcactgggagcaaggcggccgcgggccacgagagaaagctgcagcaggagctccagaaaatttgcacgtgcagcccccagcagttcaacagactgcacgtctttggaaaagtctt

SEQ ID NO: 191551 - DNA, 120 bp, Artificial Sequence
  ENSG00000112539_7 (sequence is synthesized)
ttgatatttggtgatctcttgaaaaaagttaaggatgaatatgaactctacatggcaacgctcctggagtcccagcctgcagcacagtacgaggctcttctggctcaactcaaggcgctg

SEQ ID NO: 191552 - DNA, 120 bp, Artificial Sequence
  ENSG00000112539_8 (sequence is synthesized)
gggcagaggccggtgaagacggcggacatggatctcgccagggaagagctgaggatgctcgtgacagccacaaaagcagccctggagcagaatgatagactcagaagtgaactggagatg

SEQ ID NO: 191553 - DNA, 120 bp, Artificial Sequence
  ENSG00000112539_9 (sequence is synthesized)
gaggtggcattgctgcagtctgcaaaggaacgatcagaatcatctgagaaacatataattgatgaaaaccgacttactcttactgagaaggttgaaaagaagaggtgtgaaatactcagt

SEQ ID NO: 191554 - DNA, 120 bp, Artificial Sequence
  ENSG00000112539_10 (sequence is synthesized)
aagtgggatgagatacaagctctggaaaaagaaattaaaacaactttggttcatactggaatttcagatatcactgagaataggattaaaagcatagagcatgaagctatacaattggaa

SEQ ID NO: 191555 - DNA, 120 bp, Artificial Sequence
  ENSG00000112539_11 (sequence is synthesized)
acagaaaatatgattttaaagaagaaaataaaagggcctttggaaatttatcaaggaatttgtaaaatcagaggaaacagaagataacgctcaagtggctgaacaaatggccagtggaaa

SEQ ID NO: 191556 - DNA, 120 bp, Artificial Sequence
  ENSG00000112539_12 (sequence is synthesized)
ttcttaacttccatgtatgtagcatggatatttgcagatgcatatacattcataaagatacatttcatttcatcagctttaatctctagtaaaattaatgtggtatatgtatcctactca

SEQ ID NO: 191557 - DNA, 120 bp, Artificial Sequence
  ENSG00000112539_13 (sequence is synthesized)
ggatactgaaatacacacatgcgtacacatgattagtttctgttgcatacatatttacaacaatactagttcttaacgtatgttttactttcatttaataatgttcaactttggaaaata

SEQ ID NO: 191558 - DNA, 120 bp, Artificial Sequence
  ENSG00000112539_14 (sequence is synthesized)
cttttgattatttgctaagaataaggaattcagcgctgcttgaatacagctcaaatttgtttatttgccaacacaagtttacatatatgcatttaataaaattttatagtgatttaataa

SEQ ID NO: 191559 - DNA, 120 bp, Artificial Sequence
  ENSG00000112539_15 (sequence is synthesized)
tttttatatttttccagcccccttaacaaattctatcattagttctgaaaagtgaagaacccttcacttctggaatttccctaaaattttctgatattttgaaacatcaatttcctcctc

SEQ ID NO: 191560 - DNA, 120 bp, Artificial Sequence
  ENSG00000112539_16 (sequence is synthesized)
tcctagttttttaccgggaggaccaggatctttccttctcattaattgtccttcattttatgctttgtttcttcatctgtttttaagtaatgtgctattgagtactcttgaaattataat

SEQ ID NO: 191561 - DNA, 120 bp, Artificial Sequence
  ENSG00000112539_17 (sequence is synthesized)
taacaaatatttttaaccaagtatattgtgtttaaaacaacttctcttccagcatgaagctatacaattggaaacagaaaatatgattttaaagaagaaaataaaagttactgaaaacca

SEQ ID NO: 191562 - DNA, 120 bp, Artificial Sequence
  ENSG00000112541_0 (sequence is synthesized)
atgaggatagaagagaggaaatcccaacatttaacaggtttgacagatgaaaaagtgaaggcatatctttctcttcacccccaggtattagatgaatttgtatctgaaagtgttagtgca

SEQ ID NO: 191563 - DNA, 120 bp, Artificial Sequence
  ENSG00000112541_1 (sequence is synthesized)
gagacagtagagaaatggctgaagaggaagaacaacaaatcagaagatgaatcagctcctaaggaagtcagcaggtaccaagatacgaatatgcagggagttgtatatgaactaaacagc

SEQ ID NO: 191564 - DNA, 120 bp, Artificial Sequence
  ENSG00000112541_2 (sequence is synthesized)
tatatagaacaacggttggacacaggaggagacaaccagctactcctctatgaactgagcagcatcattaaaatagccacaaaagccgatggatttgcactgtatttccttggagagtgc

SEQ ID NO: 191565 - DNA, 120 bp, Artificial Sequence
  ENSG00000112541_3 (sequence is synthesized)
aataatagcctgtgtatattcacgccacctgggataaaggaaggaaaaccccgcctcatccctgctgggcccatcactcagggcaccaccgtctctgcttatgtggccaagtccaggaaa

SEQ ID NO: 191566 - DNA, 120 bp, Artificial Sequence
  ENSG00000112541_4 (sequence is synthesized)
acactgctagtagaagacatccttggagatgaacgatttccaagaggtactggactggaatcagggactcgtatccagtctgttctttgcttaccaattgtcactgcaattggtgacttg

SEQ ID NO: 191567 - DNA, 120 bp, Artificial Sequence
  ENSG00000112541_5 (sequence is synthesized)
attggtattctcgagctgtatcggcactggggcaaagaagccttctgtcttagtcaccaggaggttgcaacagcaaatcttgcctgggcttcagtagcaatacatcaggtgcaggtatgc

SEQ ID NO: 191568 - DNA, 120 bp, Artificial Sequence
  ENSG00000112541_6 (sequence is synthesized)
agaggccttgccaaacagacagaattgaatgacttcctactcgacgtatcaaaaacatattttgataacatagttgcaatagattctctacttgaacacataatgatatatgcaaaaaac

SEQ ID NO: 191569 - DNA, 120 bp, Artificial Sequence
  ENSG00000112541_7 (sequence is synthesized)
ctggtgaatgccgatcgttgtgcgcttttccaggtggaccataagaacaaggagttatattcagacctttttgatattggagaggaaaaggaaggaaaacctgtcttcaagaagaccaaa

SEQ ID NO: 191570 - DNA, 120 bp, Artificial Sequence
  ENSG00000112541_8 (sequence is synthesized)
gagataagattttcaattgagaaaggaattgctggccaagtagcaagaacaggggaagtcctgaacattccagatgcctatgcagacccacgctttaacagagaagtagacttgtacaca

SEQ ID NO: 191571 - DNA, 120 bp, Artificial Sequence
  ENSG00000112541_9 (sequence is synthesized)
gtggtgcagatggtcaacaaaatcagtggcagtgccttctctaaaacagatgaaaacaacttcaaaatgtttgccgtcttttgtgctttagccttacactgtgctaatatgtatcataga

SEQ ID NO: 191572 - DNA, 120 bp, Artificial Sequence
  ENSG00000112541_10 (sequence is synthesized)
attcgccactcagagtgcatttaccgggtaacgatggaaaagctgtcctaccatagcatttgtacttcagaagagtggcaaggtctcatgcaattcacccttcccgtgcgtctctgcaaa

SEQ ID NO: 191573 - DNA, 120 bp, Artificial Sequence
  ENSG00000112541_11 (sequence is synthesized)
gaaattgaattattccactttgacattggtccttttgaaaacatgtggcctggaatttttgtctacatggttcatcggtcctgtgggacatcctgctttgagcttgaaaagttgtgtcgt

SEQ ID NO: 191574 - DNA, 120 bp, Artificial Sequence
  ENSG00000112541_12 (sequence is synthesized)
tttattatgtctgtgaagaagaactatcggcgggttccttatcacaactggaagcatgcggtcactgtagcacactgcatgtatgccatacttcagaacaatcacacgcttttcacagac

SEQ ID NO: 191575 - DNA, 120 bp, Artificial Sequence
  ENSG00000112541_13 (sequence is synthesized)
cttgagcgcaaaggactgctgattgcgtgtctgtgtcatgacctggaccacaggggcttcagtaacagctacctgcagaagttcgaccaccctctggccgctctctactccacttccacc

SEQ ID NO: 191576 - DNA, 120 bp, Artificial Sequence
  ENSG00000112541_14 (sequence is synthesized)
atggagcagcaccacttctcccagactgtgtccatcctccagttggaagggcacaatatcttctccactctgagctccagtgaatatgagcaggtgcttgagatcatccgcaaagccatc

SEQ ID NO: 191577 - DNA, 120 bp, Artificial Sequence
  ENSG00000112541_15 (sequence is synthesized)
attgccacagaccttgctttatactttggaaacaggaagcagttggaagagatgtaccagaccggatcactaaaccttaataatcaatcacatagagaccgtgtaattggtttgatgatg

SEQ ID NO: 191578 - DNA, 120 bp, Artificial Sequence
  ENSG00000112541_16 (sequence is synthesized)
actgcctgtgacctttgttctgtgacaaaactgtggcccgttacaaaattgacggcaaatgatatatatgcagaattctgggctgagggtgatgaaatgaagaaattgggaatacagcct

SEQ ID NO: 191579 - DNA, 120 bp, Artificial Sequence
  ENSG00000112541_17 (sequence is synthesized)
attcctatgatggacagagacaagaaggatgaagtcccccaaggccagcttgggttctacaatgccgtggccattccctgctatacaacccttacccagatcctccctcccacggagcct

SEQ ID NO: 191580 - DNA, 120 bp, Artificial Sequence
  ENSG00000112541_18 (sequence is synthesized)
cttctgaaagcatgcagggataatctcagtcagtgggagaaggtgattcgaggggaggagactgcaacctggatttcatccccatccgtggctcagaaggcagctgcatctgaagattga

SEQ ID NO: 191581 - DNA, 120 bp, Artificial Sequence
  ENSG00000112541_19 (sequence is synthesized)
ccaggcggcggcggccaaactccgcggcgtccccagggcgccagcttcgccctcgccgccgcggccgcgctgctcttcggctccgacatggaagatggaccttctaataatgcgagctgc

SEQ ID NO: 191582 - DNA, 120 bp, Artificial Sequence
  ENSG00000112541_20 (sequence is synthesized)
ttcctttttttggggggggtggggggaacctgcacctggtaactggggtgcaaacctcttcaagaaggtaacatcaaataaataagtcaagcagaggacttcctgccaatctcttctgtg

SEQ ID NO: 191583 - DNA, 120 bp, Artificial Sequence
  ENSG00000112541_21 (sequence is synthesized)
aggcatcatagacactgagcaaccaggaccacccccacgttcagaaatcagctggccaagtgactccatttgacttgcaaaccagccttttctaataggctaatattgctgaggccttaa

SEQ ID NO: 191584 - DNA, 120 bp, Artificial Sequence
  ENSG00000112541_22 (sequence is synthesized)
aggaaatggacaaaaattatccagaaggggtacttttccattgtatctttctaataagggtttaaaatggtactattatggtattgtacttgggctttaacatcaatgttgctttgatgt

SEQ ID NO: 191585 - DNA, 120 bp, Artificial Sequence
  ENSG00000112541_23 (sequence is synthesized)
tgttggatataaataggaatttttacacattactattgtgaatggtgaatgttcatgtatgacctacttgtaattaacttgagttgtagtccacagcctcaggacaaatgtcgttgaggt

SEQ ID NO: 191586 - DNA, 120 bp, Artificial Sequence
  ENSG00000112541_24 (sequence is synthesized)
tacagagtaagaaatgatggcaaaacgtcaaactcttatttcagagcttcatgaatttagttagactaaacataattctttaagttcaacctaaagggctgagatcaataaatttaacac

SEQ ID NO: 191587 - DNA, 120 bp, Artificial Sequence
  ENSG00000112541_25 (sequence is synthesized)
tagacgaagtagacttcctgtctttttgagaagagatgaggtatatgttacaataaatctcagaacttcaagtagcagttcaaaagatgtcagtttttaaaattgtttttgttgttgtct

SEQ ID NO: 191588 - DNA, 120 bp, Artificial Sequence
  ENSG00000112541_26 (sequence is synthesized)
tggcagttttactgaaccctttgcataaagaacaaaataaaagctcggcattgtaatttttttaatggacaagtcttatggatacgaagggtacatttttcataatgattcctttatatt

SEQ ID NO: 191589 - DNA, 120 bp, Artificial Sequence
  ENSG00000112541_27 (sequence is synthesized)
ttcactttgtgtcattgcagaattttagactctcattcacaatgaaaagtttattttaaacattgtttaattaaaataccatacagttctcttttaaacatcaaaccataaaaagtgtat

SEQ ID NO: 191590 - DNA, 120 bp, Artificial Sequence
  ENSG00000112541_28 (sequence is synthesized)
tttgtaattttactctgacctgccgcagtcacctctcacttatctcttccacgtactgcacggtcgtatttcatgagctttctgtccatagcacagaaacagagcagaaagtagtacaat

SEQ ID NO: 191591 - DNA, 120 bp, Artificial Sequence
  ENSG00000112541_29 (sequence is synthesized)
catgttggaccttctttctgttctctttactcttctcacagatcagatcactccatagaagcctgtgggtttcgatggtttcttctatacacctttttggttgaccagtattactataca

SEQ ID NO: 191592 - DNA, 120 bp, Artificial Sequence
  ENSG00000112541_30 (sequence is synthesized)
atgtaagtgttttaaaaaatacgaaagtaatactctgcaccccttcctacaaagatgataaagcagtcacttctggcgcattttaataatttaaagatttttagtgcaatggcacggtaa

SEQ ID NO: 191593 - DNA, 120 bp, Artificial Sequence
  ENSG00000112541_31 (sequence is synthesized)
cctccaaacctgaattagacagagactcactcaggaagtgacaggcccatcatatcaaataacttattcacttttcatgtggcaggaaactggaatatcgcttttaataaaatggaaaaa

SEQ ID NO: 191594 - DNA, 120 bp, Artificial Sequence
  ENSG00000112541_32 (sequence is synthesized)
tatgcttctacatatttaccaccataggcgttttgttcatatgagcctggtttgtgcaaaattaaatcagaggcttctacaacatggtttatttatgttgtagcaaagttggctctacat

SEQ ID NO: 191595 - DNA, 120 bp, Artificial Sequence
  ENSG00000112541_33 (sequence is synthesized)
ttcagttttcttgtgggcttctgaaagttgccatcttccctccgtggagctccatttgctattttcattatacactatgaggtaaaatgtaataacaaaagagagagaagtaccactgtg

SEQ ID NO: 191596 - DNA, 120 bp, Artificial Sequence
  ENSG00000112541_34 (sequence is synthesized)
gctagatatatacacacacatatatatatggatggatgtaatatatgtagaacacacacatagatgtatataggatacacactcatgtatgtaaacgtatacatatgtgtatatatgata

SEQ ID NO: 191597 - DNA, 120 bp, Artificial Sequence
  ENSG00000112541_35 (sequence is synthesized)
catacacatacacacacacgagagacagaaggaaagagaggaagagagaagcaaacatgtaggaaaaaatataaatcagccccattctcccattctttaagaacaatgatttttcttgat

SEQ ID NO: 191598 - DNA, 120 bp, Artificial Sequence
  ENSG00000112541_36 (sequence is synthesized)
ggaaaatgcatatcacttgacagttgacaagaaagtgtcatttttgtgttagtgtatcatataattgaatttgaacaagatacatatttttctgcatacaaatttatgaagctggagtct

SEQ ID NO: 191599 - DNA, 120 bp, Artificial Sequence
  ENSG00000112541_37 (sequence is synthesized)
accaaacacagctttagtcacaaaagttagtttagttatctcatttcgcttggagatggaatttcaggaagggatatattatttaagattattgtttaattacaagaattttaaaagaat

SEQ ID NO: 191600 - DNA, 120 bp, Artificial Sequence
  ENSG00000112541_38 (sequence is synthesized)
gaatgtatgaattctgttttttaatatagaaaataattatggagttaggaatctcatggctacatttacatttttaggttattacagaaaattctcttaatttattatagtcaagtgtat

SEQ ID NO: 191601 - DNA, 120 bp, Artificial Sequence
  ENSG00000112541_39 (sequence is synthesized)
taatctctatttagaacagtttcccaaaggaatgtgattggatttactggttggttaatttcttgtgaaatattgtcataatagaagcacagcttgaacaaaagactgaattctgatata

SEQ ID NO: 191602 - DNA, 120 bp, Artificial Sequence
  ENSG00000112541_40 (sequence is synthesized)
aactgtcaatattgcttttaccatgtgtaagatttacttagtaatcacagatttacctaaaataaaaggacccgggttgcagtgatatttagttaatgatttgttttggaaaacatgcag

SEQ ID NO: 191603 - DNA, 120 bp, Artificial Sequence
  ENSG00000112541_41 (sequence is synthesized)
ttaggagtatttttgtattttgtcagatgtttaggagacagactttcgggtcatgtttcttgtcttgttcccagatcttttcttaaaagaacagtgtgacaccagaagccaagagatggt

SEQ ID NO: 191604 - DNA, 120 bp, Artificial Sequence
  ENSG00000112541_42 (sequence is synthesized)
ttttactaacaacagctttgatgagttcctattaaggtcgtattgtgtattgtgccaaattttccacccagtataaatttagtaacccgctatgagcatatgtaggatattcaatttgca

SEQ ID NO: 191605 - DNA, 120 bp, Artificial Sequence
  ENSG00000112541_43 (sequence is synthesized)
gatacttttgttggttatgttggtttataatagacaagttttatggtcatatgcaattattccattatctttttggacacagtgaatatgttttttagctaaaaatgtccttggaaacat

SEQ ID NO: 191606 - DNA, 120 bp, Artificial Sequence
  ENSG00000112541_44 (sequence is synthesized)
aaatgcctgccaataacatggaatattgaattcgggcaatgtgaattgattaattagaaaagggtcaaaagaaatacaatggatgtggaaactaattctaaaaaatagccctattaatag

SEQ ID NO: 191607 - DNA, 120 bp, Artificial Sequence
  ENSG00000112541_45 (sequence is synthesized)
ggcagagactctggtccatttcccagctgtacttctctctaagaggtgtatgaaaaacccatcttgcaaaagagaccaaaatattagacacaatcgttcccattcctgactcttcaatgg

SEQ ID NO: 191608 - DNA, 120 bp, Artificial Sequence
  ENSG00000112541_46 (sequence is synthesized)
aaaaggaaggtacagatgtttacagtggtgccccaggtgactcgttctcaccacaacaaaagcaactaattggaaactagatgtgttcaataatagatttcctcttttttggcatgcttt

SEQ ID NO: 191609 - DNA, 120 bp, Artificial Sequence
  ENSG00000112541_47 (sequence is synthesized)
ttagattttttttcattttgtaaaatctcagttaatttttctttattggtatatttgtgtatgcgagacaaatcctgtattgtacaggatataaatagatgcataaatccttagatacct

SEQ ID NO: 191610 - DNA, 120 bp, Artificial Sequence
  ENSG00000112541_48 (sequence is synthesized)
gggttttttaataggtttaggtttgggtattgtgtttctggtcttttaactcaaaattaaggtttgagctttaataggactaaattattcacctgccttggcctgtgcctttattttaaa

SEQ ID NO: 191611 - DNA, 120 bp, Artificial Sequence
  ENSG00000112541_49 (sequence is synthesized)
tactgcaattttacttcttcattcatgtatttattattttgcttttcttgcttaagtataattgaaaatatttgcaggaacgcacaattcattttatcaagttgaatgaataggaccatt

SEQ ID NO: 191612 - DNA, 120 bp, Artificial Sequence
  ENSG00000112541_50 (sequence is synthesized)
ctctcctcatcagatttctgttctttatttgacttcattgacatataccctggtgactataaccagtgaactgttcagagtcagtcttttcggcaagaacttcagagaactgtgacactg

SEQ ID NO: 191613 - DNA, 120 bp, Artificial Sequence
  ENSG00000112541_51 (sequence is synthesized)
gttatgatgtgattttggggggtttcaggtacctaagcatgatttttaaaatcacttctctctttacatatttcgaacatatgtttgctttctacactttgcagattttatttaggattt

SEQ ID NO: 191614 - DNA, 120 bp, Artificial Sequence
  ENSG00000112541_52 (sequence is synthesized)
aattctttaaagactatattcatttagtcactatagtggatctcttctactgcaagtattcatctgatttttaaattatgtaaaatgtaaatcagccaagtatgtcatccgttatagttt

SEQ ID NO: 191615 - DNA, 120 bp, Artificial Sequence
  ENSG00000112541_53 (sequence is synthesized)
ccccatgctttcagcgcatggccatgagatttttacatgtgcataagtatttagccaatacacattttgctgacttctttaaccatttatattgtttaaattagtaatatccaatgcagt

SEQ ID NO: 191616 - DNA, 120 bp, Artificial Sequence
  ENSG00000112541_54 (sequence is synthesized)
gcacacttttttgtcttttttccaacggaatattttggttgtctgtagcgttggaagcattttatatgataaaaatagcaagaaaaaattaaaaagtgtcaacggtgtgctggttctaaa

SEQ ID NO: 191617 - DNA, 120 bp, Artificial Sequence
  ENSG00000112541_55 (sequence is synthesized)
ttaagaagatagaacaaagagaaagacattaatgttacctaagaaacacatttaacatccgaagaagcaatgctgtcctcacttgatgtttctcttctcaacccagcaatggagagcagg

SEQ ID NO: 191618 - DNA, 120 bp, Artificial Sequence
  ENSG00000112541_56 (sequence is synthesized)
gcttgcaaagccgtacagagcctacgtgctctttcctgcaagtgggagaaaactaatcaatggcacacagggccaggtgtggccctgtgaggcaaaggataatgtcacctcaggaccaag

SEQ ID NO: 191619 - DNA, 120 bp, Artificial Sequence
  ENSG00000112541_57 (sequence is synthesized)
gtggaaacttacagctgaatccagggcttactaagtagggaagtcagtttacatatttcagttttcctctgatgtttttgaggtactgtgtatttgcagaagtttaagcagaagggtttt

SEQ ID NO: 191620 - DNA, 120 bp, Artificial Sequence
  ENSG00000112541_58 (sequence is synthesized)
gtttctattgtaagttaggttctaaaagtgtataatctgatactctagcccaactgaaatattatatcttgggcgttacagcctttgtctttttctttagtcaccttaatacccagtcct

SEQ ID NO: 191621 - DNA, 120 bp, Artificial Sequence
  ENSG00000112541_59 (sequence is synthesized)
atgctgtatctctgatagcctatataaatgacatataggaatattattttccatatgatctgttgtatggtgtatatgctatgtgttcatttcgtgtgcaagttcagagtgtaatagatt

SEQ ID NO: 191622 - DNA, 120 bp, Artificial Sequence
  ENSG00000112541_60 (sequence is synthesized)
tacccagagaaggtgtttctatacaatgcccctacctatttgaaattacatgcttgcccaacacactgtgaaatagttaccaaaatttgtacaaatgcagcatcttcattctttctgaga

SEQ ID NO: 191623 - DNA, 120 bp, Artificial Sequence
  ENSG00000112541_61 (sequence is synthesized)
agacaagatggttttctttacatgaacaaatgaacaaaagagatcctagatccataacgtagctaaggcatctaagagtttgctgttgataatcttgctgaccaaaaactactggagagt

SEQ ID NO: 191624 - DNA, 120 bp, Artificial Sequence
  ENSG00000112541_62 (sequence is synthesized)
aacacaggttatatgccatcacaaatacaatgctcatgaagaactgatttgtagagtcaatgaacctgtgtccagaattttaataggctctctattggaaggagaaagaatttcaagtta

SEQ ID NO: 191625 - DNA, 120 bp, Artificial Sequence
  ENSG00000112541_63 (sequence is synthesized)
acagtatctaactttatcatagttgatgttagtaaattttaaaaaatgattttatatgtatgacaaaaatctttgtaaaatgcgcaagtgcaataatttaaagaggtcttaactttgcat

SEQ ID NO: 191626 - DNA, 120 bp, Artificial Sequence
  ENSG00000112541_64 (sequence is synthesized)
tataaatattgtacatgtgtgtaattttttcatgtattcatttgcagtctttgtatttaaaaaacatttactgttatgtttgtataatagaacagtaatcatttattataatctaggcaa

SEQ ID NO: 191627 - DNA, 120 bp, Artificial Sequence
  ENSG00000112541_65 (sequence is synthesized)
ctaggcaagttgtaaataaattcataattcaaacagccagtatatatgcatatatgagtgttatattgcaaaatctttgttttacttacatggttaaagcagcaagaattcttttgttga

SEQ ID NO: 191628 - DNA, 120 bp, Artificial Sequence
  ENSG00000112541_66 (sequence is synthesized)
gttaaagcagcaagaattcttttgttgatatgtaattatacacataaaatatatatatgtatgatacatgaaatatatttagaaatgttcataattttaatggatatcctttggtgtgaa

SEQ ID NO: 191629 - DNA, 120 bp, Artificial Sequence
  ENSG00000112541_67 (sequence is synthesized)
cgccagtgggcgtcttctgccgccgccgccaccaccgcctccacgggcagcggcactgcggcgcttttctccgctgctttcgagaagccgccgaggctcagccgccggagcgcgcacaca

SEQ ID NO: 191630 - DNA, 120 bp, Artificial Sequence
  ENSG00000112541_68 (sequence is synthesized)
cgcacacaccacgccacgcctgcagggagggtctccgccgtccctagccccggcccgggaggacgccgattgtgcgcgcctgagggtagccaggcgccgtcgccggggcctggcccccag

SEQ ID NO: 191631 - DNA, 120 bp, Artificial Sequence
  ENSG00000112541_69 (sequence is synthesized)
cctcccgcaacccaagccgagcacaatgtgaagactagactgggagggaagccgaagaccggagaggaggaccaggcagcggttcgggcggccggcaggggtgggcaggtcctgcggggg

SEQ ID NO: 191632 - DNA, 80 bp, Artificial Sequence
  ENSG00000112541_70 (sequence is synthesized)
cgcggcctgcccctccgcggcccggggaggaaccatggccagcctcgaggagcctcttgctccccgcccccagggtcccc

SEQ ID NO: 191633 - DNA, 80 bp, Artificial Sequence
  ENSG00000112541_71 (sequence is synthesized)
cccagggtcccctgccagcggccggggacgagccgggctgcggccccggcaaactccgcccggaaccccggctcagcgcg

SEQ ID NO: 191634 - DNA, 80 bp, Artificial Sequence
  ENSG00000112541_72 (sequence is synthesized)
cggcgccctctctgcgcgcggcggcggctgcggctgggtcgcggcccgcgctcccttggcgctcgccttctcgtcccggg

SEQ ID NO: 191635 - DNA, 120 bp, Artificial Sequence
  ENSG00000112541_73 (sequence is synthesized)
cccgcgctcccttggcgctcgccttctcgtcccgggtcccctcctcctctccatctttcttttacttctggccgccgccccccccgccccctccctcttttctcccctcctcatctgcct

SEQ ID NO: 191636 - DNA, 120 bp, Artificial Sequence
  ENSG00000112541_74 (sequence is synthesized)
ttcacctccccgtgcgtctcccaggaagggagggcgcagcggcggcggcggcggcgggaggaggcggcgatgctggcggaggaggaggaggaggacaagaggcagctcccttgagcgtcc

SEQ ID NO: 191637 - DNA, 120 bp, Artificial Sequence
  ENSG00000112541_75 (sequence is synthesized)
gagcgtccccaccagcagtagtcaccgcggcggcggtggcagcggcggcgggcggcggcggctcttcctctcgcctgcgctccagggcttgctgcttccagcccgtgccggtccccggcc

SEQ ID NO: 191638 - DNA, 120 bp, Artificial Sequence
  ENSG00000112541_76 (sequence is synthesized)
aaaagtcaaggcaggggttcgctagaaggaagcaggcaggcgggagacagtgaggaaagaggaggcgcccggtgcgcagaggaggggggcgtcgcggtcgcggatggagggggagcaggg

SEQ ID NO: 191639 - DNA, 120 bp, Artificial Sequence
  ENSG00000112541_77 (sequence is synthesized)
gagggcaattactttgtgtccttgacaaagcagtctcaaggccgttatacaacacatactgtgggagtgaaaggctgatgaggaaagctgcaaatgtaaatctgccggtagggaagatca

SEQ ID NO: 191640 - DNA, 120 bp, Artificial Sequence
  ENSG00000112541_78 (sequence is synthesized)
ctgagacacagagagaaacatcaagtgaggaagtcaatgccggaaaggtgactagatgctgctggggttaaagggagagaggaagaggcttggctgtgcaacagtgaacctggaagaaat

SEQ ID NO: 191641 - DNA, 120 bp, Artificial Sequence
  ENSG00000112541_79 (sequence is synthesized)
atatgctaccctggacgtgaaaggacacgtcagaacatttacatgtgtatgtgtatgtgcgtgcacagccacacacacacaatttggtttcttgaacagaaagaagcaagcgtcctcaaa

SEQ ID NO: 191642 - DNA, 120 bp, Artificial Sequence
  ENSG00000112541_80 (sequence is synthesized)
agacaacccactttctcattgggttcagttggaactctgagcttcaaacctgactttacagagaactcattcactccattttcctggacaatcgtccttcagagccctgccctggctggc

SEQ ID NO: 191643 - DNA, 120 bp, Artificial Sequence
  ENSG00000112541_81 (sequence is synthesized)
cactctccctctcccgggtggtaagcatcttggaagggctgcaggctgttttggcagtgtgtccccagcatgcagccctgaaaaacgagtgcgtctttctgtggtttgtgggatcctcgg

SEQ ID NO: 191644 - DNA, 120 bp, Artificial Sequence
  ENSG00000112541_82 (sequence is synthesized)
gcctgagatgcatatgctaggaaggcagttggataaacaaagcctgggaggatttgatccaaaggatcgttcaagactgcagcatagaaactgcagtcacagcatctaaaatcatgggat

SEQ ID NO: 191645 - DNA, 120 bp, Artificial Sequence
  ENSG00000112541_83 (sequence is synthesized)
tggatgccccaaggacagtatatagatgcctcagtgacattttgactctgagggaaatacagacggagttggttaatcaaccatagctgggtgcaatgtaagtgcctggctgaagtttga

SEQ ID NO: 191646 - DNA, 120 bp, Artificial Sequence
  ENSG00000112541_84 (sequence is synthesized)
cacgcgaacggacggcccgctggaattctgtgctatgagccggagtagaaagagagatttggactctgcaacaccaaggtagtcgttgaagccacagtcgtgaatggagaccaggagtga

SEQ ID NO: 191647 - DNA, 120 bp, Artificial Sequence
  ENSG00000112541_85 (sequence is synthesized)
atagtgggagtgagcagaagtcggaggataggacagaagaaggcagagccatggagcaccctggagaggtgtgacccggcaagatcctgagatggaaggtagcacggcctggagttcaga

SEQ ID NO: 191648 - DNA, 120 bp, Artificial Sequence
  ENSG00000112541_86 (sequence is synthesized)
gctgctgctgggagcttgagctgagatggactggtcttcatgggcgcccaaggcgctgggtgcagctttccccgagacccccagatggaaaggagggaaggaggaaccccacacactcgc

SEQ ID NO: 191649 - DNA, 120 bp, Artificial Sequence
  ENSG00000112541_87 (sequence is synthesized)
cttttgcgagaagatcggcgcgcaccccagagtgccccaagcctttggaatctgcctgctgagcggagcgcgcgagcgtggtggacaggtcccgaacttggccagcgggctttcttggca

SEQ ID NO: 191650 - DNA, 120 bp, Artificial Sequence
  ENSG00000112541_88 (sequence is synthesized)
acttgctttgcgcagttctccatggaaccctggacccactgtgctcccggcgccttgcctttttttttctttttctttctctcactgtctctttttaaatttatgaactcgaaatgaagc

SEQ ID NO: 191651 - DNA, 120 bp, Artificial Sequence
  ENSG00000112541_89 (sequence is synthesized)
ggaaagcagatatgcgcgtcagcatactttggcggaccagtcccagtgctgaccagtcccatcgtatctctgacggtgcatatcaggatccgcattgatcagatgccgaaaccatggctt

SEQ ID NO: 191652 - DNA, 120 bp, Artificial Sequence
  ENSG00000112541_90 (sequence is synthesized)
tcccatggaggaggcatttgactgagtcaccaggacattaaataactttgtaagggtcagacagcatttaagcagcagaatcacagatttcacccatgcatgtctgaattcaaaaccttt

SEQ ID NO: 191653 - DNA, 120 bp, Artificial Sequence
  ENSG00000112541_91 (sequence is synthesized)
gggacttttaaactaggcaaaccaatgaaacctttttatgtagcaataaaaagtattgccctctgtgaattaggacatattgaaatgcatacatacttaaagcataaataccgtcacatg

SEQ ID NO: 191654 - DNA, 120 bp, Artificial Sequence
  ENSG00000112541_92 (sequence is synthesized)
tcatacaatgacattttgttcaatgacagattgcatatatgacagcggtcccgtaagatgattatggagctggaaaactcctatcacccagtgacgtcatagtcttcttaacgtcacagt

SEQ ID NO: 191655 - DNA, 120 bp, Artificial Sequence
  ENSG00000112541_93 (sequence is synthesized)
gcgatgtattactcatgtgtttgtagtgatattggtgtaaacaaaccaactgtgatgccagcacatctcagtctatacaatgcataatacttgataatgacaataaacgattctgttaca

SEQ ID NO: 191656 - DNA, 120 bp, Artificial Sequence
  ENSG00000112541_94 (sequence is synthesized)
cttccatttgtaaaacatgcaatatctacaaagagcagtaaagcaaagcacaatcaaaatgacgtatgcctgtgctgacattcagaaatacatctgttggtaccaagatacgaatatgca

SEQ ID NO: 191657 - DNA, 120 bp, Artificial Sequence
  ENSG00000112541_95 (sequence is synthesized)
attagctgggacaaggtgaaacggcttcgacagagtcccaacaagatgacaactccagcaagatgcagtgctggtctgggaggtgtttgggtgggcgctgggctgtgcaccagagggtta

SEQ ID NO: 191658 - DNA, 120 bp, Artificial Sequence
  ENSG00000112541_96 (sequence is synthesized)
tcaaagcccagttccttcccgtcctgttctcaccacggcccgggcaggatgtggcctttgcttctgcagttgaagctgggtctctaccatatcaaggctcagctgggagagtcggatcca

SEQ ID NO: 191659 - DNA, 120 bp, Artificial Sequence
  ENSG00000112541_97 (sequence is synthesized)
gccagtgggtgcagaggcctgggcatggtgcacaccatgcttgtttctgtttctgtggcagaaacttagtcaaatccctggaggtgggattgtgcaatctgcttgtgtgtccagaagcca

SEQ ID NO: 191660 - DNA, 120 bp, Artificial Sequence
  ENSG00000112541_98 (sequence is synthesized)
ggaccaggggaggatggctctggtggacaattcatcatctccaccattgacaggactggggagcccggaatgaaagtactgaggatgccgaggccctcacaggcaacattctagtgcccc

SEQ ID NO: 191661 - DNA, 120 bp, Artificial Sequence
  ENSG00000112541_99 (sequence is synthesized)
ttgggaacaggaggttttggtaattcaggaaagacacacatgagagcaggaactaggggtggggtcaggacttgggcacgtgcaggcttggcaagtctgagaggactgtggcaaaggcca

SEQ ID NO: 191662 - DNA, 120 bp, Artificial Sequence
  ENSG00000112541_100 (sequence is synthesized)
ggacagggaaagggataaggaaggcctttgtcttatggagtgaggactttgtgaagagggtgattcatttcccagggctgctgtgacaaagggccacagccaggtggcttaaagcaacag

SEQ ID NO: 191663 - DNA, 120 bp, Artificial Sequence
  ENSG00000112541_101 (sequence is synthesized)
aaacatgttccctctcagttgtggaggccagaagtctgagattgaggtgtgggcagggctgcgttctctccaaagccaccacggaggatccttcctcacctctcccagcttctggtggcc

SEQ ID NO: 191664 - DNA, 120 bp, Artificial Sequence
  ENSG00000112541_102 (sequence is synthesized)
atgggcagtccttggcttgaggtttctctgcccacgtcttcacagggtggccgtcctctgcatctgtgtctctgtatctccatggccttctcctcatgtctgtctcctcttcttataagg

SEQ ID NO: 191665 - DNA, 120 bp, Artificial Sequence
  ENSG00000112541_103 (sequence is synthesized)
acacctgttgtaccagatgtatcagagtggagcccgccctgatggagtatgacctcatcctcacatctgcaaagaccctatttccaaataaacttgcattctcaagtactgcagttagga

SEQ ID NO: 191666 - DNA, 120 bp, Artificial Sequence
  ENSG00000112541_104 (sequence is synthesized)
ctgtgttccttaggccagtggctctcagtcctggctatttatcagaactacctaaaaagcttttgaagatgcagacatcagattctacccaaacctactgaatcagtcattgtaggatat

SEQ ID NO: 191667 - DNA, 120 bp, Artificial Sequence
  ENSG00000112541_105 (sequence is synthesized)
gaaatatttaaagctccatgggtttctaatacttaccccaggttgagagccactgctctggctaatgaggacctcttgaaaggtttttatttcttgtggtatcagttttaggacagcttg

SEQ ID NO: 191668 - DNA, 120 bp, Artificial Sequence
  ENSG00000112541_106 (sequence is synthesized)
cagctttgaacaaatatactataaataatattatcacataatattataacacaatatgaacacatatttatatgcattttctaagtttccatcctaaaaggtgaccctctgaattgagaa

SEQ ID NO: 191669 - DNA, 120 bp, Artificial Sequence
  ENSG00000112541_107 (sequence is synthesized)
gaatcctcaaggtgctatgtggccagccccatgctcggtgggaagactgcttatcttcttcatgtgctcttcctcgggatatgtagtacagggttgtggtccttctccaggagccagaac

SEQ ID NO: 191670 - DNA, 120 bp, Artificial Sequence
  ENSG00000112541_108 (sequence is synthesized)
tactcttggctccccgttgagtttgtggtctattaaaactccctcccacatcttttgcacacgaagggctataaatctaggttttccctctccaccacttgttcaattgattttttggag

SEQ ID NO: 191671 - DNA, 120 bp, Artificial Sequence
  ENSG00000112541_109 (sequence is synthesized)
cctgaatgcaggccttgacttatatctctgtttaatttcatcttgtggtttcagccaagtgttctggcctgtcgaggccttctgtagtttcagtctgtcattttttgcgttagcgctgtc

SEQ ID NO: 191672 - DNA, 120 bp, Artificial Sequence
  ENSG00000112541_110 (sequence is synthesized)
tcataaatttgtcatctgcagattggatcaacacatcttctcgggcttcaccaaatcactgaaaaacctgccaccatgtcacaggacagacatatgatattcctccagagacggctctcc

SEQ ID NO: 191673 - DNA, 120 bp, Artificial Sequence
  ENSG00000112541_111 (sequence is synthesized)
ttcggaaagcactctttgggaatgtagttcctaaatcagctgtcatattgaacaaacacccagtcaagccatattttattcttagagcactcttttgaaactttagtcatccaggaagtg

SEQ ID NO: 191674 - DNA, 120 bp, Artificial Sequence
  ENSG00000112541_112 (sequence is synthesized)
ctgcaaatgcacagttggtccttgatggacatgccaggaggagcaacgaggggagacaaggtgcccagggccatgaacacatcacttggtctgcaccaagagagttccagccacagataa

SEQ ID NO: 191675 - DNA, 120 bp, Artificial Sequence
  ENSG00000112541_113 (sequence is synthesized)
agaatcttcattgccaactttgacctgaaagcaatgaatgggtcaactaagcaccatgtgttcattactgagaaataaattcaaagagctaacatgacaccatcttggaagccaaaagct

SEQ ID NO: 191676 - DNA, 87 bp, Artificial Sequence
  ENSG00000112541_114 (sequence is synthesized)
agttccgggcagccgggagagtcgttcctgagagcacaagcacccccaaatgtgaagtgcactcggagcactcatgttctaaagaga

SEQ ID NO: 191677 - DNA, 120 bp, Artificial Sequence
  ENSG00000112541_115 (sequence is synthesized)
cgctttgttggctttgaggagcgggacagacccccgggcgcagatgagcgatgacccagcagaaggcaccctggacccctgcagtgcgccaggtttgacagatgaaaaagtgaaggcata

SEQ ID NO: 191678 - DNA, 120 bp, Artificial Sequence
  ENSG00000112541_116 (sequence is synthesized)
gaaagcatgcagccatcacaggaacctgcctggccacgtcgtgctggtaaccatgtcggagggccccacacaatgccgttgtgcagagctgtgccacaggactgtttggttagttttcaa

SEQ ID NO: 191679 - DNA, 120 bp, Artificial Sequence
  ENSG00000112541_117 (sequence is synthesized)
agcagatatgcgcgtcagcatactttggcggaccttttaaaaatggaactgtcggctgcggctggaaggcgcaggcaggcgccctggagagaattcacagggaggcacaggacagaacgc

SEQ ID NO: 191680 - DNA, 120 bp, Artificial Sequence
  ENSG00000112541_118 (sequence is synthesized)
tcccaggaacgaggaagcacccccagaaaggagcgctctatgggctccaggcagccgaggaaacgcgaacgtgagccccgtgactgcactcccacgtgcaccaacgctgccagtgtgagc

SEQ ID NO: 191681 - DNA, 120 bp, Artificial Sequence
  ENSG00000112541_119 (sequence is synthesized)
agaagcggagcccgcagagcgccaggctgcgccgggagatgcatcacgatgaaaaactgcgccagagcatggcgggaactttccgagagggcgtgttgtttccaggcggttccaccttct

SEQ ID NO: 191682 - DNA, 120 bp, Artificial Sequence
  ENSG00000112541_120 (sequence is synthesized)
ttttccttgatactactttatgctcggcctggttgttggcaagtagctgcccgcgtctgtacgcgcccttgattagtttccactgcatgtgttttaacacagtcctcctttttccacgtt

SEQ ID NO: 191683 - DNA, 120 bp, Artificial Sequence
  ENSG00000112541_121 (sequence is synthesized)
tatttgggccaaccctgtctgcaaagatccagtttaatacagatttgagtctacgtgctatagcctggaaatgtactaaagacactacaacatattgctgaaagaatagaatctttattc

SEQ ID NO: 191684 - DNA, 120 bp, Artificial Sequence
  ENSG00000112541_122 (sequence is synthesized)
tgaatgcaaagcggacacctagtaaaaaattctggaataataaaacaagcaaggcttatgtgctcagttttggggacgctccaatttaaaggcttagtcattgtcacggtgtaaggttta

SEQ ID NO: 191685 - DNA, 120 bp, Artificial Sequence
  ENSG00000112541_123 (sequence is synthesized)
cccattgcccccatcacacagatgtgggattgttgagagctgagtgtcctatgacctcttctgctgcccaagaacttggggtgggtggtaactggagaaatcaaagtgatcagctgcaaa

SEQ ID NO: 191686 - DNA, 120 bp, Artificial Sequence
  ENSG00000112541_124 (sequence is synthesized)
gaacgcttccattgctggagcttggttgtgcgggattctccacggaggtcttaaggcagagacaaaaacaaggactttgggaggctcctgtgagcagccaaaagggtttagagtcaggca

SEQ ID NO: 191687 - DNA, 120 bp, Artificial Sequence
  ENSG00000112541_125 (sequence is synthesized)
gcctcaggttacaaatccagtcctgcaggctaggagttgtgtaagcttaaaaaagtgactgcacttccaggaacatcatttccctacctgctcctccttctgacgggttttctgaggaca

SEQ ID NO: 191688 - DNA, 120 bp, Artificial Sequence
  ENSG00000112541_126 (sequence is synthesized)
atggaatccacactctgtgtcgaacacttttctaattagcgatgtgcagacactgtttattttacaggaataaaaatgccagaagaacccaagtcatattcatttaaagcagggtgacaa

SEQ ID NO: 191689 - DNA, 87 bp, Artificial Sequence
  ENSG00000112541_127 (sequence is synthesized)
agaagaacccaagtcatattcatttaaagcagggtgacaagtacaccaaaatctgaaaaatcatttgaaataaaagtaaactatgga

SEQ ID NO: 191690 - DNA, 120 bp, Artificial Sequence
  ENSG00000112541_128 (sequence is synthesized)
atcatcaacaaaaatagccagaattatattgaaactcatgcgataactacagatgatcattttattcatctttggatgtgttcgtttttccattttttggtgaatttctggacactgatg

SEQ ID NO: 191691 - DNA, 120 bp, Artificial Sequence
  ENSG00000112541_129 (sequence is synthesized)
ataaaccacgacagaatacttttatgtactgtgcctcctcctaaacatttttcagacacctcattatgtaacctgcagctcataatgaatgcataacatgtgtatcatattaatagagtt

SEQ ID NO: 191692 - DNA, 120 bp, Artificial Sequence
  ENSG00000112541_130 (sequence is synthesized)
cttctaaagagatctcctacgtttttattttcaagtagttcttcatgtgggggatggtcagcgggagatggcacttcataagatctgcggtggtcaccccagtcatcatccgacgtgttg

SEQ ID NO: 191693 - DNA, 120 bp, Artificial Sequence
  ENSG00000112541_131 (sequence is synthesized)
accccagtcatcatccgatgtgttgcaccagtttgtggcacttcataagttctgcggtggtcaccccagtcatcatccgacgtgttgcaccagtgtgtgttgctgtttgagccgtgctgc

SEQ ID NO: 191694 - DNA, 120 bp, Artificial Sequence
  ENSG00000112541_132 (sequence is synthesized)
cgaccccttccagggcatctgccatgggcacctcctccagcccgtgcactaagactcaagagagtcgaagaaccagggaatcgttgtaataacaagcattctgaattgcatcgtactgtg

SEQ ID NO: 191695 - DNA, 120 bp, Artificial Sequence
  ENSG00000112541_133 (sequence is synthesized)
tactagcaggagtattcgggaacttctgttgctggaaacacgggagagcattctgcccgaaggccgcactgccatttctcctttgaggtagaacatcaccttggtgcagagcactccatg

SEQ ID NO: 191696 - DNA, 120 bp, Artificial Sequence
  ENSG00000112541_134 (sequence is synthesized)
aggtctcctcccagagccttcccggtgggagcttacaggaaatatgggagatagaggaaaagacaaaatgactccatgaggaaatacccagacacgcccagaagatgaaatgtggtcttc

SEQ ID NO: 191697 - DNA, 120 bp, Artificial Sequence
  ENSG00000112541_135 (sequence is synthesized)
atcaatgactgcacgtcattgataaagaagctgtggtagattaggagcaacctaaggaaagcaacaaggtacaatgaatgggccttgactggatcctgaatggttaagccagctaaagaa

SEQ ID NO: 191698 - DNA, 120 bp, Artificial Sequence
  ENSG00000112541_136 (sequence is synthesized)
aatgtttggagcaaccgagtaaatttgaacgtggactagatattatataagatgaagattcattgaaatggaaacctagagcttattaactgaaaaaaaaatggttataaaattatacgt

SEQ ID NO: 191699 - DNA, 120 bp, Artificial Sequence
  ENSG00000112541_137 (sequence is synthesized)
aaaaagtcatttcattttaggtatgcaagtgtatatatagatagaaaatatctgaattatattcaataatgtgtttcctgcactaatttctggatggtagagacatgtattttaattatt

SEQ ID NO: 191700 - DNA, 120 bp, Artificial Sequence
  ENSG00000112541_138 (sequence is synthesized)
acggtgactcatcttaggggtgaaaacccggcctgacactgaagaaccacaacgtcgggcaggagccatgaccggcaggcaggctgggctgcgtgcgggggcctgatgcaggaccagccg

SEQ ID NO: 191701 - DNA, 120 bp, Artificial Sequence
  ENSG00000112541_139 (sequence is synthesized)
atcgattccatctgccacagcagaacatcatcgtggtttcacggccgatgctgagagtcttgtatgtgtgttgcacagagctgacttcggaccccaagccagccgcctccccttcatgct

SEQ ID NO: 191702 - DNA, 120 bp, Artificial Sequence
  ENSG00000112541_140 (sequence is synthesized)
atgaatcagctcctaaggaagtcagcaggttctggagacagagaagcccaaggtcaaggtgcctgcatctggcaaggaccttcctgctgcatcatcccatggcagaaggtggaagggcaa

SEQ ID NO: 191703 - DNA, 75 bp, Artificial Sequence
  ENSG00000112541_141 (sequence is synthesized)
ttgaaggaaaaggaggaaggaggaaggagagagagactgagagagggagagggagagggcgcaacaccagcaaac

SEQ ID NO: 191704 - DNA, 120 bp, Artificial Sequence
  ENSG00000112541_142 (sequence is synthesized)
agtctcctagacgtagggctacattgatggaccggattgtaggatttctgcactgagtccctgcccctctgcctttcctgccaccccaagtcccttcccctcctgaagcagcaatctctt

SEQ ID NO: 191705 - DNA, 120 bp, Artificial Sequence
  ENSG00000112541_143 (sequence is synthesized)
ccatctccctctctggtctcttctccccacccctttcctctgcacctaaccccctcccctccatccaaccccaccttcactctcctctccgaggggggagggccagggggtggggaaaga

SEQ ID NO: 191706 - DNA, 120 bp, Artificial Sequence
  ENSG00000112541_144 (sequence is synthesized)
aaacccccaaatccccagccctgggcagagatgtcgaagaaacgcaaagccctcgagggtggaggaggtggcggagaaccccagctcccagaggaggaacccactgcctggtttggggac

SEQ ID NO: 191707 - DNA, 120 bp, Artificial Sequence
  ENSG00000112541_145 (sequence is synthesized)
cttccacgtggatgttgatactgtgcagaatgatttgaagcggttttaagggaaaggaataatatgagtcacgttgagaagttcttagtaaatgtggaggaataaccttgaagttgtttg

SEQ ID NO: 191708 - DNA, 120 bp, Artificial Sequence
  ENSG00000112541_146 (sequence is synthesized)
tggctgtgaaaagaatggaggggatgagggacacgtgaacatctcccctgctgctgccctcagctggtgttgaagcgtggatccaggagtacaccctagacaagatgggatcttgaatga

SEQ ID NO: 191709 - DNA, 120 bp, Artificial Sequence
  ENSG00000112541_147 (sequence is synthesized)
aaacccaagccaagaatggaagaaagaaatggtggggcttgcgtcacatcgagttcaagcctatggagaagacacacttttcttgtttctttgtttaatcagctttattgagatgaatca

SEQ ID NO: 191710 - DNA, 120 bp, Artificial Sequence
  ENSG00000112541_148 (sequence is synthesized)
aaaccatgaattgtaccacagagggagatcttctgtcccactaggaaactgcgaattgtaccacagagggagatcttctatgcaacatggagaccatgaatggtacacacagagagagat

SEQ ID NO: 191711 - DNA, 120 bp, Artificial Sequence
  ENSG00000112541_149 (sequence is synthesized)
cttctatccacatggacaccatgaattgtaccacagaggcagatgttctatccaacatggaaaccatgaactgtacacacagagggggatattccatccaacataggaaccatgaactgt

SEQ ID NO: 191712 - DNA, 120 bp, Artificial Sequence
  ENSG00000112541_150 (sequence is synthesized)
acacacagagggagatcttctatccaacatggagaccatgaattttaccacaaaggaagatgttctatccaaaatggaaaccatgagttgtatgcctagagggagatcttctatccaata

SEQ ID NO: 191713 - DNA, 120 bp, Artificial Sequence
  ENSG00000112541_151 (sequence is synthesized)
acccagtataaaatgtgtgttcctggtctgggcagctttccttcacgtacccaggaccttttcttctgcagccttgccttctccagggactcactgttacctgtgtccagactgtggaag

SEQ ID NO: 191714 - DNA, 120 bp, Artificial Sequence
  ENSG00000112541_152 (sequence is synthesized)
gatgatgagtgtggagaagacatatctgcccttcagtcttggcccagaaacaatgctgatacctccactgacattccactggcaagaacagcccgtgcgccacacctggaatgggaagga

SEQ ID NO: 191715 - DNA, 120 bp, Artificial Sequence
  ENSG00000112541_153 (sequence is synthesized)
ctggtgggtagccacctcctagaacttccttctctagatgggctcacaaattccagtgtcagtgagccagtgctgccacagataactattctttgaaataaggaatgccgaagagagcca

SEQ ID NO: 191716 - DNA, 120 bp, Artificial Sequence
  ENSG00000112541_154 (sequence is synthesized)
gttctgtgagggagtattgggaattcacaccatatcaagcaagagaaaagagaggaagtatttcaggggtgcaccacctatgcatgtcatgtgatgccaaaagcaacccaccaattggga

SEQ ID NO: 191717 - DNA, 120 bp, Artificial Sequence
  ENSG00000112541_155 (sequence is synthesized)
taaaaaacagtcagctgatcatttgaccttgaatccagaaacaccgatcaaagtaaaacactcacagctcggcagccggcttgccgcttgctcatttttgcatcacacaaatccagccga

SEQ ID NO: 191718 - DNA, 120 bp, Artificial Sequence
  ENSG00000112541_156 (sequence is synthesized)
ggaagcaaaggttcaaatcatggcatctgtttgcagatctctgagaaacaagggctgtggccagaggagtggacgtgcagtcagtcaatatggggtgggcttttctgaacaaagattccg

SEQ ID NO: 191719 - DNA, 120 bp, Artificial Sequence
  ENSG00000112541_157 (sequence is synthesized)
agaagaccatgagcttgtcagacagaaatctaatctgcatatgtgatccatgcagtcctaggtatagattgcatatacatatacaaaatttgtttttattcaatttggaaataattgttg

SEQ ID NO: 191720 - DNA, 120 bp, Artificial Sequence
  ENSG00000112541_158 (sequence is synthesized)
accatgatttcctacagctcacacaaatgaggtaagaacaaaggtgatcagtagttaataatggactgggactgtttgaaaagcaacttggacaatggaatgaataaatatatctggata

SEQ ID NO: 191721 - DNA, 120 bp, Artificial Sequence
  ENSG00000112541_159 (sequence is synthesized)
ctctgacctcaaccgtgcatatcagatcagctaatgtctgttggataattttatgtgacgggctgggcttagtcatggggacaaataaatgagaagaacaaagaaaatgagaaaaacaaa

SEQ ID NO: 191722 - DNA, 120 bp, Artificial Sequence
  ENSG00000112541_160 (sequence is synthesized)
gagccccagttcctccctcttgagcctgtggccacttggctggagcagatgcgcttccttccacttgggggtccagcccaccgggtccctgtagccggggtgagggaggccagggcctca

SEQ ID NO: 191723 - DNA, 120 bp, Artificial Sequence
  ENSG00000112541_161 (sequence is synthesized)
gaaccccgcgcttccaactgtgatggcaccgccgttctccaggactcggagtgggcgcccggcctcccaccccgcgcagtgaccggcatccagagcatggactggcggggtggaaacggt

SEQ ID NO: 191724 - DNA, 120 bp, Artificial Sequence
  ENSG00000112541_162 (sequence is synthesized)
tgcacctccacccaggggacgcacccccaccccgggccgcgtcctgttggtcccgggcttctctggggtccggggtggtagagaaaagggaaggacaataggtcgctagggtggaagaga

SEQ ID NO: 191725 - DNA, 120 bp, Artificial Sequence
  ENSG00000112541_163 (sequence is synthesized)
gggcccccgcccgactccggcgccagtcggggcgggtgcggcttcccgcggcccagagcgcggctccggagccaccgtccaccgcgtgtgcacccgagcctttgtctgcgcctcgctcag

SEQ ID NO: 191726 - DNA, 120 bp, Artificial Sequence
  ENSG00000112541_164 (sequence is synthesized)
tttgtctgcgcctcgctcaggagccgcgtttccgcggcgccttctctgggccgacgctcttccaggattgctgtttcggtttcccgctcccaactgcggctcattcccaggctttggccg

SEQ ID NO: 191727 - DNA, 120 bp, Artificial Sequence
  ENSG00000112541_165 (sequence is synthesized)
acccgggtctccagggcacccgaggttgagcccctccctgcggccgaagctgctccgggctcaccgcccgctcaggcacctttggggtgcagcccccgggctggcgagcgtattcgcgcc

SEQ ID NO: 191728 - DNA, 120 bp, Artificial Sequence
  ENSG00000112541_166 (sequence is synthesized)
gggatcggccgctccttgcaaccccgcttcccgggcacgggcgagtccacggcggccgcgtggtcagcggcctctcgtacacccgtgcgggctccggctagcgagtcgctgcttgcgctt

SEQ ID NO: 191729 - DNA, 120 bp, Artificial Sequence
  ENSG00000112541_167 (sequence is synthesized)
gattggctagcggggcgcgggcccaatgctcccgaagtcctctgacccctaagtcctcccccccggtgtctgcctcccacccccgctgcagtctaggtggggaaggggtgtggagatggg

SEQ ID NO: 191730 - DNA, 120 bp, Artificial Sequence
  ENSG00000112541_168 (sequence is synthesized)
tgtgcatggacagagcatgtggccttctctgttggccagagatgtggtcagtagaagcacttttccctactgaagtgccctttggccatgcattgaaggtggtagaggatggggccccac

SEQ ID NO: 191731 - DNA, 120 bp, Artificial Sequence
  ENSG00000112541_169 (sequence is synthesized)
cagctctcccggggtgttggcatcagcctataggcctggtctaggactggggttcctcctggtcccctatctggtgggcttgtgaattctttcttaagaaaataaacatctgcttttctc

SEQ ID NO: 191732 - DNA, 120 bp, Artificial Sequence
  ENSG00000112541_170 (sequence is synthesized)
tttcatcttgccatggagcctatatccccattgagggtggaagaaaagataacatttttcttagttaaaggtaacaatcttttctggactgaaactatttctttttgaaaaatagagttt

SEQ ID NO: 191733 - DNA, 120 bp, Artificial Sequence
  ENSG00000112541_171 (sequence is synthesized)
ctgaatccatcaactcaaaactcagattatttaccagggccatttcctgtttgctgcttcttccaaagtaggtgccctgtggcaagacagatgcgatggcttcctggagtcaggacaggg

SEQ ID NO: 191734 - DNA, 120 bp, Artificial Sequence
  ENSG00000112541_172 (sequence is synthesized)
accacacataatcgaggctgtcacgttttgttgcatgtacctgacctcacgtggtggcacagcttctctcactgggactctgggccaaggcctcagtcctccctgtacctactgctgtgg

SEQ ID NO: 191735 - DNA, 120 bp, Artificial Sequence
  ENSG00000112541_173 (sequence is synthesized)
ggccagcttagtcactcccctaggcatggccaaggcggaagtcccctctgcagcttgctttgtcccaccttggcattcatgtaggattcaaacaagtccctcacctggcccctggcttag

SEQ ID NO: 191736 - DNA, 120 bp, Artificial Sequence
  ENSG00000112541_174 (sequence is synthesized)
taggtgcaagctcctctgctctctgacttagttctgcctccatccccaccacacccactactgagaggtggaacctcctccccaggaagggagaatcaataactctttctcctggcagtg

SEQ ID NO: 191737 - DNA, 120 bp, Artificial Sequence
  ENSG00000112541_175 (sequence is synthesized)
tactcttctcttgttctccattgacagagctttatactttctttgcctgatggtaggaacttcctctacctatcctgaggtctctccacctgcacttgataataaaactcttggttcagg

SEQ ID NO: 191738 - DNA, 120 bp, Artificial Sequence
  ENSG00000112541_176 (sequence is synthesized)
cattgccattttggacacacagctccaaacccaaaatgtgtccactggatcaacccacaatgcaaacaactgctttctaaggaaaagccgagtttctaggaggcagcccacttctgacgt

SEQ ID NO: 191739 - DNA, 120 bp, Artificial Sequence
  ENSG00000112541_177 (sequence is synthesized)
gtccttcagttaacaggctgcagtggacagcgtgtggtgggtggaggaagacggcagatgagaaattcaaggagattcaccacagagcagctttctggctcagctgttctagggtgccat

SEQ ID NO: 191740 - DNA, 120 bp, Artificial Sequence
  ENSG00000112541_178 (sequence is synthesized)
aaggcacacggtgtggccctggtacatgcttgtatccactcattgaggtctgggattccaccatggtaaggctcatcagagcccttcctcaggactggcaggaggacacccagagaagca

SEQ ID NO: 191741 - DNA, 120 bp, Artificial Sequence
  ENSG00000112541_179 (sequence is synthesized)
ccatctccccacttctccagcttcttgaggccgtccgcactcctgggcttgtggtcctgctccatcttccaagccagcaacagcagattgagttcctctcacttagcatcaccctgaact

SEQ ID NO: 191742 - DNA, 120 bp, Artificial Sequence
  ENSG00000112541_180 (sequence is synthesized)
tcctctactgtagacaagtcttcctcttcctccctctgctgtctccacctttgtgattaccttgggcccccaagatcatccagggtagcctcccatctctagatccctaagtgaatcaat

SEQ ID NO: 191743 - DNA, 120 bp, Artificial Sequence
  ENSG00000112541_181 (sequence is synthesized)
cacatctgcaaagtctcctttgccatgtgaggtaacctagtcataggttccagagatttggatgtgaacatttttgttggggcatcattctgcccaaccacaagcatgtacccggcactc

SEQ ID NO: 191744 - DNA, 120 bp, Artificial Sequence
  ENSG00000112541_182 (sequence is synthesized)
accacatgtggcagttagttggtgtgtactttctctacctgtaaatccctggatggagaacatgattttttctctctacatctctttgcatttcatctggttcacttaacctgatcccca

SEQ ID NO: 191745 - DNA, 120 bp, Artificial Sequence
  ENSG00000112541_183 (sequence is synthesized)
cttagtctgtacagtgtggccgtaacagaatacctgagatggggtatttattttaaaaaaaataataggtgggtttaagtcacagttctgcagtctgggcagctcaaggccatggccctt

SEQ ID NO: 191746 - DNA, 120 bp, Artificial Sequence
  ENSG00000112541_184 (sequence is synthesized)
ggttctggcaaggcaagggcttttgtggtgctgcgtcataacatggcagagaaggtcaaagcgtaagtggacacgagcaaagagaagaccagaggggcctcctggctttgtaacaaacca

SEQ ID NO: 191747 - DNA, 120 bp, Artificial Sequence
  ENSG00000112541_185 (sequence is synthesized)
ctctcatgggactattccattccctggagaactaattcagtctttccagagtgagacctcactaccatgagaacagcaccaggccgttcatgagggatctgcatcagtgattccaacacc

SEQ ID NO: 191748 - DNA, 120 bp, Artificial Sequence
  ENSG00000112541_186 (sequence is synthesized)
tcccactaggccccaccacccaacactaccacattggagaccaaatttcatcatgggcttggtggggaaaagccaaccatacccacaccatagcaccagcctgggacccaaatgcaccaa

SEQ ID NO: 191749 - DNA, 120 bp, Artificial Sequence
  ENSG00000112541_187 (sequence is synthesized)
taaagggaatgagaaagcctagaactgaaccatccagcagtcagataccaaagagatccaaaaagttaaacaatcatgaagaaaaagcgttgagagggtgagacctcaggcaagttcaag

SEQ ID NO: 191750 - DNA, 120 bp, Artificial Sequence
  ENSG00000112541_188 (sequence is synthesized)
gccaacagctggcaccaatgtgggaagatgaagccttgcataaacataagcccaatcgttatttctcgtgtaaggacttgacaattagaaaaagtgcaaagatggtccaaacctcctaga

SEQ ID NO: 191751 - DNA, 120 bp, Artificial Sequence
  ENSG00000112541_189 (sequence is synthesized)
tgatgctttcttgcagggtgaactttggtaaacactgggggatggaggagagaggaatctgccttccaggcttgtcaggtttgctcttaatcatcctgagaacacagggtctaatggagc

SEQ ID NO: 191752 - DNA, 120 bp, Artificial Sequence
  ENSG00000112541_190 (sequence is synthesized)
atctgttggtcgtctgcatggctgtgatattttactttatcatttccacctaacacttttataagtatttttattctccataaaacaggcttttaagagcatttacaaattaatcacatt

SEQ ID NO: 191753 - DNA, 120 bp, Artificial Sequence
  ENSG00000112541_191 (sequence is synthesized)
aaagacttattatctgttctcttatgatacacctattttgatatggtgtgaagataattgttataatctctattaattacatactggcattcattaaatatgaaaatgttcaattgtttg

SEQ ID NO: 191754 - DNA, 120 bp, Artificial Sequence
  ENSG00000112559_0 (sequence is synthesized)
ggggctggagggagagaaggaagaaggaaggggcgaacggcgtgagctggcgccgaaatgggagaaagcagcgagtgagaggggaaggggcgccaggcgagcacccgggagccagcggga

SEQ ID NO: 191755 - DNA, 120 bp, Artificial Sequence
  ENSG00000112559_1 (sequence is synthesized)
cctgggcaggggcgcccggagcaggcgcgcatggcgggccccgcgcggggatccggctggaagagagcgtagcacggctcgcacgagtccggggccgatgtaccaggtgagcggccagcg

SEQ ID NO: 191756 - DNA, 120 bp, Artificial Sequence
  ENSG00000112559_2 (sequence is synthesized)
cccctctggctgcgacgcgccctatggagcccccagcgcagccccgggcccagcccagaccctatccctccttcctgggctggaggtagtaacaggatccactcaccctgcggaggcagc

SEQ ID NO: 191757 - DNA, 120 bp, Artificial Sequence
  ENSG00000112559_3 (sequence is synthesized)
accagaggagggctccctggaggaggcggcaacccccatgccccaaggcaatggccctggcatcccccagggcctggacagcactgacctcgacgtccccacagaagctgtgacatgcca

SEQ ID NO: 191758 - DNA, 120 bp, Artificial Sequence
  ENSG00000112559_4 (sequence is synthesized)
gcctcaggggaaccccttgggctgcaccccacttctgccgaatgactctggccacccctcagagctgggcggcaccagacgggcggggaatggtgccctgggtggccccaaggcccaccg

SEQ ID NO: 191759 - DNA, 120 bp, Artificial Sequence
  ENSG00000112559_5 (sequence is synthesized)
gaagttgcagacacacccatctctcgccagccagggcagcaagaagagtaagagcagcagcaaatccaccacctcccagatccccctccaggcacaggaagactgctgtgtccactgcat

SEQ ID NO: 191760 - DNA, 120 bp, Artificial Sequence
  ENSG00000112559_6 (sequence is synthesized)
ctgcagctcggaggactcgtgcctctgctgctgctgctgtggctctggcgagtgtgccgactgcgacctgccctgcgacctggactgcggcatcctggatgcctgctgcgagtccgcgga

SEQ ID NO: 191761 - DNA, 120 bp, Artificial Sequence
  ENSG00000112559_7 (sequence is synthesized)
ctgcctggagatctgcatggagtgctgtgggctctgcttctcctcctgagcctctgtcgggggctaagccagcctggcgcccctgcagattccagcagggtccctctgagtggggccagg

SEQ ID NO: 191762 - DNA, 120 bp, Artificial Sequence
  ENSG00000112559_8 (sequence is synthesized)
cccaggactgtcacacaaggcttgagaagccccctctccctggtcctctcctacccacccatgtcctctcagaaccccagccttgaaaatagtggggggcactcagaggggccacctcct

SEQ ID NO: 191763 - DNA, 120 bp, Artificial Sequence
  ENSG00000112559_9 (sequence is synthesized)
cagccgtgggtggtgggcccatggcagagaagcctgaactctttactgggttaccaggttcatacattgctgaggacctgacaggacaacctaggggcagggctggggtggggaccgcag

SEQ ID NO: 191764 - DNA, 120 bp, Artificial Sequence
  ENSG00000112559_10 (sequence is synthesized)
ggggcagccagggctggggaacactgtgaaagttacttggggagggtgggccggtggggccgtagctctctacctctccctgctcctggtgcctgcctctctcctccaccccaggcttag

SEQ ID NO: 191765 - DNA, 120 bp, Artificial Sequence
  ENSG00000112559_11 (sequence is synthesized)
aggacagaaaaatgtgaagagacgccccacccaccctcagccagccctctccagtctcctttcctaggcttttttgggggcctaacccacgcagtgaccccagagggcagggctaggcga

SEQ ID NO: 191766 - DNA, 120 bp, Artificial Sequence
  ENSG00000112559_12 (sequence is synthesized)
gagcctggggtggggcgggagggggaacagtatggaaaagactggaaggggaaaggaagggaagggagggagggtctgttctatctgttgctgtaaataaagatatttgtccatctcaga

SEQ ID NO: 191767 - DNA, 120 bp, Artificial Sequence
  ENSG00000112559_13 (sequence is synthesized)
ctcctggggcactaggacagacccccgcggctagcagcccggcctggggggcggaacactctcttcttgtcccgccccaccttcctccgggccgcaaccaccccagcccatcgctgggac

SEQ ID NO: 191768 - DNA, 120 bp, Artificial Sequence
  ENSG00000112559_14 (sequence is synthesized)
ggacgtggccgcgggtgccgagagcgctgccggcgccgtgggggccatcccggtcctggccccgacggcgccccaggacctgcgatagccgtccggggccgatgtaccaggtgagcggcc

SEQ ID NO: 191769 - DNA, 120 bp, Artificial Sequence
  ENSG00000112559_15 (sequence is synthesized)
gaggcctccaaagccgggttcctcgaagcatgacgcatgggcccactggagcaccttcaccaggctgttacttagagatgcaggatctcagcctccttccacgcctactggattggaatc

SEQ ID NO: 191770 - DNA, 120 bp, Artificial Sequence
  ENSG00000112559_16 (sequence is synthesized)
tctggtggagcttaacaagccctgcagggaacctgacgcatgaccaaatcttagaaccttgcaaagtacacccgttgggtaaaggtgtacctgccttctcaaggccacctccccacccca

SEQ ID NO: 191771 - DNA, 120 bp, Artificial Sequence
  ENSG00000112559_17 (sequence is synthesized)
gcacgagtgagtggacgtgggaggcgcgcatctgcgggggaatcgccccttgcccgcctccggcgccgcccgctgagccctgttttccgcaggtccggggccgatgtaccaggtgagcgg

SEQ ID NO: 191772 - DNA, 120 bp, Artificial Sequence
  ENSG00000112559_18 (sequence is synthesized)
aggacctgcgatagccaaacttttgcagagtttggacaggcaaaggaaaacgtgcagcccgcggatctccgggcctcagagagcagggagtcggggagactgaggccccgctccgagagc

SEQ ID NO: 191773 - DNA, 120 bp, Artificial Sequence
  ENSG00000112559_19 (sequence is synthesized)
cagccggcttcctgtgggggctcgggcctcgggcgccccgcggacagacgtgtccggctcctggctgggccaagcccggcgcgggggaggggacccgcagaggggcgactgagaaggtcc

SEQ ID NO: 191774 - DNA, 120 bp, Artificial Sequence
  ENSG00000112561_0 (sequence is synthesized)
ggccgggcgggcatgggccttcccggcccggagctgggagtcgaaggggcgggaggcgtgatggtgaactcgcaagaagtttgagggacgcgcgggccccgcgcccactccccctccacc

SEQ ID NO: 191775 - DNA, 120 bp, Artificial Sequence
  ENSG00000112561_1 (sequence is synthesized)
ggacacggctggggccggcgatgcctgagagggggtcggaggacgcagtgaacatatatgcatgtacagtgtggatcctcatctgagaggagggagatgaaaacacacccacctcacagg

SEQ ID NO: 191776 - DNA, 120 bp, Artificial Sequence
  ENSG00000112561_2 (sequence is synthesized)
ctgttgtgaggactaagggtgcggcagtgcctggtacatgggagccagcgccggcagccaccatggcgtcacgcatagggttgcgcatgcagctcatgcgggagcaggcgcagcaggagg

SEQ ID NO: 191777 - DNA, 120 bp, Artificial Sequence
  ENSG00000112561_3 (sequence is synthesized)
agcagcgggagcgcatgcagcaacaggctgtcatgcattacatgcagcagcagcagcagcagcaacagcagcagctcggagggccgcccaccccggccatcaatacccccgtccacttcc

SEQ ID NO: 191778 - DNA, 120 bp, Artificial Sequence
  ENSG00000112561_4 (sequence is synthesized)
agtcgccaccacctgtgcctggggaggtgttgaaggtgcagtcctacctggagaatcccacatcctaccatctgcagcagtcgcagcatcagaaggtgcgggagtacctgtccgagacct

SEQ ID NO: 191779 - DNA, 120 bp, Artificial Sequence
  ENSG00000112561_5 (sequence is synthesized)
atgggaacaagtttgctgcccacatcagcccagcccagggctctccgaaacccccaccagccgcctccccaggggtgcgagctggacacgtgctgtcctcctccgctggcaacagtgctc

SEQ ID NO: 191780 - DNA, 120 bp, Artificial Sequence
  ENSG00000112561_6 (sequence is synthesized)
ccaatagccccatggccatgctgcacattggctccaaccctgagagggagttggatgatgtcattgacaacattatgcgtctggacgatgtccttggctacatcaatcctgaaatgcaga

SEQ ID NO: 191781 - DNA, 120 bp, Artificial Sequence
  ENSG00000112561_7 (sequence is synthesized)
tgcccaacacgctacccctgtccagcagccacctgaatgtgtacagcagcgacccccaggtcacagcctccctggtgggcgtcaccagcagctcctgccctgcggacctgacccagaagc

SEQ ID NO: 191782 - DNA, 120 bp, Artificial Sequence
  ENSG00000112561_8 (sequence is synthesized)
gagagctcacagatgctgagagcagggccctggccaaggagcggcagaagaaagacaatcacaacttaattgaaaggagacgaaggttcaacatcaatgaccgcatcaaggagttgggaa

SEQ ID NO: 191783 - DNA, 120 bp, Artificial Sequence
  ENSG00000112561_9 (sequence is synthesized)
atccggaggatgcagaaggacctgcaaaagtccagggagctggagaaccactctcgccgcctggagatgaccaacaagcagctctggctccgtatccaggagctggagatgcaggctcga

SEQ ID NO: 191784 - DNA, 120 bp, Artificial Sequence
  ENSG00000112561_10 (sequence is synthesized)
gtgcacggcctccctaccacctccccgtccggcatgaacatggctgagctggcccagcaggtggtgaagcaggagctgcctagcgaagagggcccaggggaggccctgatgctgggggct

SEQ ID NO: 191785 - DNA, 120 bp, Artificial Sequence
  ENSG00000112561_11 (sequence is synthesized)
gaggtccctgaccctgagccactgccagctctgcccccgcaagccccgctgcccctgcccacccagccaccatccccattccatcacctggacttcagccacagcctgagctttgggggc

SEQ ID NO: 191786 - DNA, 120 bp, Artificial Sequence
  ENSG00000112561_12 (sequence is synthesized)
agggaggacgagggtcccccgggctaccccgaacccctggcgccggggcatggctccccattccccagcctgtccaagaaggatctggacctcatgctcctggacgactcactgctaccg

SEQ ID NO: 191787 - DNA, 120 bp, Artificial Sequence
  ENSG00000112561_13 (sequence is synthesized)
ctggcctctgatccacttctgtccaccatgtcccccgaggcctccaaggccagcagccgccggagcagcttcagcatggaggagggcgatgtgctgtgaccctggctgcccctgtgccag

SEQ ID NO: 191788 - DNA, 120 bp, Artificial Sequence
  ENSG00000112561_14 (sequence is synthesized)
ggaacaggggccggcctgggggctgggagggccaggggcacctccctcccacccttcaggctgcactgtgtgtgaagtagccacctgccctgcctccctcctccccgttggcccctgttt

SEQ ID NO: 191789 - DNA, 120 bp, Artificial Sequence
  ENSG00000112561_15 (sequence is synthesized)
ggacttagtgcctgtctggcagcctgtggggtcaggagaagcacccccagggcagccctcttgactggcgcagtgggaagaggccttcagcccctctcccggagatggaatcgcggggca

SEQ ID NO: 191790 - DNA, 120 bp, Artificial Sequence
  ENSG00000112561_16 (sequence is synthesized)
gggaggggcagggtgttctagaggtgagaagagggcctggtggagattccctgtcttctgagcccgagcccctcattaccagtgaaggacatgcttgaggggttcgggaagctcctcatc

SEQ ID NO: 191791 - DNA, 120 bp, Artificial Sequence
  ENSG00000112561_17 (sequence is synthesized)
tgaggcaactggtcctgggggtgctcaggcctgcctttttgggactcagatggcaggaggtccaccccgcagcctggtcctcggctctcccacaggtgggcaccccccactttggtgcta

SEQ ID NO: 191792 - DNA, 120 bp, Artificial Sequence
  ENSG00000112561_18 (sequence is synthesized)
atagctctccaccaggtggtgtgagcgcgggggctgccagaagcgggaggggtcactgccggaagagcagctgccctccgacccctcactttgtgcctttagtaaacactgtgctttgta

SEQ ID NO: 191793 - DNA, 120 bp, Artificial Sequence
  ENSG00000112561_19 (sequence is synthesized)
cctccctggtggcacggggccggagcaggccgggagcaggtggcgggcacagcttgcgggccaggcacccgaacttgcgacaagttgccggagccgcggggcgcgggcggcggacagatt

SEQ ID NO: 191794 - DNA, 120 bp, Artificial Sequence
  ENSG00000112561_20 (sequence is synthesized)
cgcgagcaggttcgcgccgcagccgcctggcgcgccccagccccgcgccccggggagccagcgccggcagccaccatggcgtcacgcatagggttgcgcatgcagctcatgcgggagcag

SEQ ID NO: 191795 - DNA, 120 bp, Artificial Sequence
  ENSG00000112561_21 (sequence is synthesized)
gaggcagaggcagaggaagggaagggtcagctgccttgaggtccctgcctgctaacctgacgggagccagcgccggcagccaccatggcgtcacgcatagggttgcgcatgcagctcatg

SEQ ID NO: 191796 - DNA, 120 bp, Artificial Sequence
  ENSG00000112561_22 (sequence is synthesized)
ggtgtgagctgacgagagcttcaggcctgcttgggattctggccccatgatttagggtttctttggagcccatctgagcctggggggccctgtggtggtggaagaggtccagcctgcggt

SEQ ID NO: 191797 - DNA, 120 bp, Artificial Sequence
  ENSG00000112561_23 (sequence is synthesized)
agctctggactctgcagaccttcaggttgaattgctgggtgaaagggcccaaggtgaattttgacactccaggtgtccccaggaaggactgctcctgggatgataggccctagagggggc

SEQ ID NO: 191798 - DNA, 120 bp, Artificial Sequence
  ENSG00000112561_24 (sequence is synthesized)
gaggagaaagtagagaatgatgcctccgcaccctgtgaacttccaacaagggaaggtgacatgaaaggagctcagacaatttctgtccagcaacatgacagcaagctcaggctgggagcc

SEQ ID NO: 191799 - DNA, 120 bp, Artificial Sequence
  ENSG00000112561_25 (sequence is synthesized)
ctgcaatgagtgaagaagacagaaccttcagttttggtccaggaaccaggaaacttggattcatgtctcagctgtcacccgcttgctcagtgaccttgggcaaatctcttcccctctcag

SEQ ID NO: 191800 - DNA, 120 bp, Artificial Sequence
  ENSG00000112561_26 (sequence is synthesized)
ggctcggtgtcttctcctctaaaatggatgcggtcccagtcattctggcctccccctgccagcccctgtgctttgaggaggacacgtgcctcatatacctgctgccccttctcatccaca

SEQ ID NO: 191801 - DNA, 120 bp, Artificial Sequence
  ENSG00000112561_27 (sequence is synthesized)
tgttgggtaggctgcggtgtgggactgtgccgtcggggcgcagttccctctgtgctgtgagtaatcctcggccgcatttgcagctcccaggggattgtgcaacttcctctccagctgagg

SEQ ID NO: 191802 - DNA, 120 bp, Artificial Sequence
  ENSG00000112561_28 (sequence is synthesized)
tgcagggggctgggtgagaaacagcagccgccggggaaatgaggaaactgagcccggccctggggctggggtgcggccctgggctccggcccctggaggagctgagcattccaggggcct

SEQ ID NO: 191803 - DNA, 120 bp, Artificial Sequence
  ENSG00000112561_29 (sequence is synthesized)
gcggagcttctgcactcaacttgagcgcagtttttggcttagagctcgctggggaagtgcagggagccagcgccggcagccaccatggcgtcacgcatagggttgcgcatgcagctcatg

SEQ ID NO: 191804 - DNA, 120 bp, Artificial Sequence
  ENSG00000112561_30 (sequence is synthesized)
ggtgtgagctgacgagagcttcaggtgggagcctctcccggcagtgaatctgagggttgggagggatttccggacccagagggaagatattttggggccgagggcctttccagaacccat

SEQ ID NO: 191805 - DNA, 120 bp, Artificial Sequence
  ENSG00000112561_31 (sequence is synthesized)
agatgcggatgcgctcggttagaacgcagttcttggtgccacgactgggagacagtcctcaggccctcccctcagggagctcactgtccggggagggacagccagcaatagttcctggcc

SEQ ID NO: 191806 - DNA, 120 bp, Artificial Sequence
  ENSG00000112561_32 (sequence is synthesized)
gcctggctcccttctctccgtctgcctcctggccgcggggcccggagagctgggagccagagggtgtaaatgaagggcagagctgtttgggtgactccatgctctgcttctccccgaggg

SEQ ID NO: 191807 - DNA, 120 bp, Artificial Sequence
  ENSG00000112561_33 (sequence is synthesized)
aagccaatggtgcttaccatttacaaggcttgttacagctgcagggttattttgtcctcaactcagctctgggagacggagccaaatggggacccaggtatcttggttccgggtgccctg

SEQ ID NO: 191808 - DNA, 120 bp, Artificial Sequence
  ENSG00000112561_34 (sequence is synthesized)
gaaggagttcaggggatagggcaggggacaccctaggtgggcactgaatctagggagagccaactgggcttttacgggctaatggcctggtgactcacagtcagaggtgggcagggagtg

SEQ ID NO: 191809 - DNA, 120 bp, Artificial Sequence
  ENSG00000112561_35 (sequence is synthesized)
ggccagggcaggcaggagcccttccagggtcccacgtgcgctgtcacaggcctcctcagcctgtttctggaaagctgagaagtaggtggaaggggactcccacccctcaagtctggctgc

SEQ ID NO: 191810 - DNA, 120 bp, Artificial Sequence
  ENSG00000112561_36 (sequence is synthesized)
cctttgagggtctagctcttggccctgagccctcctggggctctgtttatgactgtaattgcatcattagccagagttaatagagttacttagcacctgcccccacagggagtagcccag

SEQ ID NO: 191811 - DNA, 120 bp, Artificial Sequence
  ENSG00000112561_37 (sequence is synthesized)
ccaccccctgggttctgtctcttccttttcaaagtcaactcggtttctgcaggcaacaggggtttccccaaccacagctgtcatgaaaaccaggttgggcctttgtcctggggatggagg

SEQ ID NO: 191812 - DNA, 120 bp, Artificial Sequence
  ENSG00000112561_38 (sequence is synthesized)
gcagtcagcacttggggcctggcttggggctgccctggagatgaccatggaaattgggttggcctcctctgatcggagggtgggagttcagggttcccagagctgccagaaatgttcacg

SEQ ID NO: 191813 - DNA, 120 bp, Artificial Sequence
  ENSG00000112561_39 (sequence is synthesized)
actaggatgggaggagaattccttctagaagttcatctatttgagaaaagatctctccctctcccaaatcaggaaagaatcaggaaagctcaagacagatgagtttctgtcctggaagtg

SEQ ID NO: 191814 - DNA, 120 bp, Artificial Sequence
  ENSG00000112561_40 (sequence is synthesized)
aggctgaggtcaagggaggcttcttggaggagcagtcatgctgagaaagttttcttaaggccattgggctggcagacaagaggccgggctcacgcctataatcccagcactgtgggaagc

SEQ ID NO: 191815 - DNA, 87 bp, Artificial Sequence
  ENSG00000112561_41 (sequence is synthesized)
tgattgaactcaggaggtggaggtagcagtgagccgagatctcgctactgcactgcattccagcctgggcaacagaacgagactcca

SEQ ID NO: 191816 - DNA, 120 bp, Artificial Sequence
  ENSG00000112562_0 (sequence is synthesized)
gggtatttgacaggagcgagggcggacgcaaagaacgcggaggacctctgggtgcctgcaggggagctgctccagccgggccgccgggagcggtggggagagcatcgcggagccgcccct

SEQ ID NO: 191817 - DNA, 120 bp, Artificial Sequence
  ENSG00000112562_1 (sequence is synthesized)
ccacgcgcccgcccagccgcgctcgcccactgggctctcccggctgcagtgccagggcgcaggacgcggccgatctcccgctcccgccacctccgccaccatgctgctcccccagctctg

SEQ ID NO: 191818 - DNA, 120 bp, Artificial Sequence
  ENSG00000112562_2 (sequence is synthesized)
ctggctgccgctgctcgctgggctgctcccgccggtgcccgctcagaagttctcggcgctcacgtttttgagagtggatcaagataaagacaaggattgtagcttggactgtgcgggttc

SEQ ID NO: 191819 - DNA, 120 bp, Artificial Sequence
  ENSG00000112562_3 (sequence is synthesized)
gccccagaaacctctctgcgcatctgacggaaggaccttcctttcccgttgtgaatttcaacgtgccaagtgcaaagatccccagctagagattgcatatcgaggaaactgcaaagacgt

SEQ ID NO: 191820 - DNA, 120 bp, Artificial Sequence
  ENSG00000112562_4 (sequence is synthesized)
gtccaggtgtgtggccgaaaggaagtatacccaggagcaagcccggaaggagtttcagcaagtgttcattcctgagtgcaatgacgacggcacctacagtcaggtccagtgtcacagcta

SEQ ID NO: 191821 - DNA, 120 bp, Artificial Sequence
  ENSG00000112562_5 (sequence is synthesized)
cacgggatactgctggtgcgtcacgcccaacgggaggcccatcagcggcactgccgtggcccacaagacgccccggtgcccgggttccgtaaatgaaaagttaccccaacgcgaaggcac

SEQ ID NO: 191822 - DNA, 120 bp, Artificial Sequence
  ENSG00000112562_6 (sequence is synthesized)
aggaaaaacagtctccttgcaaatcttttccgttctgaattcagatgatgccgcagctccagcgttggagactcagcctcaaggagatgaagaagatattgcatcacgttaccctaccct

SEQ ID NO: 191823 - DNA, 120 bp, Artificial Sequence
  ENSG00000112562_7 (sequence is synthesized)
ttggactgaacaggttaaaagtcggcagaacaaaaccaataagaattcagtgtcatcctgtgaccaagagcaccagtctgccctggaggaagccaagcagcccaagaacgacaatgtggt

SEQ ID NO: 191824 - DNA, 120 bp, Artificial Sequence
  ENSG00000112562_8 (sequence is synthesized)
gatccctgagtgtgcgcacggcggcctctacaagccagtgcagtgccacccctccacggggtactgctggtgcgtcctggtggacacggggcgccccattcccggcacatccacaaggta

SEQ ID NO: 191825 - DNA, 120 bp, Artificial Sequence
  ENSG00000112562_9 (sequence is synthesized)
cgagcagccgaaatgtgacaacacggccagggcccacccagccaaagcccgggacctgtacaagggccgccagctacaaggttgtccgggtgccaaaaagcatgagtttctgaccagcgt

SEQ ID NO: 191826 - DNA, 120 bp, Artificial Sequence
  ENSG00000112562_10 (sequence is synthesized)
tctggacgcgctgtccacggacatggtccacgccgcctccgacccctcctcctcgtcaggcaggctctcagaacccgaccccagccataccctagaggagcgggtggtgcactggtactt

SEQ ID NO: 191827 - DNA, 120 bp, Artificial Sequence
  ENSG00000112562_11 (sequence is synthesized)
caaactactggataaaaactccagtggagacatcggcaaaaaggaaatcaaacccttcaagaggttccttcgcaaaaaatcaaagcccaaaaaatgtgtgaagaagtttgttgaatactg

SEQ ID NO: 191828 - DNA, 120 bp, Artificial Sequence
  ENSG00000112562_12 (sequence is synthesized)
tgacgtgaataatgacaaatccatctccgtacaagaactgatgggctgcctgggcgtggcgaaagaggacggcaaagcggacaccaagaaacgccacacccccagaggtcatgctgaaag

SEQ ID NO: 191829 - DNA, 120 bp, Artificial Sequence
  ENSG00000112562_13 (sequence is synthesized)
ataaatggctcataccccgaaggcagttcctagacacatgggaaatttccctcaccaaagagcaattaagaaaacaaaaacagaaacacatagtatttgcactttgtactttaaatgtaa

SEQ ID NO: 191830 - DNA, 120 bp, Artificial Sequence
  ENSG00000112562_14 (sequence is synthesized)
attcactttgtagaaatgagctatttaaacagactgttttaatctgtgaaaatggagagctggcttcagaaaattaatcacatacaatgtatgtgtcctcttttgaccttggaaatctgt

SEQ ID NO: 191831 - DNA, 120 bp, Artificial Sequence
  ENSG00000112562_15 (sequence is synthesized)
atgtggtggagaagtatttgaatgcatttaggcttaatttcttcgccttccacatgttaacagtagagctctatgcactccggctgcaatcgtatggctttctctaacccctgcagtcac

SEQ ID NO: 191832 - DNA, 120 bp, Artificial Sequence
  ENSG00000112562_16 (sequence is synthesized)
ttccagatgcctgtgcttacagcattgtggaatcatgttggaagctccacatgtccatggaagtttgtgatgtacggccgaccctacaggcagttaacatgcatgggctggtttgtttct

SEQ ID NO: 191833 - DNA, 120 bp, Artificial Sequence
  ENSG00000112562_17 (sequence is synthesized)
tgggattttctgttagtttgtcttgttttgctttccagagatcttgctcatacaatgaatcacgcaaccactaaagctatccagttaagtgcaggtagttcccctggaggaaataatatt

SEQ ID NO: 191834 - DNA, 120 bp, Artificial Sequence
  ENSG00000112562_18 (sequence is synthesized)
ttcaaactgtcgttggtgtgatactttggctcaaaggatctttgcttttccattttaagcttctgttttgagttttgccctggggcttgaatgagtcccagagagtcgttcggatggtgg

SEQ ID NO: 191835 - DNA, 120 bp, Artificial Sequence
  ENSG00000112562_19 (sequence is synthesized)
gaggctgcctaggaggcagtaaatccagtcacagtgcctgggaggggcccatccttccaaaatgtaaatccagtcgcggtgtgaccgagctggctaacaggcttgtctgcctggttttcc

SEQ ID NO: 191836 - DNA, 120 bp, Artificial Sequence
  ENSG00000112562_20 (sequence is synthesized)
tcctacacgtggacattattctcctgatcctcctacctggtccaccccagggctaccggaaggtaaaatcttcacctgaaccaattatgagcagtctccttactgaaggtacagccggat

SEQ ID NO: 191837 - DNA, 120 bp, Artificial Sequence
  ENSG00000112562_21 (sequence is synthesized)
acgtggtgcccccggggctggtgttggcagccggggggaggtgcctgagggtccccacggttcctttctgcttttctgaatgcatcaagggtacgagaacttgccaatgggaaattcatc

SEQ ID NO: 191838 - DNA, 120 bp, Artificial Sequence
  ENSG00000112562_22 (sequence is synthesized)
cgagtggcactggcagagaaggataggagtggaatgcccacacagtgaccaacagaactggtctgcgtgcataaccagctgccaccctcaggcctgggccccagagctcagggcacccag

SEQ ID NO: 191839 - DNA, 120 bp, Artificial Sequence
  ENSG00000112562_23 (sequence is synthesized)
tgtcttaaggaaccatttggaggacagtctgagagcaggaacttcaagctgtgattctatctcggctcagacttttggttggaaaaagatcttcatggccccaaatcccctgagacatgc

SEQ ID NO: 191840 - DNA, 120 bp, Artificial Sequence
  ENSG00000112562_24 (sequence is synthesized)
cttgtagaatgattttgtgatgttgtgatgcttgtggagcatcgcgtaaggcttcttgcttatttaaactgtgcaaggtaaaaatcaagcctttggagccacagaaccagctcaagtaca

SEQ ID NO: 191841 - DNA, 120 bp, Artificial Sequence
  ENSG00000112562_25 (sequence is synthesized)
tgccaatgttgtttaagaaacagttatgatcctaaactttttggataatcttttatatttctgacctttgaatttaatcattgttcttagattaaaataaaatatgctattgaaactata

SEQ ID NO: 191842 - DNA, 120 bp, Artificial Sequence
  ENSG00000112562_26 (sequence is synthesized)
gctgccgcgagtcaatttgtgatttattttgtctgcacctgtttgatgccaggtcgacatttcctaaggcaagcccctgtatttgttgtggatttaagtggaggcggccagcacacacct

SEQ ID NO: 191843 - DNA, 120 bp, Artificial Sequence
  ENSG00000112562_27 (sequence is synthesized)
tggatgtaatttaaaaccatttcctgaggaaagatgtgtgatatgctttcctttgtttagcaaatgtttatggttttaactttaaatctcaccgcaaatcacttacacttgaaaacaggg

SEQ ID NO: 191844 - DNA, 120 bp, Artificial Sequence
  ENSG00000112562_28 (sequence is synthesized)
ctggtctgaaagtaattaccctccctgagtgccaagacctccagaagttgttttcattcccgaatggcaatcactgtactcatgcgctccacgcatcttaaataaactcagttcaaagca

SEQ ID NO: 191845 - DNA, 120 bp, Artificial Sequence
  ENSG00000112562_29 (sequence is synthesized)
caaagcggacaccaagaaacgccacacccccagaggtcatgctgaaagtacgtctaatagacagctactgtggttgagaggaaaggtgtctttttattgcttctagagacgttgaaagtg

SEQ ID NO: 191846 - DNA, 120 bp, Artificial Sequence
  ENSG00000112562_30 (sequence is synthesized)
acctgagcacctcataatcatgtgaaaaagacactcaaaaactaccatttgaatggatggatgaaaataacctccgtatattctacgaagatgtttaataataaataggtttcgttataa

SEQ ID NO: 191847 - DNA, 120 bp, Artificial Sequence
  ENSG00000112562_31 (sequence is synthesized)
gagaatgtgtgtcacttcgtctcttccctcacccccgagacttagtgacagttatttttgacttttccaactatactatttgcctagaaaatgtgtctattaaatagcgtattgagaaat

SEQ ID NO: 191848 - DNA, 80 bp, Artificial Sequence
  ENSG00000112576_0 (sequence is synthesized)
attccacggttgctacatcgtcgcgaggggcggggcgcctgtcagggaagcggcgcgcgcgcgcgggcggcgggcgggct

SEQ ID NO: 191849 - DNA, 120 bp, Artificial Sequence
  ENSG00000112576_1 (sequence is synthesized)
cgccccgcgctctccggcccgtcgcctgccttgggactcgcgagcccgcactcccgccctgcctgttcgctgcccgagtatggagctgctgtgttgcgaaggcacccggcacgcgccccg

SEQ ID NO: 191850 - DNA, 120 bp, Artificial Sequence
  ENSG00000112576_2 (sequence is synthesized)
ggccgggccggacccgcggctgctgggggaccagcgtgtcctgcagagcctgctccgcctggaggagcgctacgtaccccgcgcctcctacttccagtgcgtgcagcgggagatcaagcc

SEQ ID NO: 191851 - DNA, 120 bp, Artificial Sequence
  ENSG00000112576_3 (sequence is synthesized)
gcacatgcggaagatgctggcttactggatgctggaggtatgtgaggagcagcgctgtgaggaggaagtcttccccctggccatgaactacctggatcgctacctgtcttgcgtccccac

SEQ ID NO: 191852 - DNA, 120 bp, Artificial Sequence
  ENSG00000112576_4 (sequence is synthesized)
ccgaaaggcgcagttgcagctcctgggtgcggtctgcatgctgctggcctccaagctgcgcgagaccacgcccctgaccatcgaaaaactgtgcatctacaccgaccacgctgtctctcc

SEQ ID NO: 191853 - DNA, 120 bp, Artificial Sequence
  ENSG00000112576_5 (sequence is synthesized)
ccgccagttgcgggactgggaggtgctggtcctagggaagctcaagtgggacctggctgctgtgattgcacatgatttcctggccttcattctgcaccggctctctctgccccgtgaccg

SEQ ID NO: 191854 - DNA, 120 bp, Artificial Sequence
  ENSG00000112576_6 (sequence is synthesized)
acaggccttggtcaaaaagcatgcccagacctttttggccctctgtgctacagattatacctttgccatgtacccgccatccatgatcgccacgggcagcattggggctgcagtgcaagg

SEQ ID NO: 191855 - DNA, 120 bp, Artificial Sequence
  ENSG00000112576_7 (sequence is synthesized)
cctgggtgcctgctccatgtccggggatgagctcacagagctgctggcagggatcactggcactgaagtggactgcctgcgggcctgtcaggagcagatcgaagctgcactcagggagag

SEQ ID NO: 191856 - DNA, 120 bp, Artificial Sequence
  ENSG00000112576_8 (sequence is synthesized)
cccccggggctccagcagccaagggcccagccagaccagcactcctacagatgtcacagccatacacctgtagccctggagaggccctctggagtggccactaagcagaggaggggccgc

SEQ ID NO: 191857 - DNA, 120 bp, Artificial Sequence
  ENSG00000112576_9 (sequence is synthesized)
tgccacccacctccctgcctccaggaaccacaccacatctaagcctgaaggggcgtctgttcccccttcacaaagcccaagggatctggtcctacccatccccgcagtgtgcactaaggg

SEQ ID NO: 191858 - DNA, 120 bp, Artificial Sequence
  ENSG00000112576_10 (sequence is synthesized)
gcccggccagccatgtctgcatttcggtggctagtcaagctcctcctccctgcatctgaccagcagcgcctttcccaactctagctgggggtgggccaggctgatgggacagaattggat

SEQ ID NO: 191859 - DNA, 120 bp, Artificial Sequence
  ENSG00000112576_11 (sequence is synthesized)
acatacaccagcattccttttgaacgcccccccccacccctgggggctctcatgttttcaactgccaaaatgctctagtgccttctaaaggtgttgtcccttctagggttattgcatttg

SEQ ID NO: 191860 - DNA, 120 bp, Artificial Sequence
  ENSG00000112576_12 (sequence is synthesized)
gattggggtccctctaaaatttaatgcatgatagacacatatgagggggaatagtctagatggctcctctcagtactttggaggcccctatgtagtccgtgctgacagctgctcctagag

SEQ ID NO: 191861 - DNA, 120 bp, Artificial Sequence
  ENSG00000112576_13 (sequence is synthesized)
ggaggggcctaggcctcagccagagaagctataaattcctctttgctttgctttctgctcagcttctcctgtgtgattgacagctttgctgctgaaggctcattttaatttattaattgc

SEQ ID NO: 191862 - DNA, 120 bp, Artificial Sequence
  ENSG00000112576_14 (sequence is synthesized)
tttgagcacaactttaagaggacataatggggtcctggccatcccacaagtggtggtaaccctggtggttgctgttttcctcccttctgctactggcaaaaggatctttgtggccaagga

SEQ ID NO: 191863 - DNA, 120 bp, Artificial Sequence
  ENSG00000112576_15 (sequence is synthesized)
gctgctatagcctggggtggggtcatgccctcctctcccattgtccctctgccccatcctccagcagggaaaatgcagcagggatgccctggaggtggctgagcccctgtctagagaggg

SEQ ID NO: 191864 - DNA, 120 bp, Artificial Sequence
  ENSG00000112576_16 (sequence is synthesized)
aggcaagccctgttgacacaggtctttcctaaggctgcaaggtttaggctggtggcccaggaccatcatcctactgtaataaagatgattgtgaaataaaactggctttggcttcttgga

SEQ ID NO: 191865 - DNA, 120 bp, Artificial Sequence
  ENSG00000112576_17 (sequence is synthesized)
gcggcgcggactttgtaaacacttcgccactgcaggggtggagactggctctgttcggatgccggccgggggggagaggtgcaatcctctcctcgcggctggtggttgcgaccaccccca

SEQ ID NO: 191866 - DNA, 120 bp, Artificial Sequence
  ENSG00000112576_18 (sequence is synthesized)
ccagacctttttggccctctgtgctacaggtaagagccctatgcacatttttgccaaattggaaaaatcagaagacttataagggtgagaggtaactgaagattctggtttatactgtca

SEQ ID NO: 191867 - DNA, 120 bp, Artificial Sequence
  ENSG00000112576_19 (sequence is synthesized)
aaattcctttgtgaaaattataccccctctgagcccccagtctcaatgcagaaaagcaggttataatcagctatatgggatctcagacccctccagtttgtagtggggacactgagggta

SEQ ID NO: 191868 - DNA, 120 bp, Artificial Sequence
  ENSG00000112576_20 (sequence is synthesized)
tagagagaagtgacttgcccaaggtctcacagtgaacaggttgggaacagaaccccagtctcttggccctagttgtgttcccatactagggagtgtcttgtctattcccgggacctatgg

SEQ ID NO: 191869 - DNA, 120 bp, Artificial Sequence
  ENSG00000112576_21 (sequence is synthesized)
aaactggcagttggttctgatctctaggaaagatactctttcctgtcttcctcccttgctgatatcttgccccacccactgctggagttttccagcatgtcctctgctctactcatgctg

SEQ ID NO: 191870 - DNA, 120 bp, Artificial Sequence
  ENSG00000112576_22 (sequence is synthesized)
acctatgccgcgtggggcgggggctgcgggcgggggtgcgcggcgccggatgagcctcctggcctcgccgagggtgtacagggggtgggagagtcaggccggggaccgaaacttggctga

SEQ ID NO: 191871 - DNA, 120 bp, Artificial Sequence
  ENSG00000112576_23 (sequence is synthesized)
cggaggcggcgggacagagcgcctgcgaccccagtcggtgctccggggaggtcacctgacgaggagctccaacctgagcggcaagacccagatggacatgggcacctaggggctttgggg

SEQ ID NO: 191872 - DNA, 120 bp, Artificial Sequence
  ENSG00000112576_24 (sequence is synthesized)
tgacgaggagttgttcttacagattcaagaatcacttttgaaagccttcattggatccttgtgaaatgaccgattgactgcttggatgaactcctgaagtgtttctatggaggacagacc

SEQ ID NO: 191873 - DNA, 120 bp, Artificial Sequence
  ENSG00000112576_25 (sequence is synthesized)
aagaggaaacttaatatttcctctcaattttcctgtgaaactaaaactgtgctaaaaaacagtctatttagaaaaaaagaagaagatagttgcctatagaggaactaaagaatgttgtgg

SEQ ID NO: 191874 - DNA, 120 bp, Artificial Sequence
  ENSG00000112576_26 (sequence is synthesized)
acttccagtgcgtgcagcgggagatcaagccgcacatgcggaagatgctggcttactggatgctggaggtaccgcccggacgcgtccccctcccccaccgctcccgggtctggacacacc

SEQ ID NO: 191875 - DNA, 120 bp, Artificial Sequence
  ENSG00000112576_27 (sequence is synthesized)
ggggccgccctgtcgggacatcccggtccccacagcaatctgcaggatgctccgaggctaagactcccggggcctggcctttcactagggcacccacgccagctgcctcccttgctttcc

SEQ ID NO: 191876 - DNA, 120 bp, Artificial Sequence
  ENSG00000112576_28 (sequence is synthesized)
cgagccctaatcggctcctcccgacagtgactgccagtcacttggcaccctaactgtgcctctcttcgggccgagcaaacgggaccaaggacactctctccccttcggcttctcacagcg

SEQ ID NO: 191877 - DNA, 120 bp, Artificial Sequence
  ENSG00000112576_29 (sequence is synthesized)
tctcccgcttccctccgcctcccggccttctccggagagcgcgcctggaaaaccctgggctcggccgcccccgcccgggagccggttcctgtgtctttcgcggggttctggcggggaagg

SEQ ID NO: 191878 - DNA, 120 bp, Artificial Sequence
  ENSG00000112576_30 (sequence is synthesized)
cgatgggggtggcgcgcgccctgttccggccgacagggaaatgaaaagtgcaggaggcagcggcaggagcctcctcccttcccctcgggtatgtgaggagcagcgctgtgaggaggaagt

SEQ ID NO: 191879 - DNA, 120 bp, Artificial Sequence
  ENSG00000112576_31 (sequence is synthesized)
tttattggtccttgtctctctaagtagcttaccctctctgccgtttttgctccctatcccacctcacttcagcgctcccacccccccgctgctgtgttccccacgctccagacccagcag

SEQ ID NO: 191880 - DNA, 120 bp, Artificial Sequence
  ENSG00000112576_32 (sequence is synthesized)
agtcggtgctccggggaggtcacctgacgaggaggtaggcttgggtgctggagaaaccggggtagatgggatgtcagctcaggctggagaccatgcgttggggatcggtgctgggtgggt

SEQ ID NO: 191881 - DNA, 120 bp, Artificial Sequence
  ENSG00000112576_33 (sequence is synthesized)
caatggggtcgccgcatcctcatcacttcctagttggcaccgaaagcttggctcactttcccactgagtgaggtgttctgcacggaattgaagggcagagaaacccccaaaggccctgag

SEQ ID NO: 191882 - DNA, 120 bp, Artificial Sequence
  ENSG00000112576_34 (sequence is synthesized)
ggctttaccgggctgttggtcttctcatgcctcaaagatggggtggaaggccagtaggagggcagaccagtgtggatggggagtctgtgagtgctctggcaagtgcaccgggatgaaact

SEQ ID NO: 191883 - DNA, 120 bp, Artificial Sequence
  ENSG00000112576_35 (sequence is synthesized)
ggagggagggacccctcagtggtgtctgattgatacatagatgatgatcttagcttcttctgtgtctcttgaagtgccaacaagaggaataactgaataaattggttgctgttactaagg

SEQ ID NO: 191884 - DNA, 120 bp, Artificial Sequence
  ENSG00000112576_36 (sequence is synthesized)
gatgagctcacagagctgctggcagggatcactggcactgaagtggtgagtgctgggtagctgggcagcagcctctccattcataaagtagtgctatgccctgagcctccagtagaggga

SEQ ID NO: 191885 - DNA, 82 bp, Artificial Sequence
  ENSG00000112576_37 (sequence is synthesized)
ctccggagtagctgggattacaggcgggcaccaccacgccccgctagtttttgtatttttagtagagaccaagctcaagcag

SEQ ID NO: 191886 - DNA, 120 bp, Artificial Sequence
  ENSG00000112576_38 (sequence is synthesized)
tgagctaccgcgccagcctcacgtgaccttttgagagtgaagtgttctggggccttcagtggcttggttgtgggccaggaaaacgcgcccggtttcactgagttaaaagaaacctatttt

SEQ ID NO: 191887 - DNA, 120 bp, Artificial Sequence
  ENSG00000112576_39 (sequence is synthesized)
aatatgaaaatcggttcttataaagagcataccaggagatcatctacactcgcagggttttccaaacttgtcttattattagtaacacctggctgggcccagcccaatcccagtgacttc

SEQ ID NO: 191888 - DNA, 120 bp, Artificial Sequence
  ENSG00000112576_40 (sequence is synthesized)
actctctggaagaggggcttgggaatctttctcattaaggagctccccagatgattcttctgagcgagtaatgttgggaaaccctggagcatccagcctggtgattttgtgctgagggcc

SEQ ID NO: 191889 - DNA, 120 bp, Artificial Sequence
  ENSG00000112576_41 (sequence is synthesized)
gccccgcctgtcaatggcccacttggaagtagagcctggaccacctagtccaagtctatcgctgcatcctgctgccttcgcgccctcgacccgcaagtatttgcgaggtatgtgaggagc

SEQ ID NO: 191890 - DNA, 120 bp, Artificial Sequence
  ENSG00000112576_42 (sequence is synthesized)
gctttgtggctttttatctcctgccttggtctggggaagagcaagtatcttgggtggggtgaagggcactggccctaggggttcttttcttgccaagtggtgtgctggagtgggggtggg

SEQ ID NO: 191891 - DNA, 120 bp, Artificial Sequence
  ENSG00000112576_43 (sequence is synthesized)
gggtttggtgtcagatgcagggctgctctcacactcccttgccacatcctcttgctagtttctgagaactaaagagcgattcctggggccgggctgtggcctaacctccccagacttccc

SEQ ID NO: 191892 - DNA, 120 bp, Artificial Sequence
  ENSG00000112578_0 (sequence is synthesized)
aagcgcatcctggcctttcttcagtccccacgtgcgatccttcccggcaactttttcgagaaaaatgcccaaattcaaggcggcccgtggggtggggggtcaggaaaaacatgcgcccct

SEQ ID NO: 191893 - DNA, 120 bp, Artificial Sequence
  ENSG00000112578_1 (sequence is synthesized)
ggccgatcagatcctggctgggaatgcggtgcgggcgggggtccgggagaagcggcggggtcgcgggacaggagaagcggaggaagagtatgtggggccccggctgagccgacggatttt

SEQ ID NO: 191894 - DNA, 120 bp, Artificial Sequence
  ENSG00000112578_2 (sequence is synthesized)
gcagcaagcacggcagcaacaggaggaactcgaggccgagcatgggactggggacaagcccgcggcgccgcgggaacgcaccacgcggctgggtccaagaatgcctcaggatggatcaga

SEQ ID NO: 191895 - DNA, 120 bp, Artificial Sequence
  ENSG00000112578_3 (sequence is synthesized)
tgacgaggacgaggagtggcccaccctggagaaggctgccacaatgacagcagcgggccatcatgcagaggtggttgtggaccctgaggatgagcgtgccatagagatgttcatgaacaa

SEQ ID NO: 191896 - DNA, 120 bp, Artificial Sequence
  ENSG00000112578_4 (sequence is synthesized)
gaaccctcctgccaggcgcaccctggctgacatcatcatggagaagctgactgagaagcagacagaggttgagacagtcatgtcagaggtgtcgggcttccctatgccccagctggaccc

SEQ ID NO: 191897 - DNA, 120 bp, Artificial Sequence
  ENSG00000112578_5 (sequence is synthesized)
ccgggtcctagaagtgtacaggggggtccgggaggtattatctaagtaccgcagtggaaaactgcccaaggcatttaagatcatccctgcactctccaactgggagcaaatcctctacgt

SEQ ID NO: 191898 - DNA, 120 bp, Artificial Sequence
  ENSG00000112578_6 (sequence is synthesized)
cacagagccggaggcctggactgcagctgccatgtaccaggccaccaggatttttgcctctaacctgaaggaacgcatggcccagcgcttctacaaccttgtcctgctccctcgagtacg

SEQ ID NO: 191899 - DNA, 120 bp, Artificial Sequence
  ENSG00000112578_7 (sequence is synthesized)
tctacatggctctcaagaaggcccttttcaaacctggagcctggttcaaagggatcctgattccactgtgcgagtctggcacttgtaccctccgggaagccatcattgtgggtagcatca

SEQ ID NO: 191900 - DNA, 120 bp, Artificial Sequence
  ENSG00000112578_8 (sequence is synthesized)
tcaccaagtgctccatccctgtgttgcactccagtgcggccatgctgaaaattgctgagatggaatacagcggtgccaacagcatcttcctgcgactgctgctggataagaagtatgcac

SEQ ID NO: 191901 - DNA, 120 bp, Artificial Sequence
  ENSG00000112578_9 (sequence is synthesized)
tgccttaccgggtgctggatgccctagtcttccacttcctggggttccggacagagaagcgtgaactgcctgtgctgtggcaccagtgcctcctgactttggtccagcgctacaaggccg

SEQ ID NO: 191902 - DNA, 120 bp, Artificial Sequence
  ENSG00000112578_10 (sequence is synthesized)
acttggccacagaccagaaagaggccctcttagaactgctccggctgcagccccatccacagctatcgcccgaaatcaggcgtgagcttcagagtgcagtcccccgcgatgtggaagatg

SEQ ID NO: 191903 - DNA, 120 bp, Artificial Sequence
  ENSG00000112578_11 (sequence is synthesized)
ttcccatcaccgtggagtgaggaaaacagtcagctgtcctggccaaaggggtttggaaggacaccaagacccccgttggtgactgaagatgacactgagctttaatggctgaagacccag

SEQ ID NO: 191904 - DNA, 120 bp, Artificial Sequence
  ENSG00000112578_12 (sequence is synthesized)
atcagggcagtgacagatcacagggacatctgtggctcccagtccaggacaggaaggactgagggtctggctggttccctcttccattctaggcccttatccctgtttagttctgagagc

SEQ ID NO: 191905 - DNA, 120 bp, Artificial Sequence
  ENSG00000112578_13 (sequence is synthesized)
caacttgagataccatatgctagcattcccagtccccagctggggcttggtgtgagtactttttctatggctattgtgtcaggtcactgtggataaaggcaaagacagatatttattgaa

SEQ ID NO: 191906 - DNA, 120 bp, Artificial Sequence
  ENSG00000112578_14 (sequence is synthesized)
cgggtcctagaagtgtacaggggggtccgggaggtaagagctgagaggggagccatggtggaagacccctttgggggctgtgggctcctgccacaggcttttttgccttttgcctgcatc

SEQ ID NO: 191907 - DNA, 120 bp, Artificial Sequence
  ENSG00000112578_15 (sequence is synthesized)
ccatctctacatggctctcaagaaggcccttttcaaacctggagcctggttcaaagtggctgccctttgactctccctagggatcctgattccactgtgcgagtctggcacttgtaccct

SEQ ID NO: 191908 - DNA, 120 bp, Artificial Sequence
  ENSG00000112578_16 (sequence is synthesized)
ccctcctgccaggtaggcctggggatttgggataatgagtccttgtagaaagttcccacaggaaaacaagttccctggcagacttatgattccctacctttggaaagggccctggagttg

SEQ ID NO: 191909 - DNA, 120 bp, Artificial Sequence
  ENSG00000112584_0 (sequence is synthesized)
gtgaacgaggcggctgtggcggtggctgaggcggctgggcctagggtgcagcgggcgcgtctgcggctggtgttggcgcatctctagatcctttcccggagttcagttatgggtgtgaga

SEQ ID NO: 191910 - DNA, 120 bp, Artificial Sequence
  ENSG00000112584_1 (sequence is synthesized)
ggtttgcaaggatttgtgggaagtacctgcccacatatatgtacagtagtaaatttcaaagaactggcagagcaccaccgaagcaagtatcctggatgtacccctaccattgtggttgat

SEQ ID NO: 191911 - DNA, 120 bp, Artificial Sequence
  ENSG00000112584_2 (sequence is synthesized)
gccatgtgttgtctcagatattggtatactccagaatcttggatctgcggtggccagtggcgagaatacttttctgctttgcgagattttgttaaaacttttacggcagctgggatcaag

SEQ ID NO: 191912 - DNA, 120 bp, Artificial Sequence
  ENSG00000112584_3 (sequence is synthesized)
ttgatattcttctttgatggcatggtggagcaggataagagagatgaatgggtgaaacgaaggctcaagaacaacagggagatatccaggatttttcattacatcaagtcacacaaggag

SEQ ID NO: 191913 - DNA, 120 bp, Artificial Sequence
  ENSG00000112584_4 (sequence is synthesized)
cagccaggcagaaatatgttcttcatcccctcagggctagctgtgtttacacgatttgctctaaagacactgggccaggaaactttgtgttctttgcaggaagcagattatgaggtagct

SEQ ID NO: 191914 - DNA, 120 bp, Artificial Sequence
  ENSG00000112584_5 (sequence is synthesized)
tcctatggcctccagcataactgtcttgggattctgggggaagacactgattacctaatctatgacacttgtccctacttttcaattagcgagctctgcctagagagcctggacaccgtc

SEQ ID NO: 191915 - DNA, 120 bp, Artificial Sequence
  ENSG00000112584_6 (sequence is synthesized)
atgctctgcagagagaagctctgtgagagtctgggcctctgtgtggccgaccttcctcttctggcctgcctccttggcaacgacataatcccagagggcatgtttgaaagctttaggtac

SEQ ID NO: 191916 - DNA, 120 bp, Artificial Sequence
  ENSG00000112584_7 (sequence is synthesized)
aaatgcttatcgtcctacacctctgtaaaagagaactttgacaaaaaaggtaacatcatattagctgtgtcagaccatatatcgaaagttctttacttgtatcaaggtgagaaaaaatta

SEQ ID NO: 191917 - DNA, 120 bp, Artificial Sequence
  ENSG00000112584_8 (sequence is synthesized)
gaagagatattacctctgggaccaaacaaagctcttttttataaaggaatggcatcatatcttttaccaggacaaaaatctccatggtttttccaaaaacccaaaggtgtaataactttg

SEQ ID NO: 191918 - DNA, 120 bp, Artificial Sequence
  ENSG00000112584_9 (sequence is synthesized)
gacaaacaagtaatatccacgagttcagacgccgaatccagggaagaagttcccatgtgttcagatgctgaatccaggcaagaagttcccatgtgtacaggccctgaatccaggcgagaa

SEQ ID NO: 191919 - DNA, 120 bp, Artificial Sequence
  ENSG00000112584_10 (sequence is synthesized)
gttcccgtgtatacagattctgaacccaggcaagaagttcccatgtgttcagaccctgaacccaggcaagaagttcccacgtgtacaggccctgaatccaggcgagaagttcccatgtgt

SEQ ID NO: 191920 - DNA, 120 bp, Artificial Sequence
  ENSG00000112584_11 (sequence is synthesized)
tcagaccctgaacccaggcaagaagttcccatgtgtacaggccctgaagccaggcaagaagttcccatgtatacagactctgaacccaggcaagaagttcccatgtatacagactctgaa

SEQ ID NO: 191921 - DNA, 120 bp, Artificial Sequence
  ENSG00000112584_12 (sequence is synthesized)
cccaggcaagaagttcccatgtatacaggctctgaacccaggcaagaagttcccatgtatacaggccctgaatccaggcaagaagttcccatgtatacaggccctgaatccaggcaagaa

SEQ ID NO: 191922 - DNA, 120 bp, Artificial Sequence
  ENSG00000112584_13 (sequence is synthesized)
gttttaatacggacagaccctgaatctaggcaagaaattatgtgtacaggccatgaatccaaacaggaagttcccatatgtacagatcctatatccaagcaagaagactccatgtgtaca

SEQ ID NO: 191923 - DNA, 120 bp, Artificial Sequence
  ENSG00000112584_14 (sequence is synthesized)
cacgctgaaatcaatcaaaaattacctgtagcaacagattttgaatttaagctagaagctctcatgtgtacaaaccctgaaattaaacaagaagaccccacaaatgtggggcctgaagta

SEQ ID NO: 191924 - DNA, 120 bp, Artificial Sequence
  ENSG00000112584_15 (sequence is synthesized)
aagcaacaagtaaccatggtttcagacactgaaatcttaaaggttgctagaacacatcacgtccaagcagaaagctacctggtgtacaacatcatgagcagtggagagattgaatgcagc

SEQ ID NO: 191925 - DNA, 120 bp, Artificial Sequence
  ENSG00000112584_16 (sequence is synthesized)
aacaccctagaagatgagcttgaccaggccttacccagccaggccttcatttaccgtcccattcgacagcgggtctactcactcttactggaggactgtcaagatgtcaccagcacctgc

SEQ ID NO: 191926 - DNA, 120 bp, Artificial Sequence
  ENSG00000112584_17 (sequence is synthesized)
ctagctgtcaaggagtggtttgtgtatcctgggaacccactgaggcacccggacctcgtcaggccgctgcagatgaccattccagggggaacgcctagtttgaaaatattatggctgaac

SEQ ID NO: 191927 - DNA, 120 bp, Artificial Sequence
  ENSG00000112584_18 (sequence is synthesized)
caagagccagaaatacaggttcggcgcttggacacactcctagcctgtttcaatctttcctcctcaagagaagagctgcaggctgtcgaaagcccatttcaagctttgtgctgcctcttg

SEQ ID NO: 191928 - DNA, 120 bp, Artificial Sequence
  ENSG00000112584_19 (sequence is synthesized)
atctacctctttgtccaggtggacacgctttgcctggaggatttgcatgcgtttattgcgcaggccttgtgcctccaaggaaaatccacctcgcagcttgtaaatctacagcctgattac

SEQ ID NO: 191929 - DNA, 120 bp, Artificial Sequence
  ENSG00000112584_20 (sequence is synthesized)
atcaaccccagagccgtgcagctgggctcccttctcgtccgcggcctcaccactctggttttagtcaacagcgcatgtggcttcccctggaagacgagtgatttcatgccctggaatgta

SEQ ID NO: 191930 - DNA, 120 bp, Artificial Sequence
  ENSG00000112584_21 (sequence is synthesized)
tcgtctgcaaggcctgcatgaaggagaacagacgcatcactggccgagcccactggggctcacaccacgcagggaggtggggaagacagggctccagctaccacaggacgggctctgggt

SEQ ID NO: 191931 - DNA, 120 bp, Artificial Sequence
  ENSG00000112584_22 (sequence is synthesized)
atagccgttccagtcagggacagccgtggagagaccagggaccaggaagcagacagtatgagcatgaccagtggagaaggtactagtcaacctccagaaagagtatggagagaaaaagag

SEQ ID NO: 191932 - DNA, 120 bp, Artificial Sequence
  ENSG00000112584_23 (sequence is synthesized)
gcacacctggacgcagagccctgccagcgccctcctctgctgttgcagctgcaaggagaccatgcctgtgggagccaggcctcgcttgcatgaagaaggaacgatgcctttttcaatggt

SEQ ID NO: 191933 - DNA, 120 bp, Artificial Sequence
  ENSG00000112584_24 (sequence is synthesized)
gtctccctcccattgtgcagaagagcttttgttggcttctctcccgagcttgtgcctgattctgtggcccaaaacaatcattgttaacatcttcatgtgtttcattctgatctttcattc

SEQ ID NO: 191934 - DNA, 120 bp, Artificial Sequence
  ENSG00000112584_25 (sequence is synthesized)
atatatatgatgcctagctaatttcattttaaaataaatgggaatctgttgtattctgattttttattagcaacactagattatgaggggttatctcctgttattaaaaagtcagaaaac

SEQ ID NO: 191935 - DNA, 120 bp, Artificial Sequence
  ENSG00000112584_26 (sequence is synthesized)
actatacagtagtcctcccttatctgcgggggagacatcccaagaccctcagtggatgcctgagactggatagtatggaatcctacatatctataccttggctttttcctctacgtacat

SEQ ID NO: 191936 - DNA, 120 bp, Artificial Sequence
  ENSG00000112584_27 (sequence is synthesized)
accatgataaagcttaacaaagaacagtgagagattaacagcaaccaataactaataaaagctatgtgaatgtggtctctgtcaaaatatcgtgctgtaatcacccttcttgctatctga

SEQ ID NO: 191937 - DNA, 120 bp, Artificial Sequence
  ENSG00000112584_28 (sequence is synthesized)
aaaccaagaagaccactaagtgactaatggtcagagaagctggatgaggggctgattcatgtcctgggcatgacagagcgggaggcacaaggtttcatcacactattcacaatggcgagc

SEQ ID NO: 191938 - DNA, 120 bp, Artificial Sequence
  ENSG00000112584_29 (sequence is synthesized)
aagttaaaacggatttcccatttaatttaattttcagacttcagttgaccatgagtaaccgaaaccacagaaagtgaagctggggatatttcagaaattcttttctaatcagaaattcta

SEQ ID NO: 191939 - DNA, 120 bp, Artificial Sequence
  ENSG00000112584_30 (sequence is synthesized)
atcaaacataagtttccaactatgtgttctcttggtcctcagaagtgtttgaatagaaaagtaacaactaacttcccatctttctggtggaagagttaattctgcctggagggttctgcc

SEQ ID NO: 191940 - DNA, 120 bp, Artificial Sequence
  ENSG00000112584_31 (sequence is synthesized)
tgggagacatgacagcatgtgtgtgactcctgtgtctgtttctgtggggtcatccctttcgtttcattttgccagggcctggctcaggattttttatggcagtgcctgtgaagacaagcc

SEQ ID NO: 191941 - DNA, 120 bp, Artificial Sequence
  ENSG00000112584_32 (sequence is synthesized)
tggccctccatccagtcacacaggaaatccacagagagcatgctgagagcagccagcggctgggctgccatcaggcctggtttatgatgccacaagtgaatggcacgtttgttcctcttt

SEQ ID NO: 191942 - DNA, 120 bp, Artificial Sequence
  ENSG00000112584_33 (sequence is synthesized)
atctctgagcattgaaggacttttggttaaaaaaaaaaattaagttcagagtaatccttttcatggaagaatcttcaggtcaccaaagaattgaaattttaagccccagattgtactgag

SEQ ID NO: 191943 - DNA, 120 bp, Artificial Sequence
  ENSG00000112584_34 (sequence is synthesized)
ctgtacctgtgggaaaaggaatggccagggtattgatgatggaaaagattcaaatgaggagttagaaggcaagccctctgtgggcagccgtcttccagaaacctcgaacttatgtctgtc

SEQ ID NO: 191944 - DNA, 120 bp, Artificial Sequence
  ENSG00000112584_35 (sequence is synthesized)
tccacctgagaaaggagaagaaaagctggtggtgacccctgctcctgctgggccatgccatggctctgaagatgccccgtgttcttaggaggtgctcacccctggcacctaaagacattt

SEQ ID NO: 191945 - DNA, 120 bp, Artificial Sequence
  ENSG00000112584_36 (sequence is synthesized)
ccttctggttgttgctctttaaaaacaaaataagcccctgaacgtgcttgcaggccagtttgtgtgcctgcacttgacgaattaccttgaccaacgggccaaaggcacagagctccaagg

SEQ ID NO: 191946 - DNA, 120 bp, Artificial Sequence
  ENSG00000112584_37 (sequence is synthesized)
catcatctttccttaaaatcctgagtgtttattaaaaagggacatggtctctaggtatcttattacatttgtatttcttacatttgaaatatcctaaccgctcccttcggtttcttctta

SEQ ID NO: 191947 - DNA, 120 bp, Artificial Sequence
  ENSG00000112584_38 (sequence is synthesized)
agaacatttacatctaattatttttcgtgcaagtcttgtaggacccacatgttttcctagctttggaaatcgatttttttcattcctcttatgaggatttccctatgtcagtaaacatta

SEQ ID NO: 191948 - DNA, 120 bp, Artificial Sequence
  ENSG00000112584_39 (sequence is synthesized)
actttctatttcttccatttttgctcatttgaaacccctgctgcttctagatctatttctttgcacttgtataactttgaaataaattcctcatcccttagactaagagagtgggtgtct

SEQ ID NO: 191949 - DNA, 120 bp, Artificial Sequence
  ENSG00000112584_40 (sequence is synthesized)
gtgaaaattgttttctccttcataatacctaaattctagtttgtcagtaaaatatttgtgtttggttaacaagctcttatttaagccattgagttagtataatctttattacctttgaaa

SEQ ID NO: 191950 - DNA, 120 bp, Artificial Sequence
  ENSG00000112584_41 (sequence is synthesized)
aaccagagagctgaattttttgtcattctaagttgtaagtaacactgcagtcaagtcttctgatgaaatttccatatatcaaattgaaaataaagcaaaatatatttattactcataact

SEQ ID NO: 191951 - DNA, 120 bp, Artificial Sequence
  ENSG00000112584_42 (sequence is synthesized)
actcggttgccgcgcgtggacttacaagcccacgaagccatcgttcgtcacagcctggaaaagggagggggcatcgatctggtttatgtttggacctcgaggctccaccagcgctggcgc

SEQ ID NO: 191952 - DNA, 120 bp, Artificial Sequence
  ENSG00000112584_43 (sequence is synthesized)
gtcactcggcggcggcggtcgttccgggagcactccgggctccgatctccggtgtcacagcaaagatccgcgtctttccgatgaatccagccaatgccatccagtacacacgcgcaggac

SEQ ID NO: 191953 - DNA, 120 bp, Artificial Sequence
  ENSG00000112584_44 (sequence is synthesized)
tgggaggaggctctgcgccgcggctgcccgggttcccctgcgctctgccctcggccgggtcgggtctccgcgggtgcgcgcagaggatctggctctcgccggcgcctgccgcccttatat

SEQ ID NO: 191954 - DNA, 120 bp, Artificial Sequence
  ENSG00000112584_45 (sequence is synthesized)
cctgccgcccttatattcagccggccgcccgcatggctaatgagatgcaaatcagcagccccccaatctggcgagagctgtcacaaaggagccacttttccaaaccctcctctcaatgga

SEQ ID NO: 191955 - DNA, 120 bp, Artificial Sequence
  ENSG00000112584_46 (sequence is synthesized)
gagctgcacgtgggcttttctgtgttggcagaacgtccatggtgagccatctgcatgtgaatttccatttccaaaagtcgtcagcaatagtaaatgcctagaaatcacgcagatggatgg

SEQ ID NO: 191956 - DNA, 120 bp, Artificial Sequence
  ENSG00000112584_47 (sequence is synthesized)
agctggtgtgaagaggaacaactttgacattgtttccttccacgaacctcttaattaattgcttccactttaatggaataattatggaacacagttttaatggcatgtggccacaactgt

SEQ ID NO: 191957 - DNA, 120 bp, Artificial Sequence
  ENSG00000112584_48 (sequence is synthesized)
aaagaggataaagctgtgtcctccaaatacagctcagcatctttgttcatacttagaaatgtgcagcattcttgtttgtgtattgagagagatttaattcttactttggttttcatgtct

SEQ ID NO: 191958 - DNA, 120 bp, Artificial Sequence
  ENSG00000112592_0 (sequence is synthesized)
ggcaggttcgctgtggcgggcgcctgggccgccggctgtttaacttcgcttccgctggcccatagtgatctttgcagtgacccagcagcatcactgtttcttggcgtgtgaagataaccc

SEQ ID NO: 191959 - DNA, 120 bp, Artificial Sequence
  ENSG00000112592_1 (sequence is synthesized)
aaggaattgaggaagttgctgagaagagtgtgctggagatgctctaggaaaaaattgaatagtgagacgagttccagcgcaagggtttctggtttgccaagaagaaagtgaacatcatgg

SEQ ID NO: 191960 - DNA, 120 bp, Artificial Sequence
  ENSG00000112592_2 (sequence is synthesized)
atcagaacaacagcctgccaccttacgctcagggcttggcctcccctcagggtgccatgactcccggaatccctatctttagtccaatgatgccttatggcactggactgaccccacagc

SEQ ID NO: 191961 - DNA, 120 bp, Artificial Sequence
  ENSG00000112592_3 (sequence is synthesized)
gatgccttatggcactggactgaccccacagcctattcagaacaccaatagtctgtctattttggaagagcaacaaaggcagcagcagcaacaacaacagcagcagcagcagcagcagca

SEQ ID NO: 191962 - DNA, 120 bp, Artificial Sequence
  ENSG00000112592_4 (sequence is synthesized)
agcagcagcagcagcagcagcagcaacaggcagtggcagctgcagccgttcagcagtcaacgtcccagcaggcaacacagggaacctcaggccaggcaccacagctcttccactcacaga

SEQ ID NO: 191963 - DNA, 120 bp, Artificial Sequence
  ENSG00000112592_5 (sequence is synthesized)
tccactcacagactctcacaactgcacccttgccgggcaccactccactgtatccctcccccatgactcccatgacccccatcactcctgccacgccagcttcggagagttctgggattg

SEQ ID NO: 191964 - DNA, 120 bp, Artificial Sequence
  ENSG00000112592_6 (sequence is synthesized)
taccgcagctgcaaaatattgtatccacagtgaatcttggttgtaaacttgacctaaagaccattgcacttcgtgcccgaaacgccgaatataatcccaagcggtttgctgcggtaatca

SEQ ID NO: 191965 - DNA, 120 bp, Artificial Sequence
  ENSG00000112592_7 (sequence is synthesized)
aggagccaagagtgaagaacagtccagactggcagcaagaaaatatgctagagttgtacagaagttgggttttccagctaagttcttggacttcaagattcagaatatggtggggagctg

SEQ ID NO: 191966 - DNA, 120 bp, Artificial Sequence
  ENSG00000112592_8 (sequence is synthesized)
tgatgtgaagtttcctataaggttagaaggccttgtgctcacccaccaacaatttagtagttatgagccagagttatttcctggtttaatctacagaatgatcaaacccagaattgttct

SEQ ID NO: 191967 - DNA, 120 bp, Artificial Sequence
  ENSG00000112592_9 (sequence is synthesized)
ccttatttttgtttctggaaaagttgtattaacaggtgctaaagtcagagcagaaatttatgaagcatttgaaaacatctaccctattctaaagggattcaggaagacgacgtaatggct

SEQ ID NO: 191968 - DNA, 120 bp, Artificial Sequence
  ENSG00000112592_10 (sequence is synthesized)
ctcatgtacccttgcctcccccacccccttctttttttttttttaaacaaatcagtttgttttggtacctttaaatggtggtgttgtgagaagatggatgttgagttgcagggtgtggca

SEQ ID NO: 191969 - DNA, 120 bp, Artificial Sequence
  ENSG00000112592_11 (sequence is synthesized)
ccaggtgatgcccttctgtaagtgcccaccgcgggatgccgggaaggggcattatttgtgcactgagaacaccgcgcagcgtgactgtgagttgctcataccgtgctgctatctgggcag

SEQ ID NO: 191970 - DNA, 120 bp, Artificial Sequence
  ENSG00000112592_12 (sequence is synthesized)
cgctgcccatttatttatatgtagattttaaacactgctgttgacaagttggtttgagggagaaaactttaagtgttaaagccacctctataattgattggactttttaattttaatgtt

SEQ ID NO: 191971 - DNA, 120 bp, Artificial Sequence
  ENSG00000112592_13 (sequence is synthesized)
tttccccatgaaccacagtttttatatttctaccagaaaagtaaaaatcttttttaaaagtgttgtttttctaatttataactcctaggggttatttctgtgccagacacattccacctc

SEQ ID NO: 191972 - DNA, 120 bp, Artificial Sequence
  ENSG00000112592_14 (sequence is synthesized)
tccagtattgcaggacagaatatatgtgttaatgaaaatgaatggctgtacatatttttttctttcttcagagtactctgtacaataaatgcagtttataaaagtgttagattgttgtta

SEQ ID NO: 191973 - DNA, 120 bp, Artificial Sequence
  ENSG00000112592_15 (sequence is synthesized)
agtgaggtcgggcaggttcgctgtggcgggcgcctgggccgccggctgtttaacttcgcttccgctggcccatagtgatctttgcagtgacccagcatcactgtttcttggcgtgtgaag

SEQ ID NO: 191974 - DNA, 120 bp, Artificial Sequence
  ENSG00000112592_16 (sequence is synthesized)
agagagccacgaaccacggcactgattttcagttctgggaaaatggtgtgcacaggagccaagagatatgggcaggcgtggtgtctcaccaaggcgggcaaatcacttgaggccaggagt

SEQ ID NO: 191975 - DNA, 120 bp, Artificial Sequence
  ENSG00000112592_17 (sequence is synthesized)
gttccggcctgtaacggccactcggccgccactcccgcctggtgccctactctgctgtgtttcgcaggcagcttcccatcgtacgattgtggggctcaggcagcatcactgtttcttggc

SEQ ID NO: 191976 - DNA, 120 bp, Artificial Sequence
  ENSG00000112599_0 (sequence is synthesized)
agtcacccaggagatgatggagaggctgatcaggcctcctggaaagggaggaagagggccctagttggagagatccatcagcagaagccagggaggagatacagacccttgctccctgat

SEQ ID NO: 191977 - DNA, 120 bp, Artificial Sequence
  ENSG00000112599_1 (sequence is synthesized)
gctcctcagggctagcatggggcaggagtttagctgggaggaggcggaggcagctggcgagatagatgtggcggagctccaggagtggtacaagaagtttgtgatggagtgccccagcgg

SEQ ID NO: 191978 - DNA, 120 bp, Artificial Sequence
  ENSG00000112599_2 (sequence is synthesized)
cacactctttatgcatgagtttaagcgcttcttcaaggtcacagacgatgaggaggcctcccagtatgtagagggcatgttccgagccttcgacaagaatggggacaacaccatcgactt

SEQ ID NO: 191979 - DNA, 120 bp, Artificial Sequence
  ENSG00000112599_3 (sequence is synthesized)
cctggagtacgtggcagctctgaatctcgtgctgaggggcaccctggagcacaagctgaagtggacattcaagatctatgataaggatggcaatggctgcatcgaccgcctggagctact

SEQ ID NO: 191980 - DNA, 120 bp, Artificial Sequence
  ENSG00000112599_4 (sequence is synthesized)
caacattgtggagggaatttaccagctgaagaaagcctgccggcgagagctacaaactgagcaaggccagctgctcacacccgaggaggtcgtggacaggatcttcctcctggtggatga

SEQ ID NO: 191981 - DNA, 120 bp, Artificial Sequence
  ENSG00000112599_5 (sequence is synthesized)
gaatggagatggccagctgtctctgaacgagtttgttgaaggtgcccgtcgggacaagtgggtgatgaagatgctgcagatggacatgaatcccagcagctggctcgctcagcagagacg

SEQ ID NO: 191982 - DNA, 120 bp, Artificial Sequence
  ENSG00000112599_6 (sequence is synthesized)
gaaaagtgccatgttctgaggagtctggggcccctccacgactccaggctcacccaggtttccagggtagtaggagggtccctggctcagcctgctcatgcccactcttcccctggtgtt

SEQ ID NO: 191983 - DNA, 120 bp, Artificial Sequence
  ENSG00000112599_7 (sequence is synthesized)
gacttcctggcaccccctgtgcagggctgagtggggatggggaagggctgctgggtttgaagtggccaacagggcatagtccattttggaggagtccctgggatggtgaagggaattcag

SEQ ID NO: 191984 - DNA, 120 bp, Artificial Sequence
  ENSG00000112599_8 (sequence is synthesized)
ttacttttcctgttcagccgctcctgggaggactgtgccttggctgggtggttgtggggctcccacagtttctgggtgttctcagttggaagcaagagccaactgaggggtgagggtccc

SEQ ID NO: 191985 - DNA, 120 bp, Artificial Sequence
  ENSG00000112599_9 (sequence is synthesized)
ccgtctcaaaaaaaaaaaaagaaagaaaagaaaaggcaggagttttggggggcagggggcagcaataattctataacttccgggatgctgaggggcgttcatggggaggaccctggcctc

SEQ ID NO: 191986 - DNA, 120 bp, Artificial Sequence
  ENSG00000112599_10 (sequence is synthesized)
ctggcctcctcctccccaaggcatcctcaccagtggtgtcaacaggaaaaatggcagcaaatacgctgcaggctgtggtctttctgcctttgaaagggtcagctgtacttaaagggactg

SEQ ID NO: 191987 - DNA, 120 bp, Artificial Sequence
  ENSG00000112599_11 (sequence is synthesized)
tttcagctctgcctgggtgctgctctgggaccccctgctgccaacccaccactcccccaacaatcctctctttccatccatatcccccagtatggaccttccacaactcccagccataag

SEQ ID NO: 191988 - DNA, 120 bp, Artificial Sequence
  ENSG00000112599_12 (sequence is synthesized)
ctgaatgtttctctttaaaggatggagaaaacttctgtctgtctctggcaagaattgggggactgttgactgggattgtgggctgggcttggcttctaactgctgtgtgacccaagacag

SEQ ID NO: 191989 - DNA, 120 bp, Artificial Sequence
  ENSG00000112599_13 (sequence is synthesized)
ccacttctcctccctaaccttggttatgtcttggcagcacagtgagcaggtcggactaggcgaacagttttggattattgtgtttttagatgtggaattattttttgttatataaactct

SEQ ID NO: 191990 - DNA, 120 bp, Artificial Sequence
  ENSG00000112599_14 (sequence is synthesized)
tatgtgtaaccccaatatagaaactagattaaaagggagtctctctggttgaaaggggagctgagtaccctctggaactggaggcacctctgaaaaaagcaaactgaaaaccagtgccct

SEQ ID NO: 191991 - DNA, 120 bp, Artificial Sequence
  ENSG00000112599_15 (sequence is synthesized)
gggtcactgttactcctataagacagtttaaagtgagacctggaaaaacatttgctttaccttgaatagataggtttttatgttggtatataagaaataaaactaacctattaaacctga

SEQ ID NO: 191992 - DNA, 120 bp, Artificial Sequence
  ENSG00000112619_0 (sequence is synthesized)
ggctgggaagggcgctgaagaaacaacgcccaggaccaggactatcccctgctcaagctgtgattccgagacccctgccaccactactgcattcacggggatcccaggctagtgggactc

SEQ ID NO: 191993 - DNA, 120 bp, Artificial Sequence
  ENSG00000112619_1 (sequence is synthesized)
gacatgggtagcccccagggcagctccctacagcttgggccatctgcacttttcccaaggccctaagtctccgcctctgggctcgttaaggtttggggtgggagctgtgctgtgggaagc

SEQ ID NO: 191994 - DNA, 120 bp, Artificial Sequence
  ENSG00000112619_2 (sequence is synthesized)
aacccggactacacttggcaagcatggcgctactgaaagtcaagtttgaccagaagaagcgggtcaagttggcccaagggctctggctcatgaactggttctccgtgttggctggcatca

SEQ ID NO: 191995 - DNA, 120 bp, Artificial Sequence
  ENSG00000112619_3 (sequence is synthesized)
tcatcttcagcctaggactgttcctgaagattgaactccgaaagaggagcgatgtgatgaataattctgagagccattttgtgcccaactcattgatagggatgggggtgctatcctgtg

SEQ ID NO: 191996 - DNA, 120 bp, Artificial Sequence
  ENSG00000112619_4 (sequence is synthesized)
tcttcaactcgctggctgggaagatctgctacgacgccctggacccagccaagtatgccagatggaagccctggctgaagccgtacctggctatctgtgttctcttcaacatcatcctct

SEQ ID NO: 191997 - DNA, 120 bp, Artificial Sequence
  ENSG00000112619_5 (sequence is synthesized)
tccttgtggctctctgctgctttctgcttcggggctcgctggagaacaccctgggccaagggctcaagaacggcatgaagtactaccgggacacagacacccctggcaggtgtttcatga

SEQ ID NO: 191998 - DNA, 120 bp, Artificial Sequence
  ENSG00000112619_6 (sequence is synthesized)
agaagaccatcgacatgctgcagatcgagttcaaatgctgcggcaacaacggttttcgggactggtttgagattcagtggatcagcaatcgctacctggacttttcctccaaagaagtca

SEQ ID NO: 191999 - DNA, 120 bp, Artificial Sequence
  ENSG00000112619_7 (sequence is synthesized)
aagatcgaatcaagagcaacgtggatgggcggtacctggtggacggcgtccctttcagctgctgcaatcctagctcgccacggccctgcatccagtatcagatcaccaacaactcagcac

SEQ ID NO: 192000 - DNA, 120 bp, Artificial Sequence
  ENSG00000112619_8 (sequence is synthesized)
actacagttacgaccaccagacggaggagctcaacctgtgggtgcgtggctgcagggctgccctgctgagctactacagcagcctcatgaactccatgggtgtcgtcacgctcctcattt

SEQ ID NO: 192001 - DNA, 120 bp, Artificial Sequence
  ENSG00000112619_9 (sequence is synthesized)
ggctcttcgaggtgaccattacaattgggctgcgctacctacagacgtcgctggatggtgtgtccaaccccgaggaatctgagagcgagagccagggctggctgctggagaggagcgtgc

SEQ ID NO: 192002 - DNA, 120 bp, Artificial Sequence
  ENSG00000112619_10 (sequence is synthesized)
cggagacctggaaggcctttctggagagtgtgaagaagctgggcaagggcaaccaggtggaagccgagggcgcagacgcaggccaggccccagaggctggctgagggccctggggcccct

SEQ ID NO: 192003 - DNA, 120 bp, Artificial Sequence
  ENSG00000112619_11 (sequence is synthesized)
cccctcccgaacactgagaaatagtgcactccaagaaacgtggatctccccctcatccaactccgaaagtctgaatctcccaaggagggcaccatcttacagagactctccctgacggtg

SEQ ID NO: 192004 - DNA, 120 bp, Artificial Sequence
  ENSG00000112619_12 (sequence is synthesized)
aatttaagtttagggtccctaaaagcatttgacacacagttgttgaatgactgacccaaaatgtgaatgaagctaatgtgaatgtgagtgaagctcccttcaggcccgctgccctaggat

SEQ ID NO: 192005 - DNA, 120 bp, Artificial Sequence
  ENSG00000112619_13 (sequence is synthesized)
atgccctcctggtgactcgggggctgtctcagacgactagcccaggacccatctttctcacacggatttagtcccaccctatggccactggccgtatctgagggctgctccccttttaga

SEQ ID NO: 192006 - DNA, 120 bp, Artificial Sequence
  ENSG00000112619_14 (sequence is synthesized)
atttacctcttatgagctccatgttgcttcactctatccaaagtgtcacttggtgcataagcacagaaatctgaaaaatggccatgttgtcttttttttttttttttaatgccaagattg

SEQ ID NO: 192007 - DNA, 120 bp, Artificial Sequence
  ENSG00000112619_15 (sequence is synthesized)
acaggttggccgtttgcttaatgccagaagttgggggaaagttacgcttttctaagaataatggactcttaaggcattgagggctctaaacaggattctttaatcatggagcaagagaat

SEQ ID NO: 192008 - DNA, 120 bp, Artificial Sequence
  ENSG00000112619_16 (sequence is synthesized)
ttcaaggcaggggattttatcccccaccaaaaacacagtgaaaggcctgcttttgtgtcccattcacatgccctcggtcactgagtctggagtgaaccacgggttgaggaagtcaggctg

SEQ ID NO: 192009 - DNA, 120 bp, Artificial Sequence
  ENSG00000112619_17 (sequence is synthesized)
ttggcgtgtcccagcaccacaccacccctaaagtgccaggtgatctcctgtggctcatcggtggaagcagtggggtaggctgctgccctgctgtggaagaggagcaacaatcagacatga

SEQ ID NO: 192010 - DNA, 120 bp, Artificial Sequence
  ENSG00000112619_18 (sequence is synthesized)
gtccaccctttggagaccaggcctcagctcttggtgggcccagggacacccacacaggtggccatcacagccccatggacaacactaattgtccacagcaaagggcaaggaatcctctgg

SEQ ID NO: 192011 - DNA, 120 bp, Artificial Sequence
  ENSG00000112619_19 (sequence is synthesized)
gagcttcttccgtttcttccccccagatacccatcttgaaaaacactatttctggaatgcttctgcatcaaaggagattctttgagatagcccatcttcctgagctagcaaatacaggag

SEQ ID NO: 192012 - DNA, 120 bp, Artificial Sequence
  ENSG00000112619_20 (sequence is synthesized)
ttttcactttctttaggaaagagaagctttcaggggaaggagagaatgattttgctgacttcccaagccctggtgaccagaccaaggcagggcccagcataattcctccagttggatgaa

SEQ ID NO: 192013 - DNA, 120 bp, Artificial Sequence
  ENSG00000112619_21 (sequence is synthesized)
cattcaagagagctcgttcctacctggctggagaccgaggccagaaggcaaaaaccagaaagggaacagtccataacttacctctgcttctgaccgatggtgtttgggaataggttactt

SEQ ID NO: 192014 - DNA, 120 bp, Artificial Sequence
  ENSG00000112619_22 (sequence is synthesized)
tggactgagtttgggttctctgctgtcctaagaacttcagtgtagagaaaataagacttctggtgctgctggggtatgttctgggcttaattcccccaagcagaagaccagatccaagat

SEQ ID NO: 192015 - DNA, 120 bp, Artificial Sequence
  ENSG00000112619_23 (sequence is synthesized)
gtttggacaccctgtcagacgttggtcccaagtttaattagatttctgaatctcgttgaggccaaggaatgatccatactgaaaaaatgctgagccagccatctttggcaaaggtccctg

SEQ ID NO: 192016 - DNA, 120 bp, Artificial Sequence
  ENSG00000112619_24 (sequence is synthesized)
agctcttgctatctctcaagagtgctgagaaccacggtgaaagtgctgctctaggcccacaagtgtaactatgctgttaacagctgtcaatagataattaaaattcatactgtatgaaaa

SEQ ID NO: 192017 - DNA, 120 bp, Artificial Sequence
  ENSG00000112624_0 (sequence is synthesized)
cgccgccgccgccgccgccgcccctgttgcgatggcgcagaaaccccgttgacaaggcactgctttttcatgacgcaaaacgtcatattatttcacaaaaagcccagcgatttcacctga

SEQ ID NO: 192018 - DNA, 120 bp, Artificial Sequence
  ENSG00000112624_1 (sequence is synthesized)
agaagcttgggaactcctgccaaaaattgtagcacttctcacattgcaatgttgtcatggatgatgatgatgactcgtgtctccttgatcttattggagacccacaagcattgaactatt

SEQ ID NO: 192019 - DNA, 120 bp, Artificial Sequence
  ENSG00000112624_2 (sequence is synthesized)
ttctacatggacctagtaataaatctagcaatgatgacttgactaatgcaggatattctgcagccaattcaaattcaattttcgccaactctagtaatgctgatcctaagtcatccctca

SEQ ID NO: 192020 - DNA, 120 bp, Artificial Sequence
  ENSG00000112624_3 (sequence is synthesized)
aaggtgtaagcaaccagcttggagaagggcccagtgatggactgccactttcaagtagcctccagtttcttgaagatgaactcgagtcttctcctcttcctgatctcactgaggaccaac

SEQ ID NO: 192021 - DNA, 120 bp, Artificial Sequence
  ENSG00000112624_4 (sequence is synthesized)
ctttcgacattcttcagaaatccttgcaagaggccaatatcactgaacagacattggcagaagaggcatatttggatgccagtataggttcaagccaacagtttgcacaagctcagcttc

SEQ ID NO: 192022 - DNA, 120 bp, Artificial Sequence
  ENSG00000112624_5 (sequence is synthesized)
atccttcttcatcagcatcctttactcaggcttctaatgtttctaattactcaggtcagacgctgcagcctataggggtgacgcatgtgcctgttggagcatcgtttgcaagcaatacag

SEQ ID NO: 192023 - DNA, 120 bp, Artificial Sequence
  ENSG00000112624_6 (sequence is synthesized)
tgggtgtacaacatggctttatgcaacatgtggggatcagtgttcccagccagcatttgtctaatagcagtcagattagtggttctggtcaaatacagttaattgggtcatttggtaatc

SEQ ID NO: 192024 - DNA, 120 bp, Artificial Sequence
  ENSG00000112624_7 (sequence is synthesized)
atccttccatgatgactattaataacctagatggatctcaaatcatattaaagggcagcgggcagcaagccccatcaaatgtgagtggagggctcctggttcatagacagactcctaatg

SEQ ID NO: 192025 - DNA, 120 bp, Artificial Sequence
  ENSG00000112624_8 (sequence is synthesized)
gcaactccttgtttgggaactctagttccagtccagtagcacagcctgttaccgttccatttaacagcacaaattttcaaacatctttacctgtgcataacatcatcatacaaaggggtc

SEQ ID NO: 192026 - DNA, 120 bp, Artificial Sequence
  ENSG00000112624_9 (sequence is synthesized)
ttgcaccaaattcaaataaagtcccaattaatatacagccaaagcctatccagatgggtcagcaaaatacatacaatgtgaacaatttgggaattcagcagcaccacgtacaacaaggga

SEQ ID NO: 192027 - DNA, 120 bp, Artificial Sequence
  ENSG00000112624_10 (sequence is synthesized)
tctcttttgcttctgcaagctcaccccagggctcagtagttggtccacacatgtctgtgaacattgtaaaccaacagaacacaagaaagccagtcacctcacaggcagtgagcagcactg

SEQ ID NO: 192028 - DNA, 120 bp, Artificial Sequence
  ENSG00000112624_11 (sequence is synthesized)
ggggcagtattgttattcattcccccatgggccaacctcacgcaccccaaagtcagttccttatacctacaagcctttctgtcagttccaactcggtacaccacgtccagactataaatg

SEQ ID NO: 192029 - DNA, 120 bp, Artificial Sequence
  ENSG00000112624_12 (sequence is synthesized)
ggcaacttcttcaaactcaaccctctcagctcatttctggccaagtggcctcagagcatgtcatgttgaacagaaactcttccaacatgctcaggaccaaccaaccatatactggaccga

SEQ ID NO: 192030 - DNA, 120 bp, Artificial Sequence
  ENSG00000112624_13 (sequence is synthesized)
tgcttaacaaccagaatactgctgtccacttagtgtctgggcagacatttgctgcctctggaagtccagtgatagccaatcatgcctctcctcagcttgtgggtggacagatgcccttgc

SEQ ID NO: 192031 - DNA, 120 bp, Artificial Sequence
  ENSG00000112624_14 (sequence is synthesized)
agcaggcatccccaactgtattacacctgtcacctgggcagagcagcgtttcccaaggaagacctggcttcgccaccatgccatcggtgacaagcatgtcaggacctagtcggttccctg

SEQ ID NO: 192032 - DNA, 120 bp, Artificial Sequence
  ENSG00000112624_15 (sequence is synthesized)
ctgtcagctcagccagcactgcccatcctagtcttgggtctgcagttcagtctggttcatcaggatcaaactttacaggagatcagctgacccagccaaacaggactccagtaccagtca

SEQ ID NO: 192033 - DNA, 120 bp, Artificial Sequence
  ENSG00000112624_16 (sequence is synthesized)
gtgtgtctcatcgtcttccagtttcttcttccaagtctaccagcaccttcagtaacacacctggaacaggaacccagcaacaattcttctgccaggctcagaaaaaatgtctgaatcaga

SEQ ID NO: 192034 - DNA, 120 bp, Artificial Sequence
  ENSG00000112624_17 (sequence is synthesized)
cttcccccatttctgctcccaagaccacagacggcctgaggcaagcacagatccctgggctcttgagcaccacactgccagggcaggattctggaagcaaagttatatccgcatccttag

SEQ ID NO: 192035 - DNA, 120 bp, Artificial Sequence
  ENSG00000112624_18 (sequence is synthesized)
gaaccgcacaaccacagcaggaaaaagtagttggatcatctcctggccatccagctgtgcaggtggagagtcattcgggaggacaaaaaaggcctgctgcgaaacagctaacgaaaggag

SEQ ID NO: 192036 - DNA, 120 bp, Artificial Sequence
  ENSG00000112624_19 (sequence is synthesized)
ctttcattctccagcagttgcagagggaccaagcccacactgtgacaccagacaaaagtcacttccgatcactaagtgatgcggtacagagactgctctcctaccacgtgtgccagggct

SEQ ID NO: 192037 - DNA, 120 bp, Artificial Sequence
  ENSG00000112624_20 (sequence is synthesized)
ccatgcccactgaagaagacttgagaaaagtggacaatgaatttgagacagttgccactcagctcctaaaaaggacccaagctatgcttaacaaatacagatgcctgctcctagaagatg

SEQ ID NO: 192038 - DNA, 120 bp, Artificial Sequence
  ENSG00000112624_21 (sequence is synthesized)
ccatgcgaatcaatccctctgctgagatggtgatgatcgataggatgttcaaccaggaggaaagagcttccctgtcccgagacaagcgtttggcacttgtagaccctgagggttttcagg

SEQ ID NO: 192039 - DNA, 120 bp, Artificial Sequence
  ENSG00000112624_22 (sequence is synthesized)
ctgatttctgttgttccttcaaacttgataaagctgctcatgagacacagtttggccggagtgaccagcatggcagtaaagcaagcagctctctgcaaccgccagccaaggcccaaggca

SEQ ID NO: 192040 - DNA, 120 bp, Artificial Sequence
  ENSG00000112624_23 (sequence is synthesized)
gagaccgagccaaaaccggtgtgacggaacccatgaatcatgaccagtttcatctagtgcctaatcacatcgtggtctctgcagaaggaaacatttctaaaaaaacagaatgccttggca

SEQ ID NO: 192041 - DNA, 120 bp, Artificial Sequence
  ENSG00000112624_24 (sequence is synthesized)
gagcactgaaatttgacaaagtgggcttagtgcagtaccagagcacgtctgaagagaaggccagccggagagagcctctgaaggccagtcagtgctctcccggccctgaggggcaccgga

SEQ ID NO: 192042 - DNA, 120 bp, Artificial Sequence
  ENSG00000112624_25 (sequence is synthesized)
aaacctcatccagatcggatcatggtactgagagcaaactgtcaagcatcctagcagattcgcacttggagatgacgtgtaacaattccttccaggacaaaagtctgaggaattctccaa

SEQ ID NO: 192043 - DNA, 120 bp, Artificial Sequence
  ENSG00000112624_26 (sequence is synthesized)
agaatgaagttttacacacagacatcatgaaagggtcaggcgaaccccagccagatctccagctgacaaagagcttggaaaccacatttaagaacatcttggaactcaaaaaggcgggac

SEQ ID NO: 192044 - DNA, 120 bp, Artificial Sequence
  ENSG00000112624_27 (sequence is synthesized)
cccaacttttctcctatggcttcacaggaaaactgcctggaaaagttcatcccggaccacagtgaaggtgttgtagaaactgactccattttagaagcagctgtaaatagtatcctagag

SEQ ID NO: 192045 - DNA, 120 bp, Artificial Sequence
  ENSG00000112624_28 (sequence is synthesized)
tgttaatagcagcagtcctccccctaccccgccccgagaccccaccccgagaccccaccccggaccagttacattcgttcctggcaaaagcaaatggaaatggtctcctgtctccagcct

SEQ ID NO: 192046 - DNA, 120 bp, Artificial Sequence
  ENSG00000112624_29 (sequence is synthesized)
gcttgatctttcatcacaggttattctttctaatctcaatcctgttctttgtttaagagcaatacttgtcgtgattacagggagatcctttagtaaaattaatccttggcagaaagcagt

SEQ ID NO: 192047 - DNA, 120 bp, Artificial Sequence
  ENSG00000112624_30 (sequence is synthesized)
ctgataggccccactcatttcaagtgttatgaaagtgcttataggcattttgtttatttgttttgttttttaaaaacactgtaactcaatgagaccacagtatacttggcccttggtaaa

SEQ ID NO: 192048 - DNA, 120 bp, Artificial Sequence
  ENSG00000112624_31 (sequence is synthesized)
attttgacaatcataagtcatttgaaaagaacagacttactaaaatcaaacgagacggatagaagctactttttaaagaatatcccactgcatctgcaaatttagttttgggttttttta

SEQ ID NO: 192049 - DNA, 120 bp, Artificial Sequence
  ENSG00000112624_32 (sequence is synthesized)
ttattattattttgagtttttttgtgtgtgttttgttgttattgttgaggggaagaccacatggttcttccccctcagccatctttgagcagtaaattgctggctgtgctgccagggacc

SEQ ID NO: 192050 - DNA, 120 bp, Artificial Sequence
  ENSG00000112624_33 (sequence is synthesized)
cgcagccctggtggaaaagccagtagcacatacgcagggcattgcagggcttccctattgatggttcaagtgcttttctgatgcttccggagcaaaacctcatgcttttaggcatatcta

SEQ ID NO: 192051 - DNA, 120 bp, Artificial Sequence
  ENSG00000112624_34 (sequence is synthesized)
tgttgaatttcacctagggaatgttctgttcttagttacagcagcaaaatttgaaataatttcaccaggctaaataaaggaaaatggaaaccagttaagaggcacagtgtacagaggagg

SEQ ID NO: 192052 - DNA, 120 bp, Artificial Sequence
  ENSG00000112624_35 (sequence is synthesized)
ccgggatagagccatgagggttataatattaatatgtatatatgtaaaagcatatatatgttaactattgagaaaaaacaagttttgcattttataattggatatagtcaacatataatg

SEQ ID NO: 192053 - DNA, 120 bp, Artificial Sequence
  ENSG00000112624_36 (sequence is synthesized)
tatgtttttgtttgttgctggattttgtttcatttaacctctctttgcaccctctcccacaacaaataccaagcatcaaaagcactttcatttgaaaattattatgttgtaatttttcag

SEQ ID NO: 192054 - DNA, 120 bp, Artificial Sequence
  ENSG00000112624_37 (sequence is synthesized)
tttaaactttaaggagactctggccttgtttatgcttcttgtctgagaacagtagtgacccctggcagcaattcattaccaaaacacagacaaaccaaaggtaaccagctagcccaccac

SEQ ID NO: 192055 - DNA, 120 bp, Artificial Sequence
  ENSG00000112624_38 (sequence is synthesized)
tgaaaggaaagatctgagacatgggattcccatttgagagccaaaggatatgccctgtcatggtttctgtttggcctgtgttcatattagtgagcatggcttactgctttatttattttt

SEQ ID NO: 192056 - DNA, 120 bp, Artificial Sequence
  ENSG00000112624_39 (sequence is synthesized)
atttcttgtcagggagtattctccgttttcctttctcgtatacctgccccaggttatcccatttctgttgttacctttattcttaatgtcattgtaaccatcacttatctcctctcattg

SEQ ID NO: 192057 - DNA, 120 bp, Artificial Sequence
  ENSG00000112624_40 (sequence is synthesized)
ggaaagctacatgatagtatttttatgcactcttctcccacacatacacacacgtgcatgtatctgagctgctcggatccagaggtcatttttgttacagtgtgtgcacactcactctcc

SEQ ID NO: 192058 - DNA, 120 bp, Artificial Sequence
  ENSG00000112624_41 (sequence is synthesized)
ttcttagtgtgcatactctctcatttattctgtttatctccctggctctggaggtgcagccactggtcttcactttaatgtgttgccagaatctgcttctggctgtcgccaacatgggga

SEQ ID NO: 192059 - DNA, 120 bp, Artificial Sequence
  ENSG00000112624_42 (sequence is synthesized)
tgacccccattgtcatcatgttgggcatttcttttccagattggcctgtgatggaaaggaaggcttctaattagaaaacacagcaacagaagacctataccccggtgcccctgtgtccca

SEQ ID NO: 192060 - DNA, 120 bp, Artificial Sequence
  ENSG00000112624_43 (sequence is synthesized)
ctacacacagaaaaccctgtgagatggccagtcttcataatagcaacgtaccttcaccccagccacatgccccagccaatacaaattggaaaatctggcccattttagggttaccatttt

SEQ ID NO: 192061 - DNA, 120 bp, Artificial Sequence
  ENSG00000112624_44 (sequence is synthesized)
ttccttatttgtgccaatgtccaagttgcagatttcccctttttcctgtattgtaacatattagataagttggtgtcgccagttggtactttctgtttgggtagtcctagggtaacaccc

SEQ ID NO: 192062 - DNA, 120 bp, Artificial Sequence
  ENSG00000112624_45 (sequence is synthesized)
tgccctaaactccatgatttcataggcttttcttcccttggggctcatgctcccctaattcctagcaagatgatccttcctaatcaaattcttctcattgcagaactttatccctggaag

SEQ ID NO: 192063 - DNA, 120 bp, Artificial Sequence
  ENSG00000112624_46 (sequence is synthesized)
ccttcatgtgggctgctagtgagttacattaattactgcaaatcagtggaattctcaagagacaagataagcttcatgtacatttgtcacctctctttcttccctatcctgccctgctgt

SEQ ID NO: 192064 - DNA, 120 bp, Artificial Sequence
  ENSG00000112624_47 (sequence is synthesized)
cccaatcctagcttttctatataccatcctaaagggtttttaagccctaacacttgtctagcaaatggagagcctaatttaccaaaatgaaacttgtaaatttttgtgtcattgtatgta

SEQ ID NO: 192065 - DNA, 120 bp, Artificial Sequence
  ENSG00000112624_48 (sequence is synthesized)
agtttactttttatggaggaaggattctagataatgacaaatgaagattatgacatgtatttcactcctgtgattaggttctacgcacatgggtcataactcgcatgtcgagccccctct

SEQ ID NO: 192066 - DNA, 120 bp, Artificial Sequence
  ENSG00000112624_49 (sequence is synthesized)
agtgaagggtaggagagctcagcctcggatggccaacattcagttgttcaggttcattcgtcaaagttaagttttagaactatttgtactcagtaacaaaaatcattttctttttttttt

SEQ ID NO: 192067 - DNA, 120 bp, Artificial Sequence
  ENSG00000112624_50 (sequence is synthesized)
tttttttctgttgtggaaaagcgtgaatttgttattaagcatttgattttctgtgtccttaagtacttcctgaagatgaagcaaaattttaatctggcaattatgaaaaagaaatatttt

SEQ ID NO: 192068 - DNA, 120 bp, Artificial Sequence
  ENSG00000112624_51 (sequence is synthesized)
agctctgaaggatttagtagattctgttagattagggaggccttacagactgactttacttaaagaggacgcgtcactcgctgtcagtgtggtgtgggctttatttgcttaaataccttc

SEQ ID NO: 192069 - DNA, 120 bp, Artificial Sequence
  ENSG00000112624_52 (sequence is synthesized)
atttgtatagtacgtctcacttgaaattgctttgtatacattttgtaaaaatatttataaaatgttttgtaaaaaaaaaaaaactataacaaattgcagtttattttgttatgttggata

SEQ ID NO: 192070 - DNA, 120 bp, Artificial Sequence
  ENSG00000112624_53 (sequence is synthesized)
aatactgttaaaagaaaccagtcagtaactatattgttaatccatggttaggaaatgtttagttggagattacaaattgaaacaaccattgcaatacagccaaagatttgggaaaatgtg

SEQ ID NO: 192071 - DNA, 120 bp, Artificial Sequence
  ENSG00000112624_54 (sequence is synthesized)
ggcatcttttcaggatttcattcctacgtccaactgccgttcacaactgccctttccaactgctccagaactcttggccctggcattccgtgatgtaaattattccacacatggctcaaa

SEQ ID NO: 192072 - DNA, 120 bp, Artificial Sequence
  ENSG00000112624_55 (sequence is synthesized)
ccctgccctccccgagctcggtcccggccactccctccgcagctgggcgtcgccggccgcgctggggcgagaaccgaagtttggaggtagacgagcaggcgagcggtttgcccgggcgca

SEQ ID NO: 192073 - DNA, 120 bp, Artificial Sequence
  ENSG00000112640_0 (sequence is synthesized)
gcagcgcgcaggcggtggcgaagagacgccgagcgggccgagtgcggccgagcaaagccggagccggagcggggccgcaggagacgggccgggtccggacgggccgagatgccctataaa

SEQ ID NO: 192074 - DNA, 120 bp, Artificial Sequence
  ENSG00000112640_1 (sequence is synthesized)
ctgaaaaaggagaaggagccccccaaggttgccaaatgcacagccaagcctagcagctcgggcaaggatggtggaggcgagaacactgaggaggcccagccgcagccccagccccagccc

SEQ ID NO: 192075 - DNA, 120 bp, Artificial Sequence
  ENSG00000112640_2 (sequence is synthesized)
cagccccaagcccagtctcagccaccgtcatccaacaagcgtcccagcaatagcacgccgccccccacgcagctcagcaaaatcaagtactcaggggggccccagattgtcaagaaggag

SEQ ID NO: 192076 - DNA, 120 bp, Artificial Sequence
  ENSG00000112640_3 (sequence is synthesized)
cgacggcaaagctcctcccgcttcaacctcagcaagaatcgggagctgcagaagcttcctgccctgaaagattcgccaacccaggagcgggaggagctgtttatccagaagctacgccag

SEQ ID NO: 192077 - DNA, 120 bp, Artificial Sequence
  ENSG00000112640_4 (sequence is synthesized)
tgctgtgtcctctttgacttcgtgtcagacccactcagtgacctcaaattcaaggaggtgaagcgggcaggactcaacgagatggtggagtacatcacccatagccgtgatgttgtcact

SEQ ID NO: 192078 - DNA, 120 bp, Artificial Sequence
  ENSG00000112640_5 (sequence is synthesized)
gaggccatttaccctgaggctgtcaccatgttttcagtgaacctcttccggacgctgccaccttcatcgaatcccacaggggctgagtttgacccagaggaagatgagcccaccctggaa

SEQ ID NO: 192079 - DNA, 120 bp, Artificial Sequence
  ENSG00000112640_6 (sequence is synthesized)
gctgcttggccacatctccagctcgtgtatgagttcttcttacgtttccttgagtctcctgatttccagccaaacatagccaagaagtacatcgaccagaagtttgtacttgctctccta

SEQ ID NO: 192080 - DNA, 120 bp, Artificial Sequence
  ENSG00000112640_7 (sequence is synthesized)
gacctatttgacagtgaggatcctcgagagcgggacttcctcaagaccattttgcatcgcatctatggcaagtttttggggctccgggcttatatccgtaggcagatcaaccacatcttc

SEQ ID NO: 192081 - DNA, 120 bp, Artificial Sequence
  ENSG00000112640_8 (sequence is synthesized)
tacaggttcatctacgagacggagcatcacaacgggattgctgagctcctggagatcctgggcagcatcatcaatggctttgccctgccccttaaagaagagcacaagatgttcctcatc

SEQ ID NO: 192082 - DNA, 120 bp, Artificial Sequence
  ENSG00000112640_9 (sequence is synthesized)
cgtgtcctacttccccttcacaaggtcaagtccctgagtgtctaccaccctcagctggcatactgtgtggtacaattcctggagaaggagagcagtctgactgagccggtaattgtggga

SEQ ID NO: 192083 - DNA, 120 bp, Artificial Sequence
  ENSG00000112640_10 (sequence is synthesized)
cttctcaagttttggcccaagacccacagccccaaggaggtgatgttcttgaatgagctggaggagattctggacgtcattgaaccttctgagttcagcaaagtgatggaacccctcttc

SEQ ID NO: 192084 - DNA, 120 bp, Artificial Sequence
  ENSG00000112640_11 (sequence is synthesized)
cgccagctggccaagtgtgtctctagcccccatttccaggtggcagagcgtgctctctattactggaacaatgagtacatcatgagcctgataagtgacaatgctgcccgagtcctcccc

SEQ ID NO: 192085 - DNA, 120 bp, Artificial Sequence
  ENSG00000112640_12 (sequence is synthesized)
atgaatcagaagctgtttgatgactgcacacaacaatacaaggcagagaagcagaagggccggttccgaatgaaggaaagggaagagatgtggcaaaaaatcgaggagctggcccggctt

SEQ ID NO: 192086 - DNA, 120 bp, Artificial Sequence
  ENSG00000112640_13 (sequence is synthesized)
aatccccagtatcccatgttccgagcccctccaccactgccccctgtgtactcgatggagacagagacccccacagctgaggacatccagcttctgaagaggactgtggagactgaggct

SEQ ID NO: 192087 - DNA, 120 bp, Artificial Sequence
  ENSG00000112640_14 (sequence is synthesized)
gttcagatgctaaaagacatcaagaaggagaaagtgctgctgcggaggaagtcggagctgccccaggacgtgtacaccatcaaggcactggaggcgcacaagcgggcggaagagttccta

SEQ ID NO: 192088 - DNA, 120 bp, Artificial Sequence
  ENSG00000112640_15 (sequence is synthesized)
actgccagccaggaggctctctgacccctcacgttcctaccacagggccacagcccacacagccctgggacactgccctggccctccatactctgctccctactggctgtcttgggggaa

SEQ ID NO: 192089 - DNA, 120 bp, Artificial Sequence
  ENSG00000112640_16 (sequence is synthesized)
ggcagcgcctctctagctactcaagggagggggatgtgggcacttgaagcagggacacccacagaatggtccctcttctccccaaaaggtgttcatgcctccctgtggctagtacaggct

SEQ ID NO: 192090 - DNA, 120 bp, Artificial Sequence
  ENSG00000112640_17 (sequence is synthesized)
gagcactaagatgcttagtgctcagacaacctggggatgcctgtcccctacctgctcctcacccacagctacctgaggctgctctgagaagtacacacaggaatacatacgctcctctat

SEQ ID NO: 192091 - DNA, 120 bp, Artificial Sequence
  ENSG00000112640_18 (sequence is synthesized)
tcttcccttcatcctcatttgaacgccaggtatctcccctcctctctctcccctgcagaggcatgtagggaacagcaggagattattctcaccaaagttatgtcaagccccattggtccc

SEQ ID NO: 192092 - DNA, 120 bp, Artificial Sequence
  ENSG00000112640_19 (sequence is synthesized)
agagtagctgaagggaagccaacccccctgcagcacaaataggccccccagtcccagccgtgtgctggcagatagggttgtattatttcttcttaccccatgcctgaccaagggaggtca

SEQ ID NO: 192093 - DNA, 120 bp, Artificial Sequence
  ENSG00000112640_20 (sequence is synthesized)
aaaggagaaaagtataggctgtggacaataactgatgaatatagggcccagatggaccaagtggggccggggagggatgaataaacaccctaccccgtgccctgtctttggtgagcagca

SEQ ID NO: 192094 - DNA, 120 bp, Artificial Sequence
  ENSG00000112640_21 (sequence is synthesized)
gccctggggtcacagacatggaagggaccaccctggggctgactgcttttctgtgctgttggttcccaaaactagaaagaaggaagcagggagcggtgccccaagcatggctcctgccaa

SEQ ID NO: 192095 - DNA, 120 bp, Artificial Sequence
  ENSG00000112640_22 (sequence is synthesized)
cacctatttatttccttgtttgtgctatgctgggcaggccttctcttgtcccttataggtaccttggaggggccaggggctgaggaaggccggacccaggttccaggggcgcaggcagtg

SEQ ID NO: 192096 - DNA, 120 bp, Artificial Sequence
  ENSG00000112640_23 (sequence is synthesized)
cggcttttggctgtgtacatagggtgctttattctccacagagtgatacatgctaaggtgggttgggcttggaccgatgtccccatatgtacagaactgaataaagtgggtctctgagaa

SEQ ID NO: 192097 - DNA, 120 bp, Artificial Sequence
  ENSG00000112640_24 (sequence is synthesized)
ttctgctactgaggtggggtgggagcagggaggtggggggactgtacagaatgctggagggacatcaggggttgtcaagagagccatttttcttccctcaggttcatctacgagacggag

SEQ ID NO: 192098 - DNA, 120 bp, Artificial Sequence
  ENSG00000112640_25 (sequence is synthesized)
gcacagatgcctgaaaaaggttggcaggattggtgtactgaacttggatctgaccctctggtcctaacaaatgtcccttaattcctagcatcatcaatggctttgccctgccccttaaag

SEQ ID NO: 192099 - DNA, 120 bp, Artificial Sequence
  ENSG00000112640_26 (sequence is synthesized)
gaacccaaccccaatcctacttttgctcctcaggggccggttccgaatgaaggaaagggaagagatgtggcaaaaaatcgaggagctggcccggcttaatccccagtatcccatgttccg

SEQ ID NO: 192100 - DNA, 120 bp, Artificial Sequence
  ENSG00000112651_0 (sequence is synthesized)
aacgtcatctaggagcaccgagcagcttggctaaaagtaagggtgtcgtgctgatggccctgtgcgcactgacccgcgctctgcgctctctgaacctggcgcccccgaccgtcgccgccc

SEQ ID NO: 192101 - DNA, 120 bp, Artificial Sequence
  ENSG00000112651_1 (sequence is synthesized)
ctgccccgagtctgttccccgccgcccagatgatgaacaatggcctcctccaacagccctctgccttgatgttgctcccctgccgcccagttcttacttctgtggcccttaatgccaact

SEQ ID NO: 192102 - DNA, 120 bp, Artificial Sequence
  ENSG00000112651_2 (sequence is synthesized)
ttgtgtcctggaagagtcgtaccaagtacaccattacaccagtgaagatgaggaagtctgggggccgagaccacacaggccgaatccgggtgcatggtattggcgggggccacaagcaac

SEQ ID NO: 192103 - DNA, 120 bp, Artificial Sequence
  ENSG00000112651_3 (sequence is synthesized)
gttatcgaatgattgactttctgcgtttccggcctgaggagaccaagtcaggaccctttgaggagaaggttatccaagtccgctatgatccctgtaggtcagcagacatagctctggttg

SEQ ID NO: 192104 - DNA, 120 bp, Artificial Sequence
  ENSG00000112651_4 (sequence is synthesized)
ctgggggcagccggaaacgctggatcatcgccacagaaaacatgcaggctggagatacaatcttgaactctaaccacataggccgaatggcagttgctgctcgggaaggggatgcgcatc

SEQ ID NO: 192105 - DNA, 120 bp, Artificial Sequence
  ENSG00000112651_5 (sequence is synthesized)
tgtggggaccctcatcaacaacgtggaaagtgagccaggccggggtgcccaatatatccgagctgcagggacgtgtggtgtgctactgcggaaggtgaatggcacagccattatccagct

SEQ ID NO: 192106 - DNA, 120 bp, Artificial Sequence
  ENSG00000112651_6 (sequence is synthesized)
gccctctaagaggcagatgcaggtgctggaaacgtgcgtagcaacagtaggccgagtatccaacgttgatcataacaaacgggtcattggcaaggcaggtcgcaaccgctggctgggcaa

SEQ ID NO: 192107 - DNA, 120 bp, Artificial Sequence
  ENSG00000112651_7 (sequence is synthesized)
gaggcctaacagtgggcggtggcaccgcaaggggggctgggctggccgaaagattcggccactaccccccatgaagagttacgtgaagctgccttctgcttctgcccaaagctgatatcc

SEQ ID NO: 192108 - DNA, 120 bp, Artificial Sequence
  ENSG00000112651_8 (sequence is synthesized)
ctgccttctgcttctgcccaaagctgatatccctgtactctaataaaatgccccccccccccgttttaatctgttactgtggttttgttttgggtgttttttgttttttttgttgttgtt

SEQ ID NO: 192109 - DNA, 120 bp, Artificial Sequence
  ENSG00000112651_9 (sequence is synthesized)
aaacgtggggaaaagaagtaaaaagtgtggaagagaaagtacaggacactgggtctgtccccaccccaattcccttacaagtaatggagccggggatggaaataaatgacgtccaaggtc

SEQ ID NO: 192110 - DNA, 120 bp, Artificial Sequence
  ENSG00000112651_10 (sequence is synthesized)
taggccgaatggcaggtgagagatggctaccagatgtgtgggctggaggcagcaaaagttctagagctaatgaaatcctgtcttttagttgctgctcgggaaggggatgcgcatcctctt

SEQ ID NO: 192111 - DNA, 120 bp, Artificial Sequence
  ENSG00000112651_11 (sequence is synthesized)
gcaaggagagtctgaacccatggttccacatctggtactggcagagaaaattaaggaaaaaacaaacatgaggatgaagatatgcatgtgtttttacctaaaacatagcatgcgtccttc

SEQ ID NO: 192112 - DNA, 120 bp, Artificial Sequence
  ENSG00000112651_12 (sequence is synthesized)
tttgtgtatctgctcctaaagagcaaagcaagggcagcatgtggggtatgtcccctgtgtaagtccctctgcacccccctgttttgtggagggtggcaaatcagcttctttccccaggga

SEQ ID NO: 192113 - DNA, 120 bp, Artificial Sequence
  ENSG00000112651_13 (sequence is synthesized)
caaggacagggggatttaagcagtcaaaaggaaaaacatgttaagaccctagacttgtatattgacacacttgtaccttgtaaggcagaggaatgtaattaaaaagcacttatttggctc

SEQ ID NO: 192114 - DNA, 120 bp, Artificial Sequence
  ENSG00000112651_14 (sequence is synthesized)
cttttgcatgtagtatgtgtacaggagtcagagagtagaatacaaagcaataggtaattggtctatgcttctaaagacaatttgggtaattgaagaaaatgggccatacacaggaagtgc

SEQ ID NO: 192115 - DNA, 120 bp, Artificial Sequence
  ENSG00000112651_15 (sequence is synthesized)
attgaagaaaatgggccatacacaggaagtgccatgacattttccttcatacccttcaaaaatttataacaggctgggtaaggtggctcacgactgtaatcccagcattttgggaggccg

SEQ ID NO: 192116 - DNA, 120 bp, Artificial Sequence
  ENSG00000112651_16 (sequence is synthesized)
gttccccgccgcccaggtaatccatcttacccgggaagaaggctgcttccattcgggctgccggagatggggtctgcgggcatgcgaggcgggagttgcgagtctggtcaggagtcatgc

SEQ ID NO: 192117 - DNA, 120 bp, Artificial Sequence
  ENSG00000112651_17 (sequence is synthesized)
aagagcaaagcaagggcagcatgtggggtatgtcccctgtgtaagtccctctgcacccccctgttttgtggagggtggcaaatcagcttctttccccagggacgtgtggtgtgctactgc

SEQ ID NO: 192118 - DNA, 80 bp, Artificial Sequence
  ENSG00000112655_0 (sequence is synthesized)
gctccggctgcggctgctgctgcggcgcccgcgctccggtgcgctccgcctcctgtgcccgccgcggagcgcagtctgcg

SEQ ID NO: 192119 - DNA, 120 bp, Artificial Sequence
  ENSG00000112655_1 (sequence is synthesized)
gcgcagtctgcgcgcccgccgtgcgccctcagctccttttcctgagcccgccgcgatgggagctgcgcggggatccccggccagaccccgccggttgcctctgctcagcgtcctgctgct

SEQ ID NO: 192120 - DNA, 120 bp, Artificial Sequence
  ENSG00000112655_2 (sequence is synthesized)
gccgctgctgggcggtacccagacagccattgtcttcatcaagcagccgtcctcccaggatgcactgcaggggcgccgggcgctgcttcgctgtgaggttgaggctccgggcccggtaca

SEQ ID NO: 192121 - DNA, 120 bp, Artificial Sequence
  ENSG00000112655_3 (sequence is synthesized)
tgtgtactggctgctcgatggggcccctgtccaggacacggagcggcgtttcgcccagggcagcagcctgagctttgcagctgtggaccggctgcaggactctggcaccttccagtgtgt

SEQ ID NO: 192122 - DNA, 120 bp, Artificial Sequence
  ENSG00000112655_4 (sequence is synthesized)
ggctcgggatgatgtcactggagaagaagcccgcagtgccaacgcctccttcaacatcaaatggattgaggcaggtcctgtggtcctgaagcatccagcctcggaagctgagatccagcc

SEQ ID NO: 192123 - DNA, 120 bp, Artificial Sequence
  ENSG00000112655_5 (sequence is synthesized)
acagacccaggtcacacttcgttgccacattgatgggcaccctcggcccacctaccaatggttccgagatgggacccccctttctgatggtcagagcaaccacacagtcagcagcaagga

SEQ ID NO: 192124 - DNA, 120 bp, Artificial Sequence
  ENSG00000112655_6 (sequence is synthesized)
gcggaacctgacgctccggccagctggtcctgagcatagtgggctgtattcctgctgcgcccacagtgcttttggccaggcttgcagcagccagaacttcaccttgagcattgctgatga

SEQ ID NO: 192125 - DNA, 120 bp, Artificial Sequence
  ENSG00000112655_7 (sequence is synthesized)
aagctttgccagggtggtgctggcaccccaggacgtggtagtagcgaggtatgaggaggccatgttccattgccagttctcagcccagccacccccgagcctgcagtggctctttgagga

SEQ ID NO: 192126 - DNA, 120 bp, Artificial Sequence
  ENSG00000112655_8 (sequence is synthesized)
tgagactcccatcactaaccgcagtcgccccccacacctccgcagagccacagtgtttgccaacgggtctctgctgctgacccaggtccggccacgcaatgcagggatctaccgctgcat

SEQ ID NO: 192127 - DNA, 120 bp, Artificial Sequence
  ENSG00000112655_9 (sequence is synthesized)
tggccaggggcagaggggcccacccatcatcctggaagccacacttcacctagcagagattgaagacatgccgctatttgagccacgggtgtttacagctggcagcgaggagcgtgtgac

SEQ ID NO: 192128 - DNA, 120 bp, Artificial Sequence
  ENSG00000112655_10 (sequence is synthesized)
ctgccttccccccaagggtctgccagagcccagcgtgtggtgggagcacgcgggagtccggctgcccacccatggcagggtctaccagaagggccacgagctggtgttggccaatattgc

SEQ ID NO: 192129 - DNA, 120 bp, Artificial Sequence
  ENSG00000112655_11 (sequence is synthesized)
tgaaagtgatgctggtgtctacacctgccacgcggccaacctggctggtcagcggagacaggatgtcaacatcactgtggccactgtgccctcctggctgaagaagccccaagacagcca

SEQ ID NO: 192130 - DNA, 120 bp, Artificial Sequence
  ENSG00000112655_12 (sequence is synthesized)
gctggaggagggcaaacccggctacttggattgcctgacccaggccacaccaaaacctacagttgtctggtacagaaaccagatgctcatctcagaggactcacggttcgaggtcttcaa

SEQ ID NO: 192131 - DNA, 120 bp, Artificial Sequence
  ENSG00000112655_13 (sequence is synthesized)
gaatgggaccttgcgcatcaacagcgtggaggtgtatgatgggacatggtaccgttgtatgagcagcaccccagccggcagcatcgaggcgcaagcccgtgtccaagtgctggaaaagct

SEQ ID NO: 192132 - DNA, 120 bp, Artificial Sequence
  ENSG00000112655_14 (sequence is synthesized)
caagttcacaccaccaccccagccacagcagtgcatggagtttgacaaggaggccacggtgccctgttcagccacaggccgagagaagcccactattaagtgggaacgggcagatgggag

SEQ ID NO: 192133 - DNA, 120 bp, Artificial Sequence
  ENSG00000112655_15 (sequence is synthesized)
cagcctcccagagtgggtgacagacaacgctgggaccctgcattttgcccgggtgactcgagatgacgctggcaactacacttgcattgcctccaacgggccgcagggccagattcgtgc

SEQ ID NO: 192134 - DNA, 120 bp, Artificial Sequence
  ENSG00000112655_16 (sequence is synthesized)
ccatgtccagctcactgtggcagtttttatcaccttcaaagtggaaccagagcgtacgactgtgtaccagggccacacagccctactgcagtgcgaggcccagggggaccccaagccgct

SEQ ID NO: 192135 - DNA, 120 bp, Artificial Sequence
  ENSG00000112655_17 (sequence is synthesized)
cgcatcctggaccccaccaagctgggacccaggatgcacatcttccagaatggctccctggtgatccatgacgtggcccctgaggactcaggccgctacacctgcattgcaggcaacagc

SEQ ID NO: 192136 - DNA, 120 bp, Artificial Sequence
  ENSG00000112655_18 (sequence is synthesized)
tgcaacatcaagcacacggaggcccccctctatgtcgtggacaagcctgtgccggaggagtcggagggccctggcagccctcccccctacaagatgatccagaccattgggttgtcggtg

SEQ ID NO: 192137 - DNA, 120 bp, Artificial Sequence
  ENSG00000112655_19 (sequence is synthesized)
ggtgccgctgtggcctacatcattgccgtgctgggcctcatgttctactgcaagaagcgctgcaaagccaagcggctgcagaagcagcccgagggcgaggagccagagatggaatgcctc

SEQ ID NO: 192138 - DNA, 120 bp, Artificial Sequence
  ENSG00000112655_20 (sequence is synthesized)
aacggtgggcctttgcagaacgggcagccctcagcagagatccaagaagaagtggccttgaccagcttgggctccggccccgcggccaccaacaaacgccacagcacaagtgataagatg

SEQ ID NO: 192139 - DNA, 120 bp, Artificial Sequence
  ENSG00000112655_21 (sequence is synthesized)
cacttcccacggtctagcctgcagcccatcaccacgctggggaagagtgagtttggggaggtgttcctggcaaaggctcagggcttggaggagggagtggcagagaccctggtacttgtg

SEQ ID NO: 192140 - DNA, 120 bp, Artificial Sequence
  ENSG00000112655_22 (sequence is synthesized)
aagagcctgcagagcaaggatgagcagcagcagctggacttccggagggagttggagatgtttgggaagctgaaccacgccaacgtggtgcggctcctggggctgtgccgggaggctgag

SEQ ID NO: 192141 - DNA, 120 bp, Artificial Sequence
  ENSG00000112655_23 (sequence is synthesized)
ccccactacatggtgctggaatatgtggatctgggagacctcaagcagttcctgaggatttccaagagcaaggatgaaaaattgaagtcacagcccctcagcaccaagcagaaggtggcc

SEQ ID NO: 192142 - DNA, 120 bp, Artificial Sequence
  ENSG00000112655_24 (sequence is synthesized)
ctatgcacccaggtagccctgggcatggagcacctgtccaacaaccgctttgtgcataaggacttggctgcgcgtaactgcctggtcagtgcccagagacaagtgaaggtgtctgccctg

SEQ ID NO: 192143 - DNA, 120 bp, Artificial Sequence
  ENSG00000112655_25 (sequence is synthesized)
ggcctcagcaaggatgtgtacaacagtgagtactaccacttccgccaggcctgggtgccgctgcgctggatgtcccccgaggccatcctggagggtgacttctctaccaagtctgatgtc

SEQ ID NO: 192144 - DNA, 120 bp, Artificial Sequence
  ENSG00000112655_26 (sequence is synthesized)
tgggccttcggtgtgctgatgtgggaagtgtttacacatggagagatgccccatggtgggcaggcagatgatgaagtactggcagatttgcaggctgggaaggctagacttcctcagccc

SEQ ID NO: 192145 - DNA, 120 bp, Artificial Sequence
  ENSG00000112655_27 (sequence is synthesized)
gagggctgcccttccaaactctatcggctgatgcagcgctgctgggccctcagccccaaggaccggccctccttcagtgagattgccagcgccctgggagacagcaccgtggacagcaag

SEQ ID NO: 192146 - DNA, 120 bp, Artificial Sequence
  ENSG00000112655_28 (sequence is synthesized)
ccgtgaggagggagcccgctcaggatggcctgggcaggggaggacatctctagagggaagctcacagcatgatgggcaagatccctgtcctcctgggccctgaggcccctgccctagtgc

SEQ ID NO: 192147 - DNA, 120 bp, Artificial Sequence
  ENSG00000112655_29 (sequence is synthesized)
aacaggcattgctgaggtctgagcagggcctggcctttcctcctcttcctcaccctcatcctttgggaggctgacttggacccaaactgggcgactagggctttgagctgggcagttttc

SEQ ID NO: 192148 - DNA, 120 bp, Artificial Sequence
  ENSG00000112655_30 (sequence is synthesized)
cctgccacctcttcctctatcagggacagtgtgggtgccacaggtaaccccaatttctggccttcaacttctccccttgaccgggtccaactctgccactcatctgccaactttgcctgg

SEQ ID NO: 192149 - DNA, 120 bp, Artificial Sequence
  ENSG00000112655_31 (sequence is synthesized)
ggagggctaggcttgggatgagctgggtttgtggggagttccttaatattctcaagttctgggcacacagggttaatgagtctcttggcccactggtcccacttgggggtctagaccagg

SEQ ID NO: 192150 - DNA, 120 bp, Artificial Sequence
  ENSG00000112655_32 (sequence is synthesized)
attatagaggacacagcaagtgagtcctccccactctgggcttgtgcacactgacccagacccacgtcttccccacccttctctcctttcctcatcctaagtgcctggcagatgaaggag

SEQ ID NO: 192151 - DNA, 120 bp, Artificial Sequence
  ENSG00000112655_33 (sequence is synthesized)
ttttcaggagcttttgacactatataaaccgccctttttgtatgcaccacgggcggcttttatatgtaattgcagcgtggggtgggtgggcatgggaggtaggggtgggccctggagatg

SEQ ID NO: 192152 - DNA, 81 bp, Artificial Sequence
  ENSG00000112655_34 (sequence is synthesized)
ggtgggtgggcatgggaggtaggggtgggccctggagatgaggagggtgggccatccttaccccacacttttattgttgtc

SEQ ID NO: 192153 - DNA, 120 bp, Artificial Sequence
  ENSG00000112655_35 (sequence is synthesized)
attatttcatcatttgggcttgccctttcatgtggagcactgtgattggacccaagttggcaagagtggaagaccaggggacagaacagaaatccccatggtggccagagtgtcaggtct

SEQ ID NO: 192154 - DNA, 120 bp, Artificial Sequence
  ENSG00000112655_36 (sequence is synthesized)
acagaacatggcacagaagccatttttgtggcagcggtggggattcggccgtctcaccatgctgctgcacagtcttagagtccttgctcagagccgggctgtcgtttatttaacatccaa

SEQ ID NO: 192155 - DNA, 120 bp, Artificial Sequence
  ENSG00000112655_37 (sequence is synthesized)
cctgagtttttctggtctgagccgagagtttgctcgagaactgccgagagttgctggctctcgggcccagatggggagtttcttgtcgggggagaaaagaccatccgcacccaccgtggg

SEQ ID NO: 192156 - DNA, 120 bp, Artificial Sequence
  ENSG00000112655_38 (sequence is synthesized)
atcaaatgtgagagccaggggggctgtgcccagtccccctgtcagaccctcaatgactgaggcctgggggatccctcccttacctcagcttctcccatttccagttaaacgggccaggca

SEQ ID NO: 192157 - DNA, 120 bp, Artificial Sequence
  ENSG00000112655_39 (sequence is synthesized)
gaatgcatttatcatcagctttttttgctcatgtggataagaggaaattaaaagttatattttttccaaaattttttccttcaagtctgggacccatttatctgctgcatgcttgtgcaa

SEQ ID NO: 192158 - DNA, 120 bp, Artificial Sequence
  ENSG00000112655_40 (sequence is synthesized)
atggaaagggcggccgagcccttggccaagtgtcagacttgacctgccagggaccaggcaggcacttagtatctggtaactgtagccccagcctcagcctccagggcttccttgtgtctg

SEQ ID NO: 192159 - DNA, 120 bp, Artificial Sequence
  ENSG00000112655_41 (sequence is synthesized)
ggggggtgttctcttcctacaatgctgcctcccaggttcctgcagcagccacacatatctctgggtggctggggaggaggaccaggtcagaatgcagtaggacaaggttcttttctccag

SEQ ID NO: 192160 - DNA, 120 bp, Artificial Sequence
  ENSG00000112655_42 (sequence is synthesized)
gaggcccagagaggatgatgggtcaggtaaaaggccctgcacttaactctctgcccctgggagacttatttctcctctggggacttgtttctgcatccacaggtgaaagtggtttaaatg

SEQ ID NO: 192161 - DNA, 120 bp, Artificial Sequence
  ENSG00000112655_43 (sequence is synthesized)
aagctcttaaactttcttggtttggcagcagagttatttttctagacaaagtataatgtgaaagtttaaatggatgaaaatgaactgaggaggcccccttggtgggagccactggggtgt

SEQ ID NO: 192162 - DNA, 120 bp, Artificial Sequence
  ENSG00000112655_44 (sequence is synthesized)
gtgtggcagttgggggatcctgcatggtctcccttcattcccctaatgcctcttgaggcccctcagtgtgggccattaaaaggcccctagaccagcagatcccttctacagatctgctta

SEQ ID NO: 192163 - DNA, 120 bp, Artificial Sequence
  ENSG00000112655_45 (sequence is synthesized)
ttgaaaaacctgctctgtgccaggcagtgcctggaattctaaacctgaagctcccaaatgctgctctccggggcctggctcacattatcaagtcacttgggaagcttaacaaataacgtg

SEQ ID NO: 192164 - DNA, 120 bp, Artificial Sequence
  ENSG00000112655_46 (sequence is synthesized)
ggtttgtggtagctccttgacaggtgtgcttatccgtgtcgcctgtcttggcttccgatgcaaagccagcttgggaacccctggcctcatctccttcagagtcttcgtttgaccttggtg

SEQ ID NO: 192165 - DNA, 120 bp, Artificial Sequence
  ENSG00000112655_47 (sequence is synthesized)
gggcatgaggacctgctggcccttgttaaagccagtgaaggtggtgaccctcccgggccatctgttaagttgccctgttgatggggttgggaggagttagtagagaagcagggcttcttt

SEQ ID NO: 192166 - DNA, 120 bp, Artificial Sequence
  ENSG00000112655_48 (sequence is synthesized)
aagcataggtagagatctagcccagtgtggccccagagcctgttattcactgcccttcgtgcagattttgtcattcctgtgtactacctgtagtattatttacttgatgttttatttaaa

SEQ ID NO: 192167 - DNA, 120 bp, Artificial Sequence
  ENSG00000112655_49 (sequence is synthesized)
ttgactctttaaaaaaaaaaactaagttaccattgttctaggaaaaaatatgagaaatcatgggtttgtcatagttacgttttttcctagcatacgttaagacatgtttaccatgagcca

SEQ ID NO: 192168 - DNA, 120 bp, Artificial Sequence
  ENSG00000112655_50 (sequence is synthesized)
ccaaaaattctcatgcgagtcaccctttggaaaatgctgaatattagtcccacccttttattttgttgctgcagacactgaagcctaaggagggagggggtcacagcagaaccgggtctc

SEQ ID NO: 192169 - DNA, 120 bp, Artificial Sequence
  ENSG00000112655_51 (sequence is synthesized)
gtgcccagcccaggtgggtgggtccccactgtgggagaggctaggcccctcccccaggtcaggagctgcctcggcctgggtgaaggtggctggctgactcagactgtacccacagggaag

SEQ ID NO: 192170 - DNA, 120 bp, Artificial Sequence
  ENSG00000112655_52 (sequence is synthesized)
caggggacgtgggggtctcgggtagggagggcagtgtcctacaaaggtgggagtcagtggttggagcaccgtgaaaaccttgtctcgtgcagtctcagccgagacctcacctgcctgctg

SEQ ID NO: 192171 - DNA, 120 bp, Artificial Sequence
  ENSG00000112655_53 (sequence is synthesized)
ttacactttgcccaccttatgatgctcagcttctgccttccctgctcttggatgcctgctttccctttatcagcacccagtctttccatctgtatctcaggggcgttggtcctaagtttt

SEQ ID NO: 192172 - DNA, 120 bp, Artificial Sequence
  ENSG00000112655_54 (sequence is synthesized)
tctgggacttctcactgtcacactgcagggatgccttccaggtcatcttctctgactcttgttttctttggtttgttattttttcctccccaaaagcttgtccccacttgagaataaata

SEQ ID NO: 192173 - DNA, 120 bp, Artificial Sequence
  ENSG00000112655_55 (sequence is synthesized)
tatcagaacccactttgcctccctccttcctagcaccacttgtgacatgagtgttaccccagccaccagccttctcctctccactcagggtgtcattcccagagctgcgccttcctcttc

SEQ ID NO: 192174 - DNA, 120 bp, Artificial Sequence
  ENSG00000112655_56 (sequence is synthesized)
attccccagctggtccttgccctcaccccatggtcctcaaactgctgcttctcaaatccctagttctggggcaagagcgggcaggagtcctatcagtctttccattaacaagtacttacg

SEQ ID NO: 192175 - DNA, 120 bp, Artificial Sequence
  ENSG00000112655_57 (sequence is synthesized)
cctggtactcacctgaggtcctctcagttctgggccctgcaggcttgggaatcagttcactactgggagtcggtgtagacagtagagagccaggcacaggggttagggtgggtgctccag

SEQ ID NO: 192176 - DNA, 120 bp, Artificial Sequence
  ENSG00000112655_58 (sequence is synthesized)
aggaaatagtgacagccctcacagaaaaatggtcctctgggtacagaggaaagagcaatagactaggaatctagagacctgggtcccactatgctcccaatgcacagagtgacgatggta

SEQ ID NO: 192177 - DNA, 120 bp, Artificial Sequence
  ENSG00000112655_59 (sequence is synthesized)
gcaaatcacccaccttactggggttcagtctcctcatccataaaatggagccagtaatctactacctaccccacaaggtggttggaaaggtcaaatgaagtagatgaaaatgatttttct

SEQ ID NO: 192178 - DNA, 120 bp, Artificial Sequence
  ENSG00000112655_60 (sequence is synthesized)
ttttttcttttttgggaggtaatagtggacaaaattataggtgatttttaatttgttttagtttgttatgctttccaaatttctttactaaacatattacttatgaaaaaaaagaggggg

SEQ ID NO: 192179 - DNA, 87 bp, Artificial Sequence
  ENSG00000112655_61 (sequence is synthesized)
ttctttactaaacatattacttatgaaaaaaaagagggggagaaaagcaagacatatgactgaaagtacacatgataaaccctttat

SEQ ID NO: 192180 - DNA, 71 bp, Artificial Sequence
  ENSG00000112655_62 (sequence is synthesized)
gagatcgcaccgttgctcttccttatatcctcactacaggcatagggatttatttgtttacttatttcttt

SEQ ID NO: 192181 - DNA, 120 bp, Artificial Sequence
  ENSG00000112655_63 (sequence is synthesized)
cactacaggcatagggatttatttgtttacttatttctttataccatgccttgttccaaaccttttgtggtagtttaaaaggatacacaataaaaattacaatatgcacacagagacaca

SEQ ID NO: 192182 - DNA, 120 bp, Artificial Sequence
  ENSG00000112655_64 (sequence is synthesized)
gagtggggacacagccaaaccatatcactctctctcgcacctgcattgccatttgcctcattgcttcccgagctgatctcctgtagttggaacacacacctgcacgtgcacctgagcaag

SEQ ID NO: 192183 - DNA, 120 bp, Artificial Sequence
  ENSG00000112655_65 (sequence is synthesized)
cacctgagcaagtgtatgcaggcacacacaccagtctggagtgtcagcttccttctctctgccctgttcctggtcgattccttactacatttccgactttgcaggaaaggggttcccttg

SEQ ID NO: 192184 - DNA, 86 bp, Artificial Sequence
  ENSG00000112655_66 (sequence is synthesized)
tgggaggctgaggtgggaaaaatcacttgagcctatgagttcgagactgtagtgagccataattgtgtcactcttaaaagaaaaaa

SEQ ID NO: 192185 - DNA, 120 bp, Artificial Sequence
  ENSG00000112655_67 (sequence is synthesized)
aattttaaaaaaggtgctggcacctgggtcttccgtaaagggaaactcctgccatctgaggagcatggggcttctgaactcagggcctagaatggtagtaggatttcttggagatggatc

SEQ ID NO: 192186 - DNA, 120 bp, Artificial Sequence
  ENSG00000112658_0 (sequence is synthesized)
aaacattgtatctctttatatggggggaagggtcgggggatccctccgccgccagcgcgtggtcccggccccctccacccgccgtctcggccgcggccagcagcccctgccccccggggg

SEQ ID NO: 192187 - DNA, 80 bp, Artificial Sequence
  ENSG00000112658_1 (sequence is synthesized)
agggggcgctgcgcgcggcctggggcaacccgggccacaggggcaggaaagtgagggcccaggtcggcccgggcgtgcag

SEQ ID NO: 192188 - DNA, 120 bp, Artificial Sequence
  ENSG00000112658_2 (sequence is synthesized)
gggccccgggttcgcagcggcggccgcggcagcgatagcggcactagcagcagcgggagtgccgggttgagccgggaagccgatggcggcggctgcggcggctccgattcctcgctgact

SEQ ID NO: 192189 - DNA, 120 bp, Artificial Sequence
  ENSG00000112658_3 (sequence is synthesized)
gactgcccgtccgccctcctgcatcgagcgccatgttaccgacccaagctggggccgcggcggctctgggccggggctcggccctggggggcagcctgaaccggaccccgacggggcggc

SEQ ID NO: 192190 - DNA, 80 bp, Artificial Sequence
  ENSG00000112658_4 (sequence is synthesized)
gccgcctggagcgggaggctgcggcagcggcggcaaccaccccggcgcccaccgcgggggccctctacagcggcagcgag

SEQ ID NO: 192191 - DNA, 120 bp, Artificial Sequence
  ENSG00000112658_5 (sequence is synthesized)
cgcgggggccctctacagcggcagcgagggcgactcggagtcgggcgaggaggaggagctgggcgccgagcggcgcggcctgaagcggagcctgagcgagatggagatcggtatggtggt

SEQ ID NO: 192192 - DNA, 120 bp, Artificial Sequence
  ENSG00000112658_6 (sequence is synthesized)
cggtgggcccgaggcgtcggcagcggccaccgggggctacgggccggtgagcggcgcggtgagcggggccaagccgggtaagaagacccggggccgcgtgaagatcaagatggagttcat

SEQ ID NO: 192193 - DNA, 120 bp, Artificial Sequence
  ENSG00000112658_7 (sequence is synthesized)
cgacaacaagctgcggcgctacacgaccttcagcaagaggaagacgggcatcatgaagaaggcctatgagctgtccacgctgacagggacacaggtgctgttgctggtggccagtgagac

SEQ ID NO: 192194 - DNA, 120 bp, Artificial Sequence
  ENSG00000112658_8 (sequence is synthesized)
aggccatgtgtatacctttgccacccgaaaactgcagcccatgatcaccagtgagaccggcaaggcactgattcagacctgcctcaactcgccagactctccaccccgttcagaccccac

SEQ ID NO: 192195 - DNA, 120 bp, Artificial Sequence
  ENSG00000112658_9 (sequence is synthesized)
aacagaccagagaatgagtgccactggctttgaagagacagatctcacctaccaggtgtcggagtctgacagcagtggggagaccaaggacacactgaagccggcgttcacagtcaccaa

SEQ ID NO: 192196 - DNA, 120 bp, Artificial Sequence
  ENSG00000112658_10 (sequence is synthesized)
cctgccgggtacaacctccaccatccaaacagcacctagcacctctaccaccatgcaagtcagcagcggcccctcctttcccatcaccaactacctggcaccagtgtctgctagtgtcag

SEQ ID NO: 192197 - DNA, 120 bp, Artificial Sequence
  ENSG00000112658_11 (sequence is synthesized)
ccccagtgctgtcagcagtgccaatgggactgtgctgaagagtacaggcagcggccctgtctcctctgggggccttatgcagctgcctaccagcttcaccctcatgcctggtggggcagt

SEQ ID NO: 192198 - DNA, 120 bp, Artificial Sequence
  ENSG00000112658_12 (sequence is synthesized)
ggcccagcaggtcccagtgcaggccattcaagtgcaccaggccccacagcaagcgtctccctcccgtgacagcagcacagacctcacgcagacctcctccagcgggacagtgacgctgcc

SEQ ID NO: 192199 - DNA, 120 bp, Artificial Sequence
  ENSG00000112658_13 (sequence is synthesized)
cgccaccatcatgacgtcatccgtgcccacaactgtgggtggccacatgatgtaccctagcccgcatgcggtgatgtatgcccccacctcgggcctgggtgatggcagcctcaccgtgct

SEQ ID NO: 192200 - DNA, 120 bp, Artificial Sequence
  ENSG00000112658_14 (sequence is synthesized)
gaatgccttctcccaggcaccatccaccatgcaggtgtcacacagccaggtccaggagccaggtggcgtcccccaggtgttcctgacagcatcatctgggacagtgcagatccctgtttc

SEQ ID NO: 192201 - DNA, 120 bp, Artificial Sequence
  ENSG00000112658_15 (sequence is synthesized)
agcagttcagctccaccagatggctgtgatagggcagcaggccgggagcagcagcaacctcaccgagctacaggtggtgaacctggacaccgcccacagcaccaagagtgaatgatccgc

SEQ ID NO: 192202 - DNA, 120 bp, Artificial Sequence
  ENSG00000112658_16 (sequence is synthesized)
ccgccgccctggacagatggcccaagggatggcaccacttatttattgttgccttttcacgttttctttacacacacgttgacgggccgcaggagggaggcggggaggaggaacgggcag

SEQ ID NO: 192203 - DNA, 120 bp, Artificial Sequence
  ENSG00000112658_17 (sequence is synthesized)
agaaatgggcctgcctgcctccacccgtcctccctcagcctccccttcttcccgccccacctcccatttctgttgctggaggggctgtcctccttcctgggaccccctcgccagcttggc

SEQ ID NO: 192204 - DNA, 120 bp, Artificial Sequence
  ENSG00000112658_18 (sequence is synthesized)
tcgatgtttgccatgagtattagcttacccaatgggaccgtgccccacctccccacacacaggccttctgtggggctgggcaccgtgtcctcctctgaggaagcagttggggccctcttg

SEQ ID NO: 192205 - DNA, 120 bp, Artificial Sequence
  ENSG00000112658_19 (sequence is synthesized)
ccagcctccttgctgaccccaggtcagccctgtgtctgtcacaggctgggtcaaaagagccctggctctgcccctcagggggccagctggggagatgggggcttcttcctcacactgctg

SEQ ID NO: 192206 - DNA, 120 bp, Artificial Sequence
  ENSG00000112658_20 (sequence is synthesized)
tcctctcccccttcagctcctgagtagctgggcctgtgcactgggcaggttcctggggccgcctgccctgccttgccgctccccttggacctccaggggctcctgggttggagggaacca

SEQ ID NO: 192207 - DNA, 120 bp, Artificial Sequence
  ENSG00000112658_21 (sequence is synthesized)
ccagcgttcccttctcccccttgtcttcccccctctcctcccagctgctttacttaaagttgattttgaactttttatttgaggagacgaagtgaaaacaaatctataaatatatatttt

SEQ ID NO: 192208 - DNA, 120 bp, Artificial Sequence
  ENSG00000112658_22 (sequence is synthesized)
taaaatatttaacttttttttatggcgtttttctcgtccccctccctgcccaaactccccttccctggggagccctcaggctccccagaactggctgggcccctggggacagagccaccc

SEQ ID NO: 192209 - DNA, 120 bp, Artificial Sequence
  ENSG00000112658_23 (sequence is synthesized)
catgagctcggggtccaccagtgtgtgggggagattctgggtttgcccagtcctgggttgtttccaggagaaagccgggggaggggccctcaggccattccccaacggggtggggagggt

SEQ ID NO: 192210 - DNA, 120 bp, Artificial Sequence
  ENSG00000112658_24 (sequence is synthesized)
gacccacagctctgggcctctttttgccctttagggctgttgctagggagagggaagagggagaccaaatgtcggggttggggtgggagggcgtcaggcagaggcaactgacttcatttg

SEQ ID NO: 192211 - DNA, 120 bp, Artificial Sequence
  ENSG00000112658_25 (sequence is synthesized)
tgccacacgcatgggcattgcagccttgcgctgtcccaggcatgcagctgcctggggcccaagttgcagtgagcagggtggggtctgggagggggtgagaggcaggaatgggggtcagaa

SEQ ID NO: 192212 - DNA, 120 bp, Artificial Sequence
  ENSG00000112658_26 (sequence is synthesized)
gaagtgggagcagcttcttgggctgagtgcagccaaaggggagccagaaatgggcagttctcccagggagtgagcagctactgtaacttttttaaattaagacaaaaagccttgaagaaa

SEQ ID NO: 192213 - DNA, 120 bp, Artificial Sequence
  ENSG00000112658_27 (sequence is synthesized)
atgactttatttttctaagtgtaacctcagtatttatgtaatttgtacaggggccatgccccacccccctcctccccctttggggtagaccttgagggtgggccagcataggggggaggg

SEQ ID NO: 192214 - DNA, 120 bp, Artificial Sequence
  ENSG00000112658_28 (sequence is synthesized)
tcttttaccctgtgtcagagcctaccttcaccacctatatccagaaggggagctttttcagaaacagggcagcagtggggtgaaattttcttaacccctaagactgccttcagtaggaac

SEQ ID NO: 192215 - DNA, 120 bp, Artificial Sequence
  ENSG00000112658_29 (sequence is synthesized)
aagctggcttctgtgattaggtgaagggatgggggaagattttatgcacagcctagttatcaaggggatgatttgccgacatgtttgagaaccccctaacctctaaccctcattgctgtc

SEQ ID NO: 192216 - DNA, 120 bp, Artificial Sequence
  ENSG00000112658_30 (sequence is synthesized)
ttgccccagtttggggtgccaagatggaagtcacctttctgggctttctcctggagatagctggggcttatgggtggctttcaaggctggggcatggcaaatcaggggccagagagcagg

SEQ ID NO: 192217 - DNA, 120 bp, Artificial Sequence
  ENSG00000112658_31 (sequence is synthesized)
ggagcttgggactcaggtctgtaactgcccagccccttttctctgctcttgtttcactccaccatcactcactcactccccactcccccacccatggggaggagacctttgatgaattct

SEQ ID NO: 192218 - DNA, 120 bp, Artificial Sequence
  ENSG00000112658_32 (sequence is synthesized)
tcctctccttcccacaaaagacagacccagtgagtgaatcaggcaaagtgcttataatgtgtgttgtgtgagcgtggccttgggaggacatgcgtgtgtcagggatgagttgaggtgata

SEQ ID NO: 192219 - DNA, 120 bp, Artificial Sequence
  ENSG00000112658_33 (sequence is synthesized)
tttttatgtgcagcgacccttggtgtttcccttcctcggtggctctggggtatgtgtgtgtgggtgtgtgcgcctgagtgagtgtgtgtgcttgaatgtgagtgtgtatgtcagtggttt

SEQ ID NO: 192220 - DNA, 120 bp, Artificial Sequence
  ENSG00000112658_34 (sequence is synthesized)
ctacttcccctgggatgctgacccaggaatagtggacatggtcacagtcctatgtacagagctttcttttgtattaaaaaaaaatactctttcaataaatgtatcatttttgtgcacaga

SEQ ID NO: 192221 - DNA, 120 bp, Artificial Sequence
  ENSG00000112659_0 (sequence is synthesized)
ggacggcgggaccggccgctgggtcccagcgagggctgagccgggcggtgggaggaggtcaggatggtgggggaacggcatgctggggacctcatggtgcccttagggcctcggctgcag

SEQ ID NO: 192222 - DNA, 120 bp, Artificial Sequence
  ENSG00000112659_1 (sequence is synthesized)
gcatatcctgaagaactcattcgacagaggcctgggcatgacgggcatcctgaatacctgatccgatggagtgtcctgaagtgtggggaagtgggcaaagtgggtgtggaagaaggcaaa

SEQ ID NO: 192223 - DNA, 120 bp, Artificial Sequence
  ENSG00000112659_2 (sequence is synthesized)
gcagagcacatcctcatgtggctgtcggctcctgaggtctacgccaactgccctgggctgttaggtgagcgggcactatctaagggacttcagcacgaaccagctggggtttcaggaagc

SEQ ID NO: 192224 - DNA, 120 bp, Artificial Sequence
  ENSG00000112659_3 (sequence is synthesized)
tttcctcgagatccaggaggcctggatgaagtggcaatgggagagatggaggctgatgttcaggcgctggtacgcagggcggccaggcagctggcagaaagtgggaccccaagcctcacg

SEQ ID NO: 192225 - DNA, 120 bp, Artificial Sequence
  ENSG00000112659_4 (sequence is synthesized)
gccgctgtgcttcacaccatccacgtgctcagtgcctacgccagcatcgggcccctcactggtgtcttcagggagacaggagccctggacctgctcatgcacatgttatgcaatcctgag

SEQ ID NO: 192226 - DNA, 120 bp, Artificial Sequence
  ENSG00000112659_5 (sequence is synthesized)
cctcagatccgccggagtgcaggcaaaatgctgcaggctctggcagcccacgatgctgggagtcgggctcacgtccttctatcactgagccagcaagatggcatcgagcagcacatggat

SEQ ID NO: 192227 - DNA, 120 bp, Artificial Sequence
  ENSG00000112659_6 (sequence is synthesized)
tttgacagtcgctatacattgctggagctgtttgcagaaaccacatcctctgaagaacactgcatggcctttgagggcattcatctgcctcagatcccaggaaagctgcttttctccttg

SEQ ID NO: 192228 - DNA, 120 bp, Artificial Sequence
  ENSG00000112659_7 (sequence is synthesized)
gtgaagcgctacctttgtgtcacgtccctcctggatcagctgaatagcagtccagagctgggagctggagaccaaagctccccatgtgccacaagagagaaaagccggggacagcgggaa

SEQ ID NO: 192229 - DNA, 120 bp, Artificial Sequence
  ENSG00000112659_8 (sequence is synthesized)
ctggagttcagcatggctgtgggcaacctcatctctgagcttgtgcggagcatgggctgggcccggaacctcagcgaacagggcatgtcacctccccggccaacccggtccatctttcag

SEQ ID NO: 192230 - DNA, 120 bp, Artificial Sequence
  ENSG00000112659_9 (sequence is synthesized)
ccctacatttcaggccccagccttttactccccaccattgtcaccacccccagaagacaagggtgggtcttccgccagcgctctgaattctccagccgtagtggctatggagaatatgtg

SEQ ID NO: 192231 - DNA, 120 bp, Artificial Sequence
  ENSG00000112659_10 (sequence is synthesized)
cagcagacactgcagccagggatgcgagtgcggatgctggatgattatgaggagatcagtgctggggacgagggcgagttccggcagagcaacaacggcattccccctgtgcaggttttc

SEQ ID NO: 192232 - DNA, 120 bp, Artificial Sequence
  ENSG00000112659_11 (sequence is synthesized)
tggcagtcgacaggccgcacttactgggtgcactggcacatgctggagatcctgggccctgaggaagccactgaggataaggcttcagcagctgtggagaagggggcaggggctactgtg

SEQ ID NO: 192233 - DNA, 120 bp, Artificial Sequence
  ENSG00000112659_12 (sequence is synthesized)
ttgggcacagcatttccctcctgggactggaatcctatggatgggctgtaccctttgccgtacctccagcccgaacctcagaagaatgagagagtgggatatctgacccaggctgaatgg

SEQ ID NO: 192234 - DNA, 120 bp, Artificial Sequence
  ENSG00000112659_13 (sequence is synthesized)
tgggagctgcttttctttatcaaaaagttggacttgtgtgagcagcagccaattttccagaatctttggaagaacctggatgagaccctgggtgaaaaggccctaggtgagatctctgtg

SEQ ID NO: 192235 - DNA, 120 bp, Artificial Sequence
  ENSG00000112659_14 (sequence is synthesized)
tccgtggaaatggccgagagtctgctgcaggttctcagtagtcgatttgagggcagcactctcaatgacctgctcaactcccagatctacaccaagtatgggctgctgtctaatgaacca

SEQ ID NO: 192236 - DNA, 120 bp, Artificial Sequence
  ENSG00000112659_15 (sequence is synthesized)
agcagctcgtctacttcacgaaatcactcctgtaccccagatccagaagaggagtccaagtcggaggccagcttctcagaggaagagactgagtccctcaaagcaaaggccgaggcccct

SEQ ID NO: 192237 - DNA, 120 bp, Artificial Sequence
  ENSG00000112659_16 (sequence is synthesized)
aagacagaggccgagcccaccaagacaaggaccgagacccccatggcacagagtgattctcagctgtttaaccagcttctggtgactgaggggatgaccctgcccactgagatgaaggag

SEQ ID NO: 192238 - DNA, 120 bp, Artificial Sequence
  ENSG00000112659_17 (sequence is synthesized)
gcagccagtgaaatggccagagccttgcggggtcccggtcctcgcagctccctggatcagcatgtggcagcggtcgtggccactgtgcagatatccagcttggacacaaacctgcagctt

SEQ ID NO: 192239 - DNA, 120 bp, Artificial Sequence
  ENSG00000112659_18 (sequence is synthesized)
tcagggctctctgccctctctcaggctgtggaggaggtcactgagcgggaccaccctctggtccgtcctgacagatcgctgagagagaagctagtgaagatgctggtggagctgctgacc

SEQ ID NO: 192240 - DNA, 120 bp, Artificial Sequence
  ENSG00000112659_19 (sequence is synthesized)
aaccaggtgggagagaagatggtggtcgtgcaggccctgcgcctcctttacctgctcatgaccaagcacgagtggcggccgctctttgccagggagggtggcatctatgctgtgctggtc

SEQ ID NO: 192241 - DNA, 120 bp, Artificial Sequence
  ENSG00000112659_20 (sequence is synthesized)
tgcatgcaagaatataagacttctgtcttggtgcagcaggctgggctggcggcactgaagatgctggccgtcgccagctcctcggagatccccacttttgttactggccgagattctatc

SEQ ID NO: 192242 - DNA, 120 bp, Artificial Sequence
  ENSG00000112659_21 (sequence is synthesized)
cactctttgtttgatgctcagatgaccagagagatcttcgccagcatcgactcagccacacgcccgggctctgagagcctgctcctcactgtccctgcagccgtgatcctgatgctgaat

SEQ ID NO: 192243 - DNA, 120 bp, Artificial Sequence
  ENSG00000112659_22 (sequence is synthesized)
actgaggggtgctcttctgcagcgagaaatggcttactcctgctcaacctacttttgtgcaaccaccacactctgggagaccagattataacccaagagctgagagacacgttgtttagg

SEQ ID NO: 192244 - DNA, 120 bp, Artificial Sequence
  ENSG00000112659_23 (sequence is synthesized)
cactcagggatagcaccaagaacagaacctatgcctaccacacgcaccatcctcatgatgcttctcaatcgctactcagagccgccgggcagccctgagcgtgcagcactagagaccccc

SEQ ID NO: 192245 - DNA, 120 bp, Artificial Sequence
  ENSG00000112659_24 (sequence is synthesized)
atcatccagggtcaggatgggtcccctgagctactgattcgatccctggttgggggcccatctgcagaactactcctggacttggagcgtgtgctgtgccgtgagggcagccccggaggt

SEQ ID NO: 192246 - DNA, 120 bp, Artificial Sequence
  ENSG00000112659_25 (sequence is synthesized)
gccgtgaggcccctcctcaagcgcctccagcaggagacccagcctttcctcctgttgctgcggactctggatgctccggggcccaacaagactctgctgctgtctgtgctgagggtcata

SEQ ID NO: 192247 - DNA, 120 bp, Artificial Sequence
  ENSG00000112659_26 (sequence is synthesized)
acccgactgctggatttccctgaggcaatggtcctcccctggcacgaggtcttggagccctgcctcaactgcctgagtggccctagcagtgactccgagattgttcaggagctgacctgc

SEQ ID NO: 192248 - DNA, 120 bp, Artificial Sequence
  ENSG00000112659_27 (sequence is synthesized)
ttcctacatcgcctggcctcgatgcataaggactatgctgtggtgctctgctgcctgggagcaaaagagatcctctccaaagtcctggacaagcactcagctcagctgctgctgggctgt

SEQ ID NO: 192249 - DNA, 120 bp, Artificial Sequence
  ENSG00000112659_28 (sequence is synthesized)
gagcttcgggacctggtgacagagtgtgagaagtacgcacagctctatagcaacctcacctccagcatcctggccggctgcattcagatggtgctgggccagatcgaagaccacagacga

SEQ ID NO: 192250 - DNA, 120 bp, Artificial Sequence
  ENSG00000112659_29 (sequence is synthesized)
acccaccaacccatcaatatccccttctttgatgtgttcctcaggcatctctgccagggctccagtgtggaagtgaaggaggacaagtgctgggagaaggtggaggtgtcctccaacccg

SEQ ID NO: 192251 - DNA, 120 bp, Artificial Sequence
  ENSG00000112659_30 (sequence is synthesized)
caccgagccagcaagctgacggaccacaaccccaagacctactgggagtccaacggcagcaccggctcccactacatcaccctgcacatgcaccgtggtgttcttgttaggcagctcact

SEQ ID NO: 192252 - DNA, 120 bp, Artificial Sequence
  ENSG00000112659_31 (sequence is synthesized)
ttgctggtggccagtgaggactcaagctacatgccagccagggtggtggtgtttgggggtgacagcaccagctgcatcggcactgagctcaacacggtgaatgtgatgccctctgccagc

SEQ ID NO: 192253 - DNA, 120 bp, Artificial Sequence
  ENSG00000112659_32 (sequence is synthesized)
ttgacacccgggttcggggtgtggaggtcctgggccctaagcccacattctggccactgttccgggagcagctgtgtcgccgaacatgtctcttctacacaattcgggcacaagcctgga

SEQ ID NO: 192254 - DNA, 120 bp, Artificial Sequence
  ENSG00000112659_33 (sequence is synthesized)
gccgggacatagcagaggaccaccggcgcctcctccagctctgtcccagactgaacagggttttgcgccacgagcagaattttgctgaccgcttcctccctgatgatgaggccgcccagg

SEQ ID NO: 192255 - DNA, 120 bp, Artificial Sequence
  ENSG00000112659_34 (sequence is synthesized)
cactgggcaagacctgctgggaggccctggtcagccccctggtgcagaacatcacctctcccgatgcggaaggcgtgagtgccctgggatggctgctggatcagtacttagaacagagag

SEQ ID NO: 192256 - DNA, 120 bp, Artificial Sequence
  ENSG00000112659_35 (sequence is synthesized)
agacctctcggaaccccttgagtcgagcagcgtcctttgcttctcgagttcgtcgcctttgccacttgctggtgcatgtggaacctcctcctgggccttctcctgagccatccactcggc

SEQ ID NO: 192257 - DNA, 120 bp, Artificial Sequence
  ENSG00000112659_36 (sequence is synthesized)
ccttcagcaagaacagcaagggtcgggaccggagcccggcgccttcgccagtgcttccaagcagcagcctgaggaacataacccagtgctggctgagcgtggtgcaggagcaggtcagca

SEQ ID NO: 192258 - DNA, 120 bp, Artificial Sequence
  ENSG00000112659_37 (sequence is synthesized)
gattcctggctgcagcttggagggccccagactttgtgcctcgttactgtaaactctatgagcacttgcagagagcaggctccgagctgtttgggcctcgggcagccttcatgctggctc

SEQ ID NO: 192259 - DNA, 120 bp, Artificial Sequence
  ENSG00000112659_38 (sequence is synthesized)
tgcgcagtggcttctctggcgccttgctgcagcagtccttcctcactgctgctcacatgagtgagcagtttgccaggtacattgaccaacagatccagggtggcctgattggtggagccc

SEQ ID NO: 192260 - DNA, 120 bp, Artificial Sequence
  ENSG00000112659_39 (sequence is synthesized)
ctggagtggaaatgctggggcagcttcagcggcacctggaacccattatggtcctttctggtctggaactggccacaacttttgagcacttctatcagcattatatggcggaccgtctcc

SEQ ID NO: 192261 - DNA, 120 bp, Artificial Sequence
  ENSG00000112659_40 (sequence is synthesized)
tgagctttggttcgagctggctggagggggctgtgctagagcagattggcctctgttttcccaaccgcctcccacagctgatgctgcagagcctgagcacctctgaggagctgcagcgcc

SEQ ID NO: 192262 - DNA, 120 bp, Artificial Sequence
  ENSG00000112659_41 (sequence is synthesized)
agttccacctcttccagctccagcggctcgacaagttgttcttggagcaggaagatgaggaggaaaagagactagaggaagaggaggaggaagaggaggaagaggaagctgagaaagaat

SEQ ID NO: 192263 - DNA, 120 bp, Artificial Sequence
  ENSG00000112659_42 (sequence is synthesized)
tatttatcgaagatccaagtccagccatttctatactggtcctgtcaccacgctgctggcccgtctccccactctgctacctgtaccatcccagaaagtgccttcccacagaattctgtg

SEQ ID NO: 192264 - DNA, 120 bp, Artificial Sequence
  ENSG00000112659_43 (sequence is synthesized)
atgcccttgaccgtttctccagtttctacagccagagtcagaaccatccagtcctggacatgggaccacatcggcgactgcagtggacgtggctgggccgggctgagctgcagtttggga

SEQ ID NO: 192265 - DNA, 120 bp, Artificial Sequence
  ENSG00000112659_44 (sequence is synthesized)
agcagatactgcatgtgtccaccgtgcagatgtggctgctgctgaaattcaatcagacagaggaggtgtcagtagagaccttgctgaaggattctgacctctccccagagctgctgctcc

SEQ ID NO: 192266 - DNA, 120 bp, Artificial Sequence
  ENSG00000112659_45 (sequence is synthesized)
aggcactcgtgcccctcacctcagggaatggccctttgaccctgcatgagggccaggactttccacacgggggtgtgctgcggcttcatgagcctgggccccagcgcagtggggaggccc

SEQ ID NO: 192267 - DNA, 120 bp, Artificial Sequence
  ENSG00000112659_46 (sequence is synthesized)
tgtggctgatacctccccaggcatacctgaacgtagagaaggatgaaggccgaaccctggaacagaagaggaatctcttgagctgtcttcttgttcgtattctcaaagcccatggggaaa

SEQ ID NO: 192268 - DNA, 120 bp, Artificial Sequence
  ENSG00000112659_47 (sequence is synthesized)
agggcctccacattgatcagctggtttgtctggtgctggaggcctggcagaagggtccaaatcctcctggaaccctgggccacactgttgctgggggtgtggcctgtaccagtacagatg

SEQ ID NO: 192269 - DNA, 120 bp, Artificial Sequence
  ENSG00000112659_48 (sequence is synthesized)
tcctctcttgcatcctgcacctcttaggccagggctacgtgaaacggcgtgatgaccggccccagatcctgatgtatgccgctccagagcccatggggccctgccggggtcaggcagatg

SEQ ID NO: 192270 - DNA, 120 bp, Artificial Sequence
  ENSG00000112659_49 (sequence is synthesized)
tccctttctgtggcagccagagcgaaacctccaagcccagcccagaagctgtggctaccctggcatctctacagctgcctgcaggccgcaccatgagcccccaggaagtagaagggttga

SEQ ID NO: 192271 - DNA, 120 bp, Artificial Sequence
  ENSG00000112659_50 (sequence is synthesized)
tgaagcagacggtgcgtcaggtgcaggagacgctgaacttagagccagatgtcgctcagcaccttttggctcattcccactggggcgctgaacagctgctgcagagctacagtgaggacc

SEQ ID NO: 192272 - DNA, 120 bp, Artificial Sequence
  ENSG00000112659_51 (sequence is synthesized)
ctgagccactgctgctggcagctgggctgtgcgtacaccaggctcaggctgtacccgtacggcctgaccactgccccgtctgtgtgagccccctggggtgtgacgacgacctgccctctc

SEQ ID NO: 192273 - DNA, 120 bp, Artificial Sequence
  ENSG00000112659_52 (sequence is synthesized)
tctgctgcatgcactattgctgtaagtcttgctggaatgagtacctgacaactcggatcgagcagaaccttgttttgaattgcacctgccccattgccgactgccccgcccagcccaccg

SEQ ID NO: 192274 - DNA, 120 bp, Artificial Sequence
  ENSG00000112659_53 (sequence is synthesized)
gagccttcattcgtgccatcgtctcctcgccagaggtcatctccaagtatgagaaggcgctcctgcgtggctatgtggagagctgctccaacctgacctggtgcaccaacccccagggct

SEQ ID NO: 192275 - DNA, 120 bp, Artificial Sequence
  ENSG00000112659_54 (sequence is synthesized)
gcgaccgcatcctgtgccgccagggcctgggctgtgggaccacctgctccaagtgtggctgggcctcttgcttcaactgtagcttccctgaggcacactaccctgctagctgtggccata

SEQ ID NO: 192276 - DNA, 120 bp, Artificial Sequence
  ENSG00000112659_55 (sequence is synthesized)
tgtctcagtgggtcgacgacggtggctactatgacggcatgagcgtggaggcgcagagcaagcacctggccaagctcatctccaagcgctgtcccagctgtcaggctcccatcgagaaga

SEQ ID NO: 192277 - DNA, 120 bp, Artificial Sequence
  ENSG00000112659_56 (sequence is synthesized)
acgaggggtgcctgcacatgacctgtgccaaatgtaaccatggattctgctggcgctgcctcaagtcctggaagccaaatcacaaagactattacaactgctctgccatggtaagcaagg

SEQ ID NO: 192278 - DNA, 120 bp, Artificial Sequence
  ENSG00000112659_57 (sequence is synthesized)
cagctcgccaggagaagcggtttcaggactataatgagaggtgcactttccatcaccaggcgcgggagtttgctgtgaacttgcggaaccgggtgtctgccatccatgaagtgcccccgc

SEQ ID NO: 192279 - DNA, 120 bp, Artificial Sequence
  ENSG00000112659_58 (sequence is synthesized)
ccagatccttcaccttcctcaatgatgcctgccagggactggagcaggctcggaaggtgctggcctacgcctgcgtgtacagcttctacagccaggacgcagagtacatggatgtggtgg

SEQ ID NO: 192280 - DNA, 120 bp, Artificial Sequence
  ENSG00000112659_59 (sequence is synthesized)
agcagcagacagagaacctggagctgcacaccaatgccctgcagatcctcctggaggaaaccctgctgcggtgcagagacctggcctcctccctgcgcctcctgcgggccgactgcctca

SEQ ID NO: 192281 - DNA, 120 bp, Artificial Sequence
  ENSG00000112659_60 (sequence is synthesized)
gcacgggcatggagctgctccggcggatccaggagaggctgcttgccatcctgcagcattctgcccaggatttccgggttggtcttcagagtccatcagtagaggcctgggaggcaaaag

SEQ ID NO: 192282 - DNA, 120 bp, Artificial Sequence
  ENSG00000112659_61 (sequence is synthesized)
gacccaacatgcctggcagtcagccccaggcctcctcagggccagaggcagaagaggaggaggaagacgatgaggatgatgtgcccgagtggcagcaggatgagtttgatgaggagctgg

SEQ ID NO: 192283 - DNA, 120 bp, Artificial Sequence
  ENSG00000112659_62 (sequence is synthesized)
acaatgacagcttctcctacgatgagtctgagaacctggaccaagagactttcttctttggtgatgaggaagaggatgaagatgaggcctatgactgagggggcagatgcaggaaacacc

SEQ ID NO: 192284 - DNA, 120 bp, Artificial Sequence
  ENSG00000112659_63 (sequence is synthesized)
tagagcagccccagagtcacggggctgagggggcgggagctgcccctgtcatagggagggggattcccagcgtctgtagtgcttcctgtttgctgaataaaggtctctttctcacacaca

SEQ ID NO: 192285 - DNA, 120 bp, Artificial Sequence
  ENSG00000112659_64 (sequence is synthesized)
gtgagtcaggttctgggaggaagcaattggaacaagtcctgggtagtctcagtagaagaaatggatagtcaggatcgaaggaaagccatggaggaaggtgatttttgcaggggaaaatgc

SEQ ID NO: 192286 - DNA, 120 bp, Artificial Sequence
  ENSG00000112659_65 (sequence is synthesized)
cttggaaccatgcgtccatcttcttccttttgaccttgattgtatttaattaaccagcgctcccttccttcagtatctctggaaaaggaggatccgttttctggggtgtcttcatctcct

SEQ ID NO: 192287 - DNA, 120 bp, Artificial Sequence
  ENSG00000112659_66 (sequence is synthesized)
ttgtttgatcattagatccctgacacagaattggaaaactctgcaagctgcagtagccgataatgtgtttaaatattggtaggataactgggcttgactttaaagacttctaacttcaag

SEQ ID NO: 192288 - DNA, 120 bp, Artificial Sequence
  ENSG00000112659_67 (sequence is synthesized)
agcatactggggagggaagaggttttggttgaagctgtaggcaaaggatggtggtagcggggaaggagctttgagatcacgaattagaaaagcttggggtgagggaaggctcagcctgag

SEQ ID NO: 192289 - DNA, 120 bp, Artificial Sequence
  ENSG00000112659_68 (sequence is synthesized)
gagcagccgagcaggagggttggatgttttaatggctcgtattcttggagcacttctgttatgccaggcactgtgctagtattttacatgcattctctcattaaatccacctaacacctg

SEQ ID NO: 192290 - DNA, 120 bp, Artificial Sequence
  ENSG00000112659_69 (sequence is synthesized)
atgaacagatgtctcaggctcaccttgcctgagctgtgaaacaggaggaggaagagatccagcccagtgggtctttaaaactgtgagctccttgagggcaaaatgcaagtgttttctctc

SEQ ID NO: 192291 - DNA, 120 bp, Artificial Sequence
  ENSG00000112659_70 (sequence is synthesized)
tggtgtttttgcatggaacctgcctggctcagggctaggcgctgggtctagggatgggctcctagatacccgtggctcatcagggaggcaggcgcagggaaggctgagatctggaagctt

SEQ ID NO: 192292 - DNA, 120 bp, Artificial Sequence
  ENSG00000112659_71 (sequence is synthesized)
gacaaggtatctctctgtctgaaaatgctggggccctcctccccatagggactagtaggagcaaagcttgacacctcaacccctaaaccccttgtttcgcccattctgtgtctccaccct

SEQ ID NO: 192293 - DNA, 120 bp, Artificial Sequence
  ENSG00000112659_72 (sequence is synthesized)
ggctgagcctctgctgctggtcggggggtcgccctcaagatggggggactgtgagaatggggtcatcttagtccccattcatctgtccctctgcctcctctggtacctgaccgggagcgg

SEQ ID NO: 192294 - DNA, 120 bp, Artificial Sequence
  ENSG00000112659_73 (sequence is synthesized)
ctgttcctcttcctggagccctccaaatgtgatctgtgcctgctcccctctctcctgtgcacaccagccatgctgccctcacggctcagctgtgtccccaccatgccctcttgccttagg

SEQ ID NO: 192295 - DNA, 120 bp, Artificial Sequence
  ENSG00000112659_74 (sequence is synthesized)
gggagatggcccaggacctgttgagtcccagagatgtggggatgtcctgagcagttctagggagctcagggcaggaggcttggctttggtagtacttagtggctcaagcggcttgggtga

SEQ ID NO: 192296 - DNA, 120 bp, Artificial Sequence
  ENSG00000112659_75 (sequence is synthesized)
ctaaccagttccttgtccttattcccagggatcacctgagttaatgctcttggttcttttggttcctgtctttatccctgaaggcctgtcacctcagtgttcctctctccttcctgcccc

SEQ ID NO: 192297 - DNA, 120 bp, Artificial Sequence
  ENSG00000112659_76 (sequence is synthesized)
tctgctctgccctttcacctcctttcgctccccagtctcctactccactccctcattcatggtttgctcatgccctttcccctgcccccagatgagtgagcagtttgccaggtacattga

SEQ ID NO: 192298 - DNA, 120 bp, Artificial Sequence
  ENSG00000112659_77 (sequence is synthesized)
gccctgcagatcctcctgggtgagccacccctgccagccaggccctcctcctgcctcctcccctctgttgcacagcccggcccctcccagacaggtcaagcggcacccttaccttccctc

SEQ ID NO: 192299 - DNA, 120 bp, Artificial Sequence
  ENSG00000112659_78 (sequence is synthesized)
tgtcacctccggattaagcattggtggcgctgccaactgttgttggaggagaacccaagtggattggggatagggagattcccagagagggcagagacacactgacttccctttatgggt

SEQ ID NO: 192300 - DNA, 120 bp, Artificial Sequence
  ENSG00000112659_79 (sequence is synthesized)
ttgggaggagtggcccaaggtcaggggatcagatgtcctggctcagagggcccactggagccctttgctccctagctgcccggccttctatgcttgctttgctgcttccattgcattcat

SEQ ID NO: 192301 - DNA, 120 bp, Artificial Sequence
  ENSG00000112659_80 (sequence is synthesized)
cacactgactgggggagttcaaaagcagaggtgcattcagcagggctgggtatgactaaggagactatcagggcaggagcagaggccacagcatcaacagcggtacatctgggcccttgg

SEQ ID NO: 192302 - DNA, 120 bp, Artificial Sequence
  ENSG00000112659_81 (sequence is synthesized)
cattcctggcacacccctgcccagaggcaggagtccctgaccagccagcttcctccatagcatgacctgtgccaaatgtaaccatggattctgctggcgctgcctcaagtcctggaagcc

SEQ ID NO: 192303 - DNA, 120 bp, Artificial Sequence
  ENSG00000112659_82 (sequence is synthesized)
aaatcacaaagactattacaactgctctgccatggtaaggcgctgggcactaggggagggcagaggcccagagccgtcggggaggggtgctgctaccaggtcctgggcagacagggctcc

SEQ ID NO: 192304 - DNA, 120 bp, Artificial Sequence
  ENSG00000112659_83 (sequence is synthesized)
ttgtgcagtgcagcattctagctgttgggatagaggctcactgtggggaagacagagccacctgggcctgcagatgctggaaagtctgttcacagggaccttcagctccagaacaggact

SEQ ID NO: 192305 - DNA, 120 bp, Artificial Sequence
  ENSG00000112659_84 (sequence is synthesized)
tctcataccgaggtggctacagaaaggctggggagggctgggcactctcagaaggcagcagggcagagcaggaaagagcagggaccctgcatttagagcctggctctgctgcttagcatg

SEQ ID NO: 192306 - DNA, 120 bp, Artificial Sequence
  ENSG00000112659_85 (sequence is synthesized)
tggctttgagcaagttcatttacttctccaagcctcaacagcctctgcaaaaggggtgaataatatgacctactccacacagtcatgaggactgaatgaagataatcgggggaggtgtag

SEQ ID NO: 192307 - DNA, 120 bp, Artificial Sequence
  ENSG00000112659_86 (sequence is synthesized)
aaaggcctccgtgaatgttggcttttccacttattaactccctcctgtccaaacaaaacacccaatagccctcccaacgtatccttgctaggtaagcaaggcagctcgccaggagaagcg

SEQ ID NO: 192308 - DNA, 120 bp, Artificial Sequence
  ENSG00000112659_87 (sequence is synthesized)
gtttcaggactataatgagaggtgcactttccatcaccaggcgcgggtgagtcgggaggaaacagcgggtagatgcctgcagaagcaggttggggtggtggggtggaggggggtgggctg

SEQ ID NO: 192309 - DNA, 120 bp, Artificial Sequence
  ENSG00000112659_88 (sequence is synthesized)
aaggtctgaccgggcaggtggtgctgcgccacctgtgctggtactgatacaccttcctccacacaggagtttgctgtgaacttgcggaaccgggtgtctgccatccatgaagtgcccccg

SEQ ID NO: 192310 - DNA, 120 bp, Artificial Sequence
  ENSG00000112659_89 (sequence is synthesized)
tgctttcatcggacttgcctgggtgaagggaatgaggagagggcaggcgggagagctgatgggagcccctgcaggtgctggcctacgcctgcgtgtacagcttctacagccaggacgcag

SEQ ID NO: 192311 - DNA, 120 bp, Artificial Sequence
  ENSG00000112659_90 (sequence is synthesized)
ctacattgtaaggtgcccaagggcgcagatgttcgtggatgtttcttggtttctggtctttaccctgctcccctagggagcttcatgagaatgtctagagctgcacctggtgcttggtag

SEQ ID NO: 192312 - DNA, 120 bp, Artificial Sequence
  ENSG00000112659_91 (sequence is synthesized)
acgttccataggtgtttgttggaggaaggaatggatgagaatgagaagggagggagcctctgtgcctgccccctctgcagaggaaaccctgctgcggtgcagagacctggcctcctccct

SEQ ID NO: 192313 - DNA, 120 bp, Artificial Sequence
  ENSG00000112659_92 (sequence is synthesized)
ctcctgcattctgcgggagttgaggtcctcctgtcccagcacagcccctgccctggggcgagtccagaaggaaaggcagcaaagcgggtgaatggatgttagacctgggcgcacatcccg

SEQ ID NO: 192314 - DNA, 120 bp, Artificial Sequence
  ENSG00000112659_93 (sequence is synthesized)
gcttttgggccaacctgcctgatgctgctggaccctatcacttcacctcctggggattcctacaaaataaaggggttggctagcccacatcaagggtatttggtcaggtgcctatcagaa

SEQ ID NO: 192315 - DNA, 120 bp, Artificial Sequence
  ENSG00000112659_94 (sequence is synthesized)
tcacttggggaacttttccagactgtacttcccagatagggatttgaaatcctaagagtgggcatcaggggattggggtcactggagcaagggctctcccaggctctctccagctctaat

SEQ ID NO: 192316 - DNA, 120 bp, Artificial Sequence
  ENSG00000112659_95 (sequence is synthesized)
gcactgatgctgagtctaaactgtgagtcctgtcctcaggttgcttactgactggtaagtcacatgggcagaaaagacatagattctgtaagctctttaagcacagggtcgtgtgcctca

SEQ ID NO: 192317 - DNA, 120 bp, Artificial Sequence
  ENSG00000112659_96 (sequence is synthesized)
cctggtaccccgtatccctggagaccatctgtgggtgaactcacaaaggcagtgtttcatgaagtgctgtgctgggaggggagcagtcctagcaggagcttggccctcccagagcatcag

SEQ ID NO: 192318 - DNA, 120 bp, Artificial Sequence
  ENSG00000112659_97 (sequence is synthesized)
tggaaggaatgctgggtccaaaggccccatgccctctacctccttctcaaatccttctgtctgctcaccaggatttccgggttggtcttcagagtccatcagtagaggcctgggaggcaa

SEQ ID NO: 192319 - DNA, 120 bp, Artificial Sequence
  ENSG00000112659_98 (sequence is synthesized)
gtatttgaatctttcccactaccccatccccaccctgttaacatttcccctgactccagctgaaacaaaccttggtgaggggaggactagggccccactacccctcaagcctttttgtac

SEQ ID NO: 192320 - DNA, 120 bp, Artificial Sequence
  ENSG00000112659_99 (sequence is synthesized)
aattgatctttctccctcctctgccctgagctgtctgttctcccatctcccatggagacctgttcctgacctgtcttctttcagatgcggaaggcgtgagtgccctgggatggctgctgg

SEQ ID NO: 192321 - DNA, 120 bp, Artificial Sequence
  ENSG00000112667_0 (sequence is synthesized)
ggcgccggagagcgcgggcggctggggaatggctgctgccatggtgccggggcgcagcgagagctgggagcgcggggagcctggccgcccggccctgtacttctgcgggagcattcgcgg

SEQ ID NO: 192322 - DNA, 120 bp, Artificial Sequence
  ENSG00000112667_1 (sequence is synthesized)
cggacgcgaggacaggacgctgtacgagcggatcgtgtctcggctgcggcgattcgggacagtgctcaccgagcacgtggcggccgccgagctgggcgcgcgcggggaagaggctgctgg

SEQ ID NO: 192323 - DNA, 120 bp, Artificial Sequence
  ENSG00000112667_2 (sequence is synthesized)
cgtggcagaagtgacacagccatccttgggtgtaggctatgagctgggccgggccgtggcctttaacaagcggatcctgtgcctgttccgcccgcagtctggccgcgtgctttcggccat

SEQ ID NO: 192324 - DNA, 120 bp, Artificial Sequence
  ENSG00000112667_3 (sequence is synthesized)
gatccggggagcagcagatggctctcggttccaggtgtgggactatgaggagggagaggtggaggccctgctggatcgatacttcgaggctgatcctccagggcaggtggctgcctcccc

SEQ ID NO: 192325 - DNA, 120 bp, Artificial Sequence
  ENSG00000112667_4 (sequence is synthesized)
tgacccaaccacttgacttaatctcactttcttaaattcttctattctcagacactgctctagtaccattccttcctcttagccccaggagcaaattaaaaggtacagttaaaatcctaa

SEQ ID NO: 192326 - DNA, 120 bp, Artificial Sequence
  ENSG00000112667_5 (sequence is synthesized)
ccagccctcagctccttccctggtgggctctgagcaccgcgcctctcccaaggggtaagggagctgtgagggtgtggatgggaggcagcttcacctttccctgccctttccagtgctttc

SEQ ID NO: 192327 - DNA, 120 bp, Artificial Sequence
  ENSG00000112667_6 (sequence is synthesized)
ccggcagctgcgctcccggcgcccggagcccgccctcctaccccggtgctccatccagcgccccagcccgagaaggaaacgggccggggctcgggctgcgtgggtcccagcaagcctgcg

SEQ ID NO: 192328 - DNA, 120 bp, Artificial Sequence
  ENSG00000112667_7 (sequence is synthesized)
tgatgttcctcattcggccctaatcacatgtcccaccttgcatagggttgaatttttctttttgtggctattccatttcctcgctgctttgatgagattgtcatgtttggtcaggtcatc

SEQ ID NO: 192329 - DNA, 120 bp, Artificial Sequence
  ENSG00000112667_8 (sequence is synthesized)
tatggacatacaagggcataggagttactgggagccagcatgaggcatgtccttgaccagctttccctcaacacaggggaagaggctgctgggggtgacaggctcatccatgagcaggac

SEQ ID NO: 192330 - DNA, 120 bp, Artificial Sequence
  ENSG00000112679_0 (sequence is synthesized)
gagcccgagcctagtgcctcccacgcccggcggccgcgagccggggtccgcgagggcggagtggggcgcggcagccaggaacccgactacgaatcccagggtgcgggcgggcggagcgag

SEQ ID NO: 192331 - DNA, 120 bp, Artificial Sequence
  ENSG00000112679_1 (sequence is synthesized)
gagggacgctgggcctgcccggtgcgcacgggggcggggaccggcaaggcgggaccatttcccggcataggctccggtgcccctgcccggctcccgccgggaagttctaggccgccgcac

SEQ ID NO: 192332 - DNA, 120 bp, Artificial Sequence
  ENSG00000112679_2 (sequence is synthesized)
agaaagccctgccctccacgccgggtctctggagcgccctgggttgcccggccggtccctgccgctgacttgttgacactgcgagcactcagtccctcccgcgcgcctcctccccgcccg

SEQ ID NO: 192333 - DNA, 120 bp, Artificial Sequence
  ENSG00000112679_3 (sequence is synthesized)
ccccgccgctcctcctccctgtaacatgccatagtgcgcctgcgaccacacggccggggcgctagcgttcgccttcagccaccatggggaatgggatgaacaagatcctgcccggcctgt

SEQ ID NO: 192334 - DNA, 120 bp, Artificial Sequence
  ENSG00000112679_4 (sequence is synthesized)
acatcggcaacttcaaagatgccagagacgcggaacaattgagcaagaacaaggtgacacatattctgtctgtccacgatagtgccaggcctatgttggagggagttaaatacctgtgca

SEQ ID NO: 192335 - DNA, 120 bp, Artificial Sequence
  ENSG00000112679_5 (sequence is synthesized)
tcccagcagcggattcaccatctcaaaacctgacaagacatttcaaagaaagtattaaattcattcacgagtgccggctccgcggtgagagctgccttgtacactgcctggccggggtct

SEQ ID NO: 192336 - DNA, 120 bp, Artificial Sequence
  ENSG00000112679_6 (sequence is synthesized)
actttggctgggaggatgccctgcacaccgtgcgtgctgggagatcctgtgccaaccccaacgtgggcttccagagacagctccaggagtttgagaagcatgaggtccatcagtatcggc

SEQ ID NO: 192337 - DNA, 120 bp, Artificial Sequence
  ENSG00000112679_7 (sequence is synthesized)
agtggctgaaggaagaatatggagagagccctttgcaggatgcagaagaagccaaaaacattctggccgctccgggaattctgaagttctgggcctttctcagaagactgtaatgtacct

SEQ ID NO: 192338 - DNA, 120 bp, Artificial Sequence
  ENSG00000112679_8 (sequence is synthesized)
gaagtttctgaaatattgcaaacccacagagtttaggctggtgctgccaaaaagaaaagcaacatagagtttaagtatccagtagtgatttgtaaacttgtttttcatttgaagctgaat

SEQ ID NO: 192339 - DNA, 120 bp, Artificial Sequence
  ENSG00000112679_9 (sequence is synthesized)
atatacgtagtcatgtttatgttgagaactaaggatattctttagcaagagaaaatattttccccttatccccactgctgtggaggtttctgtacctcgcttggatgcctgtaaggatcc

SEQ ID NO: 192340 - DNA, 120 bp, Artificial Sequence
  ENSG00000112679_10 (sequence is synthesized)
cgggagccttgccgcactgccttgtgggtggcttggcgctcgtgattgcttcctgtgaacgcctcccaaggacgagcccagtgtagttgtgtggcgtgaactctgcccgtgtgttctcaa

SEQ ID NO: 192341 - DNA, 120 bp, Artificial Sequence
  ENSG00000112679_11 (sequence is synthesized)
attccccagcttgggaaatagcccttggtgtgggttttatctctggtttgtgttctccgtggtggaattgaccgaaagctctatgttttcgttaataaagggcaacttagccaagtttaa

SEQ ID NO: 192342 - DNA, 120 bp, Artificial Sequence
  ENSG00000112679_12 (sequence is synthesized)
caagggcgcacagagccccagcccggcgccaggcggtggagcagttttccggcactggctccgctgacctacgataattatacgacggagacctaacgcaagcgacctgctgccttcctt

SEQ ID NO: 192343 - DNA, 120 bp, Artificial Sequence
  ENSG00000112679_13 (sequence is synthesized)
cccactgcttgtcttcagtgtgcccggctgggcaggggtgcggtggtggtggccgatgaggacaggaaagggagatagccagggcgaggtggggcgagggctccttcccccaagcaacac

SEQ ID NO: 192344 - DNA, 120 bp, Artificial Sequence
  ENSG00000112679_14 (sequence is synthesized)
cgcccagccctgctccaggcccctgcactccgcccacccctaccctggctgcacctgagcttgctgcccctggggatgttgcccagtggctgtgcactgctctgtgcacgtgcgtgtgtg

SEQ ID NO: 192345 - DNA, 120 bp, Artificial Sequence
  ENSG00000112679_15 (sequence is synthesized)
tgagtgcacttgtgtgtgggtgactaagtggatgcatgtgtgtgcctgtgtgagtgagggtatgtgcacctaagtgtgtacatgtgtgtatgttgtgaaagtgtctgtgcacatgaatgt

SEQ ID NO: 192346 - DNA, 120 bp, Artificial Sequence
  ENSG00000112679_16 (sequence is synthesized)
ttgtgtgtgtgtgaactctttcttactgctggaagtcacagaattcatattgctgcccgggttggtgtggccacctttccctttgtccaagactccacatggaaggcatttgagctcgac

SEQ ID NO: 192347 - DNA, 120 bp, Artificial Sequence
  ENSG00000112679_17 (sequence is synthesized)
ctccgaaaagctacccagcaaagagcagtctgtgcctctgagcagaccgtgagaactcaggggacgagtggctaagagcatggcctctcccagaacccacccagggtggtgtggtggggg

SEQ ID NO: 192348 - DNA, 120 bp, Artificial Sequence
  ENSG00000112679_18 (sequence is synthesized)
caacaggggccagactcctctagagggagggtggctctggggccctggaaaacgtgagagactgccctgagctggtccagtgggccagcactttataccaactcagcatttaagggaagt

SEQ ID NO: 192349 - DNA, 120 bp, Artificial Sequence
  ENSG00000112679_19 (sequence is synthesized)
tacttggtgtttgttctctggagctgattgcacttgagctctgtggtgggcaggcgcactttagcctaagttgggtgccccagggcaccccctcctctctgctccttgccagcttcattc

SEQ ID NO: 192350 - DNA, 120 bp, Artificial Sequence
  ENSG00000112679_20 (sequence is synthesized)
actcccagcctctcgctgtcctcactttgcaggggctcctcctcaacatttgcatgcacctgcaagaattgggaagaaagagcatttattaggcactgtagcaatttgcattttaaaatg

SEQ ID NO: 192351 - DNA, 120 bp, Artificial Sequence
  ENSG00000112679_21 (sequence is synthesized)
cctgagcatttattaagcttcttggtattcacttgggtttgataattgatctgagctacctcattgaatgtttttggaaaggtgttttttggtatgcaagtcagctttgcctcacagttg

SEQ ID NO: 192352 - DNA, 120 bp, Artificial Sequence
  ENSG00000112679_22 (sequence is synthesized)
aaaatgttcggtcatgattgcttttgaaaccaaaggggaaggtaccgatatcattgagctatttaaagttgccagtttgggctccagtaatgctttctggtgggtaaaattccacattca

SEQ ID NO: 192353 - DNA, 120 bp, Artificial Sequence
  ENSG00000112679_23 (sequence is synthesized)
ggccacgagagcatctacagtttgtactctggggctgcaggcatcctgggacgctgtacgcaattcagtggtctagtcctttataccgactcagattccttaagcatgcagagtcactcg

SEQ ID NO: 192354 - DNA, 120 bp, Artificial Sequence
  ENSG00000112679_24 (sequence is synthesized)
aatgaaaaaacatactcgacctctccctaaaaagatgttgcaacccagtttctctgaattccaccacaaaaagagaccctgaataagaagagcagttttcctgtgcatatagagggtgtg

SEQ ID NO: 192355 - DNA, 120 bp, Artificial Sequence
  ENSG00000112679_25 (sequence is synthesized)
tcaaaggtgagctttttggggaccgggaaaaacaaagttgcctgattccgcgcaggtgcacaggccccggatgtacacccggaaaggggagtgtggctgtagaatcatccatccgtctac

SEQ ID NO: 192356 - DNA, 120 bp, Artificial Sequence
  ENSG00000112679_26 (sequence is synthesized)
agctaaaacaatttgccaataaagtacatgtttttcctaagccaaaaataaatacgttaacagaaaaatgatttaggatatagcttgaatgcttaaatatgtgcacctttacaaacctct

SEQ ID NO: 192357 - DNA, 120 bp, Artificial Sequence
  ENSG00000112679_27 (sequence is synthesized)
cagtgtattcttggagttcttgaaatgttgttttaatatttgttgccagtaatgttctttcttcacagccgctccgggaattctgaagttctgggcctttctcagaagactgtaatgtac

SEQ ID NO: 192358 - DNA, 120 bp, Artificial Sequence
  ENSG00000112679_28 (sequence is synthesized)
atagcagggatcgaaaactgtctagtaatcgctctttcttgaagcaagctgtatctaggtttctcgtgtggcagtcgggtgtgtaagagcggcccctccactggctggtcctgctaccac

SEQ ID NO: 192359 - DNA, 120 bp, Artificial Sequence
  ENSG00000112679_29 (sequence is synthesized)
agactcacttgcaaatggagccctagaactcctgcatggctggactcagagggcttgagatcttccagtacttaactgagtctagggaggacatggttttttaaacttctaaatcaaaga

SEQ ID NO: 192360 - DNA, 120 bp, Artificial Sequence
  ENSG00000112679_30 (sequence is synthesized)
ctcactgaccagcctctccttacaactgaagacttttgcaggacactcttcctagatgttgccttcatgttgagtcccggtgtctgagcatttcctcctgacggctgtacttgagcagtc

SEQ ID NO: 192361 - DNA, 120 bp, Artificial Sequence
  ENSG00000112679_31 (sequence is synthesized)
acctggcacagggagttaaatacctgtgcatcccagcagcggattcaccatctcaaaacctgacaagacatttcaaagaaagtattaaattcattcacgagtgccggctccgcggtgaga

SEQ ID NO: 192362 - DNA, 120 bp, Artificial Sequence
  ENSG00000112679_32 (sequence is synthesized)
agtgctgtatctgctggtgcctggagagtcatctgccctgggcttccgcgtcctggtgtgtgcagtgctatatctgctggtgcctggagagtcatctgccctgggcttccgcgtcctggt

SEQ ID NO: 192363 - DNA, 120 bp, Artificial Sequence
  ENSG00000112679_33 (sequence is synthesized)
gtgtgcaatgctgtatctgcgggtgcctggagagtcatctgccctgggcttctgcatcctggtgtgtgcagtgctgtatctgctggtgcctggagtcatctgccctgggcttctgcgtcc

SEQ ID NO: 192364 - DNA, 120 bp, Artificial Sequence
  ENSG00000112679_34 (sequence is synthesized)
tggtgtgtgcagtgctgtacctgctggtgcctggagagtcatctgccctgggcttccgtatcctggtgtgtgcagtgctgtatctgctggtgcctggagagtcatctgccctgggcttcc

SEQ ID NO: 192365 - DNA, 120 bp, Artificial Sequence
  ENSG00000112679_35 (sequence is synthesized)
gcgtcctggtgtgtgcaatgctgtatctgcgggtgcctggagagtcatctgccctgggcttctgcatcctggtgtgtgcaatgctgtatctgctggtgcctggagtcatctgccctgggc

SEQ ID NO: 192366 - DNA, 120 bp, Artificial Sequence
  ENSG00000112679_36 (sequence is synthesized)
ttctgcatcctcgtgtgtgcagtgctgtacctgctggtgcctggagtcatctgccctgggcttccgcatcctcgtgtgtgcagtgctgtacctgctggtgcctggagagtcatctgccct

SEQ ID NO: 192367 - DNA, 120 bp, Artificial Sequence
  ENSG00000112679_37 (sequence is synthesized)
gggcttctgcgttctggtgtgtgcagtgctgtatctgctggtgcctggagagtcatctgccctgggcttccgcgtcctggtgtgtgcaatgctgtatctgctggtgtctggagtcatctt

SEQ ID NO: 192368 - DNA, 120 bp, Artificial Sequence
  ENSG00000112679_38 (sequence is synthesized)
ccctgggcttctgcgtcctggtgtgtgcagtgctgtatctgctggtgcctggagagtcatctgcgctgggcttctgcgtcctggtgtgtgcaatgctgtatctgctggtgcctggagagt

SEQ ID NO: 192369 - DNA, 120 bp, Artificial Sequence
  ENSG00000112679_39 (sequence is synthesized)
catctgccctgggcttctgcgttctggtgtgtgcagtgctgtatctgctggtgcctggagagtcatctgccctgggcttccccgtcctggtgtgtgcaatgctgtatctgctggtgcctg

SEQ ID NO: 192370 - DNA, 120 bp, Artificial Sequence
  ENSG00000112679_40 (sequence is synthesized)
agcgttcgccttcagccaccatggggaatgggatgaacaagatcctgcccggcctgtacatcggcaacttcaaagatgccagagacgcggaacaattgagcaagaacaaggacaagacat

SEQ ID NO: 192371 - DNA, 120 bp, Artificial Sequence
  ENSG00000112679_41 (sequence is synthesized)
ctgggctctggacatctgctgtcagtgcaggtggctacctgtccttgagctgtccccagtgcttctcagctttgctaggagctgagtgctctcttgtctgtgacagtgacctgatttaag

SEQ ID NO: 192372 - DNA, 120 bp, Artificial Sequence
  ENSG00000112679_42 (sequence is synthesized)
ggcaggtgcccctgaacggtgcccacagtctttccgtacacagccagcatcatggcgtttggagttgaaaggcccacagaggacatcggctcccagggcgcccagctgcaccccttcaga

SEQ ID NO: 192373 - DNA, 120 bp, Artificial Sequence
  ENSG00000112679_43 (sequence is synthesized)
gccacaggcgcctaccctttgtcattctccttgtgcctggtactccctactagtttgtttctctccctttgggtgacgtaccatttccttggtctggcctattttcatgtcctaggccag

SEQ ID NO: 192374 - DNA, 120 bp, Artificial Sequence
  ENSG00000112679_44 (sequence is synthesized)
caccttgaaggagcagttccttctcttgcttgaccctggctggccaaccacagagctctgatttcccactgctgtttgtttccctggttatgtgtggcaccatctctgtggtgaagtcac

SEQ ID NO: 192375 - DNA, 120 bp, Artificial Sequence
  ENSG00000112679_45 (sequence is synthesized)
aggtgcaagcccacgtggatgcagacgtgcacatgtgtgtgacgtttcgggtttgtttccatcctctccagtatcggcagtggctgaaggaagaatatggagagagccctttgcaggatg

SEQ ID NO: 192376 - DNA, 120 bp, Artificial Sequence
  ENSG00000112685_0 (sequence is synthesized)
acacgctcggcgctcgcggcgggcggaagtgaggtgccggcggctggcggccgcggagtcttcggcgagacctaccgggccctgtctgtgccggccgtgagctgcggcaggacggctgga

SEQ ID NO: 192377 - DNA, 120 bp, Artificial Sequence
  ENSG00000112685_1 (sequence is synthesized)
gattacttctctaacaggatcaccagtttgctccacaaagcacaatgtctcgatcacgacaacccccccttgtgaccggcatctctccaaatgaagggataccatggacgaaggtcacaa

SEQ ID NO: 192378 - DNA, 120 bp, Artificial Sequence
  ENSG00000112685_2 (sequence is synthesized)
tcaggggagaaaatctggggactggccccaccgacctcataggcttgaccatttgtggacataattgcctcctgacggcagaatggatgtctgcaagtaaaatagtatgtcgagtgggac

SEQ ID NO: 192379 - DNA, 120 bp, Artificial Sequence
  ENSG00000112685_3 (sequence is synthesized)
aagccaaaaatgacaaaggagacattattgtcaccactaagtcaggtggcagaggaacctcaacagtctctttcaagctactcaaacctgagaaaataggcattttggatcagtctgctg

SEQ ID NO: 192380 - DNA, 120 bp, Artificial Sequence
  ENSG00000112685_4 (sequence is synthesized)
tgtgggttgatgaaatgaattattatgatatgcgcactgacaggaacaaaggaattccgcccttgtccttacgtcctgctaacccgcttggcattgagattgaaaaaagtaaattttcgc

SEQ ID NO: 192381 - DNA, 120 bp, Artificial Sequence
  ENSG00000112685_5 (sequence is synthesized)
agaaggacttagaaatgctattccatggaatgagtgctgattttacaagtgagaatttctcagcagcctggtatcttatagagaatcactcaaacaccagttttgagcagctcaaaatgg

SEQ ID NO: 192382 - DNA, 120 bp, Artificial Sequence
  ENSG00000112685_6 (sequence is synthesized)
cagtcaccaacctaaagagacaggctaacaagaagagtgagggcagcctggcctatgtgaaaggcggtctcagtacattcttcgaagcacaggatgccctctcagccatccatcaaaaac

SEQ ID NO: 192383 - DNA, 120 bp, Artificial Sequence
  ENSG00000112685_7 (sequence is synthesized)
tagaagcagatggaacggaaaaagtagaaggatccatgacgcagaaactggagaatgttctgaacagagcaagtaatactgcagacacattgtttcaagaagtattaggtcggaaagaca

SEQ ID NO: 192384 - DNA, 120 bp, Artificial Sequence
  ENSG00000112685_8 (sequence is synthesized)
aggcagattccactagaaatgcactcaatgtgcttcagcgatttaagtttcttttcaaccttcctctaaatattgaaaggaatattcaaaagggtgattatgatgtggttattaatgatt

SEQ ID NO: 192385 - DNA, 120 bp, Artificial Sequence
  ENSG00000112685_9 (sequence is synthesized)
atgaaaaggccaagtcactttttgggaaaacggaggtgcaagttttcaagaaatattatgctgaagtagaaacaaggattgaagctttaagagaattacttctggataaattgcttgaga

SEQ ID NO: 192386 - DNA, 120 bp, Artificial Sequence
  ENSG00000112685_10 (sequence is synthesized)
caccatcaactttacatgaccaaaaacgttacataaggtacctgtctgaccttcatgcgtctggtgaccctgcttggcaatgcattggagcccaacacaagtggatccttcagctcatgc

SEQ ID NO: 192387 - DNA, 120 bp, Artificial Sequence
  ENSG00000112685_11 (sequence is synthesized)
acagttgcaaagagggctacgtgaaagatctgaaaggtaacccaggcctgcacagtcccatgttggatcttgataatgatacacgtccctcagtgttgggccatctcagtcagacagcgt

SEQ ID NO: 192388 - DNA, 120 bp, Artificial Sequence
  ENSG00000112685_12 (sequence is synthesized)
ccctgaagaggggcagcagctttcagtctggtcgagacgacacgtggagatacaaaactccccacagggtggcctttgttgaaaaattgacaaaactcgtcttgagccagctgcctaact

SEQ ID NO: 192389 - DNA, 120 bp, Artificial Sequence
  ENSG00000112685_13 (sequence is synthesized)
tctggaaactctggatctcctacgttaatggaagcctcttcagtgagactgctgagaagtcaggccagattgaaagatcaaagaatgtaaggcaaagacaaaatgattttaagaaaatga

SEQ ID NO: 192390 - DNA, 120 bp, Artificial Sequence
  ENSG00000112685_14 (sequence is synthesized)
ttcaggaagtaatgcactccctggtgaagcttacccgcggagccctgcttcccctcagcatccgggatggggaagccaagcagtacggaggctgggaggtgaagtgcgagctctccggac

SEQ ID NO: 192391 - DNA, 120 bp, Artificial Sequence
  ENSG00000112685_15 (sequence is synthesized)
agtggctcgctcacgccatccagactgtaagacttactcatgaatcgttgactgcccttgaaattcctaatgacctgttacagactatccaggatctcatcttggatctccgagtacgtt

SEQ ID NO: 192392 - DNA, 120 bp, Artificial Sequence
  ENSG00000112685_16 (sequence is synthesized)
gcgtaatggccacgttgcagcacacggcggaagaaataaagagattagctgaaaaagaagactggattgttgacaatgaaggactgacttctctaccatgtcagtttgaacagtgcatcg

SEQ ID NO: 192393 - DNA, 120 bp, Artificial Sequence
  ENSG00000112685_17 (sequence is synthesized)
tgtgttctctgcagtcactgaagggggttctggagtgcaagccgggagaggccagtgtcttccaacaacctaaaacacaggaggaggtttgccagctaagcatcaatataatgcaggttt

SEQ ID NO: 192394 - DNA, 120 bp, Artificial Sequence
  ENSG00000112685_18 (sequence is synthesized)
acagttgagcaccaagcctgatgcagatatagatactacacatctctctgttgatgtttcttcccctgacttgtttggaagtatccatgaagacttcagcttgacctcagaacagcgcct

SEQ ID NO: 192395 - DNA, 120 bp, Artificial Sequence
  ENSG00000112685_19 (sequence is synthesized)
tttgatagtcctaagtaattgctgctatctagaacgtcacaccttcctaaatatcgcagaacattttgaaaagcacaacttccagggaatagaaaaaatcacacaggttagcatggcctc

SEQ ID NO: 192396 - DNA, 120 bp, Artificial Sequence
  ENSG00000112685_20 (sequence is synthesized)
attgaaagaactagatcaaagactctttgaaaattacatcgagttgaaagcagatcccatcgttggctccttagaacctggaatttatgcaggatattttgattggaaggactgcctgcc

SEQ ID NO: 192397 - DNA, 120 bp, Artificial Sequence
  ENSG00000112685_21 (sequence is synthesized)
tccaacaggtgtcagaaactatttaaaagaagcactggtgaatataattgccgtgcatgcagaggtgttcaccatttccaaagaactggtccctcgggtactatccaaggtgatagaagc

SEQ ID NO: 192398 - DNA, 120 bp, Artificial Sequence
  ENSG00000112685_22 (sequence is synthesized)
agtttctgaagagctcagtcgactgatgcagtgtgtttcatccttcagcaaaaatggagctttacaggcgagacttgaaatctgtgctttgagggacactgtggctgtttacctgacacc

SEQ ID NO: 192399 - DNA, 120 bp, Artificial Sequence
  ENSG00000112685_23 (sequence is synthesized)
cgaaagcaagtcaagttttaagcaggctttggaagccctgccccagctttccagtggagcagataaaaagttactggaagagctcctgaacaagttcaagagtagcatgcacttgcagct

SEQ ID NO: 192400 - DNA, 120 bp, Artificial Sequence
  ENSG00000112685_24 (sequence is synthesized)
cacctgtttccaagcagcttcttcaaccatgatgaaaacataaatatctgccacataaaagaagtccaggaaaataacacgtaataagactgttcactctctaagtaccctaaaggtatt

SEQ ID NO: 192401 - DNA, 120 bp, Artificial Sequence
  ENSG00000112685_25 (sequence is synthesized)
tggtgtattaaacattgggtttgccatttttctcttttttcttcctctgacttcgaaaattgttggtatacatttcaaccaaaatgacctcatttgaaatgcccaggaagtatttgtttt

SEQ ID NO: 192402 - DNA, 120 bp, Artificial Sequence
  ENSG00000112685_26 (sequence is synthesized)
gccattcttactagatcagatcctgtatgactttaaaatacattttaaaatatattttgcatctcagcagaaggttgagtgctgcaggaagagctgcttctgcagggagttttctggaat

SEQ ID NO: 192403 - DNA, 120 bp, Artificial Sequence
  ENSG00000112685_27 (sequence is synthesized)
ggcgtggcacatattgaagcatttctcagtgtcccgttcacggaagcgcaggcagctcccacgacacacggagagactgactgatacgagatttggaaagctatgtagacatctttggag

SEQ ID NO: 192404 - DNA, 120 bp, Artificial Sequence
  ENSG00000112685_28 (sequence is synthesized)
ctcttactgtcctaaactgtacagctgtgcttaaaaccctcatttcatataaatggccttaagttttctaattcaagcgggtttttggaaaaatttatggtctccattaaaatacatatt

SEQ ID NO: 192405 - DNA, 120 bp, Artificial Sequence
  ENSG00000112685_29 (sequence is synthesized)
acaactggggtagattatttgtggtccaggtgtctgtgatttaactttgcgttttgctatctgatttttatttttcacagggctaagcatgagctttcattctcactcactcttaatttg

SEQ ID NO: 192406 - DNA, 120 bp, Artificial Sequence
  ENSG00000112685_30 (sequence is synthesized)
tcgtgcgtcactacacatgcacgtgttgcagtccctgaggccctgtgtgttatctgtgatggagtgtgaatgtgtaacgggcactgtgttacactctgaggtgttggcggggcggtcgca

SEQ ID NO: 192407 - DNA, 120 bp, Artificial Sequence
  ENSG00000112685_31 (sequence is synthesized)
gacttcagggtcccctaacggaaaggccaggctccgcgtggacggccaactccctgcccgctccttcagcaggtgactgtctctgccacttcttacctgctgaaggatcttgctcagtag

SEQ ID NO: 192408 - DNA, 120 bp, Artificial Sequence
  ENSG00000112685_32 (sequence is synthesized)
ctggaacaatgctgctgtcacacagtctcttctctgaaacttcaggatgctccttggtcaccaggcaatgggagctgtagaccagccgcatgcacttgccccacattcactgctgactgg

SEQ ID NO: 192409 - DNA, 120 bp, Artificial Sequence
  ENSG00000112685_33 (sequence is synthesized)
cttcactggaataggttcaggtcaccgggacttctctcagagtcagcggcccacccaactccctcataccgtcgcatctgaaaattttcagagaggaattctctttgtagtcggcttgtc

SEQ ID NO: 192410 - DNA, 120 bp, Artificial Sequence
  ENSG00000112685_34 (sequence is synthesized)
agggttttcaagtttttctatggttatttttaaatctctttttttaaatgctaaaattaatgtcctcattaatgcaagtaattttagagcacagtgtagccatgtacagtttccattatt

SEQ ID NO: 192411 - DNA, 120 bp, Artificial Sequence
  ENSG00000112685_35 (sequence is synthesized)
taaaataaataaatgtgttggttcatttggtgtatggggggacatcatggtaactggaaatgaaagtttaatctttcacaaatgtgcttgataaagctgttaagaattgtctttcctaag

SEQ ID NO: 192412 - DNA, 120 bp, Artificial Sequence
  ENSG00000112685_36 (sequence is synthesized)
tatgttaactgttgtatctaactcaactgtgagctaagtttaaaaactgcaatcatgaatgtttgtgatattttaaatatctactacagcacattcagccaataaagaatctgcctttaa

SEQ ID NO: 192413 - DNA, 120 bp, Artificial Sequence
  ENSG00000112685_37 (sequence is synthesized)
gtgaggtgccggcggctggcggccgcggagtcttcggcgagacctaccgggccctgtctgtgccggccgtgagctgcggcaggacggctggagtaaatcttggtgccaataatggaacga

SEQ ID NO: 192414 - DNA, 120 bp, Artificial Sequence
  ENSG00000112685_38 (sequence is synthesized)
acactggacacaggactggggaagactggatttcagcttaggagaagaatactaagaagtttcagcagtggaatgcctactcttcttataaccggagtggaaacggaagcattttgtgag

SEQ ID NO: 192415 - DNA, 120 bp, Artificial Sequence
  ENSG00000112685_39 (sequence is synthesized)
ctggacacaggactggggaagactggatttcagcttaggagaagagtattggaacagttgtgctgctgccagcgatccgtgggagctgtgtacagattcagccgacaactatgagccttc

SEQ ID NO: 192416 - DNA, 120 bp, Artificial Sequence
  ENSG00000112685_40 (sequence is synthesized)
ttgatgtttctctgaggttgggttttgtctttatgttcgttggttggttgcatctcctctcttgtgaactgtaagcttataccttctcaatttttttttgaagctcttggtgttttctgg

SEQ ID NO: 192417 - DNA, 120 bp, Artificial Sequence
  ENSG00000112685_41 (sequence is synthesized)
attgatttttgtgagctgtttatataataaagttatttgtattttgacattttgaatatatttgcagacttcctgtttggctttcaaatttcttatcttttatttattaacttatagaag

SEQ ID NO: 192418 - DNA, 120 bp, Artificial Sequence
  ENSG00000112695_0 (sequence is synthesized)
aagtaccttattattccattgtcttaacactgactgacttctctatcttttcttgtgccttgacatctgtcttgagctctagatttttcattattaatctcttgagaaatgaaggttaat

SEQ ID NO: 192419 - DNA, 120 bp, Artificial Sequence
  ENSG00000112695_1 (sequence is synthesized)
aatgaattaacctaagttagtaaggcccaagcagcaatcattccacacaagcctgggtttaataaggtcaaaacaggaataatctcacaccaacctgagatttcttacattcctcattac

SEQ ID NO: 192420 - DNA, 120 bp, Artificial Sequence
  ENSG00000112695_2 (sequence is synthesized)
tgtgaatggtatagccaaccaccttgaggagcgcaagcctctcttcggcccggaaagatttaagttcgtgaatgcatacgcaagactcggaggtagttccggttccggcgtggccatttt

SEQ ID NO: 192421 - DNA, 120 bp, Artificial Sequence
  ENSG00000112695_3 (sequence is synthesized)
cagattgggcagaggacgataagcactgcttcccgcaggcattttaaaaataaagttccggagaagcaaaaactgttccaggaggatgatgaaattccactgtatctaaagggtggggta

SEQ ID NO: 192422 - DNA, 120 bp, Artificial Sequence
  ENSG00000112695_4 (sequence is synthesized)
gctgatgccctcctgtatagagccaccatgattcttacagttggtggaacagcatatgccatatatgagctggctgtggcttcatttcccaagaagcaggagtgacttcagtcatcccag

SEQ ID NO: 192423 - DNA, 120 bp, Artificial Sequence
  ENSG00000112695_5 (sequence is synthesized)
caatcgcttggttcagtttcattcagctctctatggaccagtaatctgataaataaccgagctcttctttggggatcaatatttattgacttgtagtaactgccaccaataaagcagtct

SEQ ID NO: 192424 - DNA, 120 bp, Artificial Sequence
  ENSG00000112695_6 (sequence is synthesized)
ttaccatgctttgtctgattttatcactttatgccaataatttcaacttttggtcagccttgtaaatcttaggtaaggatcaaagaaatgattcttttgccactaaacttgtgaaagcaa

SEQ ID NO: 192425 - DNA, 120 bp, Artificial Sequence
  ENSG00000112695_7 (sequence is synthesized)
cagccttagctccagggaccagcctactgaacatcgaaaaggtcaggaacgagatcacgggactgagacggcgagccggctagagcggatagagccgtactgccgctctagtttttcttt

SEQ ID NO: 192426 - DNA, 120 bp, Artificial Sequence
  ENSG00000112695_8 (sequence is synthesized)
gagttgggataaacaagtatgtgtataaattagatcatatgacaatataaacattacaaaaaaagtcaaggacatgtaccatagtgctaatagtggttgtctcttggggaaagacctggt

SEQ ID NO: 192427 - DNA, 120 bp, Artificial Sequence
  ENSG00000112695_9 (sequence is synthesized)
ctaaataaagcttaaagtgattaaaaatagttgtatcatatatacctaaaaatacaatactttattgaacagatgtactaaatagctactgtatgctggattagatgctagggatataat

SEQ ID NO: 192428 - DNA, 120 bp, Artificial Sequence
  ENSG00000112695_10 (sequence is synthesized)
ttagggttataaaccaaaatcccttccccacttttttaagggaaaaaaagtttcctatgactaaatctaatgtgtggcaattattggttcttttatatttaagttatattaaagttgttg

SEQ ID NO: 192429 - DNA, 120 bp, Artificial Sequence
  ENSG00000112695_11 (sequence is synthesized)
agatcagtgtgtatgttttatagctttaatgtttatatattctttggaaagaccgtcattaatggatctcaaattaacggtgaaagaagaatgctgacttttaggaattcttattttaaa

SEQ ID NO: 192430 - DNA, 120 bp, Artificial Sequence
  ENSG00000112695_12 (sequence is synthesized)
agtagtagtagtagagacggaataaagaaaattgtaggtcttttaaattttaatacttaaaatactttaattctagggatttaaggagctatatcattttatatgcctgttcttttgaaa

SEQ ID NO: 192431 - DNA, 73 bp, Artificial Sequence
  ENSG00000112695_13 (sequence is synthesized)
ggccattttcgttggtggtgttcagttgtggcggttgctggtcagtaacagccaagatgctgcggaatctgct

SEQ ID NO: 192432 - DNA, 120 bp, Artificial Sequence
  ENSG00000112697_0 (sequence is synthesized)
ctcttccgctctacagcggaggtggctgtggcggtggcgctggtggctgcggcggcggcggcggcagcggcgctcgagcggttcctgtcagggtcagccggcgggccccctgggtggtcc

SEQ ID NO: 192433 - DNA, 120 bp, Artificial Sequence
  ENSG00000112697_1 (sequence is synthesized)
acctgcaaatcgcggagcggcgccccagggatcgatggcgatgaactataacgcgaaggatgaagtggacggtgggcccccgtgtgctccggggggcaccgcgaagactcggagaccgga

SEQ ID NO: 192434 - DNA, 120 bp, Artificial Sequence
  ENSG00000112697_2 (sequence is synthesized)
taacacggccttcaaacagcaacggctgccagcttggcagcccatccttacggctggcacggtgctacctattttcttcatcatcggtctcatcttcattcccatcggcattggcatttt

SEQ ID NO: 192435 - DNA, 120 bp, Artificial Sequence
  ENSG00000112697_3 (sequence is synthesized)
tgtcacctccaacaacatccgcgagatcgagattgattataccggaacagagccttccagtccctgtaataaatgtttatctccggatgtgacaccttgcttttgtaccattaacttcac

SEQ ID NO: 192436 - DNA, 120 bp, Artificial Sequence
  ENSG00000112697_4 (sequence is synthesized)
actggaaaagtcatttgagggcaacgtgtttatgtattatggactgtctaatttctatcaaaaccatcgtcgttacgtgaaatctcgagatgatagtcaactaaatggagattctagtgc

SEQ ID NO: 192437 - DNA, 120 bp, Artificial Sequence
  ENSG00000112697_5 (sequence is synthesized)
tttgcttaatcccagtaaggaatgtgaaccttatcgaagaaatgaagacaaaccaattgctccttgtggagctattgccaacagcatgtttaatgatacattagaattgtttctcattgg

SEQ ID NO: 192438 - DNA, 120 bp, Artificial Sequence
  ENSG00000112697_6 (sequence is synthesized)
caatgattcttatcctatacctatcgctttgaaaaagaaaggtattgcttggtggacagataaaaatgtgaaattcagaaatccccctggaggagacaacctggaagaacgatttaaagg

SEQ ID NO: 192439 - DNA, 120 bp, Artificial Sequence
  ENSG00000112697_7 (sequence is synthesized)
tacaacaaagcctgtgaactggcttaaaccagtttacatgctggattctgacccagataataatggattcataaatgaggattttattgtttggatgcgtactgcagcattacctacttt

SEQ ID NO: 192440 - DNA, 120 bp, Artificial Sequence
  ENSG00000112697_8 (sequence is synthesized)
tcgcaagttgtatcgtcttatagaaaggaaaagtgatttacatccaacattaccagctggccgatactctttgaatgtcacatacaattaccctgtacattattttgatggacgaaaacg

SEQ ID NO: 192441 - DNA, 120 bp, Artificial Sequence
  ENSG00000112697_9 (sequence is synthesized)
gatgatcttgagcactatttcatggatgggaggaaaaaatccatttttggggattgcttacatcgctgttggatccatctccttccttctgggagttgtactgctagtaattaatcataa

SEQ ID NO: 192442 - DNA, 120 bp, Artificial Sequence
  ENSG00000112697_10 (sequence is synthesized)
atatagaaacagtagtaatacagctgacattaccatttaattttatattatgaaagcaaatcatctgcatgtgcatcaaggccagtcctattcaacctagctttcgaatgctgatatctg

SEQ ID NO: 192443 - DNA, 120 bp, Artificial Sequence
  ENSG00000112697_11 (sequence is synthesized)
gttagtatgtcattttgaagttggcacataacttttctaaaaaaaagcagtctttgttgtttgcttcttccctacggatgacttctaaaaatatatgacgggtataaaaaaattagctat

SEQ ID NO: 192444 - DNA, 120 bp, Artificial Sequence
  ENSG00000112697_12 (sequence is synthesized)
attgatcatatcaacactgtaactgctgaaatggcattctaatgtttgctttttattcggacaggccacatgatgcatagagcctctttcatgtgacttgtgtctactgcttaaatcttt

SEQ ID NO: 192445 - DNA, 120 bp, Artificial Sequence
  ENSG00000112697_13 (sequence is synthesized)
atgctgtgttgatgatattatattgacatatgaagctgtatatgtgtatgtattttgtggagaaagggattacaagatgtatgagtataatgacttgctaacctttcaggattcagagaa

SEQ ID NO: 192446 - DNA, 120 bp, Artificial Sequence
  ENSG00000112697_14 (sequence is synthesized)
agatgaagaaagaccatatctaaataatacacttcatcattttcatgtgtataaatgcttaaagtaccatctttgttgaggtggttcatgtatccagtttatccagtacagttatttgtc

SEQ ID NO: 192447 - DNA, 120 bp, Artificial Sequence
  ENSG00000112697_15 (sequence is synthesized)
aagcttagctttgatttcaaaggacacgcttaccttgtctggcataagaattaatgctcatgtctgcagtggttgggtaggtcctgcttaggagaattaaaaaattcctctttccgtttg

SEQ ID NO: 192448 - DNA, 120 bp, Artificial Sequence
  ENSG00000112697_16 (sequence is synthesized)
gttgaatgttgcagtcaggaaccccaactcacttggaatgtttttatatgtaatcatttcccttgaagcttatactttataagggaagaaagaattcaggtgatatgggaaaactgcttg

SEQ ID NO: 192449 - DNA, 120 bp, Artificial Sequence
  ENSG00000112697_17 (sequence is synthesized)
gcagaccttcatcttctgcctcaactgtaaaccacatgtaagtgcttaatggagactgttttcattcttgtgatatttaacattcagaaaattacttcagctttggaaatactcaggctg

SEQ ID NO: 192450 - DNA, 120 bp, Artificial Sequence
  ENSG00000112697_18 (sequence is synthesized)
gcatataggtcaaatagcaatgtgtatgcacattctctttagttaaggcaccaattgttttggttggttttcctaagacatactttaaaaagatgttctataaatttcctaattaaatta

SEQ ID NO: 192451 - DNA, 120 bp, Artificial Sequence
  ENSG00000112697_19 (sequence is synthesized)
tggggattttggagtatgtacatgataaattataatatgtatatggttgaagttattttattttttactaatgaattattttaatattccttattgaataaatgctgtaacttgtttgct

SEQ ID NO: 192452 - DNA, 120 bp, Artificial Sequence
  ENSG00000112697_20 (sequence is synthesized)
atggaacttattcttaaagttctagttaaaaataatttttccacatgcatgaaaatatgtattaatcagaggtggcttaattacattgaaattgcttttttgttgttgtttttttactga

SEQ ID NO: 192453 - DNA, 120 bp, Artificial Sequence
  ENSG00000112697_21 (sequence is synthesized)
aataactcatgtttgtgtagaagaatgcctgtttactcagagtttatattttccttcagttatattttaaatcaaaaggtctgggtaatgtatacttttgattaatatatacttttttta

SEQ ID NO: 192454 - DNA, 120 bp, Artificial Sequence
  ENSG00000112697_22 (sequence is synthesized)
aaaaacaaaaaacaatgtaatggttaatagtagaaatgtgccacacttttcaagttttatataacatatgaaattcagttaaaagaatgtgtgtttcataatgacttttaactggtaaaa

SEQ ID NO: 192455 - DNA, 120 bp, Artificial Sequence
  ENSG00000112697_23 (sequence is synthesized)
atattacttgcacgaagtacttgatgtatggttatcctgaaatttcggagtatttggtgtgttctttgtctaaaaatagtctgttttgtcagtccttcagaatattatttattctgaaga

SEQ ID NO: 192456 - DNA, 120 bp, Artificial Sequence
  ENSG00000112697_24 (sequence is synthesized)
ttgtccctcttgcacttggcagtttattttcggggatacattgttgggggagaggggtttctgccactctttccagattgagtctgtgctgtttaaggaggactaccatcctgcaactct

SEQ ID NO: 192457 - DNA, 120 bp, Artificial Sequence
  ENSG00000112697_25 (sequence is synthesized)
ttttctaactggggcacagaggatgtcgctaaagaaaagttgaagagccctttcagcactttctcatctgtggagaagatggaatcttaaaatacatttggagttttatctgttttacaa

SEQ ID NO: 192458 - DNA, 120 bp, Artificial Sequence
  ENSG00000112697_26 (sequence is synthesized)
gtccattgatggcctaagttcctcctgttttctgctgtttgatctctaaggaactcctgttgctaaatatgaagagtatggaacattcgtatagtctctgtgaagcatggggggagggaa

SEQ ID NO: 192459 - DNA, 120 bp, Artificial Sequence
  ENSG00000112697_27 (sequence is synthesized)
gacatttctttttcttataggctttatgctcaaatgtcatagtctcctttcaaagaattgtgttgcattttaaatgcacccagcttaagtagaagacattgaaggatgcattaattttca

SEQ ID NO: 192460 - DNA, 120 bp, Artificial Sequence
  ENSG00000112697_28 (sequence is synthesized)
ggaactattttgaattatgaaaagattcccaattgaaaaaattattcaacaagtaaaagctaagaaatttcattgaaatcataaggcagtttaagcataaattgataaaaatagctgtgt

SEQ ID NO: 192461 - DNA, 120 bp, Artificial Sequence
  ENSG00000112697_29 (sequence is synthesized)
actactaattaatagaaaatcattcaaccaagagaagagtcaagtgaatatcgtttgtttatttgctagtgagtttctttgtaacgttgattttattaaatgataatatttggttagtat

SEQ ID NO: 192462 - DNA, 120 bp, Artificial Sequence
  ENSG00000112697_30 (sequence is synthesized)
gtcctatgttaataaaaatgaacaaaattaattttgctatgttcaggtgtcttgataaaataacaatgctccagtgttgttgcttacatttagcactaaattttaacacagcgtcagtga

SEQ ID NO: 192463 - DNA, 120 bp, Artificial Sequence
  ENSG00000112697_31 (sequence is synthesized)
gtccaggttttaacttcttcatgcctggatgggataaaatgtaattcattgttaaattaattcatatttgtatttattaatcactgtgacaacattaaccatttgttcttaccaggaagt

SEQ ID NO: 192464 - DNA, 120 bp, Artificial Sequence
  ENSG00000112697_32 (sequence is synthesized)
ggtcagattatcatctgagttacagttagactggctaagtttggtattagatcaaggggaatgtccagtaaacagagaggtaagcatgatggaaataatgaagtggggtacacaggaaaa

SEQ ID NO: 192465 - DNA, 120 bp, Artificial Sequence
  ENSG00000112697_33 (sequence is synthesized)
acctgactagtgaggaggagcagctgagagatagggtcagtgaatgcggttcagcctgctacctctcctgtcttcatagaaccattgccttagaattattgtatgacacattttttgttg

SEQ ID NO: 192466 - DNA, 120 bp, Artificial Sequence
  ENSG00000112697_34 (sequence is synthesized)
gttaagctgtaaggttttgttctttgtgaacatgggtattttgaggggagggtggagggagtagggaagtggtccttttacaagaattttgatgcataagtgtctattgtagggtttgga

SEQ ID NO: 192467 - DNA, 120 bp, Artificial Sequence
  ENSG00000112697_35 (sequence is synthesized)
tgatctagtaaagtgttttagaacccctttttatcccatgcaccattcagtaaacataaaaatcacaattctgctaatgtcatttggaacttcaaaataaatatcttgtctaaaaacaaa

SEQ ID NO: 192468 - DNA, 120 bp, Artificial Sequence
  ENSG00000112697_36 (sequence is synthesized)
cagggtgcgtccgccttttcgttcccgcttctatcctcctcccctttcccctccccatgtccctccttcttctccctcctccctctctccctccctctggcgtctccagccgactttcgc

SEQ ID NO: 192469 - DNA, 120 bp, Artificial Sequence
  ENSG00000112697_37 (sequence is synthesized)
acactggctaccatgggtttatggagaggaagaacccatctctccctttggtttctgaagtgggaggtggagccctgcatccttccaaaactcacaatggacagttccacaaaacttgga

SEQ ID NO: 192470 - DNA, 120 bp, Artificial Sequence
  ENSG00000112697_38 (sequence is synthesized)
aacaattccagcaattgccagggtaattgtatttttaaaatgagatgatgtgtgttagataatcagtgccatgaagaaaagtcagcatagagacagaggacctctcagaaacgcagtctt

SEQ ID NO: 192471 - DNA, 120 bp, Artificial Sequence
  ENSG00000112697_39 (sequence is synthesized)
tactttctgcagaaagggcgctccttgaagatggaacaatggtgagagcacacttgaacaaaggaaaagcaacatatttatcccttatgcatttggatcatccttactgtcgtatcctgc

SEQ ID NO: 192472 - DNA, 120 bp, Artificial Sequence
  ENSG00000112699_0 (sequence is synthesized)
ctccctgcacggcctcccgtgcgcccctgtcagactgtggcggccggtcgcgcggtgcgctctccctccctgcccgcagcctggagaggcgcttcgtgctgcacacccccgcgttcctgc

SEQ ID NO: 192473 - DNA, 120 bp, Artificial Sequence
  ENSG00000112699_1 (sequence is synthesized)
cctgccgccgaccgcacgcccgccgcgggacatggcacacgcaccggcacgctgccccagcgcccggggctccggggacggcgagatgggcaagcccaggaacgtggcgctcatcaccgg

SEQ ID NO: 192474 - DNA, 120 bp, Artificial Sequence
  ENSG00000112699_2 (sequence is synthesized)
ggcaagcccaggaacgtggcgctcatcaccggtatcacaggccaggatggttcctacctggctgagttcctgctggagaaaggctatgaggtccatggaattgtacggcggtccagttca

SEQ ID NO: 192475 - DNA, 120 bp, Artificial Sequence
  ENSG00000112699_3 (sequence is synthesized)
tttaatacgggtcgaattgagcatctgtataagaatccccaggctcacattgaaggaaacatgaagttgcactatggcgatctcactgacagtacctgccttgtgaagatcattaatgaa

SEQ ID NO: 192476 - DNA, 120 bp, Artificial Sequence
  ENSG00000112699_4 (sequence is synthesized)
gtaaagcccacagagatctacaaccttggagcccagagccacgtcaaaatttcctttgacctcgctgagtacactgcggacgttgacggagttggcactctacgacttctagatgcagtt

SEQ ID NO: 192477 - DNA, 120 bp, Artificial Sequence
  ENSG00000112699_5 (sequence is synthesized)
aagacttgtggccttatcaactctgtgaagttctaccaagcctcaacaagtgaactttatgggaaagtgcaggaaataccccagaaggagaccacccctttctatccccggtcaccctat

SEQ ID NO: 192478 - DNA, 120 bp, Artificial Sequence
  ENSG00000112699_6 (sequence is synthesized)
ggagctaatttcgttactcgaaaaattagccggtcagtagctaagatttaccttggacaactggaatgtttcagtttgggaaatctggatgccaaacgagattggggccatgccaaggac

SEQ ID NO: 192479 - DNA, 120 bp, Artificial Sequence
  ENSG00000112699_7 (sequence is synthesized)
tatgtggaggctatgtggttgatgttgcagaatgatgagccggaggacttcgttatagctactggggaggtccatagtgtccgggaatttgtcgagaaatcattcttgcacattggaaaa

SEQ ID NO: 192480 - DNA, 120 bp, Artificial Sequence
  ENSG00000112699_8 (sequence is synthesized)
accattgtgtgggaaggaaagaatgaaaatgaagtgggcagatgtaaagagaccggcaaagttcacgtgactgtggatctcaagtactaccggccaactgaagtggactttctgcagggc

SEQ ID NO: 192481 - DNA, 120 bp, Artificial Sequence
  ENSG00000112699_9 (sequence is synthesized)
gactgcaccaaagcgaaacagaagctgaactggaagccccgggtcgctttcgatgagctggtgagggagatggtgcacgccgacgtggagctcatgaggacaaaccccaatgcctgagca

SEQ ID NO: 192482 - DNA, 120 bp, Artificial Sequence
  ENSG00000112699_10 (sequence is synthesized)
gcgcctcggagcccggcccgccctccggctacaatccccgcagagtctccggtgcagacgcgctgcggggatggggagcggcgtgccaatctgcgggtcccctgcggcccctgctgccgc

SEQ ID NO: 192483 - DNA, 120 bp, Artificial Sequence
  ENSG00000112699_11 (sequence is synthesized)
tgcgctgtcccggccgcaagagcggggccgccccgccgaggtttgtagcagccgggatgtgaccctccagggtttgggtcgctttgcgtttgtcgaagcctcctctgaatggctttgtga

SEQ ID NO: 192484 - DNA, 120 bp, Artificial Sequence
  ENSG00000112699_12 (sequence is synthesized)
aatcaagatgttttaatcacattcactttacttgaaattatgttgttacacaacaaattgtggggccttcaaattgtttttctcttttcatattaaaaatggtctttctgtgaactagca

SEQ ID NO: 192485 - DNA, 120 bp, Artificial Sequence
  ENSG00000112699_13 (sequence is synthesized)
gtaaagagaccggcaaagttcacgtgactgtggatctcaagtactaccggccaactgaagtggagaccaattaattgttcaaaggtaatatatagagatctcaagagcatttactttggc

SEQ ID NO: 192486 - DNA, 120 bp, Artificial Sequence
  ENSG00000112699_14 (sequence is synthesized)
acagtctctgcccctttgtggtctggctaacaataaagctaagatttgttttgtaatgacggttccagttggactggaattcctttgaagttcctgaagtttgctgttgtgagagctcaa

SEQ ID NO: 192487 - DNA, 120 bp, Artificial Sequence
  ENSG00000112699_15 (sequence is synthesized)
gatattatttgactgcaatgaaacactctctgtgtattatcaaaatatcgtatacactgaactgtaacaacttgcagtaatcagacttctccttcgaggtggcctgcgtgagtagagagc

SEQ ID NO: 192488 - DNA, 120 bp, Artificial Sequence
  ENSG00000112699_16 (sequence is synthesized)
ggtatgaggagcagagagcagatcagcacggagcagcattagctggggcccccttgcctggcctggcagtgaagatagagcaccatgccagttgttcagcttctcagcgcttgcgtcagc

SEQ ID NO: 192489 - DNA, 120 bp, Artificial Sequence
  ENSG00000112699_17 (sequence is synthesized)
tgacctaaattatttaaggatgttgtcacctctaaataaatatagtcattgtcctggtctctatttatattttaaaactctttcccagcccaccccgatggcctaaaacaattcatatat

SEQ ID NO: 192490 - DNA, 120 bp, Artificial Sequence
  ENSG00000112699_18 (sequence is synthesized)
ttcagtagaagagggtgtcacagggctatttgcacaggtttggatccagtgccagcgttagccttcacacaagttacactcctctgagatgtaactgtctcctgtgtatgagtgccaaag

SEQ ID NO: 192491 - DNA, 120 bp, Artificial Sequence
  ENSG00000112699_19 (sequence is synthesized)
gtttcctcgagtggagcagttggggaaagcgggaggaggaaggcactgccagaggggacggtggcgggcagtgcggggtcctgcagagctgctggctgcagctccgctcgtggaagtaca

SEQ ID NO: 192492 - DNA, 120 bp, Artificial Sequence
  ENSG00000112699_20 (sequence is synthesized)
agtgggtcgagatcggcattttcttaggaacagaatcgaaccgagtagaataggggtagaatagaatagaccgtctacagcgttcctggacgctaagcctaagaattgcttcgtgaaact

SEQ ID NO: 192493 - DNA, 120 bp, Artificial Sequence
  ENSG00000112699_21 (sequence is synthesized)
ccagtttcgttttatgaacgcgtgtgtgcgggaggcgacgtgaactgacttgactgtgggtacgaaaagcccaaagccaccgcccaggaagaaccgcgcttggctgcggcccgggaagaa

SEQ ID NO: 192494 - DNA, 120 bp, Artificial Sequence
  ENSG00000112699_22 (sequence is synthesized)
cccagtgctctggctttgcttctctctagctccatccagcttatgaaggtgttgagactgctgagatgaaatcaggaaagcaactaggatcttatgagatttcctttgacctcgctgagt

SEQ ID NO: 192495 - DNA, 120 bp, Artificial Sequence
  ENSG00000112699_23 (sequence is synthesized)
attgtggtgaacttccgtgaggcgtataatctctttgcagtgaacggcattctcttcaatcatgagagtcccagaagaggtcagtaaatatattaactgaaaagagaatttcagacttga

SEQ ID NO: 192496 - DNA, 120 bp, Artificial Sequence
  ENSG00000112699_24 (sequence is synthesized)
acaacaacaacaagttgcatgtctatttggtgtatgtactacagagactgaaaaatttcctatctgtatctaattatgatgaatgtcagagcagcaaatgaagaaatgtatacccagcct

SEQ ID NO: 192497 - DNA, 120 bp, Artificial Sequence
  ENSG00000112699_25 (sequence is synthesized)
cattaaaacaatttcagtgctttcatcaagatatggcccctttcaaccaatcatttcaaaatattacacaaaatttaggagccctttctgtaaataacactgaaatgaatttggaaagtg

SEQ ID NO: 192498 - DNA, 120 bp, Artificial Sequence
  ENSG00000112699_26 (sequence is synthesized)
gcattgccttaagtatagtacagagaaacttttgcccaggggccatatcatatcatttggatggctgtgcaggtttctaaataagagccatcaccacttattttgttaagagaaaggcag

SEQ ID NO: 192499 - DNA, 120 bp, Artificial Sequence
  ENSG00000112699_27 (sequence is synthesized)
cctaaataaattcctttcttgtttcctttaactagttaccctgtgaactaagctatgtttctttctctccccatgagtcccaaagtagctttattaataggaatatatgatgtttgtgtt

SEQ ID NO: 192500 - DNA, 120 bp, Artificial Sequence
  ENSG00000112699_28 (sequence is synthesized)
cttaaaaaaaatcagggtggtcttagatgtctgtcgtccattctggcatttccctttatacaacccttttgaattttctgtttaaaaactggcattccaacagcttttctttggcctaat

SEQ ID NO: 192501 - DNA, 120 bp, Artificial Sequence
  ENSG00000112699_29 (sequence is synthesized)
gcctgggttgcatattgaagcaacaaattaggaatgttaagatgtcccccaaagaaaaacgtttgttctgaaagtagagctgatgtgacacatggaattagggcttcttaacttgtctaa

SEQ ID NO: 192502 - DNA, 120 bp, Artificial Sequence
  ENSG00000112699_30 (sequence is synthesized)
atgacagttaatgatcttttctctttttcttttcttttattgttttaacagggtggctgggagtgtagaatgaaagaaatgcccagaggccgaaatcgggtttggttcaccaaactgtta

SEQ ID NO: 192503 - DNA, 120 bp, Artificial Sequence
  ENSG00000112699_31 (sequence is synthesized)
tagtactgccagctgtgtgcttcttgacccaggggtagaaaggatgatcgtggtggaaggtagggatatgctgaattggtgatcgacttctgattctgcctaaacggactttctgcaggg

SEQ ID NO: 192504 - DNA, 120 bp, Artificial Sequence
  ENSG00000112701_0 (sequence is synthesized)
actaccttttctcttcggttggctgtagtttaaattctaaggtctcctcaagaaatgacattttcacatttcttaggcatctgtggtgccagaggagcaaacccatcgcacacgccaggt

SEQ ID NO: 192505 - DNA, 120 bp, Artificial Sequence
  ENSG00000112701_1 (sequence is synthesized)
ctgccatggggccctgggcggtggggattttggatgtaacgtgtctaggccgagcccgcgccgtgaaaggcctaccctgccgaaagcccgggcggcgggcgcccacaagtcagggctcgg

SEQ ID NO: 192506 - DNA, 80 bp, Artificial Sequence
  ENSG00000112701_2 (sequence is synthesized)
gtcagggctcggtgcggcgccgcagccagctctgcccgcgagccgagtccgggctgctgagggggagccgcgctgggggc

SEQ ID NO: 192507 - DNA, 120 bp, Artificial Sequence
  ENSG00000112701_3 (sequence is synthesized)
ggaggagcggcagcggcggcggctggagctgctgtggcgaccgacgcgaggcggtggcagaggagacccacccctgtccacatggacagtcgcaaaggcctccgctgatgcattcacgcc

SEQ ID NO: 192508 - DNA, 120 bp, Artificial Sequence
  ENSG00000112701_4 (sequence is synthesized)
tgggcggggtgggcggacggccgtagcggcggcggctgcagaacgagctaggggcctgggggcgcctgacggtcgcagagacctcgccgctccggcgcggcgggtgcggccattttacgg

SEQ ID NO: 192509 - DNA, 120 bp, Artificial Sequence
  ENSG00000112701_5 (sequence is synthesized)
cctgggacgaagggaggcgtgtttgtgtgctcgctttcattctcctttcttgggaacccacggctgggggaagtttctcaggcagcctgggtgggcggtggatggggagtcgtgggccga

SEQ ID NO: 192510 - DNA, 120 bp, Artificial Sequence
  ENSG00000112701_6 (sequence is synthesized)
ccgagaggaaccgggcccgggaagcgccgtcgtcgtcgtcgccggtcgcgttcccccggagaggcctgagaagctcgggccgcgggcctcgctgcccgccagcccgcggacaggcccggg

SEQ ID NO: 192511 - DNA, 120 bp, Artificial Sequence
  ENSG00000112701_7 (sequence is synthesized)
cctggcctgcctttgtataggcccgtctgaacgtgggagcgcagcccgcctgacggctgagcccgaggcccgcaaccctgcggcgtctaccctcctccggcgcggcccctcatcccggcg

SEQ ID NO: 192512 - DNA, 120 bp, Artificial Sequence
  ENSG00000112701_8 (sequence is synthesized)
agcacggcggcggtgtgggccatggattaagaaggaggcggcgtgggaggaggaagatggcggccggcaagagcggcggtagcgcaggggagattacttttctggaagctttggctagat

SEQ ID NO: 192513 - DNA, 120 bp, Artificial Sequence
  ENSG00000112701_9 (sequence is synthesized)
cagagtctaagagagatggaggttttaaaaataattggagctttgatcatgaagaagaaagtgaaggagatacagataaagatgggacaaatctgctcagtgtggatgaagatgaggatt

SEQ ID NO: 192514 - DNA, 120 bp, Artificial Sequence
  ENSG00000112701_10 (sequence is synthesized)
ctgaaacctcaaaaggaaaaaagttaaatcgtcgatctgaaattgttgctaatagctctggtgaattcatcttgaagacatatgtaagacgaaacaagtctgaaagttttaaaactttga

SEQ ID NO: 192515 - DNA, 120 bp, Artificial Sequence
  ENSG00000112701_11 (sequence is synthesized)
aaggcaacccaattggacttaacatgttgagcaacaataagaaattgagtgaaaatacgcaaaatacgtcattatgttctggaactgtagttcatggtagacgttttcatcatgctcatg

SEQ ID NO: 192516 - DNA, 120 bp, Artificial Sequence
  ENSG00000112701_12 (sequence is synthesized)
cacagataccagtagtaaaaacagcagcccaaaggaaagaatacccacctcatgtccaaaaagttgaaattaatcctgtaaggttaagtcggctccaaggtgttgaacgtataatgaaga

SEQ ID NO: 192517 - DNA, 120 bp, Artificial Sequence
  ENSG00000112701_13 (sequence is synthesized)
aaacagaagagtccgaatcacaagtggagcctgaaattaagaggaaagtacaacagaaacgacactgtagtacctatcagcctactcctcctctatctcctgcttcaaaaaaatgtttaa

SEQ ID NO: 192518 - DNA, 120 bp, Artificial Sequence
  ENSG00000112701_14 (sequence is synthesized)
cccatttagaggatttgcaaagaaattgcagacaagctattactttgaatgagtctactggaccattattaagaacgtcaattcatcagaattctggaggacagaagtcacaaaacacag

SEQ ID NO: 192519 - DNA, 120 bp, Artificial Sequence
  ENSG00000112701_15 (sequence is synthesized)
gattaacaaccaagaagttttatggcaacaatgtggaaaaggttccaattgatattattgtgaattgtgatgacagtaaacacacttatttacagactaatggaaaagtcattttacctg

SEQ ID NO: 192520 - DNA, 120 bp, Artificial Sequence
  ENSG00000112701_16 (sequence is synthesized)
gggcaaaaatacccaaaatcacaaacttgaaagaaaggaaaacaagtttgtcagacctaaatgatccaatcattttgtccagtgatgatgatgatgacaacgacagaactaacagaagag

SEQ ID NO: 192521 - DNA, 120 bp, Artificial Sequence
  ENSG00000112701_17 (sequence is synthesized)
aaagcatatctcctcagcctgctgattcagcatgttcttcccctgcaccatccactggaaaagtagaagcagcgctaaatgaaaatacttgcagagcagagcgtgaactacgaagcattc

SEQ ID NO: 192522 - DNA, 120 bp, Artificial Sequence
  ENSG00000112701_18 (sequence is synthesized)
cagaagactcagagttaaatacagttacattgccaagaaaagcaagaatgaaagaccagtttggcaattctattatcaacacacctctgaaacgtcgtaaagtgttttctcaagaacctc

SEQ ID NO: 192523 - DNA, 120 bp, Artificial Sequence
  ENSG00000112701_19 (sequence is synthesized)
ggctgttaatagagcctgtaattttttgtttagattttatcaagatacagctagacgaaccagaccatgatcctgtagagattatattaaatacctctgatctaactaaatgtgaatggt

SEQ ID NO: 192524 - DNA, 120 bp, Artificial Sequence
  ENSG00000112701_20 (sequence is synthesized)
gtaatgtccgaaaattacctgtagtgtttcttcaagcaattccagcagtttatcaaaagctgagcatccaactgcaaatgaataaggaggataaagtttggaatgattgtaaaggagtaa

SEQ ID NO: 192525 - DNA, 120 bp, Artificial Sequence
  ENSG00000112701_21 (sequence is synthesized)
ataaattaacaaatttagaagaacaatatataattttaatttttcaaaatggccttgatcctccggcaaatatggtatttgaaagtatcattaatgaaattggtataaagaataacatct

SEQ ID NO: 192526 - DNA, 120 bp, Artificial Sequence
  ENSG00000112701_22 (sequence is synthesized)
ccaatttttttgcgaaaattccctttgaagaagctaatggcagacttgttgcctgtacaagaacctatgaagagagcatcaaaggaagttgtgggcaaaaggaaaacaaaattaaaactg

SEQ ID NO: 192527 - DNA, 120 bp, Artificial Sequence
  ENSG00000112701_23 (sequence is synthesized)
tatcatttgaatctaaaatacaacttagaagcaaacaagaatttcagttttttgatgaagaagaagaaactggagaaaaccacaccatcttcattggcccagtagaaaagttgatagtat

SEQ ID NO: 192528 - DNA, 120 bp, Artificial Sequence
  ENSG00000112701_24 (sequence is synthesized)
atccaccacctccagctaagggaggcatctctgttaccaatgaggacctgcactgtctaaatgaaggagaatttttaaatgatgttattatagacttttatttgaaatacttggtgcttg

SEQ ID NO: 192529 - DNA, 120 bp, Artificial Sequence
  ENSG00000112701_25 (sequence is synthesized)
aaaaactgaagaaggaagacgctgaccgaattcatatattcagttcttttttctataaacgccttaatcagagagagaggagaaatcatgaaacaactaatctgtcaatacagcaaaaac

SEQ ID NO: 192530 - DNA, 120 bp, Artificial Sequence
  ENSG00000112701_26 (sequence is synthesized)
ggcatgggagagtaaaaacatggacccggcacgtagatatttttgagaaggattttatttttgtaccccttaatgaagctgcacactggtttttggctgttgtttgtttccccggtttgg

SEQ ID NO: 192531 - DNA, 120 bp, Artificial Sequence
  ENSG00000112701_27 (sequence is synthesized)
aaaaaccaaagtatgaacctaatcctcattaccatgaaaatgctgtcatacagaaatgttcaactgtagaggacagttgtatttcttcttcagccagtgaaatggagagttgttcacaaa

SEQ ID NO: 192532 - DNA, 120 bp, Artificial Sequence
  ENSG00000112701_28 (sequence is synthesized)
actcttctgccaagcctgtaattaagaagatgctaaacaaaaaacattgcatagctgtaattgattccaatcctgggcaggaagaaagtgaccctcgttataagagaaacatatgcagtg

SEQ ID NO: 192533 - DNA, 120 bp, Artificial Sequence
  ENSG00000112701_29 (sequence is synthesized)
taaaatacagtgtgaaaaaaataaatcatactgcgagtgaaaatgaagaattcaataaaggagaatctacatcccagaaagttgctgataggactaaaagtgagaatggcctacagaatg

SEQ ID NO: 192534 - DNA, 120 bp, Artificial Sequence
  ENSG00000112701_30 (sequence is synthesized)
aaagtttaagttccacacatcatacagatggcttaagcaaaatcagactaaactatagcgatgaatcacctgaagctggtaaaatgcttgaagatgaactcgtcgacttctcagaagatc

SEQ ID NO: 192535 - DNA, 120 bp, Artificial Sequence
  ENSG00000112701_31 (sequence is synthesized)
aggataaccaggatgatagcagtgacgatggattcctcgctgatgacaactgcagttcagaaataggacagtggcatttaaagcctactatctgtaaacaaccttgtatcctacttatgg

SEQ ID NO: 192536 - DNA, 120 bp, Artificial Sequence
  ENSG00000112701_32 (sequence is synthesized)
actcactccgaggcccttctcggtcaaatgttgtcaaaattttaagagagtatttagaagtggaatgggaagttaaaaaaggaagcaaaagaagtttttccaaagatgttatgaagggct

SEQ ID NO: 192537 - DNA, 120 bp, Artificial Sequence
  ENSG00000112701_33 (sequence is synthesized)
ctaatccaaaagtaccacagcaaaacaacttcagtgactgtggtgtatatgtattgcagtatgtagagagcttttttgagaatccaattctcagttttgaactacctatgaatttggcaa

SEQ ID NO: 192538 - DNA, 120 bp, Artificial Sequence
  ENSG00000112701_34 (sequence is synthesized)
actggtttcctccaccaagaatgagaacaaaaagagaagaaatccgaaacataattctgaagctacaggaagatcagagcaaagagaaaagaaagcataaggacacttactcaacagaag

SEQ ID NO: 192539 - DNA, 120 bp, Artificial Sequence
  ENSG00000112701_35 (sequence is synthesized)
cacctttaggcgaaggaacagaacaatatgtcaatagtatctcagattgaccatttctgttacttgtcatttctactttcagaaactaaatgactttcaaatttgggtatagacaataaa

SEQ ID NO: 192540 - DNA, 120 bp, Artificial Sequence
  ENSG00000112701_36 (sequence is synthesized)
gaactgaagtgctcactactcagtgatttggaaattttgatgcttgtataaatgtcagataattaatttccaaaggcgtatgtattaagtaaaagtctgtaaatatgttaatgaggccaa

SEQ ID NO: 192541 - DNA, 120 bp, Artificial Sequence
  ENSG00000112701_37 (sequence is synthesized)
tttttccagcatttataattatttttttcacttgttaggaagcttttgttatgtattttctgttaatagtacctaaaattgcaacttctaaacacaaataaaaagaaaatatttatagga

SEQ ID NO: 192542 - DNA, 120 bp, Artificial Sequence
  ENSG00000112701_38 (sequence is synthesized)
tgaccctttatatttgttctaaaataagtcaaaatgtgaaaataatattaaatctaagatattttgaactaagcatctttatatgcttgtgtaacaggaacaaagtaacagcctttcaat

SEQ ID NO: 192543 - DNA, 120 bp, Artificial Sequence
  ENSG00000112701_39 (sequence is synthesized)
tcatatactgccttgtgttcagtgaacccaagaaatgtaataaatatttgtaattttacacaaatatttaagaggaaagagtattaagagcaattcaaaaaaagtaaccttatactacta

SEQ ID NO: 192544 - DNA, 120 bp, Artificial Sequence
  ENSG00000112701_40 (sequence is synthesized)
aaaaaaaaattcttgcatatattatcatcaaatgcatttttgaagacatcaaagactcaggttaaaactattttggtaagtgcagcttgaatttcaaatatcccgtgttacctttctcta

SEQ ID NO: 192545 - DNA, 120 bp, Artificial Sequence
  ENSG00000112701_41 (sequence is synthesized)
ttacagcttaaagtatgctacaatctgtgtcatatagttaattgataagcatttttaatctgtgtaaacacaggaatttaaataggaatttactatttttttataaagcttttgctattt

SEQ ID NO: 192546 - DNA, 120 bp, Artificial Sequence
  ENSG00000112701_42 (sequence is synthesized)
tttcattgctcattttgttcttattattttgataaagtatcagactttttgcttgagttcttcagtgtaaattattttttacatgtaaaagtactgtattcaaccagttgcataatacag

SEQ ID NO: 192547 - DNA, 120 bp, Artificial Sequence
  ENSG00000112701_43 (sequence is synthesized)
caaaaatctttgaattcccctttaaaataactaaaatttgatggtttccatgacagatttatagcacatatagggatcttgcatgtatctgcagaaacttcattatttttcaaatgaaat

SEQ ID NO: 192548 - DNA, 120 bp, Artificial Sequence
  ENSG00000112701_44 (sequence is synthesized)
ggtgtatacttctttcaaatgaactttgagacttgaaacatattttagtcattttttgttaaatattgaatttttaaatacacatatatcaaaaatagttgagaataaaaagaaagccta

SEQ ID NO: 192549 - DNA, 120 bp, Artificial Sequence
  ENSG00000112701_45 (sequence is synthesized)
atcatcagcaattattttatttttaatttggccatctctgacattgcagtcaatatcttagggtattttcttgaatttaataaagtcccatgggtgggttcagggtgaatgggagtatta

SEQ ID NO: 192550 - DNA, 120 bp, Artificial Sequence
  ENSG00000112701_46 (sequence is synthesized)
acaacaaccaaaaaatatctattgagacacagtagagtctcagtaagagaaatattaaaatgtaagaaaggtcaccattagtgatatcaactgtagtttgttactttgaactatatttct

SEQ ID NO: 192551 - DNA, 120 bp, Artificial Sequence
  ENSG00000112701_47 (sequence is synthesized)
gattaactctttatagtaataacttagagctgttagctcagatatcttaattagctcatatgaaaaacaagtttaattttattatttactgaacatggcaaaatgcttttcaatctataa

SEQ ID NO: 192552 - DNA, 120 bp, Artificial Sequence
  ENSG00000112701_48 (sequence is synthesized)
taaaactgggataaaaaattgaagttgttttttttaaaacctaatagcaataagcaaaattggcatacataatttttttaatgaactatattttgtcagaatctgaaggtactgaaaaac

SEQ ID NO: 192553 - DNA, 120 bp, Artificial Sequence
  ENSG00000112701_49 (sequence is synthesized)
tattctaaaatgcctacttgtttttgcattaatttgtaatgcttacattttgcacccttagataatgtttgataagataaaaatataatttatcccttgtaccaactcaagtcaatcaga

SEQ ID NO: 192554 - DNA, 120 bp, Artificial Sequence
  ENSG00000112701_50 (sequence is synthesized)
ttttaacatgaaaaatatagattaatgtatgtcagctttctagaggtagaatactcagctatttgatggcatttttcccaccccatgtgaaattttatttttggaagttatgctagtgac

SEQ ID NO: 192555 - DNA, 120 bp, Artificial Sequence
  ENSG00000112701_51 (sequence is synthesized)
attgcaatatatattgaaatcttcggaggctgccaggttgagcttcaaaactagacttgagaatctttcgtgtatatgcacattcacttgataattgtgtattctatgtagtttaaagtg

SEQ ID NO: 192556 - DNA, 120 bp, Artificial Sequence
  ENSG00000112701_52 (sequence is synthesized)
ggatcaagccttttaaaatgtgttattagtacttagaagttgtaaaacagaacttatagaggtttgttactagacactgaaactgcatgacaagtatctggtgtcttaactaattagata

SEQ ID NO: 192557 - DNA, 120 bp, Artificial Sequence
  ENSG00000112701_53 (sequence is synthesized)
gatctgttgtattggttttcttgttggatagaataacagttaatcatttttagaagagttttagattacttgccataaaatttgtatgtctcagctcttgttggtttaggagcagaagtg

SEQ ID NO: 192558 - DNA, 120 bp, Artificial Sequence
  ENSG00000112701_54 (sequence is synthesized)
gtgtttagtcccttcccgttaatgttgctgtgctacttcagacagctgaaaacttaatggtattatttcaagttcacataaccctaaaaaaggttttctttgtgtagtaacttgtgctta

SEQ ID NO: 192559 - DNA, 120 bp, Artificial Sequence
  ENSG00000112701_55 (sequence is synthesized)
aacttttagtcaattaaatgtaggaggttttatttgaaaacataaaatgattctctaaattacatcttgttttaagccaccaaaatgaatgcagtaatttttctttaaaaaaatgatctc

SEQ ID NO: 192560 - DNA, 120 bp, Artificial Sequence
  ENSG00000112701_56 (sequence is synthesized)
tgaaaactgtgagacaatgtaaaaagaataagttttaattcccccaaaatcaaaaattgtacttaaaatctcagacaattcactgaacaggaataataaagaacatattttaatatataa

SEQ ID NO: 192561 - DNA, 120 bp, Artificial Sequence
  ENSG00000112701_57 (sequence is synthesized)
tctctgccacttactgtgtgacatttggggagttattttttctgtttctgtctttgcacattttaaaaatgagaattctatctaaaaagttgtgaaaattgggccagggagatatctggc

SEQ ID NO: 192562 - DNA, 120 bp, Artificial Sequence
  ENSG00000112701_58 (sequence is synthesized)
ggtcaaggtgggaggatcgcttgagcccaagagttcacgaccagcctgggaaacaaagtgagaccttgtctccacaaaaaatttaaaaattagccagtcatatacctatagtcccagcca

SEQ ID NO: 192563 - DNA, 120 bp, Artificial Sequence
  ENSG00000112701_59 (sequence is synthesized)
atttaaaaattagccagtcatatacctatagtcccagccacttgggaggctcagacaggaagattacctgagcccatgagttcgaagttgcactgagccatgatggcgccactgcactcc

SEQ ID NO: 192564 - DNA, 120 bp, Artificial Sequence
  ENSG00000112701_60 (sequence is synthesized)
aaagcaaaactctacccccacacccacccccgaaaacaggagttgtgagaattaaatgagatcgtacatatcaagtagtaggaaaaatgcctagtacagtgttagaagtttatggtcttg

SEQ ID NO: 192565 - DNA, 120 bp, Artificial Sequence
  ENSG00000112701_61 (sequence is synthesized)
taggaagcacaaatacagaattaaagcaatgatagaagcattaacatggtacagtcctagcagatgagagaatgcttcattatctttggaggttgggagatatgagggaccaggaagctt

SEQ ID NO: 192566 - DNA, 120 bp, Artificial Sequence
  ENSG00000112701_62 (sequence is synthesized)
tcctggaagagcttacattatgacccaatatacattatgacccaacataacacatgtatacacctatgtgcaatgtgtttatacatttatcaatttgtatgtttttactggtttgtgata

SEQ ID NO: 192567 - DNA, 120 bp, Artificial Sequence
  ENSG00000112701_63 (sequence is synthesized)
taaaatggacatgtatatgaaataaaacagaacttagcatcagtatgcatagttctctgtaatattttctagtttcttatactgtgtttcattaaacaaaacaaaacttttaaaaattga

SEQ ID NO: 192568 - DNA, 120 bp, Artificial Sequence
  ENSG00000112701_64 (sequence is synthesized)
ttactaaggattatgtttaaaatccttgatattgtgtgtatttgaagtttaagagaggaatttaatactttacaacaaacatactttatagcccctgacataatgtaatcatactacaag

SEQ ID NO: 192569 - DNA, 120 bp, Artificial Sequence
  ENSG00000112701_65 (sequence is synthesized)
actaaatacttgttccacgattgctgatcttgtacgtaacgttttttgttctgattttggaattgtcctcaagacaatctcattcaacatttattcctttatttattaatttgtttttaa

SEQ ID NO: 192570 - DNA, 120 bp, Artificial Sequence
  ENSG00000112701_66 (sequence is synthesized)
acaactaaaaaatacagtaaaattttacaaattgagtttcatttattggtatagttttgttattttatagtatcactttttatatggcaaagaagctatgatttgcttttaataggctta

SEQ ID NO: 192571 - DNA, 120 bp, Artificial Sequence
  ENSG00000112701_67 (sequence is synthesized)
aattctaattgtctttggttagtatatacatggcatcttcttcaataggttttcactttttttaaccatttttttcctttgtgaaaccttactgttttcactgtctgtagagagatatat

SEQ ID NO: 192572 - DNA, 120 bp, Artificial Sequence
  ENSG00000112701_68 (sequence is synthesized)
ctctgaaataattcatgacatgaaattatactattttatatctgcttttgagtaatcagattctgtaaatagagaatttttcactaagacctgttgtattgcattataatccagagaatc

SEQ ID NO: 192573 - DNA, 120 bp, Artificial Sequence
  ENSG00000112701_69 (sequence is synthesized)
ttgtgtatattcatatttgtactgcctgttttacaagaattaatgcagtttcacagtgaagcatgtaagatattgaattttagagacaatagaccagatacctttctaatctcattttat

SEQ ID NO: 192574 - DNA, 120 bp, Artificial Sequence
  ENSG00000112701_70 (sequence is synthesized)
tcattaatgtcaaataataccatttttaaaaatatggtgcttattgtctagcaagtaacctatagaaaagtattattttatacaaaaagatgattaggtcacataaaggaattggaatct

SEQ ID NO: 192575 - DNA, 120 bp, Artificial Sequence
  ENSG00000112701_71 (sequence is synthesized)
taagtttaaaatacacttctgtttttagccagaaaggagaaacgatggttggatttatgccatttttcaattaaaaaccatgtggactacttgaagcagtttctgagtaaatggaggtgt

SEQ ID NO: 192576 - DNA, 120 bp, Artificial Sequence
  ENSG00000112701_72 (sequence is synthesized)
aatttgcaagagttggcacattagtgaaaagctgttttgcagttagattctcttgagatactaccagttcacatggcaattttctatttgtgtttgacaaaaatgttaactattatatct

SEQ ID NO: 192577 - DNA, 120 bp, Artificial Sequence
  ENSG00000112701_73 (sequence is synthesized)
ttaagactatagatttagatttattagatgaagtaaattagttacatacgtgaatagatttgttcttgaactgttgttagagtaatgtattctggttccttccaataacttaggtgacat

SEQ ID NO: 192578 - DNA, 120 bp, Artificial Sequence
  ENSG00000112701_74 (sequence is synthesized)
tggcatgtaacacatactggtctttccagtgattgttgtgtatccactgtatgtcagacattgttgtggacctttatactgggatttctgattatcctcctggaaagaattaataattac

SEQ ID NO: 192579 - DNA, 120 bp, Artificial Sequence
  ENSG00000112701_75 (sequence is synthesized)
ttttaatactgttcatttcagtgttaaatctttttaattttatttcagaattacttacttttatgtgtgatttgtaaactaccttgtgtcaaaacagtggtgggtaggtgccaaatacca

SEQ ID NO: 192580 - DNA, 120 bp, Artificial Sequence
  ENSG00000112701_76 (sequence is synthesized)
cttgatacaggtctcagaagcatttttggttcctccacattctatccttatctttacttttcatcatcattttctctgtcatccttttttctttataccctacttccaacatatatatgc

SEQ ID NO: 192581 - DNA, 120 bp, Artificial Sequence
  ENSG00000112701_77 (sequence is synthesized)
acacactgctacattcaaatggattggttaccctgtgtcttacgtttgaagaaattgtggtccgtggtgtacatttgtatgtaatataggcatatatggttgaaaacttgagagatgaag

SEQ ID NO: 192582 - DNA, 120 bp, Artificial Sequence
  ENSG00000112701_78 (sequence is synthesized)
aggccacaatactactaaacacatagtataatggtaaataatacaaacataattttaaaactctaagtttatttcctattacagcaacttagctttgctgacctaatttattgggaacag

SEQ ID NO: 192583 - DNA, 120 bp, Artificial Sequence
  ENSG00000112701_79 (sequence is synthesized)
atctctcacactgcctacaaacttggaaatatggctatccacagcgcaatcttggtgatagttgagcaaggactccccagagaagagctgtaaatatagttaagtgggttgagaaaagaa

SEQ ID NO: 192584 - DNA, 120 bp, Artificial Sequence
  ENSG00000112701_80 (sequence is synthesized)
caaaagaagaaagggaaatggttctttttcttttgcatagtttgcatgggagacagtgccagaggaagaaaagagcagcataatgccactgggatggactcaaacttcagaggaaggttc

SEQ ID NO: 192585 - DNA, 120 bp, Artificial Sequence
  ENSG00000112701_81 (sequence is synthesized)
tttcctccaaggaacccctgtttcacttagctttatggagggctgaaactcattagactgtgttccctgagcctctgcccctacatcttatagattgcctagccattgaactaagaggca

SEQ ID NO: 192586 - DNA, 120 bp, Artificial Sequence
  ENSG00000112701_82 (sequence is synthesized)
aaaaccactttggtttttttgaaaggttatttgaattttaccagcattatttaatttcatgtagatagtagagagagaagtaagatactggaaaattactgttacataagttgggagagt

SEQ ID NO: 192587 - DNA, 120 bp, Artificial Sequence
  ENSG00000112701_83 (sequence is synthesized)
atcactatctagaagctacagataataagaaagtggcccctagttttgcctgtttcttgtttttaattgttaagtatcatgcatactttttagttccacatttttaatccttttgcattg

SEQ ID NO: 192588 - DNA, 120 bp, Artificial Sequence
  ENSG00000112706_0 (sequence is synthesized)
agacactgctacatgttcttcataaattaacaccctcataaaggtaaaccaagaaggttatcctcaatcatctggtatcaatatataattatttttcacatttctgttactttttaatga

SEQ ID NO: 192589 - DNA, 120 bp, Artificial Sequence
  ENSG00000112706_1 (sequence is synthesized)
gatttgaggttgttctgtgattgttatcagaattaccaatgcacaaaagccagaatgtatttggaaactagaagagctatttttgttttttggatttttctccaagttcaaggaaccaaa

SEQ ID NO: 192590 - DNA, 120 bp, Artificial Sequence
  ENSG00000112706_2 (sequence is synthesized)
gatatctccattaacatataccattctgaaactaaagacatagacaatcccccaagaaatgaaacaactgaaagtactgaaaaaatgtacaaaatgtcaactatgagacgaatattcgat

SEQ ID NO: 192591 - DNA, 120 bp, Artificial Sequence
  ENSG00000112706_3 (sequence is synthesized)
ttggcaaagcatcgaacaaaaagatccgcatttttcccaacgggggttaaagtctgtccacaggaatccatgaaacagattttagacagtcttcaagcttattatagattgagagtgtgt

SEQ ID NO: 192592 - DNA, 120 bp, Artificial Sequence
  ENSG00000112706_4 (sequence is synthesized)
caggaagcagtatgggaagcatatcggatctttctggatcgcatccctgacacaggggaatatcaggactgggtcagcatctgccagcaggagaccttctgcctctttgacattggaaaa

SEQ ID NO: 192593 - DNA, 120 bp, Artificial Sequence
  ENSG00000112706_5 (sequence is synthesized)
aacttcagcaattcccaggagcacctggatcttctccagcagagaataaaacagagaagtttccctgacagaaaagatgaaatatctgcagagaagacattgggagagcctggtgaaacc

SEQ ID NO: 192594 - DNA, 120 bp, Artificial Sequence
  ENSG00000112706_6 (sequence is synthesized)
attgtcatttcaacagatgttgccaacgtctcacttgggcctttccctctcactcctgatgacaccctcctcaatgaaattctcgataatacactcaacgacaccaagatgcctacaaca

SEQ ID NO: 192595 - DNA, 120 bp, Artificial Sequence
  ENSG00000112706_7 (sequence is synthesized)
gaaagagaaacagaattcgctgtgttggaggagcagagggtggagctcagcgtctctctggtaaaccagaagttcaaggcagagctcgctgactcccagtccccatattaccaggagcta

SEQ ID NO: 192596 - DNA, 120 bp, Artificial Sequence
  ENSG00000112706_8 (sequence is synthesized)
gcaggaaagtcccaacttcagatgcaaaagatatttaagaaacttccaggattcaaaaaaatccatgtgttaggatttagaccaaagaaagaaaaagatggctcaagctccacagagatg

SEQ ID NO: 192597 - DNA, 120 bp, Artificial Sequence
  ENSG00000112706_9 (sequence is synthesized)
caacttacggccatctttaagagacacagtgcagaagcaaaaagccctgcaagtgacctcctgtcttttgattccaacaaaattgaaagtgaggaagtctatcatggaaccatggaggag

SEQ ID NO: 192598 - DNA, 120 bp, Artificial Sequence
  ENSG00000112706_10 (sequence is synthesized)
gacaagcaaccagaaatctatctcacagctacagacctcaaaaggctgatcagcaaagcactagaggaagaacaatctttggatgtggggacaattcagttcactgatgaaattgctgga

SEQ ID NO: 192599 - DNA, 120 bp, Artificial Sequence
  ENSG00000112706_11 (sequence is synthesized)
tcactgccagcctttggtcctgacacccaatcagagctgcccacatcttttgctgttataacagaggatgctactttgagtccagaacttcctcctgttgaaccccagcttgagacagtg

SEQ ID NO: 192600 - DNA, 120 bp, Artificial Sequence
  ENSG00000112706_12 (sequence is synthesized)
gacggagcagagcatggtctacctgacacttcttggtctccacctgctatggcctctacctccctgtcagaagctccacctttctttatggcatcaagcatcttctctctgactgatcaa

SEQ ID NO: 192601 - DNA, 120 bp, Artificial Sequence
  ENSG00000112706_13 (sequence is synthesized)
ggcaccacagatacaatggccactgaccagacaatgctagtaccagggctcaccatccccaccagtgattattctgcaatcagccaactggctctgggaatttcacatccacctgcatct

SEQ ID NO: 192602 - DNA, 120 bp, Artificial Sequence
  ENSG00000112706_14 (sequence is synthesized)
ctgtctgacactcctgccccatctgaggtaccagagctcagcgaatatgtttctgtcccagatcatttcttggaggataccactcctgtctcagctttacagtatatcaccactagttct

SEQ ID NO: 192603 - DNA, 120 bp, Artificial Sequence
  ENSG00000112706_15 (sequence is synthesized)
atgaccattgcccccaagggccgagagctggtagtgttcttcagtctgcgtgttgctaacatggccttctccaacgacctgttcaacaagagctctctggagtaccgagctctggagcaa

SEQ ID NO: 192604 - DNA, 120 bp, Artificial Sequence
  ENSG00000112706_16 (sequence is synthesized)
caattcacacagctgctggttccatatctacgatccaatcttacaggatttaagcaacttgaaatacttaacttcagaaacgggagtgtgattgtgaatagcaaaatgaagtttgctaag

SEQ ID NO: 192605 - DNA, 120 bp, Artificial Sequence
  ENSG00000112706_17 (sequence is synthesized)
tcagtgccgtataacctcaccaaggctgtgcacggggtcttggaggattttcgttctgctgcagcccaacaactccatctggaaatagacagctactctctcaacattgaaccagctgat

SEQ ID NO: 192606 - DNA, 120 bp, Artificial Sequence
  ENSG00000112706_18 (sequence is synthesized)
caagcagatccctgcaagttcctggcctgcggcgaatttgcccaatgtgtaaagaacgaacggactgaggaagcggagtgtcgctgcaaaccaggatatgacagccaggggagcctggac

SEQ ID NO: 192607 - DNA, 120 bp, Artificial Sequence
  ENSG00000112706_19 (sequence is synthesized)
ggtctggaaccaggcctctgtggccctggcacaaaggaatgcgaggtcctccagggaaagggagctccatgcaggttgccagatcactctgaaaatcaagcatacaaaactagtgttaaa

SEQ ID NO: 192608 - DNA, 120 bp, Artificial Sequence
  ENSG00000112706_20 (sequence is synthesized)
aagttccaaaatcaacaaaataacaaggtaatcagtaaaagaaattctgaattactgaccgtagaatatgaagaatttaaccatcaagattgggaaggaaattaaaaactgaaaatgtac

SEQ ID NO: 192609 - DNA, 120 bp, Artificial Sequence
  ENSG00000112706_21 (sequence is synthesized)
aattatcatttaggctatctcaagagagatgatttgccttctcaaggaaaatggagacaggcatattcatgggtcatcaaaatccagacatacagtcaacactgagaatcagcacacacc

SEQ ID NO: 192610 - DNA, 120 bp, Artificial Sequence
  ENSG00000112706_22 (sequence is synthesized)
atatttcaaatatagaagagtcatgtacttggcaaccagtaaattctgaagaaaaagacacttacttattattaaaaccccaaatgcaatcagcgaaacatatttttactattcttggat

SEQ ID NO: 192611 - DNA, 120 bp, Artificial Sequence
  ENSG00000112706_23 (sequence is synthesized)
gatagtcaaaatgatcataagccaggtttgcttccaccttccctgaaaattttactcacagatcatttgcaacaagcatagcttacttattgtttagggactgaacaatttattgggaag

SEQ ID NO: 192612 - DNA, 120 bp, Artificial Sequence
  ENSG00000112706_24 (sequence is synthesized)
caaactctttatatgctagaaagtacatttaaaagatgactacttacgcagggagatgcaggtctctctaaacgcatgaatgtatgtagtgtgtaggcactgtagtgagtgtatatatgc

SEQ ID NO: 192613 - DNA, 120 bp, Artificial Sequence
  ENSG00000112706_25 (sequence is synthesized)
tccacactacgtctgataaacacaaacctcagtattcagttattaggcacactagttttatacgcaactactgcttacatagtagactgttttgttgccaataatctttgaattgttctt

SEQ ID NO: 192614 - DNA, 120 bp, Artificial Sequence
  ENSG00000112706_26 (sequence is synthesized)
taaaagaaactgaggttcagatacacataccatggaaaaatcttacttttcttgttactacacaaagctattttaaagaagatgctatgttgggagaagggcgaagttgtactatatgac

SEQ ID NO: 192615 - DNA, 120 bp, Artificial Sequence
  ENSG00000112706_27 (sequence is synthesized)
ataatcaattcctgtcttccaccacagatgaacaatgtcttcctataataacttcagaatatttcctcacaccaactttagtgtgtgtatacctagactggcatcaatgtaatccaattc

SEQ ID NO: 192616 - DNA, 120 bp, Artificial Sequence
  ENSG00000112706_28 (sequence is synthesized)
agtccattttttatgtgctgcttaatgaaaatgaatctgtctctatctctttcaaatgttctaatatcagatatatttgctacaaaccttaatttcaataaagtaaaagtgatatactca

SEQ ID NO: 192617 - DNA, 120 bp, Artificial Sequence
  ENSG00000112706_29 (sequence is synthesized)
acagaaaagaataaaggtaaaaccaaaccattcaatatcttacagtttggaaacaaccatcatgaacatttactgcctattttctgccttctttcttctattatatacacatattactga

SEQ ID NO: 192618 - DNA, 120 bp, Artificial Sequence
  ENSG00000112706_30 (sequence is synthesized)
gagagacccaacgggacctcagcccagccagcccaggtgaagcctgaattttataggcaagctgagctgaaaccttgcccttggacaggatccaatcaaaggagatgtatcactttctgt

SEQ ID NO: 192619 - DNA, 80 bp, Artificial Sequence
  ENSG00000112715_0 (sequence is synthesized)
gcgcagacagtgctccagccgcgcgcgctccccaggccctggcccgggcctcgggccggggaggaagagtagctcgccga

SEQ ID NO: 192620 - DNA, 120 bp, Artificial Sequence
  ENSG00000112715_1 (sequence is synthesized)
gagggagcgcgagccgcgccggccccggtcgggcctccgaaaccatgaactttctgctgtcttgggtgcattggagccttgccttgctgctctacctccaccatgccaagtggtcccagg

SEQ ID NO: 192621 - DNA, 120 bp, Artificial Sequence
  ENSG00000112715_2 (sequence is synthesized)
ctgcacccatggcagaaggaggagggcagaatcatcacgaagtggtgaagttcatggatgtctatcagcgcagctactgccatccaatcgagaccctggtggacatcttccaggagtacc

SEQ ID NO: 192622 - DNA, 120 bp, Artificial Sequence
  ENSG00000112715_3 (sequence is synthesized)
ctgatgagatcgagtacatcttcaagccatcctgtgtgcccctgatgcgatgcgggggctgctgcaatgacgagggcctggagtgtgtgcccactgaggagtccaacatcaccatgcaga

SEQ ID NO: 192623 - DNA, 120 bp, Artificial Sequence
  ENSG00000112715_4 (sequence is synthesized)
ggaaagggaaaggggcaaaaacgaaagcgcaagaaatcccggtataagtcctggagcgttccctgtgggccttgctcagagcggagaaagcatttgtttgtacaagatccgcagacgtgt

SEQ ID NO: 192624 - DNA, 120 bp, Artificial Sequence
  ENSG00000112715_5 (sequence is synthesized)
aaatgttcctgcaaaaacacagactcgcgttgcaaggcgaggcagcttgagttaaacgaacgtacttgcagatgtgacaagccgaggcggtgagccgggcaggaggaaggagcctccctc

SEQ ID NO: 192625 - DNA, 120 bp, Artificial Sequence
  ENSG00000112715_6 (sequence is synthesized)
agggtttcgggaaccagatctctcaccaggaaagactgatacagaacgatcgatacagaaaccacgctgccgccaccacaccatcaccatcgacagaacagtccttaatccagaaacctg

SEQ ID NO: 192626 - DNA, 120 bp, Artificial Sequence
  ENSG00000112715_7 (sequence is synthesized)
aaatgaaggaagaggagactctgcgcagagcactttgggtccggagggcgagactccggcggaagcattcccgggcgggtgacccagcacggtccctcttggaattggattcgccatttt

SEQ ID NO: 192627 - DNA, 120 bp, Artificial Sequence
  ENSG00000112715_8 (sequence is synthesized)
atttttcttgctgctaaatcaccgagcccggaagattagagagttttatttctgggattcctgtagacacacccacccacatacatacatttatatatatatatattatatatatataaa

SEQ ID NO: 192628 - DNA, 120 bp, Artificial Sequence
  ENSG00000112715_9 (sequence is synthesized)
tgggaacaggtggtcccaggtcgtttcctggctagatttgccttgtctggctcctgcccctgagttgcacaggggaggtatggtggggtcttgccttctgtggagaagatgcttcattcc

SEQ ID NO: 192629 - DNA, 120 bp, Artificial Sequence
  ENSG00000112715_10 (sequence is synthesized)
cagcccaggttcccagcaagccccaaccatctccttctccctgatggttgcccatgggctcaggaggggacagatggatgcctgtgtcaggagcccctctctccctctcttggagagagt

SEQ ID NO: 192630 - DNA, 120 bp, Artificial Sequence
  ENSG00000112715_11 (sequence is synthesized)
cctgagtgcccccccttcttgggggctttgtttgggaagctggatgagcctggtccatggagagtttaaaaagtcttttggtgttacctggtaatggggcacatctcagcccagataggg

SEQ ID NO: 192631 - DNA, 120 bp, Artificial Sequence
  ENSG00000112715_12 (sequence is synthesized)
tgggagggagctgtgaaacacagggagggggttgctttcgggtatctactaggagtcagggtgaagcctagagaggatgaaagaaggggaggggatggggagtggtaagaacctaggatt

SEQ ID NO: 192632 - DNA, 120 bp, Artificial Sequence
  ENSG00000112715_13 (sequence is synthesized)
tgaattcccagcctggccaacccttgcagccatgtcttggcctcaagtggaacaagggctccttgaggccagcagggttgggggagttggggtgggcctgagcctctttcctgctagagc

SEQ ID NO: 192633 - DNA, 120 bp, Artificial Sequence
  ENSG00000112715_14 (sequence is synthesized)
tcttggtcctccctgcctccaccacccatccctgctctgcagaacccctgggtgctgagtggcaggagccccagggttgtcccatctgggtatggctggctgggtcactaacctctgtga

SEQ ID NO: 192634 - DNA, 120 bp, Artificial Sequence
  ENSG00000112715_15 (sequence is synthesized)
tctgcttccttcctttccagattatgcggatcaaacctcaccaaggccagcacataggagagatgagcttcctacagcacaacaaatgtgaatgcagaccaaagaaagatagagcaagac

SEQ ID NO: 192635 - DNA, 120 bp, Artificial Sequence
  ENSG00000112715_16 (sequence is synthesized)
tggcatgatcttttttttgtcccacttggtggggccagggtcctctcccctgcccaggaatgtgcaaggccagggcatgggggcaaatatgacccagttttgggaacaccgacaaaccca

SEQ ID NO: 192636 - DNA, 120 bp, Artificial Sequence
  ENSG00000112715_17 (sequence is synthesized)
gccctggcgctgagcctctctaccccaggtcagacggacagaaagacagatcacaggtacagggatgaggacaccggctctgaccaggagtttggggagcttcaggacattgctgtgctt

SEQ ID NO: 192637 - DNA, 120 bp, Artificial Sequence
  ENSG00000112715_18 (sequence is synthesized)
tggggattccctccacatgctgcacgcgcatctcgcccccaggggcactgcctggaagattcaggagcctgggcggccttcgcttactctcacctgcttctgagttgcccaggagaccac

SEQ ID NO: 192638 - DNA, 120 bp, Artificial Sequence
  ENSG00000112715_19 (sequence is synthesized)
tggcagatgtcccggcgaagagaagagacacattgttggaagaagcagcccatgacagctccccttcctgggactcgccctcatcctcttcctgctccccttcctggggtgcagcctaaa

SEQ ID NO: 192639 - DNA, 120 bp, Artificial Sequence
  ENSG00000112715_20 (sequence is synthesized)
aggacctatgtcctcacaccattgaaaccactagttctgtccccccaggagacctggttgtgtgtgtgtgagtggttgaccttcctccatcccctggtccttcccttcccttcccgaggc

SEQ ID NO: 192640 - DNA, 120 bp, Artificial Sequence
  ENSG00000112715_21 (sequence is synthesized)
acagagagacagggcaggatccacgtgcccattgtggaggcagagaaaagagaaagtgttttatatacggtacttatttaatatccctttttaattagaaattaaaacagttaatttaat

SEQ ID NO: 192641 - DNA, 120 bp, Artificial Sequence
  ENSG00000112715_22 (sequence is synthesized)
taaagagtagggttttttttcagtattcttggttaatatttaatttcaactatttatgagatgtatcttttgctctctcttgctctcttatttgtaccggtttttgtatataaaattcat

SEQ ID NO: 192642 - DNA, 120 bp, Artificial Sequence
  ENSG00000112715_23 (sequence is synthesized)
gtttccaatctctctctccctgatcggtgacagtcactagcttatcttgaacagatatttaattttgctaacactcagctctgccctccccgatcccctggctccccagcacacattcct

SEQ ID NO: 192643 - DNA, 120 bp, Artificial Sequence
  ENSG00000112715_24 (sequence is synthesized)
cccagcacacattcctttgaaataaggtttcaatatacatctacatactatatatatatttggcaacttgtatttgtgtgtatatatatatatatatgtttatgtatatatgtgattctg

SEQ ID NO: 192644 - DNA, 120 bp, Artificial Sequence
  ENSG00000112715_25 (sequence is synthesized)
ttgctattctgttttttatatgtaaaaacaaaacaagaaaaaatagagaattctacatactaaatctctctccttttttaattttaatatttgttatcatttatttattggtgctactgt

SEQ ID NO: 192645 - DNA, 120 bp, Artificial Sequence
  ENSG00000112715_26 (sequence is synthesized)
ccgtaataattgtggggaaaagatattaacatcacgtctttgtctctagtgcagtttttcgagatattccgtagtacatatttatttttaaacaacgacaaagaaatacagatatatctt

SEQ ID NO: 192646 - DNA, 80 bp, Artificial Sequence
  ENSG00000112715_27 (sequence is synthesized)
ctgacggacagacagacagacaccgcccccagccccagctaccacctcctccccggccggcggcggacagtggacgcggc

SEQ ID NO: 192647 - DNA, 120 bp, Artificial Sequence
  ENSG00000112715_28 (sequence is synthesized)
ggggtggagggggtcggggctcgcggcgtcgcactgaaacttttcgtccaacttctgggctgttctcgcttcggaggagccgtggtccgcgcgggggaagccgagccgagcggagccgcg

SEQ ID NO: 192648 - DNA, 120 bp, Artificial Sequence
  ENSG00000112715_29 (sequence is synthesized)
agaagtgctagctcgggccgggaggagccgcagccggaggagggggaggaggaagaagagaaggaagaggagagggggccgcagtggcgactcggcgctcggaagccgggctcatggacg

SEQ ID NO: 192649 - DNA, 120 bp, Artificial Sequence
  ENSG00000112715_30 (sequence is synthesized)
ggaggcttggggcagccgggtagctcggaggtcgtggcgctgggggctagcaccagcgctctgtcgggaggcgcagcggttaggtggaccggtcagcggactcaccggccagggcgctcg

SEQ ID NO: 192650 - DNA, 120 bp, Artificial Sequence
  ENSG00000112715_31 (sequence is synthesized)
gtgctggaatttgatattcattgatccgggttttatccctcttcttttttcttaaacatttttttttaaaactgtattgtttctcgttttaatttatttttgcttgccattccccacttg

SEQ ID NO: 192651 - DNA, 120 bp, Artificial Sequence
  ENSG00000112715_32 (sequence is synthesized)
aatcgggccgacggcttggggagattgctctacttccccaaatcactgtggattttggaaaccagcagaaagaggaaagaggtagcaagagctccagagagaagtcgaggaagagagaga

SEQ ID NO: 192652 - DNA, 120 bp, Artificial Sequence
  ENSG00000112715_33 (sequence is synthesized)
cggggtcagagagagcgcgcgggcgtgcgagcagcgaaagcgacaggggcaaagtgagtgacctgcttttgggggtgaccgccggagcgcggcgtgagccctcccccttgggatcccgca

SEQ ID NO: 192653 - DNA, 120 bp, Artificial Sequence
  ENSG00000112715_34 (sequence is synthesized)
aagcgcaagaaatcccggtataagtcctggagcgtgtacgttggtgcccgctgctgtctaatgccctggagcctccctggcccccatccctgtgggccttgctcagagcggagaaagcat

SEQ ID NO: 192654 - DNA, 120 bp, Artificial Sequence
  ENSG00000112715_35 (sequence is synthesized)
cttggctgtctctgggagcagggctggggtacctgagtggggtgcatttggggtgtgtgggaaggagagggaaagaaagatggacagtgggactctcccctagcagggtctggtgttccg

SEQ ID NO: 192655 - DNA, 120 bp, Artificial Sequence
  ENSG00000112715_36 (sequence is synthesized)
taggctagagtgcccctctgctctgcgagtgctgggcgggaggggagttggtgagagctggagacccccaggaagggctggcagaagcctttccttttgggtgctgtcaggtccgcatgt

SEQ ID NO: 192656 - DNA, 120 bp, Artificial Sequence
  ENSG00000112715_37 (sequence is synthesized)
cttggcgtgttgaccttcacagcttctggcgaggggaggaatgatctgatgcgggtggggagggttagaggaggcctcaggcctaaggtggtgcagggggccccctaggggctgggcagt

SEQ ID NO: 192657 - DNA, 120 bp, Artificial Sequence
  ENSG00000112715_38 (sequence is synthesized)
gccaaggcataaaagccttccctggtccctggtggcatttgaaggtgcccaggtgagaggggcttggcacctcctcaccctgggagggagaagaaaccagggaacaggtaggagtgggag

SEQ ID NO: 192658 - DNA, 120 bp, Artificial Sequence
  ENSG00000112715_39 (sequence is synthesized)
acaggtgaggctttggaaatctattgaggctctggagagatttgtgtagagaggaaaatgtggttctcccccagggtctcctcctgggtttttaccctctaagcaacctgtgggcatgct

SEQ ID NO: 192659 - DNA, 120 bp, Artificial Sequence
  ENSG00000112715_40 (sequence is synthesized)
gggttattcctaaggactagaagagcttggatgggggagggtggttggtgcccttcggtcctcggcacccccctccgtctccaacaccagctcaccctggtatttgtcatgtcagcagga

SEQ ID NO: 192660 - DNA, 120 bp, Artificial Sequence
  ENSG00000112715_41 (sequence is synthesized)
gaaggtcaccatgttgtttttctcgcccctagtccttccttcctgccccagtccaaatttgtcctcctatttgaccttaatacttaccatggctttggaccagggaactagggggatagt

SEQ ID NO: 192661 - DNA, 120 bp, Artificial Sequence
  ENSG00000112715_42 (sequence is synthesized)
gagagcagggagagggaagtgtggggaaggtacaggggacctcgacagtgaagcattctggggttttcctcctgcatttcgagctccccagcccccaacatctggttagtctttaacttc

SEQ ID NO: 192662 - DNA, 120 bp, Artificial Sequence
  ENSG00000112715_43 (sequence is synthesized)
ctcgggttcataaccatagcagtccaggagtggtgggcatattctgtgcccgtggggacccccggttgtgtcctgttcgactcagaagacttggagaagccagaggctgttggtgggagg

SEQ ID NO: 192663 - DNA, 120 bp, Artificial Sequence
  ENSG00000112715_44 (sequence is synthesized)
gaagtgaggagggaggaggggctgggtggctgggcctgtgcaccccagcccctgcccatgcccatgccttgctctctttctgtcctcagtggtcccaggctgcacccatggcagaaggag

SEQ ID NO: 192664 - DNA, 120 bp, Artificial Sequence
  ENSG00000112715_45 (sequence is synthesized)
gagggcagaatcatcacgaaggtgagtccccctggctgttggatggggttccctgtcctctcaggggatgggtggatggcctaattcctttttcttcagaactgtggggaggaaggggaa

SEQ ID NO: 192665 - DNA, 120 bp, Artificial Sequence
  ENSG00000112715_46 (sequence is synthesized)
ggggcacaggaatataaggatcaagaaagaaagagctgggcaccacgaggttcaccctcagtttcgtgaggactctccgctgttcaggtctctgctagaagtaggacttgttgccttttt

SEQ ID NO: 192666 - DNA, 120 bp, Artificial Sequence
  ENSG00000112715_47 (sequence is synthesized)
cttctgctctttccagtaaaattttatttggagaaggagtcgtgcgcacagagcaggaagacagtgttcagggatcctaggtgttgggggaagtgtcccttgtttcccctagctcccagg

SEQ ID NO: 192667 - DNA, 120 bp, Artificial Sequence
  ENSG00000112715_48 (sequence is synthesized)
ggagagtggacatttagtgtcatttcctatatagacatgtcccatttgtgggaactgtgacccttcctgtgtgagctggaggcacagagggctcagcctaatgggatctctcctcccttc

SEQ ID NO: 192668 - DNA, 120 bp, Artificial Sequence
  ENSG00000112715_49 (sequence is synthesized)
cctggtttgcattcctttgggggtggagaaaaccccatttgactatgttcgggtgctgtgaacttccctcccaggccagcagagggctggctgtagctcccaggcgccccgcccccctgc

SEQ ID NO: 192669 - DNA, 120 bp, Artificial Sequence
  ENSG00000112715_50 (sequence is synthesized)
ccaaccccgagtccgcctgccttttgttccgttgtggtttggatcctcccatttctctggggacaccctggctctccccaccactgactgtggcctgtgctctccacctctggggaggga

SEQ ID NO: 192670 - DNA, 120 bp, Artificial Sequence
  ENSG00000112715_51 (sequence is synthesized)
aggccctggggtcttccttcccgcgagtttccctgacctaaatctggcgtggctgggtagtggccagcagtggtgatgcccagcctgttctgcctcctccttccccaccccaggagccct

SEQ ID NO: 192671 - DNA, 120 bp, Artificial Sequence
  ENSG00000112715_52 (sequence is synthesized)
ttccttggcctaggacctggcttctcagccactgaccggccccctgcttccagtgcgccacttaccccttccagcttcccagtggtctctggtctgggagaggcaggacaaaggtctttg

SEQ ID NO: 192672 - DNA, 120 bp, Artificial Sequence
  ENSG00000112715_53 (sequence is synthesized)
tttgctggagaaaaggttgtctgcgataaataaggaaaaccacgaaagcctggttgttggagtgtacgtgtgtgctcccccaggcagtggaggccagccctccttggaggggcggctgcc

SEQ ID NO: 192673 - DNA, 120 bp, Artificial Sequence
  ENSG00000112715_54 (sequence is synthesized)
tgatgaaggatgcgggtgaggttccccgcctccacctcccatgggacttggggattcattccaaggggaagctttttgggggaattcctaccccaggtctttttaccctcagttaccaac

SEQ ID NO: 192674 - DNA, 120 bp, Artificial Sequence
  ENSG00000112715_55 (sequence is synthesized)
cccttgcccaggccagaccttcctgctatcccctcctgggccacaagcctggccctcctctgtcccaattgtgatgaaggggcagttcaaaacttcttgattagtcatcttctcccctat

SEQ ID NO: 192675 - DNA, 120 bp, Artificial Sequence
  ENSG00000112715_56 (sequence is synthesized)
cgacttggctttaaaaaatgaccttttcagacttctagtctcgttcactctttttgatgatgctttgccgtaacccttcgtgggtagagaaggattctgtgcccattggtggtctggata

SEQ ID NO: 192676 - DNA, 120 bp, Artificial Sequence
  ENSG00000112715_57 (sequence is synthesized)
aaagaaatagagacctcacaggaagcagtggactggcctgtttccccactgttctttctgttttcacacctgtggccttctccccaccttcttcccaatcaacctattgtgtacatagcc

SEQ ID NO: 192677 - DNA, 120 bp, Artificial Sequence
  ENSG00000112715_58 (sequence is synthesized)
cccctcattgtcctttattcttctggaaagcagaccttggagggaggagtgagggggaggctcagctgtggtctctggggggtgggggttgggagctggggtggaagtccacgaagcata

SEQ ID NO: 192678 - DNA, 120 bp, Artificial Sequence
  ENSG00000112715_59 (sequence is synthesized)
cacttaagatgctttggtgaagttctaaacttcatattacccaggctgaaaaaagagcacttgttcctagggctggaaatggaagccaaaacaccacctttttcagcctgtttcagcatc

SEQ ID NO: 192679 - DNA, 120 bp, Artificial Sequence
  ENSG00000112715_60 (sequence is synthesized)
tttagagatcagcccaacccacttacacagttgagcagagttggaggcctagagaggggagggactggcccaaggtcataccaactcatggccagagcctgggcctcctcactggccagg

SEQ ID NO: 192680 - DNA, 120 bp, Artificial Sequence
  ENSG00000112715_61 (sequence is synthesized)
tgttatttcttccctctgggtagggaacctatttcagggacaggattgctatgtggtagtggtggtggggtgcgataggcgtggcaggctgggccacaatttggagtagtcatgccagag

SEQ ID NO: 192681 - DNA, 120 bp, Artificial Sequence
  ENSG00000112715_62 (sequence is synthesized)
tcctgcatttatttattctcaagggccccgcctctgtggcccagaattaccccttcatgctccagtgcaccccaggcttcgtggccagcctgggaaactgtctctaccctggtctccctt

SEQ ID NO: 192682 - DNA, 120 bp, Artificial Sequence
  ENSG00000112715_63 (sequence is synthesized)
cagatcagcttctagaaatgtttcgtggctacagtggcagcactgttttttccatgatgcaagcagtttgccctcttgggcggggttatcagtggctggcagggctggcacagcgtgtcc

SEQ ID NO: 192683 - DNA, 120 bp, Artificial Sequence
  ENSG00000112715_64 (sequence is synthesized)
gcccactgccacctgtgggttccaggagggcccagcccctgtgctgatgcccaccaccttctcagctcatgtctggggaagaggactggcagggggaaaggtgcctcctcctgaaaggtg

SEQ ID NO: 192684 - DNA, 120 bp, Artificial Sequence
  ENSG00000112715_65 (sequence is synthesized)
cctcctctgtttttgcctaatataggcttgggaacactttgatgtcagctaattctgactcctttacttactagctgtgcggccttggggcaacttacttagcctctttgagcctcctgt

SEQ ID NO: 192685 - DNA, 120 bp, Artificial Sequence
  ENSG00000112715_66 (sequence is synthesized)
tccccatctgtaaaatggaatctcaatagtgtctaatagtaccatgtggagaaacttgtgtgaaatgatagctgtggactactgtacacagtactcaggatgtagtaagtgctcaataaa

SEQ ID NO: 192686 - DNA, 120 bp, Artificial Sequence
  ENSG00000112715_67 (sequence is synthesized)
cagctgttggtatggttgacgttatggtagtggttgtggggaggacgtaggaaactggagactagcttggcaaagctggctcttcctccttttagggaaagcttagagcatccccatggg

SEQ ID NO: 192687 - DNA, 120 bp, Artificial Sequence
  ENSG00000112715_68 (sequence is synthesized)
gtatacccatactcagactgtcctctggcatcgaggttggcccaggattcagttcagctgtcacagtgaggtggcgggatcagatgtggcaggccatgtcccttggaacttgagtacatc

SEQ ID NO: 192688 - DNA, 120 bp, Artificial Sequence
  ENSG00000112715_69 (sequence is synthesized)
gtgtgatctctggaatgaaaacaggccttcaccagtgttgatggtggaaagcttagggaagtgcttcaaacacagtaggagggacttacgttagattttggaaggacttgcctgattcgg

SEQ ID NO: 192689 - DNA, 120 bp, Artificial Sequence
  ENSG00000112715_70 (sequence is synthesized)
aagctccaaagagtggcattacagagctgggtggagagaggggctagccatcttttgtgtcgcccaccgggctcatgtgtcatcgcctctcatgcagtggtgaagttcatggatgtctat

SEQ ID NO: 192690 - DNA, 120 bp, Artificial Sequence
  ENSG00000112715_71 (sequence is synthesized)
gggctcccatagcctccctgggtcagggacttggtcttgtgggggacttgtggtggcagcaacaatgggatggagccaactccaggatgatggctctagggctagtgagaaaacatagcc

SEQ ID NO: 192691 - DNA, 120 bp, Artificial Sequence
  ENSG00000112715_72 (sequence is synthesized)
aggagcctggcacttcctttggaagggacaatgccttctgggtctccagatcattcctgaccaggacttgctgtttcggtgtgtcagggggcactgtggacactggctcactggcttgct

SEQ ID NO: 192692 - DNA, 120 bp, Artificial Sequence
  ENSG00000112715_73 (sequence is synthesized)
ctaggacacccacagtggggagagggagtgggtggcagagaggccagcttttgtgtgtcagaggaaatggcctcttttggtggctgctgtgacggtgcagttggatgcgaggccggctgg

SEQ ID NO: 192693 - DNA, 120 bp, Artificial Sequence
  ENSG00000112715_74 (sequence is synthesized)
agggtggtttctcagtgcatgccctcctgtaggcggcaggcggcagacacacagccctcttggccagggagaaaaagttgaatgttggtcattttcagaggcttgtgagtgctccgtgtt

SEQ ID NO: 192694 - DNA, 120 bp, Artificial Sequence
  ENSG00000112715_75 (sequence is synthesized)
aaggggcaggtaggatggggtgggggacaaggtctggcggcagtaacccttcaagacagggtgggcggctggcatcagcaagagcttgcagggaaagagagactgagagagagcacctgt

SEQ ID NO: 192695 - DNA, 120 bp, Artificial Sequence
  ENSG00000112715_76 (sequence is synthesized)
gccctgccctttcccccacaccatcttgtctgcctccagtgctgtgcggacattgaagcccccaccaggcctcaaccccttgcctcttccctcagctcccagcttccagagcgaggggat

SEQ ID NO: 192696 - DNA, 120 bp, Artificial Sequence
  ENSG00000112715_77 (sequence is synthesized)
gcggaaaccttccttccaccctttggtgctttctcctaagggggacagacttgccctctctggtcccttctccccctcctttcttccctgtgacagacatcctgaggtgtgttctcttgg

SEQ ID NO: 192697 - DNA, 120 bp, Artificial Sequence
  ENSG00000112715_78 (sequence is synthesized)
gcttggcaggcatggagagctctggttctcttgaaggggacaggctacagcctgccccccttcctgtttccccaaatgactgctctgccatggggagagtagggggctcgcctgggctcg

SEQ ID NO: 192698 - DNA, 120 bp, Artificial Sequence
  ENSG00000112715_79 (sequence is synthesized)
gaagagtgtctggtgagatggtgtagcaggctttgacaggctggggagagaactccctgccaagtaccgcccaagcctctcctccccagacctccttaactcccaccccatcctgctgcc

SEQ ID NO: 192699 - DNA, 120 bp, Artificial Sequence
  ENSG00000112715_80 (sequence is synthesized)
tgcccagggctccaggacacccagccctgcctcccagtccaggtcgtgctgagcaggctggtgttgctcttggttccgtgccagctcccaaggtagccgcttcccccacaccgggattcc

SEQ ID NO: 192700 - DNA, 120 bp, Artificial Sequence
  ENSG00000112715_81 (sequence is synthesized)
cagaggttctgtcgcagttgcaaatgaaggcacaaggcctgatacacagccctccctcccactcctgctccccatccaggcaggtctctgaccttctccccaaagtctggcctacctttt

SEQ ID NO: 192701 - DNA, 120 bp, Artificial Sequence
  ENSG00000112715_82 (sequence is synthesized)
aagagccttccctcaggctttgccccctgccggggactgggagccactgtgagtgtggagacctttgggtcctgtgccctccacccagtctcggcttcccaccaaagccttgtcaggggc

SEQ ID NO: 192702 - DNA, 120 bp, Artificial Sequence
  ENSG00000112715_83 (sequence is synthesized)
tgggtttgccatcccatggtgggcagcgtgaggagaagaaagagccatcgagtgcttgctgcccagacacgcctgtgtgcgcccgcgcatgcctccccagagaccacctgcctcctgaca

SEQ ID NO: 192703 - DNA, 120 bp, Artificial Sequence
  ENSG00000112715_84 (sequence is synthesized)
cttcctccgggaagcggccctgtgtggctttgctttggtcgttcccccatccctgcccaccttaccacttcttttactccccccaccgcccccgctctctctctgtctctgtttttttat

SEQ ID NO: 192704 - DNA, 120 bp, Artificial Sequence
  ENSG00000112715_85 (sequence is synthesized)
ctggcccccagtacaacctccgcctgccattccctgtaaccctgcctccctcccctggtccttccctggctctcatcctcctggcccgtgtctctctctcactctctcactccactaatt

SEQ ID NO: 192705 - DNA, 120 bp, Artificial Sequence
  ENSG00000112715_86 (sequence is synthesized)
ggcaccaacgggtagatttggtggtggcattgctggtccagggttggggtgaatgggggtgccgacttggcctggaggattaagggaggggaccctggcttggctgggcaccgattttct

SEQ ID NO: 192706 - DNA, 120 bp, Artificial Sequence
  ENSG00000112715_87 (sequence is synthesized)
ctcacccactgggcactggtggcgggcccatgttggcacaggtgcctgctcacccaactggtttccattgctctaggcttctgcactcgtctggaagctgagggtggtggggagggcaga

SEQ ID NO: 192707 - DNA, 120 bp, Artificial Sequence
  ENSG00000112715_88 (sequence is synthesized)
catggcccaagaagggctgtgaatgactggaggcagcttgctgaatgactccttggctgaaggaggagcttgggtgggatcagacaccatgtggcggcctcccttcatctggtggaagtg

SEQ ID NO: 192708 - DNA, 120 bp, Artificial Sequence
  ENSG00000112715_89 (sequence is synthesized)
ccctggctcctcacggaggtggggcctctggaggggagccccctattccggcccaacccatggcacccacagaggcctccttgcagggcagcctcttcctctgggtcggaggctgtggtg

SEQ ID NO: 192709 - DNA, 120 bp, Artificial Sequence
  ENSG00000112715_90 (sequence is synthesized)
ggccctgccctgggccctctggccaccagcggcctggcctggggacaccgcctccgggcttagcctcccatcacaccctactttagcccaccttggtggaagggcctggacatgagcctt

SEQ ID NO: 192710 - DNA, 120 bp, Artificial Sequence
  ENSG00000112715_91 (sequence is synthesized)
gcacggggagaaggtggcccctgattgccatccccagcaggtgaagagtcaaggcgtgctccgatgggggcaacagcagttgggtccctgtggcctgagactcacccttgtctcccagag

SEQ ID NO: 192711 - DNA, 120 bp, Artificial Sequence
  ENSG00000112715_92 (sequence is synthesized)
acacagcattgccccttatggcagcctctccctgcactctctgcccgtctgtgcccgcctcttcctgcggcaggtgtcctagccagtgctgcctctttccgccgctctctctgtcttttg

SEQ ID NO: 192712 - DNA, 120 bp, Artificial Sequence
  ENSG00000112715_93 (sequence is synthesized)
ctgtagcgctcggatccttccagggcctgggggctgaccggctgggtgggggtgcagctgcggacatgttagggggtgttgcatggtgattttttttctctctctctgctgatgctctag

SEQ ID NO: 192713 - DNA, 120 bp, Artificial Sequence
  ENSG00000112715_94 (sequence is synthesized)
gttgcaaggcgaggcagcttgagttaaacgaacgtacttgcaggttggttcccagagggcaagcaagtcagagaggggcatcacacagagatggggagagagagagagaaagagagtgag

SEQ ID NO: 192714 - DNA, 120 bp, Artificial Sequence
  ENSG00000112715_95 (sequence is synthesized)
cgagcgagcgagcgggagagcgcctgagaggggccagctgcttgctcagtttctagctgcctgcctggtgactgctgccttctctgcttttaaggcccctgtggtgggctgcaggcactg

SEQ ID NO: 192715 - DNA, 120 bp, Artificial Sequence
  ENSG00000112715_96 (sequence is synthesized)
gtccagcctggcggggcctgttccgaggttgccctggttgcctgagtggtaggctggtgtggcttagtgtagtggtgtggacgcaagctgtgtgttgtgtcctgtggtccttctgctcat

SEQ ID NO: 192716 - DNA, 120 bp, Artificial Sequence
  ENSG00000112715_97 (sequence is synthesized)
agtggctgttggtcctgatgttattactacctctggtagtaatgctgagaagctgaaagccgattccaggtgtggacaatgtcaacaaagcacagatgctctcgctggggccttgcctcg

SEQ ID NO: 192717 - DNA, 120 bp, Artificial Sequence
  ENSG00000112715_98 (sequence is synthesized)
gccctttgaagtctgcatggctgggcttctcactcactcagtgtttcttgctgggggaaggaattgagtctcccacttcagactgggcctccctgaggaaagggttgtgtctccccactc

SEQ ID NO: 192718 - DNA, 120 bp, Artificial Sequence
  ENSG00000112715_99 (sequence is synthesized)
agactgaggttccctgagggtagggctgtgtctctcccctccgacctgggctccctgatagggctgtctccccgctcagactgaggctccctcaggccagggctatgtctccctcctcag

SEQ ID NO: 192719 - DNA, 120 bp, Artificial Sequence
  ENSG00000112715_100 (sequence is synthesized)
actggggctctgagggcaaggggtctggctgttcgtttaggatggggcacttttgcctacacactgaaggagctgtagcatccaagaatactagatacctttaatcctccaccagtcatg

SEQ ID NO: 192720 - DNA, 120 bp, Artificial Sequence
  ENSG00000112715_101 (sequence is synthesized)
gtgacaaccccaagcagcccacacattttcaagtgcccccaggatgcgtggagggaggggtctgtgcccattctcctgacattagcctgtgagctccgtaagcccgggcctcgtttacgt

SEQ ID NO: 192721 - DNA, 120 bp, Artificial Sequence
  ENSG00000112715_102 (sequence is synthesized)
acctttgtgagccccgggcatctgtacctctttcctttgcccatactggggaccaaggaagtgtcaagtgcatgagtgaatgtgtgactcagttcagagggtgaggtcaggagcacaggg

SEQ ID NO: 192722 - DNA, 120 bp, Artificial Sequence
  ENSG00000112715_103 (sequence is synthesized)
tcgggacaggtggctggcatcttttaatgccttagcttatgttctttataccaacttggcctgtgctcagagtgagggaggccctgggggtcagggtaagcgtcagtcagggaggcaaga

SEQ ID NO: 192723 - DNA, 120 bp, Artificial Sequence
  ENSG00000112715_104 (sequence is synthesized)
ctttgtggggatttcctagacagggccaaggcacccccagctcaccccgaggctgtgttagggaagtccttggagtgtctcccctcccccagcaatgttcttgtggcttgtgtgtgctca

SEQ ID NO: 192724 - DNA, 120 bp, Artificial Sequence
  ENSG00000112715_105 (sequence is synthesized)
ggggatgctgggaaccaggcctgggtagttggtgtggggtgctgtctgtcttggccctatgtgaaaccaagagggcgtatattagtgctggggtgggggctctgcctaacttcagggctg

SEQ ID NO: 192725 - DNA, 120 bp, Artificial Sequence
  ENSG00000112715_106 (sequence is synthesized)
gatgaggggagtctcagttccccaggggtccttgggaaagataagggacttgacattttagggtttttaggtgattattctgctgatgggggtttgtgtgaagtgacctgggagctaact

SEQ ID NO: 192726 - DNA, 120 bp, Artificial Sequence
  ENSG00000112715_107 (sequence is synthesized)
gaagttactctaacctcccaatacctttacccaacccccaagctggctgtatctgggaatatcagtttccaaaattggaggcttaggactccgtttcggggctccccagaagggtagggc

SEQ ID NO: 192727 - DNA, 120 bp, Artificial Sequence
  ENSG00000112715_108 (sequence is synthesized)
ctgttctgcctccttctcacaatcacccaggggcaggggcatgctgagaaagttcttggaggccccctttgcttcagctggagtagtgaagccgccgaattgtctctccccatcctaagt

SEQ ID NO: 192728 - DNA, 120 bp, Artificial Sequence
  ENSG00000112715_109 (sequence is synthesized)
gaagcagcatatttgaaaggaaagacaacctgttacctgggcctgcaacctccaggcagctcaagagagatgaggcctacagccacagtgggaggggacatggggaatggagatggtccc

SEQ ID NO: 192729 - DNA, 120 bp, Artificial Sequence
  ENSG00000112715_110 (sequence is synthesized)
tcaccttcctggggcctcctgctctacgctaccccctcgggagcctcctgtccccagggcaggcccttgccattgttggtcacccggccaagcctctctgcctcaggcgttctcccagaa

SEQ ID NO: 192730 - DNA, 120 bp, Artificial Sequence
  ENSG00000112715_111 (sequence is synthesized)
gatctgcccactctcttccccacaccagcccctagagactgaactgaaaaccctcctcagcagggagcctcttctgattaacttcatccagctctggtcacccatcagctcttaaaatgt

SEQ ID NO: 192731 - DNA, 120 bp, Artificial Sequence
  ENSG00000112715_112 (sequence is synthesized)
caagtggggactgttctttggtatccgttcatttgttgctttgtaaagtgttcccatgtccttgtcttgtctcaagtagattgcaagctcaggagggtagactgggagcccctgagtgga

SEQ ID NO: 192732 - DNA, 120 bp, Artificial Sequence
  ENSG00000112715_113 (sequence is synthesized)
gctgctgctcaggccggggctccctgagggcagggctggggctgttctcatactggggctttctgccccaggaccacaccttcctgtcctctctgctcttatggtgccggaggctgcagt

SEQ ID NO: 192733 - DNA, 120 bp, Artificial Sequence
  ENSG00000112715_114 (sequence is synthesized)
gacccaggggcccccaggaatggggaggccgcctgcctcatcgccaggcctcctcacttggccctaaccccagcctttgttttccatttccctcagatgtgacaagccgaggcggtgagc

SEQ ID NO: 192734 - DNA, 120 bp, Artificial Sequence
  ENSG00000112715_115 (sequence is synthesized)
gcctggccggccgcgtgttcccggagcctcggctgcccgaatggggagcccagagtggcgagcggcacccctccccccgccagccctccgcgggaaggtgacctctcgagtggtcccagg

SEQ ID NO: 192735 - DNA, 120 bp, Artificial Sequence
  ENSG00000112715_116 (sequence is synthesized)
atgtgaatgcaggtgaggatgtagtcacggattcattatcagcaagtggctgcagggtgcctgatctgtgccagggttaagcatgctgtactttttggcccccgtccagcttcccgctat

SEQ ID NO: 192736 - DNA, 120 bp, Artificial Sequence
  ENSG00000112715_117 (sequence is synthesized)
gtgacctttggcattttacttcaatgtgcctcagtttctacatctgtaaaatgggcacaatagtagtatacttcatagcattgttataatgattaaacaagttatatatgaaaagattaa

SEQ ID NO: 192737 - DNA, 120 bp, Artificial Sequence
  ENSG00000112715_118 (sequence is synthesized)
ggggggtaacactttgggaacaggtggtcccaggtcgtttcctggctagatttgccttgtctggctcctgcccctgagttgcacaggggaggtatggtggggtcttgccttctgtggaga

SEQ ID NO: 192738 - DNA, 120 bp, Artificial Sequence
  ENSG00000112739_0 (sequence is synthesized)
agaacccagctcttccctacacggtcggcacatgcgcggcagctcttttccttcttcctccacttcccctaccctccaccgtccgggagccgccgccaccgccgccgaggagtcaggaag

SEQ ID NO: 192739 - DNA, 120 bp, Artificial Sequence
  ENSG00000112739_1 (sequence is synthesized)
ttcaagatggccgccgcggagacccagtcgctacgggagcagccagagatggaagatgctaattctgaaaagagtataaatgaagaaaatggagaagtatcagaagaccagtctcaaaat

SEQ ID NO: 192740 - DNA, 120 bp, Artificial Sequence
  ENSG00000112739_2 (sequence is synthesized)
aagcacagtcgtcacaaaaaaaagaagcataaacacagaagtaaacataagaaacataaacattcctcagaagaagacaaggataaaaaacataaacataagcataaacataagaaacac

SEQ ID NO: 192741 - DNA, 120 bp, Artificial Sequence
  ENSG00000112739_3 (sequence is synthesized)
aaaagaaaagagattattgatgcttctgataaagagggtatgtctccagcaaaaagaactaaacttgatgatttagctttgctagaagacttggaaaaacagagagccttgattaaggcc

SEQ ID NO: 192742 - DNA, 120 bp, Artificial Sequence
  ENSG00000112739_4 (sequence is synthesized)
gaacttgataatgagttaatggaaggaaaggtccagtctggtatggggctcattttgcaaggttatgagtctggctctgaagaagagggggaaattcatgaaaaggcaagaaatggaaat

SEQ ID NO: 192743 - DNA, 120 bp, Artificial Sequence
  ENSG00000112739_5 (sequence is synthesized)
aggtctagtactagatcttcaagtacaaaggggaaacttgaacttgtggacaataaaattactacaaagaaacgaagtaaaagcagatccaaagaacggactagacataggtctgataaa

SEQ ID NO: 192744 - DNA, 120 bp, Artificial Sequence
  ENSG00000112739_6 (sequence is synthesized)
aagaaaagtaaggggggtattgaaatcgttaaagagaaaacaactaggagcaagtcaaaggagaggaaaaaatctaaaagcccatccaaaagaagtaagtctcaagatcaagcaaggaaa

SEQ ID NO: 192745 - DNA, 120 bp, Artificial Sequence
  ENSG00000112739_7 (sequence is synthesized)
tcaaaatcccctacccttagaaggcgatctcaagagaaaattggtaaggccagatctcctactgatgataaggttaaaattgaagataaaagtaaatcaaaagataggaaaaaatcccca

SEQ ID NO: 192746 - DNA, 120 bp, Artificial Sequence
  ENSG00000112739_8 (sequence is synthesized)
attataaatgaaagtagaagtcgcgatcgaggtaaaaaatccagatccccagttgatttaagaggtaaatccaaagacagaaggtcacggtccaaagagagaaaatcaaaacggtctgaa

SEQ ID NO: 192747 - DNA, 120 bp, Artificial Sequence
  ENSG00000112739_9 (sequence is synthesized)
actgataaagaaaagaagccaattaaatctccctctaaagatgcttcatctgggaaagaaaataggtcacccagcagaagacctggtcgtagtcctaaaagaagaagtttgtctccaaaa

SEQ ID NO: 192748 - DNA, 120 bp, Artificial Sequence
  ENSG00000112739_10 (sequence is synthesized)
ccacgtgataaatcaagaagaagcaggtctccacttttgaatgatagaagatctaagcagagcaaatccccctcgcggacactgtctcctgggagaagagccaagagccgatccttagaa

SEQ ID NO: 192749 - DNA, 120 bp, Artificial Sequence
  ENSG00000112739_11 (sequence is synthesized)
agaaaacgacgagaaccagagaggagacgactttcttctccaagaacacgacctcgagatgatatcctcagtagacgtgaaagatcaaaagatgccagccccatcaatagatggtctcca

SEQ ID NO: 192750 - DNA, 120 bp, Artificial Sequence
  ENSG00000112739_12 (sequence is synthesized)
acccgaagaagaagtagatctcccattagaaggaggtctcgttccccactcagacgtagcaggtctccaagaagaagaagcagatctcctcggagaagggacagaggtcggaggagcaga

SEQ ID NO: 192751 - DNA, 120 bp, Artificial Sequence
  ENSG00000112739_13 (sequence is synthesized)
tcacgcttgcgaaggcggtctcgatcacgcggtggtcgtagacgaaggagcagaagcaaagtaaaggaagataaatttaaaggaagtctttctgaaggaatgaaagttgagcaggaatct

SEQ ID NO: 192752 - DNA, 120 bp, Artificial Sequence
  ENSG00000112739_14 (sequence is synthesized)
tcgtctgatgataaccttgaagactttgatgtagaggaagaagatgaagaagccctaatagaacagagaagaatccaaaggcaggcaattgttcagaaatataaataccttgctgaagat

SEQ ID NO: 192753 - DNA, 120 bp, Artificial Sequence
  ENSG00000112739_15 (sequence is synthesized)
agcaacatgtctgtgccatctgaaccaagcagcccccagagcagtacgagaacacgatcaccatctccagatgacattctggagcgagtagctgctgatgttaaagagtatgaacgggaa

SEQ ID NO: 192754 - DNA, 120 bp, Artificial Sequence
  ENSG00000112739_16 (sequence is synthesized)
aatgttgatacatttgaggcctcagtgaaagccaagcataatctaatgacagttgaacagaataatggttcatctcagaagaagttgttggcacctgatatgtttacagaatctgatgat

SEQ ID NO: 192755 - DNA, 120 bp, Artificial Sequence
  ENSG00000112739_17 (sequence is synthesized)
atgtttgctgcgtattttgatagtgctcgtcttcgggccgctggcattggaaaagatttcaaagagaatcccaacctcagagataactggaccgatgcagaaggctattatcgtgtgaac

SEQ ID NO: 192756 - DNA, 120 bp, Artificial Sequence
  ENSG00000112739_18 (sequence is synthesized)
ataggtgaagtcctagataaacgttacaatgtgtatggctacactgggcaaggtgtattcagtaatgttgtacgagccagagataatgcaagagccaaccaagaagtggctgtaaagatc

SEQ ID NO: 192757 - DNA, 120 bp, Artificial Sequence
  ENSG00000112739_19 (sequence is synthesized)
atcagaaacaatgagctcatgcaaaagactggtttaaaagaattagagttcttgaaaaaacttaatgatgctgatcctgatgacaaatttcattgtctgagactcttcaggcacttctat

SEQ ID NO: 192758 - DNA, 120 bp, Artificial Sequence
  ENSG00000112739_20 (sequence is synthesized)
cacaagcagcatctttgtctggtattcgagcctctcagcatgaacttacgagaggtgttaaaaaaatatggtaaagatgttggtcttcatattaaagctgtaagatcctatagtcagcag

SEQ ID NO: 192759 - DNA, 120 bp, Artificial Sequence
  ENSG00000112739_21 (sequence is synthesized)
ttgttcctggcattgaaactccttaaaagatgcaatatcctacatgcagatatcaagccagacaatatcctggttaatgaatccaaaactattttaaagctttgcgattttgggtcggct

SEQ ID NO: 192760 - DNA, 120 bp, Artificial Sequence
  ENSG00000112739_22 (sequence is synthesized)
tcacatgttgcggataatgacataacaccttatcttgtcagtagattttatcgtgctcctgaaatcattataggtaaaagctatgactatggtatagatatgtggtctgtaggttgcacc

SEQ ID NO: 192761 - DNA, 120 bp, Artificial Sequence
  ENSG00000112739_23 (sequence is synthesized)
ttatacgaactctatactggaaaaattttattccctggcaaaaccaataaccatatgctgaagcttgcaatggatctcaaaggaaagatgccaaataagatgattcgaaaaggtgtgttc

SEQ ID NO: 192762 - DNA, 120 bp, Artificial Sequence
  ENSG00000112739_24 (sequence is synthesized)
aaagatcagcattttgatcaaaatctcaacttcatgtacatagaagttgataaagtaacagagagggagaaagttactgttatgagcaccattaatccaactaaggacctgttggctgac

SEQ ID NO: 192763 - DNA, 120 bp, Artificial Sequence
  ENSG00000112739_25 (sequence is synthesized)
ttgattgggtgccagagacttcctgaagaccaacgtaagaaagtacaccagctaaaggacttgttggaccagattctgatgttggacccagctaaacgaattagcatcaaccaggcccta

SEQ ID NO: 192764 - DNA, 120 bp, Artificial Sequence
  ENSG00000112739_26 (sequence is synthesized)
cagcacgccttcatccaggaaaaaatttaaacaagatgaagaaactccaagggtttgagtaaatacaaagactgaagaaatttcacagcagtttattaatgtatataaacttataaatat

SEQ ID NO: 192765 - DNA, 120 bp, Artificial Sequence
  ENSG00000112739_27 (sequence is synthesized)
ttctccagcaaatttgaggaagcatgatatatttgaattaacaccaagggtgatatttcttttagagatgttagttaatctgttttgtgtcttacgtgaaatttcactgtagactgtttt

SEQ ID NO: 192766 - DNA, 120 bp, Artificial Sequence
  ENSG00000112739_28 (sequence is synthesized)
aaattgccaagactgcacaaaattacagtgctaatgtatatggttgcagttcacataaagacaaaagcatctgttatgaaatgagtagtaatattgggtggttgatttgttcttagcaga

SEQ ID NO: 192767 - DNA, 120 bp, Artificial Sequence
  ENSG00000112739_29 (sequence is synthesized)
cttggcttcattttggtcttgagataaaatggccagcataaatgctgtttatattcacgttttcctaggtgtgtgtgtgcaggccacagcagcatgcccttggtgtagtcagtgccgaaa

SEQ ID NO: 192768 - DNA, 120 bp, Artificial Sequence
  ENSG00000112739_30 (sequence is synthesized)
ggggtctgttccttcttgagcctgcctgcagggatggtctccttttaaagcaggttgtgtgcagcattcagtacactgaaggtaagctaaaccatcaacatctctggtgttttaagatgt

SEQ ID NO: 192769 - DNA, 120 bp, Artificial Sequence
  ENSG00000112739_31 (sequence is synthesized)
gttttattttttggcattgcaactgtggcatagttacaatttctgtttgttcatcacatttaaaattggaagagaacgcgcttgatggatagagcgccttcagtgtactgtttcttatta

SEQ ID NO: 192770 - DNA, 120 bp, Artificial Sequence
  ENSG00000112739_32 (sequence is synthesized)
actttactttttttaaatcaacttgctatagactttatatacattttgttaaatatagttcctagtgacatagaaacgatgcgtagttttcatttactaattacaaatgttgaggcctaa

SEQ ID NO: 192771 - DNA, 120 bp, Artificial Sequence
  ENSG00000112739_33 (sequence is synthesized)
ttctgaaagtcctcatatttaaaggctagacaacgtaatgaaatttttaactatttgtatgtcattttgaaagtgtactgctttatggtaaaagtgtttttcatttgttcattgttttca

SEQ ID NO: 192772 - DNA, 120 bp, Artificial Sequence
  ENSG00000112739_34 (sequence is synthesized)
ttatttgtgatcatgttgtctttcaatacaggcataaaccttccactcttgaacaaagcagctgctttttaaaagcggtaattgcttctttaccttttatttcttttgtaaatgaagctt

SEQ ID NO: 192773 - DNA, 120 bp, Artificial Sequence
  ENSG00000112739_35 (sequence is synthesized)
ttctttaagaatgtgactttaaagtgttgtctattgcataaaacagttgacactcacttattgtaaagtgaagattgttctactgcatgtgaagtggaccatgcagatttctgtatgttc

SEQ ID NO: 192774 - DNA, 120 bp, Artificial Sequence
  ENSG00000112739_36 (sequence is synthesized)
tcagtatgcatcactagataataaagtcttttgtgaacaaggcatttgtagccatttttaaaagtttttgtcttcagtgctggtaagtcaggtaaaccataaatagttaaaagcaacctt

SEQ ID NO: 192775 - DNA, 120 bp, Artificial Sequence
  ENSG00000112739_37 (sequence is synthesized)
ttgtttttttcctgaaagtttttaattgaaagtattattagttaaagatgtaaacctagccaaaattaccagtttattaataattaggatcctaattatttcaaaaaatcctacaaatat

SEQ ID NO: 192776 - DNA, 120 bp, Artificial Sequence
  ENSG00000112739_38 (sequence is synthesized)
tgtcagctttcagtgtagtgagattattcctgtaggttatggggtataattcaggatttaactaatgtttctgctattttctcacttttccttttgatggtgcggaaagagaaaaaggaa

SEQ ID NO: 192777 - DNA, 120 bp, Artificial Sequence
  ENSG00000112739_39 (sequence is synthesized)
aacggggcacaggccattcgacgccttctccaaggggtctgatttgctgagacaccagcttcaccttcttaacaaggttatttctgacagcatgtgtagataaacatttagcaacaattt

SEQ ID NO: 192778 - DNA, 120 bp, Artificial Sequence
  ENSG00000112739_40 (sequence is synthesized)
aagacaaaatcgtttaaatcagcttggttttgcaacacaaaggaatttgtattattaacatggtagaagagaatttttcagaaatatatgtaatctttgctgtttggggggtaaaattaa

SEQ ID NO: 192779 - DNA, 120 bp, Artificial Sequence
  ENSG00000112739_41 (sequence is synthesized)
tgcttgtctccctgaggaatatggaaaataatcagattttaggggtttaaataatatttttaaattgtaaatgggatttttttattcacccaggcacctaattacaacaagcatgcacat

SEQ ID NO: 192780 - DNA, 120 bp, Artificial Sequence
  ENSG00000112739_42 (sequence is synthesized)
tttggtgcattcaagaatggaaaatcagaatagcagcattgattcttctggtgggttttgctccatttaaagacatgaaatgaactacagccaggaaggtgatagatgatataataagcc

SEQ ID NO: 192781 - DNA, 120 bp, Artificial Sequence
  ENSG00000112739_43 (sequence is synthesized)
acctctgaacctacaccccgtctcttcacggtttagacttactaaaataaatacaaggtgattttcatcttcaggtagagtgaagccttttaattaaggcgtcacaggtgcagctattct

SEQ ID NO: 192782 - DNA, 120 bp, Artificial Sequence
  ENSG00000112739_44 (sequence is synthesized)
accttaatgaaatgggtagtgattttcccaccattatttatttcggtgataatatgctgcatattcaagtctcttgtagttattttcacccaaagtagttgacaatttgatgcttctggt

SEQ ID NO: 192783 - DNA, 120 bp, Artificial Sequence
  ENSG00000112739_45 (sequence is synthesized)
gatgtttatggcttcattttatgtaattttttaagtaagttccactagaaacagttcatcttataccttcaaaactgttacctgttctttaaaaaacaaagttgcttgttacttgttctt

SEQ ID NO: 192784 - DNA, 120 bp, Artificial Sequence
  ENSG00000112739_46 (sequence is synthesized)
tgtgttttaggtgcagctcagtggaagatgatgacaaccagaagacatgagctaaggtttctgtcctataaaagatttattaaaaaacaatccttcatttattttttgtctaatttttta

SEQ ID NO: 192785 - DNA, 120 bp, Artificial Sequence
  ENSG00000112739_47 (sequence is synthesized)
gttttcagcattatgatttgggttttattggtgtttggtatttagaattagtgctgttgtggagtgcgtctgtaaagtgcttgttttatcatacttcctgcctctcccctcccccagttt

SEQ ID NO: 192786 - DNA, 120 bp, Artificial Sequence
  ENSG00000112739_48 (sequence is synthesized)
ctcctcccctaaaataaaaatagtggtcaactttagtaatataaaaggctgctggatgctgagattccacataacacatggttgtcaaaattggatgttaaggattcttagaaaaacagc

SEQ ID NO: 192787 - DNA, 120 bp, Artificial Sequence
  ENSG00000112739_49 (sequence is synthesized)
aaccaccagaatagcatatatctgaaagtagtcttcagctttaggcagatgcaaaagaatacaaactggaatattaagaatactgttcaactcctttagtatctgttccccaacttaccc

SEQ ID NO: 192788 - DNA, 120 bp, Artificial Sequence
  ENSG00000112739_50 (sequence is synthesized)
tgtagaaacctcgttattaaccagtgttccagtcttaaagtagacaaaatattcagagccattttttttaagggaaatgaaaaagatactctgggttttttatactccccaatttagcat

SEQ ID NO: 192789 - DNA, 120 bp, Artificial Sequence
  ENSG00000112739_51 (sequence is synthesized)
atctagactacctatttgaaaggaaccctatcaactgtcttatgtacgttacatgattttcctacactctgtaattttgctgaggtgcaatttggaactctgcaagacctactagattga

SEQ ID NO: 192790 - DNA, 120 bp, Artificial Sequence
  ENSG00000112739_52 (sequence is synthesized)
atttatttagtgaatgctcctgaataaatgtgcattcctcttttagagtagctgtatgcttttcaaatgctatctgccgtgaattttttgcttttattatactttatggcaaaagtgata

SEQ ID NO: 192791 - DNA, 120 bp, Artificial Sequence
  ENSG00000112739_53 (sequence is synthesized)
tcaagtgattgtcagacttgagggctcatagaagtgttaggtacggctctcaaagatgttacagttttttctagggttgggagaatagttgagatctggaaagcatagacattttttaca

SEQ ID NO: 192792 - DNA, 120 bp, Artificial Sequence
  ENSG00000112739_54 (sequence is synthesized)
ctctggatagactttattcttgaagatcatcagaaatgaggttggaatttcgaggttttgagcagggggagcatcttatattcacccttaaatcgttattaatacatcctgttttcttca

SEQ ID NO: 192793 - DNA, 120 bp, Artificial Sequence
  ENSG00000112739_55 (sequence is synthesized)
ttccctgatagctatctcatttcactctactgtctcaaaattttgttttaaaataatagaaatgttttgccattattaagtaccactttattcctaacaaaaataagtactcaggacttt

SEQ ID NO: 192794 - DNA, 120 bp, Artificial Sequence
  ENSG00000112739_56 (sequence is synthesized)
tttttcaaaatgaaatatttatgtactgttttatggtatgtggtagagtaagtaaaatgtaatgttctcagttttgttccatatttgcattcctcttatgctttacctgtattttatcat

SEQ ID NO: 192795 - DNA, 120 bp, Artificial Sequence
  ENSG00000112739_57 (sequence is synthesized)
ttgtaagcagaactctagctatatggggtagaaataaaatctctgagatgaaacaaaggaatcaacatgataaaatttaggcgaagtagttaagaaatggcccttttgaatgttgaagat

SEQ ID NO: 192796 - DNA, 120 bp, Artificial Sequence
  ENSG00000112739_58 (sequence is synthesized)
aggaaagaaagccatatattcaaatatgtaattttcctcatttagttataatgacatctttaccaattgggcttcataaatgtgtttctttcttaatagtatcctagttccagcatatat

SEQ ID NO: 192797 - DNA, 120 bp, Artificial Sequence
  ENSG00000112739_59 (sequence is synthesized)
tcaacatgaattttatcattctcctcctaatggaatgtcttccttatagaaatgttcacgacaaattcatttgtgttttttacatgtcaataatgtatgctaaattaaaatgttttccag

SEQ ID NO: 192798 - DNA, 120 bp, Artificial Sequence
  ENSG00000112739_60 (sequence is synthesized)
ttattctgatagatgtcattatggcatccttaatttttcttctccttctgtatatagggtaagggactgttctgaagaacctttccatttagtgatcaagatatggaagctgatttctga

SEQ ID NO: 192799 - DNA, 120 bp, Artificial Sequence
  ENSG00000112739_61 (sequence is synthesized)
aaatgctcagtgtgtactctaattatttatggtaccatttgaattgtaacttgcattttagcagtgcatgtttctaattgacttactgggaaactgaataaaatatgcctcttattatca

SEQ ID NO: 192800 - DNA, 120 bp, Artificial Sequence
  ENSG00000112739_62 (sequence is synthesized)
ttttatcgtgctcctgaaatcagtaagtttcttaatgttctttgacctgggccatcatatgtggtggaaaccgcatacttaatgtctaagcactgttttccatcacacttcagcagctgc

SEQ ID NO: 192801 - DNA, 120 bp, Artificial Sequence
  ENSG00000112739_63 (sequence is synthesized)
acgagttcattcatgaggaagggaaccatagcaagttcatcctcctcaggtggaatgaaggtagttgtgacaggagtcttgatcatgtcgggcaagagtagcaaaacagttgtggaaaat

SEQ ID NO: 192802 - DNA, 120 bp, Artificial Sequence
  ENSG00000112739_64 (sequence is synthesized)
gctgattagcacctccaccaaaggcgaaatgagaaaagagaagaaatacatattttcttttgccctttaagttcctcccctacacctccattttttaaggtttttaagtttgagtctcta

SEQ ID NO: 192803 - DNA, 120 bp, Artificial Sequence
  ENSG00000112739_65 (sequence is synthesized)
ttaagaattagtgggaaagaacacaaaactaattgtcaaactaaggcatgaagattgtggttatagtccaagctaaggtagccagcccctcattaatggaaataaaaattaatagtcgtc

SEQ ID NO: 192804 - DNA, 120 bp, Artificial Sequence
  ENSG00000112739_66 (sequence is synthesized)
atctcaacttcatgtacatagaagttgataaagtaacagagagggtaagtgttttaaatgcagcatgcaatagttattttattgttaactgagtactaaatcatacgagctggtgaatta

SEQ ID NO: 192805 - DNA, 120 bp, Artificial Sequence
  ENSG00000112739_67 (sequence is synthesized)
gccaagcataatctaatgacagttgaacagaataatggtgagagagttttgtcctggcgacgcttttctctgaattgttagctctgtaactttataataagagacgttatttggggtggg

SEQ ID NO: 192806 - DNA, 120 bp, Artificial Sequence
  ENSG00000112739_68 (sequence is synthesized)
attaggaaaagtaaaagattagacatgttgcttctgctgaatattgcagtaatataatattaaatatgtccttagaaatgttctctataaatgtgtttttattagttcacatatcctgaa

SEQ ID NO: 192807 - DNA, 120 bp, Artificial Sequence
  ENSG00000112742_0 (sequence is synthesized)
caaacgtgtttgcggaaaggagtttgggttccatcttttcatttccccagcgcagctttctgtagaaatggaatccgaggatttaagtggcagagaattgacaattgattccataatgaa

SEQ ID NO: 192808 - DNA, 120 bp, Artificial Sequence
  ENSG00000112742_1 (sequence is synthesized)
caaagtgagagacattaaaaataagtttaaaaatgaagaccttactgatgaactaagcttgaataaaatttctgctgatactacagataactcgggaactgttaaccaaattatgatgat

SEQ ID NO: 192809 - DNA, 120 bp, Artificial Sequence
  ENSG00000112742_2 (sequence is synthesized)
ggcaaacaacccagaggactggttgagtttgttgctcaaactagagaaaaacagtgttccgctaagtgatgctcttttaaataaattgattggtcgttacagtcaagcaattgaagcgct

SEQ ID NO: 192810 - DNA, 120 bp, Artificial Sequence
  ENSG00000112742_3 (sequence is synthesized)
tcccccagataaatatggccaaaatgagagttttgctagaattcaagtgagatttgctgaattaaaagctattcaagagccagatgatgcacgtgactactttcaaatggccagagcaaa

SEQ ID NO: 192811 - DNA, 120 bp, Artificial Sequence
  ENSG00000112742_4 (sequence is synthesized)
ctgcaagaaatttgcttttgttcatatatcttttgcacaatttgaactgtcacaaggtaatgtcaaaaaaagtaaacaacttcttcaaaaagctgtagaacgtggagcagtaccactaga

SEQ ID NO: 192812 - DNA, 120 bp, Artificial Sequence
  ENSG00000112742_5 (sequence is synthesized)
aatgctggaaattgccctgcggaatttaaacctccaaaaaaagcagctgctttcagaggaggaaaagaagaatttatcagcatctacggtattaactgcccaagaatcattttccggttc

SEQ ID NO: 192813 - DNA, 120 bp, Artificial Sequence
  ENSG00000112742_6 (sequence is synthesized)
acttgggcatttacagaataggaacaacagttgtgattccagaggacagactactaaagccaggtttttatatggagagaacatgccaccacaagatgcagaaataggttaccggaattc

SEQ ID NO: 192814 - DNA, 120 bp, Artificial Sequence
  ENSG00000112742_7 (sequence is synthesized)
attgagacaaactaacaaaactaaacagtcatgcccatttggaagagtcccagttaaccttctaaatagcccagattgtgatgtgaagacagatgattcagttgtaccttgttttatgaa

SEQ ID NO: 192815 - DNA, 120 bp, Artificial Sequence
  ENSG00000112742_8 (sequence is synthesized)
aagacaaacctctagatcagaatgccgagatttggttgtgcctggatctaaaccaagtggaaatgattcctgtgaattaagaaatttaaagtctgttcaaaatagtcatttcaaggaacc

SEQ ID NO: 192816 - DNA, 120 bp, Artificial Sequence
  ENSG00000112742_9 (sequence is synthesized)
tctggtgtcagatgaaaagagttctgaacttattattactgattcaataaccctgaagaataaaacggaatcaagtcttctagctaaattagaagaaactaaagagtatcaagaaccaga

SEQ ID NO: 192817 - DNA, 120 bp, Artificial Sequence
  ENSG00000112742_10 (sequence is synthesized)
ggttccagagagtaaccagaaacagtggcaatctaagagaaagtcagagtgtattaaccagaatcctgctgcatcttcaaatcactggcagattccggagttagcccgaaaagttaatac

SEQ ID NO: 192818 - DNA, 120 bp, Artificial Sequence
  ENSG00000112742_11 (sequence is synthesized)
agagcagaaacataccacttttgagcaacctgtcttttcagtttcaaaacagtcaccaccaatatcaacatctaaatggtttgacccaaaatctatttgtaagacaccaagcagcaatac

SEQ ID NO: 192819 - DNA, 120 bp, Artificial Sequence
  ENSG00000112742_12 (sequence is synthesized)
aacctgcctgtttccagcagcaacagcatcaaatacttgccactccacttcaaaatttacaggttttagcatcttcttcagcaaatgaatgcatttcggttaaaggaagaatttattcca

SEQ ID NO: 192820 - DNA, 120 bp, Artificial Sequence
  ENSG00000112742_13 (sequence is synthesized)
tattaaagcagataggaagtggaggttcaagcaaggtatttcaggtgttaaatgaaaagaaacagatatatgctataaaatatgtgaacttagaagaagcagataaccaaactcttgata

SEQ ID NO: 192821 - DNA, 120 bp, Artificial Sequence
  ENSG00000112742_14 (sequence is synthesized)
gttaccggaacgaaatagcttatttgaataaactacaacaacacagtgataagatcatccgactttatgattatgaaatcacggaccagtacatctacatggtaatggagtgtggaaata

SEQ ID NO: 192822 - DNA, 120 bp, Artificial Sequence
  ENSG00000112742_15 (sequence is synthesized)
ttgatcttaatagttggcttaaaaagaaaaaatccattgatccatgggaacgcaagagttactggaaaaatatgttagaggcagttcacacaatccatcaacatggcattgttcacagtg

SEQ ID NO: 192823 - DNA, 120 bp, Artificial Sequence
  ENSG00000112742_16 (sequence is synthesized)
atcttaaaccagctaactttctgatagttgatggaatgctaaagctaattgattttgggattgcaaaccaaatgcaaccagatacaacaagtgttgttaaagattctcaggttggcacag

SEQ ID NO: 192824 - DNA, 120 bp, Artificial Sequence
  ENSG00000112742_17 (sequence is synthesized)
ttaattatatgccaccagaagcaatcaaagatatgtcttcctccagagagaatgggaaatctaagtcaaagataagccccaaaagtgatgtttggtccttaggatgtattttgtactata

SEQ ID NO: 192825 - DNA, 120 bp, Artificial Sequence
  ENSG00000112742_18 (sequence is synthesized)
tgacttacgggaaaacaccatttcagcagataattaatcagatttctaaattacatgccataattgatcctaatcatgaaattgaatttcccgatattccagagaaagatcttcaagatg

SEQ ID NO: 192826 - DNA, 120 bp, Artificial Sequence
  ENSG00000112742_19 (sequence is synthesized)
tgttaaagtgttgtttaaaaagggacccaaaacagaggatatccattcctgagctcctggctcatccatatgttcaaattcaaactcatccagttaaccaaatggccaagggaaccactg

SEQ ID NO: 192827 - DNA, 120 bp, Artificial Sequence
  ENSG00000112742_20 (sequence is synthesized)
aagaaatgaaatatgttctgggccaacttgttggtctgaattctcctaactccattttgaaagctgctaaaactttatatgaacactatagtggtggtgaaagtcataattcttcatcct

SEQ ID NO: 192828 - DNA, 120 bp, Artificial Sequence
  ENSG00000112742_21 (sequence is synthesized)
ccaagacttttgaaaaaaaaaggggaaaaaaatgatttgcagttattcgtaatgtcagataccacctataaaatatattggactgttatactcttgaatccctgtggaaatctacatttg

SEQ ID NO: 192829 - DNA, 120 bp, Artificial Sequence
  ENSG00000112742_22 (sequence is synthesized)
aagacaacatcactctgaagtgttatcagcaaaaaaaattcagtagattatctttaaaagaaaactgtaaaaatagcaaccacttatggcactgtatatattgtagacttgttttctctg

SEQ ID NO: 192830 - DNA, 120 bp, Artificial Sequence
  ENSG00000112742_23 (sequence is synthesized)
ttttatgctcttgtgtaatctacttgacatcattttactcttggaatagtgggtggatagcaagtatattctaaaaaactttgtaaataaagttttgtggctaaaatgacactaacattt

SEQ ID NO: 192831 - DNA, 120 bp, Artificial Sequence
  ENSG00000112742_24 (sequence is synthesized)
aaaaagcactgaaattcttgagctggcggcagggctgaacgtagctcagtgaaagatcctttcttgccacatcctctctaagccaggctgtgagaaccgcgggaaacgaaggagaagggt

SEQ ID NO: 192832 - DNA, 120 bp, Artificial Sequence
  ENSG00000112742_25 (sequence is synthesized)
ggcggtggggtcagtaaagggccggcccaaggtgcatcttttaggtcctgatgctaggagcagccgtccctgcccctatattcctctcactgggtaggtttgctcgggagtggctacctc

SEQ ID NO: 192833 - DNA, 120 bp, Artificial Sequence
  ENSG00000112742_26 (sequence is synthesized)
ccaggcaaaaattcggcctggttaaactggaaagaccaggaaagcccgcccacgggcgtccggggaacgcctgcaaagtgccagcaccctaccaacccaggcgccgcacgggtggggtcg

SEQ ID NO: 192834 - DNA, 120 bp, Artificial Sequence
  ENSG00000112742_27 (sequence is synthesized)
cggccgcaggctcttccggggcgggcctagcctgacgcaggaggaggggcggcccccgtcgcacaagaaccaatcacgactgtcgcttctacgtggctagcattgaccaataggagaccg

SEQ ID NO: 192835 - DNA, 120 bp, Artificial Sequence
  ENSG00000112742_28 (sequence is synthesized)
accacaaagccacttagcggcagagcctcgcacccgcgaagattattactagggagatgtttttacccctgaggacacctgagcccttaagtggggcaggcttcgagggaggggggccga

SEQ ID NO: 192836 - DNA, 120 bp, Artificial Sequence
  ENSG00000112742_29 (sequence is synthesized)
taaggcgacttcagacagggcaatcacgatgggcgcttgagttctgcgcagaattttgacaagggggagggtcttggcttgaagacagagcgtggagtcatttaaggataatggaagggc

SEQ ID NO: 192837 - DNA, 120 bp, Artificial Sequence
  ENSG00000112742_30 (sequence is synthesized)
atttctgctgatactacagaatgcaggctacatgatggcagggtttttgtctgttatatccacagaactttgaatggtgtctggcacatgataactcgggaactgttaaccaaattatga

SEQ ID NO: 192838 - DNA, 120 bp, Artificial Sequence
  ENSG00000112742_31 (sequence is synthesized)
caagaaacgaatggtaagtccctcaatggcctcaaagtttatggccattaataggattttagcctggagagtttttagggcaggctttactagttgcccagtataatcatagaaaaagca

SEQ ID NO: 192839 - DNA, 120 bp, Artificial Sequence
  ENSG00000112742_32 (sequence is synthesized)
cagcattctgaaaggagtcactttgctgattatgaacccaactcgttttgctgcagttgtgaagaaatttgatatatatatcttaacgttgtcagcagttatttgaaatttgcaaggata

SEQ ID NO: 192840 - DNA, 120 bp, Artificial Sequence
  ENSG00000112742_33 (sequence is synthesized)
ttgtcagcagttatttgaaatttgcaaggatatcattgaaatttataattacccaagtttccaaggatctggcatttgtatttttaagaatctaaaacttaaagtataataataataata

SEQ ID NO: 192841 - DNA, 120 bp, Artificial Sequence
  ENSG00000112742_34 (sequence is synthesized)
ataaatagttcatgtatctccaacagtgttccacataccccaagagctgtgggactacgagtgggaagttggtgcagaagtcctagactatgtttctccaagattaagtctgttcaaaat

SEQ ID NO: 192842 - DNA, 120 bp, Artificial Sequence
  ENSG00000112742_35 (sequence is synthesized)
gtaggtaagttctgtcttaccggtgcaccggcgcactgaggaacagccgcagccggtgtaggggctcattgttagcgctggtcggtgaggggtggggcgaggtgggggcagctcggagcc

SEQ ID NO: 192843 - DNA, 120 bp, Artificial Sequence
  ENSG00000112742_36 (sequence is synthesized)
atgcgacgcggctaaacgagctggagggggaggggatgtctcactgcctcagcgggtctggccggtggggtgatgcaggaggttttgttgaggaaaaatggaatccgaggatttaagtgg

SEQ ID NO: 192844 - DNA, 120 bp, Artificial Sequence
  ENSG00000112759_0 (sequence is synthesized)
agggggtcttactggactcctccactggcctgttctgtcagccctgccccctctccccctaagagcctgaggaggcctatggcagggccaagacagggcctcacactgttcctgccccca

SEQ ID NO: 192845 - DNA, 120 bp, Artificial Sequence
  ENSG00000112759_1 (sequence is synthesized)
gcaggcccctgagggagggagctgtcagccagggaaaaccgagaacaccatcaccatgacaaccagtcaccagcctcaggacagatacaaagctgtctggcttatcttcttcatgctggg

SEQ ID NO: 192846 - DNA, 120 bp, Artificial Sequence
  ENSG00000112759_2 (sequence is synthesized)
tctgggaacgctgctcccgtggaattttttcatgacggccactcagtatttcacaaaccgcctggacatgtcccagaatgtgtccttggtcactgctgaactgagcaaggacgcccaggc

SEQ ID NO: 192847 - DNA, 120 bp, Artificial Sequence
  ENSG00000112759_3 (sequence is synthesized)
gtcagccgcccctgcagcacccttgcctgagcggaactctctcagtgccatcttcaacaatgtcatgaccctatgtgccatgctgcccctgctgttattcacctacctcaactccttcct

SEQ ID NO: 192848 - DNA, 120 bp, Artificial Sequence
  ENSG00000112759_4 (sequence is synthesized)
gcatcagaggatcccccagtccgtacggatcctgggcagcctggtggccatcctgctggtgtttctgatcactgccatcctggtgaaggtgcagctggatgctctgcccttctttgtcat

SEQ ID NO: 192849 - DNA, 120 bp, Artificial Sequence
  ENSG00000112759_5 (sequence is synthesized)
caccatgatcaagatcgtgctcattaattcatttggtgccatcctgcagggcagcctgtttggtctggctggccttctgcctgccagctacacggcccccatcatgagtggccagggcct

SEQ ID NO: 192850 - DNA, 120 bp, Artificial Sequence
  ENSG00000112759_6 (sequence is synthesized)
agcaggcttctttgcctccgtggccatgatctgcgctattgccagtggctcggagctatcagaaagtgccttcggctactttatcacagcctgtgctgttatcattttgaccatcatctg

SEQ ID NO: 192851 - DNA, 120 bp, Artificial Sequence
  ENSG00000112759_7 (sequence is synthesized)
ttacctgggcctgccccgcctggaattctaccgctactaccagcagctcaagcttgaaggacccggggagcaggagaccaagttggacctcattagcaaaggagaggagccaagagcagg

SEQ ID NO: 192852 - DNA, 120 bp, Artificial Sequence
  ENSG00000112759_8 (sequence is synthesized)
tcaccattgggatgtttccagccgtgactgttgaggtcaagtccagcatcgcaggcagcagcacctgggaacgttacttcattcctgtgtcctgtttcttgactttcaatatctttgact

SEQ ID NO: 192853 - DNA, 120 bp, Artificial Sequence
  ENSG00000112759_9 (sequence is synthesized)
ggttgggccggagcctcacagctgtattcatgtggcctgggaaggacagccgctggctgccaagcctggtgctggcccggctggtgtttgtgccactgctgctgctgtgcaacattaagc

SEQ ID NO: 192854 - DNA, 120 bp, Artificial Sequence
  ENSG00000112759_10 (sequence is synthesized)
cccgccgctacctgactgtggtcttcgagcacgatgcctggttcatcttcttcatggctgcctttgccttctccaacggctacctcgccagcctctgcatgtgcttcgggcccaagaaag

SEQ ID NO: 192855 - DNA, 120 bp, Artificial Sequence
  ENSG00000112759_11 (sequence is synthesized)
tgaagccagctgaggcagagaccgcaggagccatcatggccttcttcctgtgtctgggtctggcactgggggctgttttctccttcctgttccgggcaattgtgtgacaaaggatggaca

SEQ ID NO: 192856 - DNA, 120 bp, Artificial Sequence
  ENSG00000112759_12 (sequence is synthesized)
gaaggactgcctgcctccctccctgtctgcctcctgccccttccttctgccaggggtgatcctgagtggtctggcggttttttcttctaactgacttctgctttccacggcgtgtgctgg

SEQ ID NO: 192857 - DNA, 120 bp, Artificial Sequence
  ENSG00000112759_13 (sequence is synthesized)
gcccggatctccaggccctggggagggagcctctggacggacagtggggacattgtgggtttggggctcagagtcgagggacggggtgtagcctcggcatttgcttgagtttctccactc

SEQ ID NO: 192858 - DNA, 120 bp, Artificial Sequence
  ENSG00000112759_14 (sequence is synthesized)
ttggctctgactgatccctgcttgtgcaggccagtggaggctcttgggcttggagaacacgtgtgtctctgtgtatgtgtctgtgtgtctgcgtccgtgtctgtcagactgtctgcctgt

SEQ ID NO: 192859 - DNA, 120 bp, Artificial Sequence
  ENSG00000112759_15 (sequence is synthesized)
cctggggtggctaggagctgggtctgaccgttgtatggtttgacctgatatactccattctcccctgcgcctcctcctctgtgttctctccatgtccccctcccaactccccatgcccag

SEQ ID NO: 192860 - DNA, 120 bp, Artificial Sequence
  ENSG00000112759_16 (sequence is synthesized)
ttcttacccatcatgcaccctgtacagttgccacgttactgccttttttaaaaatatatttgacagaaaccaggtgccttcagaggctctctgatttaaataaacctttcttgttttttt

SEQ ID NO: 192861 - DNA, 120 bp, Artificial Sequence
  ENSG00000112759_17 (sequence is synthesized)
acaccggtcaggcccggcgcgggctgcgctctccagctgtggctatggccccagccccgagatgaggagggagagaactaggggcccgcaggcctgggaatttccgtcccccaccaagtc

SEQ ID NO: 192862 - DNA, 120 bp, Artificial Sequence
  ENSG00000112759_18 (sequence is synthesized)
cggatgctcactccaaagtctcagcagggacctgagggagctcagggagggagagaagccagaagaccaggcagagactgaagagagctggcaaggcctggctagaaaaactccaggcaa

SEQ ID NO: 192863 - DNA, 120 bp, Artificial Sequence
  ENSG00000112759_19 (sequence is synthesized)
agcacgtggcgcgcacgggccagggagcctgaggaccctgcggggaccgggacccaagctgggcggggcggcctggctcccgggcctaaaacaggctgcggtcacgttgacctccgcaag

SEQ ID NO: 192864 - DNA, 120 bp, Artificial Sequence
  ENSG00000112759_20 (sequence is synthesized)
gggcaggcgagtggacgggtgatccccatcgatctggagcccgtggacaaggcccactgcctgagcctgaactaggagcacctcctagggactgcccaggcttgctctgctctgaccctt

SEQ ID NO: 192865 - DNA, 120 bp, Artificial Sequence
  ENSG00000112759_21 (sequence is synthesized)
gcgggcgtcggggaggtggcagtgggcgcagggcggggcgagctcagcggagggcgggtttgaatgtgccccggcgggagagggaagctgcagcgagagcgcgcggatctcagcgcggga

SEQ ID NO: 192866 - DNA, 120 bp, Artificial Sequence
  ENSG00000112759_22 (sequence is synthesized)
gaagggcccctcccactgagtcggctctggtctccccgcccctgagccgcgaggactggacgcagctggctgcggagctctgggcgggcgctggggtcgcctgttgcagcctctcttccg

SEQ ID NO: 192867 - DNA, 120 bp, Artificial Sequence
  ENSG00000112759_23 (sequence is synthesized)
ggaatctgggttgccttcaggagaggacagccccactctagccatgaatccaggggctccccagggagggtggagagaccagacttgcagagaggggcctggggagcctctggtttgacc

SEQ ID NO: 192868 - DNA, 120 bp, Artificial Sequence
  ENSG00000112759_24 (sequence is synthesized)
tcagtcatcatcgatgttgtcgcagctgctgcagatctgcctgttccgtgtccttcctcctcctcccccgacctctttgctgtgtctcctccatttgtctccctccttcccttgtcatca

SEQ ID NO: 192869 - DNA, 120 bp, Artificial Sequence
  ENSG00000112759_25 (sequence is synthesized)
ctgtccctgacccctctcgtcctcttgcctgccttctttgactgtctttccctccctcccatcatctttcctcctccttccctcctgctctccaccctcctgtttcccagcttataaact

SEQ ID NO: 192870 - DNA, 120 bp, Artificial Sequence
  ENSG00000112759_26 (sequence is synthesized)
agcgcgcggatctcagcgcgggagcagtgcttctgcggcaggggtggctttttatctcctgggtgtgcttctgcttctttgcttgcaaggcttctcagaatggggccccatgaagcctga

SEQ ID NO: 192871 - DNA, 120 bp, Artificial Sequence
  ENSG00000112759_27 (sequence is synthesized)
tacccccactcttttttcagacccagcgttagccagagagaagcccagcctccgcctggagggagtggatgctgtgagcagctgggattcagaggcctgagtgggcctggaccagggctg

SEQ ID NO: 192872 - DNA, 120 bp, Artificial Sequence
  ENSG00000112759_28 (sequence is synthesized)
ggagggggcagagagaagggcagctcagcctcaaggctcaccaagagtaaagtaggaatgacagggatctgtcttcttgggcacccccaaccaccagccctagctcccctgctcatgccc

SEQ ID NO: 192873 - DNA, 120 bp, Artificial Sequence
  ENSG00000112759_29 (sequence is synthesized)
cagctgtattcatgtgggtaagtggaggaagagggccccaggcccctgtgggaagtaagagtccagcctggacccagagagggaacccaagaaagtatggtagtaaggggaccatttgtt

SEQ ID NO: 192874 - DNA, 120 bp, Artificial Sequence
  ENSG00000112759_30 (sequence is synthesized)
ttaaagtcgaggcataatttatgtatagttaagtacaagtcttaagtgtacaacttaatgaatatatgtatatacacatacctgcccagatcgagatgtagaatatttccagcactccag

SEQ ID NO: 192875 - DNA, 120 bp, Artificial Sequence
  ENSG00000112759_31 (sequence is synthesized)
tttgaggtttcagttcagatcctgaggggccccagatggatccttgggggcctggctgtgccctggggtggcggcctgggctgaggccctgcctggtgcccacagcctgggaaggacagc

SEQ ID NO: 192876 - DNA, 120 bp, Artificial Sequence
  ENSG00000112759_32 (sequence is synthesized)
ccttctgcctctatctggaggtgtggggctgaggggctgaggaggacctctgagagcttggagtttccctggggagggttgagaggaactacagggaggtgggagagcccgtggaaggtc

SEQ ID NO: 192877 - DNA, 120 bp, Artificial Sequence
  ENSG00000112759_33 (sequence is synthesized)
tcatggtgcccagctgcttctgtttgtctgagtggggccagaagcaatgctgcacctgcgagagctcccctgctgagactccctgttctcttatctcccgagcgacaggggtggcttttt

SEQ ID NO: 192878 - DNA, 120 bp, Artificial Sequence
  ENSG00000112761_0 (sequence is synthesized)
cctcctgagtcccgggaggaaagtgctcgcccattcctgacctgtgacacgctcactgcgaaggcaggttattagaagagtcccatgaaagtaaacagggtattaaaacggatccttaaa

SEQ ID NO: 192879 - DNA, 120 bp, Artificial Sequence
  ENSG00000112761_1 (sequence is synthesized)
aatgaaagtgcaggctgaaagttggtagtgtgggaggtagagggtgtgtgttcttgtgcagaggagcgtggggtttgcagaggagacaggggagctttgtgtacccggagcaatgaacaa

SEQ ID NO: 192880 - DNA, 120 bp, Artificial Sequence
  ENSG00000112761_2 (sequence is synthesized)
gcggcgacttctctacccctcagggtggctccacggtcccagcgacatgcaggggctcctcttctccactcttctgcttgctggcctggcacagttctgctgcagggtacagggcactgg

SEQ ID NO: 192881 - DNA, 120 bp, Artificial Sequence
  ENSG00000112761_3 (sequence is synthesized)
accattagatacaacacctgaaggaaggcctggagaagtgtcagatgcacctcagcgtaaacagttttgtcactggccctgcaaatgccctcagcagaagccccgttgccctcctggagt

SEQ ID NO: 192882 - DNA, 120 bp, Artificial Sequence
  ENSG00000112761_4 (sequence is synthesized)
gagcctggtgagagatggctgtggatgctgtaaaatctgtgccaagcaaccaggggaaatctgcaatgaagctgacctctgtgacccacacaaagggctgtattgtgactactcagtaga

SEQ ID NO: 192883 - DNA, 120 bp, Artificial Sequence
  ENSG00000112761_5 (sequence is synthesized)
caggcctaggtacgagactggagtgtgtgcataccttgtagctgttgggtgcgagttcaaccaggtacattatcataatggccaagtgtttcagcccaaccccttgttcagctgcctctg

SEQ ID NO: 192884 - DNA, 120 bp, Artificial Sequence
  ENSG00000112761_6 (sequence is synthesized)
tgtgagtggggccattggatgcacacctctgttcataccaaagctggctggcagtcactgctctggagctaaaggtggaaagaagtctgatcagtcaaactgtagcctggaaccattact

SEQ ID NO: 192885 - DNA, 120 bp, Artificial Sequence
  ENSG00000112761_7 (sequence is synthesized)
acagcagctttcaacaagctacaaaacaatgccagcttatagaaatctcccacttatttggaaaaaaaaatgtcttgtgcaagcaacaaaatggactccctgctccagaacatgtgggat

SEQ ID NO: 192886 - DNA, 120 bp, Artificial Sequence
  ENSG00000112761_8 (sequence is synthesized)
gggaatatctaacagggtgaccaatgaaaacagcaactgtgaaatgagaaaagagaaaagactgtgttacattcagccttgcgacagcaatatattaaagacaataaagattcccaaagg

SEQ ID NO: 192887 - DNA, 120 bp, Artificial Sequence
  ENSG00000112761_9 (sequence is synthesized)
aaaaacatgccaacctactttccaactctccaaagctgaaaaatttgtcttttctggatgctcaagtactcagagttacaaacccactttttgtggaatatgcttggataagagatgctg

SEQ ID NO: 192888 - DNA, 120 bp, Artificial Sequence
  ENSG00000112761_10 (sequence is synthesized)
tatccctaataagtctaaaatgattactattcaatttgattgcccaaatgaggggtcatttaaatggaagatgctgtggattacatcttgtgtgtgtcagagaaactgcagagaacctgg

SEQ ID NO: 192889 - DNA, 120 bp, Artificial Sequence
  ENSG00000112761_11 (sequence is synthesized)
atcctgtcatataataaaaaaattagtgagtataaaatggtggcaaatctactttgtttaaaacagtatgaatgcctattctcagatcactacatttaaggcattagaaacttttaaaaa

SEQ ID NO: 192890 - DNA, 120 bp, Artificial Sequence
  ENSG00000112761_12 (sequence is synthesized)
aaaattatgcaatttacaagaaaatattttacaaaataatctggaatacttgctaaagctgtataaaaagtatactaaattttaggctgggcgcagtggttcatgtctgtaatcccagca

SEQ ID NO: 192891 - DNA, 86 bp, Artificial Sequence
  ENSG00000112761_13 (sequence is synthesized)
ggtcaagattgcaccactgcactggcacggagaagcgagactcctttgggggagaaaaaaacatactcaatttaaaaaatttaatc

SEQ ID NO: 192892 - DNA, 120 bp, Artificial Sequence
  ENSG00000112761_14 (sequence is synthesized)
tgggggagaaaaaaacatactcaatttaaaaaatttaatctatatttgacaatgtagcctaaggtgcccattagttgatacatcattatagggcaagtgaaattctagattaattcttga

SEQ ID NO: 192893 - DNA, 120 bp, Artificial Sequence
  ENSG00000112761_15 (sequence is synthesized)
acagaaataagattaagctgtaaatatatttagacttttcactgcctgatcttgaatatcagtttcttttggaaaggagaaaatgcaacttttctggccactgttaacaactgcaatcta

SEQ ID NO: 192894 - DNA, 120 bp, Artificial Sequence
  ENSG00000112761_16 (sequence is synthesized)
aaattttttacatcaaatattgtaaaaagttaaatttccaagacaaagaccaagaacagtatcattactttgcaaaggaaagaaatataaagaatacaacttaaaattaacctgtggatc

SEQ ID NO: 192895 - DNA, 120 bp, Artificial Sequence
  ENSG00000112761_17 (sequence is synthesized)
tgaaatataaaatgttattaaaaataaattaatgttaaggctagaactgaagattatagtaaccggaacaattatagccatttattgcaaagtttggaagatatcaagcttagtaacatt

SEQ ID NO: 192896 - DNA, 120 bp, Artificial Sequence
  ENSG00000112761_18 (sequence is synthesized)
ctgttcatttgcataaatgtcatgcagaacaataacaagtagcactgttgaaaaatatagacatttattataaaatcaattggtttgataagaaagcaattatttaaaaagtttaataca

SEQ ID NO: 192897 - DNA, 120 bp, Artificial Sequence
  ENSG00000112761_19 (sequence is synthesized)
aatacatgttaagtgtacaaattaggattcttttgggcaaacaagttgttatctaaagaagaagcaaaacctccttaacagttgtaataaaacctatgcctgaaaagttggtggctatta

SEQ ID NO: 192898 - DNA, 120 bp, Artificial Sequence
  ENSG00000112761_20 (sequence is synthesized)
tgtgggaggtagagggtgtgtgcatgtaagtgtcttcttctggacctgctggaaaagattgagtctagacagaatttttttttcctgcaattgttagcttggagtgatcagcttagtttg

SEQ ID NO: 192899 - DNA, 120 bp, Artificial Sequence
  ENSG00000112761_21 (sequence is synthesized)
tgtttgaacagcgccacgctttcctatatatttttatagcagagcctaaggcacagcctggcacagtgcgggaaacagtgtctctccatgccagctccaggcggaggctcaactttccat

SEQ ID NO: 192900 - DNA, 120 bp, Artificial Sequence
  ENSG00000112761_22 (sequence is synthesized)
tgctgtttgcaaaatgtgcaaagagcccctggaaaaacgaattttgacagcgactttttccagttaagtctgtccttctttgaaaggggcactttggaataaacatttacatttttaaaa

SEQ ID NO: 192901 - DNA, 120 bp, Artificial Sequence
  ENSG00000112763_0 (sequence is synthesized)
agatttcgtttcctgcatctccaaacatggcgacctaggagaaggggaagaacaattttttctcctcttttgggaaggtttgtgtctagtagtgcctgtgcccctgggcagattggagag

SEQ ID NO: 192902 - DNA, 120 bp, Artificial Sequence
  ENSG00000112763_1 (sequence is synthesized)
aagagggacgactggagaatcgtcgagaaccagcggagaaaagaaaaagcaacgtttaattctagaaggcctcctgtccctgcctgctctgggtgctcatggaatcagctgctgccctgc

SEQ ID NO: 192903 - DNA, 120 bp, Artificial Sequence
  ENSG00000112763_2 (sequence is synthesized)
acttctcccggccagcctccctcctcctcctcctcctcagcctgtgtgcactggtctcagcccagtttattgtcgtggggcccactgatcccatcttggccacggttggagaaaacacta

SEQ ID NO: 192904 - DNA, 120 bp, Artificial Sequence
  ENSG00000112763_3 (sequence is synthesized)
cgttacgctgccatctgtcacccgagaaaaatgctgaggacatggaggtgcggtggttccggtctcagttctcccccgcagtgtttgtgtataaaggtggcagagagagaacagaggagc

SEQ ID NO: 192905 - DNA, 120 bp, Artificial Sequence
  ENSG00000112763_4 (sequence is synthesized)
agatggaggagtaccgaggaagaaccacctttgtgagcaaagacatcagcaggggcagcgtggccctggtcatacacaacatcacagcccaggaaaacggcacctaccgctgttacttcc

SEQ ID NO: 192906 - DNA, 120 bp, Artificial Sequence
  ENSG00000112763_5 (sequence is synthesized)
aagaaggcaggtcctacgatgaggccatcctgcacctcgtagtggcaggactaggctctaagcccctcatttcaatgaggggccatgaagacgggggcatccggctggagtgcatatcta

SEQ ID NO: 192907 - DNA, 120 bp, Artificial Sequence
  ENSG00000112763_6 (sequence is synthesized)
gagggtggtacccaaagcccctcacagtgtggagggacccctacggtggggttgcgcctgccctgaaagaggtctccatgcctgatgcagacggcctcttcatggtcaccacggctgtga

SEQ ID NO: 192908 - DNA, 120 bp, Artificial Sequence
  ENSG00000112763_7 (sequence is synthesized)
tcatcagagacaagtctgtgaggaacatgtcctgctctatcaacaacaccctgctcggccagaagaaagaaagtgtcatttttattccagaatcctttatgcccagtgtgtctccctgtg

SEQ ID NO: 192909 - DNA, 120 bp, Artificial Sequence
  ENSG00000112763_8 (sequence is synthesized)
cagtggccctgcctatcattgtggttattctgatgatacccattgccgtatgcatctattggatcaacaaactccaaaaggaaaaaaagattctgtcaggggaaaaggagtttgaacggg

SEQ ID NO: 192910 - DNA, 120 bp, Artificial Sequence
  ENSG00000112763_9 (sequence is synthesized)
aaacaagagaaattgctctaaaggaactggagaaagaacgtgtgcaaaaagaggaagaacttcaagtaaaagagaaacttcaagaagaattgcgatggagaagaacattcttacatgctg

SEQ ID NO: 192911 - DNA, 120 bp, Artificial Sequence
  ENSG00000112763_10 (sequence is synthesized)
ttgatgtggtcctggatccagacaccgctcatcccgatctcttcctgtcagaggaccggagaagtgtgagaaggtgccccttcaggcacctaggggagagcgtgcctgacaacccagaga

SEQ ID NO: 192912 - DNA, 120 bp, Artificial Sequence
  ENSG00000112763_11 (sequence is synthesized)
gattcgacagtcagccttgtgtcctaggccgggagagcttcgcttcagggaaacattactgggaggtggaggtggaaaacgtgattgagtggactgtgggggtctgtagagacagtgttg

SEQ ID NO: 192913 - DNA, 120 bp, Artificial Sequence
  ENSG00000112763_12 (sequence is synthesized)
ggaggtcctgctgattcctcagaatggcttctggaccttggagatgcataaagggcaataccgggccgtgtcctcccctgataggattctccctttgaaggagtccctttgccgggtggg

SEQ ID NO: 192914 - DNA, 120 bp, Artificial Sequence
  ENSG00000112763_13 (sequence is synthesized)
cgtcttcctggactatgaagctggagatgtctccttctacaacatgagggacagatcgcacatctacacatgtccccgttcagccttttccgtgcctgtgaggcccttcttcaggttggg

SEQ ID NO: 192915 - DNA, 120 bp, Artificial Sequence
  ENSG00000112763_14 (sequence is synthesized)
gtgtgaggacagccccatcttcatctgccctgcactcacaggagccaatggggtcacggtgcctgaagagggcctgacacttcacagagtggggacccaccagagcctatagaatcaatt

SEQ ID NO: 192916 - DNA, 120 bp, Artificial Sequence
  ENSG00000112763_15 (sequence is synthesized)
ccttggtctcacagccatgtagacaagccctggtcatctcagcagccaccgcacaacacccctggtggaagacacgccctcctcccctctggtcacacaagagaacatcttccagctgcc

SEQ ID NO: 192917 - DNA, 120 bp, Artificial Sequence
  ENSG00000112763_16 (sequence is synthesized)
tctttcacacccactacagacctcagccccagttttctcctcctcactaggctgtgtttttagtagttcctttgcttgtaactatgggatgggatccaggcatagggaactagttgttac

SEQ ID NO: 192918 - DNA, 120 bp, Artificial Sequence
  ENSG00000112763_17 (sequence is synthesized)
acagctcccagccaagaagaaagtgtgagaagttgatgggcagcaaacctgctgtttaacatcagggtgaccacattaagcccagtattccagttggcaccagaagatatggacttggaa

SEQ ID NO: 192919 - DNA, 120 bp, Artificial Sequence
  ENSG00000112763_18 (sequence is synthesized)
tgaggcctacagggttcaccaggatgtaagaggagagaggaatccacaggaccaccagagaggagagggaaccagatatgcagatcagagatagaggaagtggaaccagagagctgggag

SEQ ID NO: 192920 - DNA, 120 bp, Artificial Sequence
  ENSG00000112763_19 (sequence is synthesized)
ggaccaaggttgtaagggtggctaagtcccaccataacagctaaggggacctgggagatgatggctcatttccacccagccccaggatttccagagcgcacatccacaggcctggacctg

SEQ ID NO: 192921 - DNA, 120 bp, Artificial Sequence
  ENSG00000112763_20 (sequence is synthesized)
ggatgaagatgaatgaagaacatggatgcacgtggatgtagtttggctcaggtgtccctgcagttggcaaggagtcagtactcagtccctgagtgtggctgaaatttgaggtcctggctg

SEQ ID NO: 192922 - DNA, 120 bp, Artificial Sequence
  ENSG00000112763_21 (sequence is synthesized)
agccaaggagtaatggaccagatctacctcagtattcaagttcagtggggacaccagtggcttcaaacttcctggtttcatgatatcttgagacgccttacaaatgatggaggattccaa

SEQ ID NO: 192923 - DNA, 120 bp, Artificial Sequence
  ENSG00000112763_22 (sequence is synthesized)
agagtttttgtttatttgggttaatatttgttggtatttatggcatttgagattgaaactaagaaatgttttaatttattacctttacaacatttatttacattacatacatacatttac

SEQ ID NO: 192924 - DNA, 120 bp, Artificial Sequence
  ENSG00000112763_23 (sequence is synthesized)
aacatttattaatttatattaaaatagcatgaataagccaattataggttaatataagtagaatgtttgtgaaaaataagtatggtatccaaagcaaaataaattttattgtgaagtgtg

SEQ ID NO: 192925 - DNA, 120 bp, Artificial Sequence
  ENSG00000112763_24 (sequence is synthesized)
gaaagaactgctgagcgggtctgtagagcccatcgctctctcctgtctattcatcagctaggctgaagctcctgacagactcacaccagtatcttgctgctccagaaaggtcgaagatgg

SEQ ID NO: 192926 - DNA, 120 bp, Artificial Sequence
  ENSG00000112763_25 (sequence is synthesized)
cagttttcccaaactccggcttgcccagatgtctgctcaccctcattcttctccagctgcccaagctggtttcagataggtctctctctctggcctgcagagttaaaacatctcaataaa

SEQ ID NO: 192927 - DNA, 120 bp, Artificial Sequence
  ENSG00000112763_26 (sequence is synthesized)
tataaagtataaaaagaagctggagcccaaccacttcggcacatgttcacaggatctcggggctgtgtcacaagccactgggcactcatatctggctgagaataaatctcttgcaatatt

SEQ ID NO: 192928 - DNA, 120 bp, Artificial Sequence
  ENSG00000112763_27 (sequence is synthesized)
aattcttctcaaactgagagaactgcttctgtctctggagagacagaagtgcagcttcagtaattctcagtgtgtgagctgcctaggatcagagagccttcatggaagtggccactacgt

SEQ ID NO: 192929 - DNA, 120 bp, Artificial Sequence
  ENSG00000112769_0 (sequence is synthesized)
gagaaggaagccaggacagcgcagtccccagtcccgaacggccagggagaggaggtggcctagcgctggcggggctcaccccaatccgtctgccttttgatgccgtactctgctggttgc

SEQ ID NO: 192930 - DNA, 120 bp, Artificial Sequence
  ENSG00000112769_1 (sequence is synthesized)
gcagccacctcgggatactgcacacggagaggagggaaaataagcgaggcaccgccgcaccacgcgggagacctacggagacccacagcgcccgagccctggaagagcactactggatgt

SEQ ID NO: 192931 - DNA, 120 bp, Artificial Sequence
  ENSG00000112769_2 (sequence is synthesized)
cagcggagaaatggctttgagctcagcctggcgctcggttctgcctctgtggctcctctggagcgctgcctgctcccgcgccgcgtccggggacgacaacgcttttccttttgacattga

SEQ ID NO: 192932 - DNA, 120 bp, Artificial Sequence
  ENSG00000112769_3 (sequence is synthesized)
agggagctcagcggttggcaggcaagacccgcctgagacgagcgaaccccgcgtggctctgggacgcctgccgcctgcggccgagaaatgcaatgctggattctttcacaccctgtcggg

SEQ ID NO: 192933 - DNA, 120 bp, Artificial Sequence
  ENSG00000112769_4 (sequence is synthesized)
agaatgtgtgccctgcgactgtaatggcaattccaacgagtgtttggacggctcaggatactgtgtgcactgccagcggaacacaacaggagagcactgtgaaaagtgtctggatggtta

SEQ ID NO: 192934 - DNA, 120 bp, Artificial Sequence
  ENSG00000112769_5 (sequence is synthesized)
tatcggagattccatcaggggagcaccccaattctgccagccgtgcccctgtcccctgccccacttggccaattttgcagaatcctgctataggaaaaatggagctgttcggtgcatttg

SEQ ID NO: 192935 - DNA, 120 bp, Artificial Sequence
  ENSG00000112769_6 (sequence is synthesized)
taacgaaaattatgctggacctaactgtgaaagatgtgctcccggttactatggaaaccccttactcattggaagcacctgtaagaaatgtgactgcagtggaaattcagatcccaacct

SEQ ID NO: 192936 - DNA, 120 bp, Artificial Sequence
  ENSG00000112769_7 (sequence is synthesized)
gatctttgaagattgtgatgaagtcactggccagtgtaggaattgcttacgcaacaccaccggattcaagtgtgaacgttgcgctcctggctactatggggacgccaggatagccaagaa

SEQ ID NO: 192937 - DNA, 120 bp, Artificial Sequence
  ENSG00000112769_8 (sequence is synthesized)
ctgtgcagtgtgcaactgcgggggaggcccatgtgacagtgtaaccggagaatgcttggaagaaggttttgaaccccctacaggctgtgataagtgcgtctgggacctgactgatgacct

SEQ ID NO: 192938 - DNA, 120 bp, Artificial Sequence
  ENSG00000112769_9 (sequence is synthesized)
gcggttagcagcgctctccatcgaggaaggcaaatccggggtgctgagcgtatcctctggggccgccgctcataggcacgtgaatgaaatcaacgccaccatctacctcctcaaaacaaa

SEQ ID NO: 192939 - DNA, 120 bp, Artificial Sequence
  ENSG00000112769_10 (sequence is synthesized)
attgtcagaaagagaaaaccaatacgccctaagaaagatacaaatcaacaatgctgagaacacgatgaaaagccttctgtctgacgtagaggaattagttgaaaaggaaaatcaagcctc

SEQ ID NO: 192940 - DNA, 120 bp, Artificial Sequence
  ENSG00000112769_11 (sequence is synthesized)
cagaaaaggacaacttgttcagaaggaaagcatggacaccattaaccacgcaagtcagctggtagagcaagcccatgatatgagggataaaatccaagagatcaacaacaagatgctcta

SEQ ID NO: 192941 - DNA, 120 bp, Artificial Sequence
  ENSG00000112769_12 (sequence is synthesized)
ttatggggaagagcatgaacttagccccaaggaaatctctgagaagctggtgttggcccagaagatgcttgaagagattagaagccgtcaaccatttttcacccaacgggagctcgtgga

SEQ ID NO: 192942 - DNA, 120 bp, Artificial Sequence
  ENSG00000112769_13 (sequence is synthesized)
tgaggaggcagatgaggcttacgaactactgagccaggctgagagctggcagcggctgcacaatgagacccgcactctgtttcctgtcgtcctggagcagctggatgactacaatgctaa

SEQ ID NO: 192943 - DNA, 120 bp, Artificial Sequence
  ENSG00000112769_14 (sequence is synthesized)
gttgtcagatctccaggaagcacttgaccaggcccttaactatgtcagggatgccgaagacatgaacagggccacagcagccaggcagcgggaccatgagaaacaacaggaaagagtgag

SEQ ID NO: 192944 - DNA, 120 bp, Artificial Sequence
  ENSG00000112769_15 (sequence is synthesized)
ggaacaaatggaagtggtgaacatgtctctgagcacatctgcggactctctgacaacacctcgtctaactctttcagaacttgatgatataataaagaatgcgtcagggatttatgcaga

SEQ ID NO: 192945 - DNA, 120 bp, Artificial Sequence
  ENSG00000112769_16 (sequence is synthesized)
aatagatggagccaaaagtgaactacaagtaaaactatctaacctaagtaacctcagccatgatttagtccaagaagctattgaccatgcacaggaccttcaacaagaagctaatgaatt

SEQ ID NO: 192946 - DNA, 120 bp, Artificial Sequence
  ENSG00000112769_17 (sequence is synthesized)
gagcaggaagttgcacagttcagatatgaacgggctggtacagaaggctttggatgcatcaaatgtctatgaaaatattgttaattatgttagtgaagccaatgaaacagcagaatttgc

SEQ ID NO: 192947 - DNA, 120 bp, Artificial Sequence
  ENSG00000112769_18 (sequence is synthesized)
tttgaacaccactgaccgaatttatgatgcggtgagtgggattgatactcaaatcatttaccataaagatgaaagtgagaacctcctcaatcaagccagagaactgcaagcaaaggcaga

SEQ ID NO: 192948 - DNA, 120 bp, Artificial Sequence
  ENSG00000112769_19 (sequence is synthesized)
gtctagcagtgatgaagcagtggctgacactagcaggcgtgtgggtggagccctagcaaggaaaagtgcccttaaaaccagactcagtgatgccgttaagcaactacaagcagcagagag

SEQ ID NO: 192949 - DNA, 120 bp, Artificial Sequence
  ENSG00000112769_20 (sequence is synthesized)
aggggatgcccagcagcgcctggggcagtctagactgatcaccgaggaagccaacaggacgacgatggaggtgcagcaggccactgcccccatggccaacaatctaaccaactggtcaca

SEQ ID NO: 192950 - DNA, 120 bp, Artificial Sequence
  ENSG00000112769_21 (sequence is synthesized)
gaatcttcaacattttgactcttctgcttacaacactgcagtgaactctgctagggatgcagtaagaaatctgaccgaggttgtccctcagctcctggatcagcttcgtacggttgagca

SEQ ID NO: 192951 - DNA, 120 bp, Artificial Sequence
  ENSG00000112769_22 (sequence is synthesized)
gaagcgacctgcaagcaacgtttctgccagcatccagaggatccgagagctcattgctcagaccagaagtgttgccagcaagatccaagtctccatgatgtttgatggccagtcagctgt

SEQ ID NO: 192952 - DNA, 120 bp, Artificial Sequence
  ENSG00000112769_23 (sequence is synthesized)
ggaagtgcactcgagaaccagtatggatgacttaaaggccttcacgtctctgagcctgtacatgaaaccccctgtgaagcggccggaactgaccgagactgcagatcagtttatcctgta

SEQ ID NO: 192953 - DNA, 120 bp, Artificial Sequence
  ENSG00000112769_24 (sequence is synthesized)
cctcggaagcaaaaacgccaaaaaagagtatatgggtcttgcaatcaaaaatgataatctggtatacgtctataatttgggaactaaagatgtggagattcccctggactccaagcccgt

SEQ ID NO: 192954 - DNA, 120 bp, Artificial Sequence
  ENSG00000112769_25 (sequence is synthesized)
cagttcctggcctgcttacttcagcattgtcaagattgaaagggtgggaaaacatggaaaggtgtttttaacagtcccgagtctaagtagcacagcagaggaaaagttcattaaaaaggg

SEQ ID NO: 192955 - DNA, 120 bp, Artificial Sequence
  ENSG00000112769_26 (sequence is synthesized)
tctgctggacctggaccctgaggacacagtgttttatgttggtggagtgccttccaacttcaagctccctaccagcttaaacctgcctggctttgttggctgcctggaactggccacttt

SEQ ID NO: 192956 - DNA, 120 bp, Artificial Sequence
  ENSG00000112769_27 (sequence is synthesized)
gaataatgatgtgatcagcttgtacaactttaagcacatctataatatggacccctccacatcagtgccatgtgcccgagataagctggccttcactcagagtcgggctgccagttactt

SEQ ID NO: 192957 - DNA, 120 bp, Artificial Sequence
  ENSG00000112769_28 (sequence is synthesized)
cttcgatggctccggttatgccgtggtgagagacatcacaaggagagggaaatttggtcaggtgactcgctttgacatagaagttcgaacaccagctgacaacggccttattctcctgat

SEQ ID NO: 192958 - DNA, 120 bp, Artificial Sequence
  ENSG00000112769_29 (sequence is synthesized)
ggtcaatggaagtatgtttttcagactggaaatgcgcaatggttacctacatgtgttctatgattttggattcagcggtggccctgtgcatcttgaagatacgttaaagaaagctcaaat

SEQ ID NO: 192959 - DNA, 120 bp, Artificial Sequence
  ENSG00000112769_30 (sequence is synthesized)
taatgatgcaaaataccatgagatctcaatcatttaccacaatgataagaaaatgatcttggtagttgacagaaggcatgtcaagagcatggataatgaaaagatgaaaataccttttac

SEQ ID NO: 192960 - DNA, 120 bp, Artificial Sequence
  ENSG00000112769_31 (sequence is synthesized)
agatatatacattggaggagctcctccagaaatcttacaatccagggccctcagagcacaccttcccctagatatcaacttcagaggatgcatgaagggcttccagttccaaaagaagga

SEQ ID NO: 192961 - DNA, 120 bp, Artificial Sequence
  ENSG00000112769_32 (sequence is synthesized)
cttcaatttactggagcagacagaaaccctgggagttggttatggatgcccagaagactcacttatatctcgcagagcatatttcaatggacagagcttcattgcttcaattcagaaaat

SEQ ID NO: 192962 - DNA, 120 bp, Artificial Sequence
  ENSG00000112769_33 (sequence is synthesized)
atctttctttgatggctttgaaggaggttttaatttccgaacattacaaccaaatgggttactattctattatgcttcagggtcagacgtgttctccatctcactggataatggtactgt

SEQ ID NO: 192963 - DNA, 120 bp, Artificial Sequence
  ENSG00000112769_34 (sequence is synthesized)
catcatggatgtaaagggaatcaaagttcagtcagtagataagcagtacaatgatgggctgtcccacttcgtcattagctctgtctcacccacaagatatgaactgatagtagataaaag

SEQ ID NO: 192964 - DNA, 120 bp, Artificial Sequence
  ENSG00000112769_35 (sequence is synthesized)
cagagttgggagtaagaatcctaccaaagggaaaatagaacagacacaagcaagtgaaaagaagttttacttcggtggctcaccaatcagtgctcagtatgctaatttcactggctgcat

SEQ ID NO: 192965 - DNA, 120 bp, Artificial Sequence
  ENSG00000112769_36 (sequence is synthesized)
aagtaatgcctactttaccagggtggatagagatgtggaggttgaagatttccaacggtatactgaaaaggtccacacttctctttatgagtgtcccattgagtcttcaccattgtttct

SEQ ID NO: 192966 - DNA, 120 bp, Artificial Sequence
  ENSG00000112769_37 (sequence is synthesized)
cctccataaaaaaggaaaaaatttatccaagcctaaagcaagtcagaataaaaagggagggaaaagtaaagatgcaccttcatgggatcctgttgctctgaaactcccagagcggaatac

SEQ ID NO: 192967 - DNA, 120 bp, Artificial Sequence
  ENSG00000112769_38 (sequence is synthesized)
tccaagaaactctcattgccacctttccaacagccctagagcaatagagcacgcctatcaatatggaggaacagccaacagccgccaagagtttgaacacttaaaaggagattttggtgc

SEQ ID NO: 192968 - DNA, 120 bp, Artificial Sequence
  ENSG00000112769_39 (sequence is synthesized)
caaatctcagttttccattcgtctgagaactcgttcctcccatggcatgatcttctatgtctcagatcaagaagagaatgacttcatgactctatttttggcccatggccgcttggttta

SEQ ID NO: 192969 - DNA, 120 bp, Artificial Sequence
  ENSG00000112769_40 (sequence is synthesized)
catgtttaatgttggtcacaaaaaactgaagattagaagccaggagaaatacaatgatggcctgtggcatgatgtgatatttattcgagaaaggagcagtggccgactggtaattgatgg

SEQ ID NO: 192970 - DNA, 120 bp, Artificial Sequence
  ENSG00000112769_41 (sequence is synthesized)
tctccgagtcctagaagaaagtcttcctcctactgaagctacctggaaaatcaagggtcccatttatttgggaggtgtggctcctggaaaggctgtgaaaaatgttcagattaactccat

SEQ ID NO: 192971 - DNA, 120 bp, Artificial Sequence
  ENSG00000112769_42 (sequence is synthesized)
ctacagttttagtggctgtctcagcaatctccagctcaatggggcctccatcacctctgcttctcagacattcagtgtgaccccttgctttgaaggccccatggaaacaggaacttactt

SEQ ID NO: 192972 - DNA, 120 bp, Artificial Sequence
  ENSG00000112769_43 (sequence is synthesized)
ttcaacagaaggaggatacgtggttctagatgaatctttcaatattggattgaagtttgaaattgcatttgaagtccgtcccagaagcagttccggaaccctggtccacggccacagtgt

SEQ ID NO: 192973 - DNA, 120 bp, Artificial Sequence
  ENSG00000112769_44 (sequence is synthesized)
caatggggagtacctaaatgttcacatgaaaaatggacaggtcatagtgaaagtcaataatggcatcagagatttttccacctcagttacacccaagcagagtctctgtgatggcagatg

SEQ ID NO: 192974 - DNA, 120 bp, Artificial Sequence
  ENSG00000112769_45 (sequence is synthesized)
gcacagaattacagttattagagattctaatgtggttcagttggatgtggactctgaagtgaaccatgtggttggacccctgaatccaaaaccaattgatcacagggagcctgtgtttgt

SEQ ID NO: 192975 - DNA, 120 bp, Artificial Sequence
  ENSG00000112769_46 (sequence is synthesized)
tggaggtgttccagaatctctactgacaccacgcttggcccccagcaaacccttcacaggctgcatacgccactttgtgattgatggacacccagtgagcttcagtaaagcagccctggt

SEQ ID NO: 192976 - DNA, 120 bp, Artificial Sequence
  ENSG00000112769_47 (sequence is synthesized)
cagcggcgccgtaagcatcaactcctgtccagcagcctgacatgacagagcacagctgcccaaatacaaagttctttagagcactgaaagaaacacaaagccagccaggaggaacagtaa

SEQ ID NO: 192977 - DNA, 120 bp, Artificial Sequence
  ENSG00000112769_48 (sequence is synthesized)
ctcttccttcgggtggaagctttcatcgagttgaacaggacttaaacgaatcatcagggaccggatatttcttatttctcatttggattcttaaccttgaatccaaagtgtctgcaatgg

SEQ ID NO: 192978 - DNA, 120 bp, Artificial Sequence
  ENSG00000112769_49 (sequence is synthesized)
acaacaattgaaggagtggcaaacttacttgtattgagagcacacgcaattcctactggtgaaattactgtttctgtttctaataaaatagaagggattccaaataaacacttgcacaca

SEQ ID NO: 192979 - DNA, 120 bp, Artificial Sequence
  ENSG00000112769_50 (sequence is synthesized)
tttttgaagtgcggctagattctcagattcacctttcttccagggaagataactttcaatctatataaaaatctctgtcctaaaactacctttctttattttgaagagacttactaactt

SEQ ID NO: 192980 - DNA, 120 bp, Artificial Sequence
  ENSG00000112769_51 (sequence is synthesized)
acatataatctaaattagatgatagatttgtttttagcccttttgtttggtctatcagtataagaagaatattttaggtttatagctgaagttatcaaggtttaataaagtaaatttcta

SEQ ID NO: 192981 - DNA, 120 bp, Artificial Sequence
  ENSG00000112769_52 (sequence is synthesized)
acagaatactagaaaaatgcagtataatttaattttttctaaataagaaacacaggaaatcaactactttttccccttccttatctccttaaaagaaaaataaaattgtacatgagagga

SEQ ID NO: 192982 - DNA, 120 bp, Artificial Sequence
  ENSG00000112769_53 (sequence is synthesized)
agtcccgaacggccagggagaggaggtggcctagcgctggcggggctcaccccaatccgtctgccttttgatgccgtactgtaagctccgtccatctgtaggttcttgagccagaacctc

SEQ ID NO: 192983 - DNA, 120 bp, Artificial Sequence
  ENSG00000112769_54 (sequence is synthesized)
tgcgggaaggagaaaaagtgaaagagggagagggagagggagagagagggggagaaggggagagagagagagggagagagaggctggaactctcccttactctcgcactttccctttatt

SEQ ID NO: 192984 - DNA, 120 bp, Artificial Sequence
  ENSG00000112769_55 (sequence is synthesized)
ttcttctggagcccttggaggggctccaaactgagaggggagggaagaccgcagggaaaggcggacctcagtgtctgaaaagccagcttagagtgggagggcctgggagtagaaggtaaa

SEQ ID NO: 192985 - DNA, 120 bp, Artificial Sequence
  ENSG00000112769_56 (sequence is synthesized)
aagggagtggtgagaatgaatgtgagaaggaagccaggacagcgcagtccccagtcccgaacggccagggagaggaggtggcctagcgctggcggggctcaccccaatccgtctgccttt

SEQ ID NO: 192986 - DNA, 120 bp, Artificial Sequence
  ENSG00000112769_57 (sequence is synthesized)
atttaagagtacacaagtccttttattaaaagtttgctcctagcctgggcaacataatgagatcccatctctgcaaaaaaatttgtacatgggcatacacctgtagtcccagctacttgg

SEQ ID NO: 192987 - DNA, 75 bp, Artificial Sequence
  ENSG00000112769_58 (sequence is synthesized)
ctatgactgctgactgtacaaagtgtgctctccacatacctgcaacacaactagtcttatttctaaaatgttata

SEQ ID NO: 192988 - DNA, 120 bp, Artificial Sequence
  ENSG00000112769_59 (sequence is synthesized)
atacctgcaacacaactagtcttatttctaaaatgttataatcttttttccaagtagctacattaatatagtctagaaaaaaatggacttgaatagctggtagaatattaaaatatagaa

SEQ ID NO: 192989 - DNA, 120 bp, Artificial Sequence
  ENSG00000112769_60 (sequence is synthesized)
atgaaataaaagaattatatctaaaaacctcaactcagaagacagaaaaagagaaaataggccctgatatcaacagaattaacaatacataaaaggagtaacttttgaggggagaggata

SEQ ID NO: 192990 - DNA, 120 bp, Artificial Sequence
  ENSG00000112769_61 (sequence is synthesized)
taaaatattttgaggaattaccaaggggaataaaacaatgttaccttgaaatgattatatatatattacatattggtatatatgtccatacctacctatatcccctgctacccttctgtc

SEQ ID NO: 192991 - DNA, 120 bp, Artificial Sequence
  ENSG00000112769_62 (sequence is synthesized)
tgaaatatacaaataatgataatgttgaagatatcgataaacatagctaatgtctgttcatagaggacttactaagtgccagccaccatgataagctaaagttaattattttatttgttc

SEQ ID NO: 192992 - DNA, 120 bp, Artificial Sequence
  ENSG00000112769_63 (sequence is synthesized)
aaaagctgaatattcttctggagcccttggaggggctccaaactgagaggggagggaagaccgcagggaaaggcggacctcagtgtctgaaaagccagcttagagtgggagggcctggga

SEQ ID NO: 192993 - DNA, 120 bp, Artificial Sequence
  ENSG00000112769_64 (sequence is synthesized)
agtaaagtaacacactatactcctagactcctaatgacatggctgggctccatctttgtttgtcacatgtcatcgttttttcccatctttcctttctgtgccaccttaatcctattatgt

SEQ ID NO: 192994 - DNA, 120 bp, Artificial Sequence
  ENSG00000112769_65 (sequence is synthesized)
tatcaccaaaataaacactaaatagtacatgatttatgctatcaaaagaattatattctctgtgactttccaattgtaaggttcataaaacagtattcttccaggatactgtatttgatc

SEQ ID NO: 192995 - DNA, 120 bp, Artificial Sequence
  ENSG00000112769_66 (sequence is synthesized)
attctcagctctcagggagccagagaagccagggctccaacatgaacacttcttgtagctcactgtcatgaccagtgtttcagtcagttcttgcaggttgcctgacttacctcatttctc

SEQ ID NO: 192996 - DNA, 120 bp, Artificial Sequence
  ENSG00000112769_67 (sequence is synthesized)
tcatttcctgtaagcaaccaaaaataaaaggctttcttttatttcattttgtcttattttgcttttatcttgaaggcatataagacctctgtatctgccttgttcaccttcaactgcttc

SEQ ID NO: 192997 - DNA, 120 bp, Artificial Sequence
  ENSG00000112769_68 (sequence is synthesized)
taattcttcctcaattccagtgtccaatgtcaatttgaaattaaaatttacagactgattttaactaagctgttggtaaagctgacctaagccattcagccacaaaatatagagtataca

SEQ ID NO: 192998 - DNA, 120 bp, Artificial Sequence
  ENSG00000112769_69 (sequence is synthesized)
aaattatgctaccattttacacatatcaagcaagcaaagagatttttttttactggtggaacactaatctttcaaatatagaatagtggctaaatgaaaataaaacagcttagaaatcta

SEQ ID NO: 192999 - DNA, 120 bp, Artificial Sequence
  ENSG00000112769_70 (sequence is synthesized)
gtccattcagagagcccacagtttatgaagggactgatgaccacattgccgctgcacagtgggctctgtgactacaggagccttgctctgtagggaggggattacccttctccaataaaa

SEQ ID NO: 193000 - DNA, 120 bp, Artificial Sequence
  ENSG00000112769_71 (sequence is synthesized)
ttttaaagagctgagccaaaaaagcaacagacaaggcaagtgggcattcgaccaaatgccagactaaagaacttctcttcctcttaaatataacccatagatcagtccttcaaatcccaa

SEQ ID NO: 193001 - DNA, 120 bp, Artificial Sequence
  ENSG00000112769_72 (sequence is synthesized)
aagtaagtacatgtcgcccatgctgtgcatacagggtggtgtcctagccttgaatcatttctgtgctcttagatcacattctgtccttcaccacgcacacaaaaacacacacatacacac

SEQ ID NO: 193002 - DNA, 120 bp, Artificial Sequence
  ENSG00000112769_73 (sequence is synthesized)
agacgcccacacaaaccctttcttcagaggccacatttgagttgggcattatttttgacaaatactgtgtgagatctctgaaacagaatctcccaagttgagagaatggaatcagcttct

SEQ ID NO: 193003 - DNA, 120 bp, Artificial Sequence
  ENSG00000112769_74 (sequence is synthesized)
cggagaagagctccattcacgctgagccaaatctgcttgagcagttatttgtacacaagtgccatcaatgttgatgggaatttggaatgaagcactgaaaacagcatgttaggccagtga

SEQ ID NO: 193004 - DNA, 120 bp, Artificial Sequence
  ENSG00000112769_75 (sequence is synthesized)
gaataatccttgaaatctctgtggtaattcaatttcagcagtggttggaccacccaggagccactggaagcatggtgcatttcaaggtctgcctattttttcaacaattttctctttgaa

SEQ ID NO: 193005 - DNA, 120 bp, Artificial Sequence
  ENSG00000112769_76 (sequence is synthesized)
actttaagctcttcagtcagcacaatgtcaaaatgataagcagacatgggcaattttctagtccagcaacttgagatacagtaaaaatttgaagaataaattacatatgaaaggcagttg

SEQ ID NO: 193006 - DNA, 120 bp, Artificial Sequence
  ENSG00000112769_77 (sequence is synthesized)
gttgggactgaactgtgactgatgatataggaatagcaccagattttatagcattctgtcattctaaaactggccatcaagtgaagtaacttaggaatggaaaaccaaacattgtatgtc

SEQ ID NO: 193007 - DNA, 84 bp, Artificial Sequence
  ENSG00000112769_78 (sequence is synthesized)
gtgaagtaacttaggaatggaaaaccaaacattgtatgtcctaactgatacgtgggagctaagctatgaggacgcagcagggaa

SEQ ID NO: 193008 - DNA, 77 bp, Artificial Sequence
  ENSG00000112769_79 (sequence is synthesized)
ataccccaataacttacggaaaaattaaaaaattttttaaaagtaaaactggccatcacattacctttcatgcatta

SEQ ID NO: 193009 - DNA, 120 bp, Artificial Sequence
  ENSG00000112769_80 (sequence is synthesized)
taaaagtaaaactggccatcacattacctttcatgcattatttttgggatgatttcatgtgttatagaactttcacatgccaggaagatttacgtttaggaaatacattatgcccaccca

SEQ ID NO: 193010 - DNA, 120 bp, Artificial Sequence
  ENSG00000112769_81 (sequence is synthesized)
aatgcatttcagcatcagcagtgtgatggtacaccaagaaggggctgttgatataaatttttttaaaatattggtatagttaaatacttatattttaaaatattggtgtgttttttggtg

SEQ ID NO: 193011 - DNA, 120 bp, Artificial Sequence
  ENSG00000112769_82 (sequence is synthesized)
ctataaattactaacttgtgtgttcctaaaatcaagttgaaactaggataattgtctagttcttgctttgataagaacgcagtagttctgatgcttgtgtccatgtgtatgggtctgtta

SEQ ID NO: 193012 - DNA, 120 bp, Artificial Sequence
  ENSG00000112769_83 (sequence is synthesized)
ttcttgcaagtgggtaagcaatgcatagctttttttatactgagagcactagaaggccaaagcatctcaaaaccatgggttctgggtatgcataatttttggaaaggcacgataagcaaa

SEQ ID NO: 193013 - DNA, 120 bp, Artificial Sequence
  ENSG00000112769_84 (sequence is synthesized)
tctcacagtctggctggtcagcagctgcagggataaggagactaattgccaaggccatgcaaatgcaaagaggaaggtgaggaggattcccagatgtgatcatagcttgcaaagatggtc

SEQ ID NO: 193014 - DNA, 120 bp, Artificial Sequence
  ENSG00000112769_85 (sequence is synthesized)
atctcatggggccagaattcgtgcatgcccacacctacaaagctgagaactggtagtggtcatgtgtccgcttcaagcaatgcatgtattcacagccgccagcatcaagaggggccatct

SEQ ID NO: 193015 - DNA, 120 bp, Artificial Sequence
  ENSG00000112769_86 (sequence is synthesized)
tttgataggatgacacatgcatgttcaaacatattttaaaagattagggagaaaagaatactgtgaacaaatagaaaccaattatgagcaaattcacgaattcggttatgtactattgtg

SEQ ID NO: 193016 - DNA, 120 bp, Artificial Sequence
  ENSG00000112769_87 (sequence is synthesized)
gctggcaaaagccacttaaactaggctctctagcctgattttcagccatcattacccctcactaagaatccttgtaaaatttcttccgtaaaagttaattacactcatcaccactgtttg

SEQ ID NO: 193017 - DNA, 120 bp, Artificial Sequence
  ENSG00000112769_88 (sequence is synthesized)
ctaatgggagcaaacccctagccaatattttttagaataatatggttgggataactttttttttttttttttgctaaatgaatgcatgattatcttatacaataaaagtataacacaaaa

SEQ ID NO: 193018 - DNA, 120 bp, Artificial Sequence
  ENSG00000112769_89 (sequence is synthesized)
ggcatggactgcccaaccataagtaaaaataacagtacatgattgactaaccccactttctctaatgtgctgcaggtgtgggattaagaaaagctatgcaatatcactctctagaaactg

SEQ ID NO: 193019 - DNA, 120 bp, Artificial Sequence
  ENSG00000112769_90 (sequence is synthesized)
ctgagtcccacccctggacttaaccctttctgcacctcagcaaatggagcctgcaccaagtacttggtggtccacttgattccctagggcaaatgggtggtttacatttgcatagctcta

SEQ ID NO: 193020 - DNA, 120 bp, Artificial Sequence
  ENSG00000112769_91 (sequence is synthesized)
atctaatcaggcagtcaaatgagacaggcaggatggtaaataaactgagaactttcatatctaaagagcaactgaaggaccctcatcttctcaaccctaggaaaacatttactttaaaac

SEQ ID NO: 193021 - DNA, 120 bp, Artificial Sequence
  ENSG00000112769_92 (sequence is synthesized)
attggatgtatttttcctgttgatgttccaatttaaaagtcactgaaagattccttttaattgcttaattaaccagaaggcttctattaatcttaaatatctcaattggtattcctacag

SEQ ID NO: 193022 - DNA, 120 bp, Artificial Sequence
  ENSG00000112769_93 (sequence is synthesized)
gtctatcccccagaaaaaacccgagaaaccttgctcaagaaagtgggcaccctgaccctctgccttcagagatcatctacctttggttcctgccctggaatcccttttccacccactttc

SEQ ID NO: 193023 - DNA, 120 bp, Artificial Sequence
  ENSG00000112769_94 (sequence is synthesized)
cttttcattaaccacatgttccatttcaatttcatgagaaaacctgcttatccaacctagagtgggtcaaggtaaaatgctagctctgtggtatgtaaagaagcctttttcttttgcaga

SEQ ID NO: 193024 - DNA, 120 bp, Artificial Sequence
  ENSG00000112769_95 (sequence is synthesized)
cgcgggctgtgccacactcgtccttctctctctctccgcctctttcctctccccagtgccttgagagtttcacctgggctaggtcagttcggaaacttgaaataaagagttttcctttgt

SEQ ID NO: 193025 - DNA, 120 bp, Artificial Sequence
  ENSG00000112769_96 (sequence is synthesized)
ttattcttccttgcaatgataagacagtgttaaaggcatttctgttctcctgaaaagtgaaaggagggaaaaagttatgtaacaaagaagattatatatacatcatctatcactgaatga

SEQ ID NO: 193026 - DNA, 120 bp, Artificial Sequence
  ENSG00000112773_0 (sequence is synthesized)
gcacaactgctaaagctccagagacacgagcgtgtgtggcagcaagagccgccagttcgggaccaccgcagctggggtggcagcggcgcaggaggggtcgcggggagggagtggtgagcg

SEQ ID NO: 193027 - DNA, 120 bp, Artificial Sequence
  ENSG00000112773_1 (sequence is synthesized)
caggcggcaggggtctgggaaagacgaagtcgctatttgctgtctgagcgcgctcgcagctcctggaagtgttgccgcctctcggtttcgctctcgctcgctgcgctcctagaaggggcg

SEQ ID NO: 193028 - DNA, 120 bp, Artificial Sequence
  ENSG00000112773_2 (sequence is synthesized)
gccgcctccaggactgaccagggccaagtggcgctcggcgggcactacatggcggagggtgaagggtacttcgccatgtctgaggacgagctggcctgcagcccctacatccccctaggc

SEQ ID NO: 193029 - DNA, 120 bp, Artificial Sequence
  ENSG00000112773_3 (sequence is synthesized)
ggcgacttcggcggcggcgacttcggcggcggcgacttcggcggcggcgacttcggcggtggcggcagcttcggtgggcattgcttggactattgcgaaagccctacggcgcactgcaat

SEQ ID NO: 193030 - DNA, 120 bp, Artificial Sequence
  ENSG00000112773_4 (sequence is synthesized)
gtgctgaactgggagcaagtgcagcggctggacggcatcctgagcgagaccattccgattcacgggcgcggcaacttccccacgctcgagctgcagccgagcctgatcgtgaaggtggtg

SEQ ID NO: 193031 - DNA, 120 bp, Artificial Sequence
  ENSG00000112773_5 (sequence is synthesized)
cggcggcgcctggccgagaagcgcattggcgtccgcgacgtgcgcctcaacggctcggcagccagccatgtcctgcaccaggacagcggcctgggctacaaggacctggacctcatcttc

SEQ ID NO: 193032 - DNA, 120 bp, Artificial Sequence
  ENSG00000112773_6 (sequence is synthesized)
tgcgccgacctgcgcggggaaggggagtttcagactgtgaaggacgtcgtgctggactgcctgttggacttcttacccgagggggtgaacaaagagaagatcacaccactcacgctcaag

SEQ ID NO: 193033 - DNA, 120 bp, Artificial Sequence
  ENSG00000112773_7 (sequence is synthesized)
gaagcttatgtgcagaaaatggttaaagtgtgcaatgactctgaccgatggagtcttatatccctgtcaaacaacagtggcaaaaatgtggaactgaaatttgtggattccctccggagg

SEQ ID NO: 193034 - DNA, 120 bp, Artificial Sequence
  ENSG00000112773_8 (sequence is synthesized)
cagtttgaattcagtgtagattcttttcaaatcaaattagactctcttctgctcttttatgaatgttcagagaacccaatgactgagacatttcaccccacaataatcggggagagcgtc

SEQ ID NO: 193035 - DNA, 120 bp, Artificial Sequence
  ENSG00000112773_9 (sequence is synthesized)
tatggcgatttccaggaagcctttgatcacctttgtaacaagatcattgccaccaggaacccagaggaaatccgagggggaggcctgcttaagtactgcaacctcttggtgaggggcttt

SEQ ID NO: 193036 - DNA, 120 bp, Artificial Sequence
  ENSG00000112773_10 (sequence is synthesized)
aggcccgcctctgatgaaatcaagacccttcaaaggtatatgtgttccaggtttttcatcgacttctcagacattggagagcagcagagaaaactggagtcctatttgcagaaccacttt

SEQ ID NO: 193037 - DNA, 120 bp, Artificial Sequence
  ENSG00000112773_11 (sequence is synthesized)
gtgggattggaagaccgcaagtatgagtatctcatgacccttcatggagtggtaaatgagagcacagtgtgcctgatgggacatgaaagaagacagactttaaaccttatcaccatgctg

SEQ ID NO: 193038 - DNA, 120 bp, Artificial Sequence
  ENSG00000112773_12 (sequence is synthesized)
gctatccgggtgttagctgaccaaaatgtcattcctaatgtggctaatgtcacttgctattaccagccagccccctatgtagcagatgccaactttagcaattactacattgcacaggtt

SEQ ID NO: 193039 - DNA, 120 bp, Artificial Sequence
  ENSG00000112773_13 (sequence is synthesized)
cagccagtattcacgtgccagcaacagacctactccacttggctaccctgcaattaagaatcatttaaaaatgtcctgtggggaagccatttcagacaagacaggagagaaaaaaaaaaa

SEQ ID NO: 193040 - DNA, 120 bp, Artificial Sequence
  ENSG00000112773_14 (sequence is synthesized)
aaagaaaaaaaaaagagtgatccagcccttattagggatgtgttttgtgcaatgatgatatgctcctggttttaagtttggcaaagcttatgtatcttttaatagatgtgggagcatgat

SEQ ID NO: 193041 - DNA, 120 bp, Artificial Sequence
  ENSG00000112773_15 (sequence is synthesized)
ctcgaaaggatccttttcccttctcttattctcctacccaattggattctatcctgcaaaaaaagagagacctgtcattagaagcaaccaggttctcctgatacaagagaagaaatgtgt

SEQ ID NO: 193042 - DNA, 120 bp, Artificial Sequence
  ENSG00000112773_16 (sequence is synthesized)
gatgacaatatgggtttgctgtatctgctcccatagctttgccataggaaaaaaaaaagtggaaagtttcttttaagatggaattcataaaagggaaaatacggaggaaaaaaggtctca

SEQ ID NO: 193043 - DNA, 120 bp, Artificial Sequence
  ENSG00000112773_17 (sequence is synthesized)
ctccaacttgtgaatcagtttaggagttcagatattaatagtaacaatacaggaaaaaggggaactccaacgttgggattactgtctgaggcttgtagcaagtgctttctgtggaatgat

SEQ ID NO: 193044 - DNA, 120 bp, Artificial Sequence
  ENSG00000112773_18 (sequence is synthesized)
cttgttttgctaacaaacggcttgctccaaatgaacagtagtaggttggtgcagttctcgtaacaatcagcagaacttatgatgacacaatccattaattccagctgcgtgcatagatca

SEQ ID NO: 193045 - DNA, 120 bp, Artificial Sequence
  ENSG00000112773_19 (sequence is synthesized)
catttttaaaatgtaaaaatgcaagcaaaaacagctgtaacaaagaaagtgtgctcaaggaccaaagatttaacagataaaaatacccaattagaagagatatagtagactatatgaaga

SEQ ID NO: 193046 - DNA, 120 bp, Artificial Sequence
  ENSG00000112773_20 (sequence is synthesized)
gagattatatttgttacacaccaatatacatcaaagtgcctgttgccttctgaaaatttgaagtggcaaaattattttatggtttaatgattattttattttatcagggactgcctcaag

SEQ ID NO: 193047 - DNA, 120 bp, Artificial Sequence
  ENSG00000112773_21 (sequence is synthesized)
aagaaaataacataagcttgtgaatggtggagaaaatgccctattttttcttgcaaatacttgtataaagttaacatttgttgatctgatattatcataggtacatgtgtatgtgtgtat

SEQ ID NO: 193048 - DNA, 120 bp, Artificial Sequence
  ENSG00000112773_22 (sequence is synthesized)
ttttatatatacattttatatgtatatatacacagtagattgactatgatctagaataatgtctcaaataggaaatgtttaaatactgtgtgtttttatgttttcaacaggataacatga

SEQ ID NO: 193049 - DNA, 120 bp, Artificial Sequence
  ENSG00000112773_23 (sequence is synthesized)
tgatgaattaaatccacatctaaaaaaattaaatgaaggagggaaccaagtaatatatttcataggaagagcagaaattatactgttttagtgggatttttttttctttttttttttttc

SEQ ID NO: 193050 - DNA, 120 bp, Artificial Sequence
  ENSG00000112773_24 (sequence is synthesized)
attccacaaatgggagaatatttgtttggcagagcactcttttttatattgaactgccattttgacagttggaacccatttattaaaaaaaaaattgcattcctctatgatgtttaatct

SEQ ID NO: 193051 - DNA, 120 bp, Artificial Sequence
  ENSG00000112773_25 (sequence is synthesized)
agtggatcatggatcagtaataggctacttaaatccctgactgctaaaaaggatttccggtgatctaaacactacttgctaatgtttaaatgaattttaatgaatgcattctgcatttct

SEQ ID NO: 193052 - DNA, 120 bp, Artificial Sequence
  ENSG00000112773_26 (sequence is synthesized)
ttctggaccactagaatttagtaatgtgaaatgaccctttttacagaatatttgcacaattgcttaaaatttatatatgagatatatattatatataacattttataaatcatgtcaata

SEQ ID NO: 193053 - DNA, 120 bp, Artificial Sequence
  ENSG00000112773_27 (sequence is synthesized)
acatctttgatctggttgtcacactgcatttaaatatttagtactgtactttaaatcgctttccattaaatcaaatccaactttattttctttcttacaaaaataccagttatacctttg

SEQ ID NO: 193054 - DNA, 120 bp, Artificial Sequence
  ENSG00000112773_28 (sequence is synthesized)
tgaaatgaactggcattactatttcagttcaataacagctaatcctaaaaccaccctttctcctagccagtagttcctctagatactggtctctgaaaatgcatttgttaaaaacaaaac

SEQ ID NO: 193055 - DNA, 120 bp, Artificial Sequence
  ENSG00000112773_29 (sequence is synthesized)
aaaactaacacataagaaccttccctttgtgttgtgaaacaaccacataatctccacaaccttagtggatgactgcttgctatgataattcctcgaagacccaattagaagattttcatc

SEQ ID NO: 193056 - DNA, 120 bp, Artificial Sequence
  ENSG00000112773_30 (sequence is synthesized)
atcagttaaagagagaccacgggagaaaaaaatatcctcctgttggcagtataatttgtttgtttgtttatctagggatcctcagatgcttagtgctaggttaatccaggttaatccgtc

SEQ ID NO: 193057 - DNA, 120 bp, Artificial Sequence
  ENSG00000112773_31 (sequence is synthesized)
tggactaccttttgtgcatctttctttgaagccttaatgggaacctgatgggtttgctgtagcagcttccttgtgaattctgtcagagctgcaacagccgctgcactgccactcagtttt

SEQ ID NO: 193058 - DNA, 120 bp, Artificial Sequence
  ENSG00000112773_32 (sequence is synthesized)
ctaaggaactcctcctactaccatcttggctcagtctccctcacttaagccctgggtttgaaaaattaattgcaacttcccaggaaacattgttcagtttgcagattaagcctggcactc

SEQ ID NO: 193059 - DNA, 120 bp, Artificial Sequence
  ENSG00000112773_33 (sequence is synthesized)
acctatcagaaaccagagctccgcctgcttagttgtttcaaagttttctgaaagaaaactaggggagcacttgtgaacacaggagcagctggtgatctgctttcttaccctaactcttga

SEQ ID NO: 193060 - DNA, 120 bp, Artificial Sequence
  ENSG00000112773_34 (sequence is synthesized)
caaatgagtcgtctactattttaaagagtctggaggtctctgactctgccataacaataacctgctgttaatttataacacagatttttgtttggaagagccttatttgaaatacacttt

SEQ ID NO: 193061 - DNA, 120 bp, Artificial Sequence
  ENSG00000112773_35 (sequence is synthesized)
gatttattttcttaaatatttatattcttttcttgcttacttcagggttggtagcttagttggaagtgccagcacctggcacctattcatatagaacaggctgtactcaagacaacttct

SEQ ID NO: 193062 - DNA, 120 bp, Artificial Sequence
  ENSG00000112773_36 (sequence is synthesized)
agcatttactttaagacttatataatttatttctattttgtgtgtactatagtcttgtgcatatgtagttgaacacacagtgaaatatatgtctctctttgtggatgtgcggcctaaaaa

SEQ ID NO: 193063 - DNA, 120 bp, Artificial Sequence
  ENSG00000112773_37 (sequence is synthesized)
tttgaatgtctggtgagagagagccatgtgtataggtcagagaaaagaacagctcccgactccctattagcgcctgtgatttgtttccttttgtgtttatctggcctagtgtgctgtttc

SEQ ID NO: 193064 - DNA, 120 bp, Artificial Sequence
  ENSG00000112773_38 (sequence is synthesized)
tttaaaccaggaagaagttttgtcttttggaggctcttctcacctgtccagcctggcatgtcagagaacacatagcctgtgacaatgccgtttttaaaggtttacttaatttgcagtaaa

SEQ ID NO: 193065 - DNA, 120 bp, Artificial Sequence
  ENSG00000112773_39 (sequence is synthesized)
tccagctgcctcaagaactcctacaccaagatggacatttcctttccagaaatgggatcaagtatctgctcactttggtattggatggactaataatgtagctccaaaaatgcaaggatg

SEQ ID NO: 193066 - DNA, 120 bp, Artificial Sequence
  ENSG00000112773_40 (sequence is synthesized)
gaagaatatgtgtaatccaaaccaaggaaggaaatgaaaagtgaacgtactgtttttaccacccctttctgtttgcttattgttggttgcttcactgtgcataaagttgttttcaatgca

SEQ ID NO: 193067 - DNA, 120 bp, Artificial Sequence
  ENSG00000112773_41 (sequence is synthesized)
acgcttgttaaataaatattgtgaactattttgtaaatgaaatgtattatgttgaaagctgtcagttcaaaaataagcttttttgttgttgttgaagatgaagtgtgttaggtgaaacca

SEQ ID NO: 193068 - DNA, 120 bp, Artificial Sequence
  ENSG00000112773_42 (sequence is synthesized)
aaaagccaaaaaaagtaatttcatatatagcatctatttgaatataatctttctttaaaatttcttttagcatagcattttcagtgctaagaaagaatctctatgttatattttgttaaa

SEQ ID NO: 193069 - DNA, 120 bp, Artificial Sequence
  ENSG00000112773_43 (sequence is synthesized)
ataatggctttctaacaaagcaaatggtaaagtacaaagttggaagatgtcaagttaacgagacttgctgcaaagccttgcagaacggaggaggctctgcctgctggctgtctctccctc

SEQ ID NO: 193070 - DNA, 120 bp, Artificial Sequence
  ENSG00000112773_44 (sequence is synthesized)
caacctctctacaatcatgcctgctttgaggtgttctgttgcagcaagctgcaccttgggtcactcttttggaatattttgactataggctgcgtcacaggcagaaaaggagttgatgga

SEQ ID NO: 193071 - DNA, 120 bp, Artificial Sequence
  ENSG00000112773_45 (sequence is synthesized)
aaatggactaaaaaactgacatgtttgaatcagtgctagagggaacagattgtgaattttgtttacagcatccaatatttggatttttttgtaaataaaaaagttatttttttctattga

SEQ ID NO: 193072 - DNA, 120 bp, Artificial Sequence
  ENSG00000112773_46 (sequence is synthesized)
aaagacaacagaagagtccaaagtctgaggggactgggcaagcttctgtcacatgctttcagaatgaagacaatctgcaagaattttaagttgtgacctctacagagaaaagaatgaaaa

SEQ ID NO: 193073 - DNA, 120 bp, Artificial Sequence
  ENSG00000112773_47 (sequence is synthesized)
gtagccaaatctccacatgagagattttggactattttgcagtgtaaaccccatctgatttatatgaagtaagcagactttctctccaagagttcaaaataaattaattctaatgctaaa

SEQ ID NO: 193074 - DNA, 120 bp, Artificial Sequence
  ENSG00000112782_0 (sequence is synthesized)
gcccggcacttgttgctcccacgacctgttgtcattcccttaacccggctttccccgtggccccccgcctcctcccggcttcgctccttttcatgtgagcatctgggacactgatctctc

SEQ ID NO: 193075 - DNA, 120 bp, Artificial Sequence
  ENSG00000112782_1 (sequence is synthesized)
agaccccgctgctcgggctggagaatagatggttttgtgaaaaattaaacaccgccctgaagaggagccccgctgggcagcggcaggagcgcagagtgctggcccaggtgctgcagaggt

SEQ ID NO: 193076 - DNA, 120 bp, Artificial Sequence
  ENSG00000112782_2 (sequence is synthesized)
ggcgcctccccggcccgggacggtagccccgggcgccaacggcatgacagactcggcgacagctaacggggacgacagggaccccgagatcgagctctttgtgaaggctggaatcgatgg

SEQ ID NO: 193077 - DNA, 120 bp, Artificial Sequence
  ENSG00000112782_3 (sequence is synthesized)
agaaagcatcggcaactgtcctttctctcagcgcctcttcatgatcctctggctgaaaggagtcgtgttcaatgtcaccactgtggatctgaaaagaaagccagctgacctgcacaacct

SEQ ID NO: 193078 - DNA, 120 bp, Artificial Sequence
  ENSG00000112782_4 (sequence is synthesized)
agcccccggcacgcacccgcccttcctgaccttcaacggggacgtgaagacagacgtcaataagatcgaggagttcctggaggagaccttgacccctgaaaagtaccccaaactggctgc

SEQ ID NO: 193079 - DNA, 120 bp, Artificial Sequence
  ENSG00000112782_5 (sequence is synthesized)
aaaacaccgggaatccaacacagcgggcatcgacatcttttccaagttttctgcctacatcaaaaataccaagcagcagaacaatgctgctcttgaaagaggcctaaccaaggctctaaa

SEQ ID NO: 193080 - DNA, 120 bp, Artificial Sequence
  ENSG00000112782_6 (sequence is synthesized)
gaaattggatgactacctgaacacccctctaccagaggagattgacgccaacacttgtggggaagacaaggggtcccggcgcaagttcctggatggggatgagctgaccctggctgactg

SEQ ID NO: 193081 - DNA, 120 bp, Artificial Sequence
  ENSG00000112782_7 (sequence is synthesized)
caatctgttgcccaagctccatgtggtcaagattgtggccaagaaataccgcaactatgatatcccggctgagatgacaggcctgtggcggtacctcaagaacgcctatgcccgtgatga

SEQ ID NO: 193082 - DNA, 120 bp, Artificial Sequence
  ENSG00000112782_8 (sequence is synthesized)
gttcaccaacacctgtgcagctgacagtgagatcgagttggcctacgctgatgtcgccaaacgcctcagccgatcctgagcacagccattttgccccatccccgctgcagaaggactcaa

SEQ ID NO: 193083 - DNA, 120 bp, Artificial Sequence
  ENSG00000112782_9 (sequence is synthesized)
ccactcccctaagactccagcttcatagactcctctgtatcactgccttgaggcgcactttttataatcaagcctcatcttgctggtatcatgggaactccagcctgctatctttcatga

SEQ ID NO: 193084 - DNA, 120 bp, Artificial Sequence
  ENSG00000112782_10 (sequence is synthesized)
aggtcagcaccatccctggcctcctcacataggaatctagcagaaatgatagacacagtccacctttcggccggccagcctgatctgggctcagcatgtttggggtcagtcagtgttgga

SEQ ID NO: 193085 - DNA, 120 bp, Artificial Sequence
  ENSG00000112782_11 (sequence is synthesized)
gagcccacatatgggattgccactagcttcttctgccaatatcaaaataccttctcagatgctttagaaacatgcaacaccaactccttttctaccctcctctccgtccatacctacaag

SEQ ID NO: 193086 - DNA, 120 bp, Artificial Sequence
  ENSG00000112782_12 (sequence is synthesized)
gccaaggacaaacgccatcttcatccttcttagaaagagatctattaccccattaggggagacagagagagtgaatggaggagtaccgagctggctatggacttgggtgtctggcaaaca

SEQ ID NO: 193087 - DNA, 120 bp, Artificial Sequence
  ENSG00000112782_13 (sequence is synthesized)
cagcttcagtctcactacttctgacactctggttattgggcactaagggccagactggaaagtcacttgagacacattctcagtttgttgcagtgccaggaatgctgcgctgctgctgct

SEQ ID NO: 193088 - DNA, 120 bp, Artificial Sequence
  ENSG00000112782_14 (sequence is synthesized)
gcgcacctggcccatgctgtccctggcttccatgccgtccaggccctgccagaaaaggaaattggcatgcaattctaaactgcagtgactgggatgggaggggaggggagcagtgttgat

SEQ ID NO: 193089 - DNA, 120 bp, Artificial Sequence
  ENSG00000112782_15 (sequence is synthesized)
gccaaaatacccacggggtctaccagccatggggtttgcttgcttaggagtagttgtttcagaggtgattacaggcctgggtttgactgtgcttaccaatgagtggtttttgagctatga

SEQ ID NO: 193090 - DNA, 120 bp, Artificial Sequence
  ENSG00000112782_16 (sequence is synthesized)
gaaagtggatgggagtgggaggaggagagatgggtgaagacaaaagagttctttatgagcctcgatgttccctggtaaacttttaaaaaggccttctctcatgatctaagtcttggactg

SEQ ID NO: 193091 - DNA, 120 bp, Artificial Sequence
  ENSG00000112782_17 (sequence is synthesized)
gtggcatcatgtaactgctaaccttacagtaaaaacccaagaatgggtcaaaaatgtcttcccagtttctccaagctgcttctggaatgcaggtctgtcggctgggtgctctccagcagc

SEQ ID NO: 193092 - DNA, 120 bp, Artificial Sequence
  ENSG00000112782_18 (sequence is synthesized)
tgctcctgcctgattcaactgtagcctgtaatgggtaaaagccacatttaggaggtggtctgatcatagaacaccttaggaagaaagtccatgagactttctgactaggaaaccatgtgg

SEQ ID NO: 193093 - DNA, 120 bp, Artificial Sequence
  ENSG00000112782_19 (sequence is synthesized)
tttgaacttgaagaaaaatgtagacccatctgggttaattttcctacaatctgactcaactgccaggtgaaaaaaaaaaggaaaaatttttaagctaatatttcactcttttgtcattct

SEQ ID NO: 193094 - DNA, 120 bp, Artificial Sequence
  ENSG00000112782_20 (sequence is synthesized)
ccttaagtttcatctcctaaaaagcttacccagcctgagcttggggacctgtgcagaggaaactaagaaaaatgcactcatcaactccttctcccagtgaacgcccggtgagaaaatcca

SEQ ID NO: 193095 - DNA, 120 bp, Artificial Sequence
  ENSG00000112782_21 (sequence is synthesized)
tttgccacaggcccttaccttcaacaatcccccttctatagtgttcgctggtaaagggtgaggctcccaagtgctggaaagcccctggacttggctcatttctcagcaagggcaggatag

SEQ ID NO: 193096 - DNA, 120 bp, Artificial Sequence
  ENSG00000112782_22 (sequence is synthesized)
tatcaacaaattctaacccaagcaatccctggacctacctgcctccagggatctctgaagaaaaaaagtaacccattgatcaaatcagaggagaggaagcaggaggtctcctagagccca

SEQ ID NO: 193097 - DNA, 120 bp, Artificial Sequence
  ENSG00000112782_23 (sequence is synthesized)
ttgaggaagaggaactttctcagtaggacactttataagcctgagaaagctttgaaaaggcggaatgagttgattcatttccacctcaaaaggaacctttccaggtccccctggaaattg

SEQ ID NO: 193098 - DNA, 120 bp, Artificial Sequence
  ENSG00000112782_24 (sequence is synthesized)
tgccctggagatgtttaacaaggagaactggtgaggaaagagtccttttttactgtagggaaaagccccaaactggcctcctgggggatgagggctgaaatgatcccgaaggccttttaa

SEQ ID NO: 193099 - DNA, 120 bp, Artificial Sequence
  ENSG00000112782_25 (sequence is synthesized)
ttagtgtgaaatcctgctgtactcagaaatccttccccgaatttacagcacaggcaggatgacctaagaggcagtttacttccctgagacccacagttgggctgttctggaaacacatct

SEQ ID NO: 193100 - DNA, 120 bp, Artificial Sequence
  ENSG00000112782_26 (sequence is synthesized)
gtgaatcatagccaattgccacagagaaaacagaaccaagcctccggtgaggccactccaccccagagaagtctgcagaattccaaggactcggattggatgttcagaattcagcaactg

SEQ ID NO: 193101 - DNA, 120 bp, Artificial Sequence
  ENSG00000112782_27 (sequence is synthesized)
gaaagtccttaaaaacaaacaggccaaaccaaatcaatattgctgtttctagatgtcccttctgtggttgagctagttttacagagataaatatattaagacaaggaggtgggggtgtta

SEQ ID NO: 193102 - DNA, 120 bp, Artificial Sequence
  ENSG00000112782_28 (sequence is synthesized)
tatgatcaatgatagccatttgaaagagagggaggagtacagaaggaaggcacttctgggtacttaattcagaaatttctttatatttcagcactggattatcatataatgcaagtgact

SEQ ID NO: 193103 - DNA, 120 bp, Artificial Sequence
  ENSG00000112782_29 (sequence is synthesized)
atggactaagagttagttatggtgtcttatgactagatttattatggtatattaaagtaacaataatattaatattaccttcctttttttttttgtttcaaaagagatctttctccagat

SEQ ID NO: 193104 - DNA, 120 bp, Artificial Sequence
  ENSG00000112782_30 (sequence is synthesized)
gcttcagcctgtctggccttcttatcatatgtgcagcacatcatgtctcagcaacagtgtggtgaggtccttaggtgtcccaagaacaactcagggagcacgggagggtctgcagttggg

SEQ ID NO: 193105 - DNA, 120 bp, Artificial Sequence
  ENSG00000112782_31 (sequence is synthesized)
accccacaactatacagctatagggtaggaggcttccttttcattggtcctgaatgaatacaaatcgctcagaaagcattttggtggcacagaaaggggatgtatttgtgttgagatctt

SEQ ID NO: 193106 - DNA, 120 bp, Artificial Sequence
  ENSG00000112782_32 (sequence is synthesized)
attttattttgtatttatttatcttctttgacttgcacagcactattgggggtgggggaagcagggtagtgggagacgaaggcagaagcaagagtcaaactcagaatgactgagttgaat

SEQ ID NO: 193107 - DNA, 120 bp, Artificial Sequence
  ENSG00000112782_33 (sequence is synthesized)
tcactgtctagtcagcaatgcctgcttctgagtttggcccagagagaaggtattgagtaagattttaataactgtaaaaagtaagctggataagtaaaatcatgatggatccaaagcaca

SEQ ID NO: 193108 - DNA, 120 bp, Artificial Sequence
  ENSG00000112782_34 (sequence is synthesized)
gtttcttcatctcctgataaagaaagtcaaatgcttgataaattcagagtcacagatgtgagcatagctatattcttttaaacgagaggtagagtgacctagcactaagcaaatgagctg

SEQ ID NO: 193109 - DNA, 120 bp, Artificial Sequence
  ENSG00000112782_35 (sequence is synthesized)
aaatgtcggaaacagagtccatcagcttatttggccacacgatcccaaactagttttatcttgggaaatggccctgtcctcagcattcccttcttgtgctggtggggccagtgaagtctt

SEQ ID NO: 193110 - DNA, 120 bp, Artificial Sequence
  ENSG00000112782_36 (sequence is synthesized)
gatcttatcagaaaaaggccacaccaagtgcgagttttcccaggctgactttccaggcccttatcaaatgaaacaacagaagctcttcacagttctgtgccccatggccactccacagac

SEQ ID NO: 193111 - DNA, 120 bp, Artificial Sequence
  ENSG00000112782_37 (sequence is synthesized)
agacaataccaagcatcttagaactgtcataagataggtcatgcctgaaatagatcttgaccatatgagagtcccagaaatcagcaaggcctggacaaatagaactaagagagaggcaga

SEQ ID NO: 193112 - DNA, 120 bp, Artificial Sequence
  ENSG00000112782_38 (sequence is synthesized)
ggcaggaagctgcgggtctatcttgtaaagagtttagcatcactgtgagagtgtgtgtctaaaattaaattaaactagaagcagcaggtgagtatttggtaagtacttctgtgactcgcc

SEQ ID NO: 193113 - DNA, 120 bp, Artificial Sequence
  ENSG00000112782_39 (sequence is synthesized)
tcaattcccactggccaggggccatctcaactgcacggtgaatcaagatgctggtgtcatcctccttggaaaaaggaaatgttaactcatggttaaaactaagtacaatgattcccaagg

SEQ ID NO: 193114 - DNA, 120 bp, Artificial Sequence
  ENSG00000112782_40 (sequence is synthesized)
gatcactttcttatttttttaaatgacattaaggagaatcttaagaaagcatcagagaaagacatgtgcatgtgaagcaccctgattctgatgttaggaaaacttaagcgaacaggacct

SEQ ID NO: 193115 - DNA, 120 bp, Artificial Sequence
  ENSG00000112782_41 (sequence is synthesized)
gctgcacacagccccattgtcttctatccatttctctttatcattcaaatcaagcaacatgtgccctcctcatcaacacacattcttcccctttgtcagtatgcatctcccagcttagtg

SEQ ID NO: 193116 - DNA, 120 bp, Artificial Sequence
  ENSG00000112782_42 (sequence is synthesized)
tcaggatactttcgattcataattatgtatgatccaaagtgtgcataatttcatttaacgttaaagaaatagatccaattcctttcttgcaaccaaaaataaataaaatacgttgcctca

SEQ ID NO: 193117 - DNA, 120 bp, Artificial Sequence
  ENSG00000112782_43 (sequence is synthesized)
atataaggtttgggctattctgtgtttctatagaagcaatctgtttttggtaaaatgtacttttaaggatccagtcatctgaagtattttatgtagagttagagatttcacaatattgac

SEQ ID NO: 193118 - DNA, 120 bp, Artificial Sequence
  ENSG00000112782_44 (sequence is synthesized)
ggagctgtaaaacaagtacatgtgcaattcccggcctgggtttgaatcccagcacttctagctgcacaactttacccaagaggcttattctttctgagcctctggctctgcatctgtaaa

SEQ ID NO: 193119 - DNA, 120 bp, Artificial Sequence
  ENSG00000112782_45 (sequence is synthesized)
atggactttacattcagtttctttatctggcaataaggtattctgcagtgtgtggggagctggcagtgtgatgaaggggacaggattctagatgagctactccactctgaagaccctatg

SEQ ID NO: 193120 - DNA, 120 bp, Artificial Sequence
  ENSG00000112782_46 (sequence is synthesized)
tttttctcatgcctagaagaacagaagtggattgtattccttcttgccttcttttcctttcttctttccctccttctttccttttctcttgctcaaacatgtattcactaccactcaaaa

SEQ ID NO: 193121 - DNA, 120 bp, Artificial Sequence
  ENSG00000112782_47 (sequence is synthesized)
accatttgttgaacaaagcaaacaaatgaatctcccaagccttgggcttcatcctgtgatttcctcaattcccacctgccttaaattactcagtgaagccctgtccttggagaaaattca

SEQ ID NO: 193122 - DNA, 120 bp, Artificial Sequence
  ENSG00000112782_48 (sequence is synthesized)
gtgggtggttaacccagagaagctggagatcaaaaagaagatggccaatgaaagaacaaaggccagcccttggcccctatctctttggatttctgctgatccagcttatcagatcccaga

SEQ ID NO: 193123 - DNA, 120 bp, Artificial Sequence
  ENSG00000112782_49 (sequence is synthesized)
aacctggcaaacctctaaagttcacaaagagcgaaggggaagccaagtcaggcctccagtttggcttcggatgccaaaacttaatctgggctgtgggagctaactgttttcatatgaaag

SEQ ID NO: 193124 - DNA, 120 bp, Artificial Sequence
  ENSG00000112782_50 (sequence is synthesized)
agcaaattcagaacatgagcatggaagtccctgcgaacgtcagatctccgtgtgcatccttacccccttgctgctttcatgctcactctcctcttgcgtggctcgctttcaggtttatct

SEQ ID NO: 193125 - DNA, 120 bp, Artificial Sequence
  ENSG00000112782_51 (sequence is synthesized)
ccatccctggaagcagagttgctctggcccaggctctccatgagagtttggcttgaacattcattgtctggccccctcctagttctcatctcccaaagtcaagccaatgtgtgaagaaat

SEQ ID NO: 193126 - DNA, 120 bp, Artificial Sequence
  ENSG00000112782_52 (sequence is synthesized)
gaccagctcagcagccaaggcccagggtgcacaggtcttcgttgggagaggcatctgcaggcctttccttgctcactgggatccttgcctagcatagtgacgatgttcagccctggagac

SEQ ID NO: 193127 - DNA, 120 bp, Artificial Sequence
  ENSG00000112782_53 (sequence is synthesized)
aaacaagaaggggaacaccaacatcaatagaagtatatatttacaaattgcatttctgctgtattgaaactaacattctgccctttaaaatcctgaaaataaaatttcagtatgaaatga

SEQ ID NO: 193128 - DNA, 120 bp, Artificial Sequence
  ENSG00000112782_54 (sequence is synthesized)
cggcatgacagactcggcgacagctaacggggacgacagggaccccgagatcgagctctttgtgaaggaggaaggatggaggcgaggctgcggcggcgtttcccggtccgccggtgtaag

SEQ ID NO: 193129 - DNA, 120 bp, Artificial Sequence
  ENSG00000112782_55 (sequence is synthesized)
gagaaagaaacatttgatcagcccttggtgccgacgctgcagaagtagggaaacctgaggctgcgggagagtagcctccagggctgagcagaaacagtcgccaggacttgggggagggga

SEQ ID NO: 193130 - DNA, 120 bp, Artificial Sequence
  ENSG00000112782_56 (sequence is synthesized)
gccaagacctttcacaaagggggaaaactctctcagtgcaaagtttccctagaaatatgcagatcgctgagaagggaagagtcactggtgcctgtcaggggcctcctggcagaatttaaa

SEQ ID NO: 193131 - DNA, 120 bp, Artificial Sequence
  ENSG00000112782_57 (sequence is synthesized)
aggcataaatattccctggaattgggaaaatgttattttgcccaaaagatccttctctacaagctaattaaatagatgtttgcaaaaagtatgagatctacataaaccttgataacaatc

SEQ ID NO: 193132 - DNA, 120 bp, Artificial Sequence
  ENSG00000112782_58 (sequence is synthesized)
ttctttttgttgaaaaaaagggggcatggagtagaggaagaagcaagcagaagaaatggggagaagctagagaaagaagaaaaaaatgggattctttctactgaaatttctaaatgtgga

SEQ ID NO: 193133 - DNA, 120 bp, Artificial Sequence
  ENSG00000112782_59 (sequence is synthesized)
actcattgtctgtactggctttgaggcagaaaaaaaaacctaagagtttaaatatttgttgaagtctggatttctccctgcacccgtccccccattccctctagtaaaattaaagctgaa

SEQ ID NO: 193134 - DNA, 120 bp, Artificial Sequence
  ENSG00000112782_60 (sequence is synthesized)
gctagcagttcatgtctagctcttgaaatgtcaccggcaacactgctattattctgattttctgggcaacgcccgtcggttccctgctgcagttcaattaaactaactctgcctctctca

SEQ ID NO: 193135 - DNA, 120 bp, Artificial Sequence
  ENSG00000112782_61 (sequence is synthesized)
cacacagcccgtgtgacagcactggcccctagtacaggcagagttgaaaagtgatgtgatgggtcatggttgcccctctactcagagaaaactccttcttgacctcatcacggtcgctga

SEQ ID NO: 193136 - DNA, 120 bp, Artificial Sequence
  ENSG00000112782_62 (sequence is synthesized)
aagtactaagaattatatctgaaatcaagcactggtagcagaacacaaatatgttaccaaattagttggaagaggttaggagcttgtaaggaagaccatagcagttgaaaacaaagcaag

SEQ ID NO: 193137 - DNA, 120 bp, Artificial Sequence
  ENSG00000112782_63 (sequence is synthesized)
gcacatttccattgtacgtcccaggagtagtttgaatggtttaaggaccagctatgtgtgtgcttgcataagcgtatgtgccctgggtattctgcagtgtgtggggagctggcagtgtga

SEQ ID NO: 193138 - DNA, 120 bp, Artificial Sequence
  ENSG00000112782_64 (sequence is synthesized)
gtcaagacccaccttctcacttcctccagcaacttcctaagatatagtatgaggcccacaacagttgcttatgttcataagcaataagagctaggatttcaacccaaagactgccatcaa

SEQ ID NO: 193139 - DNA, 120 bp, Artificial Sequence
  ENSG00000112782_65 (sequence is synthesized)
gaatcccagcacttctagctgcacaactttacccaagaggcttattctttctgagcctctggctctgcatctgtaaaatggactttacattcagtttctttatctggcaataagctcttg

SEQ ID NO: 193140 - DNA, 120 bp, Artificial Sequence
  ENSG00000112782_66 (sequence is synthesized)
aagagctcgttgattcctctgcaaggtggtgcagcatcctctgtcccttcattcatttcagatctactcaggtctccctgtaaacagatctctcggatcaataagcatgaatgacgaaga

SEQ ID NO: 193141 - DNA, 120 bp, Artificial Sequence
  ENSG00000112782_67 (sequence is synthesized)
ctacagcaccatctatgacacaatccaaaatgagaggacgtatgaggttccagaccagccagaagaaaatgaaagtccccattatgatgatgtccatgagtacttaaggccagaaaatga

SEQ ID NO: 193142 - DNA, 120 bp, Artificial Sequence
  ENSG00000112782_68 (sequence is synthesized)
tttatatgccactcagctgaatacccatgagtatgattttgtgtcagtctataccattaagggtgaagagaccagcttggcctctgtccagtcagaagacagaggctacctcctgcctga

SEQ ID NO: 193143 - DNA, 120 bp, Artificial Sequence
  ENSG00000112782_69 (sequence is synthesized)
tgagatatactctgaactccaggaggctcatccaggtgagccccaggaggacaggggcatctcaatggaagggttatattcatcaacccaggaccagcaactctgcgcagcagaactcca

SEQ ID NO: 193144 - DNA, 120 bp, Artificial Sequence
  ENSG00000112782_70 (sequence is synthesized)
ggagaatgggagtgtgatgaaggaagatctgccttctccttcaagcttcaccattcagcacagtaaggccttctctaccaccaagtattcctgctattctgatgctgaaggtttggaaga

SEQ ID NO: 193145 - DNA, 120 bp, Artificial Sequence
  ENSG00000112782_71 (sequence is synthesized)
tttaaaatataaattatccagctgatgtttgaatttgtcttactttcctggccacctcgttgtcctattttataagctggggagttaactagcttaacaaaagatgcttagcttttgtaa

SEQ ID NO: 193146 - DNA, 120 bp, Artificial Sequence
  ENSG00000112782_72 (sequence is synthesized)
aagaacaagtgtttcattttacaaagacactccaaatgatagttacttgattttctcgagacctttaactatggtgatgaataacaggacttgctttcaagccttaataaatgtaaaatg

SEQ ID NO: 193147 - DNA, 120 bp, Artificial Sequence
  ENSG00000112782_73 (sequence is synthesized)
ccttttaatgaagatacagctgagtgttttcctcatgaatctgaaccaattaccaatttgtgttccagtcttgattggtattgactgattcaaataaagttggtttattttcaaatatta

SEQ ID NO: 193148 - DNA, 120 bp, Artificial Sequence
  ENSG00000112782_74 (sequence is synthesized)
ccacctgttggtcaagaacctggaccctgaagtcaggtaataaggacccaaggtcaccctctgctgcttgttggctgtgtggcctccttgagcttcagttttcatttataaaataggcat

SEQ ID NO: 193149 - DNA, 120 bp, Artificial Sequence
  ENSG00000112782_75 (sequence is synthesized)
atattgcttacttcaagtgttggtggaagagtaaatacagcgtgaaagtgcttggcatattgtgggggcttaatatgtgtaatagtcgcaattatcgttgttgtatacagtcatatcact

SEQ ID NO: 193150 - DNA, 120 bp, Artificial Sequence
  ENSG00000112782_76 (sequence is synthesized)
ccaaaggcctcttcctcataggatttccctggctacacccctacagctctattaaatgtgccctcatatgcattttttctttgtgcacagacccaccttctcacttcctccagcaacttc

SEQ ID NO: 193151 - DNA, 120 bp, Artificial Sequence
  ENSG00000112782_77 (sequence is synthesized)
ctaaggtgagcccacattattttcctcatctatcaaatgaagaggtggaggttgcaagaagtgatgtcactttcttgctatcattgcacttactaaccatttgcagcatgtagtgtcatc

SEQ ID NO: 193152 - DNA, 120 bp, Artificial Sequence
  ENSG00000112782_78 (sequence is synthesized)
ctctcctatataacaaaccctgggaatctgagagttggaaaggacatttagaggtcatccaaaacaatctcccacttcaacctggaccactttctgctgtttctgtgacaggcttctgtg

SEQ ID NO: 193153 - DNA, 120 bp, Artificial Sequence
  ENSG00000112782_79 (sequence is synthesized)
aagctgtgactgcagcctctgagaacgaggagccctctgcttaatgagccagccctaccatgttagatagctctgattattaaatcattgttctttacaatgagcccaagcatgcctccc

SEQ ID NO: 193154 - DNA, 120 bp, Artificial Sequence
  ENSG00000112782_80 (sequence is synthesized)
tgctatccattttttctctagagtaacagagaacagctttgcttgccttcacctcatttgaagacagtagttgtatccccctaagctctgtcaatgagcacttcttcccccattctttcc

SEQ ID NO: 193155 - DNA, 120 bp, Artificial Sequence
  ENSG00000112782_81 (sequence is synthesized)
tgaccctcgtcagcctagtatcagatagccatactgtgctctattttacgcatgcttatatcttactgtctcagccagacagcaaactctgtgaggaaaggaactttttaaagtgtgatg

SEQ ID NO: 193156 - DNA, 120 bp, Artificial Sequence
  ENSG00000112782_82 (sequence is synthesized)
gcctctggctctgcatctgtaaaatggactttacattcagtttctttatctggcaataagaaaggctttatagctactcccagggatgcataaagcacggcaaaccaacaaaggccaaga

SEQ ID NO: 193157 - DNA, 120 bp, Artificial Sequence
  ENSG00000112782_83 (sequence is synthesized)
caaatggagccctgggcccgaatcttcaaattgctcctgtcttctccttctaagaggtgccacctgcagtgggtcatgctcctggctgatgctgctagaaaaagaactcatctgtatcac

SEQ ID NO: 193158 - DNA, 120 bp, Artificial Sequence
  ENSG00000112787_0 (sequence is synthesized)
ctggccgaggaccctcccccggtcctccccgccccttccccgtcccttccacgctcgccgagggcaggacttcggttccgcgagaccggaggcccctcgtcctcctcggaagccgcccgc

SEQ ID NO: 193159 - DNA, 120 bp, Artificial Sequence
  ENSG00000112787_1 (sequence is synthesized)
cagtcccgcagaggagggcggcgctgcccccgcctcccgcttggagagcgccgcccgcaggtgcccacggaggggccgcggcatcccagcgccctcccaggaaggagccgagcggatcac

SEQ ID NO: 193160 - DNA, 120 bp, Artificial Sequence
  ENSG00000112787_2 (sequence is synthesized)
gaaggagccgagcggatcaccgccggctgcagcggaggtcggggcgccggggaggggcgcggctagggggcgaggtcgaagggcgggcacctgcgggtggggcggggcctgaattagcgg

SEQ ID NO: 193161 - DNA, 80 bp, Artificial Sequence
  ENSG00000112787_3 (sequence is synthesized)
gtgagcgggtcggggagggggcggagcctgcggggggcggggcctgcgtgaatggggcggggaggggccggagccttgtg

SEQ ID NO: 193162 - DNA, 120 bp, Artificial Sequence
  ENSG00000112787_4 (sequence is synthesized)
gggcggagccttatgagcggggcggggcaggggcgtggtcggggcggggcgcgcgggcgcccgcggcggccctcacttcctctggcgagcgcagccgggcggaagtgcgtcagttgttat

SEQ ID NO: 193163 - DNA, 120 bp, Artificial Sequence
  ENSG00000112787_5 (sequence is synthesized)
ttcctctggcgagcgcagccgggcggaagtgcgtcagttgttatctgttcggggcgccgccgccgcctcacgagcccggtgcccaggagcccggccgcctcccgcctgccgcctgccgcg

SEQ ID NO: 193164 - DNA, 80 bp, Artificial Sequence
  ENSG00000112787_6 (sequence is synthesized)
cgcggcgcacactcagcccggcggcgccgcgtagccgagggagcccgcctgctgcgagccaggcgcggggcgtcaaggtc

SEQ ID NO: 193165 - DNA, 80 bp, Artificial Sequence
  ENSG00000112787_7 (sequence is synthesized)
ctgctgcgagccaggcgcggggcgtcaaggtcaccggcccgacggggcgcacgcgcggccatggaggccaaggtccgccc

SEQ ID NO: 193166 - DNA, 80 bp, Artificial Sequence
  ENSG00000112787_8 (sequence is synthesized)
cgggaggccgcccgcgacgcccgcgcccagagtccgtcgtcgggcgacgagcccgagcccagccccggcaaggagaacgc

SEQ ID NO: 193167 - DNA, 120 bp, Artificial Sequence
  ENSG00000112787_9 (sequence is synthesized)
ccccgcaccgcgcgtcccccgcgccgccgccgccgcgagtccagctcgcaggaggaggaggtcatcgacggcttcgccatcgccagcttcagcaccctggaggccctggagaaggatatg

SEQ ID NO: 193168 - DNA, 120 bp, Artificial Sequence
  ENSG00000112787_10 (sequence is synthesized)
gccctgaagccacatgagcggaaggagaagtgggagcgtcgtctcatcaagaagccccgggagtcggaaacctgcccccctgcggagcccagtgagaacaggcggcccctggaggcaggc

SEQ ID NO: 193169 - DNA, 120 bp, Artificial Sequence
  ENSG00000112787_11 (sequence is synthesized)
agccccgggcaggacctcgaacccgcctgcgatggggcgagaaaggtcccactgcagccctccaagcagatgaaggtcaccgtgtccaaagggggcgaccgggacagtgacgacgacagc

SEQ ID NO: 193170 - DNA, 120 bp, Artificial Sequence
  ENSG00000112787_12 (sequence is synthesized)
gtcctcgaagccaccagctcccgggacccgctcagcgatagctctgcgcatgcggtctcggggagaggctactcttgtgacagcgagagcggcccggacgacaaggcatccgtgggctct

SEQ ID NO: 193171 - DNA, 120 bp, Artificial Sequence
  ENSG00000112787_13 (sequence is synthesized)
gagaagctctttgcgccgggaaccgataaaggcccagcgcttgagaagtcggaggccaaggccgggccggtgcccaaggtgtcaggcctggagcgcagccgcgagctcagcgccgagagc

SEQ ID NO: 193172 - DNA, 120 bp, Artificial Sequence
  ENSG00000112787_14 (sequence is synthesized)
gcgcagccgcgagctcagcgccgagagcttcctgcccactgccagccccgcgccccatgccgcgccctgcccggggcccccgcccggctcccgcgccaatcccttggtgaagaaggaacc

SEQ ID NO: 193173 - DNA, 120 bp, Artificial Sequence
  ENSG00000112787_15 (sequence is synthesized)
ccgccacccccgcagccccgcggcctgctcccgacacacgtgcctgcatccctgggcgccttcgcgggccacagccaggcggcagccaacggcctgcacggcctcagcaggagcagcagc

SEQ ID NO: 193174 - DNA, 120 bp, Artificial Sequence
  ENSG00000112787_16 (sequence is synthesized)
gcccccctgggcctggggaagcacgtgtcgctgtcgccacacgggccgggcccccacctgtctacctcacacctggcgctccggtcccaggcgcagcaccagctccacgcggccatgttt

SEQ ID NO: 193175 - DNA, 120 bp, Artificial Sequence
  ENSG00000112787_17 (sequence is synthesized)
gccgcacccccgacactgcccccgcccccggcgctgccggccagcagcctggtcctcccaggacacccggccgatcacgagctgctcaggcaagagctgaacacgcggtttctggtgcag

SEQ ID NO: 193176 - DNA, 120 bp, Artificial Sequence
  ENSG00000112787_18 (sequence is synthesized)
agcgccgagcggcctggcgcctccctgggcccgggggctctgctgcgggcggagttccatcagcaccagcacacacaccagcacacgcaccaacacacacaccagcaccaacacacattc

SEQ ID NO: 193177 - DNA, 120 bp, Artificial Sequence
  ENSG00000112787_19 (sequence is synthesized)
gcccccttccccgcagggctgcccccgacgccgcccgccgcacccccgccgtttgacaagtatgcgcccaagctggacagcccctacttccgacattccagcgtgagtttcttcccgtcc

SEQ ID NO: 193178 - DNA, 120 bp, Artificial Sequence
  ENSG00000112787_20 (sequence is synthesized)
ttccctcctgccatcccgggactgcccaccctgctcccacaccccggccccttcgggtccctgcagggcgcttttcagcctaaggtgtctgacccgtaccgggcggtggtcaaggtgagc

SEQ ID NO: 193179 - DNA, 120 bp, Artificial Sequence
  ENSG00000112787_21 (sequence is synthesized)
acgtgttgggaaggcccgtggcaagggaggactctggtgcccccggggcggcctcggggggcccgtgacagcaggagtctgcagaaaacatgggtgggggtggcaccagccccactgagc

SEQ ID NO: 193180 - DNA, 120 bp, Artificial Sequence
  ENSG00000112787_22 (sequence is synthesized)
cagatcgcctggcagatctaccgtcaccagcagaagataaaggagatgcagctggacccccacaagctggaggtgggtgcaaagctggacctgttcggcagaccccctgccccgggcgtg

SEQ ID NO: 193181 - DNA, 120 bp, Artificial Sequence
  ENSG00000112787_23 (sequence is synthesized)
tttgcaggcttccactacccacaggacctggcccggcccctcttccccagcacaggtgccgcccatcctgcctccaacccatttggaccctcagcccatcctggcagcttcctgcccact

SEQ ID NO: 193182 - DNA, 120 bp, Artificial Sequence
  ENSG00000112787_24 (sequence is synthesized)
ggccccctgacagaccctttcagcagaccgagcacctttgggggcctgggcagcctgagcagccacgcctttgggggcctgggcagccatgcactggctcccggtggcagcatctttgcc

SEQ ID NO: 193183 - DNA, 120 bp, Artificial Sequence
  ENSG00000112787_25 (sequence is synthesized)
cccaaggagggctcctccgtgcacggcctgcccagcccccatgaggcctggaaccgactgcaccgggcaccgccctccttcccggctccgcccccgtggcccaagtccgtggacgcggag

SEQ ID NO: 193184 - DNA, 120 bp, Artificial Sequence
  ENSG00000112787_26 (sequence is synthesized)
cgggtgtcagccctgaccaaccatgaccgagagccggacaatggcaaggaggagcaggaacgggacctcctggagaagacgcgcctgctgagccgggcctcgcccgccacccccgctggc

SEQ ID NO: 193185 - DNA, 120 bp, Artificial Sequence
  ENSG00000112787_27 (sequence is synthesized)
caccccgtcagcggcctcctgctccgggcccagagcgagctgggccggtccggggcccccgcggagcgcgaggccgaacctcgggtcaaggagagccgctccccggccaaggaggaggcc

SEQ ID NO: 193186 - DNA, 120 bp, Artificial Sequence
  ENSG00000112787_28 (sequence is synthesized)
gccaagatgcccgcgcgcgcatccccgccccacagcaaggcggcccctggagacgtgaaggtcaaggaggagcgcggggaggacgaggcctccgagcccccggcgggcggcctgcacccc

SEQ ID NO: 193187 - DNA, 80 bp, Artificial Sequence
  ENSG00000112787_29 (sequence is synthesized)
gcgcccctgcagctcggcctgggccgcgagcgcctgggcgcgccgggcttcgcgtgggagcctttccgcggcctggagct

SEQ ID NO: 193188 - DNA, 80 bp, Artificial Sequence
  ENSG00000112787_30 (sequence is synthesized)
tccgccgccctcttggagcccccggagcgcccctaccgcgaccgcgagccccacggctacagccccgagcgcctgcgcgg

SEQ ID NO: 193189 - DNA, 80 bp, Artificial Sequence
  ENSG00000112787_31 (sequence is synthesized)
gcccccgccttggacggcgcgctgctgccctcgctgggagccctgcacttcccgcgcctctcgcccgccgcgctgcacaa

SEQ ID NO: 193190 - DNA, 80 bp, Artificial Sequence
  ENSG00000112787_32 (sequence is synthesized)
ccccgggccgccgcggagccggactactccgctggggggcctcgggccgggcgaggcgcgcgactactccccgtcccgaa

SEQ ID NO: 193191 - DNA, 120 bp, Artificial Sequence
  ENSG00000112787_33 (sequence is synthesized)
cgaaatcccccggaggtggaggcgcggtagccccggggccgcagacgcctctccgagcggagcgcaccgctgtccgtctctccatcagttcctagaactcaagcacagctcccgccgatc

SEQ ID NO: 193192 - DNA, 120 bp, Artificial Sequence
  ENSG00000112787_34 (sequence is synthesized)
ctggggcggcgccgcctctccacccgcagcctgcggaggcggggacttgggtgtcggcttttctgagggtgatcttttgttttccgagtttgggattcggctgttgggaaaaaaaaatcg

SEQ ID NO: 193193 - DNA, 120 bp, Artificial Sequence
  ENSG00000112787_35 (sequence is synthesized)
cgtttgtaccttttccccccacagatgagaagtgtttgtaatggatttgtatttttcttaattttatgctctttagacgtttaaaagaaccaaaaaagaaacttttgcttcttcgttttc

SEQ ID NO: 193194 - DNA, 120 bp, Artificial Sequence
  ENSG00000112787_36 (sequence is synthesized)
ggttgggatttgcagtttaatggcctcagatccttctccagatccccagggtttctttgtcttatttatggagaaaaaccggtcactttgtccagcgcactgtgaggcccccactcaggc

SEQ ID NO: 193195 - DNA, 120 bp, Artificial Sequence
  ENSG00000112787_37 (sequence is synthesized)
cagccctggcccccccttggtacttggaaccgaagttacagattatattaaaataataatgtacaaaactttgtttttttgccttattatgcagaagtgtaatttcttttttggtttgtt

SEQ ID NO: 193196 - DNA, 120 bp, Artificial Sequence
  ENSG00000112787_38 (sequence is synthesized)
tttttaaaagcaaacgaaacgtgtaaatagtctgttgatataaatatatgacgttactaaattcttaatctagatagactttataaaaaccgtttccagaaacccctctggttgtttgtc

SEQ ID NO: 193197 - DNA, 120 bp, Artificial Sequence
  ENSG00000112787_39 (sequence is synthesized)
taacatggtcacaaaaacccaggcgctgctggctgtaaacattatcagaagtttaatggcagcaactttccttcaactatgcaagcgcttcccggcggctctgctggttgggggaggaag

SEQ ID NO: 193198 - DNA, 120 bp, Artificial Sequence
  ENSG00000112787_40 (sequence is synthesized)
gttccgccagcgacctcccagcccctgggtccgtggaggggttgggtcccccagcagagcccctgggccagcagaacagcactcctgggcggctcctgtgggcttcaggactggccggct

SEQ ID NO: 193199 - DNA, 120 bp, Artificial Sequence
  ENSG00000112787_41 (sequence is synthesized)
ccagccgcaagggcgatgctgtggacgtttgtgtggatggtgcagtgttcttggaatctgtagaccagatcggtggaggtatagaagtgcaagagtctaaaggctgattttacacacaca

SEQ ID NO: 193200 - DNA, 120 bp, Artificial Sequence
  ENSG00000112787_42 (sequence is synthesized)
cacacacacacacacacacaaaatcactgctgtgtgttttcttccgcctgaggcatcagcgtcacctcggtgtggtcgtcgcctcccaggcccttggcctggcctcctctcagtttgggt

SEQ ID NO: 193201 - DNA, 120 bp, Artificial Sequence
  ENSG00000112787_43 (sequence is synthesized)
gggttttgccctcacccacatgagcccccccatgccctgccccccttgcggccttttgtgttccccgatgtctgggctgtgtccctgccgggattcccagccttcggggtcagccgtcga

SEQ ID NO: 193202 - DNA, 120 bp, Artificial Sequence
  ENSG00000112787_44 (sequence is synthesized)
gccacttgctttgctcagttctgtgtttcagccacatttccacggtggaccctgtttgttttaaatattctgttcccatgtcaatcagtgacgataaatacagccttgatttggatgaaa

SEQ ID NO: 193203 - DNA, 120 bp, Artificial Sequence
  ENSG00000112787_45 (sequence is synthesized)
tccctgcagggcgcttttcagcctaagacttcaagccccattgaggtggcccgccgggctggtgcggttcacacactcctgcagaaagcgcctggggtgtctgacccgtaccgggcggtg

SEQ ID NO: 193204 - DNA, 120 bp, Artificial Sequence
  ENSG00000112787_46 (sequence is synthesized)
cggcaccaccatggctcttgtctctgtcgtctgcccttaccggagggacagccaagctgtgccctccccgagaggattctgtcctttcgtggacgcttctccctggccggctggctcctc

SEQ ID NO: 193205 - DNA, 120 bp, Artificial Sequence
  ENSG00000112787_47 (sequence is synthesized)
aaaggtcccactgcagccctccaagcaggtgtgctccccagaaggggggccgctcccagccagccactgggaccagaacggcccggcccagcgccagcaacagctccagcccagccagtc

SEQ ID NO: 193206 - DNA, 120 bp, Artificial Sequence
  ENSG00000112787_48 (sequence is synthesized)
cagccagccccaggggtccctcccagccccgtcggcactcccggaccctgggcagccctgccagccctcccagcggccactcctgggtcagcgcagctggccccagcggtcacttctggg

SEQ ID NO: 193207 - DNA, 120 bp, Artificial Sequence
  ENSG00000112787_49 (sequence is synthesized)
cctgaaacagccctgccagccccggcggtcacttctgggccccggtcagccctgccggccccagcggctccttccatccccagatcagctctgccagccccagcggtcacgcccggccca

SEQ ID NO: 193208 - DNA, 120 bp, Artificial Sequence
  ENSG00000112787_50 (sequence is synthesized)
gccctgccggccgcattgggcactcccaggccccaggcagtgctgcaggcgcctgcggtccctgctgaccccgtgtcaccactgccggcgcctgcggtccctcctggccccacggtccct

SEQ ID NO: 193209 - DNA, 120 bp, Artificial Sequence
  ENSG00000112787_51 (sequence is synthesized)
cctggtcccctgcctctactgccggcgcctgcggttcctcctggccccaaggcaccgctgcaggcgcctgcggtccctgctgaccctgtggcaccgctgccgacccctgcggccgtgggc

SEQ ID NO: 193210 - DNA, 120 bp, Artificial Sequence
  ENSG00000112787_52 (sequence is synthesized)
cagcccgtgtcactgtggccagcccggtagggcatcctcaggacagcgcagccggcccctgtggtcgctgctagcccagtgccagcggtaccagcccccgcggccactcctcaccctccg

SEQ ID NO: 193211 - DNA, 120 bp, Artificial Sequence
  ENSG00000112787_53 (sequence is synthesized)
accacgccgacggcccgccagcttcctcccaggacagtgctgctgcccccggcgggccttcctagccccgtgtcagtacggccagccccgaaggtccctgctgggccagcccagccgccc

SEQ ID NO: 193212 - DNA, 120 bp, Artificial Sequence
  ENSG00000112787_54 (sequence is synthesized)
ccggcggtcgctgctgcgccccaggcagccccagcggttagtggaagccccagagcagcccggcccactcacgccttcactcctgggcccgggacggccgaggcagcagaagcagccgct

SEQ ID NO: 193213 - DNA, 120 bp, Artificial Sequence
  ENSG00000112787_55 (sequence is synthesized)
catgggcccggagcagccctgcccacccaagcggccgctcatgggcccagagcagccctgccagcccctgcggccgctcatgggccccaacaagccctgcaaaccccagccgttgctccc

SEQ ID NO: 193214 - DNA, 120 bp, Artificial Sequence
  ENSG00000112787_56 (sequence is synthesized)
cattcccgatcgcccttcactcctggggcagccgggcccaccctgccggcctctcctggggctcctgtgccagccgcggcggtccctattggatctggtgccggcccgtcagccccggct

SEQ ID NO: 193215 - DNA, 120 bp, Artificial Sequence
  ENSG00000112787_57 (sequence is synthesized)
tcctgtgcccccgggatggcccgtcaggccccatctgtgagccctggagcctgatgcctgcaggcacctccccatatgggttttccagcccactccagtgtgatctgcaccctggcaggg

SEQ ID NO: 193216 - DNA, 120 bp, Artificial Sequence
  ENSG00000112787_58 (sequence is synthesized)
ccccaagggccaaggccgcattgcccttcgggctggagatgctttgccggactagcctgaggccttgtctagacagggctgagctgtttgtcgttggaaattgaggctcggccagaggcg

SEQ ID NO: 193217 - DNA, 120 bp, Artificial Sequence
  ENSG00000112787_59 (sequence is synthesized)
ggagcccctacagtgccacgatcaggctgaggctcaccacaccaggaagagagatgaacccgcgtctgcctgccgccccgccatgctccctctccccccactggcgtcacagtgccccca

SEQ ID NO: 193218 - DNA, 120 bp, Artificial Sequence
  ENSG00000112787_60 (sequence is synthesized)
cccgcgttgctgcctgtggtgtgcgtgccctgggaggggaacacagcccctgagggcggggaccttgctgggggcccctcagcgtctttctgtgcctctgaattgccaatactgtccttg

SEQ ID NO: 193219 - DNA, 120 bp, Artificial Sequence
  ENSG00000112787_61 (sequence is synthesized)
catctctgagtctacgtgcacgcttgcccctggcgtgccacctgtgcggagcgcgtgagcctggtgtgtgcgtgctgtgtgtgcatgtgtgcgagagggtgtgagagtgagtggcgtgct

SEQ ID NO: 193220 - DNA, 120 bp, Artificial Sequence
  ENSG00000112787_62 (sequence is synthesized)
gggcatgaaggatctgtggggtgctgcagttcctgcagagtggcccagtggcgaatggtgaaggtgtgggtttcagtccaggccctccccctggtagtcaggaggtgctggtgtccacct

SEQ ID NO: 193221 - DNA, 120 bp, Artificial Sequence
  ENSG00000112787_63 (sequence is synthesized)
ccagggcccccaagctacagggggcacatgggcccatctggtgggtcaggacctgcaggggacccggaggctcccacccccacctctcaggactctgcctccaccacccccgtgggcatg

SEQ ID NO: 193222 - DNA, 120 bp, Artificial Sequence
  ENSG00000112787_64 (sequence is synthesized)
cactgaagggttgcctgcagggtctccaggcgagggggaccccacagggtgggcagcgccttctcccggcttccccacagtcccctgcagcgtcccgtctggctgttgacctacatgtgg

SEQ ID NO: 193223 - DNA, 120 bp, Artificial Sequence
  ENSG00000112787_65 (sequence is synthesized)
tcgggcacacctcacactacaaggctacccctgggcccatccctgccccttccacggcccccacctgtggtcaggtgttgccaccccctcaggacctggtctcaaggcagccccactcga

SEQ ID NO: 193224 - DNA, 120 bp, Artificial Sequence
  ENSG00000112787_66 (sequence is synthesized)
gtcttctggagtccaaggcacgccactcgcccaaaagggagggggtgtttgggggggctttgactgtctccagacctcaggggagctgggcaggctctaaccagtggtcctccagagagc

SEQ ID NO: 193225 - DNA, 120 bp, Artificial Sequence
  ENSG00000112787_67 (sequence is synthesized)
agcgttgaccacctggacccctgcgccacgtgacaggaggctctggtcctgcaggcctggtcttgcccagctgggctgcctcaggtgtcaggaaggggatgggtgtccctggctcccagg

SEQ ID NO: 193226 - DNA, 120 bp, Artificial Sequence
  ENSG00000112787_68 (sequence is synthesized)
ccaggcagctgctgacctccagcaccccgcacttgctcatgaggaccccacccccgcaggccctcccgggtcctgaccagcctctggtgcagcatctgctttggcctccgggccccctcg

SEQ ID NO: 193227 - DNA, 120 bp, Artificial Sequence
  ENSG00000112787_69 (sequence is synthesized)
ctccccacccacccgggccccttcctccggtgctcacctggggcctccatcccagaagcgcagggcttatttttctgattaaagaaaataaaaagtgccgtgccactattttttataaca

SEQ ID NO: 193228 - DNA, 120 bp, Artificial Sequence
  ENSG00000112787_70 (sequence is synthesized)
cccgtgttccccgccccggaggcccggtctgaggagggagttgctgggggctggagtcccctccactctctcgagttttattcggaaactggccagtttgtcagtaacccggtgtgtccc

SEQ ID NO: 193229 - DNA, 120 bp, Artificial Sequence
  ENSG00000112787_71 (sequence is synthesized)
cagcgcgacccagcagccagggcttcacgccccaggcctcagccaggcacacagactgcctgggggggccgagttcccaccccatgcaaggggacccttagaatggcagggccgccctgg

SEQ ID NO: 193230 - DNA, 120 bp, Artificial Sequence
  ENSG00000112787_72 (sequence is synthesized)
tctgagactgagttcagagccgtggggctggcgctctagaggagcctgggacggctggccgaagccgccagcctcaggaagcacaacgccgtcctgtcactgcccagcccggccaggtgg

SEQ ID NO: 193231 - DNA, 120 bp, Artificial Sequence
  ENSG00000112787_73 (sequence is synthesized)
gcggggcccggggcccagcaacggtgtcgtgtgtgcggggcctcaccctcctctccttcccttccagtttgacaagtatgcgcccaagctggacagcccctacttccgacattccagctt

SEQ ID NO: 193232 - DNA, 80 bp, Artificial Sequence
  ENSG00000112787_74 (sequence is synthesized)
gagcgcgcagagccggcgcggcggacatgcgcgtccccggcccgagctccggctgagcagggcacgcggggagaggggtc

SEQ ID NO: 193233 - DNA, 120 bp, Artificial Sequence
  ENSG00000112796_0 (sequence is synthesized)
aggtgctccgctccagagttgagcgcaggtgagctcctgcgcgttccgggggcgttcctccagtcaccctcccgccgttacccgcggcgcgcccgagggagtctcctccagaccctccct

SEQ ID NO: 193234 - DNA, 120 bp, Artificial Sequence
  ENSG00000112796_1 (sequence is synthesized)
cccgttgctccaaactaatacggactgaacggatcgctgcgaggattatcttacactgaactgatcaagtactttgaaaatgacttcgaaatttctcttggtgtccttcatacttgctgc

SEQ ID NO: 193235 - DNA, 120 bp, Artificial Sequence
  ENSG00000112796_2 (sequence is synthesized)
actgagtctttcaaccaccttttctctccaaccagaccagcaaaaggttctactagtttcttttgatggattccgttgggattacttatataaagttccaacgccccattttcattatat

SEQ ID NO: 193236 - DNA, 120 bp, Artificial Sequence
  ENSG00000112796_3 (sequence is synthesized)
tatgaaatatggtgttcacgtgaagcaagttactaatgtttttattacaaaaacctaccctaaccattatactttggtaactggcctctttgcagagaatcatgggattgttgcaaatga

SEQ ID NO: 193237 - DNA, 120 bp, Artificial Sequence
  ENSG00000112796_4 (sequence is synthesized)
tatgtttgatcctattcggaacaaatctttctccttggatcacatgaatatttatgattccaagttttgggaagaagcgacaccaatatggatcacaaaccagagggcaggacatactag

SEQ ID NO: 193238 - DNA, 120 bp, Artificial Sequence
  ENSG00000112796_5 (sequence is synthesized)
tggtgcagccatgtggcccggaacagatgtaaaaatacataagcgctttcctactcattacatgccttacaatgagtcagtttcatttgaagatagagttgccaaaattattgaatggtt

SEQ ID NO: 193239 - DNA, 120 bp, Artificial Sequence
  ENSG00000112796_6 (sequence is synthesized)
tacgtcaaaagagcccataaatcttggtcttctctattgggaagaccctgatgacatgggccaccatttgggacctgacagtccgctcatggggcctgtcatttcagatattgacaagaa

SEQ ID NO: 193240 - DNA, 120 bp, Artificial Sequence
  ENSG00000112796_7 (sequence is synthesized)
gttaggatatctcatacaaatgctgaaaaaggcaaagttgtggaacactctgaacctaatcatcacaagtgatcatggaatgacgcagtgctctgaggaaaggttaatagaacttgacca

SEQ ID NO: 193241 - DNA, 120 bp, Artificial Sequence
  ENSG00000112796_8 (sequence is synthesized)
gtacctggataaagaccactataccctgattgatcaatctccagtagcagccatcttgccaaaagaaggtaaatttgatgaagtctatgaagcactaactcacgctcatcctaatcttac

SEQ ID NO: 193242 - DNA, 120 bp, Artificial Sequence
  ENSG00000112796_9 (sequence is synthesized)
tgtttacaaaaaagaagacgttccagaaaggtggcattacaaatacaacagtcgaattcaaccaatcatagcagtggctgatgaagggtggcacattttacagaataagtcagatgactt

SEQ ID NO: 193243 - DNA, 120 bp, Artificial Sequence
  ENSG00000112796_10 (sequence is synthesized)
taatgcgttagcagatatgcatccaatatttttagcccatggtcctgccttcagaaagaatttctcaaaagaagccatgaactccacagatttgtacccactactatgccacctcctcaa

SEQ ID NO: 193244 - DNA, 120 bp, Artificial Sequence
  ENSG00000112796_11 (sequence is synthesized)
tatcaccgccatgccacacaatggatcattctggaatgtccaggatctgctcaattcagcaatgccaagggtggtcccttatacacagagtactatactcctccctggtagtgttaaacc

SEQ ID NO: 193245 - DNA, 120 bp, Artificial Sequence
  ENSG00000112796_12 (sequence is synthesized)
agcagaatatgaccaagaggggtcatacccttatttcataggggtctctcttggcagcattatagtgattgtattttttgtaattttcattaagcatttaattcacagtcaaatacctgc

SEQ ID NO: 193246 - DNA, 120 bp, Artificial Sequence
  ENSG00000112796_13 (sequence is synthesized)
cttacaagatatgcatgctgaaatagctcaaccattattacaagcctaatgttactttgaagtggatttgcatattgaagtggagattccataattatgtcagtgtttaaaggtttcaaa

SEQ ID NO: 193247 - DNA, 120 bp, Artificial Sequence
  ENSG00000112796_14 (sequence is synthesized)
gattccataattatgtcagtgtttaaaggtttcaaattctgggaaaccagttccaaacatttgcagaaaccattaagcagttacatatttaggtatacacacacacacacacacacatac

SEQ ID NO: 193248 - DNA, 120 bp, Artificial Sequence
  ENSG00000112796_15 (sequence is synthesized)
ataaagatgtgagagtatgtctccattgttcactgtagcatagggatagataagatcctgctttatttggacttggcgcagataatgtatatatttagcaactttgcactatgtaaagta

SEQ ID NO: 193249 - DNA, 120 bp, Artificial Sequence
  ENSG00000112796_16 (sequence is synthesized)
ccttatgtattgcactttaaatttctctcctgatgggtactttaatttgaaatgcactttatgcacagttatgtcttataacttgattgaaaatgacaactttttgcacccatgtcacag

SEQ ID NO: 193250 - DNA, 120 bp, Artificial Sequence
  ENSG00000112796_17 (sequence is synthesized)
aatacttgttacgcattgttcaaactgaaggaaatttctaataatcccgaataatgaacgtagaaatctatctccataaattgagagaagaagaaggtgataagtgttgaaaattaaatg

SEQ ID NO: 193251 - DNA, 120 bp, Artificial Sequence
  ENSG00000112796_18 (sequence is synthesized)
tgataacctttgaaccttgaattttggagatgtattcccaacagcagaatgcaactgtgggcatttcttgtcttatttctttccagagaacgtggttttcatttatttttccctcaaaag

SEQ ID NO: 193252 - DNA, 120 bp, Artificial Sequence
  ENSG00000112796_19 (sequence is synthesized)
agagtcaaatactgacagattcgttctaaatatattgtttctgtcataaaattattgtgatttcctgatgagtcatattactgtgattttcataataatgaagacaccatgaatatactt

SEQ ID NO: 193253 - DNA, 120 bp, Artificial Sequence
  ENSG00000112796_20 (sequence is synthesized)
tttttctatatagttcagcaatggcctgaatagaagcaaccaggcaccatctcagcaatgttttctcttgtttgtaattatttgctcctttgaaaattaaatcactattaattacattaa

SEQ ID NO: 193254 - DNA, 120 bp, Artificial Sequence
  ENSG00000112796_21 (sequence is synthesized)
tctggtagcgcataataacagagcacaagcatcttttagatttgagcatttgaagattcaaagttgcgaaagagcacaaaccatattaggtaaaatattggccactcgatccttgaaaag

SEQ ID NO: 193255 - DNA, 120 bp, Artificial Sequence
  ENSG00000112796_22 (sequence is synthesized)
aactgtgtggagcctggaaaaaaaaattaggaccacatgtgagatgtttacaagacacccagaacagtggtaaagtgtgcatactagaaaaagcagcaaaataactctttgtggtaacag

SEQ ID NO: 193256 - DNA, 120 bp, Artificial Sequence
  ENSG00000112796_23 (sequence is synthesized)
gtatcaaaacacgggagccgagatgatatagctctgtttcaagaaatatgtgaatacccacctaccaggtgctcagtggaatcaaagatgaatccaagttcacaaatagacttctacttc

SEQ ID NO: 193257 - DNA, 120 bp, Artificial Sequence
  ENSG00000112796_24 (sequence is synthesized)
caaggtagtacttttgacctgcctggtcatctcagtcttttccattccaacaacctaaggctgtgctttagatttctaagtaatcaagaagtttgggagaggcatagtattacatgtggc

SEQ ID NO: 193258 - DNA, 120 bp, Artificial Sequence
  ENSG00000112796_25 (sequence is synthesized)
ttcttagaggaaagaggaagccctgaaaagaaagactttccttgaagaaaatagcattttacagacacatggatagtactgtgatttcatgtatatatatgtaccaattggctaatgagt

SEQ ID NO: 193259 - DNA, 120 bp, Artificial Sequence
  ENSG00000112796_26 (sequence is synthesized)
aggtaaaattgtattactattccagaaagaaaggacaaatgggatgtgaagaactaaagtgacatagttaaaaatttaaccaaatttaagtgcttcctaaaatttggtgaatgtcttatt

SEQ ID NO: 193260 - DNA, 120 bp, Artificial Sequence
  ENSG00000112796_27 (sequence is synthesized)
ttttaaaatgataataccaataaggaatgttggcacataattcccatttcattataaaacctcttaatagaatagaatcaaataattggaaatggcctatagattaaaaagctgagaaag

SEQ ID NO: 193261 - DNA, 120 bp, Artificial Sequence
  ENSG00000112796_28 (sequence is synthesized)
tatatggtaggtagcaaactccccagaagtatgaactctggattagacatctcagaatacatgagcactcatgttggcttgctttgtagctatgaacttaccctgtattattgaaatgtc

SEQ ID NO: 193262 - DNA, 120 bp, Artificial Sequence
  ENSG00000112796_29 (sequence is synthesized)
agcataatgactggaaggtgaaattggtccattttagagcattactattatgctatctgtccatttaaattaataattgcattaaattcattttagaaggtgctattacattagtagtaa

SEQ ID NO: 193263 - DNA, 120 bp, Artificial Sequence
  ENSG00000112796_30 (sequence is synthesized)
gaaagtaaattcatatataaatatttgattatcagatggtttacttacagatacttattttcctgtaaaataggagagtttacctgaagaaaaataaaacttttaacttttctgggaaaa

SEQ ID NO: 193264 - DNA, 120 bp, Artificial Sequence
  ENSG00000112796_31 (sequence is synthesized)
atacagcagtttattgattgatatttttactgtctgttacttgaatattaaggaactacaatgttttcgtacttatctaaaaatgctttttttagatattggtccttgatatgtaaaaga

SEQ ID NO: 193265 - DNA, 120 bp, Artificial Sequence
  ENSG00000112796_32 (sequence is synthesized)
tatatacaaaatgtccctttaggtagaattgggtttctatcatgtttattgattaaaagaaaagcagatgcctgaacaatggcatttgtagtgtgctcgtgactcatagtggcagatgta

SEQ ID NO: 193266 - DNA, 79 bp, Artificial Sequence
  ENSG00000112796_33 (sequence is synthesized)
ggcatttgtagtgtgctcgtgactcatagtggcagatgtatacagatacatggtttctggttcttaaaacggtttttgg

SEQ ID NO: 193267 - DNA, 120 bp, Artificial Sequence
  ENSG00000112799_0 (sequence is synthesized)
atacaggcccccaccatgaagggtttcacagccactctcttcctctggactctgatttttcccagctgcagtggaggcggcggtgggaaagcctggcccacacacgtggtctgtagcgac

SEQ ID NO: 193268 - DNA, 120 bp, Artificial Sequence
  ENSG00000112799_1 (sequence is synthesized)
agcggcttggaagtgctctaccagagttgcgatccattacaagattttggcttttctgttgaaaagtgttccaagcaattaaaatcaaatatcaacattagatttggaattattctgaga

SEQ ID NO: 193269 - DNA, 120 bp, Artificial Sequence
  ENSG00000112799_2 (sequence is synthesized)
gaggacatcaaagagctttttcttgacctagctctcatgtctcaaggctcatctgttttgaatttctcctatcccatctgtgaggcggctctgcccaagttttctttctgtggaagaagg

SEQ ID NO: 193270 - DNA, 120 bp, Artificial Sequence
  ENSG00000112799_3 (sequence is synthesized)
atgctgggcctgtcaataatcctgaatttactattcctcagggagaataccaggttttgctggaactgtacactgaaaaacggtccaccgtggcctgtgccaatgctactatcatgtgct

SEQ ID NO: 193271 - DNA, 120 bp, Artificial Sequence
  ENSG00000112799_4 (sequence is synthesized)
cctgactgtggcctgtagcaaaaatcacagccagctgcatctcgtgggacctccaagctcctctgactgaacctactgtgggaggagaagcagctgatgacagagagaggctctacaaag

SEQ ID NO: 193272 - DNA, 120 bp, Artificial Sequence
  ENSG00000112799_5 (sequence is synthesized)
aagcgcccccaaagagtgcagctgctaattttagtcccaggaccagacatccccagactccacagatgtaatgaagtccccgaatgtatctgtttctaaggagcctcttggcagtcctta

SEQ ID NO: 193273 - DNA, 120 bp, Artificial Sequence
  ENSG00000112799_6 (sequence is synthesized)
agcagtcttgagggtccatcctttttctctaattggtcgcctcccaccagactcacctgcttttcaactttttaggagtgcttcctcacagttaccaagaataaagaaagctggccacca

SEQ ID NO: 193274 - DNA, 120 bp, Artificial Sequence
  ENSG00000112799_7 (sequence is synthesized)
tccagagaccacatctgcagctcccaaaacaaggtctgttctgcagctggacaattcactgctaaaatcccaaacctaagagcagagccaaagccagaggagaggaaagtgacaataggg

SEQ ID NO: 193275 - DNA, 120 bp, Artificial Sequence
  ENSG00000112799_8 (sequence is synthesized)
ccaaagcctcattccagattccaaatgtcattctgtagccctcgtgctatcaactgctgcctgctggctgcagccaggtccctgggtccatacacagcctgcatcaagagcctgcagaga

SEQ ID NO: 193276 - DNA, 120 bp, Artificial Sequence
  ENSG00000112812_0 (sequence is synthesized)
aaaggtcctcctgggggagaacagagtcccgaacaccatggccgtctggcttgcccagtggctgggccctctgctcttggtttccctctggggactcttggctccagcctcccttcttag

SEQ ID NO: 193277 - DNA, 120 bp, Artificial Sequence
  ENSG00000112812_1 (sequence is synthesized)
gcgcctgggtgagcacattcagcagtttcaggagagctctgcccagggcctgggcctgagcctggggccaggtgctgcagccctcccaaaagtggggtggctggagcaactgctggaccc

SEQ ID NO: 193278 - DNA, 120 bp, Artificial Sequence
  ENSG00000112812_2 (sequence is synthesized)
cttcaacgtgtccgacagacgatccttcctacagcgttactgggtgaatgaccaacattgggttggccaggatggacccatattcctgcatctagggggtgagggcagccttgggcctgg

SEQ ID NO: 193279 - DNA, 120 bp, Artificial Sequence
  ENSG00000112812_3 (sequence is synthesized)
ctcagtgatgagaggccatcccgcagccttggccccagcctggggcgccctggtgataagcctggaacacagattttatggcctgagtatacctgctggaggcctggaaatggcccagct

SEQ ID NO: 193280 - DNA, 120 bp, Artificial Sequence
  ENSG00000112812_4 (sequence is synthesized)
ccgcttcttgtccagccgccttgcgctggctgatgtggtctctgcccgcctggcactttcccgcctctttaacatctcctcctccagcccctggatctgcttcggaggctcctatgccgg

SEQ ID NO: 193281 - DNA, 120 bp, Artificial Sequence
  ENSG00000112812_5 (sequence is synthesized)
ctccttggccgcctgggcccggctgaagttcccccatctcattttcgcgtcggtcgcctcctccgccccggtgcgggccgtgctggatttctccgagtataatgacgtggtatcccgaag

SEQ ID NO: 193282 - DNA, 120 bp, Artificial Sequence
  ENSG00000112812_6 (sequence is synthesized)
cctaatgagcaccgcgatcggcgggtccctggagtgccgggcggcggtgtccgtcgccttcgctgaagtggagcggcggctgcgctcgggtggggcggctcaagcagcattgcggacgga

SEQ ID NO: 193283 - DNA, 120 bp, Artificial Sequence
  ENSG00000112812_7 (sequence is synthesized)
gctgagcgcttgcgggcccctgggccgcgctgaaaaccaggcggagctgttgggggcgctgcaggcactggtgggaggtgtagtgcagtatgatgggcagacgggagcgccgctaagcgt

SEQ ID NO: 193284 - DNA, 120 bp, Artificial Sequence
  ENSG00000112812_8 (sequence is synthesized)
gcgacagctctgcggacttctcctcgggggcgggggcaaccgcagccactccacgccctactgcgggcttcgtcgggcggtgcagattgtcttgcacagcctgggccagaagtgtttaag

SEQ ID NO: 193285 - DNA, 120 bp, Artificial Sequence
  ENSG00000112812_9 (sequence is synthesized)
cttttcccgagcagagacagtggcacagctgaggagcacagaacctcaactgtctggtgtgggtgaccggcagtggttgtatcagacatgtaccgagttcggcttctatgtcacctgtga

SEQ ID NO: 193286 - DNA, 120 bp, Artificial Sequence
  ENSG00000112812_10 (sequence is synthesized)
gaatcccagatgtcctttctcccagctcccagcactgccctcccagctagacctatgtgagcaggtgtttgggctctcagccttgtcagtagcccaggctgtggctcagacgaactccta

SEQ ID NO: 193287 - DNA, 120 bp, Artificial Sequence
  ENSG00000112812_11 (sequence is synthesized)
ctacggtggccagacccctggggctaacaaagtgctgtttgttaatggggacacagacccctggcatgtgctaagtgtaacacaggctttaggatcctcagaatcaactcttcttatccg

SEQ ID NO: 193288 - DNA, 120 bp, Artificial Sequence
  ENSG00000112812_12 (sequence is synthesized)
tcccactgcttggacatggcacctgagaggccctcagactcccccagcctccgcctagggcgccagaacatcttccagcagctacagacctggctcaagctggcaaaggagagccagatt

SEQ ID NO: 193289 - DNA, 120 bp, Artificial Sequence
  ENSG00000112812_13 (sequence is synthesized)
aagggtgaagtctgaatctcataccctttccactccctgcatggtcacctcagtcctggacatacttgttcactgaacaaaagaaagcagcttgttttgaaagaagaaactcccaggaat

SEQ ID NO: 193290 - DNA, 120 bp, Artificial Sequence
  ENSG00000112812_14 (sequence is synthesized)
tggaattcagcacctgttccgcacgtaattggcatgtgtctgcaaacatccttattcccaacttaaagtgctttattgcagagagttatggaaatataagtggatgattattctcattgt

SEQ ID NO: 193291 - DNA, 120 bp, Artificial Sequence
  ENSG00000112812_15 (sequence is synthesized)
aaatattggtattttgaatgttaaatgtcaaacaaatgtgacttatgctggtgccctcgccctgctgatcagattctggttcaaattctgccactccagctcctgggttaggggctttgc

SEQ ID NO: 193292 - DNA, 120 bp, Artificial Sequence
  ENSG00000112812_16 (sequence is synthesized)
tgtaagtttctttttctggactttagatcctgaacctgtccttgcttctcagtttctctcactgtacccctttccctcagtctcttcctctctctttcccctgtcactatttgtctttct

SEQ ID NO: 193293 - DNA, 120 bp, Artificial Sequence
  ENSG00000112812_17 (sequence is synthesized)
aatctccttctgtttctctgaatatcttcatttctatctctgtgtttctgtctatttctctgtttatctttctgtccttcaatctgtgtttttgtttctggctctccgtcagtgtctttt

SEQ ID NO: 193294 - DNA, 120 bp, Artificial Sequence
  ENSG00000112812_18 (sequence is synthesized)
tctctcctctctctcttgctctgccatggctatttccactgctctatttctgactctcatttttggtctctgtgtgtctcctagtcactttctttctcactctgtctctgtctctatttc

SEQ ID NO: 193295 - DNA, 120 bp, Artificial Sequence
  ENSG00000112812_19 (sequence is synthesized)
tgtctctcctctgctgtgtcctcaatctctctgtctccctgaggctctatttctgtctctcctctgctgtgtcctcaatctctctgtctccctgaggctctatttctgtctctgatgctc

SEQ ID NO: 193296 - DNA, 120 bp, Artificial Sequence
  ENSG00000112812_20 (sequence is synthesized)
ttcttctgtgtctctatttctcttcctgtcacttaatcttttccttctctatctctcttatttagtcttccttccacacccttcactcaccatcttttcccacaatcaaatatcactccc

SEQ ID NO: 193297 - DNA, 120 bp, Artificial Sequence
  ENSG00000112812_21 (sequence is synthesized)
tggtacttccagcttccaactctagggattcatgattctggtggagattccttcttccagggcctgggaggatagggctaatcccaagggtgcctgcttaggctatgttagctgtgacag

SEQ ID NO: 193298 - DNA, 120 bp, Artificial Sequence
  ENSG00000112812_22 (sequence is synthesized)
gaacctgccatagatttgcactgttctttcctaaagatcaattattttcagcaataaatacttctcagctttttgtatgtctttgtatgcacagagatggtagttttagagttttatcca

SEQ ID NO: 193299 - DNA, 120 bp, Artificial Sequence
  ENSG00000112812_23 (sequence is synthesized)
gtttcatatttccttgtgggtaagaggcaacctcctcatgctgtcataccaaagtcaatctccactacactttagttctgcctgttcttgatctttatataaatggaaacttgcagtata

SEQ ID NO: 193300 - DNA, 120 bp, Artificial Sequence
  ENSG00000112812_24 (sequence is synthesized)
agggaagaggaggccagagaagggcgaaacctgcaacgtggcggggtctaaggaaggtcggagctcgggggaatacgcaggttttggaagaaggcgggagctgacgaagaggaggggcac

SEQ ID NO: 193301 - DNA, 120 bp, Artificial Sequence
  ENSG00000112812_25 (sequence is synthesized)
ctcctccgccccggtgcgggccgtgctggatttctccgagtataatgacgtaaggatggcgggcagcaggtgcgggacggggaggggtcccagcgggcggagtcccttgacacttccgga

SEQ ID NO: 193302 - DNA, 120 bp, Artificial Sequence
  ENSG00000112812_26 (sequence is synthesized)
ggcggtgcaggtgagcactccctggcacagctgggaggagttagcggacaaagattcctgccccacttccgttgtgtgatcttgggcaagcgagaaccttctctgaaacttcgttttctc

SEQ ID NO: 193303 - DNA, 120 bp, Artificial Sequence
  ENSG00000112812_27 (sequence is synthesized)
atctgtaaaatggggataacacttcacagggccgatgggaagatgaaatgaggcgggtcatgtagagcaatcagctgggagcctggcacacagtgtgcgaatgttagagactgcgattat

SEQ ID NO: 193304 - DNA, 120 bp, Artificial Sequence
  ENSG00000112812_28 (sequence is synthesized)
ggggcgggggcctgggggcgggggcctgggccaagagctaggtctgcaccctctgagtcccgctaggggaaagtggggaacccaaggaggacgcaggtcctgggtagggaaagccgaggc

SEQ ID NO: 193305 - DNA, 120 bp, Artificial Sequence
  ENSG00000112812_29 (sequence is synthesized)
aacaacctttttactatgcccagagaagtcatcttacaggtggtctggactcatttcgacccagctctcaggcactgtgtaacctgcagatgttgggctggagaaggtggaagccatact

SEQ ID NO: 193306 - DNA, 120 bp, Artificial Sequence
  ENSG00000112812_30 (sequence is synthesized)
agtgtatgcatgtgcttggccctcacatgcctcctcacgcacacactgaggtctccacttgagtgatcttcccttcagcctattctttctctgtgtccccattccagggatggccccctt

SEQ ID NO: 193307 - DNA, 120 bp, Artificial Sequence
  ENSG00000112812_31 (sequence is synthesized)
tccccatccaccagactagaaacttgagccttgttttagttgcttccttcccattttctagctagcctgtcaattactgagtcctcctcactctgcatggacaactctgtagtccatccc

SEQ ID NO: 193308 - DNA, 120 bp, Artificial Sequence
  ENSG00000112812_32 (sequence is synthesized)
ttgtgctttctatgcctacctctgctgtcctgctgggaacctccattctttcttgccgggatcccttcccagccgcttctctggtctcatggttttcacttcctctgtacaatccaactt

SEQ ID NO: 193309 - DNA, 120 bp, Artificial Sequence
  ENSG00000112812_33 (sequence is synthesized)
tttcatagcatccacagagatccttgtaaatataaccttgtccctcctgtactcaaaaccacagctcctcaaagaccccagggtagtgttgccagatacaatacaggatgcccagttaaa

SEQ ID NO: 193310 - DNA, 120 bp, Artificial Sequence
  ENSG00000112812_34 (sequence is synthesized)
tttgaatttcagatatacaacagatttttttttagtataagcatgtcccaaatactacatatggtaaattaaatgttcaaattccagctccattttctactcgtaatcttgggcaaactt

SEQ ID NO: 193311 - DNA, 120 bp, Artificial Sequence
  ENSG00000112812_35 (sequence is synthesized)
gggcaagtgacttacttctctatgcctgtttccacatctataaaatgggaatacaagcaatatttctctcatagggttgtttcaaggactaaaggaggtaatatttgtagcattctaaga

SEQ ID NO: 193312 - DNA, 120 bp, Artificial Sequence
  ENSG00000112812_36 (sequence is synthesized)
ataatgcaggtctacagtaagtattccataaacctcttgctattgttattattataaggctttacatattttaaccctcttaatacattagtcttcctaacatcttaggaactttgtaca

SEQ ID NO: 193313 - DNA, 120 bp, Artificial Sequence
  ENSG00000112812_37 (sequence is synthesized)
tgctgttcactttgcttggattattcatcttcaagtctcaatagggtggcctccctcaggaagccatgatccctcaagataagtcagccttgccacctccgacttcgatagctctgtgtt

SEQ ID NO: 193314 - DNA, 120 bp, Artificial Sequence
  ENSG00000112812_38 (sequence is synthesized)
ctccttagcattttacacagcctgtcataatacattttttattgcctgtcttcccctctggactgagtcctgtgacagcagagcctggagctgtcttggttgccaccatgtgcccaacat

SEQ ID NO: 193315 - DNA, 120 bp, Artificial Sequence
  ENSG00000112812_39 (sequence is synthesized)
tgtacaacatttatctgagcacctggtaggtggtcaacaaatagggagggaagggatgaattaatctgatgttacagaagttatctttaccctgaaagcacagtgagctatgggttttaa

SEQ ID NO: 193316 - DNA, 120 bp, Artificial Sequence
  ENSG00000112812_40 (sequence is synthesized)
gcagggcagacataatacaatttgagctccgagcattccagacctttgcacgtgctatttcttctatttactatgccttccttctctatctttgtttggctcagttctactaatttctca

SEQ ID NO: 193317 - DNA, 120 bp, Artificial Sequence
  ENSG00000112812_41 (sequence is synthesized)
aggtcttatcctttgcaggatgctttccctgagcccatcatgtttcctctgggatccctgccttgtggcctttttccatcacagccctgatcactgtgggctatcactgtcaggggactg

SEQ ID NO: 193318 - DNA, 120 bp, Artificial Sequence
  ENSG00000112812_42 (sequence is synthesized)
tgtgagtctgtctgccaggactgtaaactcctcgaagggagtattagaaatgttctggtcatcactgaggaaagctttgaaaatgattattgaaggagagtggtgggctgcctgtatacc

SEQ ID NO: 193319 - DNA, 120 bp, Artificial Sequence
  ENSG00000112818_0 (sequence is synthesized)
acttgcagcaatggcttggattagatccacttgcattctcttttttaccttgctttttgcccacatagcagctgtaccgattaagtatcttcctgaagaaaatgtacatgatgcagattt

SEQ ID NO: 193320 - DNA, 120 bp, Artificial Sequence
  ENSG00000112818_1 (sequence is synthesized)
tggtgaacagaaggatatttcagaaatcaatttagctgcaggcttggacctctttcaaggggacatcctcttgcagaaatccagaaatggcctgagagacccaaacaccaggtggacgtt

SEQ ID NO: 193321 - DNA, 120 bp, Artificial Sequence
  ENSG00000112818_2 (sequence is synthesized)
ccccattccttacatcttggctgataatttggggctgaatgctaaaggagccattctgtatgcctttgagatgttccgtctcaagtcctgtgtggatttcaagccctatgaaggagagag

SEQ ID NO: 193322 - DNA, 120 bp, Artificial Sequence
  ENSG00000112818_3 (sequence is synthesized)
ctcatatatcatatttcaacagtttgatgggtgctggtctgaggttggtgaccaacatgtgggacagaacatttccattggccaaggatgtgcctataaggccatcatagaacacgagat

SEQ ID NO: 193323 - DNA, 120 bp, Artificial Sequence
  ENSG00000112818_4 (sequence is synthesized)
cctgcatgctttgggattttaccacgagcagtcaaggacggaccgggatgattatgtgaacatctggtgggaccaaattctttcaggttaccagcacaactttgacacctatgatgatag

SEQ ID NO: 193324 - DNA, 120 bp, Artificial Sequence
  ENSG00000112818_5 (sequence is synthesized)
cttaatcacagacctcaatacaccctatgattatgagtctttgatgcactaccagcctttctcatttaacaagaatgcaagtgttcccaccatcacagccaagatccctgagtttaactc

SEQ ID NO: 193325 - DNA, 120 bp, Artificial Sequence
  ENSG00000112818_6 (sequence is synthesized)
cattatcggacagcgcctggatttcagtgccattgatttagagaggctgaaccgaatgtacaattgcaccacaactcacactcttttggaccactgtacttttgagaaggcaaacatctg

SEQ ID NO: 193326 - DNA, 120 bp, Artificial Sequence
  ENSG00000112818_7 (sequence is synthesized)
tggaatgattcagggcaccagagatgacactgactgggcccatcaggacagtgctcaggctggagaagtggatcacaccttgttgggacaatgcacaggtgccggctacttcatgcagtt

SEQ ID NO: 193327 - DNA, 120 bp, Artificial Sequence
  ENSG00000112818_8 (sequence is synthesized)
cagcaccagctcggggtccgcggaagaggcagccctactggagtctcggattctttacccaaagaggaagcagcagtgcctgcaatttttctataaaatgacgggaagtccttcagacag

SEQ ID NO: 193328 - DNA, 120 bp, Artificial Sequence
  ENSG00000112818_9 (sequence is synthesized)
actcgttgtctgggtcaggagggatgacagcacaggcaatgttcgcaagttggtgaaggtgcagacttttcaaggagatgatgaccacaattggaaaattgcccatgtggtgctcaaaga

SEQ ID NO: 193329 - DNA, 120 bp, Artificial Sequence
  ENSG00000112818_10 (sequence is synthesized)
ggaacagaagtttcgctaccttttccagggcacaaaaggcgaccctcagaactcaactgggggaatttacctagatgacatcactctgacagaaaccccctgccccacaggggtctggac

SEQ ID NO: 193330 - DNA, 120 bp, Artificial Sequence
  ENSG00000112818_11 (sequence is synthesized)
agtccggaatttctcccaagtccttgagaacaccagcaaaggggacaagcttcagagccctcgattctacaattcggagggatatggttttggggtaactttatacccaaatagcagaga

SEQ ID NO: 193331 - DNA, 120 bp, Artificial Sequence
  ENSG00000112818_12 (sequence is synthesized)
ttgagacttgcttttcatgtgtgcagtggggagaacgatgctatcctggagtggccggtagaaaacagacaggtgataattaccatccttgaccaggagcctgatgtccggaacaggatg

SEQ ID NO: 193332 - DNA, 120 bp, Artificial Sequence
  ENSG00000112818_13 (sequence is synthesized)
tcctcaagcatggtgttcactacctcgaagtcgcacacatctccagcgataaatgacactgtcatctgggacaggccgtccagggtgggaacctatcatacggactgtaattgttttaga

SEQ ID NO: 193333 - DNA, 120 bp, Artificial Sequence
  ENSG00000112818_14 (sequence is synthesized)
agcatcgacttgggctggagtggtttcatttcccaccaaatgctgaaaaggaggagtttcctgaaaaatgatgacctcatcatatttgtggactttgaagatatcacccacctcagccag

SEQ ID NO: 193334 - DNA, 120 bp, Artificial Sequence
  ENSG00000112818_15 (sequence is synthesized)
actgaagttcccactaaaggcaaaagactgagcccccaaggcctcattctccaaggccaggagcagcaggtctccgaagaaggttcgggaaaggccatgttagaggaagccctacctgtc

SEQ ID NO: 193335 - DNA, 120 bp, Artificial Sequence
  ENSG00000112818_16 (sequence is synthesized)
agcctgagccaggggcagcccagccgacagaagcggtcggtggagaacacaggccccctggaggaccataactggccacagtacttcagagacccatgtgacccaaacccttgccaaaat

SEQ ID NO: 193336 - DNA, 120 bp, Artificial Sequence
  ENSG00000112818_17 (sequence is synthesized)
gacggcatctgtgtgaacgtgaaggggatggcgagctgcaggtgcatctctggacatgctttcttctacacgggggagcgctgtcaggccgtgcaggtgcacggcagtgtcctgggcatg

SEQ ID NO: 193337 - DNA, 120 bp, Artificial Sequence
  ENSG00000112818_18 (sequence is synthesized)
gtgatcggaggcacggctggcgtgatcttcttgaccttctccatcatcgccatcctttcccaaaggccaaggaagtgacctgcctgctggcattggccagaccacagcagcacctcctcc

SEQ ID NO: 193338 - DNA, 120 bp, Artificial Sequence
  ENSG00000112818_19 (sequence is synthesized)
atgcaggccttaactttcccatggtcaatgcagtttttatcagccttgctttggataggacctccaaggactaaggcctccagccccatgtgtgacccttgtcatctctctgccccacat

SEQ ID NO: 193339 - DNA, 120 bp, Artificial Sequence
  ENSG00000112818_20 (sequence is synthesized)
aattctgttactttgctatgtgctcctaatgtatctagtgtgtcctgtgacaacactcatcacacttcattgtaaatcacttgttttattgactgtctttcctatagactgtaagctcca

SEQ ID NO: 193340 - DNA, 120 bp, Artificial Sequence
  ENSG00000112818_21 (sequence is synthesized)
tgagggcaggcacatgttgttctcattgaccgtgctggccccagtgcctagatgcatggctggcacattgttggcactcaacaatggttgaatgaataaaacaataaatgaatgaataac

SEQ ID NO: 193341 - DNA, 120 bp, Artificial Sequence
  ENSG00000112818_22 (sequence is synthesized)
taagatatagaaactctcatttatattgcagattgaatatatatgatgaaattcttatgttgaatatgttagaatcaaatactcatttttcattagatacagtagtgtcatcactctttt

SEQ ID NO: 193342 - DNA, 120 bp, Artificial Sequence
  ENSG00000112818_23 (sequence is synthesized)
aagatcttgttaaagatttcaaataaaggtacttctgggcagccaggctgcacagcatttgctttcctctgagattctaagagaaggcctttaataaatttaataaatattgagttagca

SEQ ID NO: 193343 - DNA, 120 bp, Artificial Sequence
  ENSG00000112818_24 (sequence is synthesized)
atggcttggattagatccacttgcattctcttttttaccttgctttttgcccacatagcagctgtaccggtaagtcgagtcctgctttttggatatttagaaatattaattctagtatac

SEQ ID NO: 193344 - DNA, 120 bp, Artificial Sequence
  ENSG00000112837_0 (sequence is synthesized)
accgctctcctgcctggaagtgctgacagatcaaggcaacaaatttcaattacaatccctaatttgtgtccacagagtgttttttacccatgttagtcctctctggcgcatcagttgagg

SEQ ID NO: 193345 - DNA, 120 bp, Artificial Sequence
  ENSG00000112837_1 (sequence is synthesized)
cagacctcggagcagcaggaggaggtggaaggggtgggagcaaaggagtgcatcagtgagagagcgcgcgagagagacccaggaaaggagacttggccggcgcgtcgccggttcctggat

SEQ ID NO: 193346 - DNA, 120 bp, Artificial Sequence
  ENSG00000112837_2 (sequence is synthesized)
cccaacacaagcgagaaagcggaaacgccaaatctgttttttgcccgcggtggggaagggggcagatctcgggaggccccgagagccttttagtttttggtgggggaagagcgagagcgc

SEQ ID NO: 193347 - DNA, 120 bp, Artificial Sequence
  ENSG00000112837_3 (sequence is synthesized)
gcgtgtgcccgcgtgagtgtatatgagagaggggcgggcgggcgcggggcgggggggatggccgagaagcgaaggggctcgccgtgcagcatgctaagcctcaaggcgcacgctttctcg

SEQ ID NO: 193348 - DNA, 120 bp, Artificial Sequence
  ENSG00000112837_4 (sequence is synthesized)
gtggaggcgctgatcggcgccgagaagcagcaacagcttcagaagaagcggcgaaaactgggcgccgaagaggcggcgggggccgtggacgacggaggctgcagccgcggcggcggcgcg

SEQ ID NO: 193349 - DNA, 120 bp, Artificial Sequence
  ENSG00000112837_5 (sequence is synthesized)
ggcgaaaagggttcttctgagggagacgaaggcgctgcgctcccgccgccggctggggcgacgtctgggccggctcggagtggcgcagacctggagcgcggagccgcgggcggctgtgag

SEQ ID NO: 193350 - DNA, 120 bp, Artificial Sequence
  ENSG00000112837_6 (sequence is synthesized)
gcttccagcagggagcttcccctctggcgtcaccgggaggctcccccaaggggtctccggcgcgctccctggcccggcccgggacccctctgccctcgccgcaggccccgcgggtggatc

SEQ ID NO: 193351 - DNA, 120 bp, Artificial Sequence
  ENSG00000112837_7 (sequence is synthesized)
gatctgcagggagccgagctctggaagcgctttcatgagataggcactgagatgatcatcaccaaggccggcaggcgcatgtttccagcaatgagagtgaagatctctggattagatcct

SEQ ID NO: 193352 - DNA, 120 bp, Artificial Sequence
  ENSG00000112837_8 (sequence is synthesized)
caccagcaatattacattgccatggatattgtaccagtggacaacaaaagatacaggtatgtttaccacagttcgaaatggatggtggcaggtaatgctgactcgcctgtgccaccccgt

SEQ ID NO: 193353 - DNA, 120 bp, Artificial Sequence
  ENSG00000112837_9 (sequence is synthesized)
gtgtacattcatccagactcgcctgcctcgggggagacttggatgagacaagttatcagcttcgacaagctgaagctcaccaacaatgaactggatgaccaaggccatattattcttcat

SEQ ID NO: 193354 - DNA, 120 bp, Artificial Sequence
  ENSG00000112837_10 (sequence is synthesized)
tctatgcacaaataccaaccgcgagtgcacgtcatccgtaaagactgtggagacgatctttctcccatcaagcctgttccatccggggagggagtaaaggcattctcctttccagaaact

SEQ ID NO: 193355 - DNA, 120 bp, Artificial Sequence
  ENSG00000112837_11 (sequence is synthesized)
gtcttcacaaccgtcactgcctatcagaatcagcagattactcgcctgaagatagataggaatccatttgctaaaggcttccgagactccgggcgcaacagaatgggtttggaagccttg

SEQ ID NO: 193356 - DNA, 120 bp, Artificial Sequence
  ENSG00000112837_12 (sequence is synthesized)
gtggaatcatatgcattctggcgaccatcactacggactctgacctttgaagatatccctggaattcccaagcaaggcaatgcaagttcctccaccttgctccaaggtactgggaatggc

SEQ ID NO: 193357 - DNA, 120 bp, Artificial Sequence
  ENSG00000112837_13 (sequence is synthesized)
gttcctgccactcaccctcaccttttgtctggctcctcttgctcctctcctgccttccatctggggcccaacaccagccagctgtgtagtctggcccctgctgactattctgcctgtgcc

SEQ ID NO: 193358 - DNA, 120 bp, Artificial Sequence
  ENSG00000112837_14 (sequence is synthesized)
cgctcaggcctcaccctcaaccgatacagcacatctttggcagagacctacaacaggctcaccaaccaggctggtgagacctttgccccgcccaggactccctcctatgtgggcgtgagc

SEQ ID NO: 193359 - DNA, 120 bp, Artificial Sequence
  ENSG00000112837_15 (sequence is synthesized)
agcagcacctccgtgaacatgtccatgggtggcactgatggggacaccttcagctgcccacagaccagcttatccatgcagatttcgggaatgtccccccagctccagtatatcatgcca

SEQ ID NO: 193360 - DNA, 120 bp, Artificial Sequence
  ENSG00000112837_16 (sequence is synthesized)
tcaccctccagcaatgccttcgccactaaccagacccatcagggttcctataatacttttagattacacagcccctgtgcactatatggatataacttctccacatcccccaaactggct

SEQ ID NO: 193361 - DNA, 120 bp, Artificial Sequence
  ENSG00000112837_17 (sequence is synthesized)
gccagtcctgagaaaattgtttcttcccaaggaagtttcttggggtcctcaccgagtgggaccatgacggatcggcagatgttgccccctgtggaaggagtgcacctgcttagcagtggg

SEQ ID NO: 193362 - DNA, 120 bp, Artificial Sequence
  ENSG00000112837_18 (sequence is synthesized)
ggtcagcagagtttctttgactctaggaccctaggaagcttaactctgtcatcatctcaagtatctgcacatatggtctgatgaagcctttaagttaaatgacatttggatctgtctaac

SEQ ID NO: 193363 - DNA, 120 bp, Artificial Sequence
  ENSG00000112837_19 (sequence is synthesized)
atattttctttttcttttttaaaagctatgtggaaagaaactctctgtggtttataaaatgtacatataatagaaaatgaaggctcactgggttttttgactttatcatggtgagattgt

SEQ ID NO: 193364 - DNA, 120 bp, Artificial Sequence
  ENSG00000112837_20 (sequence is synthesized)
aattatctatggtatatatgtatgctgtatatacatagcacatggagtatcacggcccctattgttcccctgtttcatccagttgcacggagtattggcatgcgtgtagtatgtttaagc

SEQ ID NO: 193365 - DNA, 120 bp, Artificial Sequence
  ENSG00000112837_21 (sequence is synthesized)
aaagttctcagactcttttaaaaacaagatggtaaacttaaaacttggcaattatactatccagaagaacacttataacttaatttatcagaaaaatgctctaaacggtttcatacttga

SEQ ID NO: 193366 - DNA, 120 bp, Artificial Sequence
  ENSG00000112837_22 (sequence is synthesized)
tgtattgataaccagcagtaaccagcatgtagagtcttgtgatttctgttattcttggacacagtgtgagaatctaaaatacaaaagccagttgaagtcttagtgttagtcctgaggtat

SEQ ID NO: 193367 - DNA, 120 bp, Artificial Sequence
  ENSG00000112837_23 (sequence is synthesized)
ttgtaatcatgaaggatcagctttttcattcctgcttattatttaccacacatactatatgaccttgggtctataaaaaaatcataacccataataattgttattttcttaaggaaggta

SEQ ID NO: 193368 - DNA, 120 bp, Artificial Sequence
  ENSG00000112837_24 (sequence is synthesized)
aaggagaggcttgtgatttttttttttacactttccattgggcacataagaggttcttattcatctgtagagaacaaatttccagtattttcgattttttgcttattttatatatcaaat

SEQ ID NO: 193369 - DNA, 120 bp, Artificial Sequence
  ENSG00000112837_25 (sequence is synthesized)
agaccattaaagaatgttctataaacatttttaaattccaattttcaccaggggaggaatatgtgatatgagtggaatggcaaaaggaaaataaatccacctcaaattcattgattccaa

SEQ ID NO: 193370 - DNA, 120 bp, Artificial Sequence
  ENSG00000112837_26 (sequence is synthesized)
gtttttaaatttagaatattttttccatcttgctctgagcttcctgaccgatagtatataagtaaaaaaaatgcatttatgctacttatttatatcttgtaattcctacacattgaaccc

SEQ ID NO: 193371 - DNA, 120 bp, Artificial Sequence
  ENSG00000112837_27 (sequence is synthesized)
ttttccccttcttaaccttgtccgtctgcctgagtctttcccaaaacagatagttcctaggcctgtatggtgttaaataacacggtgaggaatttcagtaggttatctccagcaatctgt

SEQ ID NO: 193372 - DNA, 120 bp, Artificial Sequence
  ENSG00000112837_28 (sequence is synthesized)
cttttgggagctatagtgcaaaggccaaagcccattactataaagaccctcttggaggactaagaaggaagatactaattatgataaaggaactataaaacttttaacctcaacagaatt

SEQ ID NO: 193373 - DNA, 120 bp, Artificial Sequence
  ENSG00000112837_29 (sequence is synthesized)
tgtaatgtcagaactggagaaattaaaatcagtattaaattttttaattcctaaaataatatatgcatggttgaagagttaaaaacaagtaactttgagagcacagtatgagataaataa

SEQ ID NO: 193374 - DNA, 120 bp, Artificial Sequence
  ENSG00000112837_30 (sequence is synthesized)
aaaaggctaagaatacatgatgaggcacattccccttctgaggagaaagcgaaataacatgtctgtgcattgacccattcattacatttcatgtatcttaagcaaaagagcatgattttc

SEQ ID NO: 193375 - DNA, 120 bp, Artificial Sequence
  ENSG00000112837_31 (sequence is synthesized)
tctcattgctaaaaagagttgctttaactcatccctggatttggtggggaaagggtacaactcctgatttgctgtttcactttgaaacaacacaatttgttagatacttagggagatata

SEQ ID NO: 193376 - DNA, 120 bp, Artificial Sequence
  ENSG00000112837_32 (sequence is synthesized)
ctgttgaatttgcacaggatgtgactctgtttatacatattaacaaatttccttttggattccttagcagttcatcaaattagtattaaatttttaaatttaaaactagcatgaagggac

SEQ ID NO: 193377 - DNA, 120 bp, Artificial Sequence
  ENSG00000112837_33 (sequence is synthesized)
atgaaatatttgcagtaggtggatctatgtaagatgtttgggtatggcattaatagcttgacaaagatttggggaaaggtgttaagaatgagtccatctcagccaatagtgcttggtgta

SEQ ID NO: 193378 - DNA, 120 bp, Artificial Sequence
  ENSG00000112837_34 (sequence is synthesized)
taattcaagaacagagagttttccatcttgaaaaaacatggaaagtaatgctctatacccatatgtattaataagagcattttccttcttgccgttgatcatttcagatgataccacaat

SEQ ID NO: 193379 - DNA, 120 bp, Artificial Sequence
  ENSG00000112837_35 (sequence is synthesized)
atgagtataattttttattaatcttttttctggtaaaattttagcaatattgtacaaatgctttttttaggttttactgtaaatattaatcaccacgtcacttcagagactagcctttta

SEQ ID NO: 193380 - DNA, 120 bp, Artificial Sequence
  ENSG00000112837_36 (sequence is synthesized)
gtcacttcagagactagccttttattgctgaattaaatgacatgcatacattgataattatatatctgtattttattaaaaagtacttaaaattatattaaaatatgttattaaaccctt

SEQ ID NO: 193381 - DNA, 120 bp, Artificial Sequence
  ENSG00000112837_37 (sequence is synthesized)
ttaatgtctaaaaatattgatccaagaataagcacacacatgcacaccccaaacgcaaattctgtacctctcaaatacatggcagaaagaaatgggcctgctgttcatgtttcatgtgtt

SEQ ID NO: 193382 - DNA, 120 bp, Artificial Sequence
  ENSG00000112837_38 (sequence is synthesized)
aaatgtaatttcttggtgtgttgaccatgtcattgaaggtgaaggccctgacaaatgttgaacacatgaaaatttgaatgtgagaggaaagggatggggtggtatgttttgttttgggtc

SEQ ID NO: 193383 - DNA, 120 bp, Artificial Sequence
  ENSG00000112837_39 (sequence is synthesized)
caggggagaaaggcaaggttacaagaatgagtggcttgcaccactgactagtgatgacagattacttctatgccccttgactagtaaacattccaagggacatcgcgatggggtgaggtt

SEQ ID NO: 193384 - DNA, 120 bp, Artificial Sequence
  ENSG00000112837_40 (sequence is synthesized)
gctgctatcaagaccagtcacattttgaaaattaacacttgcttccttacaagctgccttccagaggtcaacagcttttcacaagtgaggcacccagttgctgacccttgatttctggaa

SEQ ID NO: 193385 - DNA, 120 bp, Artificial Sequence
  ENSG00000112837_41 (sequence is synthesized)
tgtaaggggtcaggaatccttggtggcccccagagaaggttggggcacagtgtaacctatataaggaaggatcatactcactctttacatcaattagcaaaattttgaggaaaaagaatc

SEQ ID NO: 193386 - DNA, 120 bp, Artificial Sequence
  ENSG00000112837_42 (sequence is synthesized)
tcacttttaaaatgtaaatagctcttcattacccctccagacttaatcctaccagtaactcacaccttagtgtgaaattaataaacagcagctttggagatagctggaggtttgacttag

SEQ ID NO: 193387 - DNA, 120 bp, Artificial Sequence
  ENSG00000112837_43 (sequence is synthesized)
aggaaaaagtaatttttgtagcaggacaattctgggaagatttgtatgggaaggagaaggtgcaagaagagagatccctaactaaactctgcagtgtcccatgaagtcctggtgcagagc

SEQ ID NO: 193388 - DNA, 120 bp, Artificial Sequence
  ENSG00000112837_44 (sequence is synthesized)
attaaaaataatcatttcataaacttctttcaggaaccttggtagaggtggtggatgctacctaccctgatgctgtctctaattagagaggtttgtaaagattcctttgttgcaaagtgt

SEQ ID NO: 193389 - DNA, 120 bp, Artificial Sequence
  ENSG00000112837_45 (sequence is synthesized)
aacacagtgttatttcctcatgagaaatttattggctcatctacatgaagttttttctaagctttcccttaagaactaattgtattaaattattaccatgttgtgttttaatctcattgt

SEQ ID NO: 193390 - DNA, 120 bp, Artificial Sequence
  ENSG00000112837_46 (sequence is synthesized)
tcatcctttctaaaaagaaatgctcagataagttgagagtaaggttaaatatatgagcagttaagtactcatacatgattacagcattctaagagttcaaaccttaaaaattatcagtgc

SEQ ID NO: 193391 - DNA, 120 bp, Artificial Sequence
  ENSG00000112837_47 (sequence is synthesized)
tagaaatcgacaaatatattcaagtatacaaacattcaacagatatataaacttagtatccctctacatgctgatatattttcaaataatgtgctttcttttcattgaactgtggtatga

SEQ ID NO: 193392 - DNA, 120 bp, Artificial Sequence
  ENSG00000112837_48 (sequence is synthesized)
tgagaataacatgtcctcgggaattagagaacttagtttgagactatggatttctcaatcatgattttgggtaaaaaaattagctgctttatgtctcagttttgctatgtgtgaaaggaa

SEQ ID NO: 193393 - DNA, 120 bp, Artificial Sequence
  ENSG00000112837_49 (sequence is synthesized)
tggctgggatgataattgttagtattccttttagtttccaattcatatggtcctattatataaatatttagcttaatattgggaaactagttttataaaactattatatcttttggaata

SEQ ID NO: 193394 - DNA, 120 bp, Artificial Sequence
  ENSG00000112837_50 (sequence is synthesized)
ctgtttatttttggatatatatatatatatactgtatctgtggctttacaaagaatataacactatcagtattattttcaacttgttgaattatgtgaaatttatcctttaaatggaact

SEQ ID NO: 193395 - DNA, 120 bp, Artificial Sequence
  ENSG00000112837_51 (sequence is synthesized)
aactgtgctttagttttacaggataaattttagtattttaatatcagaaggaagctatacttagtaacgtatttgctactttatagtgaatagtaaaagacattaataaaatttcttttt

SEQ ID NO: 193396 - DNA, 120 bp, Artificial Sequence
  ENSG00000112837_52 (sequence is synthesized)
catgatgctcttaattgcatggcattaaattattttgttttgaaataagtatagcagtctattataatatatggagatcattccaagtccattcaaaatacatttaaatcctcgagaaaa

SEQ ID NO: 193397 - DNA, 120 bp, Artificial Sequence
  ENSG00000112837_53 (sequence is synthesized)
ctgagcgagacaatttggtctcaagggaaaccaaactgtagcacagaatgtgagagagagcaacaataggatggaatgcataaaatccttccccagagcaagcttctcccacttcttgaa

SEQ ID NO: 193398 - DNA, 120 bp, Artificial Sequence
  ENSG00000112837_54 (sequence is synthesized)
aggctttatttttatatagcctctggaagccagacaaagtatcacttagaaagcgagcctcacagggcggctctggagagatctgaaggctgcgttcataagttcagaaagaacaaagtt

SEQ ID NO: 193399 - DNA, 120 bp, Artificial Sequence
  ENSG00000112837_55 (sequence is synthesized)
tatgctttaggccgctagaccgtaagctctttgagttcagtttttatcttcattgtatttcaagaactgtgcaagtatctggtacctggaatatgctcaataaatgtttgaataaagatt

SEQ ID NO: 193400 - DNA, 120 bp, Artificial Sequence
  ENSG00000112837_56 (sequence is synthesized)
atgacaagttttcaggaagaattctagatactcagcataatgaaaatacatttggatacttaaatttggtcagtgaaaatgacagtggtgttgttgaatataaaatactaggactatatt

SEQ ID NO: 193401 - DNA, 120 bp, Artificial Sequence
  ENSG00000112837_57 (sequence is synthesized)
gtttgatatggcgagttcaaaatgctagctttgatatggatttttctatccctttggctatttcaggagtatgtaagcctgacatccatggtgcttgttactatttcttccctgactcta

SEQ ID NO: 193402 - DNA, 120 bp, Artificial Sequence
  ENSG00000112837_58 (sequence is synthesized)
aaactttaaaaattttggaggaacatacagaagacagtgaattatgttttaatgcttttaagattttgttaaaatttaaaatttttattttgttccaagtgtttaaacaatattatagta

SEQ ID NO: 193403 - DNA, 120 bp, Artificial Sequence
  ENSG00000112837_59 (sequence is synthesized)
catgaaaagcacattgagcctatatatggctttcttgctagtgaaatacagtttcaacttttttccttgctgaaactctcttgcttattatagacaagctatttactaatacttctcact

SEQ ID NO: 193404 - DNA, 120 bp, Artificial Sequence
  ENSG00000112837_60 (sequence is synthesized)
gaaggggcatgattttttaattatattagtagagaagtgaagctatgagaaaaagtttaacatatttctttattacccctggttctattgtgctgttgttagtggtttttaaaacaaatt

SEQ ID NO: 193405 - DNA, 120 bp, Artificial Sequence
  ENSG00000112837_61 (sequence is synthesized)
ctatttttatttccccgaccctgtacatgaaatatacaaattgaccaggacaagaaataaacatagacttgtgattgtttaaactttatgaaacaatttgccttaattaaaaattatcct

SEQ ID NO: 193406 - DNA, 120 bp, Artificial Sequence
  ENSG00000112837_62 (sequence is synthesized)
tttctggctatttatggctgcacagcctattttacaggaatcagtagcttcggcccttaaaagctctcctgcaagacatttgctatgtgagagagaatttatgtgctgagaatagtttca

SEQ ID NO: 193407 - DNA, 120 bp, Artificial Sequence
  ENSG00000112837_63 (sequence is synthesized)
taggtttgaccctataaaattttttactcaggaaggtacaaaaatttcttctctttaaatacttcaggaaaaacataaccattttactaaataaacttggccatttgatagcataaatta

SEQ ID NO: 193408 - DNA, 120 bp, Artificial Sequence
  ENSG00000112837_64 (sequence is synthesized)
gggcagtgataaaatgtggaaattgttcaaaggcatcttgtataaattatcgccttggctgcactcctgcaggaggtgccttttatcttttctttaactagccaggaaaggtctccatta

SEQ ID NO: 193409 - DNA, 120 bp, Artificial Sequence
  ENSG00000112837_65 (sequence is synthesized)
ctggagaaaatgaaggctttttaaaaaatgtccagattcagctaataaacattttataactgtttcctgcaaaatatctaaaatcctttctggaacttgtagtgtgaaacagcagcctca

SEQ ID NO: 193410 - DNA, 120 bp, Artificial Sequence
  ENSG00000112837_66 (sequence is synthesized)
gcttttcacacttttctctgctgggctggaagcgcagggcgccgggagtttggcgaaagcggggtctgaagagccttctagaagatgcctccggcccggcccaaaagaaggcccaaagcg

SEQ ID NO: 193411 - DNA, 120 bp, Artificial Sequence
  ENSG00000112837_67 (sequence is synthesized)
aggcgccgcagacgcttatggcttaaggaggcccaggctcttgggaccagagtccgggcgcttttgctgcttgcgcttcgaggcgcaggttgcgtcggagtttgcactggggactctgga

SEQ ID NO: 193412 - DNA, 120 bp, Artificial Sequence
  ENSG00000112851_0 (sequence is synthesized)
ttttgtttttttttttttcggcggagatcctcgttggggctgggaaactcctgcaaaactcgagaccaggaagccagcccgcaccccaacccccaccaaagccacctactcttcttctgt

SEQ ID NO: 193413 - DNA, 120 bp, Artificial Sequence
  ENSG00000112851_1 (sequence is synthesized)
gggaggccagtccacatccgctctcacccgagagagatattcagctggatccaaagtgactgatgaagggaaggaaatcatgtcaagcgaagccttgaaaaagctgccctgagacggtgt

SEQ ID NO: 193414 - DNA, 120 bp, Artificial Sequence
  ENSG00000112851_2 (sequence is synthesized)
cccgccgaaagaatgttggctcaattaagaaacatcagggagataaattcaacccagtgtgtctaaaaatgactacaaaacgaagtttgtttgtgcggttggtaccatgtcgctgtctac

SEQ ID NO: 193415 - DNA, 120 bp, Artificial Sequence
  ENSG00000112851_3 (sequence is synthesized)
gaggggaagaggagactgtcactactcttgattattctcattgcagcttagaacaagttccgaaagagatttttacttttgaaaaaaccttggaggaactctatttagatgctaatcaga

SEQ ID NO: 193416 - DNA, 120 bp, Artificial Sequence
  ENSG00000112851_4 (sequence is synthesized)
ttgaagagcttccaaagcaactttttaactgtcagtctttacacaaactgagtttgccagacaatgatttaacaacgttaccagcatccattgcaaaccttattaatctcagggaactgg

SEQ ID NO: 193417 - DNA, 120 bp, Artificial Sequence
  ENSG00000112851_5 (sequence is synthesized)
atgtcagcaagaatggaatacaggagtttccagaaaatataaaaaattgtaaagttttgacaattgtggaggccagtgtaaaccctatttccaagctccctgatggattttctcagctgt

SEQ ID NO: 193418 - DNA, 120 bp, Artificial Sequence
  ENSG00000112851_6 (sequence is synthesized)
taaacctaacccagttgtatctgaatgatgcttttcttgagttcttgccagcaaattttggcagattaactaaactccaaatattagagcttagagaaaaccagttaaaaatgttgccta

SEQ ID NO: 193419 - DNA, 120 bp, Artificial Sequence
  ENSG00000112851_7 (sequence is synthesized)
aaactatgaatagactgacccagctggaaagactggatttgggaagtaacgaattcacggaagtgcctgaagtacttgagcaactaagtggattgaaagagttttggatggatgctaata

SEQ ID NO: 193420 - DNA, 120 bp, Artificial Sequence
  ENSG00000112851_8 (sequence is synthesized)
gactgacttttattccagggtttattggtagtttgaaacagctcacatatttggatgtttctaaaaataatattgaaatggttgaagaaggaatttcaacatgtgaaaaccttcaagacc

SEQ ID NO: 193421 - DNA, 120 bp, Artificial Sequence
  ENSG00000112851_9 (sequence is synthesized)
tcctattatcaagcaattcacttcagcagcttcctgagactattggttcgttgaagaatataacaacgcttaaaatagatgaaaaccagttaatgtatctgccagactctataggagggt

SEQ ID NO: 193422 - DNA, 120 bp, Artificial Sequence
  ENSG00000112851_10 (sequence is synthesized)
taatatcagtagaagaactggattgtagtttcaatgaagttgaagctttgccttcatctattgggcagcttactaacttaagaacttttgctgctgatcataattacttacagcagttgc

SEQ ID NO: 193423 - DNA, 120 bp, Artificial Sequence
  ENSG00000112851_11 (sequence is synthesized)
ccccagagattggaagctggaaaaatataactgtgctgtttctccattccaataaacttgagacacttccagaggaaatgggtgatatgcaaaaattaaaagtcattaatttaagtgata

SEQ ID NO: 193424 - DNA, 120 bp, Artificial Sequence
  ENSG00000112851_12 (sequence is synthesized)
atagattaaagaatttaccctttagctttacaaagctacagcaattgacagctatgtggctctcagataatcagtccaaacccctgatacctcttcaaaaagaaactgattcagagaccc

SEQ ID NO: 193425 - DNA, 120 bp, Artificial Sequence
  ENSG00000112851_13 (sequence is synthesized)
agaaaatggtgcttaccaactacatgttccctcaacagccaaggactgaggatgttatgtttatatcagataatgaaagttttaacccttcattgtgggaggaacagaggaaacagcggg

SEQ ID NO: 193426 - DNA, 120 bp, Artificial Sequence
  ENSG00000112851_14 (sequence is synthesized)
ctcaagttgcatttgaatgtgatgaagacaaagatgaaagggaggcacctcccagggagggaaatttaaaaagatatccaacaccatacccagatgagcttaagaatatggtcaaaactg

SEQ ID NO: 193427 - DNA, 120 bp, Artificial Sequence
  ENSG00000112851_15 (sequence is synthesized)
ttcaaaccattgtacatagattaaaagatgaagagaccaatgaagactcaggaagagatttgaaaccacatgaagatcaacaagatataaataaagatgtgggtgtgaagacctcagaaa

SEQ ID NO: 193428 - DNA, 120 bp, Artificial Sequence
  ENSG00000112851_16 (sequence is synthesized)
gtactactacagtaaaaagcaaagttgatgaaagagaaaaatatatgataggaaactctgtacagaagatcagtgaacctgaagctgagattagtcctgggagtttaccagtgactgcaa

SEQ ID NO: 193429 - DNA, 120 bp, Artificial Sequence
  ENSG00000112851_17 (sequence is synthesized)
atatgaaagcctctgagaacttgaagcatattgttaaccatgatgatgtttttgaggaatctgaagaactttcttctgatgaagagatgaaaatggcggagatgcgaccaccattaattg

SEQ ID NO: 193430 - DNA, 120 bp, Artificial Sequence
  ENSG00000112851_18 (sequence is synthesized)
aaacctctattaaccagccaaaagtcgtagcacttagtaataacaaaaaagatgatacaaaggaaacagattctttatcagatgaagttacacacaatagcaatcagaataacagcaatt

SEQ ID NO: 193431 - DNA, 120 bp, Artificial Sequence
  ENSG00000112851_19 (sequence is synthesized)
gttcttctccatctcggatgtctgattcagtttctcttaatactgatagtagtcaagacacctcactctgctctccagtgaaacaaactcatattgatattaattccaaaatcaggcaag

SEQ ID NO: 193432 - DNA, 120 bp, Artificial Sequence
  ENSG00000112851_20 (sequence is synthesized)
aagatgaaaattttaacagccttttacaaaatggagatattttaaacagttcaacagaggaaaagttcaaagctcatgataaaaaagattttaacttacctgaatatgatttgaatgttg

SEQ ID NO: 193433 - DNA, 120 bp, Artificial Sequence
  ENSG00000112851_21 (sequence is synthesized)
aagagcgattagttctaattgagaaaagtgttgactcaacagccacagctgatgacactcacaaattagatcatatcaatatgaatcttaataaacttataactaatgatacatttcaac

SEQ ID NO: 193434 - DNA, 120 bp, Artificial Sequence
  ENSG00000112851_22 (sequence is synthesized)
cagagatcatggaaagatcaaaaacacaggatattgtgcttggaacaagctttttaagcattaattctaaagaggaaactgagcacttggaaaatggaaacaagtatcctaatttggaat

SEQ ID NO: 193435 - DNA, 120 bp, Artificial Sequence
  ENSG00000112851_23 (sequence is synthesized)
ccgtaaataaggtaaatggacattctgaggaaacttcccagtctcctaataggactgaaccacatgacagtgattgttctgttgacttaggtatttccaaaagcactgaagatctctccc

SEQ ID NO: 193436 - DNA, 120 bp, Artificial Sequence
  ENSG00000112851_24 (sequence is synthesized)
ctcagaaaagtggtccagttggatctgttgtgaaatctcatagcataactaatatggagattggagggctaaaaatctatgatattcttagtgataatggacctcagcagccaagtacaa

SEQ ID NO: 193437 - DNA, 120 bp, Artificial Sequence
  ENSG00000112851_25 (sequence is synthesized)
ccgttaaaatcacatctgctgttgatggaaaaaatatagtcaggagcaagtctgccacactgttgtatgatcaaccattgcaggtatttactggttcttcctcatcttctgatttaatat

SEQ ID NO: 193438 - DNA, 120 bp, Artificial Sequence
  ENSG00000112851_26 (sequence is synthesized)
ccaaatataataagaggccccacaagtggcccacaatctgcacctcaaatatatggtcctccacagtataatatccaatacagtagcagtgctgcagtcaaagacactttgtggcactcc

SEQ ID NO: 193439 - DNA, 120 bp, Artificial Sequence
  ENSG00000112851_27 (sequence is synthesized)
aaacaaaatccccaaatagaccatgccagttttcctcctcagctccttcctagatcagagagcacagaaaatcaaagttatgctaaacattctgccaatatgaatttctctaatcataac

SEQ ID NO: 193440 - DNA, 120 bp, Artificial Sequence
  ENSG00000112851_28 (sequence is synthesized)
aatgttcgagctaatactgcataccatttacatcagagacttggcccagcaagacatggggaaatgtgggccatctcaccaaacgaccgacttattcctgcagtaactcgaagtacaatc

SEQ ID NO: 193441 - DNA, 120 bp, Artificial Sequence
  ENSG00000112851_29 (sequence is synthesized)
cagcgacaaagtagtgtgtcctccacagcctctgtaaatcttggtgatccaggctctacaaggcgggctcagattcctgaaggagattatttatcatacagagagttccactcagcggga

SEQ ID NO: 193442 - DNA, 120 bp, Artificial Sequence
  ENSG00000112851_30 (sequence is synthesized)
agaactcctccaatgatgccaggatcacagagacccctttctgcacgaacatacagcatagatggtccaaatgcatcaagacctcagagtgctcgaccctctattaatgaaataccagag

SEQ ID NO: 193443 - DNA, 120 bp, Artificial Sequence
  ENSG00000112851_31 (sequence is synthesized)
agaactatgtcagttagtgatttcaattattcacggactagtccttcaaaaagaccaaatgcaagggttggttctgagcattctttattagatcctccaggaaaaagtaaagttcctcgt

SEQ ID NO: 193444 - DNA, 120 bp, Artificial Sequence
  ENSG00000112851_32 (sequence is synthesized)
gactggagagaacaagtacttcgacatattgaagccaaaaagttagaaaagatgcctttgagtaatggacagatgggccagcctctcaggcctcaggcaaattatagtcaaatacatcac

SEQ ID NO: 193445 - DNA, 120 bp, Artificial Sequence
  ENSG00000112851_33 (sequence is synthesized)
ccccctcaggcatctgtggcaaggcatccctctagagaacaactaattgattacttgatgctgaaagtggcccaccagcctccatatacacagccccattgttctcctagacaaggccat

SEQ ID NO: 193446 - DNA, 120 bp, Artificial Sequence
  ENSG00000112851_34 (sequence is synthesized)
gaactggcaaaacaagagattcgagtgagggttgaaaaggatccagaacttggatttagcatatcaggtggtgtcgggggtagaggaaacccattcagacctgatgatgatggtatattt

SEQ ID NO: 193447 - DNA, 120 bp, Artificial Sequence
  ENSG00000112851_35 (sequence is synthesized)
gtaacaagggtacaacctgaaggaccagcatcaaaattactgcagccaggtgataaaattattcaggctaatggctacagttttataaatattgaacatggacaagcagtgtccttgcta

SEQ ID NO: 193448 - DNA, 120 bp, Artificial Sequence
  ENSG00000112851_36 (sequence is synthesized)
aaaactttccagaatacagttgaactcatcattgtacgagaagtttcctcataagcactgtggacaaaaaaagcggggaagacagcaagatttattggaagatacttacaggggaaatta

SEQ ID NO: 193449 - DNA, 120 bp, Artificial Sequence
  ENSG00000112851_37 (sequence is synthesized)
atattttgactatttttatatataaagaagaactcaaaaaattatgttcaaatttgtacattaatgaaataatggaacttgtggttagagggaaagaaccactgtacagaatataaagga

SEQ ID NO: 193450 - DNA, 120 bp, Artificial Sequence
  ENSG00000112851_38 (sequence is synthesized)
gactgttgaattcataccatataaaacttgttaggtttttaaacatagcaatcaaggctacaaaaacaaacctgtgttgtttttgtatagattgtaggtttatttttggatttcatatac

SEQ ID NO: 193451 - DNA, 120 bp, Artificial Sequence
  ENSG00000112851_39 (sequence is synthesized)
atgactgaactgtgtgcaaggcaatagttagccttgattttagcccagagacagatggcagagctatctctctcatagcttttatgcccttatttttattcaactggtattaatgttttt

SEQ ID NO: 193452 - DNA, 120 bp, Artificial Sequence
  ENSG00000112851_40 (sequence is synthesized)
ctcctgaaactactttttttgatgtgggcaagagatttgaagtgttggcttttgctatgtgcatattgaattgaagagtgagtaggtgaaggtggtgctggtgggttcactttccaaggc

SEQ ID NO: 193453 - DNA, 120 bp, Artificial Sequence
  ENSG00000112851_41 (sequence is synthesized)
cagactaaaacagttattttctataaaaatctggaagcaaagaatggggatggggagagctacgtggtagtatgtttttattaggagaataatgcaataaaatatgtaatgtctttttta

SEQ ID NO: 193454 - DNA, 120 bp, Artificial Sequence
  ENSG00000112851_42 (sequence is synthesized)
taaagcaaaaaagacaataattgcatttatgagctcggcaggatctgttcttgtcatagccattgactatacatttgctactggtgattcagtttttaattttttagtcacaggaaattt

SEQ ID NO: 193455 - DNA, 120 bp, Artificial Sequence
  ENSG00000112851_43 (sequence is synthesized)
ttaactctactgtagatgcatgtccatgcattttctgtgttatggaaatccactgatttttttttttttttcaaatggtggtacttgcaatctgttttataattagtgctccatttaaat

SEQ ID NO: 193456 - DNA, 120 bp, Artificial Sequence
  ENSG00000112851_44 (sequence is synthesized)
ctaatttataatttttattttaagcagcaaatgaaacaaaaatggccagttttaagattgtgttgcctgtaacacaaaatgttacgaaggtttaggaaagcctctttgatttttgtttgg

SEQ ID NO: 193457 - DNA, 120 bp, Artificial Sequence
  ENSG00000112851_45 (sequence is synthesized)
ccttgcattgccttggtaaagtaaaaggaaacagtacacttggagctaggaaaccaaagcaagctttgtgaaactggcacagtgatagagaattgctgtggagagttatagagcaaaggg

SEQ ID NO: 193458 - DNA, 120 bp, Artificial Sequence
  ENSG00000112851_46 (sequence is synthesized)
atgggtccttgaggcctgccagtgtgtaaaggtgttcaaataaagggctgtttctacaggtaacattaaatgtgaactcaacacttccagagtctttaaagggtttctatgtgtatcagt

SEQ ID NO: 193459 - DNA, 120 bp, Artificial Sequence
  ENSG00000112851_47 (sequence is synthesized)
gtaatagtgttttaccaccaactgcctttctttgttcctagttactgtaacaaatatttgatgatagaggtttattaattttgtttatccagaccattaattttatttgtttttgttcta

SEQ ID NO: 193460 - DNA, 120 bp, Artificial Sequence
  ENSG00000112851_48 (sequence is synthesized)
tgtaatcaaataaaatttgagtaacatgtaatggtaaggattaatgcatggttatttggaccagaaaaaagtgccatagaagaccaataactgtttagttgaggctagtctggaaccttt

SEQ ID NO: 193461 - DNA, 120 bp, Artificial Sequence
  ENSG00000112851_49 (sequence is synthesized)
cattagagcaatatttggttattgcacttcatttttatttactaagaaatgcaatttgggaatttttaatctgttatgctttgtttatcaaccttgattttaattaagacttttataaga

SEQ ID NO: 193462 - DNA, 120 bp, Artificial Sequence
  ENSG00000112851_50 (sequence is synthesized)
ctagcttaaaacaccaaccaacattatttttgcaaaagtgagttggactcactttccattcttgctagtcagagtaagtaggcagcacttttaaaaatatgtgaactcaaatattgcact

SEQ ID NO: 193463 - DNA, 120 bp, Artificial Sequence
  ENSG00000112851_51 (sequence is synthesized)
tctttcaagatgttatcaattggttattgtactgtatagttttaataattttgattgaaaccctttaacaactctttgtaaattttaactcattttagttgattttcagtactatttaca

SEQ ID NO: 193464 - DNA, 120 bp, Artificial Sequence
  ENSG00000112851_52 (sequence is synthesized)
taggaattgatttttatggatatagtagaagaaatgtgctgtattttgataaaattcacttattgtatgtgtgttgtaatctaaaaaaaaaaagaatgacaaacagcttctttaagacaa

SEQ ID NO: 193465 - DNA, 120 bp, Artificial Sequence
  ENSG00000112851_53 (sequence is synthesized)
atcagaaatatatttaataagtataattgtgaagttttcaactactttaccttgaaccacatataccaattataattttggaaaaggaattaagcctcacggaacaatggatcttcagca

SEQ ID NO: 193466 - DNA, 120 bp, Artificial Sequence
  ENSG00000112851_54 (sequence is synthesized)
aaccttaacttcattgtctgcacattacattgaagtattataaatgcaacagatgttatatgcactggcattttatcctactctagttagttaaaattttatagtattcttgcaacacat

SEQ ID NO: 193467 - DNA, 120 bp, Artificial Sequence
  ENSG00000112851_55 (sequence is synthesized)
aaagttgcgtaagaaactttaccaagaggagtattatagccaagttttctttgaaagtattggaaaactaaaattaaatgacaaggactttgaattagaattttgctgtaataaagtttc

SEQ ID NO: 193468 - DNA, 120 bp, Artificial Sequence
  ENSG00000112851_56 (sequence is synthesized)
aaaatttgaataaaataattaaattttttgaggaagtggagaagacatttttagtttatatattgttgagtaaattgtagttaaggcctatacccataactaactttagtaagtattata

SEQ ID NO: 193469 - DNA, 120 bp, Artificial Sequence
  ENSG00000112851_57 (sequence is synthesized)
tagcaattcatcaaaaccacaactgtcttttagtgattttgtctttaagagtaatttcttactctaaccagtaaaaaaataatactgatcagagtaatttatacggcatacaatagttga

SEQ ID NO: 193470 - DNA, 120 bp, Artificial Sequence
  ENSG00000112851_58 (sequence is synthesized)
tacaatctaaagatttatgctaattaaggaattatcacttcatctgaatcaatgaaattctaaaattccctacatatttattttgtaaatattcttctgacctctttggactggatatga

SEQ ID NO: 193471 - DNA, 120 bp, Artificial Sequence
  ENSG00000112851_59 (sequence is synthesized)
agatatatatatatacacttaattcttttaaacacaaaacttgccataagcagaaccaaacttttaagtattaatttgctgcacttaaaaaatcccattagcagctatgtaatattttta

SEQ ID NO: 193472 - DNA, 120 bp, Artificial Sequence
  ENSG00000112851_60 (sequence is synthesized)
tcaaccaacatttattcattccaaatttttgtatatatctagatgaagtaacacatagaggatagataacaaactaatgatgtttaaactggtttatttacaaaattcggggttagagaa

SEQ ID NO: 193473 - DNA, 120 bp, Artificial Sequence
  ENSG00000112851_61 (sequence is synthesized)
attctcatgaaaaatatacaatttttttttagcattaaaaccctgtatatctaggtgtggaagaagtgtagtttatctcaaattattattatttacttctaaagggaggcattaagatgg

SEQ ID NO: 193474 - DNA, 120 bp, Artificial Sequence
  ENSG00000112851_62 (sequence is synthesized)
gaaatgtttctctgatggagattgacgtgtgaaatctatttggaagggtatttttttcactcagtctgttgcattcttacagccttctgttttaatgttcagtgaataggtttcttatga

SEQ ID NO: 193475 - DNA, 120 bp, Artificial Sequence
  ENSG00000112851_63 (sequence is synthesized)
aatggacattgaaataaaaattatgattcaagagcattaattgatgaacaagtgaacaagatgcctctttaaaaaaaaaaaagaaaaagtaatctagacaggcagccaactcagaccttt

SEQ ID NO: 193476 - DNA, 120 bp, Artificial Sequence
  ENSG00000112851_64 (sequence is synthesized)
gggtattcctttgtttctaaataaggaccttcagaaaaagttgaccatattctacctaaagctgctaattctttacagaattcataagcccaggggatagtaagtagtcatttagttttg

SEQ ID NO: 193477 - DNA, 120 bp, Artificial Sequence
  ENSG00000112851_65 (sequence is synthesized)
gaaagttcttaagagaatgctatcttctacagtctcatgaagcagtttttcaagattagaatctgtggtcagctataacgtacagtcctaatatccaaccacctgagaagctcatcctaa

SEQ ID NO: 193478 - DNA, 120 bp, Artificial Sequence
  ENSG00000112851_66 (sequence is synthesized)
gctgagaaagcctaaaatgttagagaatgtttagagaaaacacctgaaattttttttaagagaacaacctaggttttattgtagagaacaatcaaaatactcctgaacctttctatagaa

SEQ ID NO: 193479 - DNA, 120 bp, Artificial Sequence
  ENSG00000112851_67 (sequence is synthesized)
tctttaggagagaggctgacaaaaagaatccttctgttacaactttcttttctaatgtaacaaccagggacaatggtgatctgtcacgcatctgcccatctagcttctcaatcggcccac

SEQ ID NO: 193480 - DNA, 120 bp, Artificial Sequence
  ENSG00000112851_68 (sequence is synthesized)
ggttttatttcaggataaaatttgagaaactagtatcactggggaaggaagaaacctaagctgtaaaattatgcttttcccctcaagggattcaataaagcttatttttcatgaaaacaa

SEQ ID NO: 193481 - DNA, 120 bp, Artificial Sequence
  ENSG00000112851_69 (sequence is synthesized)
ctctagggatctgcatggcagccagggcagtcttgccttgagtgttgcagacagaagaggttctggtgggcacatttttcgaatgcctttgagtaatggacagatgggccagcctctcag

SEQ ID NO: 193482 - DNA, 120 bp, Artificial Sequence
  ENSG00000112851_70 (sequence is synthesized)
ataatcccagctctgcctttaactcactaactcattaacataatattctatgttgtatttcacttcatctgaccaaatatttatttttgatgaattcttatgtttatgtttgcttggact

SEQ ID NO: 193483 - DNA, 120 bp, Artificial Sequence
  ENSG00000112851_71 (sequence is synthesized)
gtaagttttctttgtatattcttgaaacacctataaagttttatttaccgattgaatacttaaatgtaagtgaaaatctaatagatgtttatgtaaatctaggtagacatcacctggatt

SEQ ID NO: 193484 - DNA, 120 bp, Artificial Sequence
  ENSG00000112851_72 (sequence is synthesized)
ccccactctattgcttacctttttgttttgtaatttgatcagttcaagttaaaacaatttaaccaaaaactatgaatgtttatgatataatgaaatgatttttaactttcttattgcttt

SEQ ID NO: 193485 - DNA, 120 bp, Artificial Sequence
  ENSG00000112851_73 (sequence is synthesized)
taactagtttgttacagtattactcagagaagtcagggagaaaacttgtaccatgattcaaatatttgcatggtgtggaggaaaaattgctccttggtactctgttatttatacatactg

SEQ ID NO: 193486 - DNA, 120 bp, Artificial Sequence
  ENSG00000112851_74 (sequence is synthesized)
ccccagacatccagttcaggagatccttgtcaagatggtatattcatttcaggacagcagaactactcatcagccacacttagtcacaaagatgttcctccagacagcttgatgaaagtg

SEQ ID NO: 193487 - DNA, 120 bp, Artificial Sequence
  ENSG00000112851_75 (sequence is synthesized)
aaggacaggatgagggaatagaacattgggattgggagtggtatctcttttagatacgtttgttaggaaagttgtttctaattcttgtcagatgtagtatgtctcacactgactgttggt

SEQ ID NO: 193488 - DNA, 120 bp, Artificial Sequence
  ENSG00000112851_76 (sequence is synthesized)
tttgtaatttttctgttttctaaaagctgtatcttcttactgataatgcatgagtgcatatttttattgtatacttctaagcagtgagtcctattttttatttctttacaaattatataa

SEQ ID NO: 193489 - DNA, 120 bp, Artificial Sequence
  ENSG00000112851_77 (sequence is synthesized)
aaacttgcccctgttgtgtaatccaaagcttaaatgtgttttttgtaatctactgctatggcatgtctctttgatttctccattaataattttctataataattttactgtagtaactat

SEQ ID NO: 193490 - DNA, 120 bp, Artificial Sequence
  ENSG00000112851_78 (sequence is synthesized)
taaaggttattagaaattcccagggcttcttttgccagataaagacattcataaaaattaattgaattactgctatcccctaccctaatcccaacagcctgaagtacttgagcaactaag

SEQ ID NO: 193491 - DNA, 120 bp, Artificial Sequence
  ENSG00000112852_0 (sequence is synthesized)
agatactcagctaaagaagcagcaagcaggaagaggaggctttctaaggcggtcgctccgggaaatccgggccctaggattgtccactcatcccagtatcagcgagatacggggagatag

SEQ ID NO: 193492 - DNA, 120 bp, Artificial Sequence
  ENSG00000112852_1 (sequence is synthesized)
agttagcgacaacgtgagccagagctggagcacgtttggtgagagaccagaaagcaatggaggccggagaggggaaggagcgcgttccgaaacaaaggcaagtcctgatattctttgttt

SEQ ID NO: 193493 - DNA, 120 bp, Artificial Sequence
  ENSG00000112852_2 (sequence is synthesized)
tgctgggcatagctcaggctagttgccagcctaggcactattcagtggccgaggaaacggagagtggctcctttgtggccaatttgttaaaagacctggggctggagataggagaacttg

SEQ ID NO: 193494 - DNA, 120 bp, Artificial Sequence
  ENSG00000112852_3 (sequence is synthesized)
ctgtgaggggggccagggtcgtttccaaaggaaaaaaaatgcatttgcagttcgataggcagaccggggatttgttgttaaatgagaaattggaccgggaggagctgtgcggccccacag

SEQ ID NO: 193495 - DNA, 120 bp, Artificial Sequence
  ENSG00000112852_4 (sequence is synthesized)
agccctgtgtcctacctttccaggtgttactagaaaatcccttgcagttttttcaggcggagctacggattagggacgtaaatgatcattccccagttttcctagacaaagaaatacttt

SEQ ID NO: 193496 - DNA, 120 bp, Artificial Sequence
  ENSG00000112852_5 (sequence is synthesized)
tgaaaattccagaaagtatcactcctggaactactttcttaatagaacgtgcccaggacttggatgtaggaaccaacagtctccaaaattacacaatcagtcccaatttccactttcatc

SEQ ID NO: 193497 - DNA, 120 bp, Artificial Sequence
  ENSG00000112852_6 (sequence is synthesized)
ttaatttacaagacagtctcgatggcataatattaccacagctggtgctgaacagagccctggatcgcgaggagcagcctgagatcaggttaaccctcacagcgctagatggcgggagtc

SEQ ID NO: 193498 - DNA, 120 bp, Artificial Sequence
  ENSG00000112852_7 (sequence is synthesized)
cacccaggtccggcacggccctggtacggattgaagttgtggacatcaatgacaacgtcccagagtttgcaaagctgctctatgaggtgcagatcccggaggacagccccgttggatccc

SEQ ID NO: 193499 - DNA, 120 bp, Artificial Sequence
  ENSG00000112852_8 (sequence is synthesized)
aggttgccatcgtctctgccagggatttagacattggaactaatggagaaatatcttatgcattttcccaagcatctgaagacattcgcaaaacgtttcgattaagtgcaaaatcgggag

SEQ ID NO: 193500 - DNA, 120 bp, Artificial Sequence
  ENSG00000112852_9 (sequence is synthesized)
aactgcttttaagacagaaactggatttcgaatccatccagacatacacagtaaatattcaggcgacagatggtgggggcctatctggaacttgtgtggtatttgtccaagtgatggatt

SEQ ID NO: 193501 - DNA, 120 bp, Artificial Sequence
  ENSG00000112852_10 (sequence is synthesized)
tgaatgacaatcctccggaactaactatgtcgacacttatcaatcagatcccagaaaacttgcaggacaccctcattgctgtattcagcgtttcagatcctgactccggagacaacggaa

SEQ ID NO: 193502 - DNA, 120 bp, Artificial Sequence
  ENSG00000112852_11 (sequence is synthesized)
ggatggtgtgctccatccaagatgatcttccttttttcttgaaaccttctgttgagaacttttacactctggtgataagcacggccctggaccgggagaccagatccgaatacaacatca

SEQ ID NO: 193503 - DNA, 120 bp, Artificial Sequence
  ENSG00000112852_12 (sequence is synthesized)
atcaccatcaccgtcaccgacttcgggacacccaggctgaaaaccgagcacaacataaccgtgctggtctccgacgtcaatgacaacgcccccgccttcacccaaacctcctacaccctg

SEQ ID NO: 193504 - DNA, 120 bp, Artificial Sequence
  ENSG00000112852_13 (sequence is synthesized)
acagccccgccctgcacatcggcagcgtcagcgccacagacagagactcgggcaccaacgcccaggtcacctactcgctgctgccgccccaggacccgcacctgcccctcgcctccctgg

SEQ ID NO: 193505 - DNA, 120 bp, Artificial Sequence
  ENSG00000112852_14 (sequence is synthesized)
tcgcctccctggtctccatcaacgcggacaacggccacctgttcgctctccagtcgctggactacgaggccctgcaggcgttcgagttccgcgtgggcgccgcagaccgcggctccccgg

SEQ ID NO: 193506 - DNA, 120 bp, Artificial Sequence
  ENSG00000112852_15 (sequence is synthesized)
tggacggcttctcccagccctacctgctgctcccggaggcggcaccggcccaggcccaggccgacttgctcaccgtctacctggtggtggcgttggcctcggtgtcttcgctcttcctct

SEQ ID NO: 193507 - DNA, 120 bp, Artificial Sequence
  ENSG00000112852_16 (sequence is synthesized)
gctgtgcaggaggagcagggcggcctcggtgggtcgctgctcggtgcccgagggcccctttccagggcagatggtggacgtgagcggcaccgggaccctgtcccagagctaccagtacga

SEQ ID NO: 193508 - DNA, 120 bp, Artificial Sequence
  ENSG00000112852_17 (sequence is synthesized)
ggaccctgtcccagagctaccagtacgaggtgtgtctgactggaggctccgggacaaatgagttcaagttcctgaagccaattatccccaacttcgttgctcagggtgcagagagggtta

SEQ ID NO: 193509 - DNA, 120 bp, Artificial Sequence
  ENSG00000112852_18 (sequence is synthesized)
gcgaggcaaatcccagtttcaggaagagctttgaattcacttaagtgttaataaggatctactgaggctagtctcgtttaatttgtggaaagtccttttttactgctttgcccattggag

SEQ ID NO: 193510 - DNA, 120 bp, Artificial Sequence
  ENSG00000112852_19 (sequence is synthesized)
gtgtctccttttattagaaagtaaccatcttattccaattctatgcatgttactggtatttataaatgtatgagtttttttgcggtataataaatgtaaattttctttgtattctaattg

SEQ ID NO: 193511 - DNA, 120 bp, Artificial Sequence
  ENSG00000112852_20 (sequence is synthesized)
ttggttagtttcattgcaatttaattgcatttaaagtgtaaaagtaaattttgtattttcagaaatctttaagttagagcatcttttccagacctcacagtctatggtcctagataattt

SEQ ID NO: 193512 - DNA, 120 bp, Artificial Sequence
  ENSG00000112852_21 (sequence is synthesized)
tgaagtcctacatttgaaaatatttgttatcattacatgagttatattttccagcccagaatatttgtgttttttatatcctcttaggctagtgtaaattctatcctgtgaattcacatt

SEQ ID NO: 193513 - DNA, 120 bp, Artificial Sequence
  ENSG00000112852_22 (sequence is synthesized)
ctatcctgtgaattcacattggctaaccctttaaataggtatatttatgaataatatagcaagcaccgtccttacgtttttcaatatatgtaatttttttttttttttgagatggagttt

SEQ ID NO: 193514 - DNA, 71 bp, Artificial Sequence
  ENSG00000112852_23 (sequence is synthesized)
ttttttttgagatggagttttgcacttgttgctcaggctgtagtggagtgcaatggcgcaatctcggctcg

SEQ ID NO: 193515 - DNA, 120 bp, Artificial Sequence
  ENSG00000112852_24 (sequence is synthesized)
ccaccgccccccagtccaatatgtatacttctttcaagtgttgacatatgaaaagtattagtctttagagattgtaagaattttaactgttggattctacaaggcactaacatcataagt

SEQ ID NO: 193516 - DNA, 120 bp, Artificial Sequence
  ENSG00000112852_25 (sequence is synthesized)
gctctaataaatttttgtcaaaagtcaatcattaatattcaaaaatgtagataaataatacatgtctagcaattttcaaaggcatgctaattcatcatgctttctctttcaaatagtttt

SEQ ID NO: 193517 - DNA, 120 bp, Artificial Sequence
  ENSG00000112852_26 (sequence is synthesized)
tttaagagccctctgcttattccagtccccccctttaaaatcttttaaaattattaataacctattaactttgagcacttcattaaaatccaaaaaatttgagggagtacatgtctttgt

SEQ ID NO: 193518 - DNA, 120 bp, Artificial Sequence
  ENSG00000112852_27 (sequence is synthesized)
cctttacctttagaaccctcaaacatagcttggtattgctgtttttaaaattttctggagcatttaggattcacttagaaacaagcctttagggagaaaaatttatctagcaccactcac

SEQ ID NO: 193519 - DNA, 120 bp, Artificial Sequence
  ENSG00000112852_28 (sequence is synthesized)
tctatttttttgcactgactacttctatttttccccctttcatttccctagacttttcaatgcttttttataaaggtgcttgagttctgtttctcaacagctccctcatttattgaatga

SEQ ID NO: 193520 - DNA, 120 bp, Artificial Sequence
  ENSG00000112852_29 (sequence is synthesized)
ttcacacagtcactggaatattataggctcttaataaaatttttgaatgattgaaagagagaaaagtattttacctgtgatatattgatatttaaataaactagaacacttaaaggaaaa

SEQ ID NO: 193521 - DNA, 120 bp, Artificial Sequence
  ENSG00000112855_0 (sequence is synthesized)
gccgaagctggctactaagggaacttgggaggatcccacctcagccttcgtgactagtgaggtgcgcaaacgcccgagttttccctggtgcgcgggttccgcctttgcagtgccctccac

SEQ ID NO: 193522 - DNA, 120 bp, Artificial Sequence
  ENSG00000112855_1 (sequence is synthesized)
ccttcctggtgtctgacccgcctccttcccaggccttttgttcctgtcccggaaagccggcgtcctgccgcgcgatgcccctgctcggacttcttcccaggagggcctgggcttcgctgc

SEQ ID NO: 193523 - DNA, 120 bp, Artificial Sequence
  ENSG00000112855_2 (sequence is synthesized)
tcagccagctcctgcgaccgccctgcgcttcgtgcaccggggcggtccgttgccaaagccaggttgcagaggcagtgttaacatcccaactgaaagcacatcaagagaaaccaaatttta

SEQ ID NO: 193524 - DNA, 120 bp, Artificial Sequence
  ENSG00000112855_3 (sequence is synthesized)
ttatcaagaccccaaagggtaccagggatcttagtcctcagcatatggttgtgagggagaaaattcttgatttggttatcagctgctttaaacgtcatggagcaaaggggatggacaccc

SEQ ID NO: 193525 - DNA, 120 bp, Artificial Sequence
  ENSG00000112855_4 (sequence is synthesized)
cagcatttgagctgaaggaaaccctgactgagaagtatggagaggactctgggctcatgtatgatctgaaggatcaaggtggagagctgttgtccctccgctatgaccttactgttccct

SEQ ID NO: 193526 - DNA, 120 bp, Artificial Sequence
  ENSG00000112855_5 (sequence is synthesized)
ttgctcgttatctggccatgaataaggtgaagaagatgaaacgttatcatgttggaaaggtgtggcggcgagagagcccaaccatagtccaaggccgttatagggagttctgccagtgtg

SEQ ID NO: 193527 - DNA, 120 bp, Artificial Sequence
  ENSG00000112855_6 (sequence is synthesized)
attttgacattgctggtcagtttgaccctatgatccccgatgcagagtgtttgaagatcatgtgtgaaatcctaagtggattgcagttgggagactttctcattaaggtaaatgaccggc

SEQ ID NO: 193528 - DNA, 120 bp, Artificial Sequence
  ENSG00000112855_7 (sequence is synthesized)
ggattgtggatgggatgtttgctgtctgtggtgttcctgaaagcaagttccgtgccatctgctcctccatagataaactagacaagatggcttggaaagatgtgagacatgagatggtgg

SEQ ID NO: 193529 - DNA, 120 bp, Artificial Sequence
  ENSG00000112855_8 (sequence is synthesized)
tgaagaaaggcctggctcctgaggtggctgatcgaattggggactatgtccagtgtcatggtggggtatccctagtagagcaaatgtttcaggatcccagactatcccagaacaagcagg

SEQ ID NO: 193530 - DNA, 120 bp, Artificial Sequence
  ENSG00000112855_9 (sequence is synthesized)
ccctggagggcctgggagacctaaagctgctatttgaatacctgactttatttggaattgctgataagatctcctttgacctcagcctggctcggggcctagactactatacaggagtga

SEQ ID NO: 193531 - DNA, 120 bp, Artificial Sequence
  ENSG00000112855_10 (sequence is synthesized)
gctgctggtgggcgctatgatgggctggtgggcatgtttgaccccaagggccacaaggtgccatgtgtgggactcagcattggggttgagcgaatcttctacattgtggagcagaggatg

SEQ ID NO: 193532 - DNA, 120 bp, Artificial Sequence
  ENSG00000112855_11 (sequence is synthesized)
aagaccaaaggtgagaaggtgcggactacagagactcaagtgtttgtggccacaccacagaagaactttctccaagaacggttgaagcttattgcagagctttgggattctggaatcaag

SEQ ID NO: 193533 - DNA, 120 bp, Artificial Sequence
  ENSG00000112855_12 (sequence is synthesized)
gcagagatgctatacaagaacaaccccaaactattaacccagctgcactattgtgagagcacaggcattccactggtggtcattattggtgagcaagaactgaaagaaggggtcatcaag

SEQ ID NO: 193534 - DNA, 120 bp, Artificial Sequence
  ENSG00000112855_13 (sequence is synthesized)
atccgttcagtggccagcagagaggaggtggccattaaacgggaaaattttgtggctgaaattcagaagcgactgtctgagtcttgatccttgcctgattcccatctgctgctctttgta

SEQ ID NO: 193535 - DNA, 120 bp, Artificial Sequence
  ENSG00000112855_14 (sequence is synthesized)
gaaaaggtttcctctagaactgaattcctctggaattgagtgatggacttcacaacaactagccaggaagggtgacaagtaccttctgcctcctccattcttcctgggtgcagaactgta

SEQ ID NO: 193536 - DNA, 120 bp, Artificial Sequence
  ENSG00000112855_15 (sequence is synthesized)
gaagaccctgaggactcctgggctagtgtgagcagctattctgcatgggtgcagatggctggatgtgaaagagacatgctctagctgcagaggcaaatttgaagtgccacggaacgttgt

SEQ ID NO: 193537 - DNA, 120 bp, Artificial Sequence
  ENSG00000112855_16 (sequence is synthesized)
caagaggtagtgagattgttgctgtgagcaaggctctgggagagtcacctcaggctcaggattctgaaccattgagatcagaaaccagatacttagccttctactgtagctacggaacca

SEQ ID NO: 193538 - DNA, 120 bp, Artificial Sequence
  ENSG00000112855_17 (sequence is synthesized)
gattctggtgaatttgtccacaatcagccattggcctgtctggggagtttttggaagacagcaaagaggggcaatggctgctttcagctttgaggacagatgctatcctaagggcatggc

SEQ ID NO: 193539 - DNA, 120 bp, Artificial Sequence
  ENSG00000112855_18 (sequence is synthesized)
agtacccatgttgatttgacatctctctagcccatccattgcttacagtagaagagtggggctgtatgcttgataatcttgaacattgaacttaatagatgacttgacaaggtagagatc

SEQ ID NO: 193540 - DNA, 120 bp, Artificial Sequence
  ENSG00000112855_19 (sequence is synthesized)
tgatattttgagattttggagaccatttcctgtgccagaatcactgctctattccataccgtgccatggaggctgttttagaagtggttggataacatgttaaataaaatattaagtgta

SEQ ID NO: 193541 - DNA, 120 bp, Artificial Sequence
  ENSG00000112855_20 (sequence is synthesized)
ctgtgggagaagtctggatttggcctaatactgtttatgcaagtcccaaacttgggtgactccaacccttaagcctgcaactgtaggactttcctagtaaagctgttgtatttcctatat

SEQ ID NO: 193542 - DNA, 120 bp, Artificial Sequence
  ENSG00000112855_21 (sequence is synthesized)
gtctgtactcttcctgtgaaatttccatcctttttgtgtgtcaggaaagtaggtactgccattgttttgagtggaagggcattgacaagcacttgggtcactgacattgagttctcaggt

SEQ ID NO: 193543 - DNA, 120 bp, Artificial Sequence
  ENSG00000112855_22 (sequence is synthesized)
tagaccctatctagcttctgccctgccctcaaatccataccactagtgaaaaataaggagattgtggctggaagtgggctattttggggtggaaggtaaggaggcatactctgaaggaag

SEQ ID NO: 193544 - DNA, 120 bp, Artificial Sequence
  ENSG00000112855_23 (sequence is synthesized)
aggatcccacctcagccttcgtgactagtgagggtctccagatctgaacgcatagcctcgcggcctgtattccagtagtgttacaatcggtttttatcgagtgcccactatgtactgaca

SEQ ID NO: 193545 - DNA, 120 bp, Artificial Sequence
  ENSG00000112855_24 (sequence is synthesized)
ctgaactaagcgatttggatgcctggtcatttaatccttggagcaatcttgagaggttggagttttgatttccattctgcagttgaggaaacggaggctgcaagattaaatgaatgactt

SEQ ID NO: 193546 - DNA, 120 bp, Artificial Sequence
  ENSG00000112855_25 (sequence is synthesized)
acactttttcctgaaactcttggactcaaacagtaacatttttaagcgaaatatatgaatattcctagtaaatgagatgactaaagatcagaagtagactgagttcatcttagaatttac

SEQ ID NO: 193547 - DNA, 120 bp, Artificial Sequence
  ENSG00000112855_26 (sequence is synthesized)
ctcaaaatgaatctcagaaaaacattttcagatgtcagagagttttggattttggaattgcagataagggattgtgtacttgaacttggacttctcttagggcagataatcgccatagta

SEQ ID NO: 193548 - DNA, 120 bp, Artificial Sequence
  ENSG00000112855_27 (sequence is synthesized)
tggaaccaccacatcctctatttttggaagggcatacagcgtgctgggtgaagagtctttgcaggttggtggtcaacagggtcagagatgccacaggtctggccagtgtccagagaagcc

SEQ ID NO: 193549 - DNA, 120 bp, Artificial Sequence
  ENSG00000112855_28 (sequence is synthesized)
cctatcccattagagtgccttggaggactgacctctgccttgcatgtctctctgaccccttttaatgttctttacagtaaattttaaaaatatatactattcttgagatactaggtgcgg

SEQ ID NO: 193550 - DNA, 120 bp, Artificial Sequence
  ENSG00000112855_29 (sequence is synthesized)
gaagctggctactaagggaacttgggaggatcccacctcagccttcgtgactagtgagggtgaagagtctttgcaggttgcagaggcagtgttaacatcccaactgaaagcacatcaaga

SEQ ID NO: 193551 - DNA, 120 bp, Artificial Sequence
  ENSG00000112855_30 (sequence is synthesized)
cttcctgttgctcagggtgaagagtctttgcaggttggtggtcaacagggtcagagatgccacaggtctggccagtgtccagagaagccacatctcacattcattcttctgccaggttgc

SEQ ID NO: 193552 - DNA, 120 bp, Artificial Sequence
  ENSG00000112874_0 (sequence is synthesized)
aagactgcatccggctccaggaaaagcgagtgggatatcccaatctttggactgcatcctggttgcctctactgtggtcacctttgggaagaaatgtcttctgtaaaaagaagtctgaag

SEQ ID NO: 193553 - DNA, 120 bp, Artificial Sequence
  ENSG00000112874_1 (sequence is synthesized)
caagaaatagttactcagtttcactgttcagctgctgaaggagatattgccaagttaacaggaatactcagtcattctccatctcttctcaatgaaacttctgaaaatggctggactgct

SEQ ID NO: 193554 - DNA, 120 bp, Artificial Sequence
  ENSG00000112874_2 (sequence is synthesized)
ttaatgtatgcggcaaggaatgggcacccagagatagtccaatttctgcttgagaaagggtgtgacagatcaattgtcaataaatcaaggcagactgcactggacattgctgtattttgg

SEQ ID NO: 193555 - DNA, 120 bp, Artificial Sequence
  ENSG00000112874_3 (sequence is synthesized)
ggttataagcatatagctaatttactagctactgctaaaggtgggaagaagccttggttcctaacgaatgaagtggaagaatgtgaaaattattttagcaaaacactactggaccggaaa

SEQ ID NO: 193556 - DNA, 120 bp, Artificial Sequence
  ENSG00000112874_4 (sequence is synthesized)
agtgaaaagagaaataattctgactggctgctagctaaagaaagccatccagccacagtttttattcttttctcagatttaaatcccttggttactctaggtggcaataaagaaagtttc

SEQ ID NO: 193557 - DNA, 120 bp, Artificial Sequence
  ENSG00000112874_5 (sequence is synthesized)
caacagccagaagttaggctttgtcagctgaactacacagatataaaggattatttggcccagcctgagaagatcaccttgatttttcttggagtagaacttgaaataaaagacaaacta

SEQ ID NO: 193558 - DNA, 120 bp, Artificial Sequence
  ENSG00000112874_6 (sequence is synthesized)
cttaattatgctggtgaagtcccgagagaggaggaagatggattggttgcctggtttgctctaggtatagatcctattgctgctgaagaattcaagcaaagacatgaaaattgttacttt

SEQ ID NO: 193559 - DNA, 120 bp, Artificial Sequence
  ENSG00000112874_7 (sequence is synthesized)
cttcatcctcctatgccagcccttctgcaattgaaagaaaaagaagctggggttgtagctcaagcaagatctgttcttgcctggcacagtcgatacaagttttgcccaacctgtggaaat

SEQ ID NO: 193560 - DNA, 120 bp, Artificial Sequence
  ENSG00000112874_8 (sequence is synthesized)
gcaactaaaattgaagaaggtggctataagagattatgtttaaaagaagactgtcctagtctcaatggcgtccataatacctcatacccaagagttgatccagtagtaatcatgcaagtt

SEQ ID NO: 193561 - DNA, 120 bp, Artificial Sequence
  ENSG00000112874_9 (sequence is synthesized)
attcatccagatgggaccaaatgccttttaggcaggcagaaaagatttcccccaggcatgtttacttgccttgctggatttattgagcctggagagacaatagaagatgctgttaggaga

SEQ ID NO: 193562 - DNA, 120 bp, Artificial Sequence
  ENSG00000112874_10 (sequence is synthesized)
gaagtagaagaggaaagtggagtcaaagttggccatgttcagtatgttgcttgtcaaccatggccaatgccttcctccttaatgattggttgcttagctctagcagtgtctacagaaatt

SEQ ID NO: 193563 - DNA, 120 bp, Artificial Sequence
  ENSG00000112874_11 (sequence is synthesized)
aaagttgacaagaatgaaatagaggatgcccgctggttcactagagaacaggtcctggatgttctgaccaaagggaagcagcaggcattctttgtgccaccaagccgagctattgcacat

SEQ ID NO: 193564 - DNA, 120 bp, Artificial Sequence
  ENSG00000112874_12 (sequence is synthesized)
caattaatcaaacactggattagaataaatcctaatctctaaatctaagaactaagctttgagtattatttaataatttctaataacactcattcctcaagtgatattagagattattca

SEQ ID NO: 193565 - DNA, 120 bp, Artificial Sequence
  ENSG00000112874_13 (sequence is synthesized)
gtactcttgagagtgtcacaacacaaaatacgatgttgggttttcgaaatattttcaaagtgttctgtcttaatcacaaattcatatttttacacatttttacaatattgcctcagatta

SEQ ID NO: 193566 - DNA, 120 bp, Artificial Sequence
  ENSG00000112874_14 (sequence is synthesized)
ttgggtcagtcttctctgaactttttctctcttggtttcttttcttccttcacagttttatctcacaaaaccatttttctaataagagacatcatgttggaaagatgttctagaaatgtg

SEQ ID NO: 193567 - DNA, 120 bp, Artificial Sequence
  ENSG00000112874_15 (sequence is synthesized)
cataaatttcagtgcctcttgtaagcattaaactgatgatgaagaaagttcctgatttgagaaatgaatcaaagtaattttaatgaatttttagcttgtattagcttgagttagctggca

SEQ ID NO: 193568 - DNA, 120 bp, Artificial Sequence
  ENSG00000112874_16 (sequence is synthesized)
ttgattttttagtccttttgttacctttaagttgtcaatatatggtttttgttcatctccccattgtagtcccacttgctctttcctgggggttccattgttctagcagtggaggtgtta

SEQ ID NO: 193569 - DNA, 120 bp, Artificial Sequence
  ENSG00000112874_17 (sequence is synthesized)
tagtgtcgccactcgtctaatttgaccagtgttaagaattttctaatttaataatttaatagtgatctcaataccacaccctcatggaaggagaaaagcatactattatatctgggacct

SEQ ID NO: 193570 - DNA, 120 bp, Artificial Sequence
  ENSG00000112874_18 (sequence is synthesized)
ctcttttagacctaaaattaattaacatatctacttatatgttacttatacctaaagctgttattaagacaaaccaagattctctgcttttgcactgaaattaaacttgaaaggaattct

SEQ ID NO: 193571 - DNA, 120 bp, Artificial Sequence
  ENSG00000112874_19 (sequence is synthesized)
cctcaaaggtcggatattaaataagtcccaggcagatttacatatttaatttaaaacattggctttatttcattttgtgatgagtgatgtatctgtgttaacaaaaaattgtataatcat

SEQ ID NO: 193572 - DNA, 120 bp, Artificial Sequence
  ENSG00000112874_20 (sequence is synthesized)
taccaatactatttattatgctcaaatatatcttggctttgaccttatttcaacacattctaagaagccttgacaaagtaagtatattttagagctgaatcagtaagattctagagaaag

SEQ ID NO: 193573 - DNA, 120 bp, Artificial Sequence
  ENSG00000112874_21 (sequence is synthesized)
caaaacatagtagttcacaattttgcaacatagaaagtcacattttgaaaggctattttgaaattgatttaatagctattatagtttatgaatatcaaaatttgtataatttgcatcttt

SEQ ID NO: 193574 - DNA, 120 bp, Artificial Sequence
  ENSG00000112874_22 (sequence is synthesized)
actaatgtatgctagagctacaagagaccttaaggataatatatgaaattagctttccttattttatagataaggaaaaagaaattgtgaaaggtgaatttacctaattagtgaaagtta

SEQ ID NO: 193575 - DNA, 120 bp, Artificial Sequence
  ENSG00000112874_23 (sequence is synthesized)
cataactaattacaacagtctgtactatataatgcagaggacgattctccctgtaaaaggaactagaagctattactaaaaatatatatagacaaaattaaaagaaggaatgataagaat

SEQ ID NO: 193576 - DNA, 120 bp, Artificial Sequence
  ENSG00000112874_24 (sequence is synthesized)
tgttaattaaaattttagatacttaacatttatttaacttaaataaaagataactgtcagataaaactttattttactaatgagcagtgattttcttaggaattgatgaaggcttattgg

SEQ ID NO: 193577 - DNA, 120 bp, Artificial Sequence
  ENSG00000112874_25 (sequence is synthesized)
aattgatgaaggcttattggtatcaagaatttaaaccaaattaaaactgacagaggacatttagatacataataaaattcgagctacataagtatatggaaaataatgtaccttgattat

SEQ ID NO: 193578 - DNA, 120 bp, Artificial Sequence
  ENSG00000112874_26 (sequence is synthesized)
tatgaaatagagcatcttgaaattcagttttactctaaatgtacttttaatacttgcagattctaagattacattgtaaaattccaggttttcataatgttaaaataggaaagtagaata

SEQ ID NO: 193579 - DNA, 120 bp, Artificial Sequence
  ENSG00000112874_27 (sequence is synthesized)
taaagtatcaacaagtgtagttatacattttgttttggatatttaatccttacttgggaaaaaatcagcatctaggtaaattattattttaataacaactcttaaattgccaacctctga

SEQ ID NO: 193580 - DNA, 120 bp, Artificial Sequence
  ENSG00000112874_28 (sequence is synthesized)
gaggtgaaaagctatgtaaatagaaggaatggccagttcaaaagaatagtagatgtgatagtgccgtgaatgtattctactggaaatgaatgtaataatacattaaatttttaaaatcta

SEQ ID NO: 193581 - DNA, 120 bp, Artificial Sequence
  ENSG00000112874_29 (sequence is synthesized)
attgagcctggtaagccatttcttaataatttatatttaatttataattttaaaatacaaagtttaggtaacatttgagaaataatctctgataaattatcatgttataaaactcggtta

SEQ ID NO: 193582 - DNA, 120 bp, Artificial Sequence
  ENSG00000112874_30 (sequence is synthesized)
atgtatgcggcaaggaatgggcacccagagatagtccaatttctgcttgagaaagggtaaacattttaggctgtaccacctgaaagggtttgtggtttaatttctttgttacatatttac

SEQ ID NO: 193583 - DNA, 120 bp, Artificial Sequence
  ENSG00000112874_31 (sequence is synthesized)
taaaactttgtaacctttttcattgagaaattatttctttatagcaaagcaaatttatgaggagtctaattataaattttcctcccaaatagaaaatgcagatctcactatgactaccaa

SEQ ID NO: 193584 - DNA, 120 bp, Artificial Sequence
  ENSG00000112874_32 (sequence is synthesized)
ggacttcttgtagaattttggtatctctttatagtgcataaagcttaatactgttttattttgtgagtaattatccagaaagtgtaagtatccactgtctcttaactttttgtcatttat

SEQ ID NO: 193585 - DNA, 120 bp, Artificial Sequence
  ENSG00000112874_33 (sequence is synthesized)
gattgttcttttaaccttcccaatagtaaactatgtaacaaaagaaaaaaaatctatgtaatcattaaaaagaaggactttaatatgtatctggaaatattttagtgaaataaatacgga

SEQ ID NO: 193586 - DNA, 120 bp, Artificial Sequence
  ENSG00000112874_34 (sequence is synthesized)
gaaagtgtttacttcctattttactttttctccccaattttttcttccatctataggtgtgacagatcaattgtcaataaatcaaggcagactgcactggacattgctgtattttggggt

SEQ ID NO: 193587 - DNA, 120 bp, Artificial Sequence
  ENSG00000112877_0 (sequence is synthesized)
gtccgagggctccgtttgaaacatggcgcgggctggccctcggctggtgctgagcgaggaggcggttcgggcgaagagcggcttagggcctcaccgcgacctggctgagcttcagtcatt

SEQ ID NO: 193588 - DNA, 120 bp, Artificial Sequence
  ENSG00000112877_1 (sequence is synthesized)
gtctattcctggaacttaccaagagaagatcacccacctgggacattctctgatgagtttaacaggtctgaaatctttggatctctcgcgcaactccttggttagtctggagggcattca

SEQ ID NO: 193589 - DNA, 120 bp, Artificial Sequence
  ENSG00000112877_2 (sequence is synthesized)
gtacctgactgcattggagagtctcaatctctactacaactgcatctcctcgttggcagaagtgtttcggctccacgccttaaccgagctcgtggatgtggacttccggctgaaccccgt

SEQ ID NO: 193590 - DNA, 120 bp, Artificial Sequence
  ENSG00000112877_3 (sequence is synthesized)
ggtgaaggttgagcctgactaccgcctttttgttgtgcacctgctccccaagctccagcagctggacgatcgccccgtgagagcaagcgagcggaaggcttcccgactgcattttgcatc

SEQ ID NO: 193591 - DNA, 120 bp, Artificial Sequence
  ENSG00000112877_4 (sequence is synthesized)
agaggactcactcgactccaaagagagcgtcccagcttctttgaaagagggcagaccacaccaccccagagccaagtgcaccgaggccttggccaagcagagcctggtcatggatgcgga

SEQ ID NO: 193592 - DNA, 120 bp, Artificial Sequence
  ENSG00000112877_5 (sequence is synthesized)
tgacgaggcagtcctgaacctcattgcagagtgcgagtgggacctcggcaggcctcccgggagcacgagcttcagccagaaggggcgtgaggccgactctcgtggttcccaagaatccag

SEQ ID NO: 193593 - DNA, 120 bp, Artificial Sequence
  ENSG00000112877_6 (sequence is synthesized)
acatctgttgagcccgcagttggtacagtaccagtgtggggactctgggaagcagggccgtgagacgaggaggagcagctgcagagggtgctgtctggagaagatgccttggagccagct

SEQ ID NO: 193594 - DNA, 120 bp, Artificial Sequence
  ENSG00000112877_7 (sequence is synthesized)
ctgtggagagcttccgccactgtacggagcggagccagaggcctcccgtgcccccaggccacacacgtacttcaccccacacccagactccatggataccgaggactcggcctcttctca

SEQ ID NO: 193595 - DNA, 120 bp, Artificial Sequence
  ENSG00000112877_8 (sequence is synthesized)
gaagttggatttgtcaggagaaatggtgcctggtcccctgccagcccccggaaagtgcaggaagcgaagaatgcctgttggaagattccagacgttttcggaccaggagggtttgggctg

SEQ ID NO: 193596 - DNA, 120 bp, Artificial Sequence
  ENSG00000112877_9 (sequence is synthesized)
ctcagcctgaggcctcggagactgaggagcagaggtctcggggtgtgaccgacaccagagagccgtctcccgggtcacactcggctctacccgggaagaagacggccctgcaggcggcgc

SEQ ID NO: 193597 - DNA, 120 bp, Artificial Sequence
  ENSG00000112877_10 (sequence is synthesized)
tcctggagacgctcttggacctggtggacaggagctggggcggctgcaggtccctgcacagcaacgaggcattccttgctcaggcaagacacatcttgtcatctgttgaagaattcacag

SEQ ID NO: 193598 - DNA, 120 bp, Artificial Sequence
  ENSG00000112877_11 (sequence is synthesized)
cagctcaggacagctctgcgatggtgggtgaagatgtcggctccctggctctggagagtaagtccctgcaaagccgccttgctgagcagcagcagcagcacgcccgggagatgagcgagg

SEQ ID NO: 193599 - DNA, 120 bp, Artificial Sequence
  ENSG00000112877_12 (sequence is synthesized)
tgacggcggagctgcaccacacacacaaggagctggatgatttgagacaacatttagataaatctttggaagagaacagtaggttaaaatcgcttttgttgagtatgaaaaaggaagtga

SEQ ID NO: 193600 - DNA, 120 bp, Artificial Sequence
  ENSG00000112877_13 (sequence is synthesized)
agagtgcagacactgcagccacgttaaatttgcagatcgctggacttcaaacaagtgtgaagaggctgtgtggcgagattgtggaactgaagcagcacctggagcactacgacaagatcc

SEQ ID NO: 193601 - DNA, 120 bp, Artificial Sequence
  ENSG00000112877_14 (sequence is synthesized)
aggagctcacgcagatgctgcaggagagccacagctccctggtcagcaccaatgaacacctgctgcaggagctgagccaggtgcgggcgcagcacagagccgaggtggagcagatgcact

SEQ ID NO: 193602 - DNA, 120 bp, Artificial Sequence
  ENSG00000112877_15 (sequence is synthesized)
ggagctaccaggagctcaagaagaccatggccctgtttccacacagcagcgccagccatggaggctgccaggcctgctgactcctgccgagaagctgggccaccccttaagcttcctggt

SEQ ID NO: 193603 - DNA, 120 bp, Artificial Sequence
  ENSG00000112877_16 (sequence is synthesized)
aaagttacattgtctgcacctttgtacttctttattgagtgtactggctggcaagagttctctcttctgttggtaattatttaggatttttggaatgtattcaggacctgtagcttggtt

SEQ ID NO: 193604 - DNA, 120 bp, Artificial Sequence
  ENSG00000112877_17 (sequence is synthesized)
ttctaaagcacctcgtaaaatgatatgattactccaagccctctgcatgttttcagacagaacacattgacatattttgagacaaactgactattaatcttgtatccagtatcctgagat

SEQ ID NO: 193605 - DNA, 120 bp, Artificial Sequence
  ENSG00000112877_18 (sequence is synthesized)
gaagtaaatgcagtgttctactgcctgatgtgaaagagagctatgtatgataattaaagaaaataattttctgtgtaacaagcaatctttatttaataaacaaatacattgttctgaaaa

SEQ ID NO: 193606 - DNA, 120 bp, Artificial Sequence
  ENSG00000112877_19 (sequence is synthesized)
agcagggagatgtaccgtgaaactgaattactgcctttcacatcgtgactcccaagtatgcagaaggaaccctctggggattctcaggtttcagttttactttctatacgcattttactg

SEQ ID NO: 193607 - DNA, 120 bp, Artificial Sequence
  ENSG00000112877_20 (sequence is synthesized)
cttcactccggcactgaacttcccagccctgccgtggaagctgcctgccaggtcctccccatcctcaggtggaggcttctctgttgaggggcctcggagaccgccccccagccctcagcg

SEQ ID NO: 193608 - DNA, 120 bp, Artificial Sequence
  ENSG00000112877_21 (sequence is synthesized)
gaccatgctggctgggagctccgccctggggcttctgctctgctcagatccacgcggccagccttgcccttgcccttgccagaggggtcgaagcgctccttgtgggagcccgtgaacttg

SEQ ID NO: 193609 - DNA, 120 bp, Artificial Sequence
  ENSG00000112877_22 (sequence is synthesized)
aggaggaagggggcaggccccgccttccatccccgccctgctcaccgtcacccctgagatgatgggcgccttgccctcgatgagcctgtgcacctcgcgaacggcctcctcgctgctctt

SEQ ID NO: 193610 - DNA, 120 bp, Artificial Sequence
  ENSG00000112877_23 (sequence is synthesized)
gtctttgaatcgcttcttggcgagctcctccagcgcctcctggaactgctcaaagatctaccacaactaacccaaagtggggtttttcagtgtttaaaacaagagatcctgtggatgagg

SEQ ID NO: 193611 - DNA, 120 bp, Artificial Sequence
  ENSG00000112877_24 (sequence is synthesized)
ctcagctctgcaaaaggcacctgcatttcaccagggaagcctctggacagcgcgagaaaggctgcacccagcaggccaagcattccgagggcactcccagctgcagaatccacagtgacc

SEQ ID NO: 193612 - DNA, 120 bp, Artificial Sequence
  ENSG00000112877_25 (sequence is synthesized)
aagagtcaggggacaaatgacccataaaaccccagcaagcctttccagaagtcagtgagcagagggcctagaatagccaaaacgatttcaagaaatgagaacagagtcagaagactgact

SEQ ID NO: 193613 - DNA, 120 bp, Artificial Sequence
  ENSG00000112877_26 (sequence is synthesized)
tagttgtgtatgaccacgtctgccggtccatgttttcagcacccattgcctgaagtgttagcaccttcactccgcttcttctatcaataattcgcctcaagaatggatgacttttatcac

SEQ ID NO: 193614 - DNA, 120 bp, Artificial Sequence
  ENSG00000112877_27 (sequence is synthesized)
tttttctgcagtgatggagatgaccatgatttttatcatttaatatattgatgtgtttaacgaccataatttgcttttgttaaaaataaaccttgaatttctgagataagtccaacttaa

SEQ ID NO: 193615 - DNA, 120 bp, Artificial Sequence
  ENSG00000112893_0 (sequence is synthesized)
ggcggggccagccgcccgctcggctcaggcgctgcgggcgcctattgacccagcggctgctgcgccgccgctgtctcctcctgctcgtggcgggcggtgctggagcgccaagtggcgctg

SEQ ID NO: 193616 - DNA, 120 bp, Artificial Sequence
  ENSG00000112893_1 (sequence is synthesized)
gagaaccggcgcttcctttcgccgcttccgccgccatctccgcgtttgtggggcgggaaagagggagggggctagcggctgcagctggagcgggcttctctccggggacggtcctttcct

SEQ ID NO: 193617 - DNA, 120 bp, Artificial Sequence
  ENSG00000112893_2 (sequence is synthesized)
ccctgctctccttttccttctttccgcgttgccgccgcccgccccctgcgcctccccgcggagcctgggtccgggagggggaaggtaggggcggcggggggcgggagagtctggcgagcg

SEQ ID NO: 193618 - DNA, 120 bp, Artificial Sequence
  ENSG00000112893_3 (sequence is synthesized)
gacgctagctctgaggaaactcatcaatccgtgagccccggagtccggggtgcacatcggcccagccgcagcgtcggcggcggcggcggcagcagcacgaaggggctcagtcggggtagg

SEQ ID NO: 193619 - DNA, 120 bp, Artificial Sequence
  ENSG00000112893_4 (sequence is synthesized)
cgggggcggtgccggtgccgcgggggcgggcccgaccgtcccgcccagaagttgtagggcttggctcctcgcgatcttgttcctttcccctccgcttctctgacctagctgcgcggcccc

SEQ ID NO: 193620 - DNA, 120 bp, Artificial Sequence
  ENSG00000112893_5 (sequence is synthesized)
ggcccgggagctgccgaacccgcgcctcccctgggtgaggaggacacgcctgccctcgtcgagaaaacttttcctgccgactcagttggggcggcggtggcaggaagtgcgggcagcgac

SEQ ID NO: 193621 - DNA, 120 bp, Artificial Sequence
  ENSG00000112893_6 (sequence is synthesized)
ctctcctccgcctgccccgcgcgccctgccggaggtcggcgctgagcttgcgatcaagtttgtgggggccccccttcccagttgccggcgagtctcgcctcgagaggggcgcccgacccc

SEQ ID NO: 193622 - DNA, 120 bp, Artificial Sequence
  ENSG00000112893_7 (sequence is synthesized)
ggggagggcggcaggccagggcgaaggccaagggcgtgtggtggcgccggagactaggtgcggagcaaggcggggactcgcacccgcatccgagagcgcggaggtcgcgcagcccgggag

SEQ ID NO: 193623 - DNA, 120 bp, Artificial Sequence
  ENSG00000112893_8 (sequence is synthesized)
aagggagcctccggcggctgcttcctagagtccacagtgcgctgtctcctttggctgaggagagtgtcctggccccgagtctatcgaggaaaatgaagttaagccgccagttcaccgtgt

SEQ ID NO: 193624 - DNA, 120 bp, Artificial Sequence
  ENSG00000112893_9 (sequence is synthesized)
tcggcagtgcgatcttctgtgtggtgattttctcgctctacctgatgctggaccggggtcacttagactaccccaggaacccgcgccgcgagggctccttccctcagggccagctctcaa

SEQ ID NO: 193625 - DNA, 120 bp, Artificial Sequence
  ENSG00000112893_10 (sequence is synthesized)
tgttgcaagaaaaaatagaccatttggagcgtttgctagctgagaataatgagatcatctcaaatattagagactcagtcatcaatttgagtgagtctgtggaggatggtccgaaaagtt

SEQ ID NO: 193626 - DNA, 120 bp, Artificial Sequence
  ENSG00000112893_11 (sequence is synthesized)
cacaaagcaatttcagccaaggtgctggctcacatcttctgccctcacaattatccctctcagttgacactgcagactgtctgtttgcttcacaaagtggaagtcacaattcagatgtgc

SEQ ID NO: 193627 - DNA, 120 bp, Artificial Sequence
  ENSG00000112893_12 (sequence is synthesized)
agatgttggatgtttacagtctaatttcttttgacaatccagatggtggagtttggaagcaaggatttgacattacttatgaatctaatgaatgggacactgaaccccttcaagtctttg

SEQ ID NO: 193628 - DNA, 120 bp, Artificial Sequence
  ENSG00000112893_13 (sequence is synthesized)
tggtgcctcattcccataacgacccaggttggttgaagactttcaatgactactttagagacaagactcagtatatttttaataacatggtcctaaagctgaaagaagactcacggagga

SEQ ID NO: 193629 - DNA, 120 bp, Artificial Sequence
  ENSG00000112893_14 (sequence is synthesized)
agtttatttggtctgagatctcttacctttcaaagtggtgggatattatagatattcagaagaaggatgctgttaaaagtttaatagaaaatggtcagcttgaaattgtgacaggtggct

SEQ ID NO: 193630 - DNA, 120 bp, Artificial Sequence
  ENSG00000112893_15 (sequence is synthesized)
gggttatgcctgatgaagctactccacattattttgccttaattgatcaactaattgaaggacatcagtggctggaaaataatataggagtgaaacctcggtccggctgggctattgatc

SEQ ID NO: 193631 - DNA, 120 bp, Artificial Sequence
  ENSG00000112893_16 (sequence is synthesized)
cctttggacactcaccaacaatggcttatcttctaaaccgtgctggactttctcacatgcttatccagagagttcattatgcagttaaaaaacactttgcactgcataaaacattggagt

SEQ ID NO: 193632 - DNA, 120 bp, Artificial Sequence
  ENSG00000112893_17 (sequence is synthesized)
ttttttggagacagaattgggatctgggatctgtcacagatattttatgccacatgatgcccttctacagctatgacatccctcacacttgtggacctgatcctaaaatatgctgccagt

SEQ ID NO: 193633 - DNA, 120 bp, Artificial Sequence
  ENSG00000112893_18 (sequence is synthesized)
ttgattttaaacgtcttcctggaggcagatttggttgtccctggggagtccccccagaaacaatacatcctggaaatgtccaaagcagggctcggatgctactagatcagtaccgaaaga

SEQ ID NO: 193634 - DNA, 120 bp, Artificial Sequence
  ENSG00000112893_19 (sequence is synthesized)
tttgattatatgaattctcagtccaagtttaaagttaagatacagtttggaactttatcagatttttttgatgcgctggataaagcagatgaaactcagagagacaagggccaatcgatg

SEQ ID NO: 193635 - DNA, 120 bp, Artificial Sequence
  ENSG00000112893_20 (sequence is synthesized)
ttccctgttttaagtggagattttttcacttatgccgatcgagatgatcattactggagtggctattttacatccagacccttttacaaacgaatggacagaatcatggaatctcattta

SEQ ID NO: 193636 - DNA, 120 bp, Artificial Sequence
  ENSG00000112893_21 (sequence is synthesized)
agggctgctgaaattctttactatttcgccctgagacaagctcacaaatacaagataaataaatttctctcatcatcactttacacggcactgacagaagccagaaggaatttgggactg

SEQ ID NO: 193637 - DNA, 120 bp, Artificial Sequence
  ENSG00000112893_22 (sequence is synthesized)
tttcaacatcatgatgctatcacaggaactgcaaaagactgggtggttgtggattatggtaccagactttttcattcgttaatggttttggagaagataattggaaattctgcatttctt

SEQ ID NO: 193638 - DNA, 120 bp, Artificial Sequence
  ENSG00000112893_23 (sequence is synthesized)
cttattttgaaggacaaactcacatacgactcttactctcctgataccttcctggagatggatttgaaacaaaaatcacaagattctctgccacaaaaaaatataataaggctgagtgcg

SEQ ID NO: 193639 - DNA, 120 bp, Artificial Sequence
  ENSG00000112893_24 (sequence is synthesized)
gagccaaggtaccttgtggtctataatcctttagaacaagaccgaatctcgttggtctcagtctatgtgagttccccgacagtgcaagtgttctctgcttcaggaaaacctgtggaagtt

SEQ ID NO: 193640 - DNA, 120 bp, Artificial Sequence
  ENSG00000112893_25 (sequence is synthesized)
caagtcagcgcagtttgggatacagcaaatactatttcagaaacagcctatgagatctcttttcgagcacatataccgccattgggactgaaagtgtataagattttggaatcagcaagt

SEQ ID NO: 193641 - DNA, 120 bp, Artificial Sequence
  ENSG00000112893_26 (sequence is synthesized)
tcaaattcacatttagctgattatgtcttgtataagaataaagtagaagatagcggaattttcaccataaagaatatgataaatactgaagaaggtataacactagagaactcctttgtt

SEQ ID NO: 193642 - DNA, 120 bp, Artificial Sequence
  ENSG00000112893_27 (sequence is synthesized)
ttacttcggtttgatcaaactggacttatgaagcaaatgatgactaaagaagatggtaaacaccatgaagtaaatgtgcaattttcatggtatggaaccacaattaaaagagacaaaagt

SEQ ID NO: 193643 - DNA, 120 bp, Artificial Sequence
  ENSG00000112893_28 (sequence is synthesized)
ggtgcctacctcttcttacctgatggtaatgccaagccttatgtttacacaacaccgccctttgtcagagtgacacatggaaggatttattcggaagtgacttgcttttttgaccatgtt

SEQ ID NO: 193644 - DNA, 120 bp, Artificial Sequence
  ENSG00000112893_29 (sequence is synthesized)
actcatagagtccgactataccacatacagggaatagaaggacagtctgtggaagtttccaatattgtggacatccgaaaagtatataaccgtgagattgcaatgaaaatttcttctgat

SEQ ID NO: 193645 - DNA, 120 bp, Artificial Sequence
  ENSG00000112893_30 (sequence is synthesized)
ataaaaagccaaaatagattttatactgacctaaatgggtaccagattcaacctagaatgacactgagcaaattgcctcttcaagcaaatgtctatcccatgaccacaatggcctatatc

SEQ ID NO: 193646 - DNA, 120 bp, Artificial Sequence
  ENSG00000112893_31 (sequence is synthesized)
caggatgccaaacatcgtttgacactgctctctgctcagtcattaggggtttcgagtttgaatagtggtcagattgaagttatcatggatcgaagactcatgcaagatgataatcgtggc

SEQ ID NO: 193647 - DNA, 120 bp, Artificial Sequence
  ENSG00000112893_32 (sequence is synthesized)
cttgagcaaggtatccaggataacaagattacagctaatctatttcgaatactactagaaaaaagaagtgctgttaatacggaagaagaaaagaagtcggtcagttatccttctctcctt

SEQ ID NO: 193648 - DNA, 120 bp, Artificial Sequence
  ENSG00000112893_33 (sequence is synthesized)
agccacataacttcttctctcatgaatcatccagtcattccaatggcaaataagttctcctcacctacccttgagctgcaaggtgaattctctccattacagtcatctttgccttgtgac

SEQ ID NO: 193649 - DNA, 120 bp, Artificial Sequence
  ENSG00000112893_34 (sequence is synthesized)
attcatctggttaatttgagaacaatacagtcaaaggtgggcaatgggcactccaatgaggcagccttgatcctccacagaaaagggtttgattgtcggttctctagcaaaggcacaggg

SEQ ID NO: 193650 - DNA, 120 bp, Artificial Sequence
  ENSG00000112893_35 (sequence is synthesized)
ctgttttgttctactactcagggaaagatattggtacagaaacttttaaacaagtttattgtcgaaagtctcacaccttcatcactatccttgatgcattcacctcccggcactcagaat

SEQ ID NO: 193651 - DNA, 120 bp, Artificial Sequence
  ENSG00000112893_36 (sequence is synthesized)
ataagtgagatcaacttgagtccaatggaaatcagcacattccgaatccagttgaggtgaacctgactttcacatttggattgagaatcattggcttttatacctttcttggtttgacgt

SEQ ID NO: 193652 - DNA, 120 bp, Artificial Sequence
  ENSG00000112893_37 (sequence is synthesized)
acgtgcaataaagaagcacattattttagcttctggctactgtgagaacatgaattctgtgattctgtgggttttttcttttttcttttaccagtacagtaagaaaaaaaaaaaaaaaaa

SEQ ID NO: 193653 - DNA, 120 bp, Artificial Sequence
  ENSG00000112893_38 (sequence is synthesized)
ttttaaacatatgagttagatgtgtgctgtttattttcttttattgcttacaactaaacttggtagtttatggagtattttctaagactgttatttataaaatgtaatgaaaccaaatta

SEQ ID NO: 193654 - DNA, 120 bp, Artificial Sequence
  ENSG00000112893_39 (sequence is synthesized)
ttcatatatttttatattaaaccctctcagataattctgttaatatgatgagaactggaaatatagacctcttaaacatttttgttttttcttgataggaagaagaaaagaagtcggtca

SEQ ID NO: 193655 - DNA, 120 bp, Artificial Sequence
  ENSG00000112893_40 (sequence is synthesized)
gttagtgtgctttgaaatcctctttctgcaaaggatcttgacaataagatcatgtttcattgcttctttactgtctcagtttcatcagtctgcaaattagtttgaatctccccatctgaa

SEQ ID NO: 193656 - DNA, 120 bp, Artificial Sequence
  ENSG00000112893_41 (sequence is synthesized)
aaatgcactttctcaaaacttcagcctcctttccttgttgacatcaaaaggcatagctggaatttatgcacatttgaaggcaatgctcttgttatttcctaggccttctatttccagcct

SEQ ID NO: 193657 - DNA, 120 bp, Artificial Sequence
  ENSG00000112893_42 (sequence is synthesized)
gaatgtttcttgacctagagtggacttaatacttcccagatttgatgagggaggtgttttcttttctgtttgaatcttttatgttttattactcgtgagtgactttgtcagcaatcctaa

SEQ ID NO: 193658 - DNA, 120 bp, Artificial Sequence
  ENSG00000112893_43 (sequence is synthesized)
cttagattatgaagtcctttgatcttggagtacatttaaaatatcttgttgaaattgttccctctctattcatgttattctacgagctgcattaaatttcagtgttgttggagaatatta

SEQ ID NO: 193659 - DNA, 120 bp, Artificial Sequence
  ENSG00000112893_44 (sequence is synthesized)
ttttatatgctttatttaatctttcttttaatacaattcattcagacccgattttttatcagtatcttaatattgcagtgtccctctgctgtcttaaaattttttttttctctctccata

SEQ ID NO: 193660 - DNA, 120 bp, Artificial Sequence
  ENSG00000112893_45 (sequence is synthesized)
gtctgaaatgtaatgacatctaatgttagcttctggcacgatgctagtcactttttgctagcacccttctgtgcaatgctaatctgacattctgaattttaagctgtatatctctataaa

SEQ ID NO: 193661 - DNA, 120 bp, Artificial Sequence
  ENSG00000112893_46 (sequence is synthesized)
tcctgtcttttcacacagatcagtagccaagccttttatctgagccttatattacaaaaaggatgcaaaatcagaagatgtcaatggagtaatcattttaagaaataagatacaaaatta

SEQ ID NO: 193662 - DNA, 120 bp, Artificial Sequence
  ENSG00000112893_47 (sequence is synthesized)
aatttggttcaaatgtaactggtgatcaaaggacctttctgcataaattattttctaagttatttgtgtctgtttttactccttaggttaagattctactcagtcattgatttaattttg

SEQ ID NO: 193663 - DNA, 120 bp, Artificial Sequence
  ENSG00000112893_48 (sequence is synthesized)
catgtcatctagcatatttaatctaccaacattagtagattatttaatgtttgaacatacagaagtgttgcttttaaccatataccatagcaaaaactaaagcattttaaattatatgga

SEQ ID NO: 193664 - DNA, 120 bp, Artificial Sequence
  ENSG00000112893_49 (sequence is synthesized)
ataatcatatactatgtaagtgtgtgataactattcagtaacatatttaacacttctacttttggaataaaaatagtgaaacaattggcaatgatttaccaagttgaaagaaaacaatca

SEQ ID NO: 193665 - DNA, 120 bp, Artificial Sequence
  ENSG00000112893_50 (sequence is synthesized)
gatgatctaggcatgccgcctatgttatttatatttaaaaattggatttattttgagagttttgttttctttaaattctgtcattgggtaacatttagttcctatcatttggtaacatgg

SEQ ID NO: 193666 - DNA, 120 bp, Artificial Sequence
  ENSG00000112893_51 (sequence is synthesized)
atggtcttgttaaggggtataaatgaaactacaagaatatggtggatgaaacctgagaagggagataatatttgatgatgcacaacatataatctatgtacagcccaatccttgtacttt

SEQ ID NO: 193667 - DNA, 120 bp, Artificial Sequence
  ENSG00000112893_52 (sequence is synthesized)
ggcccagcttagtctatgagctgaatgttggttttatcccctgaattaagtttgcaatgggttttctctgtgcaactttagaatacgccagccttacttcagtaattcagcctcgaaagt

SEQ ID NO: 193668 - DNA, 120 bp, Artificial Sequence
  ENSG00000112893_53 (sequence is synthesized)
gatctaatctgttttacaaagatagttacctaccacagtgcttggcacaatttcaaaaattgtaaattttcttccccacatcctcccattttatggggtccagatattactaatgcatta

SEQ ID NO: 193669 - DNA, 120 bp, Artificial Sequence
  ENSG00000112893_54 (sequence is synthesized)
atgaatgtaaaagcagttcttccaaaatctgtttactctcctagagcatacagtgtgactgcttgaaggtatctgttttcctgcatgcatattcaagttaaattcacagtttccctactt

SEQ ID NO: 193670 - DNA, 120 bp, Artificial Sequence
  ENSG00000112893_55 (sequence is synthesized)
tgaaaaacagttttcttggaaataaaatgtctagacagactttgaaactgaaaaactgctgctttgcctcaggtatttttgcttgaaaactgatactttcatgaatatttgattttttaa

SEQ ID NO: 193671 - DNA, 120 bp, Artificial Sequence
  ENSG00000112893_56 (sequence is synthesized)
aaacttggacaagatgattgctatttcagttcgtttttacaaaagtgatgtaattttagttttgagagaaagtataactttttctatcagtgaaagttaatttttatgacttttatctct

SEQ ID NO: 193672 - DNA, 120 bp, Artificial Sequence
  ENSG00000112893_57 (sequence is synthesized)
atttttgtattgtcggtttaaatctcttgtagaattcaaatgtagaattccaaaggtgtttccctccccacattttttgtccccttctgttgctataaaggccttacatattcattattc

SEQ ID NO: 193673 - DNA, 120 bp, Artificial Sequence
  ENSG00000112893_58 (sequence is synthesized)
caagagcaaatgtgttgcaggaattttagccatgcatgctatcaagtgatatgtaaggatggacccatgagttaaaatggacaaatgctttaggttagtagtgatatgtgcttttaaaag

SEQ ID NO: 193674 - DNA, 120 bp, Artificial Sequence
  ENSG00000112893_59 (sequence is synthesized)
agcttaatgaagagggtttctaatctgttaatctgaatccagactttgttatgactttgatgtacgactctagacatataatttaggagttccctgagtctttagctacaaagttgtaat

SEQ ID NO: 193675 - DNA, 120 bp, Artificial Sequence
  ENSG00000112893_60 (sequence is synthesized)
gtcaaataaaggaaatttatgctaagggcttcctgtgtgccagacatttggccagatctttgttaagctatttcatttcatttcatcttcattttatggaaaaggaaaacctggttttgc

SEQ ID NO: 193676 - DNA, 120 bp, Artificial Sequence
  ENSG00000112893_61 (sequence is synthesized)
tgaaacccacagctagtaaattgcagagcaaggatccagatctccagctgtctgactccccactcaggctctgaaccactcttactacacagctcgtgcactagcgcattctgccctaca

SEQ ID NO: 193677 - DNA, 120 bp, Artificial Sequence
  ENSG00000112893_62 (sequence is synthesized)
aggcagtgtgaagctacttacatagtattttcaacaggttaatccacacagtgactccatgaaggaaataatacaagcattacctccattttacaggcaagaaaatagatatttaggaag

SEQ ID NO: 193678 - DNA, 120 bp, Artificial Sequence
  ENSG00000112893_63 (sequence is synthesized)
aagaaattactatcctaaggtttcacagttggcacatgatagagtcctgtttcttattcttttggagatctaatgataccataaatgaagggttttcctatgtgttatttttatagtaca

SEQ ID NO: 193679 - DNA, 120 bp, Artificial Sequence
  ENSG00000112893_64 (sequence is synthesized)
tgggcagggtgttttaaatgtattgaaatgaattagaaatttttatcatatgatttaaaattgctgtgtgtatcatgtggtcttgtgatgactcagaattccttaaatgactcttctctt

SEQ ID NO: 193680 - DNA, 120 bp, Artificial Sequence
  ENSG00000112893_65 (sequence is synthesized)
ccttcaaacaaaatcttagcagtacccctacaaaatatcagtgtgaaacatcataacataggttattccagccaagactctgaggtgaggacagctttaaactgttcaggcacattaaaa

SEQ ID NO: 193681 - DNA, 120 bp, Artificial Sequence
  ENSG00000112893_66 (sequence is synthesized)
tcaaatcagtggtggagattctggcagctattcaggaaagatgtctctttagtacattaaaaaatcttatcccctagtgaggatgatcaggcgtttgggcatattcctgtctgtggccag

SEQ ID NO: 193682 - DNA, 120 bp, Artificial Sequence
  ENSG00000112893_67 (sequence is synthesized)
agaacagaggaaagaatcagttttatcacaatgtcagtgctgagcagcacatgactcttttcaaaaactgtatgtttcttaatttttccagggatttttaattcatttatcataaacacc

SEQ ID NO: 193683 - DNA, 120 bp, Artificial Sequence
  ENSG00000112893_68 (sequence is synthesized)
ttccaactttaggaaacaaaatttattaagataattgtattttaaaatattcagaggcctaaaccattcatgacattgatacttaaatggatatgagaaattttattgcaagaaaaggta

SEQ ID NO: 193684 - DNA, 120 bp, Artificial Sequence
  ENSG00000112893_69 (sequence is synthesized)
tactgaccctcttagctgacttgtcatgtttagtatttttatttttgcctgcctatcaacaatagcttctgcagtatcaatttaaatgatacatcaagctggtaaatgtgagctggccta

SEQ ID NO: 193685 - DNA, 120 bp, Artificial Sequence
  ENSG00000112893_70 (sequence is synthesized)
ccaagtgaaagcataactaaatttaaatagctctgatataaaaataatgaatcagtacatcaaagattaagaatgcagttagcaaaaattaatgttcaataaagaagcatgtgtgacttt

SEQ ID NO: 193686 - DNA, 120 bp, Artificial Sequence
  ENSG00000112893_71 (sequence is synthesized)
taagttagatggtatgtcattcaatgaccagataaggactaagttcaggtgcagtttattcaactgatgtgtgtgtttgaaaaataagacgaaaacataatgctttatttgaataaactt

SEQ ID NO: 193687 - DNA, 120 bp, Artificial Sequence
  ENSG00000112893_72 (sequence is synthesized)
taataaaacaatatataatgtatggacataaggaaacctaagtcctcggggattataggggaaaccaaggcatgaggttacctaacaaggaaccttagaacataatcttacctggctcag

SEQ ID NO: 193688 - DNA, 120 bp, Artificial Sequence
  ENSG00000112893_73 (sequence is synthesized)
tacaagtaggagagaatggtagcaggtgaatgggcagtgagcatggacctgaggagaaatgaatttgcctaactttcttgctaaataaatgtgcttttggatgctgacatcgagagagtg

SEQ ID NO: 193689 - DNA, 120 bp, Artificial Sequence
  ENSG00000112893_74 (sequence is synthesized)
actaccaccatcagtatgaattgatgcaacaaatgaagaaatatttaaagacagcctctcaacagattgtatctcaggttaaatgctaactaattatgtctgtgttgggggttgcgaaga

SEQ ID NO: 193690 - DNA, 120 bp, Artificial Sequence
  ENSG00000112893_75 (sequence is synthesized)
gattcttaaaagtatctgtgtgttgatcatcagttttacaaaaacacctatttggctgaaatggaataaaatgtttgtgggtaaaagctaatggccaaaatggttgcaatcattcatact

SEQ ID NO: 193691 - DNA, 120 bp, Artificial Sequence
  ENSG00000112893_76 (sequence is synthesized)
agttagaaaaattatgtgttgaaataagtggaaaagtgcaatccatccacccttatgattaacgtagatgatttttatacctttttctgatgtacctcttgaccttctccttcccttcct

SEQ ID NO: 193692 - DNA, 120 bp, Artificial Sequence
  ENSG00000112893_77 (sequence is synthesized)
accctttctaagtatttccagaaatacctgattttgaatcattcaacagtagaaaaagaggcatattttcattacttgacaatgtgggatgggtgcaatttattccatcttcactaaaat

SEQ ID NO: 193693 - DNA, 120 bp, Artificial Sequence
  ENSG00000112893_78 (sequence is synthesized)
agaagcaattccataggtaccataaacctattttaggtaccacaaggtgtctttttacacagctcatttgaatacaggtgttctgagaaggggtttctattttaaaattaccatatcaaa

SEQ ID NO: 193694 - DNA, 120 bp, Artificial Sequence
  ENSG00000112893_79 (sequence is synthesized)
ataaatgtgccttatttttttataagtcttgttaaatcagtgtccatattactgtttggggaagggggaatgttgtggggtctgggagagggtgggtactttctatgacacataaattgt

SEQ ID NO: 193695 - DNA, 120 bp, Artificial Sequence
  ENSG00000112893_80 (sequence is synthesized)
gtaatttttgcctgacaatgctggccacattctgatctgtttcattaaatttgtggtgatgttactctaaacattttgactatttgaatgtactgagatgtcagaaaacaaaacaaggaa

SEQ ID NO: 193696 - DNA, 120 bp, Artificial Sequence
  ENSG00000112893_81 (sequence is synthesized)
ggaaaatattgttaattaaaatgtgctgctgccaaggaaactgcaacttgaagcaaggattttgtaaaatgcaaaatccagctactgtttccatttcacagtagttaactatattaaaga

SEQ ID NO: 193697 - DNA, 120 bp, Artificial Sequence
  ENSG00000112893_82 (sequence is synthesized)
gagaatgctttaaaattgatcttgttttgaaacccacttttatgtagctcatcatggtttatcttactaaggaatatgtttgttcattcagttctcaacttttgtatgtgctaaccttaa

SEQ ID NO: 193698 - DNA, 120 bp, Artificial Sequence
  ENSG00000112893_83 (sequence is synthesized)
agtgaagttctgagcccgtgtgccattacagtgcttttaataaaatttatttgggattattgtttccttaacattaaaataatagcgacatttagactatgcaattttagcatagaaagg

SEQ ID NO: 193699 - DNA, 120 bp, Artificial Sequence
  ENSG00000112893_84 (sequence is synthesized)
agtctttgagtatgtacagttttgaaaattctctttgagataattgatttcatattctgtggctttcaacctccatttacctcttgtcattccaacatctttatagagaaataaaaaccc

SEQ ID NO: 193700 - DNA, 120 bp, Artificial Sequence
  ENSG00000112893_85 (sequence is synthesized)
aatttctctttcaccatttagtttgattatcatctggattttcactcaagatgcagctcctaagattattgttatgttaaattcataaactccttcacctttaataattaaggaaacaat

SEQ ID NO: 193701 - DNA, 120 bp, Artificial Sequence
  ENSG00000112893_86 (sequence is synthesized)
accagtgttgataaagatattacaaggggtaatttcatgcaataaacatgtaccgtaagttttcttccacatattttgggaaaaaactaaaaaaagaaaaaggacttcctttttgtggac

SEQ ID NO: 193702 - DNA, 120 bp, Artificial Sequence
  ENSG00000112893_87 (sequence is synthesized)
atctacagatgttagggttgccagaagcaaatcccaggaatgagatcagtattttcattgcatcttaaatgtataaccttcctgtgggagttcagtttgtctgtggttaagtgggtgtgc

SEQ ID NO: 193703 - DNA, 120 bp, Artificial Sequence
  ENSG00000112893_88 (sequence is synthesized)
ttaatcattctcgaaattgtgatcagatgaaataaaaaaaaaatcttgatgcaataacagtggttttgccacttctggttgtttgcgatggatctgtcccatgtcagtctggggttttat

SEQ ID NO: 193704 - DNA, 120 bp, Artificial Sequence
  ENSG00000112893_89 (sequence is synthesized)
tcagcttgtgttgctaccagcagttcacaggtaaagcagaaattctctttaaccagcaagtttctgctttttaaggttacttttagaataaatcatcagggaaacagagaggatgctttg

SEQ ID NO: 193705 - DNA, 120 bp, Artificial Sequence
  ENSG00000112893_90 (sequence is synthesized)
ctttgggttgtagtcaaaaactgattaaataatttaatgtctctggcacacactaaaaaccatacacttcagttgtgatctcagtggcatatttatttggttaggtttcgttacatttat

SEQ ID NO: 193706 - DNA, 120 bp, Artificial Sequence
  ENSG00000112893_91 (sequence is synthesized)
tattacagatgttcagttgaccaagtagttcagtgttttctttcctttttttggaaattttagtttgagtttgtgactgcagtgttcaagaactcagcatccttgttttctacaaatact

SEQ ID NO: 193707 - DNA, 120 bp, Artificial Sequence
  ENSG00000112893_92 (sequence is synthesized)
gattaaaataaaatgctgtaaaatgtgatgtaaaacattatcatgatcttcccatgcctttgttgtacttgtgccgaagtgttttgatattcctttgtctggaagaaaatgtttgctttc

SEQ ID NO: 193708 - DNA, 120 bp, Artificial Sequence
  ENSG00000112893_93 (sequence is synthesized)
attttgatcattttgttcaccttggaatcaacaggttttgatattttctcttggaagattttatatctttttgggaatatgtaatataagatctctaataaaagataatcttatcatgta

SEQ ID NO: 193709 - DNA, 120 bp, Artificial Sequence
  ENSG00000112902_0 (sequence is synthesized)
gctgctctccctgagcccgctcccgagcgctgctttcccgccgcgggtgggcttcgcagcctcaggccagccgcggcccttggcccgctgcagccccggccctccaccttccccgtgcag

SEQ ID NO: 193710 - DNA, 120 bp, Artificial Sequence
  ENSG00000112902_1 (sequence is synthesized)
gccccggccctccaccttccccgtgcaggggcggcccggccagtgtcgctcatcccgggacgctcccttctcccacccaggactgccccgcggagctggcttggacacccaactttgcca

SEQ ID NO: 193711 - DNA, 120 bp, Artificial Sequence
  ENSG00000112902_2 (sequence is synthesized)
cctcgagggtcgtctctgctgggcgcgaacctgcccacccaccggttggccgcgcgctcggggaccgtgctcgtggcccccaagccggtgcccccattctggaactcagcgagtaggggg

SEQ ID NO: 193712 - DNA, 120 bp, Artificial Sequence
  ENSG00000112902_3 (sequence is synthesized)
cggctctggggaagtggcagggggcggctgcagctgctgcctccacttccctagccaggtgctgaagaggatcctcggagccgctctggcccccaggcgctggatgactggcaccagcgc

SEQ ID NO: 193713 - DNA, 120 bp, Artificial Sequence
  ENSG00000112902_4 (sequence is synthesized)
tcctcgcacctgtgttggtgtgtgagacttgggctggagtgcccacgtggctgtggagtcagtgtgattcatgattgaggaaacgcgtcctccatcctctctctccttggcactttccac

SEQ ID NO: 193714 - DNA, 120 bp, Artificial Sequence
  ENSG00000112902_5 (sequence is synthesized)
acatgaggagaagaagagcttctgtttagaagacacgtgcccagagtcagaggccccttgcccaccatgaagggaacctgtgttatagcatggctgttctcaagcctggggctgtggaga

SEQ ID NO: 193715 - DNA, 120 bp, Artificial Sequence
  ENSG00000112902_6 (sequence is synthesized)
ctcgcccacccagaggcccagggtacgactcagtgccagagaaccgagcatccagtcatctcctataaagaaattggcccctggttacgggagttcagagcgaagaatgctgtggatttc

SEQ ID NO: 193716 - DNA, 120 bp, Artificial Sequence
  ENSG00000112902_7 (sequence is synthesized)
tcgcagttaacatttgacccaggacagaaagaacttgttgtaggagcaagaaactacctcttcaggttacagcttgaggatctgtctcttatccaggctgtggaatgggagtgtgatgaa

SEQ ID NO: 193717 - DNA, 120 bp, Artificial Sequence
  ENSG00000112902_8 (sequence is synthesized)
gctaccaaaaaggcctgttacagcaaaggcaaatcaaaggaggaatgtcagaactacatccgggtgcttctggtgggtggcgaccggttattcacctgtgggaccaatgcattcacgcct

SEQ ID NO: 193718 - DNA, 120 bp, Artificial Sequence
  ENSG00000112902_9 (sequence is synthesized)
gtctgcaccaaccgctcgttgagcaacctgactgagatccatgatcagatcagtggcatggcccgctgtccctacagtccccagcacaattccacagcgctcctcacagctggtggggag

SEQ ID NO: 193719 - DNA, 120 bp, Artificial Sequence
  ENSG00000112902_10 (sequence is synthesized)
ctctatgctgctacagccatggattttccaggacgtgatcctgccatttaccgaagcctaggcattttacctcctctccgcacggcgcagtacaactccaaatggctcaatgagccaaac

SEQ ID NO: 193720 - DNA, 120 bp, Artificial Sequence
  ENSG00000112902_11 (sequence is synthesized)
tttgtgtcatcttatgacatcggaaattttacctacttctttttccgagaaaatgcagtagagcatgactgtgggaaaacagtgttctccagagctgcccgggtgtgcaagaacgatatt

SEQ ID NO: 193721 - DNA, 120 bp, Artificial Sequence
  ENSG00000112902_12 (sequence is synthesized)
ggtgggcgcttcctgctggaagacacctggaccacattcatgaaggctcgcctgaactgctcccgtcctggggaagtccccttttactacaacgaattgcagagtactttcttcctgcct

SEQ ID NO: 193722 - DNA, 120 bp, Artificial Sequence
  ENSG00000112902_13 (sequence is synthesized)
gagctggatttgatctatggcatctttaccaccaatgtgaacagcattgcggcctcagctgtgtgcgtcttcaacctgagcgccatcgcgcaggccttctctgggcccttcaagtaccaa

SEQ ID NO: 193723 - DNA, 120 bp, Artificial Sequence
  ENSG00000112902_14 (sequence is synthesized)
gaaaactcgcgctcggcctggctaccgtatcccaacccaaacccccacttccagtgtggcaccgtggaccagggcctgtacgtgaacctgaccgagagaaatctgcaggatgctcagaag

SEQ ID NO: 193724 - DNA, 120 bp, Artificial Sequence
  ENSG00000112902_15 (sequence is synthesized)
ttcattctgatgcatgaggtggtacagccagtgaccacagtgccctccttcatggaggacaatagccgcttttcccacgtggcagtcgacgtggtgcagggcagagaagcgctcgtccac

SEQ ID NO: 193725 - DNA, 120 bp, Artificial Sequence
  ENSG00000112902_16 (sequence is synthesized)
atcatctatttggccacagattacggaaccattaagaaagtgcgggtacccctgaatcagacctcaagcagctgtttgctggaagagattgagctcttccctgagaggcggagggagccc

SEQ ID NO: 193726 - DNA, 120 bp, Artificial Sequence
  ENSG00000112902_17 (sequence is synthesized)
atcaggagcctgcagatcctgcacagccagagtgtcctgttcgtgggcctgcgggagcacgtggtcaagatccccctgaagaggtgccagttctaccgcacacgcagcacctgcattggg

SEQ ID NO: 193727 - DNA, 120 bp, Artificial Sequence
  ENSG00000112902_18 (sequence is synthesized)
gcccaggacccttactgtggctgggatgtggtaatgaagaaatgcacaagcctggaggagagcctgagcatgacgcagtgggaacagagcatctctgcgtgtccgaccaggaatctcacc

SEQ ID NO: 193728 - DNA, 120 bp, Artificial Sequence
  ENSG00000112902_19 (sequence is synthesized)
gtggatgggcactttggtgtgtggtctccgtggacgccttgcacgcacacagatggcagcgccgtgggatcctgcctctgtcgaacccgctcctgcgacagcccggccccgcagtgtggt

SEQ ID NO: 193729 - DNA, 120 bp, Artificial Sequence
  ENSG00000112902_20 (sequence is synthesized)
ggctggcagtgcgagggccctggcatggagatcgccaactgttccaggaacggaggctggactccctggacctcgtggtctccctgcagcactacctgtgggatcggcttccaggtgcgg

SEQ ID NO: 193730 - DNA, 120 bp, Artificial Sequence
  ENSG00000112902_21 (sequence is synthesized)
cagcgctcctgcagcaaccccactcccaggcacgggggccgggtgtgcgtgggacagaaccgcgaggaaagatactgcaatgaacatttgctatgtcccccacacatgttctggacaggc

SEQ ID NO: 193731 - DNA, 120 bp, Artificial Sequence
  ENSG00000112902_22 (sequence is synthesized)
tggggtccttgggaacggtgcacagcccaatgcgggggtggcattcaagctcgccgcaggatctgtgagaatgggcctgactgtgcaggctgcaatgtggagtaccagtcttgcaacacc

SEQ ID NO: 193732 - DNA, 120 bp, Artificial Sequence
  ENSG00000112902_23 (sequence is synthesized)
aacccgtgtcctgagctgaagaagaccacgccctggacaccctggacacctgtcaacatctctgacaacggcggccactatgagcaacgattccgatacacatgcaaagcccgcctggct

SEQ ID NO: 193733 - DNA, 120 bp, Artificial Sequence
  ENSG00000112902_24 (sequence is synthesized)
gatccgaatttgctggaagtgggaagacagagaatcgaaatgcggtactgttctagcgacggcaccagtggctgctccacagatgggctttctggggatttcctgcgtgctgggagatac

SEQ ID NO: 193734 - DNA, 120 bp, Artificial Sequence
  ENSG00000112902_25 (sequence is synthesized)
tctgcccacacggtcaacggggcttggtcagcctggacgtcgtggtcacagtgcagccgtgactgcagcaggggcattcggaaccggaagcgtgtttgcaacaaccccgaacccaagtat

SEQ ID NO: 193735 - DNA, 120 bp, Artificial Sequence
  ENSG00000112902_26 (sequence is synthesized)
gggggaatgccttgccttggcccatctctggaataccaggaatgcaacattttgccctgcccagtggatggcgtgtggtcttgctggtccccctggacaaaatgttcagcaacatgcggc

SEQ ID NO: 193736 - DNA, 120 bp, Artificial Sequence
  ENSG00000112902_27 (sequence is synthesized)
ggtggacactatatgaggacccgctcttgctccaatccagccccggcctatggaggggacatctgcctggggctgcacacagaagaggcactctgcaacacgcagccctgcccagagagc

SEQ ID NO: 193737 - DNA, 120 bp, Artificial Sequence
  ENSG00000112902_28 (sequence is synthesized)
tggtcggagtggtcggactggtctgagtgtgaagcctctggcgtccaagtccgcgcccgccagtgcatcctcctgttccccatgggcagccagtgctccgggaacaccacggagagccgg

SEQ ID NO: 193738 - DNA, 120 bp, Artificial Sequence
  ENSG00000112902_29 (sequence is synthesized)
ccgtgtgtgtttgactctaatttcatcccagaagtatctgtggcaagatccagtagcgtagaagagaaaaggtgtggagagttcaacatgttccacatgatcgccgtggggctgagcagc

SEQ ID NO: 193739 - DNA, 120 bp, Artificial Sequence
  ENSG00000112902_30 (sequence is synthesized)
tccatcctcggctgcctcctcaccctgctcgtctatacttactgccagcggtaccagcagcaatcccacgatgcgactgtcatccaccccgtctcacctgccccccttaataccagcata

SEQ ID NO: 193740 - DNA, 120 bp, Artificial Sequence
  ENSG00000112902_31 (sequence is synthesized)
accaaccacatcaacaaactggacaagtacgactcggtggaggccatcaaggcatttaacaaaaacaacttgatcctagaggaaagaaacaaatacttcaacccacatctcactgggaag

SEQ ID NO: 193741 - DNA, 120 bp, Artificial Sequence
  ENSG00000112902_32 (sequence is synthesized)
acctattctaatgcctactttacagatctcaataattatgatgagtactaacagctttcatgtttttggcttcttgtaaatccccagttcctcaaggcctgtgccccatgactgcccatg

SEQ ID NO: 193742 - DNA, 120 bp, Artificial Sequence
  ENSG00000112902_33 (sequence is synthesized)
tttctgaggcttcagagtcgaagtttggatacatttcaagtgcatttcaagccaccagagtgtcccattgctgccaaaaatacacgtctttaaaagcaacaaaaattgaaataagacatc

SEQ ID NO: 193743 - DNA, 120 bp, Artificial Sequence
  ENSG00000112902_34 (sequence is synthesized)
gtgaaaatcttgaccattgttgaatgagccagggtgtgaagtttttaattgtgttcatcctatttttctgacaagtccattggtttgttttttgagcattattttataaatgtgccaccc

SEQ ID NO: 193744 - DNA, 120 bp, Artificial Sequence
  ENSG00000112902_35 (sequence is synthesized)
acattggaaggagtctttctttagaactttggagtgtaaatcttcatgatgttgtaattcaagaaaataggcactttctctgaaagacctgctccttccacaagaagtgcataggtccat

SEQ ID NO: 193745 - DNA, 120 bp, Artificial Sequence
  ENSG00000112902_36 (sequence is synthesized)
aatatttcataaaatgaagaaaaagaatgtggccaaacaattattcaccatggattgcccaactttccaaatctggataaagctgtgggattcttggaagcagcttgagtgttttcatct

SEQ ID NO: 193746 - DNA, 120 bp, Artificial Sequence
  ENSG00000112902_37 (sequence is synthesized)
tgcctgggaagcccaggaattccacctggtccacaccggcagaagttacagtagactgtgaggcaccccaccttgctcctgatgcagtttctgtgccattgctggtgctggtggaggcag

SEQ ID NO: 193747 - DNA, 120 bp, Artificial Sequence
  ENSG00000112902_38 (sequence is synthesized)
cggagcagaggctcaggcacaatgaagcgtggatgtgttctgcaggttgctgcaaaactcaccttattctgacttttggatttcatggcattccaggaagctccttgccatgctgttggc

SEQ ID NO: 193748 - DNA, 120 bp, Artificial Sequence
  ENSG00000112902_39 (sequence is synthesized)
ctggaagtccacctgtctggtccatagtgacgtcctgaagagccagtctgtaaaataaccaaccacttacttagcgtttggatagactccatgccttctctctccctgcaaagaaaaatc

SEQ ID NO: 193749 - DNA, 120 bp, Artificial Sequence
  ENSG00000112902_40 (sequence is synthesized)
cctgcaaagaaaaatcttgaacatttatgatgtcaattagtgaaagtattgaaaatactaaattataactaaaagcaactttttatgttattgaaaatattgaaagaactgatattaatg

SEQ ID NO: 193750 - DNA, 120 bp, Artificial Sequence
  ENSG00000112902_41 (sequence is synthesized)
tcatctctctgatatacccaatgtgtggcaatcagcccctaccacgagcattaataccatgtaaagctggctttctggagtctgccaggtccacacgaagtgctacccccagtttctgct

SEQ ID NO: 193751 - DNA, 120 bp, Artificial Sequence
  ENSG00000112902_42 (sequence is synthesized)
gttacttgctgcctccaggccaggggagcaggagatgctcagctctggtgccttttcttttatttcagtgctgccttcccacccacccagtccattcaccctcacctctccctgcatgga

SEQ ID NO: 193752 - DNA, 120 bp, Artificial Sequence
  ENSG00000112902_43 (sequence is synthesized)
ggcaacagcatttcaagatgtaccttgggaagtcaggatagctggaagtaagggtttttgggatccctgtggtctcttcactgatcatcgataagcatttaagagtgtgctaacaccatt

SEQ ID NO: 193753 - DNA, 120 bp, Artificial Sequence
  ENSG00000112902_44 (sequence is synthesized)
cacagaggtccctggaaaaaaatatataattttctcacaaacaaccaatacataacctatggcagttggttgaataattattgaaaaaaagaacacgactgaaaaagttcatctgatgcc

SEQ ID NO: 193754 - DNA, 120 bp, Artificial Sequence
  ENSG00000112902_45 (sequence is synthesized)
tctgagcatgtgataaagtcctgggtagacacggaaacgtgttcttacaaatgaaccttcggatctatgaaagaaaatatagtagggggactaaggaacatagaattttattagcatatg

SEQ ID NO: 193755 - DNA, 120 bp, Artificial Sequence
  ENSG00000112902_46 (sequence is synthesized)
tgattttacccttatctttgtttctaatttaaagaaacaatttcagaaagtgttagaagaattctatgtttaataatgaatattgttgagttcaaaatattctcatatacccagatttac

SEQ ID NO: 193756 - DNA, 120 bp, Artificial Sequence
  ENSG00000112902_47 (sequence is synthesized)
agagatgacacagtattgaaatggcaggtgggctctgtaagttattttggattaatgacattcagggtctttgcagtggggacttcatgttgcctctcactcattcctcatatgtcagag

SEQ ID NO: 193757 - DNA, 120 bp, Artificial Sequence
  ENSG00000112902_48 (sequence is synthesized)
atcagtttcttgtaagaaaaaaacattttcactttgtagcacattttagttatttttgagtcttcttccctaatagtttgtaagcttaaagggacattttattttccctggtaaagagga

SEQ ID NO: 193758 - DNA, 120 bp, Artificial Sequence
  ENSG00000112902_49 (sequence is synthesized)
ttctaatatttcaagaatgtttcactggaattgatgggaaatggtttctaaatggcatcgaagctggtctttaatgagtcttttgcaatgacttgggaaaaacaccctccctcactacag

SEQ ID NO: 193759 - DNA, 120 bp, Artificial Sequence
  ENSG00000112902_50 (sequence is synthesized)
gatcttcatgttgttaataatataaacaaacctttgaaattagcattgcaaaagaatcccatttttgtttcgtaccacactgttcaaaggaaaattgtttatctctcttcctttctctct

SEQ ID NO: 193760 - DNA, 120 bp, Artificial Sequence
  ENSG00000112902_51 (sequence is synthesized)
ctctcttatttgacagaatagcaagtgtttagataatttcagatatattctaagtattttaccagctgtggaataagttgtgtttgtccatcactgtgtagctaccgttcacatgttctg

SEQ ID NO: 193761 - DNA, 120 bp, Artificial Sequence
  ENSG00000112902_52 (sequence is synthesized)
gctctgtactccacgcttatcgcgtgaaccctcacatgttggactttcacagtgtgatctctcacctgtcttggaaactccttcataaagccgctcttccttaggcctgggctgtttgga

SEQ ID NO: 193762 - DNA, 120 bp, Artificial Sequence
  ENSG00000112902_53 (sequence is synthesized)
agtcctggtgaaactttgcggttcacattttaaattcctgaatgaccttttcattctctctttctttatctttgtttttgtccttcattccctccttttgttcttccttcctgccttctt

SEQ ID NO: 193763 - DNA, 120 bp, Artificial Sequence
  ENSG00000112902_54 (sequence is synthesized)
ttcttctttcctttcttctttctttaattcttcctttcttcctattttcttggtacaagtggaacaaaaaccaacacatagttttaagctacacctttctgcacctgatgtaaaatgaca

SEQ ID NO: 193764 - DNA, 120 bp, Artificial Sequence
  ENSG00000112902_55 (sequence is synthesized)
ttaatcactatttaacttctaaaattatttctgaatacagttggagataggctggttttcatgaggaagctggcttggctttagtcttacatttaaattctttgaaagtggctcccagtg

SEQ ID NO: 193765 - DNA, 120 bp, Artificial Sequence
  ENSG00000112902_56 (sequence is synthesized)
ctattcagggtcctttcttgaggccagactcatcaccatctactattgattttacagtgcactgacagtttacaggaaggagaagaacagaatttctgcacactacacaacatgtgggct

SEQ ID NO: 193766 - DNA, 120 bp, Artificial Sequence
  ENSG00000112902_57 (sequence is synthesized)
tcctgtagctccagggacatgtagctttggtgaaactggggttttgtaacctctgaatgatatggacttagtgaattctaaggaactcagggggcacgtggtcaggctccaccgcacaga

SEQ ID NO: 193767 - DNA, 120 bp, Artificial Sequence
  ENSG00000112902_58 (sequence is synthesized)
agagccacagtctccagactcatggcgttccctccagaactccccattcccctctgagcatatttctatgctgctgcttcttgtgacttacatgaggcatctcagcttcttcatgtttgt

SEQ ID NO: 193768 - DNA, 120 bp, Artificial Sequence
  ENSG00000112902_59 (sequence is synthesized)
agggatggttccctaagcctgttcaagtaggctctcactagagttaccattcatatttgagaagaaaagaacatttaataaatgtatgtgtggggctgaggttctaaaggaattgaaaag

SEQ ID NO: 193769 - DNA, 120 bp, Artificial Sequence
  ENSG00000112902_60 (sequence is synthesized)
agacgataaacattgaatgagggtgagggcatccctgctggggagaaacctctgtccctaggaagagtccgttcatgtcatgtggtttgggatgaaccaggggtctggccccatcgggtc

SEQ ID NO: 193770 - DNA, 120 bp, Artificial Sequence
  ENSG00000112902_61 (sequence is synthesized)
acaggtgatggcaaatagaaaagaagcaaatggaggaaatagtcggataagtaggtgacgtgaaaggcaggacctggtcaccccagcaagtgctatggacagttcccggaaacggttgcc

SEQ ID NO: 193771 - DNA, 120 bp, Artificial Sequence
  ENSG00000112902_62 (sequence is synthesized)
cacttcacaggtccatgggtctgacccttggactctgccaggatcaactgcccagagtgccagagttttagccaaaggtgtacttacttccttatttatctgcaaaaggatggaaactgt

SEQ ID NO: 193772 - DNA, 120 bp, Artificial Sequence
  ENSG00000112902_63 (sequence is synthesized)
gatggaaactgtgggagtcaaagcctattttgctgagtgttcccactggagtctctggtagaattagcaggtcatgctgtcaaaatcatggacaaaggctgggtgcagtggctcatgcct

SEQ ID NO: 193773 - DNA, 120 bp, Artificial Sequence
  ENSG00000112902_64 (sequence is synthesized)
gtttgagaccagcctgggcaacatggggaaactccatctctacaaaatatacaaaatattagccagccatcgtggtgcgtgcctgtggtcccagtttcttgggaggctgaggcgggagta

SEQ ID NO: 193774 - DNA, 120 bp, Artificial Sequence
  ENSG00000112902_65 (sequence is synthesized)
tacaaaatatacaaaatattagccagccatcgtggtgcgtgcctgtggtcccagtttcttgggaggctgaggcgggagtatcatttgagccaggaggttgaggttgcagtgagctgagat

SEQ ID NO: 193775 - DNA, 120 bp, Artificial Sequence
  ENSG00000112902_66 (sequence is synthesized)
tgtctcaaaaaaaaaaaaaaagaacaaagtcttagcggggggtctctatgtccccaagtggctctctaaggggatccattagcgtataattgaatatcaaagggaattttaccttaaaca

SEQ ID NO: 193776 - DNA, 120 bp, Artificial Sequence
  ENSG00000112902_67 (sequence is synthesized)
tatatcaagtctatactcagctaatcgttttgtctaaacacagccttgttagcatttgaatttacaaatattcatttgcttatttgcagtgttccttttgcttttagaataaatcataaa

SEQ ID NO: 193777 - DNA, 120 bp, Artificial Sequence
  ENSG00000112902_68 (sequence is synthesized)
tatttccccaatactgtcaagatacttcttcaactttgtccctgaaccatcagctttctttagggtccgggtatcctttacacttcaatggggttttcttgtgtgtgtcattgggggtaa

SEQ ID NO: 193778 - DNA, 120 bp, Artificial Sequence
  ENSG00000112902_69 (sequence is synthesized)
ctccattgacctcagcatttctatctcaagagatggctctggaacacagaaccagaggcaacaggtactaatggttgataaaattaacagcgactgcataaccattttccacatggcagg

SEQ ID NO: 193779 - DNA, 120 bp, Artificial Sequence
  ENSG00000112902_70 (sequence is synthesized)
gctgtgcttaagccccacacctccaataatcaatttctatgacggtactaataaccttaactatatgcaaattcttcaccacttatgatatggtacaaactggagtttacagatggcctt

SEQ ID NO: 193780 - DNA, 120 bp, Artificial Sequence
  ENSG00000112902_71 (sequence is synthesized)
ggccttgcctagcccatttgttcatcctaacttcttcatcacttcctgatgcacttggggaagcatgttgacacaacgttaccaatatttgattacctatggttatctgcaattacctac

SEQ ID NO: 193781 - DNA, 120 bp, Artificial Sequence
  ENSG00000112902_72 (sequence is synthesized)
gcttatcttatcagaccctagatgccatttgagccccttacttctttgggcagtgggtgaaatgggagaacatagagaaatgttcactttgacctaagaaacgcataaaagggaatgcca

SEQ ID NO: 193782 - DNA, 120 bp, Artificial Sequence
  ENSG00000112902_73 (sequence is synthesized)
tgcacaatgtaagataaaatgtttggggacaggggatcatcgtgaaatttatttctgctattctgccctattgaggtcattaattataatggatttaaagatttttttttaaactctaca

SEQ ID NO: 193783 - DNA, 120 bp, Artificial Sequence
  ENSG00000112902_74 (sequence is synthesized)
aacactaagccaaggaattcaggttatctgctatgttaacctaataaagcaaaggaaaataagttgctttaatccttgcttgttaacctaataaagcaaaggaaaatatgttgctttaat

SEQ ID NO: 193784 - DNA, 120 bp, Artificial Sequence
  ENSG00000112902_75 (sequence is synthesized)
ccttgcttcttttctcttttggtaatagaaaaggtaaataagatgtaatgttgaactgctggtgatgatttctaaaacgactctttaaatactcctttcctatggacttatattaaagat

SEQ ID NO: 193785 - DNA, 120 bp, Artificial Sequence
  ENSG00000112902_76 (sequence is synthesized)
gcattgtacacattgttttagcagatagatcaaagatatactcagtggtcatctgttgcattatcagaaatttgatacatgttacagaagcatgaggaagggaatcctatccacttttga

SEQ ID NO: 193786 - DNA, 120 bp, Artificial Sequence
  ENSG00000112902_77 (sequence is synthesized)
aaatagagttcacattgcaagcgacatagggcattatcaaaaccaattcagagcctggcacaaaatgtatacttcctagtgaaagctgtctcaaaacacagcctttttgatggatcatat

SEQ ID NO: 193787 - DNA, 120 bp, Artificial Sequence
  ENSG00000112902_78 (sequence is synthesized)
tagctcatatctgccatagaaaggcaatcaagcttactccctgcaatcggagtcaatatcaattcttgctcaagcaaacatgttttacagtgttggcgcaatggcaggaactagtcaagg

SEQ ID NO: 193788 - DNA, 120 bp, Artificial Sequence
  ENSG00000112902_79 (sequence is synthesized)
gcactttcagatctggaaagaggaaagaggaggtagaaaatcactcttttgtgtttcttaaactgtcaatcaagcaagaaaatttattccaccccttcatatttgctctaaaatctgggg

SEQ ID NO: 193789 - DNA, 120 bp, Artificial Sequence
  ENSG00000112902_80 (sequence is synthesized)
ccagtagttgaaatgtgatcttgttctttctcagccttttggcaatttaatgccaaatattccaaatgttagatgaatggcagtaataaaatgattcaaatgtttgataaatacaagctg

SEQ ID NO: 193790 - DNA, 120 bp, Artificial Sequence
  ENSG00000112902_81 (sequence is synthesized)
agagcaaaatctggactctgaaaaatcggaactattttatcatgttgctaaaatgagagcatcattttcttccctctctgtaagtgcggtagtttaatttcctagaaaaagttgctagtg

SEQ ID NO: 193791 - DNA, 120 bp, Artificial Sequence
  ENSG00000112902_82 (sequence is synthesized)
ccttgtttaagatgatcatttatcatttcatgtggatattattggtctaattagaaggagaagattgattggatttactttaaagaaaattattctcctatgtctctttgaactcaggaa

SEQ ID NO: 193792 - DNA, 120 bp, Artificial Sequence
  ENSG00000112902_83 (sequence is synthesized)
tagaaaatgaccaagaagcacatcatcttcagatgtgatttttgccctcactggggatgtagaaccagaataggtacaacatatgctcagaagagaggtgacttcagtattagccttcta

SEQ ID NO: 193793 - DNA, 120 bp, Artificial Sequence
  ENSG00000112902_84 (sequence is synthesized)
gaaactaacatcactttaatttttacatgttccaaaaaaaatcatagtgattgttctgtaataagaatgttaacgtgatgcctatagaagttagaggtttttgtttctgtttctcttcag

SEQ ID NO: 193794 - DNA, 120 bp, Artificial Sequence
  ENSG00000112902_85 (sequence is synthesized)
gcaagtccatagatagaggaaaatcagacacaggctggtgacaactggtatagatacagtgagcatggaatgagaaccacctacaacattgcctgattatttttaagtttatatcaaaac

SEQ ID NO: 193795 - DNA, 120 bp, Artificial Sequence
  ENSG00000112902_86 (sequence is synthesized)
tgcttcacaagttcacaaaagttgtcactcttaatttgggttaagaaaagtaatagtattatctctgctgaagttgattgtttttctcttttaccatgactgttggccaaaagcaagctg

SEQ ID NO: 193796 - DNA, 120 bp, Artificial Sequence
  ENSG00000112902_87 (sequence is synthesized)
aacctctgcactttgaaacaaagcacagtatgaatctttaacccaagcacttagtttcaccactgagattctacatcatctgcaagaaaatgcacaaacttttggtccaatgttggattc

SEQ ID NO: 193797 - DNA, 120 bp, Artificial Sequence
  ENSG00000112902_88 (sequence is synthesized)
ttcaaaagtgcatagcaaaacttttgtgctatgccgcttgatgtaacttttaaagatgttatcaaatgttaaatgcctcattctgcgttaatttgctgttggctgttttgtgaacacaaa

SEQ ID NO: 193798 - DNA, 120 bp, Artificial Sequence
  ENSG00000112902_89 (sequence is synthesized)
ataaacttgagatttttttttttttttttttttgtgaaactcctccaaagccaatttcagcccttggtaagcttgcagacagttactgatcttaaatttaattttaaaagacaatgtatc

SEQ ID NO: 193799 - DNA, 120 bp, Artificial Sequence
  ENSG00000112902_90 (sequence is synthesized)
ttaattataatttagctttttaaaacaatgagatagctttacatttcccctttgtttgaatgagaaaatggatcttgggttgctatgctagaacacttgtagattgctgggtcctttgta

SEQ ID NO: 193800 - DNA, 120 bp, Artificial Sequence
  ENSG00000112902_91 (sequence is synthesized)
agggggccatggacacaccacactttctttcaatccttacatttgaagcattgatattcttcaaaaccttcttgttacatgtgcgcaatagaaatttctaatgttcatgacttttatctt

SEQ ID NO: 193801 - DNA, 120 bp, Artificial Sequence
  ENSG00000112902_92 (sequence is synthesized)
tcctgtccatcaattcactggttgtaaatgcttcctgagagctgtctaggtctgtatcccagattgttgcttaatgacatctgacagatgcattgttttctgaaatcagcttaagacacc

SEQ ID NO: 193802 - DNA, 120 bp, Artificial Sequence
  ENSG00000112902_93 (sequence is synthesized)
aattgtggcaactggaaactcattacctgctgcattggatcaactatggaagttggagcaggggtgggcggaggtcacctaaccaatcaatggaaggcaactcacacctgctccaagcct

SEQ ID NO: 193803 - DNA, 120 bp, Artificial Sequence
  ENSG00000112902_94 (sequence is synthesized)
cagctttgagaaacaaacacgtttataagaaaaaatatatagctattattacagaagtgaatatgttgtgctctcttactgctcttggtgcattgacagtttctgtatctcaaccctatt

SEQ ID NO: 193804 - DNA, 120 bp, Artificial Sequence
  ENSG00000112902_95 (sequence is synthesized)
catctttatgaaaaagcattctgaagatctatcctcagcactgctgagtgtgcagtcacactttcctaccaacccccttcttaccatctctagctgccatttgtggggggaacaaaacaa

SEQ ID NO: 193805 - DNA, 120 bp, Artificial Sequence
  ENSG00000112902_96 (sequence is synthesized)
gggaatcctgattgtgtacagtataaattgtattatattttttgtacttatgttttatgtaaatagtttgtctcattcaattgtatgtgagcattgaaataaatcctaccatttagggga

SEQ ID NO: 193806 - DNA, 120 bp, Artificial Sequence
  ENSG00000112902_97 (sequence is synthesized)
cacctctcaagaaagccatttggaacaagtctagtggggaagcaggtggtcggaagtcagccttctgcgtccacagtggccctcagcctgaattttaaaattatgtgattctccttctct

SEQ ID NO: 193807 - DNA, 120 bp, Artificial Sequence
  ENSG00000112902_98 (sequence is synthesized)
gcaaatcaaaggtaagaagaatgcaattatgagcagccatcaccctgtcttgaaggactctacactatataaagcatgttgatatgaagagtattcctgattacggtgccatgtaaagtg

SEQ ID NO: 193808 - DNA, 120 bp, Artificial Sequence
  ENSG00000112902_99 (sequence is synthesized)
acagcctggagcaggaggaccgcacacaccacacaaagccacatgggagtcccgcggcagaagagttgaacatcacagggctgtgggaggcaggccttacagtggaaggaaggctgtgga

SEQ ID NO: 193809 - DNA, 120 bp, Artificial Sequence
  ENSG00000112936_0 (sequence is synthesized)
agggagaggcagagaggcaggcagcctgctgggctcttcctgctgttgaaaacttacccggcccttacagaggaaatcttcctcctctcttctgccctgaatgttttcccaaacatgaag

SEQ ID NO: 193810 - DNA, 120 bp, Artificial Sequence
  ENSG00000112936_1 (sequence is synthesized)
gtgataagcttattcattttggtgggatttataggagagttccaaagtttttcaagtgcctcctctccagtcaactgccagtgggacttctatgccccttggtcagaatgcaatggctgt

SEQ ID NO: 193811 - DNA, 120 bp, Artificial Sequence
  ENSG00000112936_2 (sequence is synthesized)
accaagactcagactcgcaggcggtcagttgctgtgtatgggcagtatggaggccagccttgtgttggaaatgcttttgaaacacagtcctgtgaacctacaagaggatgtccaacagag

SEQ ID NO: 193812 - DNA, 120 bp, Artificial Sequence
  ENSG00000112936_3 (sequence is synthesized)
gagggatgtggagagcgtttcaggtgcttttcaggtcagtgcatcagcaaatcattggtttgcaatggggattctgactgtgatgaagacagtgctgatgaagacagatgtgaggactca

SEQ ID NO: 193813 - DNA, 120 bp, Artificial Sequence
  ENSG00000112936_4 (sequence is synthesized)
gaaaggagaccttcctgtgatatcgataaacctcctcctaacatagaacttactggaaatggttacaatgaactcactggccagtttaggaacagagtcatcaataccaaaagttttggt

SEQ ID NO: 193814 - DNA, 120 bp, Artificial Sequence
  ENSG00000112936_5 (sequence is synthesized)
ggtcaatgtagaaaggtgtttagtggggatggaaaagatttctacaggctgagtggaaatgtcctgtcctatacattccaggtgaaaataaataatgattttaattatgaattttacaat

SEQ ID NO: 193815 - DNA, 120 bp, Artificial Sequence
  ENSG00000112936_6 (sequence is synthesized)
agtacttggtcttatgtaaaacatacgtcgacagaacacacatcatctagtcggaagcgctccttttttagatcttcatcatcttcttcacgcagttatacttcacataccaatgaaatc

SEQ ID NO: 193816 - DNA, 120 bp, Artificial Sequence
  ENSG00000112936_7 (sequence is synthesized)
cataaaggaaagagttaccaactgctggttgttgagaacactgttgaagtggctcagttcattaataacaatccagaatttttacaacttgctgagccattctggaaggagctttcccac

SEQ ID NO: 193817 - DNA, 120 bp, Artificial Sequence
  ENSG00000112936_8 (sequence is synthesized)
ctcccctctctgtatgactacagtgcctaccgaagattaatcgaccagtacgggacacattatctgcaatctgggtcgttaggaggagaatacagagttctattttatgtggactcagaa

SEQ ID NO: 193818 - DNA, 120 bp, Artificial Sequence
  ENSG00000112936_9 (sequence is synthesized)
aaattaaaacaaaatgattttaattcagtcgaagaaaagaaatgtaaatcctcaggttggcattttgtcgttaaattttcaagtcatggatgcaaggaactggaaaacgctttaaaagct

SEQ ID NO: 193819 - DNA, 120 bp, Artificial Sequence
  ENSG00000112936_10 (sequence is synthesized)
gcttcaggaacccagaacaatgtattgcgaggagaaccgttcatcagagggggaggtgcaggcttcatatctggccttagttacctagagctggacaatcctgctggaaacaaaaggcga

SEQ ID NO: 193820 - DNA, 120 bp, Artificial Sequence
  ENSG00000112936_11 (sequence is synthesized)
tattctgcctgggcagaatctgtgactaatcttcctcaagtcataaaacaaaagctgacacctttatatgagctggtaaaggaagtaccttgtgcctctgtgaaaaaactatacctgaaa

SEQ ID NO: 193821 - DNA, 120 bp, Artificial Sequence
  ENSG00000112936_12 (sequence is synthesized)
tgggctcttgaagagtatctggatgaatttgacccctgtcattgccggccttgtcaaaatggtggtttggctactgttgaggggacccattgtctgtgccattgcaaaccgtacacattt

SEQ ID NO: 193822 - DNA, 120 bp, Artificial Sequence
  ENSG00000112936_13 (sequence is synthesized)
ggtgcggcgtgtgagcaaggagtcctcgtagggaatcaagcaggaggggttgatggaggttggagttgctggtcctcttggagcccctgtgtccaagggaagaaaacaagaagccgtgaa

SEQ ID NO: 193823 - DNA, 120 bp, Artificial Sequence
  ENSG00000112936_14 (sequence is synthesized)
tgcaataacccacctcccagtgggggtgggagatcctgcgttggagaaacgacagaaagcacacaatgcgaagatgaggagctggagcacttgaggttgcttgaaccacattgctttcct

SEQ ID NO: 193824 - DNA, 120 bp, Artificial Sequence
  ENSG00000112936_15 (sequence is synthesized)
ttgtctttggttccaacagaattctgtccatcacctcctgccttgaaagatggatttgttcaagatgaaggtacaatgtttcctgtggggaaaaatgtagtgtacacttgcaatgaagga

SEQ ID NO: 193825 - DNA, 120 bp, Artificial Sequence
  ENSG00000112936_16 (sequence is synthesized)
tactctcttattggaaacccagtggccagatgtggagaagatttacggtggcttgttggggaaatgcattgtcagaaaattgcctgtgttctacctgtactgatggatggcatacagagt

SEQ ID NO: 193826 - DNA, 120 bp, Artificial Sequence
  ENSG00000112936_17 (sequence is synthesized)
cacccccaaaaacctttctacacagttggtgagaaggtgactgtttcctgttcaggtggcatgtccttagaaggtccttcagcatttctctgtggctccagccttaagtggagtcctgag

SEQ ID NO: 193827 - DNA, 120 bp, Artificial Sequence
  ENSG00000112936_18 (sequence is synthesized)
atgaagaatgcccgctgtgtacaaaaagaaaatccgttaacacaggcagtgcctaaatgtcagcgctgggagaaactgcagaattcaagatgtgtttgtaaaatgccctacgaatgtgga

SEQ ID NO: 193828 - DNA, 120 bp, Artificial Sequence
  ENSG00000112936_19 (sequence is synthesized)
ccttccttggatgtatgtgctcaagatgagagaagcaaaaggatactgcctctgacagtttgcaagatgcatgttctccactgtcagggtagaaattacacccttactggtagggacagc

SEQ ID NO: 193829 - DNA, 120 bp, Artificial Sequence
  ENSG00000112936_20 (sequence is synthesized)
tgtactctgcctgcctcagctgagaaagcttgtggtgcctgcccactgtggggaaaatgtgatgctgagagcagcaaatgtgtctgccgagaagcatcggagtgcgaggaagaagggttt

SEQ ID NO: 193830 - DNA, 120 bp, Artificial Sequence
  ENSG00000112936_21 (sequence is synthesized)
agcatttgtgtggaagtgaacggcaaggagcagacgatgtctgagtgtgaggcgggcgctctgagatgcagagggcagagcatctctgtcaccagcataaggccttgtgctgcggaaacc

SEQ ID NO: 193831 - DNA, 120 bp, Artificial Sequence
  ENSG00000112936_22 (sequence is synthesized)
cagtaggctcctggaggccctggtcagcttgcttggaatccagcaggcagctggggctgagtgaaaacatctgcacaactgggcactggacagcttttccttcttctccagtgtctacct

SEQ ID NO: 193832 - DNA, 120 bp, Artificial Sequence
  ENSG00000112936_23 (sequence is synthesized)
tcctttttaatgtcagtaaggatatgagcctttgcacaggctggctgcgtgttcttgaaataggtgttaccttctctgggccttggttttttaaaatctgtaaaattagaggattgcact

SEQ ID NO: 193833 - DNA, 120 bp, Artificial Sequence
  ENSG00000112936_24 (sequence is synthesized)
agagaaacttgaatgctccattcaggcctatcattttattaagtatgattgacacagcccatgggccagaacacactctacaaaatgactaggataacagaaagaacgtgatctcctgat

SEQ ID NO: 193834 - DNA, 120 bp, Artificial Sequence
  ENSG00000112936_25 (sequence is synthesized)
tagagagggtggttttcctcaatggaaccaaatataaagaggacttgaacaaaaatgacagatacaaactatttctatcctgagtagtaatctcacacttcatcctatagagtcaaccac

SEQ ID NO: 193835 - DNA, 85 bp, Artificial Sequence
  ENSG00000112936_26 (sequence is synthesized)
tgagtagtaatctcacacttcatcctatagagtcaaccaccacagataggaattccttattctttttttaatttttttgcagtgg

SEQ ID NO: 193836 - DNA, 88 bp, Artificial Sequence
  ENSG00000112936_27 (sequence is synthesized)
gcctggctggaatacttactcttgtcgggagattgaaccactaaaatgttagagcagaattcattatgctgtggtcacaggggtgtct

SEQ ID NO: 193837 - DNA, 120 bp, Artificial Sequence
  ENSG00000112936_28 (sequence is synthesized)
ttagagcagaattcattatgctgtggtcacaggggtgtcttgtctgagaacaaatacaattcagtcttctctttggggttttagtatgtgtcaaacataggactggaagtttgcccctgt

SEQ ID NO: 193838 - DNA, 120 bp, Artificial Sequence
  ENSG00000112936_29 (sequence is synthesized)
tcttttttcttttgaaagaacatcagttcatgcctgaggcatgagtgactgtgcatttgagaatagttttccctattctgtggatacagtcccagagttttcagggagtacacaggtaga

SEQ ID NO: 193839 - DNA, 120 bp, Artificial Sequence
  ENSG00000112936_30 (sequence is synthesized)
ttagtttgaagcattgaccttttatttattccttatttctctttcatcaaaacaaaacagcagctgtgggaggagaaatgagagggcttaaatgaaatttaaaataagctatattataca

SEQ ID NO: 193840 - DNA, 120 bp, Artificial Sequence
  ENSG00000112936_31 (sequence is synthesized)
aatactatctctgtattgttctgaccctggtaaatatatttcaaaacttcagatgacaaggattagaacactcattaaagatgctattcttcagaattgtttcatttgtatgatgtttca

SEQ ID NO: 193841 - DNA, 120 bp, Artificial Sequence
  ENSG00000112936_32 (sequence is synthesized)
ttttagagaagattttcatgatgaatggttaatgtgttcttgcctgaagttttatgtctgatccagatctagctttttgtatcaaagtgtgccctaagggaagatgcagatataatatgt

SEQ ID NO: 193842 - DNA, 120 bp, Artificial Sequence
  ENSG00000112936_33 (sequence is synthesized)
tgaagttacaaggaggcaggtttcaattggttaaaaacaatgacattcagacattgcaactgcatttgttagcggttattacagagttaatttctaccctggatgggaggacacatttga

SEQ ID NO: 193843 - DNA, 120 bp, Artificial Sequence
  ENSG00000112936_34 (sequence is synthesized)
acatgctaggcctggatgcagaccctgagacaaaaggttgaacaagtaattcatttggaaggaaatacctcagtatccttccaataatttctcctcttagcttaagctagtatggagtta

SEQ ID NO: 193844 - DNA, 120 bp, Artificial Sequence
  ENSG00000112936_35 (sequence is synthesized)
gattcctaccgcttatgtatcaccatgcccccttcctaaataatacagaggatatggtcagcattatcacatatcatcagagattgaggtttgaaagaaaggaaatgagtagatgtaact

SEQ ID NO: 193845 - DNA, 120 bp, Artificial Sequence
  ENSG00000112936_36 (sequence is synthesized)
aagaggtttgagaaaggaatttcagcagagttattgaaggagaagtcaaggagaggagaaggagaggagcagtgaatgttgtcgtgaagaggtgttgtcttgaaatactgtatttttttc

SEQ ID NO: 193846 - DNA, 120 bp, Artificial Sequence
  ENSG00000112936_37 (sequence is synthesized)
ctccttttcttttctgaacattcttgtgctgacctttcctctagtccaacagaggcattcacaattgcctgtggagaattaggattgtcgcagcaggtcagcaaggagaaagtcattttt

SEQ ID NO: 193847 - DNA, 120 bp, Artificial Sequence
  ENSG00000112936_38 (sequence is synthesized)
aagattaaatttttaaaaatgttttgaaacttccaaaataagttcttgaacacctatggagaggctttgaggaaagttaagggaatgattttataccacaaaaataaatggaaaaagaat

SEQ ID NO: 193848 - DNA, 120 bp, Artificial Sequence
  ENSG00000112936_39 (sequence is synthesized)
aaagactgtgagaattccatcttcctgccctttcctgtgcctcagatcaggtgagggtcatctgggttagaaggggatagagccttggaggaggcagagggcagaaagcattgctgagat

SEQ ID NO: 193849 - DNA, 120 bp, Artificial Sequence
  ENSG00000112936_40 (sequence is synthesized)
tagagtcatttggccctcagaaggaacagacaaagagaaggaaattggctggtgcattaatcatcactagcttcagggagctatgtggaggccaaggcacatcctacagatcatcgctta

SEQ ID NO: 193850 - DNA, 120 bp, Artificial Sequence
  ENSG00000112936_41 (sequence is synthesized)
ccactcatgaggacgctacaagttacctgggcagagaaggtgcctgagaatatttcctaatcgttttgagaagtgccttcctgtgacatcttatgtatttcctaattgatcaaaagtagt

SEQ ID NO: 193851 - DNA, 120 bp, Artificial Sequence
  ENSG00000112936_42 (sequence is synthesized)
gctgcttctctaagccctgagatttaatgagccccattcaaactgttattaatgtaaccttctttcccagtgcaggatgacttgtaatcaccttgaaagagaaggagggttcttcgtatt

SEQ ID NO: 193852 - DNA, 120 bp, Artificial Sequence
  ENSG00000112936_43 (sequence is synthesized)
caggtagggtatggtagggatgtggagtgccaagcaggaaatctgacaagtgacccccggaactttggattacctagcaactagccaggtaactggctaatctgattgagggttgccctc

SEQ ID NO: 193853 - DNA, 120 bp, Artificial Sequence
  ENSG00000112936_44 (sequence is synthesized)
tttgctgggcagatcatggctaatctcagcttcacatgagtcttgtgaaccatctagttgttttgtaactgctaagagctgcaagtgctgagcagctggtttatacagcattccctgaaa

SEQ ID NO: 193854 - DNA, 120 bp, Artificial Sequence
  ENSG00000112936_45 (sequence is synthesized)
cagcctagtatgtgtccatttatgtgcccggcttattatgtgtccacttatgtgtccaattagtaatcactttttctttcggtcaaggtatgtgtattaatcaatattttttgaacccgt

SEQ ID NO: 193855 - DNA, 120 bp, Artificial Sequence
  ENSG00000112936_46 (sequence is synthesized)
gtagaatgcttagtatagtccttggtattttgggagcaatcaatacattatagacagtggtattaatagttttatttcaattaatggtggtgctagtgttactaactatataggggaaaa

SEQ ID NO: 193856 - DNA, 120 bp, Artificial Sequence
  ENSG00000112936_47 (sequence is synthesized)
tgtttttatagacacttttctgaatcaattaaatgtagcttgcctgatgattatgatttatagactgaatatatgtaaagaaacgttttgttaatgcaaaatagacaaactctttccttt

SEQ ID NO: 193857 - DNA, 120 bp, Artificial Sequence
  ENSG00000112936_48 (sequence is synthesized)
gcagtgggccgaagaagatacttgaggatgttaaagactcagactgatttgacatgcactgacctctcctatacccctcactggagaagggcacagatcacagacctcagaggataagat

SEQ ID NO: 193858 - DNA, 120 bp, Artificial Sequence
  ENSG00000112936_49 (sequence is synthesized)
tcccacattcctgatgtggaaatgttctcccaaacaggggtgattccatgccaccttcatgatttttactctgtccttgtattatccatattgtgtactcattttttaaaagtctgacat

SEQ ID NO: 193859 - DNA, 120 bp, Artificial Sequence
  ENSG00000112936_50 (sequence is synthesized)
aaaaataacttaaaaatgaaaactttatatcatgtccttaaaaggaggtatcacttgccataaatactaggtaactataaaagttatatgtaatggaactaaataaagttgtggactcta

SEQ ID NO: 193860 - DNA, 120 bp, Artificial Sequence
  ENSG00000112936_51 (sequence is synthesized)
aaaccagctgttgccatagatacgaaagagccatgtgtttcccaaatatgttcttagatggaaagaatgttggattttctgagccattagttttagtgattataccaagcaggggaagct

SEQ ID NO: 193861 - DNA, 120 bp, Artificial Sequence
  ENSG00000112936_52 (sequence is synthesized)
ggataatgtatggtgtgtattaggatgctgtgctcttcatttgaactctctcaaagaagtgtttaagtgtaatgcattttaagaatttgtagagttctgtaataaacttttttccccacc

SEQ ID NO: 193862 - DNA, 120 bp, Artificial Sequence
  ENSG00000112941_0 (sequence is synthesized)
gcttttggaggatggatgttgaaggctaaggccaaggcccgactctgcactgaaagttttttttttaaacatcagactcatttatcgtggagtgacttgcccagatcctacaagtaacag

SEQ ID NO: 193863 - DNA, 120 bp, Artificial Sequence
  ENSG00000112941_1 (sequence is synthesized)
tccaagaaaaggggctgctgggtaggacctgcagactacatgaggaaataattgacttttataacttcatgtccccttgtcctgaagaagcagctatgagaagagaggtggtgaaacgga

SEQ ID NO: 193864 - DNA, 120 bp, Artificial Sequence
  ENSG00000112941_2 (sequence is synthesized)
tcgaaactgtggtgaaagacctttggccgacggctgatgtacagatatttggcagctttagtacaggtctttatcttccaactagcgacatagacctggtggtcttcgggaaatgggagc

SEQ ID NO: 193865 - DNA, 120 bp, Artificial Sequence
  ENSG00000112941_3 (sequence is synthesized)
gtcctcctttacagctgctggagcaagccctgcggaagcacaacgtggctgagccgtgttccatcaaagtccttgacaaggctacggtaccaataataaagctcacagatcaggagactg

SEQ ID NO: 193866 - DNA, 120 bp, Artificial Sequence
  ENSG00000112941_4 (sequence is synthesized)
aagtgaaagttgacatcagctttaacatggagacgggcgtccgggcagcggagttcatcaagaattacatgaagaaatattcattgctgccttacttgattttagtattgaaacagttcc

SEQ ID NO: 193867 - DNA, 120 bp, Artificial Sequence
  ENSG00000112941_5 (sequence is synthesized)
ttctgcagagggacctgaatgaagtttttacaggtggaattagctcatacagcctaattttaatggccattagctttctacagttgcatccaagaattgatgcccggagagctgatgaaa

SEQ ID NO: 193868 - DNA, 120 bp, Artificial Sequence
  ENSG00000112941_6 (sequence is synthesized)
accttggaatgcttcttgtagaattttttgaactctatgggagaaattttaattacttgaaaaccggtattagaatcaaagaaggaggtgcctatatcgccaaagaggagatcatgaaag

SEQ ID NO: 193869 - DNA, 120 bp, Artificial Sequence
  ENSG00000112941_7 (sequence is synthesized)
aggtcttcgattatgcctacatagtgctcagccatgctgtgtcaccgctggccaggtcctatccaaacagagacgccgaaagtactttaggaagaatcatcaaagtaactcaggaggtga

SEQ ID NO: 193870 - DNA, 120 bp, Artificial Sequence
  ENSG00000112941_8 (sequence is synthesized)
ttgactaccggaggtggatcaaagagaagtggggcagcaaagcccacccgtcgccaggcatggacagcaggatcaagatcaaagagcgaatagccacatgcaatggggagcagacgcaga

SEQ ID NO: 193871 - DNA, 120 bp, Artificial Sequence
  ENSG00000112941_9 (sequence is synthesized)
accgagagcccgagtctccctatggccagcgcttgactttgtcgctgtccagcccccagctcctgtcttcaggctcctcggcctcttctgtgtcttcactttctgggagtgacgttgatt

SEQ ID NO: 193872 - DNA, 120 bp, Artificial Sequence
  ENSG00000112941_10 (sequence is synthesized)
cagacacaccgccctgcacaacgcccagtgtttaccagttcagtctgcaagcgccagctcctctcatggccggcttacccaccgccttgccaatgcccagtggcaaacctcagcccacca

SEQ ID NO: 193873 - DNA, 120 bp, Artificial Sequence
  ENSG00000112941_11 (sequence is synthesized)
cttccagaacactgatcatgacaaccaacaatcagaccaggtttactatacctccaccgaccctaggggttgctcctgttccttgcagacaagctggtgtagaaggaactgcgtctttga

SEQ ID NO: 193874 - DNA, 120 bp, Artificial Sequence
  ENSG00000112941_12 (sequence is synthesized)
aagccgtccaccacatgtcttccccggccattccctcagcgtcccccaacccgctctcgagccctcatctgtatcataagcagcacaacggcatgaaactgtccatgaagggctctcacg

SEQ ID NO: 193875 - DNA, 120 bp, Artificial Sequence
  ENSG00000112941_13 (sequence is synthesized)
gccacacccaaggcggcggctacagctctgtgggtagcggaggtgtgcggccccctgtgggcaacaggggacaccaccagtataaccgcaccggctggaggaggaaaaaacacacacaca

SEQ ID NO: 193876 - DNA, 120 bp, Artificial Sequence
  ENSG00000112941_14 (sequence is synthesized)
cacgggacagtctgcccgtgagcctcagcagataatggctcctggctgcgtcagcctcccccacccctctgcagactgccccgcggcctcggccaccggcaggggaaccgagaccagcac

SEQ ID NO: 193877 - DNA, 120 bp, Artificial Sequence
  ENSG00000112941_15 (sequence is synthesized)
caaaaatcaaactacactaaaattcagatgagtccgttgtgttccttttgaacactcctcgttgaagaggctgctgttcaggcttcctcgtggtgctggtgagtgagcgagtgccactca

SEQ ID NO: 193878 - DNA, 120 bp, Artificial Sequence
  ENSG00000112941_16 (sequence is synthesized)
ctggtattgccttgaagaggctgctggacagcagacttcgtcgcgtgctattttctttagaacatgccatgaatccatacaaattgtgggtgcattgcttttacagttgcatccaagaat

SEQ ID NO: 193879 - DNA, 120 bp, Artificial Sequence
  ENSG00000112941_17 (sequence is synthesized)
tgctcatctgtgaagccttattaaacgtggacgttgttttctgccttcccaggattcttccttcagtgctgaggcaggtcgggctcaggaactgcagggacgtgaacatgcgcttgcggt

SEQ ID NO: 193880 - DNA, 120 bp, Artificial Sequence
  ENSG00000112941_18 (sequence is synthesized)
ttgaggtagccgtgtctgttccttcgcggtttgctattttcatttcctgttcgtcaaagcagcagaggagatcaaaccccgttcgtgtgtctttcctccacggataagcttgggaggtca

SEQ ID NO: 193881 - DNA, 120 bp, Artificial Sequence
  ENSG00000112941_19 (sequence is synthesized)
ttgttttactgccctcacattttgtttgaaatttcagaactgtttttctatgtaaatattgaaaacttatgatttgtgcaataactcagatattttttatttaatttcctattttcacat

SEQ ID NO: 193882 - DNA, 80 bp, Artificial Sequence
  ENSG00000112941_20 (sequence is synthesized)
cccggggcccaggcgccgcggcccggcaccccgtggaagagccgcgcgtacagcccgggcatccaggggtgagtgcgcgg

SEQ ID NO: 193883 - DNA, 120 bp, Artificial Sequence
  ENSG00000112941_21 (sequence is synthesized)
ctccaccccgcctccgggcaagtgaggaaccccttgtcaaagtggggcgtagataagtgtggagtttcacgtaagttaagttgcagaataatttagcattgccaggaactcgaatcacgt

SEQ ID NO: 193884 - DNA, 120 bp, Artificial Sequence
  ENSG00000112941_22 (sequence is synthesized)
cgaagactacatgaggaaataattgacttttataacttcatgtccccttgtcctgaagaagcagctatgagaagagaggtggtgaaacggatcgaaactgtggtgaaagacctttggccg

SEQ ID NO: 193885 - DNA, 120 bp, Artificial Sequence
  ENSG00000112941_23 (sequence is synthesized)
gagctgtgatatgcactagaggagattgatggtcctttgaattagaagagtaactttttgagtatttggccattggtgtgttgttctaggaaatcctctcttttttgtggtgttgaggtc

SEQ ID NO: 193886 - DNA, 120 bp, Artificial Sequence
  ENSG00000112941_24 (sequence is synthesized)
ccccatgtatagtttcagcagcgaggacactgtggttcttgagtgctgccgtggcttttcacgggggccaggttgactgccttcctgcaagtttcctcactgccccagcatgagactgct

SEQ ID NO: 193887 - DNA, 120 bp, Artificial Sequence
  ENSG00000112941_25 (sequence is synthesized)
gccgccgagagtgtcttttcaccgccgccgccgccgccgccgcaggagcgccgagccagcggcgcgagcgtgactgagggctagccgcacgggcggcggcgcctcccgcgggtccttcag

SEQ ID NO: 193888 - DNA, 80 bp, Artificial Sequence
  ENSG00000112941_26 (sequence is synthesized)
cgtgactgagggctagccgcacgggcggcggcgcctcccgcgggtccttcagccgctcggcgcctgggcccgccccctcg

SEQ ID NO: 193889 - DNA, 120 bp, Artificial Sequence
  ENSG00000112941_27 (sequence is synthesized)
gtcggggcgggcgggcgcgcgggccccgcgggggcggcgcgtggatggatccgcgcgtggcctggatccagcccgagcagaaggggccggccaatgccctgtggatgcagatctgggaga

SEQ ID NO: 193890 - DNA, 120 bp, Artificial Sequence
  ENSG00000112941_28 (sequence is synthesized)
aatgccctgtggatgcagatctgggagacctcgcagggcgtgggccgcggcggctcgggcttcgcgtcctatttctgcctcaactcgccggcgctggacacggcggccgcggcgggggcg

SEQ ID NO: 193891 - DNA, 80 bp, Artificial Sequence
  ENSG00000112941_29 (sequence is synthesized)
gctgccccccgcgctgctgacggcgctggggcccgcggccgagggcgcgcggcgcttgcacaagtcgccgtcgctgtcgt

SEQ ID NO: 193892 - DNA, 120 bp, Artificial Sequence
  ENSG00000112941_30 (sequence is synthesized)
gagggcgcgcggcgcttgcacaagtcgccgtcgctgtcgtcctcgtcgtcgtcctcctcgtccaacgcggagtcgggcaccgagagccccggctgctcgtcgtcgtcctccagcagcgcc

SEQ ID NO: 193893 - DNA, 80 bp, Artificial Sequence
  ENSG00000112941_31 (sequence is synthesized)
cgccttcttcaacttcgccgacggcgcgcccagcgcccctggcacagccaacgggcaccccgggccgcgcggccccgcgc

SEQ ID NO: 193894 - DNA, 120 bp, Artificial Sequence
  ENSG00000112941_32 (sequence is synthesized)
tccccgtcgcagcaccagttccacccgggtcgccggaaacgcgagaacaaggccagcacctacggcctcaactacctgctgtccggcagccgcgcggccgctctcagcggagggggcggc

SEQ ID NO: 193895 - DNA, 120 bp, Artificial Sequence
  ENSG00000112941_33 (sequence is synthesized)
accatgatgaggggtttggggttttattttgatgtcttttcttttggtcggaagtgagtgaaggagccaggtcgccctgaaggttttccaaagggcttggctccagagccacctggcaga

SEQ ID NO: 193896 - DNA, 120 bp, Artificial Sequence
  ENSG00000112941_34 (sequence is synthesized)
ctgcccgtggccctgctgtcgggccccaggccgttgtcctgctctgaccacagagttttaatgttttggttttcacttcttttaaactggacaacaaatccagcatttcaagtgccagaa

SEQ ID NO: 193897 - DNA, 120 bp, Artificial Sequence
  ENSG00000112941_35 (sequence is synthesized)
gtataactttctaaggagagaagggttgtcacattataaaatctttaggaaaatgtgaactggaaaacgcttcggtcagttttagtgacatagcctgtgatgatgggtctggtgactatt

SEQ ID NO: 193898 - DNA, 120 bp, Artificial Sequence
  ENSG00000112941_36 (sequence is synthesized)
attgcggaccgtggtacccagttttaggaatgtggagaaaggaattctgttgattccgttgaggaatctgtagcgtatgcattcgttctgttaagagcaaatctaggagaagtgcttcag

SEQ ID NO: 193899 - DNA, 120 bp, Artificial Sequence
  ENSG00000112941_37 (sequence is synthesized)
ctgcccagtgcgccgtggggagtgttttaacggatcgtgtcgcaggagagcacagcccagcgttggggccgggaccgctggcgcccgacgtcggaagcatacaggtatactatgcaagtg

SEQ ID NO: 193900 - DNA, 120 bp, Artificial Sequence
  ENSG00000112941_38 (sequence is synthesized)
tattctgccacaacaaccactgtctttgttacctttttttgaacaagaatatatccatcctgcctaaccctgagtttttggagcaccacagttgtcctgggagttggttgcatcttgtag

SEQ ID NO: 193901 - DNA, 120 bp, Artificial Sequence
  ENSG00000112941_39 (sequence is synthesized)
gccatctgacttcctgtttttaaaacgggggtctggtcttgctaaacactacaggtaggttggtctttgaagtccactagtggagaatgtcaagacaagatacttattaccatgacatct

SEQ ID NO: 193902 - DNA, 120 bp, Artificial Sequence
  ENSG00000112941_40 (sequence is synthesized)
gatgcatgtgcagcagtggggagttctagattgatctctgaatgtgatcgacgcccagcaaggacaagctttaaaatgtctgcggtctgcccttttgaagcaggactggctcactctgtc

SEQ ID NO: 193903 - DNA, 120 bp, Artificial Sequence
  ENSG00000112941_41 (sequence is synthesized)
attgggagctgtcagctgcgactgcaggttctctaggaggcattccagaatagagtagcacactgtgtctgcagttctcgatgaccgaaagttatcaaaaatatttaaaatatttaaatt

SEQ ID NO: 193904 - DNA, 120 bp, Artificial Sequence
  ENSG00000112941_42 (sequence is synthesized)
gtgaacctattgataaagaatatttataaaaactgatctgtaggcctgtactaatctctacgcattagcaatattgactgtaaacccacattaaggaaaccactacgggtctggcagtgc

SEQ ID NO: 193905 - DNA, 120 bp, Artificial Sequence
  ENSG00000112941_43 (sequence is synthesized)
gtgtcccgtggggtgtgcattttaaaactcgattcatagacacaggtaccatgttccatttccgtcatggtgaagcaaatgaattggcctggctaccactgtggtcgcgtgctacaggtt

SEQ ID NO: 193906 - DNA, 120 bp, Artificial Sequence
  ENSG00000112941_44 (sequence is synthesized)
tgacaaaaagatatcatgtttcgatttttttgtgtgtggacaacaatatggaagctaaaattgacatatttttatgtaaagtttttctattctttgatttttaataaactttggaaacca

SEQ ID NO: 193907 - DNA, 120 bp, Artificial Sequence
  ENSG00000112941_45 (sequence is synthesized)
taaaatctcccccttggttttgctcaggttttgtttccttgtatgtgtgtggaggtgggtggggggcagccccgtgatgtgggcaccaggcttcctttcccctgccgtgaaccttcagaa

SEQ ID NO: 193908 - DNA, 120 bp, Artificial Sequence
  ENSG00000112941_46 (sequence is synthesized)
cctgtctgtgcgactcatgcggctgtcgagggcagtaatcctctaaatggttgaactacagtggacttccttgagtagtttttaaaaatttatttgaagattaaaaaaaaaattaaatcc

SEQ ID NO: 193909 - DNA, 120 bp, Artificial Sequence
  ENSG00000112964_0 (sequence is synthesized)
agttgagagtgacacgcaccaactccagctcctcgccgggaagacttcatcccagcaactcggaatgcttggcccgggcggcactcggcctctccgcagcagttctcgaactggcctcct

SEQ ID NO: 193910 - DNA, 120 bp, Artificial Sequence
  ENSG00000112964_1 (sequence is synthesized)
tgaacgtccgcttcgccttcgcttctgcaacctggatctgggggactgcgggccaggcgcggcgtgacccctggtgaacggtggccgccttttcccacccctgccctcccatcctccctt

SEQ ID NO: 193911 - DNA, 120 bp, Artificial Sequence
  ENSG00000112964_2 (sequence is synthesized)
cccgtttcaccccgccccctctctcctccccaagcctgacagcccgcgagctgccaagcagggcgcagccatgggaagaggaggagggctagggagcggcggcggcggcggcagcggcag

SEQ ID NO: 193912 - DNA, 80 bp, Artificial Sequence
  ENSG00000112964_3 (sequence is synthesized)
agcggcagcagcagctgctacagtggcggtggcggcggcggctgctgctgagcccgggcggcggcggggaccccgggctg

SEQ ID NO: 193913 - DNA, 120 bp, Artificial Sequence
  ENSG00000112964_4 (sequence is synthesized)
cgaacccgcgctctctgatcagaggcgaagctcggaggtcctacaggtatggatctctggcagctgctgttgaccttggcactggcaggatcaagtgatgctttttctggaagtgaggcc

SEQ ID NO: 193914 - DNA, 120 bp, Artificial Sequence
  ENSG00000112964_5 (sequence is synthesized)
acagcagctatccttagcagagcaccctggagtctgcaaagtgttaatccaggcctaaagacaaattcttctaaggagcctaaattcaccaagtgccgttcacctgagcgagagactttt

SEQ ID NO: 193915 - DNA, 120 bp, Artificial Sequence
  ENSG00000112964_6 (sequence is synthesized)
tcatgccactggacagatgaggttcatcatggtacaaagaacctaggacccatacagctgttctataccagaaggaacactcaagaatggactcaagaatggaaagaatgccctgattat

SEQ ID NO: 193916 - DNA, 120 bp, Artificial Sequence
  ENSG00000112964_7 (sequence is synthesized)
gtttctgctggggaaaacagctgttactttaattcatcgtttacctccatctggataccttattgtatcaagctaactagcaatggtggtacagtggatgaaaagtgtttctctgttgat

SEQ ID NO: 193917 - DNA, 120 bp, Artificial Sequence
  ENSG00000112964_8 (sequence is synthesized)
gaaatagtgcaaccagatccacccattgccctcaactggactttactgaacgtcagtttaactgggattcatgcagatatccaagtgagatgggaagcaccacgcaatgcagatattcag

SEQ ID NO: 193918 - DNA, 120 bp, Artificial Sequence
  ENSG00000112964_9 (sequence is synthesized)
aaaggatggatggttctggagtatgaacttcaatacaaagaagtaaatgaaactaaatggaaaatgatggaccctatattgacaacatcagttccagtgtactcattgaaagtggataag

SEQ ID NO: 193919 - DNA, 120 bp, Artificial Sequence
  ENSG00000112964_10 (sequence is synthesized)
gaatatgaagtgcgtgtgagatccaaacaacgaaactctggaaattatggcgagttcagtgaggtgctctatgtaacacttcctcagatgagccaatttacatgtgaagaagatttctac

SEQ ID NO: 193920 - DNA, 120 bp, Artificial Sequence
  ENSG00000112964_11 (sequence is synthesized)
tttccatggctcttaattattatctttggaatatttgggctaacagtgatgctatttgtattcttattttctaaacagcaaaggattaaaatgctgattctgcccccagttccagttcca

SEQ ID NO: 193921 - DNA, 120 bp, Artificial Sequence
  ENSG00000112964_12 (sequence is synthesized)
aagattaaaggaatcgatccagatctcctcaaggaaggaaaattagaggaggtgaacacaatcttagccattcatgatagctataaacccgaattccacagtgatgactcttgggttgaa

SEQ ID NO: 193922 - DNA, 120 bp, Artificial Sequence
  ENSG00000112964_13 (sequence is synthesized)
tttattgagctagatattgatgagccagatgaaaagactgaggaatcagacacagacagacttctaagcagtgaccatgagaaatcacatagtaacctaggggtgaaggatggcgactct

SEQ ID NO: 193923 - DNA, 120 bp, Artificial Sequence
  ENSG00000112964_14 (sequence is synthesized)
ggacgtaccagctgttgtgaacctgacattctggagactgatttcaatgccaatgacatacatgagggtacctcagaggttgctcagccacagaggttaaaaggggaagcagatctctta

SEQ ID NO: 193924 - DNA, 120 bp, Artificial Sequence
  ENSG00000112964_15 (sequence is synthesized)
tgccttgaccagaagaatcaaaataactcaccttatcatgatgcttgccctgctactcagcagcccagtgttatccaagcagagaaaaacaaaccacaaccacttcctactgaaggagct

SEQ ID NO: 193925 - DNA, 120 bp, Artificial Sequence
  ENSG00000112964_16 (sequence is synthesized)
gagtcaactcaccaagctgcccatattcagctaagcaatccaagttcactgtcaaacatcgacttttatgcccaggtgagcgacattacaccagcaggtagtgtggtcctttccccgggc

SEQ ID NO: 193926 - DNA, 120 bp, Artificial Sequence
  ENSG00000112964_17 (sequence is synthesized)
caaaagaataaggcagggatgtcccaatgtgacatgcacccggaaatggtctcactctgccaagaaaacttccttatggacaatgcctacttctgtgaggcagatgccaaaaagtgcatc

SEQ ID NO: 193927 - DNA, 120 bp, Artificial Sequence
  ENSG00000112964_18 (sequence is synthesized)
cctgtggctcctcacatcaaggttgaatcacacatacagccaagcttaaaccaagaggacatttacatcaccacagaaagccttaccactgctgctgggaggcctgggacaggagaacat

SEQ ID NO: 193928 - DNA, 120 bp, Artificial Sequence
  ENSG00000112964_19 (sequence is synthesized)
gttccaggttctgagatgcctgtcccagactatacctccattcatatagtacagtccccacagggcctcatactcaatgcgactgccttgcccttgcctgacaaagagtttctctcatca

SEQ ID NO: 193929 - DNA, 120 bp, Artificial Sequence
  ENSG00000112964_20 (sequence is synthesized)
caataacgtttaagccaaaacaatgtttaaaccttttttgggggagtgacaggatggggtatggattctaaaatgccttttcccaaaatgttgaaatatgatgttaaaaaaataagaaga

SEQ ID NO: 193930 - DNA, 120 bp, Artificial Sequence
  ENSG00000112964_21 (sequence is synthesized)
atgcttaatcagatagatattcctattgtgcaatgtaaatattttaaagaattgtgtcagactgtttagtagcagtgattgtcttaatattgtgggtgttaatttttgatactaagcatt

SEQ ID NO: 193931 - DNA, 120 bp, Artificial Sequence
  ENSG00000112964_22 (sequence is synthesized)
gaatggctatgtttttaatgtatagtaaatcacgctttttgaaaaagcgaaaaaatcaggtggcttttgcggttcaggaaaattgaatgcaaaccatagcacaggctaattttttgttgt

SEQ ID NO: 193932 - DNA, 120 bp, Artificial Sequence
  ENSG00000112964_23 (sequence is synthesized)
ttcttaaataagaaacttttttatttaaaaaactaaaaactagaggtgagaaatttaaactataagcaagaaggcaaaaatagtttggatatgtaaaacatttattttgacataaagttg

SEQ ID NO: 193933 - DNA, 120 bp, Artificial Sequence
  ENSG00000112964_24 (sequence is synthesized)
ataaagattttttaataatttagacttcaagcatggctattttatattacactacacactgtgtactgcagttggtatgacccctctaaggagtgtagcaactacagtctaaagctggtt

SEQ ID NO: 193934 - DNA, 120 bp, Artificial Sequence
  ENSG00000112964_25 (sequence is synthesized)
taatgttttggccaatgcacctaaagaaaaacaaactcgttttttacaaagcccttttatacctccccagactccttcaacaattctaaaatgattgtagtaatctgcattattggaata

SEQ ID NO: 193935 - DNA, 120 bp, Artificial Sequence
  ENSG00000112964_26 (sequence is synthesized)
taattgttttatctgaatttttaaacaagtatttgttaatttagaaaactttaaagcgtttgcacagatcaacttaccaggcaccaaaagaagtaaaagcaaaaaagaaaacctttcttc

SEQ ID NO: 193936 - DNA, 120 bp, Artificial Sequence
  ENSG00000112964_27 (sequence is synthesized)
accaaatcttggttgatgccaaaaaaaaatacatgctaagagaagtagaaatcatagctggttcacactgaccaagatacttaagtgctgcaattgcacgcggagtgagttttttagtgc

SEQ ID NO: 193937 - DNA, 120 bp, Artificial Sequence
  ENSG00000112964_28 (sequence is synthesized)
gtgcagatggtgagagataagatctatagcctctgcagcggaatctgttcacacccaacttggttttgctacataattatccaggaagggaataaggtacaagaagcattttgtaagttg

SEQ ID NO: 193938 - DNA, 120 bp, Artificial Sequence
  ENSG00000112964_29 (sequence is synthesized)
aagcaaatcgaatgaaattaactgggtaatgaaacaaagagttcaagaaataagtttttgtttcacagcctataaccagacacatactcatttttcatgataatgaacagaacatagaca

SEQ ID NO: 193939 - DNA, 120 bp, Artificial Sequence
  ENSG00000112964_30 (sequence is synthesized)
gaagaaacaaggttttcagtccccacagataactgaaaattatttaaaccgctaaaagaaactttctttctcactaaatcttttataggatttatttaaaatagcaaaagaagaagtttc

SEQ ID NO: 193940 - DNA, 120 bp, Artificial Sequence
  ENSG00000112964_31 (sequence is synthesized)
atcattttttacttcctctctgagtggactggcctcaaagcaagcattcagaagaaaaagaagcaacctcagtaatttagaaatcattttgcaatcccttaatatcctaaacatcattca

SEQ ID NO: 193941 - DNA, 90 bp, Artificial Sequence
  ENSG00000112964_32 (sequence is synthesized)
agacagagtctcgctctgtcgccaggctagagtgcggtggcgcgatcttgactcactgcaatctccacctcccacaggttcaggcgattc

SEQ ID NO: 193942 - DNA, 120 bp, Artificial Sequence
  ENSG00000112964_33 (sequence is synthesized)
caggtgtaagccaccgtgcccagccctaaacatcattcttgagagcattgggatatctcctgaaaaggtttatgaaaaagaagaatctcatctcagtgaagaatacttctcattttttaa

SEQ ID NO: 193943 - DNA, 120 bp, Artificial Sequence
  ENSG00000112964_34 (sequence is synthesized)
aagaatctcatctcagtgaagaatacttctcattttttaaaaaagcttaaaactttgaagttagctttaacttaaatagtatttcccatttatcgcagaccttttttaggaagcaagctt

SEQ ID NO: 193944 - DNA, 120 bp, Artificial Sequence
  ENSG00000112964_35 (sequence is synthesized)
aatggctgataattttaaattctctctcttgcaggaaggactatgaaaagctagaattgagtgtttaaagttcaacatgttatttgtaatagatgtttgatagattttctgctactttgc

SEQ ID NO: 193945 - DNA, 120 bp, Artificial Sequence
  ENSG00000112964_36 (sequence is synthesized)
tgctatggttttctccaagagctacataatttagtttcatataaagtatcatcagtgtagaacctaattcaattcaaagctgtgtgtttggaagactatcttactatttcacaacagcct

SEQ ID NO: 193946 - DNA, 120 bp, Artificial Sequence
  ENSG00000112964_37 (sequence is synthesized)
gacaacatttctatagccaaaaatagctaaatacctcaatcagtctcagaatgtcattttggtactttggtggccacataagccattattcactagtatgactagttgtgtctggcagtt

SEQ ID NO: 193947 - DNA, 120 bp, Artificial Sequence
  ENSG00000112964_38 (sequence is synthesized)
tatatttaactctctttatgtctgtggattttttccttcaaagtttaataaatttattttcttggattcctgatagtgtgcttctgttatcaaacaccaacataaaaatgatctaaacca

SEQ ID NO: 193948 - DNA, 120 bp, Artificial Sequence
  ENSG00000112964_39 (sequence is synthesized)
agatatgtgtgtgtgtgcatgagagagagagattgagaatgactgatttgggagggattttgtgaaggtttatatatcaaagcagaaagaccaagaatttagagattaatacatgccaag

SEQ ID NO: 193949 - DNA, 120 bp, Artificial Sequence
  ENSG00000112964_40 (sequence is synthesized)
tggtaaccaagaaacttctgtgggatcccacctccaacccctccctctctgtcagattttaaccaaatcagtgtgatgtgatctgcttgcatatatgagtgaaagaaaaaggaaatttaa

SEQ ID NO: 193950 - DNA, 120 bp, Artificial Sequence
  ENSG00000112964_41 (sequence is synthesized)
ggggaatgagtagcaaagatggattaagtgagaagagtataggaggcagcagggccagaggtgtgaatagcccagaaccttctgagaagattcctttgtggacggaagaaaggggaggtt

SEQ ID NO: 193951 - DNA, 120 bp, Artificial Sequence
  ENSG00000112964_42 (sequence is synthesized)
ggagagactggggaggtcgagctgtgcgcgtggacacagcgcgcagagcgcgcggtcttttgcgcgtttgtgcgggccgcagccgcacgttggcaccgatggaactggggtcagtagagt

SEQ ID NO: 193952 - DNA, 120 bp, Artificial Sequence
  ENSG00000112964_43 (sequence is synthesized)
gacagccaccagtccgcatgaactgggttaaaatgagcaacttctttaaccagaactgaccttgaagacaaatggctaaaataaaacatttgctgaattcactgggcgcatcttacaagt

SEQ ID NO: 193953 - DNA, 120 bp, Artificial Sequence
  ENSG00000112964_44 (sequence is synthesized)
aatttttggattctgcattgactacctacaagtgccttctgggtgcaagtccacaggcaagatttgttctgcaaatcttccatgaccaaggtcacctctttggattggcagacccaggga

SEQ ID NO: 193954 - DNA, 120 bp, Artificial Sequence
  ENSG00000112964_45 (sequence is synthesized)
cctcttctcagctgatttggctgcctccattgtaataggcctcatgagactccagcctaggcctggccttcagttcagcaggcagagcccagagatgtactgggcaaaggtcctacaggt

SEQ ID NO: 193955 - DNA, 120 bp, Artificial Sequence
  ENSG00000112964_46 (sequence is synthesized)
ttacaaggaaatctagcttagaaaaattaaccctgtagcttggtttttccactctttgctcttggcaaaaggatcttacgggaaaactggagcttagagaacttatgtaacattactagc

SEQ ID NO: 193956 - DNA, 120 bp, Artificial Sequence
  ENSG00000112964_47 (sequence is synthesized)
aagttgcacagctgggattcaaactgaaatccagctagcttcaaagactgtgttctttctgctgctgcatactacccctacctaccaaggctctgagattagaaagcaggatgggtgtgt

SEQ ID NO: 193957 - DNA, 120 bp, Artificial Sequence
  ENSG00000112964_48 (sequence is synthesized)
gtcctacaggtatggatctctggcagctgctgttgaccttggcactggcaggatcaagtgatgctttttctggaagtgaggattcttctaaggagcctaaattcaccaagtgccgttcac

SEQ ID NO: 193958 - DNA, 62 bp, Artificial Sequence
  ENSG00000112964_49 (sequence is synthesized)
gtatcactgagcctttggctgagtctgatacagtccttatatacagacaatttttttttttc

SEQ ID NO: 193959 - DNA, 64 bp, Artificial Sequence
  ENSG00000112964_50 (sequence is synthesized)
tggccccatttaaggattaaaatgctgattctgcccccagttccagttccaaagattaaaggaa

SEQ ID NO: 193960 - DNA, 120 bp, Artificial Sequence
  ENSG00000112964_51 (sequence is synthesized)
aggtgatggtgacaactattaataagatctgaaagtaaacagtctcatgaaaggtggccaggagagggcagtcaccttttatcaggagcacagactgaatttgcaaagggtcctacaggt

SEQ ID NO: 193961 - DNA, 120 bp, Artificial Sequence
  ENSG00000112964_52 (sequence is synthesized)
atggatctctggcagctgctgttgaccttggcactggcaggatcaagtgatgctttttctggaagtgaggctctgaaatacctacttccaagagaacgaaatttattcaagaaatgttgg

SEQ ID NO: 193962 - DNA, 120 bp, Artificial Sequence
  ENSG00000112964_53 (sequence is synthesized)
atggaaattgaagagtgagcttggaaacgagacacagagtggcaggagcccagaccaacctgtttatgaaagatgcctttgcccatagagggaaaaatacaccttaaaacctctgccaaa

SEQ ID NO: 193963 - DNA, 120 bp, Artificial Sequence
  ENSG00000112972_0 (sequence is synthesized)
gcggactgtcctttcgtggctcactccctttcctctgctgccgctcggtcacgcttgtgcccgaaggaggaaacagtgacagacctggagactgcagttctctatccttcacacagctct

SEQ ID NO: 193964 - DNA, 120 bp, Artificial Sequence
  ENSG00000112972_1 (sequence is synthesized)
ttcaccatgcctggatcacttcctttgaatgcagaagcttgctggccaaaagatgtgggaattgttgcccttgagatctattttccttctcaatatgttgatcaagcagagttggaaaaa

SEQ ID NO: 193965 - DNA, 120 bp, Artificial Sequence
  ENSG00000112972_2 (sequence is synthesized)
tatgatggtgtagatgctggaaagtataccattggcttgggccaggccaagatgggcttctgcacagatagagaagatattaactctctttgcatgactgtggttcagaatcttatggag

SEQ ID NO: 193966 - DNA, 120 bp, Artificial Sequence
  ENSG00000112972_3 (sequence is synthesized)
agaaataacctttcctatgattgcattgggcggctggaagttggaacagagacaatcatcgacaaatcaaagtctgtgaagactaatttgatgcagctgtttgaagagtctgggaataca

SEQ ID NO: 193967 - DNA, 120 bp, Artificial Sequence
  ENSG00000112972_4 (sequence is synthesized)
gatatagaaggaatcgacacaactaatgcatgctatggaggcacagctgctgtcttcaatgctgttaactggattgagtccagctcttgggatggacggtatgccctggtagttgcagga

SEQ ID NO: 193968 - DNA, 120 bp, Artificial Sequence
  ENSG00000112972_5 (sequence is synthesized)
gatattgctgtatatgccacaggaaatgctagacctacaggtggagttggagcagtagctctgctaattgggccaaatgctcctttaatttttgaacgagggcttcgtgggacacatatg

SEQ ID NO: 193969 - DNA, 120 bp, Artificial Sequence
  ENSG00000112972_6 (sequence is synthesized)
caacatgcctatgatttttacaagcctgatatgctatctgaatatcctatagtagatggaaaactctccatacagtgctacctcagtgcattagaccgctgctattctgtctactgcaaa

SEQ ID NO: 193970 - DNA, 120 bp, Artificial Sequence
  ENSG00000112972_7 (sequence is synthesized)
aagatccatgcccagtggcagaaagagggaaatgataaagattttaccttgaatgattttggcttcatgatctttcactcaccatattgtaaactggttcagaaatctctagctcggatg

SEQ ID NO: 193971 - DNA, 120 bp, Artificial Sequence
  ENSG00000112972_8 (sequence is synthesized)
ttgctgaatgacttccttaatgaccagaatagagataaaaatagtatctatagtggcctggaagcctttggggatgttaaattagaagacacctactttgatagagatgtggagaaggca

SEQ ID NO: 193972 - DNA, 120 bp, Artificial Sequence
  ENSG00000112972_9 (sequence is synthesized)
tttatgaaggctagctctgaactcttcagtcagaaaacaaaggcatctttacttgtatcaaatcaaaatggaaatatgtacacatcttcagtatatggttcccttgcatctgttctagca

SEQ ID NO: 193973 - DNA, 120 bp, Artificial Sequence
  ENSG00000112972_10 (sequence is synthesized)
cagtactcacctcagcaattagcagggaagagaattggagtgttttcttatggttctggtttggctgccactctgtactctcttaaagtcacacaagatgctacaccggggtctgctctt

SEQ ID NO: 193974 - DNA, 120 bp, Artificial Sequence
  ENSG00000112972_11 (sequence is synthesized)
gataaaataacagcaagtttatgtgatcttaaatcaaggcttgattcaagaactggtgtggcaccagatgtcttcgctgaaaacatgaagctcagagaggacacccatcatttggtcaac

SEQ ID NO: 193975 - DNA, 120 bp, Artificial Sequence
  ENSG00000112972_12 (sequence is synthesized)
tatattccccagggttcaatagattcactctttgaaggaacgtggtacttagttagggtggatgaaaagcacagaagaacttacgctcggcgtcccactccaaatgatgacactttggat

SEQ ID NO: 193976 - DNA, 120 bp, Artificial Sequence
  ENSG00000112972_13 (sequence is synthesized)
gaaggagtaggacttgtgcattcaaacatagcaactgagcatattccaagccctgccaagaaagtaccaagactccctgccacagcagcagaacctgaagcagctgtcattagtaatggg

SEQ ID NO: 193977 - DNA, 120 bp, Artificial Sequence
  ENSG00000112972_14 (sequence is synthesized)
gaacattaagatactctgtgaggtgcaagacttcagggtggggtgggcatggggtgggggtatgggaacagttggaggaatgggatatctggggataattttaaaggattacatgttatg

SEQ ID NO: 193978 - DNA, 120 bp, Artificial Sequence
  ENSG00000112972_15 (sequence is synthesized)
taaatttttatgtgactgacatggagcctggatgactatcgtgtacttgggaaagtctctttgctctatttgctgacatgcttcctgttgtggtctggccaatgccaaatgtactcgaat

SEQ ID NO: 193979 - DNA, 120 bp, Artificial Sequence
  ENSG00000112972_16 (sequence is synthesized)
gatgttaagggctctgtaaaacttcatacctctttggccatttgtatgcatgatgtttggtttttaaacatggtataatgaattgtgtacttctgtcagaagaaagcagaggtactaatc

SEQ ID NO: 193980 - DNA, 120 bp, Artificial Sequence
  ENSG00000112972_17 (sequence is synthesized)
tccaattaaaaaattttttaacatgtaagaattttgtactttgaacaacaagattacagaaagtacctgtggtttttggaaaacatttctagcttggggaatgtgacaacattccccagt

SEQ ID NO: 193981 - DNA, 120 bp, Artificial Sequence
  ENSG00000112972_18 (sequence is synthesized)
gtggtaaaattggggtaaaatgtggtaaaatgtgatacgcacaaaccctttgaaaatagcaaaacaaacatgccctttttctaaaattgataaatcctaaagaggaagaaaagagctggg

SEQ ID NO: 193982 - DNA, 120 bp, Artificial Sequence
  ENSG00000112972_19 (sequence is synthesized)
acaataaaacactggctctggaatctggaatgttaagtccaggccagcagtgacaaaagttattgtaatgacctctgaacagagaaacactgccattgaagaggcttctggtatagaaaa

SEQ ID NO: 193983 - DNA, 120 bp, Artificial Sequence
  ENSG00000112972_20 (sequence is synthesized)
catggtacattcaggagctgtgaatatagctctaggtgtgctcctgaatcagttcatggtagattatgctgaacaacagtgagatgttattggaggtgtggatgagggagtttgttgttg

SEQ ID NO: 193984 - DNA, 120 bp, Artificial Sequence
  ENSG00000112972_21 (sequence is synthesized)
cagtccttctttgcaccttattttaaagaataaatgaaacatttttctggttacttttttaaaaatttaaaatggaagggaagaataggggcagggcattattaggctatttctgatgct

SEQ ID NO: 193985 - DNA, 120 bp, Artificial Sequence
  ENSG00000112972_22 (sequence is synthesized)
cttttttttttttttttggtatctgttcaatgaaaataaggtatgacccaagtttttacctagtctgactagaagtattccacttcaaggtctgaagtaggacttttaccttaaaaaaca

SEQ ID NO: 193986 - DNA, 120 bp, Artificial Sequence
  ENSG00000112972_23 (sequence is synthesized)
acaacaaacaaaactatcacacaggatagataagaagattggttaaacagttttgtgtagatctttttggtgctgaactatgacatgagccttatagattgtaaaatagggatagttgga

SEQ ID NO: 193987 - DNA, 120 bp, Artificial Sequence
  ENSG00000112972_24 (sequence is synthesized)
actaatgtacagaactaaattttttaaactttatttgctgttaaattctgtgaagtttcagttatctaaaataaatatacacaaatatgaaatataatgtttcagattgcaaggtaatat

SEQ ID NO: 193988 - DNA, 120 bp, Artificial Sequence
  ENSG00000112972_25 (sequence is synthesized)
gtaatagtagtgtttgtaagatactcttgtctaatattaactagtagtattttgatttgtacagtcataatttgttaaaatgacttcatttaacattcactgatgtagattaataatgta

SEQ ID NO: 193989 - DNA, 120 bp, Artificial Sequence
  ENSG00000112972_26 (sequence is synthesized)
agttctgatttaaagaatggtggcaaaatggtgcatgtaatacttttgcaagtgttggggagatcggtatgttttgaaaagagtaatttaacttttgggtgccaggaaatgggttttctc

SEQ ID NO: 193990 - DNA, 120 bp, Artificial Sequence
  ENSG00000112972_27 (sequence is synthesized)
aaagtccattgccggcaatgggcaggcctgcaaatactggcacagagcattaatcatacaccttattaacggtgaggtgaataactttgaaataaagttttagagaaatgtttcagatac

SEQ ID NO: 193991 - DNA, 120 bp, Artificial Sequence
  ENSG00000112972_28 (sequence is synthesized)
ttgagtattctttttcactcttgaactaacaacttcggcaagaaatcagctaatattctatttttaaatatgggcattaatttcatttcagttcgttcactcattccattcatttatcat

SEQ ID NO: 193992 - DNA, 120 bp, Artificial Sequence
  ENSG00000112972_29 (sequence is synthesized)
ttcacaaacatttgaaatcctaatataagcaaggtgctctgtttaaggcagaaatttgaaaatgtacaagatatatggtcttgtctttaaggagctgttcatctagaatggaggaattta

SEQ ID NO: 193993 - DNA, 120 bp, Artificial Sequence
  ENSG00000112972_30 (sequence is synthesized)
cactgataattattcctacacttgaaacaaagaaattaactctcaaattgcgtggcaagcatatatagactttgctataaatatttatgaaatgagttactgttttccttaaaaaagcta

SEQ ID NO: 193994 - DNA, 120 bp, Artificial Sequence
  ENSG00000112972_31 (sequence is synthesized)
agactaagggctggcaatcaaataagagcaaatttagtggtgaacgtagaactgcccactaccagctagagtctccaacctaaaagtcccatgttgctagtgatccccaggggttttata

SEQ ID NO: 193995 - DNA, 120 bp, Artificial Sequence
  ENSG00000112972_32 (sequence is synthesized)
gaaggaatccctgcattggcagtaattttggattagatgatccctaagagcaccatcaagtcttaggattctatgaattaggaaataaaccaaattatatattttctaatactgatcagc

SEQ ID NO: 193996 - DNA, 120 bp, Artificial Sequence
  ENSG00000112972_33 (sequence is synthesized)
tcatattttatcatcatgtcatgtctggctttcatacttagtcataatttactttctgggtcatttagaggctagcgttctctaaggtcacttctgcttgcacattgtaggatattattt

SEQ ID NO: 193997 - DNA, 120 bp, Artificial Sequence
  ENSG00000112972_34 (sequence is synthesized)
agtatggctttaagaattcaatctttccccctctcctttatggaatgtgtgtttcctctatttgtacacttaaccttttgtcctaagtttttatttttatggatactaatgagtaacttt

SEQ ID NO: 193998 - DNA, 120 bp, Artificial Sequence
  ENSG00000112972_35 (sequence is synthesized)
gaggttgacactagacccaaacagatgcaaacagccactttctgtcctcttgtgacacagttgaaacactttatctcttgtctgctgtttggagtgtcctgaaagaaacactgaagtggc

SEQ ID NO: 193999 - DNA, 120 bp, Artificial Sequence
  ENSG00000112972_36 (sequence is synthesized)
agtcaacagagcaagggtaacaggatctttaaataatttaaagttgtctgatcttgacataaaagtgaaccctttctttaaaatttctagcaactgctcttaagtcataggttcctcatt

SEQ ID NO: 194000 - DNA, 120 bp, Artificial Sequence
  ENSG00000112972_37 (sequence is synthesized)
ttttctttgctggtagtgggagaaaatagttgatctgtgatttttgttttcatctccccaaactatgttataaaggcagtaatttgatgctgaagattatgattagaaatcctcagatgg

SEQ ID NO: 194001 - DNA, 120 bp, Artificial Sequence
  ENSG00000112972_38 (sequence is synthesized)
gttatatattggggctttatcttttaatattaaaaagaatgtctttcctggactactttattcagtagtaagcactattcattctatgtatattccttattcagccttgcagactcctgt

SEQ ID NO: 194002 - DNA, 120 bp, Artificial Sequence
  ENSG00000112972_39 (sequence is synthesized)
gggatctgatctcttcctgcttcaactcagtaccatactcaccaaggcttagtatgtcttcacccactctcccttctcttgcattcctcaaacatgctgagtttattccagccttaagcc

SEQ ID NO: 194003 - DNA, 120 bp, Artificial Sequence
  ENSG00000112972_40 (sequence is synthesized)
tttgatctacgcatcagaaatgttgggccccacttcagatcttctctgccctgccttctactccagtcactgctgtggtaactaattccatgaagtctttgaccaggttctcagagaata

SEQ ID NO: 194004 - DNA, 120 bp, Artificial Sequence
  ENSG00000112972_41 (sequence is synthesized)
tgatagtacctctctttggattctagctgtatacctttcacttcagcctccctgacgtggaatgtctgcagaacttgtttggtactcccaattgcacagcccaaaggtgcaggggagtta

SEQ ID NO: 194005 - DNA, 120 bp, Artificial Sequence
  ENSG00000112972_42 (sequence is synthesized)
ggtgcccatggggccatccttgacctaggtggaaagttgctagtggataactgattactcttttcatcacctgggcagacagttctgaaatgcatttcgtaagtctcctcaaaagaggag

SEQ ID NO: 194006 - DNA, 120 bp, Artificial Sequence
  ENSG00000112972_43 (sequence is synthesized)
gagacttctgtggcgggtttggcaataaccatccttatattggctttcctcttttgtttcactcctgtgcatctctcttgcatcctgggatcgcttctcaaataaatgactttcattcaa

SEQ ID NO: 194007 - DNA, 120 bp, Artificial Sequence
  ENSG00000112972_44 (sequence is synthesized)
attggctgtgggagccaccgtcccgcctcccagcgactctcggcggtgccggagtcgggtgggttggcggctataaagctggtggcgaaggggaggcgccgcggactgtcctttcgtggc

SEQ ID NO: 194008 - DNA, 120 bp, Artificial Sequence
  ENSG00000112972_45 (sequence is synthesized)
tattccccgccgtcccccaaaatttttttctaaggttcaatagacccagatgacactttaattaatgcaatacgcaaacttttgtaatttgtccttgtttggatatattaagaaagatat

SEQ ID NO: 194009 - DNA, 120 bp, Artificial Sequence
  ENSG00000112972_46 (sequence is synthesized)
tttacctgtctgtcattatccgaattgtgaattggttatcttatcttgtaggacaaatggtctattcaaaatttagtcagatggatgacagagccttggcagatgaattttaaaaaaaaa

SEQ ID NO: 194010 - DNA, 120 bp, Artificial Sequence
  ENSG00000112972_47 (sequence is synthesized)
ttagagcattttctttctttatcaaagaagggaaaagcatattctggggaaaatataacagacttcagtttccatgtttggttatagtgttgaattccttcttgtgaaataacaaaaaat

SEQ ID NO: 194011 - DNA, 120 bp, Artificial Sequence
  ENSG00000112972_48 (sequence is synthesized)
tttgcccgggaggatggggcaccgtgagcggggccgggcgggggttccctcgtgagggacctgaggccgaccgtagcggatctgagaagatccgagaacacaggcgagtcgcggagggga

SEQ ID NO: 194012 - DNA, 120 bp, Artificial Sequence
  ENSG00000112972_49 (sequence is synthesized)
ttgggagatgttagatttctaagaccaaatctagtgtcaagcatgttggtggtagatcacagaaaattttatcttgaggctctctaatctgctattgtccattgacttgaaagatgtatg

SEQ ID NO: 194013 - DNA, 120 bp, Artificial Sequence
  ENSG00000112972_50 (sequence is synthesized)
ggttgaggctacagttcttccagaagtatttgttaatttcatactggctttcctggcttctgttttcatggttttttaattcttgacctacagttgaaccataaatacctggttgatgaa

SEQ ID NO: 194014 - DNA, 120 bp, Artificial Sequence
  ENSG00000112977_0 (sequence is synthesized)
gcgcccccttaacggcagtggcactcacccggctcgcgcggccccggcgccccacgcgcgcgcgtcgttctcccgcccgctcgctccccggcgctcacacctgagctcactcgcgcacgc

SEQ ID NO: 194015 - DNA, 120 bp, Artificial Sequence
  ENSG00000112977_1 (sequence is synthesized)
gctcacacctgagctcactcgcgcacgcccgcccggcccgagaaccgcgccgccgcctcggccccgcggaagccccgccgcgtcatgtcttcgcctcccgaagggaaactagagactaaa

SEQ ID NO: 194016 - DNA, 120 bp, Artificial Sequence
  ENSG00000112977_2 (sequence is synthesized)
gctggacacccgcccgccgtgaaagctggtggaatgcgaattgtgcagaaacacccacatacaggagacaccaaagaagagaaagacaaggatgaccaggaatgggaaagccccagtcca

SEQ ID NO: 194017 - DNA, 120 bp, Artificial Sequence
  ENSG00000112977_3 (sequence is synthesized)
cctaaacccactgtgttcatctctggggtcatcgcccggggtgacaaagatttccccccggcggctgcgcaggtggctcaccagaagccgcatgcctccatggacaagcatccttcccca

SEQ ID NO: 194018 - DNA, 120 bp, Artificial Sequence
  ENSG00000112977_4 (sequence is synthesized)
agaacccagcacatccagcagccacgcaagtgagcctggagtccaccagcctgccccatggccccggctctgctgcacttggtatttccctgacagagagaaccagcagtttcgcccaaa

SEQ ID NO: 194019 - DNA, 120 bp, Artificial Sequence
  ENSG00000112977_5 (sequence is synthesized)
tcctactctgctgggaaatctaaggcaaaaccaagtgctctgtcctttgccttacatttccatatttaaaactagaaacagctccagcccaaaccttgtttatggggagtctggttggat

SEQ ID NO: 194020 - DNA, 120 bp, Artificial Sequence
  ENSG00000112977_6 (sequence is synthesized)
gtcatttgaggatcattgtgcccctagaggtgccattagcagaatttgccaagatccgagaaaaattttagctttagttctatttcagcagtcacctgacgtccttgtctatggtcttaa

SEQ ID NO: 194021 - DNA, 120 bp, Artificial Sequence
  ENSG00000112977_7 (sequence is synthesized)
aaacaagaaggcacacatttgagaagatgagattaaggttaggagaaaacctcagtcattgcatgctttttagtatgggccaataaaatctcaacacctgtgggagagtaagaactaagg

SEQ ID NO: 194022 - DNA, 120 bp, Artificial Sequence
  ENSG00000112977_8 (sequence is synthesized)
gaatgagtttgggcggcccctcataaaggaccttagaggcagggaacagcaatgccaaatttccctctctcgtgagatgggggatcctgtgcaggctgatgaggcacccatgagaaaagc

SEQ ID NO: 194023 - DNA, 120 bp, Artificial Sequence
  ENSG00000112977_9 (sequence is synthesized)
tgaggctggagacaggtagctccgagggaggacttctggcatgagatctcggcacggcaagcccagcatcgcctcagcccagacaggctccaccaggagatcaagcaagggctgcctttc

SEQ ID NO: 194024 - DNA, 120 bp, Artificial Sequence
  ENSG00000112977_10 (sequence is synthesized)
aggagtcacctcctgagccacttcagagttctggaagtgaccacggaccagggtggaggaatagacttctagttcattctgggacacttgagccagagagttgaaagcttggaaagacca

SEQ ID NO: 194025 - DNA, 120 bp, Artificial Sequence
  ENSG00000112977_11 (sequence is synthesized)
gataagaaacctgccctttgtctccctagggacatgagacaccacattccatttgtgctagaaaaacctatccactgatgagtctaactgttccaaacgcctcccacctggtgtgcacag

SEQ ID NO: 194026 - DNA, 120 bp, Artificial Sequence
  ENSG00000112977_12 (sequence is synthesized)
ctgcctgggtccattgtcacttgggtgcatcaggttgtcctccgatttttagatgagtttcctgtctagagatgtcctagtctgctcactggctggtggcagtagggtaccctgcgtcct

SEQ ID NO: 194027 - DNA, 120 bp, Artificial Sequence
  ENSG00000112977_13 (sequence is synthesized)
cgaaaagccagagggttcacctagtcagacgaaactccagaacagtgcttgtggagggcctgactgtcctgctcacccacagccgatctgctgcaggtcagcaactgtgtcgtgagcagc

SEQ ID NO: 194028 - DNA, 120 bp, Artificial Sequence
  ENSG00000112977_14 (sequence is synthesized)
tgccaaccaccagcctttctggtgctgttctccagttcacgtctgccagctggtgagggcagaggcagacctggtcagacccagcgcccctcctccctgagggagcatggcacagcctca

SEQ ID NO: 194029 - DNA, 120 bp, Artificial Sequence
  ENSG00000112977_15 (sequence is synthesized)
cacttgaaagacggtgtttggtttcccatctaatcaacttaagggaagccggcatgtacccttcaaggccctgtcaccacctatttcctgatcagttggtataaactgagggtggctttt

SEQ ID NO: 194030 - DNA, 120 bp, Artificial Sequence
  ENSG00000112977_16 (sequence is synthesized)
agagacccagacttggttggcagcgctgccatggaacaccccagcaagcacctcccagcctgcctttcggagcagcacccaggaggggatgccgcgctccagcaacaccaggtcaggcct

SEQ ID NO: 194031 - DNA, 120 bp, Artificial Sequence
  ENSG00000112977_17 (sequence is synthesized)
gtgcagacccctgccctgccgctgcagaaatccagaagcatccttaatgcttctcagtcttcagccagagggagggctgttatttccagaggtgcgctttttatgtacttttagctagat

SEQ ID NO: 194032 - DNA, 120 bp, Artificial Sequence
  ENSG00000112977_18 (sequence is synthesized)
gtggcatgcatctgtgagctttagatcattaaatccaaaatgtttgcctaaatgagtttatcagttgttaacttcaagaatattaaatgatttataataaagctcctgcatttctctcca

SEQ ID NO: 194033 - DNA, 120 bp, Artificial Sequence
  ENSG00000112977_19 (sequence is synthesized)
tttgttaaactctacctggaataacccagcaccactgctcatctcctctgtggccatggctctcttcattgccgcgtttccccagaggctgcttctgcagaccgcaggccagactcgcat

SEQ ID NO: 194034 - DNA, 120 bp, Artificial Sequence
  ENSG00000112977_20 (sequence is synthesized)
cctttacctttccagagccgccgtctggtgagacccaacattgtgacttaagcgcagacctcccaccagtgaactcccatcagcaaacccccgcagtgaaccccacagtattgccgtcca

SEQ ID NO: 194035 - DNA, 120 bp, Artificial Sequence
  ENSG00000112977_21 (sequence is synthesized)
tagggctgctgttctcagaacattcactttcttatcagaggatgcctgaagaaagtgccagtgttggggacagcccactgttggtggagctgtgaccgcagccagccaacctgccagcca

SEQ ID NO: 194036 - DNA, 120 bp, Artificial Sequence
  ENSG00000112977_22 (sequence is synthesized)
tcatcctcttggaacggaggctcctttgtttttatggtgtgacttgaaaggttgcactatttatcaggagtgttttcttactacataaacatatgaactgaatttaaatcaactctccag

SEQ ID NO: 194037 - DNA, 120 bp, Artificial Sequence
  ENSG00000112977_23 (sequence is synthesized)
tgcttggattttatagaatgaaatatgtaataataaccacatgaaagtaagagcccttattgagtttattacattaaaatgactaggcctgaagtttttaagtactttttatctagataa

SEQ ID NO: 194038 - DNA, 120 bp, Artificial Sequence
  ENSG00000112977_24 (sequence is synthesized)
gccctgttgacttcaattgtctcagaaggcatagcactcagaaaacacttgctgaatcagtaataattatcttggactttgattctctaaagataaaatagtcaattaacttgattactt

SEQ ID NO: 194039 - DNA, 120 bp, Artificial Sequence
  ENSG00000112981_0 (sequence is synthesized)
acgctggggcttcaggtctcctagcaacaagttgtaccatatgaggacggccgctgagccataatggagatatcaatgcctccacctcagatatatgtagaaaaaactctggccattatc

SEQ ID NO: 194040 - DNA, 120 bp, Artificial Sequence
  ENSG00000112981_1 (sequence is synthesized)
aaaccagatattgttgacaaagaggaggagatacaagatattattcttagatccggattcaccattgttcagagaagaaaactacgcctcagccctgagcaatgtagtaacttttatgtg

SEQ ID NO: 194041 - DNA, 120 bp, Artificial Sequence
  ENSG00000112981_2 (sequence is synthesized)
gaaaagtatggaaaaatgtttttccccaacttaacagcttacatgagttctggaccacttgtcgccatgatattagctagacataaagccatctcttattggttagaacttttgggacca

SEQ ID NO: 194042 - DNA, 120 bp, Artificial Sequence
  ENSG00000112981_3 (sequence is synthesized)
aataatagcttagtagcgaaggagacacatccagacagtctgagggcaatttatggcacagatgacctaaggaatgcacttcatgggagtaatgactttgctgctgcggaaagagaaata

SEQ ID NO: 194043 - DNA, 120 bp, Artificial Sequence
  ENSG00000112981_4 (sequence is synthesized)
cgttttatgtttcctgaagtgattgttgagcccattccaattggacaagctgctaaggactatttaaatttacatataatgccaactctgcttgaaggactcacagagctttgtaagcaa

SEQ ID NO: 194044 - DNA, 120 bp, Artificial Sequence
  ENSG00000112981_5 (sequence is synthesized)
agatcctttgatttggctagctgattggctgctgaaaaataatcctaacaaacccaaactttgtcaccatccaattgtagaagaaccttattaaaaaaaaaatcctcgaaagaacaaatc

SEQ ID NO: 194045 - DNA, 120 bp, Artificial Sequence
  ENSG00000112981_6 (sequence is synthesized)
aacaaatcatgaactatcttattataaaaggctgtacttctactgtttgaaaaaattatttctagggtttaagtaactacaagtaaaataaatttatttcttaaaaataagtgttaaagg

SEQ ID NO: 194046 - DNA, 120 bp, Artificial Sequence
  ENSG00000112981_7 (sequence is synthesized)
ttctatgaagcagataacattaaggtaaaatataggcttagagtatgattttaacaatgatgtaacactaggtaatggaaaactcatgtaagatgttgctagatgtttttgtttttctta

SEQ ID NO: 194047 - DNA, 120 bp, Artificial Sequence
  ENSG00000112981_8 (sequence is synthesized)
agtttgagaagtaagacataaagtttagttatacattttcccaagcacatatcctatatctaaatacataattaatgcacagttgagacagtctagtttaaaaggcttaggtccttttgt

SEQ ID NO: 194048 - DNA, 120 bp, Artificial Sequence
  ENSG00000112981_9 (sequence is synthesized)
agtccataagcatggtgatttggtttcatgctcatgtgtcagatatgcttccctcaaaccttgttacagcatcatcacattacctgtttgatgtaaaaaataaaaaatagaaaggtgtaa

SEQ ID NO: 194049 - DNA, 120 bp, Artificial Sequence
  ENSG00000112981_10 (sequence is synthesized)
gcagccaccgtccccacgctggggcttcaggtctcctagcaacaagttgtaccatatgaggacggccgctgagatatatgtagaaaaaactctggccattatcaaaccagatattgttga

SEQ ID NO: 194050 - DNA, 120 bp, Artificial Sequence
  ENSG00000112981_11 (sequence is synthesized)
caaagaggaggagatacaagatattattcttagatccggattcaccattgttcaggtaacttctgggtatgatgattcatgcttttttcctctctgcccttaaaaaaaaaatgcttatgt

SEQ ID NO: 194051 - DNA, 120 bp, Artificial Sequence
  ENSG00000112981_12 (sequence is synthesized)
gcctacccatttaaacccttagtgttcagcattaaatttaagtttattcttctaagtataaaagttatatgtgatagtttttaaaaggatgtaaaatgagaaataaaatggacttttcct

SEQ ID NO: 194052 - DNA, 120 bp, Artificial Sequence
  ENSG00000112981_13 (sequence is synthesized)
tcacctgtcctcttttaccccaagtcccaggctccagagagaggcaaccacttaacactttctgttcttccaggagttttctatgcatttataaacattttccccccataaaacagaaca

SEQ ID NO: 194053 - DNA, 120 bp, Artificial Sequence
  ENSG00000112981_14 (sequence is synthesized)
ctcgagcccccaccacccgctctaccgccccctcgagcccccaccacccgccccaccgccctctgctgcctggggctgttgctggttccaggccttcgggtcgccccttggcctctggtt

SEQ ID NO: 194054 - DNA, 120 bp, Artificial Sequence
  ENSG00000112981_15 (sequence is synthesized)
atgtgagcccatagtccttcctgccttggtgacatcgtatacgaaaagccggggctcgatttggacatagtaggaatcctattattgagaccctgtatatagaaaaacatggcagtttct

SEQ ID NO: 194055 - DNA, 120 bp, Artificial Sequence
  ENSG00000112981_16 (sequence is synthesized)
tacgaggaagaacactgaagtttttggtttgtttttaatatttttagagcagaaataaaatttggtgatttttgttataaggaaaaaaatgcaaagcattgagcaaaattttggattttt

SEQ ID NO: 194056 - DNA, 120 bp, Artificial Sequence
  ENSG00000112981_17 (sequence is synthesized)
ttagtatgttatttttcctgttatgacttatttttccctaagtcatttagatctgttcctcagtattttccactggatattcattcaaataaaacagaaaactgtcttggagatttaaaa

SEQ ID NO: 194057 - DNA, 120 bp, Artificial Sequence
  ENSG00000112981_18 (sequence is synthesized)
gctttccatttctgcaaaaaaacttgttggacatttggcaagagctgcactgaatctgtagattgctttgggaagtattgacatcttaacaatatcaaatctccgtatccatgaaaaata

SEQ ID NO: 194058 - DNA, 120 bp, Artificial Sequence
  ENSG00000112983_0 (sequence is synthesized)
aattccagtcgttcgcttctgcttgacctctgagttctaatgtgggtccgggttaccaactgtcgtggattcgcacttattttgcctgggattcttccaacttaacctttttccttgaac

SEQ ID NO: 194059 - DNA, 120 bp, Artificial Sequence
  ENSG00000112983_1 (sequence is synthesized)
cttagacatttcttacctaagagcctaaaggaaatcttgaggcttcagcagccaactcctgtccttccttagcaacaatcttaacaggagtgcacagggtaactggtttagggtgcttgc

SEQ ID NO: 194060 - DNA, 120 bp, Artificial Sequence
  ENSG00000112983_2 (sequence is synthesized)
tttgtcttaaggggaaaaacgacatttcccaggaggcaccgcgaaccaacgccggtacactatttcccagaattccagggtttcggcccttccagaccgtctctcctcagggttggagac

SEQ ID NO: 194061 - DNA, 120 bp, Artificial Sequence
  ENSG00000112983_3 (sequence is synthesized)
ttcggggccaagatggcgacgggaacgggcaaacacaagctgctaagcactggccccacagagccatggtccatccgagagaagctatgtttagcatcttctgtcatgagaagtggcgat

SEQ ID NO: 194062 - DNA, 120 bp, Artificial Sequence
  ENSG00000112983_4 (sequence is synthesized)
caaaattgggtatcagttagcagagcaatcaagccctttgcagaacctggccgccctccagactggttctctcaaaaacattgtgcttcccagtactcggagcttttagagaccactgag

SEQ ID NO: 194063 - DNA, 120 bp, Artificial Sequence
  ENSG00000112983_5 (sequence is synthesized)
acaccaaaacggaaacgaggtgaaaagggagaagtggtggaaactgttgaagatgttattgttcggaaattgactgctgagcgagttgaagaactaaagaaagtgataaaggaaacccag

SEQ ID NO: 194064 - DNA, 120 bp, Artificial Sequence
  ENSG00000112983_6 (sequence is synthesized)
gagagatatagacggctaaagagagatgcagaactaattcaagctggacacatggacagcagactggatgagctttgcaatgacattgcaacgaaaaagaaattggaagaagaggaggct

SEQ ID NO: 194065 - DNA, 120 bp, Artificial Sequence
  ENSG00000112983_7 (sequence is synthesized)
gaagtaaagaggaaggctacagatgctgcataccaggctcgtcaagcagtaaaaacacccccccggaggttacccactgtgatggttcgctctcctatagattctgcctccccaggaggt

SEQ ID NO: 194066 - DNA, 120 bp, Artificial Sequence
  ENSG00000112983_8 (sequence is synthesized)
gattatccacttggggacttgactccaaccactatggaagaggctacctctggggtcaatgagagtgaaatggctgtggcttctggccacctgaacagtacaggtgtcctcctggaggta

SEQ ID NO: 194067 - DNA, 120 bp, Artificial Sequence
  ENSG00000112983_9 (sequence is synthesized)
ggcggggtccttcccatgatacatggtggggagatacagcaaacacccaatactgttgcagcctcccctgctgcatcaggtgctcccactctttcccggcttttagaagctggtcctaca

SEQ ID NO: 194068 - DNA, 120 bp, Artificial Sequence
  ENSG00000112983_10 (sequence is synthesized)
cagttcaccacacctcttgcttccttcactactgttgccagtgagcctccagttaaacttgtgccaccccctgtagagtctgtgtcccaagctaccattgtcatgatgcctgcgctgcca

SEQ ID NO: 194069 - DNA, 120 bp, Artificial Sequence
  ENSG00000112983_11 (sequence is synthesized)
gcaccatcctctgctccggctgtctccactactgaaagtgtagctccagtgagtcaacccgacaactgtgttcccatggaggctgtgggggatccacatactgtgactgtttccatggac

SEQ ID NO: 194070 - DNA, 120 bp, Artificial Sequence
  ENSG00000112983_12 (sequence is synthesized)
agcagtgaaatatccatgatcatcaattctatcaaagaagagtgttttcgatcaggggtagcagaggctcctgttggatcaaaggctcccagcatagatgggaaggaagaattagatctg

SEQ ID NO: 194071 - DNA, 120 bp, Artificial Sequence
  ENSG00000112983_13 (sequence is synthesized)
gctgagaagatggatattgctgtgtcttacacaggtgaagagctggattttgagactgttggagacatcattgccatcattgaggacaaggtagatgatcatcctgaagtgctggatgtg

SEQ ID NO: 194072 - DNA, 120 bp, Artificial Sequence
  ENSG00000112983_14 (sequence is synthesized)
gcagcagtggaagcagcactgtcattttgtgaagaaaatgatgatcctcagtccctgcctggcccctgggagcatcctatccagcaggagcgggacaagccagtacctctccctgcacca

SEQ ID NO: 194073 - DNA, 120 bp, Artificial Sequence
  ENSG00000112983_15 (sequence is synthesized)
gaaatgacggtcaagcaagagagactggactttgaggaaacggaaaacaagggaatacatgaactggtggacatcagggagcccagtgcagagatcaaggtggaacctgcagaaccagag

SEQ ID NO: 194074 - DNA, 120 bp, Artificial Sequence
  ENSG00000112983_16 (sequence is synthesized)
ccagtcatttcaggagccgaaatagtagctggagttgttccagccacaagtatggagccaccagaactcaggagtcaggacttagatgaggaactgggaagtactgcagctggagagatt

SEQ ID NO: 194075 - DNA, 120 bp, Artificial Sequence
  ENSG00000112983_17 (sequence is synthesized)
gttgaagcagatgttgccattgggaaaggcgatgagactccacttacaaatgtgaagacagaggcatcccctgaaagcatgttgtctccatcacatggctcaaatcccattgaagatcct

SEQ ID NO: 194076 - DNA, 120 bp, Artificial Sequence
  ENSG00000112983_18 (sequence is synthesized)
tggaagccagataaaggatgccccaggtgaggatgaggaggaagatggtgtcagtgaagcggccagcctagaggagcctaaggaagaggatcaaggagaaggctacttgtcagaaatgga

SEQ ID NO: 194077 - DNA, 120 bp, Artificial Sequence
  ENSG00000112983_19 (sequence is synthesized)
taatgaacctcctgtgagcgagagtgatgatggcttcagcatacacaatgctacactgcagtcacacacactggcagactccatccccagcagccctgcttcttcacagttctctgtctg

SEQ ID NO: 194078 - DNA, 120 bp, Artificial Sequence
  ENSG00000112983_20 (sequence is synthesized)
tagtgaggatcaggaagctattcaggcacagaaaatttggaagaaagccatcatgcttgtatggagagctgcagctaatcataggtatgccaatgtcttcctgcagcctgttacagatga

SEQ ID NO: 194079 - DNA, 120 bp, Artificial Sequence
  ENSG00000112983_21 (sequence is synthesized)
catagcacctggctaccacagcattgtgcagaggcctatggatttgtcaactattaagaaaaacatagaaaatggactgatccgaagcacagctgaatttcagcgtgacattatgctgat

SEQ ID NO: 194080 - DNA, 120 bp, Artificial Sequence
  ENSG00000112983_22 (sequence is synthesized)
gtttcagaatgctgtaatgtacaatagctcagaccatgatgtctatcacatggcagtggagatgcagcgagatgtcttggaacagatccagcaattcttggccacgcagttgattatgca

SEQ ID NO: 194081 - DNA, 120 bp, Artificial Sequence
  ENSG00000112983_23 (sequence is synthesized)
aacatccgagtctgggatcagtgctaaaagtcttcgagggagagattctacccgcaaacaggatgcttcagagaaggacagtgtcccaatgggctctcctgccttccttctctctctctt

SEQ ID NO: 194082 - DNA, 120 bp, Artificial Sequence
  ENSG00000112983_24 (sequence is synthesized)
tatgggacacgagtgggtttggctggattctgaacaagatcatcccaatgactctgagttgagcaatgactgcaggtccctcttcagctcatgggactccagtctggatcttgatgtggg

SEQ ID NO: 194083 - DNA, 120 bp, Artificial Sequence
  ENSG00000112983_25 (sequence is synthesized)
caactggagggaaactgaggatccagaggctgaggaactagaggaaagcagcccggagagagaacctagtgaactgcttgttggggatggaggcagtgaggaatctcaggaagcggcaag

SEQ ID NO: 194084 - DNA, 120 bp, Artificial Sequence
  ENSG00000112983_26 (sequence is synthesized)
gaaagccagccaccagaacctcctccactttctctctgaggtagcttatttaatggagcccttgtgcatcagcagcaacgaatcaagtgaaggctgctgccctccatctggtaccagaca

SEQ ID NO: 194085 - DNA, 120 bp, Artificial Sequence
  ENSG00000112983_27 (sequence is synthesized)
agaaggaagggaaattaaagctagcgaaggagaaagggagctctgcagagagactgaagagctttcagctaaaggagaccccttagtagctgaaaagccactgggagaaaatggaaagcc

SEQ ID NO: 194086 - DNA, 120 bp, Artificial Sequence
  ENSG00000112983_28 (sequence is synthesized)
agaggtggcttcagctccctcagttatttgtacagttcagggactactcacagagagtgaagagggggaggctcagcaagaatccaaaggggaggaccagggtgaagtatatgtgtcaga

SEQ ID NO: 194087 - DNA, 120 bp, Artificial Sequence
  ENSG00000112983_29 (sequence is synthesized)
gatggaagaccagcccccttcaggcgagtgtgatgatgcctttaacattaaggagactcccttggtggatacacttttcagccatgctacctcctcaaagctgactgatctaagccagga

SEQ ID NO: 194088 - DNA, 120 bp, Artificial Sequence
  ENSG00000112983_30 (sequence is synthesized)
tgaccctgttcaggatcatttgctatttaagaagactctcctgccagtctggaagatgattgccagtcacaggttcagcagtccatttctgaagcctgtgtcagaaaggcaggccccagg

SEQ ID NO: 194089 - DNA, 120 bp, Artificial Sequence
  ENSG00000112983_31 (sequence is synthesized)
gtacaaggatgtggtgaaaagacccatggacttaactagcctgaagagaaatctctctaagggtcggattcgcaccatggcccaattcctgcgagacctgatgctgatgttccaaaatgc

SEQ ID NO: 194090 - DNA, 120 bp, Artificial Sequence
  ENSG00000112983_32 (sequence is synthesized)
tgtaatgtacaatgactctgatcatcatgtataccatatggctgtggagatgcggcaagaagtcctggagcagattcaggtactgaatatctggttagacaaaagaaaaggctcaagtag

SEQ ID NO: 194091 - DNA, 120 bp, Artificial Sequence
  ENSG00000112983_33 (sequence is synthesized)
tctggaaggagaaccagctaacccagtggatgatggaaaacctgttttctaacctggagctgctatcctgactttttctagagtttgaatctctcccggaactctgacctagagaggatc

SEQ ID NO: 194092 - DNA, 120 bp, Artificial Sequence
  ENSG00000112983_34 (sequence is synthesized)
ctggtacttctttgccatgtcctcattttcttttccaacaagaataataccttaactcacaaccaacgagtcaaagatgcatgtggacataatataaagaaaaaaaggggaagctgaggt

SEQ ID NO: 194093 - DNA, 120 bp, Artificial Sequence
  ENSG00000112983_35 (sequence is synthesized)
ttggatttatgccataaatgttgcccacatctttgttccatcggcttgatttaaagacaattccattagatcttttctaagccttttactctataaataaatgtatttacacaataggaa

SEQ ID NO: 194094 - DNA, 120 bp, Artificial Sequence
  ENSG00000112983_36 (sequence is synthesized)
tcctccaggctctgcacccttagaagcccccatgaccccagtaacagatgattcaccccagaaaaagatgcttggacagaaagcaactccacccccctcccctctgctgtcagagctctt

SEQ ID NO: 194095 - DNA, 120 bp, Artificial Sequence
  ENSG00000112983_37 (sequence is synthesized)
tgccattgaagcagatatgaagatgaaaaagtgaagcctcagagttaccctctttgagccgaacctaaaataaaagtaaacaagatagagcttgggcttgcgggcccagttccagaggtg

SEQ ID NO: 194096 - DNA, 120 bp, Artificial Sequence
  ENSG00000112983_38 (sequence is synthesized)
gaagttacagaagaggaggtacctgggccacacgacatgagctggaaaatctctcttagagagttggagtagcacaattgcctgttttagggcagaaaccatgggctatgttaatgtcct

SEQ ID NO: 194097 - DNA, 120 bp, Artificial Sequence
  ENSG00000112983_39 (sequence is synthesized)
aatgtgtagctagcagatcgtagctagtttgtattgtcttgtcaattgtacagactttttaaaaaaaacaaccaccagtgaaatgtgtgtgtatacaataaactgaaaaaaaaaactagc

SEQ ID NO: 194098 - DNA, 120 bp, Artificial Sequence
  ENSG00000112983_40 (sequence is synthesized)
acaagtttgaaatgtcagactcattgaaagaagaatcagggactatttttggaagccagataaagggtcagagttactctcgagcaaggggaaagaaggaacgcctcttagcttagtctt

SEQ ID NO: 194099 - DNA, 120 bp, Artificial Sequence
  ENSG00000112983_41 (sequence is synthesized)
ttgcaatgacattgcaacgtgggttatattatattgttcttctgtgcttctttctttttaccctcttttcccctcaagtaatctggcttatttcctccaattgccgtccctttagacttg

SEQ ID NO: 194100 - DNA, 120 bp, Artificial Sequence
  ENSG00000112983_42 (sequence is synthesized)
ttgtttcttgggttaagtgcatgttttgggataaggggttagcatttaagtcctggcagctgggagttaaggtatatatgagaaagtctatatgataatgtattcatagatctaggtgcg

SEQ ID NO: 194101 - DNA, 120 bp, Artificial Sequence
  ENSG00000112983_43 (sequence is synthesized)
tcatgcttgtatggagagctgcagctaatcataggtgagtgggctttaccagtcagtaggttcattttctcctactcttcattgttggtgactggaaaaaagtctgagtaggcttctgtg

SEQ ID NO: 194102 - DNA, 120 bp, Artificial Sequence
  ENSG00000112983_44 (sequence is synthesized)
gaactgctggtattagttcttactacctttagttacttagagtaagttccctccctgcacttctggagaatgtcagtaattgcaccttattccttttggacaggtatgccaatgtcttcc

SEQ ID NO: 194103 - DNA, 120 bp, Artificial Sequence
  ENSG00000112983_45 (sequence is synthesized)
gactgacctcagtttcactgttactaagcagttgtcagtgctagatttaaagcccaactttttctaacttttttttggagctactttacctggtaaacaatgtagtctccatattataaa

SEQ ID NO: 194104 - DNA, 120 bp, Artificial Sequence
  ENSG00000112983_46 (sequence is synthesized)
gccatctatcttcaagatagtgatagccctgattgaccacagcatggatattgagagtaatattgaactgctttcttagggcttgcaaaatcaaggtgctagagatacctaagattatag

SEQ ID NO: 194105 - DNA, 120 bp, Artificial Sequence
  ENSG00000112983_47 (sequence is synthesized)
cccaggctggagtgcagtggcgcgatttgggctcactgcagcctcttgacttcctgggctcaagggatcctcctacctcagctgcccaagtagctgggaccacaggccgcagggtatcag

SEQ ID NO: 194106 - DNA, 120 bp, Artificial Sequence
  ENSG00000112983_48 (sequence is synthesized)
ctttctgaccttaagtgtttggatatttgacatctgtctgtagcgcttatgtgatctcaaggtggtcgctttgtacccaataagcttctgagatgcttttctctttctgttactcagtga

SEQ ID NO: 194107 - DNA, 120 bp, Artificial Sequence
  ENSG00000112983_49 (sequence is synthesized)
atatgttgtgtgttctagtgctttggttcattcctaacttggaggaagatcttaagtaaggttagagtaaggatatagatgatgaacttattcaatgcaggagttgctctcatcctttga

SEQ ID NO: 194108 - DNA, 120 bp, Artificial Sequence
  ENSG00000112983_50 (sequence is synthesized)
gaccataagaattttcttagttgagtcttcaagtagctattgcttcttatttatgtgctttcttcttacttcattttgtgtacctctttatatgttaggtgctcccactctttcccggct

SEQ ID NO: 194109 - DNA, 120 bp, Artificial Sequence
  ENSG00000112983_51 (sequence is synthesized)
gatcagtgctaaaagtcttcgagggagagattctacccgcaaacaggatgcttcagagaaggacagtgtcccaatgggctctcctgccttccttctctctctcttttgactctggatccc

SEQ ID NO: 194110 - DNA, 120 bp, Artificial Sequence
  ENSG00000112983_52 (sequence is synthesized)
ccaagcaaagcatttggctggctattgcaaggctggttaataggatcttttatctattgaagacagcaaaatattgcacaagaggaaggagctgggctgcagggagagagcagcagatgg

SEQ ID NO: 194111 - DNA, 120 bp, Artificial Sequence
  ENSG00000112983_53 (sequence is synthesized)
aaagaagccttctaattgtcctgatctcatggaaaaccactgtcaggaggtgctagggaactagtgccagggtcagtctgcaggaaaggcctttcttatagggaccaacagttggacagg

SEQ ID NO: 194112 - DNA, 120 bp, Artificial Sequence
  ENSG00000112984_0 (sequence is synthesized)
ggagttgtgctctgcggctgcgaaagtccagcttcggcgactaggtgtgagtaagccagtatcccaggaggagcaagtggcacgtcttcggacctaggctgcccctgccgtcatgtcgca

SEQ ID NO: 194113 - DNA, 120 bp, Artificial Sequence
  ENSG00000112984_1 (sequence is synthesized)
agggatcctttctccgccagcgggcttgctgtccgatgacgatgtcgtagtttctcccatgtttgagtccacagctgcagatttggggtctgtggtacgcaagaacctgctatcagactg

SEQ ID NO: 194114 - DNA, 120 bp, Artificial Sequence
  ENSG00000112984_2 (sequence is synthesized)
ctctgtcgtctctacctccctagaggacaagcagcaggttccatctgaggacagtatggagaaggtgaaagtatacttgagggttaggcccttgttaccttcagagttggaacgacagga

SEQ ID NO: 194115 - DNA, 120 bp, Artificial Sequence
  ENSG00000112984_3 (sequence is synthesized)
agatcagggttgtgtccgtattgagaatgtggagacccttgttctacaagcacccaaggactcttttgccctgaagagcaatgaacggggaattggccaagccacacacaggttcacctt

SEQ ID NO: 194116 - DNA, 120 bp, Artificial Sequence
  ENSG00000112984_4 (sequence is synthesized)
ttcccagatctttgggccagaagtgggacaggcatccttcttcaacctaactgtgaaggagatggtaaaggatgtactcaaagggcagaactggctcatctatacatatggagtcactaa

SEQ ID NO: 194117 - DNA, 120 bp, Artificial Sequence
  ENSG00000112984_5 (sequence is synthesized)
ctcagggaaaacccacacgattcaaggtaccatcaaggatggagggattctcccccggtccctggcgctgatcttcaatagcctccaaggccaacttcatccaacacctgatctgaagcc

SEQ ID NO: 194118 - DNA, 120 bp, Artificial Sequence
  ENSG00000112984_6 (sequence is synthesized)
cttgctctccaatgaggtaatctggctagacagcaagcagatccgacaggaggaaatgaagaagctgtccctgctaaatggaggcctccaagaggaggagctgtccacttccttgaagag

SEQ ID NO: 194119 - DNA, 120 bp, Artificial Sequence
  ENSG00000112984_7 (sequence is synthesized)
gagtgtctacatcgaaagtcggataggtaccagcaccagcttcgacagtggcattgctgggctctcttctatcagtcagtgtaccagcagtagccagctggatgaaacaagtcatcgatg

SEQ ID NO: 194120 - DNA, 120 bp, Artificial Sequence
  ENSG00000112984_8 (sequence is synthesized)
ggcacagccagacactgccccactacctgtcccggcaaacattcgcttctccatctggatctcattctttgagatctacaacgaactgctttatgacctattagaaccgcctagccaaca

SEQ ID NO: 194121 - DNA, 120 bp, Artificial Sequence
  ENSG00000112984_9 (sequence is synthesized)
gcgcaagaggcagactttgcggctatgcgaggatcaaaatggcaatccctatgtgaaagatctcaactggattcatgtgcaagatgctgaggaggcctggaagctcctaaaagtgggtcg

SEQ ID NO: 194122 - DNA, 120 bp, Artificial Sequence
  ENSG00000112984_10 (sequence is synthesized)
taagaaccagagctttgccagcacccacctcaaccagaactccagccgcagtcacagcatcttctcaatcaggatcctacaccttcagggggaaggagatatagtccccaagatcagcga

SEQ ID NO: 194123 - DNA, 120 bp, Artificial Sequence
  ENSG00000112984_11 (sequence is synthesized)
gctgtcactctgtgatctggctggctcagagcgctgcaaagatcagaagagtggtgaacggttgaaggaagcaggaaacattaacacctctctacacaccctgggccgctgtattgctgc

SEQ ID NO: 194124 - DNA, 120 bp, Artificial Sequence
  ENSG00000112984_12 (sequence is synthesized)
gaggccgttcctgcatgattgtcaatgtgaatccctgtgcatctacctatgatgaaactcttcatgtggccaagttctcagccattgctagccagcttgtgcatgccccacctatgcaac

SEQ ID NO: 194125 - DNA, 120 bp, Artificial Sequence
  ENSG00000112984_13 (sequence is synthesized)
tgggattcccatccctgcactcgttcatcaaggaacatagtcttcaggtatcccccagcttagagaaaggggctaaggcagacacaggccttgatgatgatattgaaaatgaagctgaca

SEQ ID NO: 194126 - DNA, 120 bp, Artificial Sequence
  ENSG00000112984_14 (sequence is synthesized)
tctccatgtatggcaaagaggagctcctacaagttgtggaagccatgaagacactgcttttgaaggaacgacaggaaaagctacagctggagatgcatctccgagatgaaatttgcaatg

SEQ ID NO: 194127 - DNA, 120 bp, Artificial Sequence
  ENSG00000112984_15 (sequence is synthesized)
agatggtagaacagatgcaacagcgggaacagtggtgcagtgaacatttggacacccaaaaggaactattggaggaaatgtatgaagaaaaactaaatatcctcaaggagtcactgacaa

SEQ ID NO: 194128 - DNA, 120 bp, Artificial Sequence
  ENSG00000112984_16 (sequence is synthesized)
gtttttaccaagaagagattcaggagcgggatgaaaagattgaagagctagaagctctcttgcaggaagccagacaacagtcagtggcccatcagcaatcagggtctgaattggccctac

SEQ ID NO: 194129 - DNA, 120 bp, Artificial Sequence
  ENSG00000112984_17 (sequence is synthesized)
ggcggtcacaaaggttggcagcttctgcctccacccagcagcttcaggaggttaaagctaaattacagcagtgcaaagcagagctaaactctaccactgaagagttgcataagtatcaga

SEQ ID NO: 194130 - DNA, 120 bp, Artificial Sequence
  ENSG00000112984_18 (sequence is synthesized)
aaatgttagaaccaccaccctcagccaagcccttcaccattgatgtggacaagaagttagaagagggccagaagaatataaggctgttgcggacagagcttcagaaacttggtgagtctc

SEQ ID NO: 194131 - DNA, 120 bp, Artificial Sequence
  ENSG00000112984_19 (sequence is synthesized)
tccaatcagcagagagagcttgttgccacagcactggggcaggaaaacttcgtcaagccttgaccacttgtgatgacatcttaatcaaacaggaccagactctggctgaactgcagaaca

SEQ ID NO: 194132 - DNA, 120 bp, Artificial Sequence
  ENSG00000112984_20 (sequence is synthesized)
acatggtgctagtgaaactggaccttcggaagaaggcagcatgtattgctgagcagtatcatactgtgttgaaactccaaggccaggtttctgccaaaaagcgccttggtaccaaccagg

SEQ ID NO: 194133 - DNA, 120 bp, Artificial Sequence
  ENSG00000112984_21 (sequence is synthesized)
aaaatcagcaaccaaaccaacaaccaccagggaagaaaccattccttcgaaatttacttccccgaacaccaacctgccaaagctcaacagactgcagcccttatgcccggatcctacgct

SEQ ID NO: 194134 - DNA, 120 bp, Artificial Sequence
  ENSG00000112984_22 (sequence is synthesized)
cacggcgttcccctttactcaaatctgggccttttggcaaaaagtactaaggctgtggggaaagagaagagcagtcatggccctgaggtgggtcagctactctcctgaagaaataggtct

SEQ ID NO: 194135 - DNA, 120 bp, Artificial Sequence
  ENSG00000112984_23 (sequence is synthesized)
cttttatgctttaccatatatcaggaattatatccaggatgcaatactcagacactagcttttttctcacttttgtattataaccacctatgtaatctcatgttgttgtttttttttatt

SEQ ID NO: 194136 - DNA, 120 bp, Artificial Sequence
  ENSG00000112984_24 (sequence is synthesized)
tacttatatgatttctatgcacacaaaaacagttatattaaagatattattgttcacattttttattgaattccaaatgtagcaaaatcattaaaacaaattataaaagggacagaaaaa

SEQ ID NO: 194137 - DNA, 120 bp, Artificial Sequence
  ENSG00000112984_25 (sequence is synthesized)
ctttattccctctttagagggaaagcttctcttcctgactgtgagttccttgtatatgcacacctacaattttgagggccctagttatgtgttagtcaatgtgtcaagtaacatatgtat

SEQ ID NO: 194138 - DNA, 120 bp, Artificial Sequence
  ENSG00000112984_26 (sequence is synthesized)
gaaatgtcgtttttccccttaagacaaagcaagcaccctaaaccagttaccctgtgcactcctgttaagattgttgctaaggaaggacaggagttggctgctgaagcctcaagatttcct

SEQ ID NO: 194139 - DNA, 120 bp, Artificial Sequence
  ENSG00000112984_27 (sequence is synthesized)
cagtatcccaggaggagcaagtggcacgtcttcgggtgagtgtgcggctgtgctggagcccgggttaccagctcttgcccgcgcggaataggctttaagaaatcggagctgcagccatct

SEQ ID NO: 194140 - DNA, 120 bp, Artificial Sequence
  ENSG00000112984_28 (sequence is synthesized)
gtttttctcttaatgctgcatctctgttctcacggtggtccttggggtgaggttagagaaggagccgagggatcctgacaccacctccacagcaccggcgggcgaggtgccctactttag

SEQ ID NO: 194141 - DNA, 120 bp, Artificial Sequence
  ENSG00000112984_29 (sequence is synthesized)
gcgtagccttctgcttttggagccagatgtctgtggacttctgttcgcgttcagaaatgccgcctcaaacttctctcaattgttcattaagtgaacttctctcattcccttcccctttgc

SEQ ID NO: 194142 - DNA, 120 bp, Artificial Sequence
  ENSG00000112984_30 (sequence is synthesized)
aggaagcgggacacggtgtcctggggcaagggacttattacctaaaattcgcggccccttctgtccctaaaggttcttctccctgcccactttttggtctctttttagacctaggctgcc

SEQ ID NO: 194143 - DNA, 120 bp, Artificial Sequence
  ENSG00000112984_31 (sequence is synthesized)
tggagcccgggttaccagctcttgcccgcgcggaataggctttaagaaatcggagctgcagccatctgtttttctcttaatgctgcatctctgttctcacggtggtccttgggacctagg

SEQ ID NO: 194144 - DNA, 120 bp, Artificial Sequence
  ENSG00000112992_0 (sequence is synthesized)
gatttttcctagcgagctggaggaaaggcaggtacccggagtggagttatattacctgtttctttgttctgatgggaccccagagaggacatcacgctttgtaactggttcttcaagggg

SEQ ID NO: 194145 - DNA, 120 bp, Artificial Sequence
  ENSG00000112992_1 (sequence is synthesized)
agaagcaaatgtgtccctgaaaacttcagctgccgcgtttggcaccagtgatttgccttcaaggaaactggggagtcagaaaattgggaactcatatcaacatggcaaacctattgaaaa

SEQ ID NO: 194146 - DNA, 120 bp, Artificial Sequence
  ENSG00000112992_2 (sequence is synthesized)
cagtggtgactggctgctcgtgtcctctacttagcaatttggggtcctgtaagggtctacgtgtgaagaaggattttttacgaacattttatactcaccaagaactgtggtgtaaagcgc

SEQ ID NO: 194147 - DNA, 120 bp, Artificial Sequence
  ENSG00000112992_3 (sequence is synthesized)
ctgtaaaaccaggaattccatataagcaactgactgttggagtccccaaagagatattccaaaatgagaagcgagtggcattgtctcctgctggtgttcagaacttggtcaagcagggtt

SEQ ID NO: 194148 - DNA, 120 bp, Artificial Sequence
  ENSG00000112992_4 (sequence is synthesized)
ttaatgttgtcgtggaatcgggtgcgggcgaagcttccaagttctcagatgatcactatagagtggcaggtgcccaaatccaaggggcaaaggaagtgctggcttctgatttggtggtca

SEQ ID NO: 194149 - DNA, 120 bp, Artificial Sequence
  ENSG00000112992_5 (sequence is synthesized)
aagtgcgagcccctatggttaatccaacattaggtgttcatgaagctgaccttttaaagacatcaggaacgctgattagttttatttacccagcccaaaatccagagttgctaaataaac

SEQ ID NO: 194150 - DNA, 120 bp, Artificial Sequence
  ENSG00000112992_6 (sequence is synthesized)
tttcccaaagaaaaactacagttctggcaatggaccaggttccaagagtcacaattgctcagggatatgatgcgctaagctccatggccaacattgcgggttataaggctgttgtcctag

SEQ ID NO: 194151 - DNA, 120 bp, Artificial Sequence
  ENSG00000112992_7 (sequence is synthesized)
cagcaaatcattttggacgtttttttactggtcagatcacagctgctggaaaagttcctccagctaagattctgatagttggtggtggtgttgctgggcttgcttctgcaggcgcagcaa

SEQ ID NO: 194152 - DNA, 120 bp, Artificial Sequence
  ENSG00000112992_8 (sequence is synthesized)
agtcgatgggtgcaattgttcgaggatttgacacaagagctgcagctttggaacagttcaagtctcttggtgctgagcccttggaggtggacttgaaggaatctggtgagggacaaggag

SEQ ID NO: 194153 - DNA, 120 bp, Artificial Sequence
  ENSG00000112992_9 (sequence is synthesized)
gatatgcaaaagagatgtccaaagagttcattgaagctgaaatgaaactctttgctcaacaatgcaaggaggtagacatccttatcagcacagcacttattccaggtaaaaaagctccag

SEQ ID NO: 194154 - DNA, 120 bp, Artificial Sequence
  ENSG00000112992_10 (sequence is synthesized)
ttttatttaataaagaaatgattgagtcaatgaaggaaggttcagttgttgtggatttagctgctgaggctggtggaaactttgaaaccactaagccaggagaactctacattcataagg

SEQ ID NO: 194155 - DNA, 120 bp, Artificial Sequence
  ENSG00000112992_11 (sequence is synthesized)
gaattactcacataggctacacagacctgcccagccgaatggccactcaggccagcaccctatattccaacaacatcaccaaactcctgaaggccatcagcccggacaaagataattttt

SEQ ID NO: 194156 - DNA, 120 bp, Artificial Sequence
  ENSG00000112992_12 (sequence is synthesized)
attttgatgtgaaagatgactttgactttggtacgatgggtcatgtcattagaggaactgtagtgatgaaagatggtaaagtgattttcccagctcccacaccgaaaaatattcctcaag

SEQ ID NO: 194157 - DNA, 120 bp, Artificial Sequence
  ENSG00000112992_13 (sequence is synthesized)
gtgccccagtaaaacagaagacagtggctgagctggaagctgaaaaagcagctaccattacacccttcaggaagacaatgtcaacggcttctgcatatacagcaggtctcacagggatac

SEQ ID NO: 194158 - DNA, 120 bp, Artificial Sequence
  ENSG00000112992_14 (sequence is synthesized)
tgggtttgggcattgcggctcccaatctagccttttctcagatggtgaccacttttggcttggctggcattgtggggtatcataccgtctggggagtgacccctgctctccactcaccac

SEQ ID NO: 194159 - DNA, 120 bp, Artificial Sequence
  ENSG00000112992_15 (sequence is synthesized)
tgatgtctgtgacaaatgcaatctcagggctgactgcagttggtgggttggcactgatgggaggacatttgtatccttccacaacttctcagggccttgctgctcttgctgcattcatat

SEQ ID NO: 194160 - DNA, 120 bp, Artificial Sequence
  ENSG00000112992_16 (sequence is synthesized)
cctctgtcaacattgcaggtggctttctggtgactcagagaatgctggacatgttcaagcgtcccactgaccccccagaatacaactacctgtacctgctccctgccggcacctttgttg

SEQ ID NO: 194161 - DNA, 120 bp, Artificial Sequence
  ENSG00000112992_17 (sequence is synthesized)
gtggatatttagctgccctctacagtggttataacattgaacagatcatgtacctaggctcgggtttgtgctgtgtcggtgccttggctggcctctccacccagggaacagcacgtcttg

SEQ ID NO: 194162 - DNA, 120 bp, Artificial Sequence
  ENSG00000112992_18 (sequence is synthesized)
gcaatgcactgggcatgattggggttgctggaggactggcagccaccctcggagtcctaaaaccgggcccagaattactagctcagatgtctggagcgatggctttgggtggtaccattg

SEQ ID NO: 194163 - DNA, 120 bp, Artificial Sequence
  ENSG00000112992_19 (sequence is synthesized)
gattgacaattgccaaacgcatccagatttctgatttacctcaattagttgctgcttttcacagtttagtgggtttggcagctgtacttacttgcatagctgagtacattatagaatatc

SEQ ID NO: 194164 - DNA, 120 bp, Artificial Sequence
  ENSG00000112992_20 (sequence is synthesized)
cacattttgctacggatgcagcagcaaatctcaccaagattgtggcctacctcggcacttacattggtggcgtcacctttagtgggtctctcattgcctatggaaaattgcagggtctcc

SEQ ID NO: 194165 - DNA, 120 bp, Artificial Sequence
  ENSG00000112992_21 (sequence is synthesized)
tgaaatctgcccctctcctactgcctggaaggcacttactcaatgcaggcttactggctgctagtgtgggcgggataatcccattcatggtggacccaagctttactactggcatcacct

SEQ ID NO: 194166 - DNA, 120 bp, Artificial Sequence
  ENSG00000112992_22 (sequence is synthesized)
gtctgggttcagtgtctgctctctctgctgtcatgggtgtgactttgacagctgctattgggggtgctgacatgcccgtcgttatcactgtgctgaacagctactcaggctgggccctgt

SEQ ID NO: 194167 - DNA, 120 bp, Artificial Sequence
  ENSG00000112992_23 (sequence is synthesized)
gtgcagagggcttcctgctcaacaacaatctgctgaccatcgtgggtgcactcataggctcgtctggtgctatcctgtcatacatcatgtgtgtggcaatgaatcgctccctggctaatg

SEQ ID NO: 194168 - DNA, 120 bp, Artificial Sequence
  ENSG00000112992_24 (sequence is synthesized)
tgattcttggaggctatggcaccacttcaacagctggtggaaaacccatggaaatttctggcacacatacggaaatcaaccttgacaatgcaattgacatgattcgagaagctaatagca

SEQ ID NO: 194169 - DNA, 120 bp, Artificial Sequence
  ENSG00000112992_25 (sequence is synthesized)
ttattattacaccaggctatggtctctgtgcagccaaagctcaataccccattgctgatttggtaaagatgctcactgagcaaggcaaaaaagtcaggtttggaattcacccagttgcag

SEQ ID NO: 194170 - DNA, 120 bp, Artificial Sequence
  ENSG00000112992_26 (sequence is synthesized)
gccgaatgcctggtcagcttaatgtgctgctggctgaggctggtgtgccatatgacattgtgttggaaatggatgagatcaaccatgattttccagatactgatttggtccttgtaattg

SEQ ID NO: 194171 - DNA, 120 bp, Artificial Sequence
  ENSG00000112992_27 (sequence is synthesized)
ctaatgacactgttaattcagcagctcaagaagatcccaactctattattgcaggcatgccagtccttgaggtctggaaatcaaagcaggtgattgttatgaagaggtctttgggtgttg

SEQ ID NO: 194172 - DNA, 120 bp, Artificial Sequence
  ENSG00000112992_28 (sequence is synthesized)
gctatgctgcagtggacaatccaatcttctacaaacctaacacggccatgcttctaggtgatgccaagaaaacatgtgacgcgctccaggcgaaagttagagaatcctatcagaagtaaa

SEQ ID NO: 194173 - DNA, 120 bp, Artificial Sequence
  ENSG00000112992_29 (sequence is synthesized)
tattaaggatcaagctgttagctaataatgccacctctgcagttttgggaacaggcaaataaagtatcagtatacatggtgatgtacatctgtagcaaagctcttggagaaaatgaagac

SEQ ID NO: 194174 - DNA, 120 bp, Artificial Sequence
  ENSG00000112992_30 (sequence is synthesized)
tgaagaaagcaaagcaaaaactgtatagagagatttttcaaaagcagtaatccctcaattttaaaaaaggattgaaaattctaaatgtctttctgtgcatattttttgtgttaggaatca

SEQ ID NO: 194175 - DNA, 120 bp, Artificial Sequence
  ENSG00000112992_31 (sequence is synthesized)
aaagtattttataaaaggagaaagaacagcctcattttagatgtagtcctgttggattttttatgcctcctcagtaaccagaaatgttttaaaaaactaagtgtttaggatttcaagaca

SEQ ID NO: 194176 - DNA, 120 bp, Artificial Sequence
  ENSG00000112992_32 (sequence is synthesized)
acattatacatggctctgaaatatctgacacaatgtaaacattgcaggcacctgcattttatgttttttttttcaacaaatgtgactaatttgaaacttttatgaacttctgagctgtcc

SEQ ID NO: 194177 - DNA, 120 bp, Artificial Sequence
  ENSG00000112992_33 (sequence is synthesized)
ccttgcaattcaaccgcagtttgaattaatcatatcaaatcagttttaattttttaaattgtacttcagagtctatatttcaagggcacattttctcactactattttaatacattaaag

SEQ ID NO: 194178 - DNA, 120 bp, Artificial Sequence
  ENSG00000112992_34 (sequence is synthesized)
gactaaataatctttcagagatgctggaaacaaatcatttgctttatatgtttcattagaataccaatgaaacatacaacttgaaaattagtaatagtatttttgaagatcccatttcta

SEQ ID NO: 194179 - DNA, 120 bp, Artificial Sequence
  ENSG00000112992_35 (sequence is synthesized)
attggagatctctttaatttcgatcaacttataatgtgtagtactatattaagtgcacttgagtggaattcaacatttgactaataaaatgagttcatcatgttggcaagtgatgtggca

SEQ ID NO: 194180 - DNA, 120 bp, Artificial Sequence
  ENSG00000112992_36 (sequence is synthesized)
attatctctggtgacaaaagagtaaaatcaaatatttctgcctgttacaaatatcaaggaagacctgctactatgaaatagatgacattaatctgtcttcactgtttataatacggatgg

SEQ ID NO: 194181 - DNA, 120 bp, Artificial Sequence
  ENSG00000112992_37 (sequence is synthesized)
attttttttcaaatcagtgtgtgttttgaggtcttatgtaattgatgacatttgagagaaatggtggctttttttagctacctctttgttcatttaagcaccagtaaagatcatgtcttt

SEQ ID NO: 194182 - DNA, 120 bp, Artificial Sequence
  ENSG00000112992_38 (sequence is synthesized)
ttatagaagtgtagattttctttgtgactttgctatcgtgcctaaagctctaaatataggtgaatgtgtgatgaatactcagattatttgtctctctatataattagtttggtactaagt

SEQ ID NO: 194183 - DNA, 120 bp, Artificial Sequence
  ENSG00000112992_39 (sequence is synthesized)
ttctcaaaaaattattaacacatgaaagacaatctctaaaccagaaaaagaagtagtacaaattttgttactgtaatgctcgcgtttagtgagtttaaaacacacagtatcttttggttt

SEQ ID NO: 194184 - DNA, 120 bp, Artificial Sequence
  ENSG00000112992_40 (sequence is synthesized)
tataatcagtttctattttgctgtgcctgagattaagatctgtgtatgtgtgtgtgtgtgtgtgtgcgtttgtgtgttaaagcagaaaagacttttttaaaagttttaagtgataaatgc

SEQ ID NO: 194185 - DNA, 120 bp, Artificial Sequence
  ENSG00000112992_41 (sequence is synthesized)
aatttgttaattgatcttagatcactagtaaactcagggctgaattataccatgtatattctattagaagaaagtaaacaccatctttattcctgccctttttcttctctcaaagtagtt

SEQ ID NO: 194186 - DNA, 120 bp, Artificial Sequence
  ENSG00000112992_42 (sequence is synthesized)
gtagttatatctagaaagaagcaattttgatttcttgaaaaggtagttcctgcactcagtttaaactaaaaataatcatacttggattttatttatttttgtcatagtaaaaattttaat

SEQ ID NO: 194187 - DNA, 120 bp, Artificial Sequence
  ENSG00000112992_43 (sequence is synthesized)
ttatatatatttttatttagtattatcttattctttgctatttgccaatcctttgtcatcaattgtgttaaatgaattgaaaattcatgccctgttcattttattttactttattggtta

SEQ ID NO: 194188 - DNA, 120 bp, Artificial Sequence
  ENSG00000112992_44 (sequence is synthesized)
tataatttcttaaattaatattccaaaaggttagtggacttagattataaattatggcaaaaatctaaaaacaacaaaaatgatttttatacattctatttcattattcctctttttcca

SEQ ID NO: 194189 - DNA, 120 bp, Artificial Sequence
  ENSG00000112992_45 (sequence is synthesized)
gtaccttatagtctgtcaccaaaaaaaaaaaattatctgtaggtagtgaaatgctaatgttgatttgtctttaagggcttgttaactatcctttattttctcatttgtcttaaattagga

SEQ ID NO: 194190 - DNA, 120 bp, Artificial Sequence
  ENSG00000112992_46 (sequence is synthesized)
tgaaataaatgtgatctttcccattaaaaaaataaagaaattttggggtaaaaaaacacaatatattgtattcttgaaaaattctaagagagtggatgtgaagtgttctcaccacaaaag

SEQ ID NO: 194191 - DNA, 120 bp, Artificial Sequence
  ENSG00000112992_47 (sequence is synthesized)
tcaccacaaaagtgataactaattgaggtaatgcacatattaattagaaagattttgtcattccacaatgtatatatacttaaaaatatgttatacacaataaatacatacattaaaaaa

SEQ ID NO: 194192 - DNA, 120 bp, Artificial Sequence
  ENSG00000112992_48 (sequence is synthesized)
gctgttcttccgggttggaggcgcagcgccgcggggcccaagcccgggtctgccagcgcgacgtcctctcgcggccctcagggcacagcccaaggctgtcagcctcccggcccagtgatt

SEQ ID NO: 194193 - DNA, 120 bp, Artificial Sequence
  ENSG00000112992_49 (sequence is synthesized)
agcagaaccaggattcaaaccagactgacttaagaaaacatattcttattcacaaccctatgcaacttctctaatttttaactggaagacaaaatagtgttgtatctaactctctcacca

SEQ ID NO: 194194 - DNA, 120 bp, Artificial Sequence
  ENSG00000112992_50 (sequence is synthesized)
gatggttaatgggctatgcactggaactttggatacatgatatgtgggtaggaaaataaattaaaactacagtcatattgaatgatttaatgtaaaattaatgtcaatccctagatattc

SEQ ID NO: 194195 - DNA, 120 bp, Artificial Sequence
  ENSG00000112992_51 (sequence is synthesized)
cagtggtgccacttccaaagtaatagtttacatcaaggaaaaaggtaccttattcaggaaagttaacttctagttccctggtcacccactgtcattttctttttactgaccactaggtaa

SEQ ID NO: 194196 - DNA, 120 bp, Artificial Sequence
  ENSG00000112992_52 (sequence is synthesized)
cactttcttctgttgcagaacaactgtccacatgtttgctatcaaggaaggcgataattaaagatgtatgttcagagctgtttgtattctgcacattcttaatttaatttgtattttttt

SEQ ID NO: 194197 - DNA, 120 bp, Artificial Sequence
  ENSG00000112992_53 (sequence is synthesized)
tccttttgtttgtaaaatcctgtttgctgacttggtgttgaggctggagctgactgccctggccaacagtccagtccagattcaggagcaattgcaaaatttgtgtcccgggtgggtgga

SEQ ID NO: 194198 - DNA, 120 bp, Artificial Sequence
  ENSG00000112992_54 (sequence is synthesized)
agccatatgttttggggaggtgctggagtgaatgaaattcttcctactcttttaaaacccctattcctcagccaaatctgagagtgacataaaattgccttcataaaagtcttgtcttat

SEQ ID NO: 194199 - DNA, 120 bp, Artificial Sequence
  ENSG00000112992_55 (sequence is synthesized)
aaaggttgtgtcttgcccaagtagaaaatgctttggtagatcctctgtaggcctgtaatcgggaataaaaatgcttatataaacacatgtggcattgttaataaaagttaaaacagggaa

SEQ ID NO: 194200 - DNA, 120 bp, Artificial Sequence
  ENSG00000112992_56 (sequence is synthesized)
gaggacaaactacacagaggaaaatgtgcaaattgttattagtgtgactcataaatattactagatctttatagcttattttgggggggtggtcagaaagttgggttttgtccacagtat

SEQ ID NO: 194201 - DNA, 120 bp, Artificial Sequence
  ENSG00000112992_57 (sequence is synthesized)
tcctccatccccccacttctcaactgtcaaatgtctaaaaaatctgctcattactggcaagggagtggaatttaaaagcattggctattccacatatttatgtatgtgcttttaatctta

SEQ ID NO: 194202 - DNA, 120 bp, Artificial Sequence
  ENSG00000112992_58 (sequence is synthesized)
cttgtgggcttctgccttcatgtgaactccagtttctcaatatatatttctaaggtccatattgatgaaataattaaattttgttcatggaagttgcttcagttaatattattttggtga

SEQ ID NO: 194203 - DNA, 120 bp, Artificial Sequence
  ENSG00000112992_59 (sequence is synthesized)
aaattcattccagttggtgtaattctcattcaaatacattttagaacactgaataaatgcatcaactgagtcaaaatatcctatactcaattcttatcttcctttactgactgtgtcccg

SEQ ID NO: 194204 - DNA, 120 bp, Artificial Sequence
  ENSG00000112992_60 (sequence is synthesized)
ttagctgataatggaatgggggattggaatccttatgtatgtactatacataagctaacttttgttctgctgggtataaataacagccaaagattctgcttcatagacctgttaaaaatg

SEQ ID NO: 194205 - DNA, 120 bp, Artificial Sequence
  ENSG00000112992_61 (sequence is synthesized)
ggcaccaggtttgattgacaaggactggcggagggaaagcgcggaggctgggctgggggccgcaggccgaggcagagacaaagaggtttcgcctgtccccgagagtggaagggcccctgg

SEQ ID NO: 194206 - DNA, 120 bp, Artificial Sequence
  ENSG00000112992_62 (sequence is synthesized)
agcccaaggctgtcagcctcccggcccaggtgagcgcgacggcactggcgggtgcgggcagccggggcgcgcgcctagggcgcagctgggaaaggggctcgggcctttcctgaagaccac

SEQ ID NO: 194207 - DNA, 120 bp, Artificial Sequence
  ENSG00000112992_63 (sequence is synthesized)
ggccctcgccgggagagagacctgtcaaagagcaaagcggggcggggtcggcggtgtcccgggcgcagggtgcattggggtgtccgcaggccgcaggcttagtgatttgccttcaaggaa

SEQ ID NO: 194208 - DNA, 120 bp, Artificial Sequence
  ENSG00000112992_64 (sequence is synthesized)
aacatttccttttcaaaggaaattttccgaaaatccttggaaaatgtgctcaataggtacttaggcttaaggtcacctagccctattcattcagtcaaaaatactgacttcctctgtgtt

SEQ ID NO: 194209 - DNA, 120 bp, Artificial Sequence
  ENSG00000112992_65 (sequence is synthesized)
gtgcaaagcactgggggagagtaataccaaagtgaatataacagctgataaggatattctcagtcctggcaacaaccctgagagtgatttgccttcaaggaaactggggagtcagaaaat

SEQ ID NO: 194210 - DNA, 120 bp, Artificial Sequence
  ENSG00000112992_66 (sequence is synthesized)
taaattactttatctggagttacaccttttcctattttcaaacagtgtatttttctcaaagaaatgactgcatgtcgtcatattcttcatgctccagtaaaacttttatcagacaatatg

SEQ ID NO: 194211 - DNA, 120 bp, Artificial Sequence
  ENSG00000112992_67 (sequence is synthesized)
atctatgtttaaccatgaggagagaaaaagtgatcttcatttttacatttgctatatggacattttcttttaattggctaggaaaaatttgttctacatggtccatatatatccagagta

SEQ ID NO: 194212 - DNA, 120 bp, Artificial Sequence
  ENSG00000112992_68 (sequence is synthesized)
gtgccagcagaaaaactactgttttaattttattcagttgtttgctggattgttaaattttcaggaatttttaggctgggcatggtggctcagactgtaatcccagcactttgggaggct

SEQ ID NO: 194213 - DNA, 90 bp, Artificial Sequence
  ENSG00000112992_69 (sequence is synthesized)
ttaaatatacaaaaattagttgggcatggtggcgtacaactgtaatcccagcttcttgggtggctgaagcatgataatcgcttgaacctg

SEQ ID NO: 194214 - DNA, 87 bp, Artificial Sequence
  ENSG00000112992_70 (sequence is synthesized)
aaaaattagttgggcatggtggcgtacaactgtaatcccagcttcttgggtggctgaagcatgataatctgtgatcatgctgctgca

SEQ ID NO: 194215 - DNA, 120 bp, Artificial Sequence
  ENSG00000112992_71 (sequence is synthesized)
aattttttttccaggaatttttaaagttgattgttaaacacagccattattaaatactaaattacataaacttaaatgaatcagaaacaaagttaataatattaaaaactcgtaactttc

SEQ ID NO: 194216 - DNA, 120 bp, Artificial Sequence
  ENSG00000112992_72 (sequence is synthesized)
taactttctaattaatttactaggttttattgtctatgctcttgaggttacttatgtctattgtatgtgtatagaagaaatactatgtatcagtgggctgtggtacatctctttccaatt

SEQ ID NO: 194217 - DNA, 120 bp, Artificial Sequence
  ENSG00000112992_73 (sequence is synthesized)
ctacattcaatgacatcacattggtagattgaaatttgacttggtagcagtattgcagtgtggaaataagcaaacgctacaaatctgggcttgatttattgttttgtttattgtccagac

SEQ ID NO: 194218 - DNA, 120 bp, Artificial Sequence
  ENSG00000112992_74 (sequence is synthesized)
gtgagaaagtgatggagaaaatgttaatgatgcagcttaaacttgagatgttttgactgtagctgtgacattgtgaatagcacaaataattgagcaaataatcttccagtatttgaaaac

SEQ ID NO: 194219 - DNA, 120 bp, Artificial Sequence
  ENSG00000112992_75 (sequence is synthesized)
tattatcagattcagcaataaagtcattcatatggttgataaatgagtgaagttctcgcatacattctgttgttttactttcgtcttacttattaaagcaaataaaaatatcaaacaatg

SEQ ID NO: 194220 - DNA, 120 bp, Artificial Sequence
  ENSG00000112992_76 (sequence is synthesized)
agcaggtgaggataccatttaccagggtttagtcttgattgtttgattttgcaagttatatatatatatatctatagatatatgtgtagctatatatacgtatatatagatatatataca

SEQ ID NO: 194221 - DNA, 120 bp, Artificial Sequence
  ENSG00000112992_77 (sequence is synthesized)
tttctgttttttatttttatttttgtgaaatatcagttgtgattatctgcacacatgggtaggacaagggaagcaaagtttgccttaaagaataaatactacaatataggctatagcccc

SEQ ID NO: 194222 - DNA, 120 bp, Artificial Sequence
  ENSG00000112992_78 (sequence is synthesized)
acaatataggctatagcccctgaacatttgactaacattttaagttactcaacttgtaaacaaattcaacattttcatttagatctctttctttgtaatttaacataaattcttttttta

SEQ ID NO: 194223 - DNA, 120 bp, Artificial Sequence
  ENSG00000112992_79 (sequence is synthesized)
aaattcatctttacaaaaacactaaataatttattgtaaagtgatgattaatattcattctggctatgcattgttggaggctgaaatacggatatttgattttaaattggtttctgtctc

SEQ ID NO: 194224 - DNA, 120 bp, Artificial Sequence
  ENSG00000112992_80 (sequence is synthesized)
aaagaatgaattaaaaatgtttagatctattcagagccaaaacaaaaacaaaacaaaagcaaactataaagaattaaggaccagcaccaggcgcatagaattcttgtagagtcatcattc

SEQ ID NO: 194225 - DNA, 120 bp, Artificial Sequence
  ENSG00000112992_81 (sequence is synthesized)
tccaaattcccatgtgagtccagatgttttaaagctaaacatgtaactctccttgaataaagagtaagtctcagcaaaatgactgaaaaagcctctagtggtgaacactgtgagtagata

SEQ ID NO: 194226 - DNA, 120 bp, Artificial Sequence
  ENSG00000112992_82 (sequence is synthesized)
aagcagtgtccctacttgcacttatttgttaaaaaaacaaaagaaatgaggttattgtgttgtacatggaacatattatgagtaggattgtaaatttccatttctctttcagattcataa

SEQ ID NO: 194227 - DNA, 120 bp, Artificial Sequence
  ENSG00000112992_83 (sequence is synthesized)
ggaaatgtagcaaggcacatataatgatttatttttctcagtttctcttatatttcttgaatcagggcatattgcttcttaatatatatgacagtggcatattccagtgaatgaaaggat

SEQ ID NO: 194228 - DNA, 120 bp, Artificial Sequence
  ENSG00000112992_84 (sequence is synthesized)
gaacttatatgtgtttttctttatcttgaactccctctttcatattaaaaataagtatttttcttttatatgtatcaggaatgtatttgaacagcattcttcaaagaatgtgatttgctt

SEQ ID NO: 194229 - DNA, 120 bp, Artificial Sequence
  ENSG00000112992_85 (sequence is synthesized)
tctcttcttttgtcagcctttctcttcctctgttatacagatatagaaatatagtctgacatacgttactaaatatattatagaaaatacattagtttattgaatagttgataagaaaac

SEQ ID NO: 194230 - DNA, 120 bp, Artificial Sequence
  ENSG00000112992_86 (sequence is synthesized)
cttcaggtgtatgatgtaatttttatcatagatgcctaacacaaaagactgtggattgtgataaggtagtgcttcttgactaatgtggtcatgataatagctagcatttagtgactccta

SEQ ID NO: 194231 - DNA, 120 bp, Artificial Sequence
  ENSG00000112992_87 (sequence is synthesized)
ggcattgtgctaaatacttcacatgtcttagctcatttattttttacaagaattcagcagtgggtatattattattttctcttccagatgaagacagagagggttgataattttacctat

SEQ ID NO: 194232 - DNA, 120 bp, Artificial Sequence
  ENSG00000112992_88 (sequence is synthesized)
gaaggtatggaacttagtctgggactaaatgttcagtgatcttctgacacctgaaggcgcaatgacttacactgacatacgtgctatttctagagagggcatgactattttggagaaagc

SEQ ID NO: 194233 - DNA, 120 bp, Artificial Sequence
  ENSG00000112996_0 (sequence is synthesized)
ggaatcgcgggcaaagatggcggcggccaggtgttggaggcctttgctacgcggtccgaggctttcattgcacaccgcggctaatgccgccgccacggctacagaaacgacctgccaaga

SEQ ID NO: 194234 - DNA, 120 bp, Artificial Sequence
  ENSG00000112996_1 (sequence is synthesized)
cgtcgcggcgacccccgtcgcgcggtacccgccgattgtggcctccatgacagccgacagcaaagctgcacggctgcggcggatcgagcgctggcaggcgacggtgcacgctgcggagtc

SEQ ID NO: 194235 - DNA, 120 bp, Artificial Sequence
  ENSG00000112996_2 (sequence is synthesized)
ggtagacgagaagctgcgaatcctcaccaagatgcagtttatgaagtacatggtttacccgcagaccttcgcgctgaatgccgaccgctggtaccagtacttcaccaagaccgtgttcct

SEQ ID NO: 194236 - DNA, 120 bp, Artificial Sequence
  ENSG00000112996_3 (sequence is synthesized)
gtcgggtctgccgccgcccccagcggagcccgagcccgagcccgaacccgaacctgaacctgcgctggacctcgcggcgctgcgtgcggtcgcctgcgactgcctgctgcaggagcactt

SEQ ID NO: 194237 - DNA, 120 bp, Artificial Sequence
  ENSG00000112996_4 (sequence is synthesized)
ctacctgcggcgcaggcggcgcgtgcaccgttacgaggagagcgaggtcatatctttgcccttcctggatcagctggtgtcaaccctcgtgggcctcctcagcccacacaacccggccct

SEQ ID NO: 194238 - DNA, 120 bp, Artificial Sequence
  ENSG00000112996_5 (sequence is synthesized)
ggccgctgccgccctcgattatagatgcccagttcatttttactgggtgcgtggtgaagaaattattcctcgtggtcatcgaagaggtcgaattgatgacttgcgataccagatagatga

SEQ ID NO: 194239 - DNA, 120 bp, Artificial Sequence
  ENSG00000112996_6 (sequence is synthesized)
aaatgtaaaccagacaaacttccattattcaaacggcagtatgaaaaccacatatttgttggctcaaaaactgcagatccttgctgttacggtcacacccagtttcatctgttacctgac

SEQ ID NO: 194240 - DNA, 120 bp, Artificial Sequence
  ENSG00000112996_7 (sequence is synthesized)
aaattaagaagggaaaggcttttgagacaaaactgtgctgatcagatagaagttgtttttagagctaatgctattgcaagcctttttgcttggactggagcacaagctatgtatcaagga

SEQ ID NO: 194241 - DNA, 120 bp, Artificial Sequence
  ENSG00000112996_8 (sequence is synthesized)
ttctggagtgaagcagatgttactcgaccttttgtctcccaggctgtgatcacagatggaaaatacttttcctttttctgctaccagctaaatactttggcactgactacacaagctgat

SEQ ID NO: 194242 - DNA, 120 bp, Artificial Sequence
  ENSG00000112996_9 (sequence is synthesized)
caaaataaccctcgtaaaaatatatgttggggtacacaaagtaagcctctttatgaaacaattgaggataatgatgtgaaaggttttaatgatgatgttctacttcagatagttcacttt

SEQ ID NO: 194243 - DNA, 120 bp, Artificial Sequence
  ENSG00000112996_10 (sequence is synthesized)
ctactgaatagaccaaaagaagaaaaatcacagctgttggaaaactgaaaaagcatatttgattgagaactgtgggaatatttaaattttactgaaggaacaataatgatgagatttgta

SEQ ID NO: 194244 - DNA, 120 bp, Artificial Sequence
  ENSG00000112996_11 (sequence is synthesized)
actgtcaactattaaatacattgatttttgagacaaatatttcttatgtcaacctgttattagatctcttactctgctcaaattcatcactgaaagatttaattttagttaccttttgtt

SEQ ID NO: 194245 - DNA, 120 bp, Artificial Sequence
  ENSG00000112996_12 (sequence is synthesized)
gatttaaaaataattgcatttgtatattgctaactgataagacaaattgagttattgagctattaaatgcacattttaatataaatgcagaaatcccaaataaaatgctaacatactgaa

SEQ ID NO: 194246 - DNA, 120 bp, Artificial Sequence
  ENSG00000112996_13 (sequence is synthesized)
tgtgagccactgcacctggcctatttacatcttatttcttagcaacgtttagagtttcttttatctccatgcatttcctgtgtatgcctacatttttgtgtaattggaaatggacttttt

SEQ ID NO: 194247 - DNA, 120 bp, Artificial Sequence
  ENSG00000112996_14 (sequence is synthesized)
tttttgtgtaattggaaatggactttttctttccaattatatacttctttatagtttttaaaagtggctttatataggtgatactgatagctatatatttatcttgtaaaagaccaattt

SEQ ID NO: 194248 - DNA, 120 bp, Artificial Sequence
  ENSG00000112996_15 (sequence is synthesized)
aagttgttcattagagccaataatttgtcagctgattctcatgaggtgtatataaccaatctgatttgcgttcttctgaaactgcttatcaaatagatggccattagcccctaaatggca

SEQ ID NO: 194249 - DNA, 120 bp, Artificial Sequence
  ENSG00000112996_16 (sequence is synthesized)
aaatccactggacagttttctgtattgtactcagtaaggtctgacatattttgcatgtttgaccgctccttcatttttaaaatagtttttttattgccttcagtgaaacatgctcttggt

SEQ ID NO: 194250 - DNA, 120 bp, Artificial Sequence
  ENSG00000112996_17 (sequence is synthesized)
tttcctcctatctcatttgctgttctgtcatatttctgtttgctgttcttcctctcacttttcttcaaatattggtgtacttttttttcttttctagactccatttttgtttaaccacac

SEQ ID NO: 194251 - DNA, 120 bp, Artificial Sequence
  ENSG00000112996_18 (sequence is synthesized)
tctccctagatgattttatcaaattccatggatttaaatatatttgtaagcacattcaaaattagtttgatttcaaccttgtgttttgtatctgaatgataagcatcagcattataacta

SEQ ID NO: 194252 - DNA, 120 bp, Artificial Sequence
  ENSG00000112996_19 (sequence is synthesized)
aacagactgtgtggttaagattatggacagtttttccctctagttatctaattttcataattacccccagaacgtgagaacattatttttatgatcagaaagtattttaagaaactagtt

SEQ ID NO: 194253 - DNA, 120 bp, Artificial Sequence
  ENSG00000112996_20 (sequence is synthesized)
gagtggactctaatatggaaccatcaacatgtatcaaattccacttaattataagcaaattcattatgaaattatatttaaaaaggcatttcatgattacatttgttatttaagaaaatg

SEQ ID NO: 194254 - DNA, 120 bp, Artificial Sequence
  ENSG00000112996_21 (sequence is synthesized)
ttatttaaagaaatttacataagtttcattatacatgtattttagcttactcattctggaaatggaaaacttagatactaggcaagaaggctttagattttttttatgagatattttaat

SEQ ID NO: 194255 - DNA, 120 bp, Artificial Sequence
  ENSG00000112996_22 (sequence is synthesized)
agaccagtacttaggtcttaatatttgtgtttttcaaaaatttatgttaaaatcctaacccccatgactatagtattaggagatagggccttttggaaggtgactggagaggggcagcac

SEQ ID NO: 194256 - DNA, 120 bp, Artificial Sequence
  ENSG00000112996_23 (sequence is synthesized)
cttcaggaatagaattagtgcccttataaaatagacccaagggaactttttcatcccttacaccctgtgagaacatgatgagaaggcaccatgtatgagccagagaatagatcctcacca

SEQ ID NO: 194257 - DNA, 120 bp, Artificial Sequence
  ENSG00000112996_24 (sequence is synthesized)
atctgctggtgccttgatcttggactttctagcctccagaactgtgagaaacaaatttctgctgtttataagctgtccagttaatggaattttgttattgtagcccaaatatactaagac

SEQ ID NO: 194258 - DNA, 120 bp, Artificial Sequence
  ENSG00000112996_25 (sequence is synthesized)
actaagacaacaaccaatatagttaaaattactatgcatgttctactttatattaagttctagtgtacgttgtataatgcttacatcaaataaaaggtaaggttaatttacataaaacat

SEQ ID NO: 194259 - DNA, 120 bp, Artificial Sequence
  ENSG00000112996_26 (sequence is synthesized)
gtttaggtaggataattgtaaaaattatttattagagaaattggtaaaattgtggctttgcatagaggcaggagaaagaaaagagcaaggcactagtgagaaaaattgctatggagaata

SEQ ID NO: 194260 - DNA, 120 bp, Artificial Sequence
  ENSG00000112996_27 (sequence is synthesized)
ttgagaatagatacaaggagacctacaggtttacaacattaatattggccaatacttgattggacagtttaaatttttcaacctgaaaggcctttgtgccccaaagtttggtaaggagat

SEQ ID NO: 194261 - DNA, 120 bp, Artificial Sequence
  ENSG00000112996_28 (sequence is synthesized)
aaacaacaatagcaataaaaaatcagggaagattaagagatttcataaggagcaagaatttataggtaatacttaaaaggtataggtatgattactattttggtgaataataggcacatg

SEQ ID NO: 194262 - DNA, 120 bp, Artificial Sequence
  ENSG00000112996_29 (sequence is synthesized)
gtagactgaaattcggcaacagctactgtgcaaataagcatatctgtgattatggcttatatctggttggggacccctgttgtaagccattctttttagtacaggttaagctccatttct

SEQ ID NO: 194263 - DNA, 120 bp, Artificial Sequence
  ENSG00000112996_30 (sequence is synthesized)
caatcacagttctgttattttcatctgtgggaaataatgaattctgtttcagattttgattgtcttttgtgttctttgtcatccaacagaattgcacatttcactttgtaaaatttttat

SEQ ID NO: 194264 - DNA, 120 bp, Artificial Sequence
  ENSG00000112996_31 (sequence is synthesized)
aactagtgtttgacacttgaaactggcttttgagtcttctataatagtttgtgcagaagtctgaggtttaatgttatgatggccttattcatactgtagaaatatatactgcagcaatat

SEQ ID NO: 194265 - DNA, 120 bp, Artificial Sequence
  ENSG00000112996_32 (sequence is synthesized)
gcacccaaatggtcaaatggtcagtaagctttttaaatgaactagctagatttttagttttgattttaattcttggtttgaattgctaaaagctatcttgaccttaggaaaatgaaagct

SEQ ID NO: 194266 - DNA, 120 bp, Artificial Sequence
  ENSG00000112996_33 (sequence is synthesized)
tacatgaggtttagccacttaaaacaaagtatttctttgtgtctccagttcatgtgaaacctgacttttatttacaatatttatgttaggagcacttttattaggatcttttgaagcctt

SEQ ID NO: 194267 - DNA, 120 bp, Artificial Sequence
  ENSG00000112996_34 (sequence is synthesized)
tcaagagttttctttcagttattattaatagtactaataaagaaggtgagcaggatttaaagctgaaaggagcatcagagataattgaactttgtttatgccattcattgttaccctatg

SEQ ID NO: 194268 - DNA, 120 bp, Artificial Sequence
  ENSG00000112996_35 (sequence is synthesized)
caatgtcttttgtttgtttttaattaattgccaatatttaagaagagggtcatagaacagtcattattccagattctcttgaaaaactggaagatctggcaactacaggtttatgttctt

SEQ ID NO: 194269 - DNA, 120 bp, Artificial Sequence
  ENSG00000112996_36 (sequence is synthesized)
gcatgttaacaatatacaggggctggaattaacctgctctgagtccctttagatgtgcatactctctccgatttgccacagttcccaccaattcttatttctcctctctttacttggccc

SEQ ID NO: 194270 - DNA, 120 bp, Artificial Sequence
  ENSG00000112996_37 (sequence is synthesized)
acatcattgggcctatctcattaatttctattaaatattttattactgaggccattagtttatgacccctgaggccaagacagctgttaagaacttgcattactggtggcaaaattatac

SEQ ID NO: 194271 - DNA, 120 bp, Artificial Sequence
  ENSG00000112996_38 (sequence is synthesized)
ctttacgattacttactaggttttagaaatctcacttttctaacaagaggtattatggtaatcataagttcaaaataattaaagttcatttgagataattaaatcaaaacctctagtctg

SEQ ID NO: 194272 - DNA, 120 bp, Artificial Sequence
  ENSG00000112996_39 (sequence is synthesized)
ggttggagggtgataaagttatctggcgaaatatatgaacttctgttaccttcctcttctgctaaatgaatggtaaaatgaatcctgatttgtttaggcagtttacttatgaagttggga

SEQ ID NO: 194273 - DNA, 120 bp, Artificial Sequence
  ENSG00000112996_40 (sequence is synthesized)
gggagaatttttttttttctttaaaggactgagtctggctctgttgcctaggctcaagtactgtggatcttggctcactgcagcctccacctcttggattcaagcagttctcctgcctca

SEQ ID NO: 194274 - DNA, 74 bp, Artificial Sequence
  ENSG00000112996_41 (sequence is synthesized)
ctccacctctccaccatgtccagctgatttttgtatttttagtaaatgagttttcaccatgttggccaggctgg

SEQ ID NO: 194275 - DNA, 120 bp, Artificial Sequence
  ENSG00000112996_42 (sequence is synthesized)
cccaaagctctgggattataggtgtgagccactgtgccaggcctgaggttgggagaaattttgtccatttctttagaaccaaaattggcaaccagagagtatttggatgttacacaaaat

SEQ ID NO: 194276 - DNA, 120 bp, Artificial Sequence
  ENSG00000112996_43 (sequence is synthesized)
atttagtttccctttctagcctaaattgggttgtttatagcacccgtctctccatttgagaaaaatggttaggatgctggtgcagggatgaggccttattaaaacagagaaggtacccaa

SEQ ID NO: 194277 - DNA, 120 bp, Artificial Sequence
  ENSG00000112996_44 (sequence is synthesized)
atggtggttcaaacacaggctggctaataagctgtgaggtgacttaccaaaaaacaacaacaacaaaaacccttgaacttctgctttcaacttctactttatgctagattatttggtcca

SEQ ID NO: 194278 - DNA, 120 bp, Artificial Sequence
  ENSG00000112996_45 (sequence is synthesized)
atcttcctggtctaacacctggctacatataacaacaaacatctgcttgaatgtgttggaaaggtgatgattaattgccaggctgatatattaaataaaatggaaatctcaaaagttgaa

SEQ ID NO: 194279 - DNA, 120 bp, Artificial Sequence
  ENSG00000112996_46 (sequence is synthesized)
ttttaaacttttgcattggcacaaagtacagttgttttaaaatcctcgtttaaatactatacatttgaaatctgacactgaggtagttgtttttgtcttttactttgaccatcttctgtg

SEQ ID NO: 194280 - DNA, 120 bp, Artificial Sequence
  ENSG00000112996_47 (sequence is synthesized)
tgaatgtacttttgcacacattccaaagactgtagccaactaagtcaaccctttctagataatagctttctgcaggtagaaaaggtaatgattttgtggattaaatatttatattacatc

SEQ ID NO: 194281 - DNA, 120 bp, Artificial Sequence
  ENSG00000112996_48 (sequence is synthesized)
gccaaatggaagagcagtggtgatgaagagaaacgccacttaagagagtggggcgggccaggtttcctgttggctgttccaccacaaagctgtgtgaccatgtgtcacatggctgagtag

SEQ ID NO: 194282 - DNA, 120 bp, Artificial Sequence
  ENSG00000113013_0 (sequence is synthesized)
agaagcgctgccgccaccgcatcgcgcagctctttgccgtcggagcgcttgtttgctgcctcgtactcctccatttatccgccatgataagtgccagccgagctgcagcagcccgtctcg

SEQ ID NO: 194283 - DNA, 120 bp, Artificial Sequence
  ENSG00000113013_1 (sequence is synthesized)
tgggcgccgcagcctcccggggccctacggccgcccgccaccaggatagctggaatggccttagtcatgaggcttttagacttgtttcaaggcgggattatgcatcagaagcaatcaagg

SEQ ID NO: 194284 - DNA, 120 bp, Artificial Sequence
  ENSG00000113013_2 (sequence is synthesized)
gagcagttgttggtattgatttgggtactaccaactcctgcgtggcagttatggaaggtaaacaagcaaaggtgctggagaatgccgaaggtgccagaaccaccccttcagttgtggcct

SEQ ID NO: 194285 - DNA, 120 bp, Artificial Sequence
  ENSG00000113013_3 (sequence is synthesized)
ttacagcagatggtgagcgacttgttggaatgccggccaagcgacaggctgtcaccaacccaaacaatacattttatgctaccaagcgtctcattggccggcgatatgatgatcctgaag

SEQ ID NO: 194286 - DNA, 120 bp, Artificial Sequence
  ENSG00000113013_4 (sequence is synthesized)
tacagaaagacattaaaaatgttccctttaaaattgtccgtgcctccaatggtgatgcctgggttgaggctcatgggaaattgtattctccgagtcagattggagcatttgtgttgatga

SEQ ID NO: 194287 - DNA, 120 bp, Artificial Sequence
  ENSG00000113013_5 (sequence is synthesized)
agatgaaagagactgcagaaaattacttggggcacacagcaaaaaatgctgtgatcacagtcccagcttatttcaatgactcgcagagacaggccactaaagatgctggccagatatctg

SEQ ID NO: 194288 - DNA, 120 bp, Artificial Sequence
  ENSG00000113013_6 (sequence is synthesized)
gactgaatgtgcttcgggtgattaatgagcccacagctgctgctcttgcctatggtctagacaaatcagaagacaaagtcattgctgtatatgatttaggtggtggaacttttgatattt

SEQ ID NO: 194289 - DNA, 120 bp, Artificial Sequence
  ENSG00000113013_7 (sequence is synthesized)
ctatcctggaaattcagaaaggagtatttgaggtgaaatccacaaatggggataccttcttaggtggggaagactttgaccaggccttgctacggcacattgtgaaggagttcaagagag

SEQ ID NO: 194290 - DNA, 120 bp, Artificial Sequence
  ENSG00000113013_8 (sequence is synthesized)
agacaggggttgatttgactaaagacaacatggcacttcagagggtacgggaagctgctgaaaaggctaaatgtgaactctcctcatctgtgcagactgacatcaatttgccctatctta

SEQ ID NO: 194291 - DNA, 120 bp, Artificial Sequence
  ENSG00000113013_9 (sequence is synthesized)
caatggattcttctggacccaagcatttgaatatgaagttgacccgtgctcaatttgaagggattgtcactgatctaatcagaaggactatcgctccatgccaaaaagctatgcaagatg

SEQ ID NO: 194292 - DNA, 120 bp, Artificial Sequence
  ENSG00000113013_10 (sequence is synthesized)
cagaagtcagcaagagtgacataggagaagtgattcttgtgggtggcatgactaggatgcccaaggttcagcagactgtacaggatctttttggcagagccccaagtaaagctgtcaatc

SEQ ID NO: 194293 - DNA, 120 bp, Artificial Sequence
  ENSG00000113013_11 (sequence is synthesized)
ctgatgaggctgtggccattggagctgccattcagggaggtgtgttggccggcgatgtcacggatgtgctgctccttgatgtcactcccctgtctctgggtattgaaactctaggaggtg

SEQ ID NO: 194294 - DNA, 120 bp, Artificial Sequence
  ENSG00000113013_12 (sequence is synthesized)
tctttaccaaacttattaataggaataccactattccaaccaagaagagccaggtattctctactgccgctgatggtcaaacgcaagtggaaattaaagtgtgtcagggtgaaagagaga

SEQ ID NO: 194295 - DNA, 120 bp, Artificial Sequence
  ENSG00000113013_13 (sequence is synthesized)
tggctggagacaacaaactccttggacagtttactttgattggaattccaccagcccctcgtggagttcctcagattgaagttacatttgacattgatgccaatgggatagtacatgttt

SEQ ID NO: 194296 - DNA, 120 bp, Artificial Sequence
  ENSG00000113013_14 (sequence is synthesized)
ctgctaaagataaaggcacaggacgtgagcagcagattgtaatccagtcttctggtggattaagcaaagatgatattgaaaatatggttaaaaatgcagagaaatatgctgaagaagacc

SEQ ID NO: 194297 - DNA, 120 bp, Artificial Sequence
  ENSG00000113013_15 (sequence is synthesized)
ggcgaaagaaggaacgagttgaagcagttaatatggctgaaggaatcattcacgacacagaaaccaagatggaagaattcaaggaccaattacctgctgatgagtgcaacaagctgaaag

SEQ ID NO: 194298 - DNA, 120 bp, Artificial Sequence
  ENSG00000113013_16 (sequence is synthesized)
aagagatttccaaaatgagggagctcctggctagaaaagacagcgaaacaggagaaaatattagacaggcagcatcctctcttcagcaggcatcactgaagctgttcgaaatggcataca

SEQ ID NO: 194299 - DNA, 120 bp, Artificial Sequence
  ENSG00000113013_17 (sequence is synthesized)
aaaagatggcatctgagcgagaaggctctggaagttctggcactggggaacaaaaggaagatcaaaaggaggaaaaacagtaataatagcagaaattttgaagccagaaggacaacatat

SEQ ID NO: 194300 - DNA, 120 bp, Artificial Sequence
  ENSG00000113013_18 (sequence is synthesized)
atttccttaatttgtaaatttagtgaccattagctagtgatcatttaatggacagtgattctaacagtataaagttcacaatattctatgtccctagcctgtcatttttcagctgcatgt

SEQ ID NO: 194301 - DNA, 120 bp, Artificial Sequence
  ENSG00000113013_19 (sequence is synthesized)
aaaaggaggtaggatgaattgatcattataaagatttaactattttatgctgaagtgaccatattttcaaggggtgaaaccatctcgcacacagcaatgaaggtagtcatccatagactt

SEQ ID NO: 194302 - DNA, 120 bp, Artificial Sequence
  ENSG00000113013_20 (sequence is synthesized)
gaaatgagaccacatatggggatgagatccttctagttagcctagtactgctgtactggcctgtatgtacatggggtccttcaactgaggccttgcaagtcaagctggctgtgccatgtt

SEQ ID NO: 194303 - DNA, 120 bp, Artificial Sequence
  ENSG00000113013_21 (sequence is synthesized)
tgtagatggggcagaggaatctagaacaatgggaaacttagctatttatattaggtacagctattaaaacaaggtaggaatgaggctagacctttaacttccctaaggcatacttttcta

SEQ ID NO: 194304 - DNA, 120 bp, Artificial Sequence
  ENSG00000113013_22 (sequence is synthesized)
gctaccttctgccctgtgtctggcacctacatccttgatgattgttctcttacccattctggaatttttttttttttaaataaatacagaaagcatcttgatctcttgtttgtgaggggt

SEQ ID NO: 194305 - DNA, 120 bp, Artificial Sequence
  ENSG00000113013_23 (sequence is synthesized)
gatgccctgagatttagcttcaagaatatgccatggctcatgcttcccatatttcccaaagagggaaatacaggatttgctaacactggttaaaaatgcaaattcaagatttggaagggc

SEQ ID NO: 194306 - DNA, 120 bp, Artificial Sequence
  ENSG00000113013_24 (sequence is synthesized)
tgttataatgaaataatgagcagtatcagcatgtgcaaatcttgtttgaaggattttattttctccccttagacctttggtacatttagaatcttgaaagtttctagatctctaacatga

SEQ ID NO: 194307 - DNA, 120 bp, Artificial Sequence
  ENSG00000113013_25 (sequence is synthesized)
aagtttctagatctctaacatgaaagtttttagatctctaacatgaaaaccaaggtggctattttcaggttgctttcagctccaagtagaaataaccagaattggcttacattaaagaaa

SEQ ID NO: 194308 - DNA, 120 bp, Artificial Sequence
  ENSG00000113013_26 (sequence is synthesized)
ctgcatctagaaataagtcctaagatactatttctatggctcaaaaataaaaggaacccagatttctttccctatttctgcttttctgtcctcagtgtactggcttgtcccaaattctct

SEQ ID NO: 194309 - DNA, 120 bp, Artificial Sequence
  ENSG00000113013_27 (sequence is synthesized)
gatgtagttctaataattatcatgtgctgacaacctgagcagaaaggcaactacatctttattcaatgttaagatttcccaaaagtcttccagcacatttcccttatgtttcatggatga

SEQ ID NO: 194310 - DNA, 120 bp, Artificial Sequence
  ENSG00000113013_28 (sequence is synthesized)
atgtcatatgccatgttcaaaagagtctgttatcaagatgggcttagaatatcagacacaatggctccttttataatgttttgtaatatgtagaaatgagattactgtatttccaaaaat

SEQ ID NO: 194311 - DNA, 120 bp, Artificial Sequence
  ENSG00000113013_29 (sequence is synthesized)
cagtataagaaatcaatttaatttgcaagtatgaaggaagtgatttagacaacatttttggaagattcagtgcttgttaacacccatgtaaaagattcttgggattcgtgaaaaattcta

SEQ ID NO: 194312 - DNA, 120 bp, Artificial Sequence
  ENSG00000113013_30 (sequence is synthesized)
ggctcaggtttccaaccacatgaacactcaatgggaacattgtaggattatgaaggattgttatatggtgtgttggaaaataacttttagcatttttggttggcccttgcccactgcctc

SEQ ID NO: 194313 - DNA, 120 bp, Artificial Sequence
  ENSG00000113013_31 (sequence is synthesized)
tactgtctcctaaagataactttaaaagccctccaggatttccaaagtactccagttgagaactactggcttaatgctagtcaagattcatccttgggatcagagagaggagccaaatgc

SEQ ID NO: 194314 - DNA, 120 bp, Artificial Sequence
  ENSG00000113013_32 (sequence is synthesized)
ccaagcaaaatatatatttgagttctattaggagggagaagttgcttgggtatgggtggacacagtatttcagtcacctatcagtaaagctaatagcataaatagcaagaaggtatatgg

SEQ ID NO: 194315 - DNA, 120 bp, Artificial Sequence
  ENSG00000113013_33 (sequence is synthesized)
agatttcctacagccaataggatatatatctagaataagatttactgtaagaaagaaactggctcacaattatggaaccgaggtcccacccacagtccactgctgggaaagctgttgggg

SEQ ID NO: 194316 - DNA, 120 bp, Artificial Sequence
  ENSG00000113013_34 (sequence is synthesized)
taaaatttcagtgaccaggaacacagtggtgtcctagtccgaggttagaagaatatggatgtcttagctctggcagttctatataggcccttaactgattagatgatgtccactcacatc

SEQ ID NO: 194317 - DNA, 120 bp, Artificial Sequence
  ENSG00000113013_35 (sequence is synthesized)
aaagcagagcaatctccaattcaatactaatctcttctggagagagacaaatgtttaacccgttaaatggcatcaatggctaaactgacacataaaattaactatcacaaaaggcaaaaa

SEQ ID NO: 194318 - DNA, 120 bp, Artificial Sequence
  ENSG00000113013_36 (sequence is synthesized)
aggcacaggacgtgagcagcagattgtaatccagtcttctggtggattaagcaaagatgatattgaaaatatggttaaaaatgcagagaaatatgctgaagaagaccggcgaaagaaggt

SEQ ID NO: 194319 - DNA, 120 bp, Artificial Sequence
  ENSG00000113013_37 (sequence is synthesized)
gattacttcttgtcttctgaactttaatcttagtaaagctcagtcttgacagtgggagtttggggctgggcgcagtgtctcactcctgtaatcccagcactgtaagcccactgccaaggt

SEQ ID NO: 194320 - DNA, 81 bp, Artificial Sequence
  ENSG00000113013_38 (sequence is synthesized)
cactcctgtaatcccagcactgtaagcccactgccaaggtgggcagatcgtttgaagccgggcgtggtggtgcacgcctgc

SEQ ID NO: 194321 - DNA, 120 bp, Artificial Sequence
  ENSG00000113013_39 (sequence is synthesized)
tgggtaagagaaaacctaagataatctattcttccttccccgttgtttataccttatgtttgcagtgcctttattatttcttctgttttccctgtcacaattctgatgttacaaaatcta

SEQ ID NO: 194322 - DNA, 120 bp, Artificial Sequence
  ENSG00000113013_40 (sequence is synthesized)
aaaactaatgactgagcacaaacctgttgaagatgcagttcttcttggtagcctaaataggattatcttggacctaagatagtgaccttgttttttttcttaatttttccattgaaatac

SEQ ID NO: 194323 - DNA, 120 bp, Artificial Sequence
  ENSG00000113013_41 (sequence is synthesized)
atggccttaaggaaatatgcaaaaaaaaaaaaaatgaacctggaaaaaaaaggtcctggaccaggtggatgcctcatatattaagaaatccccgaggccgggtacagtggcttacgcctg

SEQ ID NO: 194324 - DNA, 85 bp, Artificial Sequence
  ENSG00000113013_42 (sequence is synthesized)
gcaggaggtggagcttgcggtgagtggagattgcgccaccgcactccagcctgagcgacacagcgagactccgtctcaaaaaaaa

SEQ ID NO: 194325 - DNA, 120 bp, Artificial Sequence
  ENSG00000113013_43 (sequence is synthesized)
tctcaaaaaaaaaaaaaagaagaagaaaaagtatccccgatactattcaaatggaactttatcactaataaacacaagggaagaccatgccccatgttagcaatgcaaattattgctaca

SEQ ID NO: 194326 - DNA, 120 bp, Artificial Sequence
  ENSG00000113013_44 (sequence is synthesized)
gctgcctatgataatttggtctttagttgataatatacaagagaatgtggacttctaagtccccttgccttgcatcctctgtttcaaatgatttaatgtgttgtgtaggaaagcagataa

SEQ ID NO: 194327 - DNA, 120 bp, Artificial Sequence
  ENSG00000113013_45 (sequence is synthesized)
taaaacttaggagaatccttcccagatttacaagggtcatgaaggagatacttctataggtataaagtgtatgagtgttagaagatcattagcaggaacccaagtacgaaatggttattt

SEQ ID NO: 194328 - DNA, 120 bp, Artificial Sequence
  ENSG00000113013_46 (sequence is synthesized)
gaataaacattctcagatttgagttagcctgtcttgagatctggctgggagcgtaggacacgtgctcccttttgttctgctcaggtagttcccaagtgtgggccgacaggttctttttcc

SEQ ID NO: 194329 - DNA, 120 bp, Artificial Sequence
  ENSG00000113013_47 (sequence is synthesized)
taagagccatcacttcctaccttgtcacatgggttttaggttctatgacggatgtaattgcagccactttcatgagttttttctagaaaacttcatttttatctgttttacagtttagaa

SEQ ID NO: 194330 - DNA, 120 bp, Artificial Sequence
  ENSG00000113013_48 (sequence is synthesized)
ggtagtgatgattataagaaggacatcagtagtctcctccacaggattaacataatttgctaaaagggatctcagtcatttgagactgaatttcctgtagtcttctgttctcaaagacag

SEQ ID NO: 194331 - DNA, 120 bp, Artificial Sequence
  ENSG00000113013_49 (sequence is synthesized)
taaaaagggtagtctggaccagacttaggggagtgttcttatcttatggatgaatgaagggggtggtatgagggtgccgagataccaagcagggctacttggacatggcttgttcttgaa

SEQ ID NO: 194332 - DNA, 90 bp, Artificial Sequence
  ENSG00000113013_50 (sequence is synthesized)
taatcccagcactttgggaggctgtggcgagaggattacttgagctgtgaagctccctctctccaaaaagttaaattagccaggcatggt

SEQ ID NO: 194333 - DNA, 74 bp, Artificial Sequence
  ENSG00000113013_51 (sequence is synthesized)
ggagtttgagaccagcctgggtaacatggtgaagctccctctctccaaaaagttaaattagccaggcatggtgc

SEQ ID NO: 194334 - DNA, 120 bp, Artificial Sequence
  ENSG00000113013_52 (sequence is synthesized)
ccactgcactccagcctgggcgacagtatgaagtgaggtcttgtctcaaaaaaaaaaaaaaaattatttcctgacttacccaatcttgtgatgtttttccataaaactatggttgttggt

SEQ ID NO: 194335 - DNA, 120 bp, Artificial Sequence
  ENSG00000113013_53 (sequence is synthesized)
atggttgttggtatatttgtgccgtgatgtatttgtcaacacatcactctgaagaaaagtatgtggtgactttctgtgactgagcatgatacatcttctttctctgatcccgtttcccca

SEQ ID NO: 194336 - DNA, 120 bp, Artificial Sequence
  ENSG00000113013_54 (sequence is synthesized)
gatgagcatgtttcaacattttagttccttttgaggacttctgtcctaatgctgcgtctttgtacaatgcatttgcttagctgaaacagttgctattgtatgcccatttgctgtactaat

SEQ ID NO: 194337 - DNA, 120 bp, Artificial Sequence
  ENSG00000113013_55 (sequence is synthesized)
cctacttctattccctataaagacatcagcctttgttctgaacataccgtaaattaggagtcttccagtcttggaatgtaaacctttggctttcattttttctatagaaatggagtaggt

SEQ ID NO: 194338 - DNA, 120 bp, Artificial Sequence
  ENSG00000113013_56 (sequence is synthesized)
taatcacattgacaacccaggagggtttcttcttccctaggtattctctactgccgctgatggtcaaacgcaagtggaaattaaagtgtgtcagggtgaaagagagatggctggagacaa

SEQ ID NO: 194339 - DNA, 120 bp, Artificial Sequence
  ENSG00000113013_57 (sequence is synthesized)
caaactccttggacagtttactttggtaggttattgtgaatcctgaatactatgcctccttcactgtaaagtgagataatattctaagccataaaaatattagtataaactgctggcata

SEQ ID NO: 194340 - DNA, 120 bp, Artificial Sequence
  ENSG00000113013_58 (sequence is synthesized)
cacatacatactgagtagtcttgagaagaagggatgcaactagatacccatggcatcagtttttacctgaaagccttgctttttccttgtgccttaggaatttcctcagaaataaactcc

SEQ ID NO: 194341 - DNA, 120 bp, Artificial Sequence
  ENSG00000113013_59 (sequence is synthesized)
caagggccacacagaagagcctcagcatgttgatgaggatccctggagcaccttactttagtaattttacttattgtccctaggggaaatctgtaccactgccaaaagggtaatcccttt

SEQ ID NO: 194342 - DNA, 120 bp, Artificial Sequence
  ENSG00000113013_60 (sequence is synthesized)
atttcaaaattaccaggtagtggtcctcatggcctgttctgtggctgaatggaaaggtttggccttgggggtgagggatgcagtctattgggaaagccactattttcagttttatttttg

SEQ ID NO: 194343 - DNA, 120 bp, Artificial Sequence
  ENSG00000113013_61 (sequence is synthesized)
gctcctctacagaatacagagtgtgtaaggatcccgttgatacggtgaaataaaataagaaagctctgagtcggaactccagttttcgtgcttagcaacattttctcaaaatctgtggtg

SEQ ID NO: 194344 - DNA, 120 bp, Artificial Sequence
  ENSG00000113013_62 (sequence is synthesized)
ccgcgcgccctttagggtttgaattctccagtataggtcaggcgggaaggaaggtaacgggccttccatagttagcgctgccgggtcaagattttgcccaaggttttgcctccggcttgg

SEQ ID NO: 194345 - DNA, 120 bp, Artificial Sequence
  ENSG00000113013_63 (sequence is synthesized)
tgggcgccgcagcctcccggggccctacggccgcccgccaccaggatacacactggttggtgactgagtcagttttttcttttttaggatagctggaatggccttagtcatgaggctttt

SEQ ID NO: 194346 - DNA, 120 bp, Artificial Sequence
  ENSG00000113048_0 (sequence is synthesized)
gtccgtaacccgttggctgttccttttggtacgctccaagatggctgcctccatagtgcggcgcgggatgctcctggcgcggcaagtggttcttcctcagctctctcctgcaggtaaaag

SEQ ID NO: 194347 - DNA, 120 bp, Artificial Sequence
  ENSG00000113048_1 (sequence is synthesized)
atacctgctttcttcagcctatgtagacagccacaaatgggaagcaagagaaaaagaacattactgtcttgctgatcttgcatctttaatggataaaacatttgagagaaagttgcctgt

SEQ ID NO: 194348 - DNA, 120 bp, Artificial Sequence
  ENSG00000113048_2 (sequence is synthesized)
tagttctttaacaatatcacggcttatagacaacatttcctctcgggaagagatagatcatgcagagtattacctttacaagtttcgacacagccccaactgctggtacctgagaaactg

SEQ ID NO: 194349 - DNA, 120 bp, Artificial Sequence
  ENSG00000113048_3 (sequence is synthesized)
gactatccacacctggattaggcagtgtctaaaatatgatgcacaagacaaagccctatatacccttgtaaataaggttcaatatggaatttttccagataactttacattcaatttact

SEQ ID NO: 194350 - DNA, 120 bp, Artificial Sequence
  ENSG00000113048_4 (sequence is synthesized)
gatggattctttcataaagaaagaaaattacaaagatgctttatctgtggtttttgaggtcatgatgcaagaagcctttgaagtgccttccacccaacttctctccctctatgttttatt

SEQ ID NO: 194351 - DNA, 120 bp, Artificial Sequence
  ENSG00000113048_5 (sequence is synthesized)
tcattgcctggcaaagaagacagacttcagttgggaagaggagaggaactttggtgcatcccttttgcttccaggcctaaaacaaaagaactcagtgggtttcagttcccagttgtatgg

SEQ ID NO: 194352 - DNA, 120 bp, Artificial Sequence
  ENSG00000113048_6 (sequence is synthesized)
ctatgcacttcttgggaaggtggagttgcagcaagggctacgggctgtgtaccacaacatgcctctgatatggaaaccaggctaccttgacagagcccttcaagtgatggagaaagtggc

SEQ ID NO: 194353 - DNA, 120 bp, Artificial Sequence
  ENSG00000113048_7 (sequence is synthesized)
tgcctccccagaagacataaagctgtgtagagaagcgctcgatgtgctgggtgcagtgctgaaggctctgacttcagctgatggggcttcagaggagcagtcccaaaatgatgaagacaa

SEQ ID NO: 194354 - DNA, 120 bp, Artificial Sequence
  ENSG00000113048_8 (sequence is synthesized)
ccaggggtcagaaaaactggtggagcagttagacatcgaggaaacagagcagtccaagcttcctcaatacctggaacgatttaaggccttacattctaagcttcaagctctgggcaaaat

SEQ ID NO: 194355 - DNA, 120 bp, Artificial Sequence
  ENSG00000113048_9 (sequence is synthesized)
tgagtcagaaggtcttttaagtctgaccacccagcttgtcaaggaaaaactctccacctgtgaagcagaggacatcgccacctatgagcagaatctgcagcagtggcatctagaccttgt

SEQ ID NO: 194356 - DNA, 120 bp, Artificial Sequence
  ENSG00000113048_10 (sequence is synthesized)
acagttgatccagagagaacagcaacagagggagcaagcgaagcaggagtaccaggctcagaaagcagcaaaggcatctgcctaatagggtcccccagggccccacctgtctcacaagaa

SEQ ID NO: 194357 - DNA, 120 bp, Artificial Sequence
  ENSG00000113048_11 (sequence is synthesized)
cagcagtggcctggacaacagcctcagcttcctctacccatcttcttttcttaaagcaggctatgtgccctacatggcaaggcaccatgactgcccatcgagatgccaagaagggctatg

SEQ ID NO: 194358 - DNA, 120 bp, Artificial Sequence
  ENSG00000113048_12 (sequence is synthesized)
gaactatgcaggtggctagtggtcagactgaagtcaccagctgaataccttaaggaggactcttgaggctcataatggagttcctggggcacagggattagttatgagcattaaagttcc

SEQ ID NO: 194359 - DNA, 120 bp, Artificial Sequence
  ENSG00000113048_13 (sequence is synthesized)
tgagcattaaagttcctaagacccagtgacagtactgggagaaaccaaggctgaagagtcaggttgaagcacaggcttttgttttttgttgtttttgttttttgagacagagtctcattc

SEQ ID NO: 194360 - DNA, 66 bp, Artificial Sequence
  ENSG00000113048_14 (sequence is synthesized)
ttagtaggtgggattacaggtgcataccaccacacctttctaatttttgcatttttagtagagatg

SEQ ID NO: 194361 - DNA, 120 bp, Artificial Sequence
  ENSG00000113048_15 (sequence is synthesized)
acacccggccaagcacaggcttttgaatggtctccctctccccagcccaggtacatgaggccaaggtgaactgtgcatcctgagaccttgtgtccctgagtctcctttctgagtgcaagc

SEQ ID NO: 194362 - DNA, 120 bp, Artificial Sequence
  ENSG00000113048_16 (sequence is synthesized)
tgcactgtgagctggctgtgggatactcacacattcccacattctcctttctgccacatctcgcccttctggacctgcactgggagaaattcaggacaggagtgaactcaaggccatgaa

SEQ ID NO: 194363 - DNA, 120 bp, Artificial Sequence
  ENSG00000113048_17 (sequence is synthesized)
ctcactggatttccatttttaggcacccatagggatgtttttaggatgtaagtttctgaggagaaagctagctctagcatgaagcttttttggattggcttctccatcgtgttggggtaa

SEQ ID NO: 194364 - DNA, 120 bp, Artificial Sequence
  ENSG00000113048_18 (sequence is synthesized)
cattttttttccaattttttttttcccaaaacatcgtctcagctcatttatcaagtaggtaaaatgagccttttgtgtacacacagaggcacatgtgcatgcacacacaacttgtgaaca

SEQ ID NO: 194365 - DNA, 120 bp, Artificial Sequence
  ENSG00000113048_19 (sequence is synthesized)
cacatttctgttaaagaagttagaaaatgagagatgggttggggcttgaagtgcatcagaggtatgaatgttgtaaaactgtcaggagatgtaaaattcctttctgaagtgtctcttctg

SEQ ID NO: 194366 - DNA, 120 bp, Artificial Sequence
  ENSG00000113048_20 (sequence is synthesized)
tgaaagggttcagagcagattttgcttactatgtagtgttgcccttaagtacagtggtgtaattttattcaagattgtgctcttctatcaaaagcctctggaaataaatgttccgggatc

SEQ ID NO: 194367 - DNA, 120 bp, Artificial Sequence
  ENSG00000113048_21 (sequence is synthesized)
atgttagtgtactctttatctttggggaaagggaggagggagagggactcattattgttactatgattttgaggagtgtactttaaaccctcccccattaaactatgggatttattgtaa

SEQ ID NO: 194368 - DNA, 120 bp, Artificial Sequence
  ENSG00000113048_22 (sequence is synthesized)
tacaagtggaattttacccgatgtgaactgttatgtacctattttcagttaacactgttttaaaaccttttctacattaccacatttacttcactctttctcacagctgctaacaattcc

SEQ ID NO: 194369 - DNA, 120 bp, Artificial Sequence
  ENSG00000113048_23 (sequence is synthesized)
attgtgaactacccacaaaactcagccatgtgtacaaaaagtatgttcagtgcaacatcatttatggtagcaaaagactgaaacaacctaatgcacattaaataaagaactggtcaaaca

SEQ ID NO: 194370 - DNA, 120 bp, Artificial Sequence
  ENSG00000113048_24 (sequence is synthesized)
ggcaagtgcccattccagagactcactcacctgacatattactactggaagttgaaaagtccccacatttatttgtctgaactgcttaaaaagtcaccaacaggaattcttctcaaactt

SEQ ID NO: 194371 - DNA, 120 bp, Artificial Sequence
  ENSG00000113048_25 (sequence is synthesized)
gccatccaaaattgaaccccgctggcccagtgttttgacttgtttatattccagatagccactcacgtttcgacacagccccaactgctggtacctgagaaactggactatccacacctg

SEQ ID NO: 194372 - DNA, 120 bp, Artificial Sequence
  ENSG00000113048_26 (sequence is synthesized)
tatgtactttgttgtggtttgtgagcagaggccctggttctttgtgatagcagccatcagatcagaagctctttgctctcattgtgtcatttgccgtgcagcctcactcagccctgatgg

SEQ ID NO: 194373 - DNA, 120 bp, Artificial Sequence
  ENSG00000113048_27 (sequence is synthesized)
tactgttcttcatggttagaattgttgcattcttccagttcataataaaattgtaatttgatttaaatttaccagtgaaatccaattagccttcgtttttagacataaaaatagaccttg

SEQ ID NO: 194374 - DNA, 120 bp, Artificial Sequence
  ENSG00000113048_28 (sequence is synthesized)
atggccttacagttactccataagagagtaaagagggttcttaaaacctgccatcactggcaaagcaagaactagttctggtggatataggtaataatattcagtggtaatcagtctgaa

SEQ ID NO: 194375 - DNA, 120 bp, Artificial Sequence
  ENSG00000113048_29 (sequence is synthesized)
gaagggataaagaaagggatgttctggccctgtttagggagactagctagtagaatcttttccagtattaacaaagatctttctgtctctttagatctaaagtccagaaggtaagaaatt

SEQ ID NO: 194376 - DNA, 120 bp, Artificial Sequence
  ENSG00000113048_30 (sequence is synthesized)
aagagttagagttgaacttgtatctttggtattgttttcaggtaagggaagataaactaagagcagaagtagtagcacttcaggaaaagtggagtggttcatgggtaccatgtgattgca

SEQ ID NO: 194377 - DNA, 120 bp, Artificial Sequence
  ENSG00000113048_31 (sequence is synthesized)
attatttgtcggccctacttttcatgcagttttaggtggggaaaatcaaacttcttagttttgaaagtaaaatgacctggtttttaattaccagctcttttatttacctgtgctgcagaa

SEQ ID NO: 194378 - DNA, 120 bp, Artificial Sequence
  ENSG00000113048_32 (sequence is synthesized)
gtgcttgggggggggcgttgtttttcttctgaggtctttgcttttctcaaagactggggagcagcctcaagaaatgacacttgtattgcacaaagcctacttacagtaaagaggtttggg

SEQ ID NO: 194379 - DNA, 120 bp, Artificial Sequence
  ENSG00000113048_33 (sequence is synthesized)
tgcctatgaacatctggggtgcctcacttgcccgtggttgtaactgcagcctgcagacattattcattctctgcttcctccctaatctcttggtgcagagaccagtgcagggcaacctga

SEQ ID NO: 194380 - DNA, 120 bp, Artificial Sequence
  ENSG00000113048_34 (sequence is synthesized)
gcttagtgttctatgttttgaagccagagttagggctccagctctgtccactgtgtactcatgtggcaccaagaagatcacagatcccactggggagttgccaaggctctcccctggccg

SEQ ID NO: 194381 - DNA, 120 bp, Artificial Sequence
  ENSG00000113048_35 (sequence is synthesized)
cattgccaggaagtcctccagtcatcgttgttactagtctgcagcaggtgtagcaatgcttgtgtttttgccctttgtttcccccatgtctctaaagacttcattttcattaaagcgtaa

SEQ ID NO: 194382 - DNA, 120 bp, Artificial Sequence
  ENSG00000113048_36 (sequence is synthesized)
ttttgcaccctgggctgaaagaagcgatcactgtttctgactgcctaatttgtttttgagaagcacaaatctatctaaaagcaatttaatagtggtatttattctaacactctgaaggag

SEQ ID NO: 194383 - DNA, 120 bp, Artificial Sequence
  ENSG00000113048_37 (sequence is synthesized)
tcttatcattgctaaattctttaaaattcaaaagcttgttccatcaggccacagcagtatgagtgactgtggggctgacagcatgttgaatcttgattgtctcgagtgtcggtttaaagt

SEQ ID NO: 194384 - DNA, 120 bp, Artificial Sequence
  ENSG00000113048_38 (sequence is synthesized)
gtactctttatttgtgttttgttttgcttttctgattgtaaaagaaacgcttattcattgccaaatttttggaaaataataagatatacagggaataaaaccaaaattactcataatttc

SEQ ID NO: 194385 - DNA, 120 bp, Artificial Sequence
  ENSG00000113048_39 (sequence is synthesized)
actgcccaaaaatccattaacatatagggtatttctttcctatatttttctttgacgtaagtaccttttaatcccaaaattaggattataatgtatatatagctttgttcttctttgttt

SEQ ID NO: 194386 - DNA, 120 bp, Artificial Sequence
  ENSG00000113048_40 (sequence is synthesized)
acttaatgctataacatgttcttttcctcatgtcattgaaagtcacatttttgtataaagtactcattgcttagatggatcatgatccagtatattctgttgcagtgggaagaggagagg

SEQ ID NO: 194387 - DNA, 120 bp, Artificial Sequence
  ENSG00000113048_41 (sequence is synthesized)
gcagtggtggctttcctcttgtgccctgattgcattgaaaatcagacaggttaagaggacaaagccttctgaagagtggcctcggaacctgggttgtgtggaatctgggtaaataagatt

SEQ ID NO: 194388 - DNA, 120 bp, Artificial Sequence
  ENSG00000113048_42 (sequence is synthesized)
caacctaaatgtaacgtcccgatttacagacgtttattaaatttatgttatttcattactctcccatcgtctcttaagtagttaggcatctctcaattatacattgcttctgcttacctt

SEQ ID NO: 194389 - DNA, 120 bp, Artificial Sequence
  ENSG00000113048_43 (sequence is synthesized)
tgttttttaaaaatcataaagttatagcagtttgactgcttttgaagttgatctttgccaacagaatgtagtgtgttattcttggtgctgattctgatataataactcaggaacttcaga

SEQ ID NO: 194390 - DNA, 120 bp, Artificial Sequence
  ENSG00000113048_44 (sequence is synthesized)
aactagagggcgagggtgcgctccaggccagctaaagccgcggatacctccgagagggcagcggcagctgacagagccggagcctcccaccccaggatacaccaaaatctgcagcgcctg

SEQ ID NO: 194391 - DNA, 120 bp, Artificial Sequence
  ENSG00000113048_45 (sequence is synthesized)
caggagaactcgattcgagggccgaaatgcagcagccatactgtctcggaccataccaactactggaaccggggcgaggaggcggagcgtcggtcctgtcgtcgagagcgacaaaaggga

SEQ ID NO: 194392 - DNA, 120 bp, Artificial Sequence
  ENSG00000113048_46 (sequence is synthesized)
cagagcagtccaagcttcctcaatacctggaacgatttaagagaatagaaacctgtgcctgcattaagttctcagccctcattcctctacaaatgtatttttatgaaaattttaaaaagg

SEQ ID NO: 194393 - DNA, 120 bp, Artificial Sequence
  ENSG00000113048_47 (sequence is synthesized)
tcatgcagagtattacctttacaagtaagttttccatttgatttggctatgtactctgtgatttcacaccccttttttacataaaagttggtatatgttgtgtataattttgacaccttc

SEQ ID NO: 194394 - DNA, 120 bp, Artificial Sequence
  ENSG00000113048_48 (sequence is synthesized)
taagtttatattttaaagatcttttcatatgagtatagagagagtttctgattttttataactgcattttattccatactgtgagtttattatttaaaccagttccctttttatggacct

SEQ ID NO: 194395 - DNA, 120 bp, Artificial Sequence
  ENSG00000113048_49 (sequence is synthesized)
ttttggtacgctccaagatggctgcctccatagtgcggcgcgggatgctcctggcgcggcaagtggttcttcctcagctctctcctgcaggttggccggacagcttcattaggcccctga

SEQ ID NO: 194396 - DNA, 120 bp, Artificial Sequence
  ENSG00000113068_0 (sequence is synthesized)
actgcgcaggcgcttacagtgcaccaagatggccgcccccgtggatctagagctgaagaaggccttcacagagcttcaagccaaagttattgacactcaacagaaggtgaagctcgcaga

SEQ ID NO: 194397 - DNA, 120 bp, Artificial Sequence
  ENSG00000113068_1 (sequence is synthesized)
catacagattgaacagctaaacagaacgaaaaagcatgcacatcttacagatacagagatcatgactttggtagatgagactaacatgtatgaaggtgtaggaagaatgtttattcttca

SEQ ID NO: 194398 - DNA, 120 bp, Artificial Sequence
  ENSG00000113068_2 (sequence is synthesized)
gtccaaggaagcaattcacagtcagctgttagagaagcagaaaatagcagaagaaaaaattaaagaactagaacagaaaaagtcctacctggagcgaagcgttaaggaagctgaggacaa

SEQ ID NO: 194399 - DNA, 120 bp, Artificial Sequence
  ENSG00000113068_3 (sequence is synthesized)
catccgggagatgctgatggcacgaagggcccagtagggagcctctctgggaagctcttcctcctgcccctcccattcctggtgggggcagaggagtgtctgcagggaaacagcttctcc

SEQ ID NO: 194400 - DNA, 120 bp, Artificial Sequence
  ENSG00000113068_4 (sequence is synthesized)
tctgccccgatggatgctttatttggatggcctggcaacatcacattttctgcatcaccctgagccccatttgcttcccagccctggagtttttacccggctttgcctgccacctctgcc

SEQ ID NO: 194401 - DNA, 120 bp, Artificial Sequence
  ENSG00000113068_5 (sequence is synthesized)
ctcgggatgtgtgatgaactcccaggagagggaagatgggagccagggcaagataggaagctctgcctgagctttccactaggcacgccagccagaccaataaaaagcgtctgtcccact

SEQ ID NO: 194402 - DNA, 120 bp, Artificial Sequence
  ENSG00000113068_6 (sequence is synthesized)
ctgctaagcctggttttcttgagcagagggatggaacagagggtgagagaggcagtggccgtctccacctcagctcctgctccctctgcatcagagcccttcctttcttgggggatgggc

SEQ ID NO: 194403 - DNA, 120 bp, Artificial Sequence
  ENSG00000113068_7 (sequence is synthesized)
cttgccctcttctcttttcccttcctgtacctttgactaacgctcagcttccgggcctgcatgcagtagacagaagaggaagaaagaacagatgttcacagctgaatctcagtgaacaga

SEQ ID NO: 194404 - DNA, 120 bp, Artificial Sequence
  ENSG00000113068_8 (sequence is synthesized)
atagcagtccctggatggcagtctgcctaaagattcctttccctgccttctcccatacattccaaaaggaagttcaacagtaagcagcacctccaagactgtctccttttggccaatatc

SEQ ID NO: 194405 - DNA, 120 bp, Artificial Sequence
  ENSG00000113068_9 (sequence is synthesized)
ataagatggacgccataatcctgaggcctcctagaggctgagggggcaacggtgtgatccagctggctcatcccagcccaggtgggccaattattcaattttcaagaattttgttgcaag

SEQ ID NO: 194406 - DNA, 120 bp, Artificial Sequence
  ENSG00000113068_10 (sequence is synthesized)
ccagttgtcaaacacagccattataattatgtaaatttgcaaattatgttaaaaacaaggacaataaatattcaaaatgcatccctaattactacatttgaccacgatctgtgctctatc

SEQ ID NO: 194407 - DNA, 120 bp, Artificial Sequence
  ENSG00000113068_11 (sequence is synthesized)
tggagccgtgaagctgtcatattcatattcatagcgcatataagaccaaaacaaaaaaaaaagaatagtctcttctttggaactgcagagaattttgatgagatggttttaacctgaatg

SEQ ID NO: 194408 - DNA, 120 bp, Artificial Sequence
  ENSG00000113068_12 (sequence is synthesized)
tattttgttcattgcccttgaatgtgtttattctttaaaaaaaacaaaaccataaacaaaatgtaatgtatatttaaacaacacttgtgtagtggattgtggtggatgggcaggagagtg

SEQ ID NO: 194409 - DNA, 120 bp, Artificial Sequence
  ENSG00000113068_13 (sequence is synthesized)
ggtaataatgataaattttagaggatcttggtatagggtcttttttacacattgtaatttctttaacctaaattaggttctatataaggacaaagtagcaagctataaccaattaactat

SEQ ID NO: 194410 - DNA, 120 bp, Artificial Sequence
  ENSG00000113068_14 (sequence is synthesized)
aaaaaattaaagaactagaagtaacagagcccttcctttcttgggggatgggccttgccctcttctcttttcccttcctgtacctttgactaacgctcagcttccgggcctgcatgcagt

SEQ ID NO: 194411 - DNA, 120 bp, Artificial Sequence
  ENSG00000113068_15 (sequence is synthesized)
ggtgaaaagtaccatttgcttgctgttcctatgtaaaaatattaaggtagcagcagtcttgaactgttaactttgtcactgaggaattgtgtgctgtaactgacttaattagctgaattt

SEQ ID NO: 194412 - DNA, 120 bp, Artificial Sequence
  ENSG00000113068_16 (sequence is synthesized)
ctctgaaaacagtcaattttaagccataccaagaattttctgattttagctgccacttatctcatagtgcaaagttaggaataacttactatctaatctgagagagaggactgaaatgtt

SEQ ID NO: 194413 - DNA, 120 bp, Artificial Sequence
  ENSG00000113070_0 (sequence is synthesized)
attcggccgaaggagctacgcgggccacgctgctggctggcctgacctaggcgcgcggggtcgggcggccgcgcgggcgggctgagtgagcaagacaagacactcaagaagagcgagctg

SEQ ID NO: 194414 - DNA, 120 bp, Artificial Sequence
  ENSG00000113070_1 (sequence is synthesized)
cgcctgggtcccggccaggcttgcacgcagaggcgggcggcagacggtgcccggcggaatctcctgagctccgccgcccagctctggtgccagcgcccagtggccgccgcttcgaaagtg

SEQ ID NO: 194415 - DNA, 120 bp, Artificial Sequence
  ENSG00000113070_2 (sequence is synthesized)
actggtgcctcgccgcctcctctcggtgcgggaccatgaagctgctgccgtcggtggtgctgaagctctttctggctgcagttctctcggcactggtgactggcgagagcctggagcggc

SEQ ID NO: 194416 - DNA, 120 bp, Artificial Sequence
  ENSG00000113070_3 (sequence is synthesized)
ttcggagagggctagctgctggaaccagcaacccggaccctcccactgtatccacggaccagctgctacccctaggaggcggccgggaccggaaagtccgtgacttgcaagaggcagatc

SEQ ID NO: 194417 - DNA, 120 bp, Artificial Sequence
  ENSG00000113070_4 (sequence is synthesized)
tggaccttttgagagtcactttatcctccaagccacaagcactggccacaccaaacaaggaggagcacgggaaaagaaagaagaaaggcaaggggctagggaagaagagggacccatgtc

SEQ ID NO: 194418 - DNA, 120 bp, Artificial Sequence
  ENSG00000113070_5 (sequence is synthesized)
ttcggaaatacaaggacttctgcatccatggagaatgcaaatatgtgaaggagctccgggctccctcctgcatctgccacccgggttaccatggagagaggtgtcatgggctgagcctcc

SEQ ID NO: 194419 - DNA, 120 bp, Artificial Sequence
  ENSG00000113070_6 (sequence is synthesized)
cagtggaaaatcgcttatatacctatgaccacacaaccatcctggccgtggtggctgtggtgctgtcatctgtctgtctgctggtcatcgtggggcttctcatgtttaggtaccatagga

SEQ ID NO: 194420 - DNA, 120 bp, Artificial Sequence
  ENSG00000113070_7 (sequence is synthesized)
gaggaggttatgatgtggaaaatgaagagaaagtgaagttgggcatgactaattcccactgagagagacttgtgctcaaggaatcggctggggactgctacctctgagaagacacaaggt

SEQ ID NO: 194421 - DNA, 120 bp, Artificial Sequence
  ENSG00000113070_8 (sequence is synthesized)
gatttcagactgcagaggggaaagacttccatctagtcacaaagactccttcgtccccagttgccgtctaggattgggcctcccataattgctttgccaaaataccagagccttcaagtg

SEQ ID NO: 194422 - DNA, 120 bp, Artificial Sequence
  ENSG00000113070_9 (sequence is synthesized)
ccaccaaaccccacttcccctcataagtttgtttaaacacttatcttctggattagaatgccggttaaattccatatgctccaggatctttgactgaaaaaaaaaaagaagaagaagaag

SEQ ID NO: 194423 - DNA, 120 bp, Artificial Sequence
  ENSG00000113070_10 (sequence is synthesized)
gagagcaagaaggaaagatttgtgaactggaagaaagcaacaaagattgagaagccatgtactcaagtaccaccaagggatctgccattgggaccctccagtgctggatttgatgagtta

SEQ ID NO: 194424 - DNA, 120 bp, Artificial Sequence
  ENSG00000113070_11 (sequence is synthesized)
actgtgaaataccacaagcctgagaactgaattttgggacttctacccagatggaaaaataacaactatttttgttgttgttgtttgtaaatgcctcttaaattatatatttattttatt

SEQ ID NO: 194425 - DNA, 120 bp, Artificial Sequence
  ENSG00000113070_12 (sequence is synthesized)
ctatgtatgttaatttatttagtttttaacaatctaacaataatatttcaagtgcctagactgttactttggcaatttcctggccctccactcctcatccccacaatctggcttagtgcc

SEQ ID NO: 194426 - DNA, 120 bp, Artificial Sequence
  ENSG00000113070_13 (sequence is synthesized)
acccacctttgccacaaagctaggatggttctgtgacccatctgtagtaatttattgtctgtctacatttctgcagatcttccgtggtcagagtgccactgcgggagctctgtatggtca

SEQ ID NO: 194427 - DNA, 120 bp, Artificial Sequence
  ENSG00000113070_14 (sequence is synthesized)
ggatgtaggggttaacttggtcagagccactctatgagttggacttcagtcttgcctaggcgattttgtctaccatttgtgttttgaaagcccaaggtgctgatgtcaaagtgtaacaga

SEQ ID NO: 194428 - DNA, 120 bp, Artificial Sequence
  ENSG00000113070_15 (sequence is synthesized)
tatcagtgtctccccgtgtcctctccctgccaagtctcagaagaggttgggcttccatgcctgtagctttcctggtccctcacccccatggccccaggcccacagcgtgggaactcactt

SEQ ID NO: 194429 - DNA, 120 bp, Artificial Sequence
  ENSG00000113070_16 (sequence is synthesized)
tcccttgtgtcaagacatttctctaactcctgccattcttctggtgctactccatgcaggggtcagtgcagcagaggacagtctggagaaggtattagcaaagcaaaaggctgagaagga

SEQ ID NO: 194430 - DNA, 120 bp, Artificial Sequence
  ENSG00000113070_17 (sequence is synthesized)
acagggaacattggagctgactgttcttggtaactgattacctgccaattgctaccgagaaggttggaggtggggaaggctttgtataatcccacccacctcaccaaaacgatgaagtta

SEQ ID NO: 194431 - DNA, 120 bp, Artificial Sequence
  ENSG00000113070_18 (sequence is synthesized)
tgctgtcatggtcctttctggaagtttctggtgccatttctgaactgttacaacttgtatttccaaacctggttcatatttatactttgcaatccaaataaagataacccttattccata

SEQ ID NO: 194432 - DNA, 120 bp, Artificial Sequence
  ENSG00000113070_19 (sequence is synthesized)
attacaggcatgagccaccgtgcctagctctatgcctgttttcaagcagtgtaactcatctgtcatgagacctggaacaagttactgtctttctgaggattgtaaccttgtagtgattgt

SEQ ID NO: 194433 - DNA, 120 bp, Artificial Sequence
  ENSG00000113070_20 (sequence is synthesized)
aatgtttgtccatctacctcataaggatgttgtgaggatcacgtaaatgaggtgaaagctatttgtaaattgcatcctgctattagagacaggagttcctcggggcagttgggcctttga

SEQ ID NO: 194434 - DNA, 120 bp, Artificial Sequence
  ENSG00000113070_21 (sequence is synthesized)
ccagagtttgggctgccctactgcctgggcttttccaagtagtagaggaaaccaccatggcagagttctttggaaggacctgctctggacctgcactttgtcatagcaggcagggcttat

SEQ ID NO: 194435 - DNA, 120 bp, Artificial Sequence
  ENSG00000113070_22 (sequence is synthesized)
acagagactgtgaaatgccttccttgggacccaccctagcttctacttcctaccgaggttccctctttctggtggttctgcccaatcttcctgctcttccttctgcctcttaggaggcac

SEQ ID NO: 194436 - DNA, 120 bp, Artificial Sequence
  ENSG00000113070_23 (sequence is synthesized)
tgagctaaggggccttcccagatctctgacttcaggtggaatcaaagcatatatactcctttcaagcactatgctcttctgattttcttcccaaagagtcagactttaacagagtgcttt

SEQ ID NO: 194437 - DNA, 120 bp, Artificial Sequence
  ENSG00000113073_0 (sequence is synthesized)
agaacctaggactgtactggttctgagattctgtgcaagcctcatggaaatgaagctgccaggccaggaagggtttgaagcctccagtgctcctagaaatattccttcaggggagctgga

SEQ ID NO: 194438 - DNA, 120 bp, Artificial Sequence
  ENSG00000113073_1 (sequence is synthesized)
cagcaaccctgaccctggcaccggccccagccctgatggcccctcagacacagagagcaaggaactgggagtacccaaagaccctctgctcttcattcagctgaatgagctgctgggctg

SEQ ID NO: 194439 - DNA, 120 bp, Artificial Sequence
  ENSG00000113073_2 (sequence is synthesized)
gccccaggcgctggagtggagagagacaggcaggtgggtactgtttgaggagaagttggaggtggctgcaggccggtggagtgccccccacgtgcccaccctggcactgcccagcctcca

SEQ ID NO: 194440 - DNA, 120 bp, Artificial Sequence
  ENSG00000113073_3 (sequence is synthesized)
gaagctccgcagcctgctggccgagggccttgtactgctggactgcccagctcagagcctcctggagctcgtggagcaggtgaccagggtggagtcgctgagcccagagctgagagggca

SEQ ID NO: 194441 - DNA, 120 bp, Artificial Sequence
  ENSG00000113073_4 (sequence is synthesized)
gttgcaggccttgctgctgcagagaccccagcattacaaccagaccacaggcaccaggccctgctggggctctactcatccaagaaaggcttctgacaatgaggaagcccccctgaggga

SEQ ID NO: 194442 - DNA, 120 bp, Artificial Sequence
  ENSG00000113073_5 (sequence is synthesized)
acagtgtcagaaccccctgagacagaagctacctccaggagctgaggcagggactgtgctggcaggggagctgggcttcctggcacagccactgggagcctttgttcgactgcggaaccc

SEQ ID NO: 194443 - DNA, 120 bp, Artificial Sequence
  ENSG00000113073_6 (sequence is synthesized)
tgtggtactggggtcccttactgaggtgtccctcccaagcaggtttttctgccttctcctgggcccctgtatgctgggaaagggctaccatgagatgggacgggcagcagctgtcctcct

SEQ ID NO: 194444 - DNA, 120 bp, Artificial Sequence
  ENSG00000113073_7 (sequence is synthesized)
cagtgacccgcaattccagtggtcagttcgtcgggccagcaaccttcatgaccttctggcagccctggatgcattcctagaggaggtgacagtgcttcccccaggtcggtgggacccaac

SEQ ID NO: 194445 - DNA, 120 bp, Artificial Sequence
  ENSG00000113073_8 (sequence is synthesized)
agcccggattcccccgcccaaatgtctgccatctcagcacaaaaggcttccctcgcaacagcgggagatcagaggtcccgccgtcccgcgcctgacctcggctgaggacaggcaccgcca

SEQ ID NO: 194446 - DNA, 120 bp, Artificial Sequence
  ENSG00000113073_9 (sequence is synthesized)
tgggccacacgcacacagcccggagttgcagcggaccggcaggctgtttgggggccttatccaggacgtgcgcaggaaggtcccgtggtaccccagcgatttcttggacgccctgcatct

SEQ ID NO: 194447 - DNA, 120 bp, Artificial Sequence
  ENSG00000113073_10 (sequence is synthesized)
ccagtgcttctcggccgtactctacatttacctggccactgtcactaatgccatcacttttgggggtctgctgggagatgccactgatggtgcccagggagtgctggaaagtttcctggg

SEQ ID NO: 194448 - DNA, 120 bp, Artificial Sequence
  ENSG00000113073_11 (sequence is synthesized)
cacagcagtggctggagctgccttctgcctgatggcaggccagcccctcaccattctgagcagcacggggccagtgctggtctttgagcgcctgctcttctctttcagcagagattacag

SEQ ID NO: 194449 - DNA, 120 bp, Artificial Sequence
  ENSG00000113073_12 (sequence is synthesized)
cctggactacctgcccttccgcctatgggtgggcatctgggtggctaccttttgcctggtgctggtggccacagaggccagtgtgctggtgcgctacttcacccgcttcactgaggaagg

SEQ ID NO: 194450 - DNA, 120 bp, Artificial Sequence
  ENSG00000113073_13 (sequence is synthesized)
ggcaaaatgctgaacttgacccatacctatcctatccagaagcctgggtcctctgcctacgggtgcctctgccaatacccaggcccaggaggaaatgagtctcaatggataaggacaagg

SEQ ID NO: 194451 - DNA, 120 bp, Artificial Sequence
  ENSG00000113073_14 (sequence is synthesized)
ccaaaagacagagacgacattgtaagcatggacttaggcctgatcaatgcatccttgctgccgccacctgagtgcacccggcagggaggccaccctcgtggccctggctgtcatacagtc

SEQ ID NO: 194452 - DNA, 120 bp, Artificial Sequence
  ENSG00000113073_15 (sequence is synthesized)
ccagacattgccttcttctcccttctcctcttccttacttctttcttctttgctatggccctcaagtgtgtaaagaccagccgcttcttcccctctgtggtgcgcaaagggctcagcgac

SEQ ID NO: 194453 - DNA, 120 bp, Artificial Sequence
  ENSG00000113073_16 (sequence is synthesized)
ttctcctcagtcctggccatcctgctcggctgtggccttgatgctttcctgggcctagccacaccaaagctcatggtacccagagagttcaagcccacactccctgggcgtggctggctg

SEQ ID NO: 194454 - DNA, 120 bp, Artificial Sequence
  ENSG00000113073_17 (sequence is synthesized)
gtgtcaccttttggagccaacccctggtggtggagtgtggcagctgccctgcctgccctgctgctgtctatcctcatcttcatggaccaacagatcacagcagtcatcctcaaccgcatg

SEQ ID NO: 194455 - DNA, 120 bp, Artificial Sequence
  ENSG00000113073_18 (sequence is synthesized)
gaatacagactgcagaagggagctggcttccacctggacctcttctgtgtggctgtgctgatgctactcacatcagcgcttggactgccttggtatgtctcagccactgtcatctccctg

SEQ ID NO: 194456 - DNA, 120 bp, Artificial Sequence
  ENSG00000113073_19 (sequence is synthesized)
gctcacatggacagtcttcggagagagagcagagcctgtgcccccggggagcgccccaacttcctgggtatcagggaacagaggctgacaggcctggtggtgttcatccttacaggagcc

SEQ ID NO: 194457 - DNA, 120 bp, Artificial Sequence
  ENSG00000113073_20 (sequence is synthesized)
tccatcttcctggcacctgtgctcaagttcattccaatgcctgtgctctatggcatcttcctgtatatgggggtggcagcgctcagcagcattcagttcactaatagggtgaagctgttg

SEQ ID NO: 194458 - DNA, 120 bp, Artificial Sequence
  ENSG00000113073_21 (sequence is synthesized)
ttgatgccagcaaaacaccagccagacctgctactcttgcggcatgtgcctctgaccagggtccacctcttcacagccatccagcttgcctgtctggggctgctttggataatcaagtct

SEQ ID NO: 194459 - DNA, 120 bp, Artificial Sequence
  ENSG00000113073_22 (sequence is synthesized)
acccctgcagccatcatcttccccctcatgttgctgggccttgtgggggtccgaaaggccctggagagggtcttctcaccacaggaactcctctggctggatgagctgatgccagaggag

SEQ ID NO: 194460 - DNA, 120 bp, Artificial Sequence
  ENSG00000113073_23 (sequence is synthesized)
gagagaagcatccctgagaaggggctggagccagaacactcattcagtggaagtgacagtgaagattcagagctgatgtatcagccaaaggctccagaaatcaacatttctgtgaattag

SEQ ID NO: 194461 - DNA, 120 bp, Artificial Sequence
  ENSG00000113073_24 (sequence is synthesized)
ctggagtaggagtctgggagtggagaccccaggaaacagcatgagatgctcagtcggcttggggaaggactgaagggcagctgccaagacctcagttacctcctgacctgagggtggaga

SEQ ID NO: 194462 - DNA, 120 bp, Artificial Sequence
  ENSG00000113073_25 (sequence is synthesized)
gtggcaggaagcaagcatgtttgctgtgcacttaggaaaggctggtgagccagagggactgatcaggccccattcactctctactcattaaaaggtcctgagccacgaagcgcttcccat

SEQ ID NO: 194463 - DNA, 120 bp, Artificial Sequence
  ENSG00000113073_26 (sequence is synthesized)
tttgaactttctgtcctcacagattctgtttgacagaatctaagggccatcagggaactcttttcatcttgcaaagagaaaaagccagtctttccagaataaatattcatctgtttgaaa

SEQ ID NO: 194464 - DNA, 120 bp, Artificial Sequence
  ENSG00000113073_27 (sequence is synthesized)
ctggagtaggagtctgggagtggagaccccaggaaacagcatgagttcacaggtgcttactcaggaagtcaggacatttttggcctttggcttaacttccagatgctcagtcggcttggg

SEQ ID NO: 194465 - DNA, 120 bp, Artificial Sequence
  ENSG00000113073_28 (sequence is synthesized)
gacagtgaagatgtgagctccaggctgggtcctctcaggagaatgtgtcagggtttgggagagcgttcttgtccaggagctgtccctaaataatatctccatcagagctgatgtatcagc

SEQ ID NO: 194466 - DNA, 120 bp, Artificial Sequence
  ENSG00000113073_29 (sequence is synthesized)
ccaagggacagaagctccaggggagtctacgctcctcctctcctacctcagaggacagagggctggggcctgggctagcttcatcctcattgcccccaccactacctgcagaagggagct

SEQ ID NO: 194467 - DNA, 120 bp, Artificial Sequence
  ENSG00000113083_0 (sequence is synthesized)
agacactgcccgctctccgggactgccgcgccgctccccgttgccttccaggactgagaaaggggaaagggaagggtgccacgtccgagcagccgccttgactggggaagggtctgaatc

SEQ ID NO: 194468 - DNA, 120 bp, Artificial Sequence
  ENSG00000113083_1 (sequence is synthesized)
ccacccttggcattgcttggtggagactgagatacccgtgctccgctcgcctccttggttgaagatttctccttccctcacgtgatttgagccccgtttttattttctgtgagccacgtc

SEQ ID NO: 194469 - DNA, 120 bp, Artificial Sequence
  ENSG00000113083_2 (sequence is synthesized)
ctcctcgagcggggtcaatctggcaaaaggagtgatgcgcttcgcctggaccgtgctcctgctcgggcctttgcagctctgcgcgctagtgcactgcgcccctcccgccgccggccaaca

SEQ ID NO: 194470 - DNA, 120 bp, Artificial Sequence
  ENSG00000113083_3 (sequence is synthesized)
gcagcccccgcgcgagccgccggcggctccgggcgcctggcgccagcagatccaatgggagaacaacgggcaggtgttcagcttgctgagcctgggctcacagtaccagcctcagcgccg

SEQ ID NO: 194471 - DNA, 120 bp, Artificial Sequence
  ENSG00000113083_4 (sequence is synthesized)
ccgggacccgggcgccgccgtccctggtgcagccaacgcctccgcccagcagccccgcactccgatcctgctgatccgcgacaaccgcaccgccgcggcgcgaacgcggacggccggctc

SEQ ID NO: 194472 - DNA, 120 bp, Artificial Sequence
  ENSG00000113083_5 (sequence is synthesized)
atctggagtcaccgctggccgccccaggcccaccgcccgtcactggttccaagctggctactcgacatctagagcccgcgaagctggcgcctcgcgcgcggagaaccagacagcgccggg

SEQ ID NO: 194473 - DNA, 120 bp, Artificial Sequence
  ENSG00000113083_6 (sequence is synthesized)
agaagttcctgcgctcagtaacctgcggccgcccagccgcgtggacggcatggtgggcgacgacccttacaacccctacaagtactctgacgacaacccttattacaactactacgatac

SEQ ID NO: 194474 - DNA, 120 bp, Artificial Sequence
  ENSG00000113083_7 (sequence is synthesized)
ttatgaaaggcccagacctgggggcaggtaccggcccggatacggcactggctacttccagtacggtctcccagacctggtggccgacccctactacatccaggcgtccacgtacgtgca

SEQ ID NO: 194475 - DNA, 120 bp, Artificial Sequence
  ENSG00000113083_8 (sequence is synthesized)
gaagatgtccatgtacaacctgagatgcgcggcggaggaaaactgtctggccagtacagcatacagggcagatgtcagagattatgatcacagggtgctgctcagatttccccaaagagt

SEQ ID NO: 194476 - DNA, 120 bp, Artificial Sequence
  ENSG00000113083_9 (sequence is synthesized)
gaaaaaccaagggacatcagatttcttacccagccgaccaagatattcctgggaatggcacagttgtcatcaacattaccacagtatggatgagtttagccactatgacctgcttgatgc

SEQ ID NO: 194477 - DNA, 120 bp, Artificial Sequence
  ENSG00000113083_10 (sequence is synthesized)
caacacccagaggagagtggctgaaggccacaaagcaagtttctgtcttgaagacacatcctgtgactatggctaccacaggcgatttgcatgtactgcacacacacagggattgagtcc

SEQ ID NO: 194478 - DNA, 120 bp, Artificial Sequence
  ENSG00000113083_11 (sequence is synthesized)
tggctgttatgatacctatggtgcagacatagactgccagtggattgatattacagatgtaaaacctggaaactatatcctaaaggtcagtgtaaaccccagctacctggttcctgaatc

SEQ ID NO: 194479 - DNA, 120 bp, Artificial Sequence
  ENSG00000113083_12 (sequence is synthesized)
tgactataccaacaatgttgtgcgctgtgacattcgctacacaggacatcatgcgtatgcctcaggctgcacaatttcaccgtattagaaggcaaagcaaaactcccaatggataaatca

SEQ ID NO: 194480 - DNA, 120 bp, Artificial Sequence
  ENSG00000113083_13 (sequence is synthesized)
gtgcctggtgttctgaagtgggaaaaaatagactaacttcagtaggatttatgtattttgaaaaagagaacagaaaacaacaaaagaatttttgtttggactgttttcaataacaaagca

SEQ ID NO: 194481 - DNA, 120 bp, Artificial Sequence
  ENSG00000113083_14 (sequence is synthesized)
cataactggattttgaacgcttaagtcatcattacttgggaaatttttaatgtttattatttacatcactttgtgaattaacacagtgtttcaattctgtaattacatatttgactcttt

SEQ ID NO: 194482 - DNA, 120 bp, Artificial Sequence
  ENSG00000113083_15 (sequence is synthesized)
caaagaaatccaaatttctcatgttccttttgaaattgtagtgcaaaatggtcagtattatctaaatgaatgagccaaaatgactttgaactgaaacttttctaaagtgctggaacttta

SEQ ID NO: 194483 - DNA, 120 bp, Artificial Sequence
  ENSG00000113083_16 (sequence is synthesized)
gtgaaacataataataatgggtttatatatgtcatagcatagatgaatttagaaacaatgctcctactgtttaaatacatatggacacatctggtgctgagaaagaaacaaacacattac

SEQ ID NO: 194484 - DNA, 120 bp, Artificial Sequence
  ENSG00000113083_17 (sequence is synthesized)
cattggtgtcaagaaatattactatatagcagagaaatggcaatacatgtactcagatagttacatccctatataaaaagtatgtttacatttaaaaaattagtagataacttcctttct

SEQ ID NO: 194485 - DNA, 120 bp, Artificial Sequence
  ENSG00000113083_18 (sequence is synthesized)
ttcaagtgcacaatttcattttgacttgagtcaacttttgttttggaacaaattaagtaagggagctgcccaatcctgtctgatatttcttgaggctgccctctatcattttatctttcc

SEQ ID NO: 194486 - DNA, 120 bp, Artificial Sequence
  ENSG00000113083_19 (sequence is synthesized)
catgggcagagatgttgtaagtgggattcttaatatcaccattcttgggactggtatacataaggcagccgtgaaactggaaagtcattttgatgactgatgtgatacatccagaggtaa

SEQ ID NO: 194487 - DNA, 120 bp, Artificial Sequence
  ENSG00000113083_20 (sequence is synthesized)
aatgcatttaaacatattaaagtatttgccaaagatacaattttcttgctgacataaaaatcacacaaacaagtcccccccaaaccacaactgtctctcaaatagcttaaaaaaattgaa

SEQ ID NO: 194488 - DNA, 120 bp, Artificial Sequence
  ENSG00000113083_21 (sequence is synthesized)
aaaagatgttcagctattagaggaatgttaaaaattttatattatctagaacacaggaacatcatcctgggttattcaggaatcagtcacacatgtgtgtgtgtctgagatatagtctaa

SEQ ID NO: 194489 - DNA, 120 bp, Artificial Sequence
  ENSG00000113083_22 (sequence is synthesized)
attagcaaagcacatagtattacatacttgaggggttggtgaacaaaggaaaaatatactttctgcaaaaccaaggactgtgctgcgtaatgagacagctgtgatttcatttgaaactgt

SEQ ID NO: 194490 - DNA, 120 bp, Artificial Sequence
  ENSG00000113083_23 (sequence is synthesized)
gaaaccatgtgccataatagaattttgagaattttgcttttacctaaattcaagaaaatgaaattacacttttaagttagtggtgcttaagcataatttttcctatattaaccagtatta

SEQ ID NO: 194491 - DNA, 120 bp, Artificial Sequence
  ENSG00000113083_24 (sequence is synthesized)
aaatctcaagtaagattttccagtgccagaacatgttaggtggaattttaaaagtgcctcggcatcctgtattacatgtcatagaattgtaaagtcaacatcaattactagtaatcattc

SEQ ID NO: 194492 - DNA, 120 bp, Artificial Sequence
  ENSG00000113083_25 (sequence is synthesized)
tgcactcactgggtgcatagcatggttagaggggctagagatggacagtcatcaactggcggatatagcggtacatatgatccttagccaccagggcacaagcttaccagtagacaatac

SEQ ID NO: 194493 - DNA, 120 bp, Artificial Sequence
  ENSG00000113083_26 (sequence is synthesized)
agacagagcttttgttgagctgtaactgagctatggaatagcttctttgatgtacctctttgccttaaattgctttttagttctaagattgtagaatgatcctttcaaattgtaatcttt

SEQ ID NO: 194494 - DNA, 120 bp, Artificial Sequence
  ENSG00000113083_27 (sequence is synthesized)
tctaacagagatattttaatatacttgctttcttaaaaaacaaaaaaactactgtcagtattaatactgagccagactggcatctacagatttcagatctatcattttattgattcttaa

SEQ ID NO: 194495 - DNA, 120 bp, Artificial Sequence
  ENSG00000113083_28 (sequence is synthesized)
gcttgtattaaaaactaggcaatatcatcatggatacataggagaagacacatttacaatcattcattgggccttttatctgtctatccatccatcatcatttgaaggcctaatatatgc

SEQ ID NO: 194496 - DNA, 120 bp, Artificial Sequence
  ENSG00000113083_29 (sequence is synthesized)
caagtactcacatggtatgcattgagacataaaaaagactgtctataacctcaataagtattaaaaatcccattattacccataaggttcatcttatttcatttttagggaataaaatta

SEQ ID NO: 194497 - DNA, 120 bp, Artificial Sequence
  ENSG00000113083_30 (sequence is synthesized)
caattttaagcactattgtttttcatgaccataatttatttttaaaaataaattaaaggttaattatatgcatgtatgtatttctaataattaaaaatgtgttcaatccctgaaatgtct

SEQ ID NO: 194498 - DNA, 120 bp, Artificial Sequence
  ENSG00000113083_31 (sequence is synthesized)
aatccctgaaatgtctgccttttaaatataacacctactatttggttaattttgacgatttttttttttcaattaggaagctaaaaatactactttattccttatatgaacattcatccc

SEQ ID NO: 194499 - DNA, 120 bp, Artificial Sequence
  ENSG00000113083_32 (sequence is synthesized)
cctcctggcacctctaaacacacccaaataactcacaagtactgatttaacactctgtattactgaacttctttgaactattttgaactttgaatctcttctctgaataactgccgaaac

SEQ ID NO: 194500 - DNA, 120 bp, Artificial Sequence
  ENSG00000113083_33 (sequence is synthesized)
tcaaagataataattagttgatgaaggttatcaattaataaaataacacagaccagtcttaccaaactctaaatacattttaaaaaataggaactggcaatgataaaaagaatgttgagt

SEQ ID NO: 194501 - DNA, 120 bp, Artificial Sequence
  ENSG00000113083_34 (sequence is synthesized)
actgacaggagattggcttttacactaaaaaagacagaaaatggactaaataggaacataatttcagagtttatgagtcagtttacaatatgccatattagcgatctcatgatgattcag

SEQ ID NO: 194502 - DNA, 120 bp, Artificial Sequence
  ENSG00000113083_35 (sequence is synthesized)
accacagtctgggttaaagatgtcttgacctctgaggctagcataacatatatgagaatacaacttgcctatttccagaaaatctgtatatttttatagaataactttatttacaatttc

SEQ ID NO: 194503 - DNA, 120 bp, Artificial Sequence
  ENSG00000113083_36 (sequence is synthesized)
tatcatccaattactcactaggcattatttgtagtactttttttctctttgaaatctcataggatagtcacacttataaacattcccaatattcggattctagaagaaatgcaattcatt

SEQ ID NO: 194504 - DNA, 120 bp, Artificial Sequence
  ENSG00000113083_37 (sequence is synthesized)
aaaattttcctggcactgagagttaatctttagcagattgcatgaaaatactgaattcctggtaaggagatattttgttttaaaaataatgtgttttgatacgaatcagtgtattaactg

SEQ ID NO: 194505 - DNA, 120 bp, Artificial Sequence
  ENSG00000113083_38 (sequence is synthesized)
ataactaaaaagtactcttttttctatatatacatatttttttgaactcatattcacaatcaacatattcaatcagtgagttaagtctcattcctagctaccaaaattcctgggccactt

SEQ ID NO: 194506 - DNA, 120 bp, Artificial Sequence
  ENSG00000113083_39 (sequence is synthesized)
ttaaacactaaacatttcatttatcctctaagctaaaatggtgctgagttatttaaatctgaatgtaaaatgcattaaatcttagcttgtggtatataaacatttaattaatataaaact

SEQ ID NO: 194507 - DNA, 120 bp, Artificial Sequence
  ENSG00000113083_40 (sequence is synthesized)
gcttgctataaactaagtaacatgtcatttggtgttaggtttttagtgaagttttagcttctcccaaatttttcaggaatgttatttgtaagacgtgtaacttttttgaagaactcttat

SEQ ID NO: 194508 - DNA, 120 bp, Artificial Sequence
  ENSG00000113083_41 (sequence is synthesized)
tttaaatgctcagacattggctttatgttcctctttgcattctcatattcttttattatacatctatactatgattgcaagattatataaaaatgccttgaataaatgatttcaagtgtc

SEQ ID NO: 194509 - DNA, 120 bp, Artificial Sequence
  ENSG00000113083_42 (sequence is synthesized)
tacaacccctacaagtactctgacgacaacccttattacaactactacgatacttatgaaaggcccagacctgggggcaggtaccggcccggatacggcactggctacttccagtacgta

SEQ ID NO: 194510 - DNA, 120 bp, Artificial Sequence
  ENSG00000113083_43 (sequence is synthesized)
atacttctcaagggagatgaaatataagtatagttttatgtcagactcttggattgagtcctggctgttatgatacctatggtgcagacatagactgccagtggattgatattacagatg

SEQ ID NO: 194511 - DNA, 120 bp, Artificial Sequence
  ENSG00000113083_44 (sequence is synthesized)
cttttcacattgctttgcagtcccgggcgtccccagttctcttgctgtcctccgctccactctgcagtcccggtgggcgaaggtacagcatacagggcagatgtcagagattatgatcac

SEQ ID NO: 194512 - DNA, 120 bp, Artificial Sequence
  ENSG00000113083_45 (sequence is synthesized)
ggcagccctggaatccagtgcaaaccgcgcgtctggcccctcctgcttccttttcacattgctttgcagtcccgggcgtccccagttctcttgctgtcctccgctccactctgcagtccc

SEQ ID NO: 194513 - DNA, 120 bp, Artificial Sequence
  ENSG00000113083_46 (sequence is synthesized)
ggtgggcgaagggtgaggagtaagggacctagaggggtagggagttggagcggggggcgccgggttgtttcactgctgcgcccgtcgcctgctgacgtttaggtctcccagacctggtgg

SEQ ID NO: 194514 - DNA, 120 bp, Artificial Sequence
  ENSG00000113088_0 (sequence is synthesized)
agaatcttcttccttcatcacaggatcaacacatttcatctgggcttcttaaatctaaatctttaaaatgactaagttttcttccttttctctgtttttcctaatagttggggcttatat

SEQ ID NO: 194515 - DNA, 120 bp, Artificial Sequence
  ENSG00000113088_1 (sequence is synthesized)
gactcatgtgtgtttcaatatggaaattattggagggaaagaagtgtcacctcattccaggccatttatggcctccatccagtatggcggacatcacgtttgtggaggtgttctgattga

SEQ ID NO: 194516 - DNA, 120 bp, Artificial Sequence
  ENSG00000113088_2 (sequence is synthesized)
tccacagtgggtgctgacagcagcccactgccaatatcggtttaccaaaggccagtctcccactgtggttttaggcgcacactctctctcaaagaatgaggcctccaaacaaacactgga

SEQ ID NO: 194517 - DNA, 120 bp, Artificial Sequence
  ENSG00000113088_3 (sequence is synthesized)
gatcaaaaaatttataccattctcaagagttacatcagatcctcaatcaaatgatatcatgctggttaagcttcaaacagccgcaaaactcaataaacatgtcaagatgctccacataag

SEQ ID NO: 194518 - DNA, 120 bp, Artificial Sequence
  ENSG00000113088_4 (sequence is synthesized)
atccaaaacctctcttagatctggaaccaaatgcaaggttactggctggggagccaccgatccagattcattaagaccttctgacaccctgcgagaagtcactgttactgtcctaagtcg

SEQ ID NO: 194519 - DNA, 120 bp, Artificial Sequence
  ENSG00000113088_5 (sequence is synthesized)
aaaactttgcaacagccaaagttactacaacggcgacccttttatcaccaaagacatggtctgtgcaggagatgccaaaggccagaaggattcctgtaagggtgactcagggggcccctt

SEQ ID NO: 194520 - DNA, 120 bp, Artificial Sequence
  ENSG00000113088_6 (sequence is synthesized)
tggaatctacaccctgttaaccaagaaataccagacttggatcaaaagcaaccttgtcccgcctcatacaaattaagttacaaataattttattggatgcacttgcttcttttttcctaa

SEQ ID NO: 194521 - DNA, 120 bp, Artificial Sequence
  ENSG00000113088_7 (sequence is synthesized)
tatgctcgcaggttagagttgggtgtaagtaaagcagagcacatatggggtccatttttgcacttgtaagtcattttattaaggaatcaagttctttttcacttgtatcactgatgtatt

SEQ ID NO: 194522 - DNA, 120 bp, Artificial Sequence
  ENSG00000113088_8 (sequence is synthesized)
tctaccatgctggttttattctaaataaaatttagaagactctctgtttgtcttttatcacatgaagtaatatctgcccccattgcacccacactcgccaaagggcaataaggtcactga

SEQ ID NO: 194523 - DNA, 120 bp, Artificial Sequence
  ENSG00000113088_9 (sequence is synthesized)
ataaaacagtaatggtaccaccttcaactaggtgtaacttctgctggatcatcctaagttgttgggttgttttcttttcattgttgtgataacattgaacatgagataggcccttgcaac

SEQ ID NO: 194524 - DNA, 120 bp, Artificial Sequence
  ENSG00000113088_10 (sequence is synthesized)
aaatgtttaagggtatgatacattattgttaactataggcatgatcttgcagtgcagatctctagaactgcttcatctcatataaatgaaactttatgccagttgaatagcagctctcta

SEQ ID NO: 194525 - DNA, 120 bp, Artificial Sequence
  ENSG00000113088_11 (sequence is synthesized)
tttccccaccacccccatcctctggcaaccccattctactctaagcttctatgagtttgtattttttaaatataaatcataaatataaatatcctaattcaagcaagcagcttatacaaa

SEQ ID NO: 194526 - DNA, 120 bp, Artificial Sequence
  ENSG00000113100_0 (sequence is synthesized)
actgagatgcatgaagattcagctgtgaagatactataaaaagggaagagaaggaccgagacagaagcaacaacggaactgtcagtgcggagtagggctaaactcagttccattgttaag

SEQ ID NO: 194527 - DNA, 120 bp, Artificial Sequence
  ENSG00000113100_1 (sequence is synthesized)
caaggaaaaacaaacaatacattgaatttgacaacccactgaagttgcagataatgaggacttaccattatataccattattcatctggacctatatgttccatacagttgacaccatcc

SEQ ID NO: 194528 - DNA, 120 bp, Artificial Sequence
  ENSG00000113100_2 (sequence is synthesized)
tattacaagaaaaacctaacagttatttatcaagcaaaaagatagcgggtctgacaaaagatgacggtaaaatgctacgtcgcaccaagcgtggctggatgtggaatcagttcttcttat

SEQ ID NO: 194529 - DNA, 120 bp, Artificial Sequence
  ENSG00000113100_3 (sequence is synthesized)
tggaagagtacacaggtactgacacacaatatgtaggcaagcttcacactgaccaagataaaggagatggaaatttaaaatacatactaacaggagatggggctggcagtctatttgtta

SEQ ID NO: 194530 - DNA, 120 bp, Artificial Sequence
  ENSG00000113100_4 (sequence is synthesized)
tagatgaaaatacaggagacattcatgctgcaaagaaactagacagagaagaaaaatctctgtacattcttcgtgccaaggctatagacagaaaaactgggcggcaggtggaaccggaat

SEQ ID NO: 194531 - DNA, 120 bp, Artificial Sequence
  ENSG00000113100_5 (sequence is synthesized)
cggaatttatcattaaaatacatgatatcaatgacaatgagccaaaatttacaaaagacttatacactgccagtgttcctgaaatgtctggagtcggtacatctgttatacaagtaactg

SEQ ID NO: 194532 - DNA, 120 bp, Artificial Sequence
  ENSG00000113100_6 (sequence is synthesized)
caacagatgcagatgacgccaactatggaaatagtgccaaagtggtctatagcatattgcaaggacagccatatttttcagtggacccagaatcaggcataataaaaactgcattaccag

SEQ ID NO: 194533 - DNA, 120 bp, Artificial Sequence
  ENSG00000113100_7 (sequence is synthesized)
acatgagcagagaaaatagagagcagtaccaggttgttatacaggccaaagacatgggtggccagatgggaggcctttctggaaccaccacagtgaacatcacgctgacagatgtcaaca

SEQ ID NO: 194534 - DNA, 120 bp, Artificial Sequence
  ENSG00000113100_8 (sequence is synthesized)
acaaccctcctcgatttccccagagtacgtatcaatttaattctcctgagtctgtacctcttggaactcatcttggaaggataaaagccaatgaccctgacgtgggggaaaatgcagaaa

SEQ ID NO: 194535 - DNA, 120 bp, Artificial Sequence
  ENSG00000113100_9 (sequence is synthesized)
tggagtatagcattgctgaaggagatggtgcagacatgttcgatgtcatcactgacaaggatacacaggaagggattataactgtcaaacagaatttagattttgaaaatcaaatgctct

SEQ ID NO: 194536 - DNA, 120 bp, Artificial Sequence
  ENSG00000113100_10 (sequence is synthesized)
atactttaagagtggatgcaagtaacactcaccctgatccacgattcttacacctgggacctttcaaagatacagctgtggtcaaaatatctgtggaagatatagatgagcctcctgtgt

SEQ ID NO: 194537 - DNA, 120 bp, Artificial Sequence
  ENSG00000113100_11 (sequence is synthesized)
tcactaaagtctcttacttgatagaagtagatgaagatgtaaaggagggcagtatcattggacaggttacagcatacgatccagatgccaggaacaatttaataaagtactctgttgatc

SEQ ID NO: 194538 - DNA, 120 bp, Artificial Sequence
  ENSG00000113100_12 (sequence is synthesized)
atctccttggcataacatcactgttacagccacagaaataaataacccaaaacaaagtagccacatccctgtcttcatcagaattctagatataaatgaccatgctccggaatttgccat

SEQ ID NO: 194539 - DNA, 120 bp, Artificial Sequence
  ENSG00000113100_13 (sequence is synthesized)
gtattatgaaacatttgtttgtgaaaatgcaaaacctgggcagttgattcagactgtcagtgtcatggataaggatgaccctccccgaggtcacaaattcttttttgaaccagtgccaga

SEQ ID NO: 194540 - DNA, 120 bp, Artificial Sequence
  ENSG00000113100_14 (sequence is synthesized)
atttactctcaatccgaatttcaccattgtagataataaagataatacagcaggaatcatgactcggaaagatggctacagtcgcaacaaaatgagcacctacttattgccgattttaat

SEQ ID NO: 194541 - DNA, 120 bp, Artificial Sequence
  ENSG00000113100_15 (sequence is synthesized)
ctttgacaacgattatccaattcaaagcagcactggtacactcactatccgtgtgtgtgcctgcgataatcaaggaaacatgcaatcctgcaccgcagaagccctgatcctttcagccgg

SEQ ID NO: 194542 - DNA, 120 bp, Artificial Sequence
  ENSG00000113100_16 (sequence is synthesized)
cctgagcacgggagctctcgttgcgattctactctgtgtcctcatactgcttattttagtcgtgttgtttgctgcattgaagaggcaaagaaaaaaggaacctctgataatttcaaaaga

SEQ ID NO: 194543 - DNA, 120 bp, Artificial Sequence
  ENSG00000113100_17 (sequence is synthesized)
cgatgtccgggacaacattgtgacctacaacgatgaaggcggcggggaagaagatacccaagcttttgacattggcacattaaggaatccagaggcaagagaagacagtaaacttagacg

SEQ ID NO: 194544 - DNA, 120 bp, Artificial Sequence
  ENSG00000113100_18 (sequence is synthesized)
ggatgtaatgcctgaaactatttttcagataaggaggactgtgcctctgtgggaaaatattgatgtacaagattttatccatcgaagattaaaagaaaacgacgcagacccaagtgcacc

SEQ ID NO: 194545 - DNA, 120 bp, Artificial Sequence
  ENSG00000113100_19 (sequence is synthesized)
tccatatgattcgctggcaacgtatgcctatgaagggaatgattccatagcagattcgctcagttctttggaatctctcacagctgattgtaaccaagattatgattacctcagtgactg

SEQ ID NO: 194546 - DNA, 120 bp, Artificial Sequence
  ENSG00000113100_20 (sequence is synthesized)
ggggcctcgtttcaaaaaacttgccgatatgtatgggggtgatgatagtgaccgagactaagaggattgtttgacttaatcaatattagtggaagtactgtctatgttattagattgagt

SEQ ID NO: 194547 - DNA, 120 bp, Artificial Sequence
  ENSG00000113100_21 (sequence is synthesized)
ggcctgcattctcttcctgggaggaaatctttcaaaaattgaagttacaaacaatacgtagatgttgtcaagtagggatttgcttaatcagtaagtctttgtgaatgaatacgaatgata

SEQ ID NO: 194548 - DNA, 120 bp, Artificial Sequence
  ENSG00000113100_22 (sequence is synthesized)
cagatttttaaaaaagtaataaccagttcaccctctttgcctaacaatctcggaaggaaaatatatcacatcaataatcaataaaaataagtaaaaggctttttgtgccttttcttaggt

SEQ ID NO: 194549 - DNA, 120 bp, Artificial Sequence
  ENSG00000113100_23 (sequence is synthesized)
ataataatttataaatgttttcttaactgactttcagtcacctttacaattaaactaaatattgtgcaaccgctttgtaaattaatatgaagaagatatatccctaatgaaataggaatg

SEQ ID NO: 194550 - DNA, 80 bp, Artificial Sequence
  ENSG00000113100_24 (sequence is synthesized)
tccctaatgaaataggaatgactattactgccatatttatttagttgaagaatgtctttgtgttaattcattcatatttt

SEQ ID NO: 194551 - DNA, 120 bp, Artificial Sequence
  ENSG00000113100_25 (sequence is synthesized)
tgagtgctttataatttacgtttgcttttcagtaaagggaaaaaaagcctgggatttattttcccccatcttttacatgctgtctatccttcagataaatgagaatagttgtgatatcac

SEQ ID NO: 194552 - DNA, 120 bp, Artificial Sequence
  ENSG00000113100_26 (sequence is synthesized)
ttcaagcaagttaaatgtcttcataattgacacttaaaacctcagttgttcatgctaaaactagaaaacagtcaaattaaaattagataaacttcaaggtacttgttttgtatttctcca

SEQ ID NO: 194553 - DNA, 120 bp, Artificial Sequence
  ENSG00000113100_27 (sequence is synthesized)
tagaggaaaatataaacacacagccatcattatttcatgcacttttcaaaatattttcattgtaagtgtgatgatatatttaaataaataaaacctgaagatgctttgtgttttccattg

SEQ ID NO: 194554 - DNA, 120 bp, Artificial Sequence
  ENSG00000113100_28 (sequence is synthesized)
gttgcctcgattttcaatgcaatgtgggagaacattcttaatctttacatctaataatagagctcaatattatcatttcatattgtccttatttcactttttattcatatcttactttcc

SEQ ID NO: 194555 - DNA, 120 bp, Artificial Sequence
  ENSG00000113100_29 (sequence is synthesized)
gtccttatttcactttttattcatatcttactttccacaagtgctcaaataattgaagtagaaataatttttattctatacttctattttatatttttcttctgattataactgcataac

SEQ ID NO: 194556 - DNA, 120 bp, Artificial Sequence
  ENSG00000113100_30 (sequence is synthesized)
taagaactcactttaacagctgccatccagattcatgtgtataaataacagttctaaagtacacataggataatatagtaagtagaaagagtcaaacatatgaaattgctcaaataacaa

SEQ ID NO: 194557 - DNA, 120 bp, Artificial Sequence
  ENSG00000113100_31 (sequence is synthesized)
ttctataaaataaaaattcaagaaagttgttagcattttgcatttcatgtctttgtcagatcattgtggaaattacctatagctttaagaaagagtagaactaataaccttagaagaatg

SEQ ID NO: 194558 - DNA, 120 bp, Artificial Sequence
  ENSG00000113100_32 (sequence is synthesized)
cctggatttatgagtctgtcttctgccaggtactctgttgatcggcatactgatatggaccgtatttttggtattcactcagaaaatggttctattttcactttgaaagcccttgaccgg

SEQ ID NO: 194559 - DNA, 120 bp, Artificial Sequence
  ENSG00000113108_0 (sequence is synthesized)
acgtgaccccctcccgtcgagtctcaggctgcgtgtgagcgcactcacgaccggggcgcgatgatctcactcgtgcgcgagtgcgcgcggcgcatgttcggcgtgtcggtcttcaggcgc

SEQ ID NO: 194560 - DNA, 120 bp, Artificial Sequence
  ENSG00000113108_1 (sequence is synthesized)
ctgatgagttcatagttgggcggtggtgtcagcggtttcgctggcgttcgtgggcctcccccggacccacacacggaaacacgcaaccattcggggatccagacgcccgtttacacgcac

SEQ ID NO: 194561 - DNA, 120 bp, Artificial Sequence
  ENSG00000113108_2 (sequence is synthesized)
gtttacacgcaccacccctgggcgggctgtgcggctcaggccctcccccgggaccggcccgtgtcccgccccgtgtcccgccccgtatttgtgcggcgccagctggccccgcagcctgcg

SEQ ID NO: 194562 - DNA, 120 bp, Artificial Sequence
  ENSG00000113108_3 (sequence is synthesized)
tgggcttgcaggcgcagtagctccagaggtcgcgctgggctgagagtgcgggccggcagaggctggcggggagcagccggggttatgctgggcaaggattacatgctggccatcattctg

SEQ ID NO: 194563 - DNA, 120 bp, Artificial Sequence
  ENSG00000113108_4 (sequence is synthesized)
gtcaactgcgatgatgacttgtggggggaccacagtctggaggtggaggctggcctgcctcctggctggaggaagatccacgatgctgcaggtacttactactggcatgtacccagcggt

SEQ ID NO: 194564 - DNA, 120 bp, Artificial Sequence
  ENSG00000113108_5 (sequence is synthesized)
agcacccagtggcagcgcccaacctgggaactaggagatgcagaggacccaggcacgggaacggaggggatctggggactgcggccccccaaagggagatccttctccagcctggagagt

SEQ ID NO: 194565 - DNA, 120 bp, Artificial Sequence
  ENSG00000113108_6 (sequence is synthesized)
tcactggaccggagtaactctctgtcctggtatggtggggaatcctacatccagagcatggagccaggggctaagtgctttgcagtccgctctctgggctgggtagaggtacctgaagag

SEQ ID NO: 194566 - DNA, 120 bp, Artificial Sequence
  ENSG00000113108_7 (sequence is synthesized)
gacctggcaccggggaagagcagtattgcagtcaataactgtatccagcagctggcccagacccgcagccggagccagcctccagatggtgcctggggtgagggccagaacatgctgatg

SEQ ID NO: 194567 - DNA, 120 bp, Artificial Sequence
  ENSG00000113108_8 (sequence is synthesized)
atcctgaagaaggatgccatgagcctagtgaatcccctggaccacagtctgatccactgccagcctctggtgcacatccgtgtgtggggcgtggggagctccaagggccgtgacagggac

SEQ ID NO: 194568 - DNA, 120 bp, Artificial Sequence
  ENSG00000113108_9 (sequence is synthesized)
gtgatgtccctgccaaggccattgccagtgccctacatgggctttgtgcccagatcttgtcagagcgagtagaggtcagtggtgatgcctcttgctgctccccagaccccatctctcctg

SEQ ID NO: 194569 - DNA, 120 bp, Artificial Sequence
  ENSG00000113108_10 (sequence is synthesized)
aagacctgccacggcaagtggagctgctggatgcggtaagccaagctgctcagaagtacgaggcactgtatatggggacactgccagtcaccaaggccatgggcatggatgtgctgaacg

SEQ ID NO: 194570 - DNA, 120 bp, Artificial Sequence
  ENSG00000113108_11 (sequence is synthesized)
aggccattggtaccctcaccgccaggggggaccggaatgcctgggtccccaccatgctcagtgtgtctgactctctcatgactgcacaccccattcaggcagaggccagtacagaggagg

SEQ ID NO: 194571 - DNA, 120 bp, Artificial Sequence
  ENSG00000113108_12 (sequence is synthesized)
agccattgtggcagtgccctgtgcgccttgtgacatttattggtgttggccgcgacccacacacctttggcctcatcgctgacctgggccgtcagagcttccagtgcgcagccttctggt

SEQ ID NO: 194572 - DNA, 120 bp, Artificial Sequence
  ENSG00000113108_13 (sequence is synthesized)
gccagccccatgcagggggactctctgaagctgtgcaggctgcctgtatggttcagtaccagaagtgtcttgtggcctctgcagctcgaggcaaggcctggggtgcccaggcccgtgccc

SEQ ID NO: 194573 - DNA, 120 bp, Artificial Sequence
  ENSG00000113108_14 (sequence is synthesized)
gcctgcggctcaagcggaccagctccatggattccccaggaggtcccctgcccctccccctgctcaaaggaggggttggcggtgcaggggcaacccctcgaaagcggggtgtcttctctt

SEQ ID NO: 194574 - DNA, 120 bp, Artificial Sequence
  ENSG00000113108_15 (sequence is synthesized)
ttcttgatgccttccggctgaaaccctctctgctccatatgccctaaacttatctgggaaggctggggaagtaggctctgggtccatgcctaactctgtaccgttttattcctcaaggcc

SEQ ID NO: 194575 - DNA, 120 bp, Artificial Sequence
  ENSG00000113108_16 (sequence is synthesized)
tatagcctgtcactccttgaagccttctctgcctgtccctccgatccttgtccaccgtctatttattgcccaatttattgtttatacggatgactgggaggcactgcaccacaacgtagg

SEQ ID NO: 194576 - DNA, 120 bp, Artificial Sequence
  ENSG00000113108_17 (sequence is synthesized)
accctggctcccctttccttgggtccttgtgttccttgcccctgtccaaccctggacagttggctctacctcagtaacactttatagcaaaatcagtgcaaataaaaatccctcagtgac

SEQ ID NO: 194577 - DNA, 120 bp, Artificial Sequence
  ENSG00000113108_18 (sequence is synthesized)
cagcctctggtgcacatccgtgtgtggggcgtggggagctccaagggccgtgacaggtgagtgaaaaccaggtatcctgagccccatccctgatgtccctactccatccctgctatatcc

SEQ ID NO: 194578 - DNA, 120 bp, Artificial Sequence
  ENSG00000113108_19 (sequence is synthesized)
ctagcctgactttccagcctcctgcaggctcctgcctctaaccagcttctaccccagccccatctctgcccctgctagggacttcgcttttgtggcaagtgacaaagatagctgtatgct

SEQ ID NO: 194579 - DNA, 120 bp, Artificial Sequence
  ENSG00000113108_20 (sequence is synthesized)
cctctgatgtggacccaggactgcttcccctgcctggtccagccctggttggggagggtgggcccagctcagcagggacagtttggggagagtccgagaggctgggctgattcccttctg

SEQ ID NO: 194580 - DNA, 120 bp, Artificial Sequence
  ENSG00000113108_21 (sequence is synthesized)
gcaaaatgaaaggcttggggttccatggtgttcaaaaatgcagctggacccatggtctgctttccagcccaggttctggattctgtcacatgttttgggttctgttacgttcttggctct

SEQ ID NO: 194581 - DNA, 120 bp, Artificial Sequence
  ENSG00000113108_22 (sequence is synthesized)
gtcccaggttcttaactgtcagtattttgagttttatcccttgttctaagctcttgtttgtagctacatgtttttcatattcttggtcctaacctatcatgttctagaccttggccatta

SEQ ID NO: 194582 - DNA, 120 bp, Artificial Sequence
  ENSG00000113108_23 (sequence is synthesized)
ggggatacctctctgtgtagggaccagggggcgaatgaacccggtctttacatgtgatgtcttcaagattgaggagcctggatcttcagcctaagaactgacccattttggggatggaga

SEQ ID NO: 194583 - DNA, 120 bp, Artificial Sequence
  ENSG00000113108_24 (sequence is synthesized)
atttctggtgctatattctgggtcttgcccctcatcctgtgcttatcaagttgtctaggcctcaccagtgtccctactgtaggaaatgtggtcctcttaacagctctgctctgtttcagt

SEQ ID NO: 194584 - DNA, 120 bp, Artificial Sequence
  ENSG00000113108_25 (sequence is synthesized)
aactctctgtcctggtatggtggggaatcctacatccagagcatggagccaggggctaaggtagtgacttgggcctgagggcattgggaggtcccaagggaaagacaagggtgggattgg

SEQ ID NO: 194585 - DNA, 120 bp, Artificial Sequence
  ENSG00000113108_26 (sequence is synthesized)
actgaacagaggtgatcaagggtgaagacagggagtatgtattgtggcacctgccaccctactccatccttattaattcctgtcccttcccccaacctgtcagtgctttgcagtccgctc

SEQ ID NO: 194586 - DNA, 120 bp, Artificial Sequence
  ENSG00000113108_27 (sequence is synthesized)
agatgcagaggacccaggcacggtaggtagagtgtgaggaggaggtctgagcccatgtgtggacctaggtctgctgttaaactgactaactcccactctacagggaacggaggggatctg

SEQ ID NO: 194587 - DNA, 120 bp, Artificial Sequence
  ENSG00000113119_0 (sequence is synthesized)
gttcccgccctgtgctgaggctgcgcagtcggtgccatcttctacgcccctgggagcgttgtggctgctgtttccttcggctttcctcctcctgctccaccatgtggagccgacggcagg

SEQ ID NO: 194588 - DNA, 120 bp, Artificial Sequence
  ENSG00000113119_1 (sequence is synthesized)
gccgcctcaggcccacggtctgcggggtggaggagctacggcgccgccggcgggagcgggaggcagcactgcggaaggcgcggagggagcagcagctggtcagcaagaggctgctgagaa

SEQ ID NO: 194589 - DNA, 120 bp, Artificial Sequence
  ENSG00000113119_2 (sequence is synthesized)
acgacgccccagaggaagctggagagggatgtgtggctgcgatcctcggggaaaccgaggtgcagcagttcctgcggcaagcccagcgggggacagaggaaaaggagagagagggggctc

SEQ ID NO: 194590 - DNA, 120 bp, Artificial Sequence
  ENSG00000113119_3 (sequence is synthesized)
tggtcagccttcgtcgaggcttgcagcaccctgaaacacagcaaaccttcatccggctggagggcagcatgcggaccctggtcgggctcctgaccagcaaccaggccctgctgcagcttg

SEQ ID NO: 194591 - DNA, 120 bp, Artificial Sequence
  ENSG00000113119_4 (sequence is synthesized)
aggcggctcggtgcctgcatgagctctctcactccgagcagtccactgttgctgaggcctgcctgccagccacttcttacctcctcacctacctctccagtcacagctcagacttcatag

SEQ ID NO: 194592 - DNA, 120 bp, Artificial Sequence
  ENSG00000113119_5 (sequence is synthesized)
agctgtgtctgtatacactgggtaacctgatcgtggagagtgaggctgtgagaaggcagctcctgccacagggcattgttccagccttggctgcctgcatccagtccccccatgtggctg

SEQ ID NO: 194593 - DNA, 120 bp, Artificial Sequence
  ENSG00000113119_6 (sequence is synthesized)
tgctggaagctctcggatatgccttgtcccagcttctacaggctgaggaagctccagagaagatcattccctccatcttggcctccactctccctcagcacatgctacaaatgttgcaac

SEQ ID NO: 194594 - DNA, 120 bp, Artificial Sequence
  ENSG00000113119_7 (sequence is synthesized)
tcattggccatggggctctgtctactctggggttgctgctgttggacttggctggggctgtccagaaaaccgaggatgcaggactggagctgctggcatgccccgtgcttcgatgtctaa

SEQ ID NO: 194595 - DNA, 120 bp, Artificial Sequence
  ENSG00000113119_8 (sequence is synthesized)
gcaacctgctaactgaggcagcagtggagactgtgggagggcaaatgcagctcagagatgagcgtgttgtggcagccttatttatccttctgcagttctttttccagaaacagcccagtc

SEQ ID NO: 194596 - DNA, 120 bp, Artificial Sequence
  ENSG00000113119_9 (sequence is synthesized)
tgctccctgagggcctttggctcctcaacaacctcactgcaaacagtcctagtttctgtacctccttgctctccctggatctgattgagcctctcttacagctgttgccagtatctaacg

SEQ ID NO: 194597 - DNA, 120 bp, Artificial Sequence
  ENSG00000113119_10 (sequence is synthesized)
tggtgagcgtaatggtgctcacagttctgtgcaatgttgcagaaaagggtcctgcttactgccagcggctgtggccagggcccctgcttcccgccttgctgcacacactagccttttctg

SEQ ID NO: 194598 - DNA, 120 bp, Artificial Sequence
  ENSG00000113119_11 (sequence is synthesized)
acactgaagtagtaggccagagtttggagctgctgcatctgctgttcctgtatcagccagaggctgttcaggtcttcctgcagcagtcagggctgcaagccctggaaaggcatcaggaag

SEQ ID NO: 194599 - DNA, 120 bp, Artificial Sequence
  ENSG00000113119_12 (sequence is synthesized)
aggcccagctccaggatcgtgtgtatgctctccagcagacagctcttcaagggtgatcttgtttctcaatgtcactcattcccctctctcttaacatcaagcttgtttgtccagtagagc

SEQ ID NO: 194600 - DNA, 120 bp, Artificial Sequence
  ENSG00000113119_13 (sequence is synthesized)
ctttggagatttaggaccataatgaggtctcatgttctctgctcccacacctaagccaagacctttgggtcccagctcctccccttccactcagcactatccaggcaggaggaccaaaag

SEQ ID NO: 194601 - DNA, 120 bp, Artificial Sequence
  ENSG00000113119_14 (sequence is synthesized)
ggactcagtgtggtctacttactctggggccctagaatccctgcccccccgccacccttcatgtttgcttcagcagctggtagcttttgatgagacagaataaagttttatttttatatt

SEQ ID NO: 194602 - DNA, 120 bp, Artificial Sequence
  ENSG00000113119_15 (sequence is synthesized)
caccctgaaacacagcaaaccttcatccggtcagtgtggatggtgtggtggagggaggagttggggctctgagggatggaccacaagctaagcagggctctggtactcactcacataggc

SEQ ID NO: 194603 - DNA, 120 bp, Artificial Sequence
  ENSG00000113119_16 (sequence is synthesized)
catgtttgcccttatgcctacagccatggctacacccatcatctccccaccctcttgtgagccgcaaggatagctgctccagcgtccccatcacctcccctccccatctccccacacgca

SEQ ID NO: 194604 - DNA, 120 bp, Artificial Sequence
  ENSG00000113119_17 (sequence is synthesized)
gcctggcatgaaacaggccaagcccagtgcttttgttgcctgttctcaggagctgtgtctgtatacactgggtaacctgatcgtggagagtgaggctgtgagaaggcagctcctgccaca

SEQ ID NO: 194605 - DNA, 120 bp, Artificial Sequence
  ENSG00000113119_18 (sequence is synthesized)
caaagatgaaaggatagagtccttttctttgaggtgctcacagcccggtgaagaagacagatgtcacaagggaaggaaacatgaggaacaagagaaactcctaagtctctcaaaaagagc

SEQ ID NO: 194606 - DNA, 120 bp, Artificial Sequence
  ENSG00000113119_19 (sequence is synthesized)
taacttcccagaggaaatgaggagcagaaacctgaagagagtgggaagctggagagggtgcagcagttcctgcggcaagcccagcgggggacagaggaaaaggagagagagggggctctg

SEQ ID NO: 194607 - DNA, 120 bp, Artificial Sequence
  ENSG00000113119_20 (sequence is synthesized)
tgcatctgctgttcctgtatcagccagaggtataggtttctggcccacatcctcagtcacccctgttctgaagccacacagtggctcccttcccatccagtcctaactatagttgtttct

SEQ ID NO: 194608 - DNA, 120 bp, Artificial Sequence
  ENSG00000113119_21 (sequence is synthesized)
ctgggcctggctaacctatataggttccatgtcagaaacttcatcctcttgttggggaatgcaccctctggagtaggctgacccatgaggctgtgggaattgagtcttaggacacagaga

SEQ ID NO: 194609 - DNA, 120 bp, Artificial Sequence
  ENSG00000113119_22 (sequence is synthesized)
aggtgtgggcggccgagggagcgcgggggtatatggcggtcggggataagttgagaccccaggctcggagccgcgggttctgggttgtggtcgtccttcccacgctcagccggctcctct

SEQ ID NO: 194610 - DNA, 120 bp, Artificial Sequence
  ENSG00000113119_23 (sequence is synthesized)
gttagagtgtaggttgcatggggagaatggctagaggagtaggttttgccaggctgagaggtttaaatatccttgaaagaaccctgtatgaaggcaggatagatattgttattctcattt

SEQ ID NO: 194611 - DNA, 120 bp, Artificial Sequence
  ENSG00000113119_24 (sequence is synthesized)
tcaggtgaggaaacttaggttcaggtcccatatggagtaagtggcaggtatggtattagaactcagttctgattctctgtccactccactgcaaggtagatgcttattagttgcattagt

SEQ ID NO: 194612 - DNA, 120 bp, Artificial Sequence
  ENSG00000113119_25 (sequence is synthesized)
gtgaatgacaagttctgaaggtgtgatattggaaggctcacaggtgaagtgggcagagagagacttaggacttgctttctgtgaaccgtgtgttctcctttccctgccctgaactccagg

SEQ ID NO: 194613 - DNA, 120 bp, Artificial Sequence
  ENSG00000113140_0 (sequence is synthesized)
agactgcccggagagcgcgctctgcctgccgcctgcctgcctgccactgagggttcccagcaccatgagggcctggatcttctttctcctttgcctggccgggagggccttggcagcccc

SEQ ID NO: 194614 - DNA, 120 bp, Artificial Sequence
  ENSG00000113140_1 (sequence is synthesized)
tcagcaagaagccctgcctgatgagacagaggtggtggaagaaactgtggcagaggtgactgaggtatctgtgggagctaatcctgtccaggtggaagtaggagaatttgatgatggtgc

SEQ ID NO: 194615 - DNA, 120 bp, Artificial Sequence
  ENSG00000113140_2 (sequence is synthesized)
agaggaaaccgaagaggaggtggtggcggaaaatccctgccagaaccaccactgcaaacacggcaaggtgtgcgagctggatgagaacaacacccccatgtgcgtgtgccaggaccccac

SEQ ID NO: 194616 - DNA, 120 bp, Artificial Sequence
  ENSG00000113140_3 (sequence is synthesized)
cagctgcccagcccccattggcgagtttgagaaggtgtgcagcaatgacaacaagaccttcgactcttcctgccacttctttgccacaaagtgcaccctggagggcaccaagaagggcca

SEQ ID NO: 194617 - DNA, 120 bp, Artificial Sequence
  ENSG00000113140_4 (sequence is synthesized)
caagctccacctggactacatcgggccttgcaaatacatccccccttgcctggactctgagctgaccgaattccccctgcgcatgcgggactggctcaagaacgtcctggtcaccctgta

SEQ ID NO: 194618 - DNA, 120 bp, Artificial Sequence
  ENSG00000113140_5 (sequence is synthesized)
tgagagggatgaggacaacaaccttctgactgagaagcagaagctgcgggtgaagaagatccatgagaatgagaagcgcctggaggcaggagaccaccccgtggagctgctggcccggga

SEQ ID NO: 194619 - DNA, 120 bp, Artificial Sequence
  ENSG00000113140_6 (sequence is synthesized)
cttcgagaagaactataacatgtacatcttccctgtacactggcagttcggccagctggaccagcaccccattgacgggtacctctcccacaccgagctggctccactgcgtgctcccct

SEQ ID NO: 194620 - DNA, 120 bp, Artificial Sequence
  ENSG00000113140_7 (sequence is synthesized)
catccccatggagcattgcaccacccgctttttcgagacctgtgacctggacaatgacaagtacatcgccctggatgagtgggccggctgcttcggcatcaagcagaaggatatcgacaa

SEQ ID NO: 194621 - DNA, 120 bp, Artificial Sequence
  ENSG00000113140_8 (sequence is synthesized)
ggatcttgtgatctaaatccactccttccacagtaccggattctctctttaaccctccccttcgtgtttcccccaatgtttaaaatgtttggatggtttgttgttctgcctggagacaag

SEQ ID NO: 194622 - DNA, 120 bp, Artificial Sequence
  ENSG00000113140_9 (sequence is synthesized)
gtgctaacatagatttaagtgaatacattaacggtgctaaaaatgaaaattctaacccaagacatgacattcttagctgtaacttaactattaaggccttttccacacgcattaatagtc

SEQ ID NO: 194623 - DNA, 120 bp, Artificial Sequence
  ENSG00000113140_10 (sequence is synthesized)
ccatttttctcttgccatttgtagctttgcccattgtcttattggcacatgggtggacacggatctgctgggctctgccttaaacacacattgcagcttcaacttttctctttagtgttc

SEQ ID NO: 194624 - DNA, 120 bp, Artificial Sequence
  ENSG00000113140_11 (sequence is synthesized)
tgtttgaaactaatacttaccgagtcagactttgtgttcatttcatttcagggtcttggctgcctgtgggcttccccaggtggcctggaggtgggcaaagggaagtaacagacacacgat

SEQ ID NO: 194625 - DNA, 120 bp, Artificial Sequence
  ENSG00000113140_12 (sequence is synthesized)
gttgtcaaggatggttttgggactagaggctcagtggtgggagagatccctgcagaacccaccaaccagaacgtggtttgcctgaggctgtaactgagagaaagattctggggctgtgtt

SEQ ID NO: 194626 - DNA, 120 bp, Artificial Sequence
  ENSG00000113140_13 (sequence is synthesized)
atgaaaatatagacattctcacataagcccagttcatcaccatttcctcctttacctttcagtgcagtttcttttcacattaggctgttggttcaaacttttgggagcacggactgtcag

SEQ ID NO: 194627 - DNA, 120 bp, Artificial Sequence
  ENSG00000113140_14 (sequence is synthesized)
caggctgtttcagccaggaaggccaaaatcaagagtgagatgtagaaagttgtaaaatagaaaaagtggagttggtgaatcggttgttctttcctcacatttggatgattgtcataaggt

SEQ ID NO: 194628 - DNA, 120 bp, Artificial Sequence
  ENSG00000113140_15 (sequence is synthesized)
ttttagcatgttcctccttttcttcaccctccccttttttcttctattaatcaagagaaacttcaaagttaatgggatggtcggatctcacaggctgagaactcgttcacctccaagcat

SEQ ID NO: 194629 - DNA, 120 bp, Artificial Sequence
  ENSG00000113140_16 (sequence is synthesized)
ttcatgaaaaagctgcttcttattaatcatacaaactctcaccatgatgtgaagagtttcacaaatccttcaaaataaaaagtaatgacttagaaactgccttcctgggtgatttgcatg

SEQ ID NO: 194630 - DNA, 120 bp, Artificial Sequence
  ENSG00000113140_17 (sequence is synthesized)
tgtcttagtcttagtcaccttattatcctgacacaaaaacacatgagcatacatgtctacacatgactacacaaatgcaaacctttgcaaacacattatgcttttgcacacacacacctg

SEQ ID NO: 194631 - DNA, 120 bp, Artificial Sequence
  ENSG00000113140_18 (sequence is synthesized)
tacacacacaccggcatgtttatacacagggagtgtatggttcctgtaagcactaagttagctgttttcatttaatgacctgtggtttaacccttttgatcactaccaccattatcagca

SEQ ID NO: 194632 - DNA, 120 bp, Artificial Sequence
  ENSG00000113140_19 (sequence is synthesized)
ccagactgagcagctatatccttttattaatcatggtcattcattcattcattcattcacaaaatatttatgatgtatttactctgcaccaggtcccatgccaagcactggggacacagt

SEQ ID NO: 194633 - DNA, 120 bp, Artificial Sequence
  ENSG00000113140_20 (sequence is synthesized)
tatggcaaagtagacaaagcatttgttcatttggagcttagagtccaggaggaatacattagataatgacacaatcaaatataaattgcaagatgtcacaggtgtgatgaagggagagta

SEQ ID NO: 194634 - DNA, 120 bp, Artificial Sequence
  ENSG00000113140_21 (sequence is synthesized)
ggagagaccatgagtatgtgtaacaggaggacacagcattattctagtgctgtactgttccgtacggcagccactacccacatgtaactttttaagatttaaatttaaattagttaacat

SEQ ID NO: 194635 - DNA, 120 bp, Artificial Sequence
  ENSG00000113140_22 (sequence is synthesized)
tcaaaacgcagctccccaatcacactagcaacatttcaagtgcttgagagccatgcatgattagtggttaccctattgaataggtcagaagtagaatcttttcatcatcacagaaagttc

SEQ ID NO: 194636 - DNA, 120 bp, Artificial Sequence
  ENSG00000113140_23 (sequence is synthesized)
tattggacagtgctcttctagatcatcataagactacagagcacttttcaaagctcatgcatgttcatcatgttagtgtcgtattttgagctggggttttgagactccccttagagatag

SEQ ID NO: 194637 - DNA, 120 bp, Artificial Sequence
  ENSG00000113140_24 (sequence is synthesized)
agaaacagacccaagaaatgtgctcaattgcaatgggccacatacctagatctccagatgtcatttcccctctcttattttaagttatgttaagattactaaaacaataaaagctcctaa

SEQ ID NO: 194638 - DNA, 120 bp, Artificial Sequence
  ENSG00000113140_25 (sequence is synthesized)
aaaatcaaactgtattctggtgttctcttctacacagtgggagggcgagcagtaggagagattggcccatttggtgctggccatttgaggaatgcaagcccagcactagtctcataatct

SEQ ID NO: 194639 - DNA, 120 bp, Artificial Sequence
  ENSG00000113140_26 (sequence is synthesized)
ctaggaatctgtagagagaggaattgaagtaaatttcagcattggctcattcagtcattcggcgacattcatcaggtacctgcaatgtgttaggggatcttatgagtaggcagcgtgcgt

SEQ ID NO: 194640 - DNA, 120 bp, Artificial Sequence
  ENSG00000113140_27 (sequence is synthesized)
gatccttgctcccctggagctttctaacattctagcaggcagaccacacataaatttgcaatactgtttctgataaaaacgtgctgtaaaggaaataaagcagagaactatcatggaaaa

SEQ ID NO: 194641 - DNA, 120 bp, Artificial Sequence
  ENSG00000113140_28 (sequence is synthesized)
gagtggtttcctgttgcctgtctctaaacccctccacattcccgcggtccttcagactgcccggagagcgcgctctgcctgccgcctgcctgcctgccactgaggtatctgtgggagcta

SEQ ID NO: 194642 - DNA, 120 bp, Artificial Sequence
  ENSG00000113140_29 (sequence is synthesized)
agctatcagctgccacatcgacatagcctagagcaaagagggggagggaggagaagaagggggttgcctggagaaggaatcaacttttgaaactttctccaagtcccacccaccagaagg

SEQ ID NO: 194643 - DNA, 120 bp, Artificial Sequence
  ENSG00000113140_30 (sequence is synthesized)
ctgagaagcagaagctgcggtctctactccctcaggtgaagaagatccatgagaatgagaagcgcctggaggcaggagaccaccccgtggagctgctggcccgggacttcgagaagaact

SEQ ID NO: 194644 - DNA, 120 bp, Artificial Sequence
  ENSG00000113140_31 (sequence is synthesized)
gtttcctgttgcctgtctctaaacccctccacattcccgcggtccttcagactgcccggagagcgcgctctgcctgccgcctgcctgcctgccactgaggccttggtcttctcatctgta

SEQ ID NO: 194645 - DNA, 120 bp, Artificial Sequence
  ENSG00000113140_32 (sequence is synthesized)
ctattgggcagaaatatgtgacttgagcccccagtggggtgctggattatgaaaacaccctgaaaatgataaatgtatgcatcatcacagactaaagaaatacaaaggagggagtttttg

SEQ ID NO: 194646 - DNA, 120 bp, Artificial Sequence
  ENSG00000113140_33 (sequence is synthesized)
caggactcagggctgtccaaagcccagagtgggggccacagtcaaggactgtcagccctgagatctgtccaggtaggatgggggtggatgtgctagtccaggtgatgctaactcccttgt

SEQ ID NO: 194647 - DNA, 120 bp, Artificial Sequence
  ENSG00000113140_34 (sequence is synthesized)
gcctggggcacgaggacagcctacatgaggctccttccagcagaaatgcagggtggggtcctcagtgggctatgaaggaaacacggctttgacttaacaagtgggaaactgtggcactca

SEQ ID NO: 194648 - DNA, 120 bp, Artificial Sequence
  ENSG00000113140_35 (sequence is synthesized)
gtcccctgggatctgggcaagatcggtttccaggccatccatgtgtgtggtaggaaggagagttctccagctggaaatgggcttctcccctcatagctctttgccctgagtccaaagctg

SEQ ID NO: 194649 - DNA, 120 bp, Artificial Sequence
  ENSG00000113140_36 (sequence is synthesized)
agtttcccagtcccacggaggtcgctgatcacatctggtcaccgaaatctcccattgcttctgtatcagcccgtgccccacagagaagtagaactgagagaagagatcaggaacttgcac

SEQ ID NO: 194650 - DNA, 120 bp, Artificial Sequence
  ENSG00000113140_37 (sequence is synthesized)
actcataagctcattctatttcacacagtccaaggaaacgaggtcctgaggaaatgcaacctgacataatccgtaccatgctatccatgcgttagtgccctgggagagaaatgacctagg

SEQ ID NO: 194651 - DNA, 120 bp, Artificial Sequence
  ENSG00000113141_0 (sequence is synthesized)
gcactgtgggaaagagcttgtcgctgcggtgttgctgttggagactcgattgttggtgacagcgaaagaacgataacaaaatgccggagcgagatagtgagccgttctccaaccctttgg

SEQ ID NO: 194652 - DNA, 120 bp, Artificial Sequence
  ENSG00000113141_1 (sequence is synthesized)
cccccgatggccacgatgtggatgatcctcactccttccaccaatcaaaactcaccaatgaagacttcaggaaacttctcatgacccccagggctgcacctacctctgcaccaccttcta

SEQ ID NO: 194653 - DNA, 120 bp, Artificial Sequence
  ENSG00000113141_2 (sequence is synthesized)
agtcacgtcaccatgagatgccaagggagtacaatgaggatgaagacccagctgcacgaaggaggaaaaagaaaagttattatgccaagctacgccaacaagaaattgagagagagagag

SEQ ID NO: 194654 - DNA, 120 bp, Artificial Sequence
  ENSG00000113141_3 (sequence is synthesized)
agctagcagagaagtaccgggatcgtgccaaggaacggagagatggagtgaacaaagattatgaagaaaccgagcttatcagcaccacagctaactatagggctgttggccccactgctg

SEQ ID NO: 194655 - DNA, 120 bp, Artificial Sequence
  ENSG00000113141_4 (sequence is synthesized)
aggcggacaaatcagctgcagagaagagaagacagttgatccaggagtccaaattcttgggtggtgacatggaacacacccatttggtgaaaggcttggattttgctctgcttcaaaagg

SEQ ID NO: 194656 - DNA, 120 bp, Artificial Sequence
  ENSG00000113141_5 (sequence is synthesized)
tacgagctgagattgccagcaaagagaaagaggaagaggaactgatggaaaagccccagaaagaaaccaagaaagatgaggatcctgaaaataaaattgaatttaaaacacgtctgggcc

SEQ ID NO: 194657 - DNA, 120 bp, Artificial Sequence
  ENSG00000113141_6 (sequence is synthesized)
gcaatgtttaccgaatgctttttaagagcaaagcatatgagcggaatgagttgttcctgccgggccgcatggcctatgtggtagacctggatgatgagtatgctgacacagatatcccca

SEQ ID NO: 194658 - DNA, 120 bp, Artificial Sequence
  ENSG00000113141_7 (sequence is synthesized)
tgaggcagggaacccgtaacaagaagcttaagaagaaggataaagggaagctggaagagaagaaacctcctgaggctgacatgaatatttttgaagacattggggattacgtaccctcca

SEQ ID NO: 194659 - DNA, 120 bp, Artificial Sequence
  ENSG00000113141_8 (sequence is synthesized)
caaccaagacacctcgggacaaggagcgggagagatatcgggaacgggagcgtgatcgggaaagagacagagaccgtgaccgagagcgagagcgagaacgagatcgggaacgagagcgag

SEQ ID NO: 194660 - DNA, 120 bp, Artificial Sequence
  ENSG00000113141_9 (sequence is synthesized)
agcgggaccgagagagagaagaggaaaagaagagacacagctactttgagaagccaaaagtagatgatgagcccatggacgttgacaaaggacctgggtctaccaaggagttgatcaagt

SEQ ID NO: 194661 - DNA, 120 bp, Artificial Sequence
  ENSG00000113141_10 (sequence is synthesized)
ccatcaatgaaaagtttgctgggtctgctggctgggaaggcacagaatcgctgaagaagccagaagacaaaaagcagctgggagatttctttggcatgtccaacagttatgcagagtgct

SEQ ID NO: 194662 - DNA, 120 bp, Artificial Sequence
  ENSG00000113141_11 (sequence is synthesized)
acccagccacgatggatgacatggctgtggatagtgatgaggaggtggattatagcaaaatggaccagggtaacaagaaggggcccttaggccgttgggactttgatacccaggaagaat

SEQ ID NO: 194663 - DNA, 120 bp, Artificial Sequence
  ENSG00000113141_12 (sequence is synthesized)
acagcgagtatatgaacaacaaagaagctttgcccaaggctgcattccagtatggtatcaaaatgtctgaagggcggaaaaccaggcgcttcaaggaaaccaatgacaaagcagagcttg

SEQ ID NO: 194664 - DNA, 120 bp, Artificial Sequence
  ENSG00000113141_13 (sequence is synthesized)
atcgccagtggaagaagattagtgcaatcattgagaagaggaagaagatggaagctgatggggttgaagtcaaaagaccaaaatactaatcactagttacaaccagagatgctccacaag

SEQ ID NO: 194665 - DNA, 120 bp, Artificial Sequence
  ENSG00000113141_14 (sequence is synthesized)
gatatgctccccactgttttctttctacaatttccaaaggttgcaagatgtttttttgtggatgaatataaaattttattgtgtaattacttggttccattaaaattggttaacttgcta

SEQ ID NO: 194666 - DNA, 83 bp, Artificial Sequence
  ENSG00000113141_15 (sequence is synthesized)
atgccggagcgagatagtgagccgttctccaaccctttggcccccgatggccacgatgtggatgatcctcactccttccacca

SEQ ID NO: 194667 - DNA, 120 bp, Artificial Sequence
  ENSG00000113141_16 (sequence is synthesized)
gcttcttgtagtttcctatttcagcacttattacattgtgttgacactgtcgctgttctaacttttgttctgtattgttcactactatatctcaaatttttgcataggatctgacacgta

SEQ ID NO: 194668 - DNA, 120 bp, Artificial Sequence
  ENSG00000113141_17 (sequence is synthesized)
cgtcaattttttttgtcaggtgagccgttctccaaccctttggcccccgatggccacgatgtggatgatcctcactccttccaccaatcaaaactcaccaatgaagacttcaggaaactt

SEQ ID NO: 194669 - DNA, 120 bp, Artificial Sequence
  ENSG00000113141_18 (sequence is synthesized)
acatggctgtggatagtgatgaggaggtggattatagcaaaatggaccaggtatgtagttagaaggatggtgggcgcctttgggcagttattatttgttttacatgtatctccttcccca

SEQ ID NO: 194670 - DNA, 120 bp, Artificial Sequence
  ENSG00000113141_19 (sequence is synthesized)
tttggcatgtccaacagttatgcagagtgctacccagccacgtatgtgaaacctggttaaggaagggaggctgggatgattgggaaacaagttgggggtgaaatggaaatttgattcgct

SEQ ID NO: 194671 - DNA, 87 bp, Artificial Sequence
  ENSG00000113141_20 (sequence is synthesized)
ccaaaagtgcgaaggctacttcttacttggatgaactattttattaggctctaagtgggaggtctagggggtggtcattcctatgca

SEQ ID NO: 194672 - DNA, 120 bp, Artificial Sequence
  ENSG00000113141_21 (sequence is synthesized)
gctctaagtgggaggtctagggggtggtcattcctatgcagataacctcttagtcgggtaggtttccagatgaagcatagggtcagggtatgcaacatctgtttaactcttgcttctcct

SEQ ID NO: 194673 - DNA, 120 bp, Artificial Sequence
  ENSG00000113141_22 (sequence is synthesized)
caagatcaaatgacatagggtcaaaaatctattttttacttcctatagcaaagtgccaggctttgattcccatggtaggcagtaagcaagcatcaatgcataagtagaaagggcagaaaa

SEQ ID NO: 194674 - DNA, 120 bp, Artificial Sequence
  ENSG00000113141_23 (sequence is synthesized)
ttgaagttttcctctaagtcttaagcaaaattaaaaagaaaaaaaccactaatgccactaatagtgaagaagtctgtgttcttcccctgagttcactgtattgaaatagcatggtttaat

SEQ ID NO: 194675 - DNA, 120 bp, Artificial Sequence
  ENSG00000113141_24 (sequence is synthesized)
cttggagccttgtttaatcctgcctctactgtttattagttttgtgaacttgccaagttctttcactgtttatgcctcagtttcctcatcaggaaaatggagagaaatatagttccctct

SEQ ID NO: 194676 - DNA, 120 bp, Artificial Sequence
  ENSG00000113141_25 (sequence is synthesized)
tcatagattttatgagaattaagtgagatatgcatttagtgtacagaataatgcctgtcacatagtaagtatgtaataagcatttattattacttatcagggtatgatttatgaattgtg

SEQ ID NO: 194677 - DNA, 120 bp, Artificial Sequence
  ENSG00000113141_26 (sequence is synthesized)
gaacctgggattatgggagagtctggcttcaatcaagggctgaaattccatttccactgacatctcttccttccccatcccccgattctgtcctgcaacagggtaacaagaaggggccct

SEQ ID NO: 194678 - DNA, 120 bp, Artificial Sequence
  ENSG00000113141_27 (sequence is synthesized)
ggactggtgggaattgcttagtgtattgatcttatactgacccatttctccttccattgcagggttgaagtcaaaagaccaaaatactaatcactagttacaaccagagatgctccacaa

SEQ ID NO: 194679 - DNA, 120 bp, Artificial Sequence
  ENSG00000113141_28 (sequence is synthesized)
atacttatgttgcccggaatacaacgcatcatataaccctgcgaatataaatttcttcatggaaacaagatcaacagcaaggctaaagtccgagttctagtttctccacgggtttctgca

SEQ ID NO: 194680 - DNA, 120 bp, Artificial Sequence
  ENSG00000113141_29 (sequence is synthesized)
cgaccttgggcggtcccttctcttctcaaacccttgttcccctaccggagccccagacccctggcgtcccgcactcaccgtagcgggcccagagcttgggctgcacatcggagcattcgc

SEQ ID NO: 194681 - DNA, 120 bp, Artificial Sequence
  ENSG00000113161_0 (sequence is synthesized)
ccttccgctccgcgactgcgttaactggagccaggctgagcgtcggcgccggggttcggtggcctctagtgagatctggaggatccaaggattctgtagctacaatgttgtcaagacttt

SEQ ID NO: 194682 - DNA, 120 bp, Artificial Sequence
  ENSG00000113161_1 (sequence is synthesized)
ttcgaatgcatggcctctttgtggcctcccatccctgggaagtcatagtggggacagtgacactgaccatctgcatgatgtccatgaacatgtttactggtaacaataagatctgtggtt

SEQ ID NO: 194683 - DNA, 120 bp, Artificial Sequence
  ENSG00000113161_2 (sequence is synthesized)
ggaattatgaatgtccaaagtttgaagaggatgttttgagcagtgacattataattctgacaataacacgatgcatagccatcctgtatatttacttccagttccagaatttacgtcaac

SEQ ID NO: 194684 - DNA, 120 bp, Artificial Sequence
  ENSG00000113161_3 (sequence is synthesized)
ttggatcaaaatatattttgggtattgctggccttttcacaattttctcaagttttgtattcagtacagttgtcattcacttcttagacaaagaattgacaggcttgaatgaagctttgc

SEQ ID NO: 194685 - DNA, 120 bp, Artificial Sequence
  ENSG00000113161_4 (sequence is synthesized)
cctttttcctacttttgattgacctttccagagcaagcacattagcaaagtttgccctcagttccaactcacaggatgaagtaagggaaaatattgctcgtggaatggcaattttaggtc

SEQ ID NO: 194686 - DNA, 120 bp, Artificial Sequence
  ENSG00000113161_5 (sequence is synthesized)
ctacgtttaccctcgatgctcttgttgaatgtcttgtgattggagttggtaccatgtcaggggtacgtcagcttgaaattatgtgctgctttggctgcatgtcagttcttgccaactact

SEQ ID NO: 194687 - DNA, 120 bp, Artificial Sequence
  ENSG00000113161_6 (sequence is synthesized)
tcgtgttcatgactttcttcccagcttgtgtgtccttggtattagagctttctcgggaaagccgcgagggtcgtccaatttggcagctcagccattttgcccgagttttagaagaagaag

SEQ ID NO: 194688 - DNA, 120 bp, Artificial Sequence
  ENSG00000113161_7 (sequence is synthesized)
aaaataagccgaatcctgtaactcagagggtcaagatgattatgtctctaggcttggttcttgttcatgctcacagtcgctggatagctgatccttctcctcaaaacagtacagcagata

SEQ ID NO: 194689 - DNA, 120 bp, Artificial Sequence
  ENSG00000113161_8 (sequence is synthesized)
cttctaaggtttcattaggactggatgaaaatgtgtccaagagaattgaaccaagtgtttccctctggcagttttatctctctaaaatgatcagcatggatattgaacaagttattaccc

SEQ ID NO: 194690 - DNA, 120 bp, Artificial Sequence
  ENSG00000113161_9 (sequence is synthesized)
taagtttagctctccttctggctgtcaagtacatcttctttgaacaaacagagacagaatctacactctcattaaaaaaccctatcacatctcctgtagtgacacaaaagaaagtcccag

SEQ ID NO: 194691 - DNA, 120 bp, Artificial Sequence
  ENSG00000113161_10 (sequence is synthesized)
acaattgttgtagacgtgaacctatgctggtcagaaataaccagaaatgtgattcagtagaggaagagacagggataaaccgagaaagaaaagttgaggttataaaacccttagtggctg

SEQ ID NO: 194692 - DNA, 120 bp, Artificial Sequence
  ENSG00000113161_11 (sequence is synthesized)
aaacagataccccaaacagagctacatttgtggttggtaactcctccttactcgatacttcatcagtactggtgacacaggaacctgaaattgaacttcccagggaacctcggcctaatg

SEQ ID NO: 194693 - DNA, 120 bp, Artificial Sequence
  ENSG00000113161_12 (sequence is synthesized)
aagaatgtctacagatacttgggaatgcagagaaaggtgcaaaattccttagtgatgctgagatcatccagttagtcaatgctaagcatatcccagcctacaagttggaaactctgatgg

SEQ ID NO: 194694 - DNA, 120 bp, Artificial Sequence
  ENSG00000113161_13 (sequence is synthesized)
aaactcatgagcgtggtgtatctattcgccgacagttactttccaagaagctttcagaaccttcttctctccagtacctaccttacagggattataattactccttggtgatgggagctt

SEQ ID NO: 194695 - DNA, 120 bp, Artificial Sequence
  ENSG00000113161_14 (sequence is synthesized)
gttgtgagaatgttattggatatatgcccatccctgttggagtggcaggacccctttgcttagatgaaaaagaatttcaggttccaatggcaacaacagaaggttgtcttgtggccagca

SEQ ID NO: 194696 - DNA, 120 bp, Artificial Sequence
  ENSG00000113161_15 (sequence is synthesized)
ccaatagaggctgcagagcaataggtcttggtggaggtgccagcagccgagtccttgcagatgggatgactcgtggcccagttgtgcgtcttccacgtgcttgtgactctgcagaagtga

SEQ ID NO: 194697 - DNA, 120 bp, Artificial Sequence
  ENSG00000113161_16 (sequence is synthesized)
aagcctggctcgaaacatctgaagggttcgcagtgataaaggaggcatttgacagcactagcagatttgcacgtctacagaaacttcatacaagtatagctggacgcaacctttatatcc

SEQ ID NO: 194698 - DNA, 120 bp, Artificial Sequence
  ENSG00000113161_17 (sequence is synthesized)
gtttccagtccaggtcaggggatgccatggggatgaacatgatttcaaagggtacagagaaagcactttcaaaacttcacgagtatttccctgaaatgcagattctagccgttagtggta

SEQ ID NO: 194699 - DNA, 120 bp, Artificial Sequence
  ENSG00000113161_18 (sequence is synthesized)
ttgtcagagaagtattaaagactaccacagaggctatgattgaggtcaacattaacaagaatttagtgggctctgccatggctgggagcataggaggctacaacgcccatgcagcaaaca

SEQ ID NO: 194700 - DNA, 120 bp, Artificial Sequence
  ENSG00000113161_19 (sequence is synthesized)
ttgtcaccgccatctacattgcctgtggacaggatgcagcacagaatgttggtagttcaaactgtattactttaatggaagcaagtggtcccacaaatgaagatttatatatcagctgca

SEQ ID NO: 194701 - DNA, 120 bp, Artificial Sequence
  ENSG00000113161_20 (sequence is synthesized)
ccatgccatctatagagataggaacggtgggtggtgggaccaacctactacctcagcaagcctgtttgcagatgctaggtgttcaaggagcatgcaaagataatcctggggaaaatgccc

SEQ ID NO: 194702 - DNA, 120 bp, Artificial Sequence
  ENSG00000113161_21 (sequence is synthesized)
ggcagcttgcccgaattgtgtgtgggaccgtaatggctggggaattgtcacttatggcagcattggcagcaggacatcttgtcaaaagtcacatgattcacaacaggtcgaagatcaatt

SEQ ID NO: 194703 - DNA, 120 bp, Artificial Sequence
  ENSG00000113161_22 (sequence is synthesized)
tacaagacctccaaggagcttgcaccaagaagacagcctgaatagcccgacagttctgaactggaacatgggcattgggttctaaaggactaacataaaatctgtgaattaaaaaagctc

SEQ ID NO: 194704 - DNA, 120 bp, Artificial Sequence
  ENSG00000113161_23 (sequence is synthesized)
aatgcattgtcttgtggaggatgaatagatgtgatcactgagacagccacttggtttttggctctttcagagaggtctcaggttctttccatgcagactcctcagatctgaacacagttt

SEQ ID NO: 194705 - DNA, 120 bp, Artificial Sequence
  ENSG00000113161_24 (sequence is synthesized)
agtgctttacatgctgtgctctttgaagagatttcaacaagaatattgtatgttaaagcatcagagatggtaatctacagctcacctctgaaggcaaatataagctgggaaaaaagtttt

SEQ ID NO: 194706 - DNA, 120 bp, Artificial Sequence
  ENSG00000113161_25 (sequence is synthesized)
gatgaaattcttgaagttcatggtgatcagtgcaattgaccttctccctcactcctgccagttgaaaatggatttttaaattatactgtagctgatgaaactcctgattttgtagttaat

SEQ ID NO: 194707 - DNA, 120 bp, Artificial Sequence
  ENSG00000113161_26 (sequence is synthesized)
ttattaagtctgggatgtagaacttcaagaagtaagagctaagttctaagttcatgtttgtaaattaatacttcatttggtgctggtctattttgattttggggggtaatcagcattatt

SEQ ID NO: 194708 - DNA, 120 bp, Artificial Sequence
  ENSG00000113161_27 (sequence is synthesized)
cttcagaaggggacctgttttcttcaagggaagaaacactcttattcccaaactacagaataatgtgttaaacatgctaaatagttctatcaggaaaacaaatcactgtatttatctccg

SEQ ID NO: 194709 - DNA, 120 bp, Artificial Sequence
  ENSG00000113161_28 (sequence is synthesized)
caggctatttgttcagagaggccttttgtttaaatataaatgtttaaatataaatgtttgtctggattggctataacatgtctttcagcattaggcttttaagaaacacagggttttgta

SEQ ID NO: 194710 - DNA, 120 bp, Artificial Sequence
  ENSG00000113161_29 (sequence is synthesized)
ttctttactaaagatatcagagctcttaatgttgcttagatgagggtgactgtcaagtacaagcaagactgggaccttagaaatcattgtagaaacacagttttgaaagaaaaataccat

SEQ ID NO: 194711 - DNA, 120 bp, Artificial Sequence
  ENSG00000113161_30 (sequence is synthesized)
gtctctaagccaactttaattgcttaaaagacatttttatttagttgaaaaatctagttttttttgtaaactgtatcaaatctgtatatgttgtaataaaacttatgctagtttattgga

SEQ ID NO: 194712 - DNA, 120 bp, Artificial Sequence
  ENSG00000113161_31 (sequence is synthesized)
agtgttcaagaaataaaaatcaacttgtgtactgataaaatactctagcctgggccagagaagataatgttctttaatgttgtccaggaaaccctggcttgcttgccgagcctaatgaaa

SEQ ID NO: 194713 - DNA, 120 bp, Artificial Sequence
  ENSG00000113161_32 (sequence is synthesized)
gggaaagtcagctttcagagccagtgaaggagccacgtgaatggccctagaactgtgcctagttcctgtggccaggaggttggtgactgaaacattcacacagggctctttgatggaccc

SEQ ID NO: 194714 - DNA, 120 bp, Artificial Sequence
  ENSG00000113161_33 (sequence is synthesized)
acgaacgctcttagctttctcagggggtcagcagagttattgaatcttaattttttttaatgtacaagttttgtataaataataaagaactccttattttgtattacatctaatgcttca

SEQ ID NO: 194715 - DNA, 120 bp, Artificial Sequence
  ENSG00000113161_34 (sequence is synthesized)
agtgttgctcttggaaagctgatgatgtctcttgtagaagatggactctgaaaaacattccaggaaaccatggcagcatggagagcctcttagtgattgtgtctgcattgttattgtgga

SEQ ID NO: 194716 - DNA, 120 bp, Artificial Sequence
  ENSG00000113161_35 (sequence is synthesized)
agatttaccttttctgttgtacgtaaagcttaaattgcttttgttgtgactttttagccagtgactttttctgagcttttcatggaagtggcagtgaaaaatatgttgagtgttcatttt

SEQ ID NO: 194717 - DNA, 120 bp, Artificial Sequence
  ENSG00000113161_36 (sequence is synthesized)
agtgactgtaattaatatcttgctggattaatgttttgtacaattactaaattgtatacattttgttatagaatacttttttctagtttcagtaaataatgaaaaggaagttaataccaa

SEQ ID NO: 194718 - DNA, 120 bp, Artificial Sequence
  ENSG00000113161_37 (sequence is synthesized)
ctttctttaatccagtagacaatgagaaacgctgatttgggtctatggcataataggaagtagtatgccacatactgcatgtgggagttctgcaggacagattgggaagtgcatgcgtgt

SEQ ID NO: 194719 - DNA, 120 bp, Artificial Sequence
  ENSG00000113161_38 (sequence is synthesized)
aagactgggaagaccagttaggagaggctattgcactgttttaagtaagacataataaagccctgcaccaggcggagagcagaaggaacgcacagaagacgcaggagaggcacatttcag

SEQ ID NO: 194720 - DNA, 84 bp, Artificial Sequence
  ENSG00000113161_39 (sequence is synthesized)
tttttattgcagcattgcataaatactgtcaacttaatttgcaggagctatcctgtagcctgcttgtgacatttgcaactgctg

SEQ ID NO: 194721 - DNA, 120 bp, Artificial Sequence
  ENSG00000113161_40 (sequence is synthesized)
ttgcaactgctgatgaaggtggacgattgaattctatggcatgatccaaggattctgtagctacaatgttgtcaagactttttcgaatgcatggcctctttgtggcctcccatccctggg

SEQ ID NO: 194722 - DNA, 120 bp, Artificial Sequence
  ENSG00000113161_41 (sequence is synthesized)
tggccagcaccaatagaggctgcagagcaataggtgtaagttggcatttatatatttgccagtttaaaaatacatcataagtaaggcaatgagaagagttttaaggacaattagtgatac

SEQ ID NO: 194723 - DNA, 120 bp, Artificial Sequence
  ENSG00000113161_42 (sequence is synthesized)
ggaccaacctactacctcagcaagcctgtttgcaggtatgatgtatcaggcatagagtccacaagcctagttctgactctctgggtttctctttctatctgagactatgtatcactcacc

SEQ ID NO: 194724 - DNA, 120 bp, Artificial Sequence
  ENSG00000113161_43 (sequence is synthesized)
tctattttaattggtcttttccaaactcttttgtcatatcagcctaatccattgtgtccaaataagcatgtttaagcttatgcttagataagaaagtagatgaagagagcaaatgaatgt

SEQ ID NO: 194725 - DNA, 120 bp, Artificial Sequence
  ENSG00000113161_44 (sequence is synthesized)
aaggcttggcatcacctctaagttgctaattctatttccagtaagtggcaaggagcttaatgtactaatattttcatgttttgtccacctgcaggaagacaaatatatccttgtgatata

SEQ ID NO: 194726 - DNA, 120 bp, Artificial Sequence
  ENSG00000113161_45 (sequence is synthesized)
agaacagttaatttctgcagtaggaggaggtcgatgtactccattcttaagtagtcgtttgaaatatttcaggatttgaggatattccttcttagacatggtcctgcagagtcgtaggaa

SEQ ID NO: 194727 - DNA, 120 bp, Artificial Sequence
  ENSG00000113161_46 (sequence is synthesized)
ttgcattaaatgaattattttgcagaggtatcttttaattaaaaactacagtgatttaatttaaaaattacattattttagcttagcattgtttgtattaaatggtttataacatgaaat

SEQ ID NO: 194728 - DNA, 120 bp, Artificial Sequence
  ENSG00000113163_0 (sequence is synthesized)
aggcaggaagatggcggcggtagcggaggtgtgagtggacgcgggactcagcggccggattttctcttcccttcttttcccttttccttccctatttgaaattggcatcgagggggctaa

SEQ ID NO: 194729 - DNA, 120 bp, Artificial Sequence
  ENSG00000113163_1 (sequence is synthesized)
gttcgggtggcagcgccgggcgcaacgcaggggtcacggcgacggcggcggcggctgacggctggaagggtaggcttccttcaccgctcgtcctccttcctcgctccgctcggtgtcagg

SEQ ID NO: 194730 - DNA, 120 bp, Artificial Sequence
  ENSG00000113163_2 (sequence is synthesized)
cgcggcggcggcgcggcgggcggacttcgtccctcctcctgctcccccccacaccggagcgggcactcttcgcttcgccatcccccgacccttcaccccgaggactgggcgcctcctccg

SEQ ID NO: 194731 - DNA, 120 bp, Artificial Sequence
  ENSG00000113163_3 (sequence is synthesized)
gcgcagctgagggagcgggggccggtctcctgctcggttgtcgagcctccatgtcggataatcagagctggaactcgtcgggctcggaggaggatccagagacggagtctgggccgcctg

SEQ ID NO: 194732 - DNA, 120 bp, Artificial Sequence
  ENSG00000113163_4 (sequence is synthesized)
tggagcgctgcggggtcctcagtaagtggacaaactacattcatgggtggcaggatcgttgggtagttttgaaaaataatgctctgagttactacaaatctgaagatgaaacagagtatg

SEQ ID NO: 194733 - DNA, 120 bp, Artificial Sequence
  ENSG00000113163_5 (sequence is synthesized)
gctgcagaggatccatctgtcttagcaaggctgtcatcacacctcacgattttgatgaatgtcgatttgatattagtgtaaatgatagtgtttggtatcttcgtgctcaggatccagatc

SEQ ID NO: 194734 - DNA, 120 bp, Artificial Sequence
  ENSG00000113163_6 (sequence is synthesized)
atagacagcaatggatagatgccattgaacagcacaagactgaatctggatatggatctgaatccagcttgcgtcgacatggctcaatggtgtccctggtgtctggagcaagtggctact

SEQ ID NO: 194735 - DNA, 120 bp, Artificial Sequence
  ENSG00000113163_7 (sequence is synthesized)
ctgcaacatccacctcttcattcaagaaaggccacagtttacgtgagaagttggctgaaatggaaacatttagagacatcttatgtagacaagttgacacgctacagaagtactttgatg

SEQ ID NO: 194736 - DNA, 120 bp, Artificial Sequence
  ENSG00000113163_8 (sequence is synthesized)
cctgtgctgatgctgtctctaaggatgaacttcaaagggataaagtggtagaagatgatgaagatgactttcctacaacgcgttctgatggtgacttcttgcatagtaccaacggcaata

SEQ ID NO: 194737 - DNA, 120 bp, Artificial Sequence
  ENSG00000113163_9 (sequence is synthesized)
aagaaaagttatttccacatgtgacaccaaaaggaattaatggtatagactttaaaggggaagcgataacttttaaagcaactactgctggaatccttgcaacactttctcattgtattg

SEQ ID NO: 194738 - DNA, 120 bp, Artificial Sequence
  ENSG00000113163_10 (sequence is synthesized)
agaacagaggaagcatataaaaatgcaatgacagaacttaagaaaaaatcccactttggaggaccagattatgaagaaggccctaacagtctgattaatgaagaagagttctttgatgct

SEQ ID NO: 194739 - DNA, 120 bp, Artificial Sequence
  ENSG00000113163_11 (sequence is synthesized)
gttgaagctgctcttgacagacaagataaaatagaagaacagtcacagagtgaaaaggtgagattacattggcctacatccttgccctctggagatgccttttcttctgtggggacacat

SEQ ID NO: 194740 - DNA, 120 bp, Artificial Sequence
  ENSG00000113163_12 (sequence is synthesized)
agatttgtccaaaagccctatagtcgctcttcctccatgtcttccattgatctagtcagtgcctctgatgatgttcacagattcagctcccaggttgaagagatggtgcagaaccacatg

SEQ ID NO: 194741 - DNA, 120 bp, Artificial Sequence
  ENSG00000113163_13 (sequence is synthesized)
acttactcattacaggatgtaggcggagatgccaattggcagttggttgtagaagaaggagaaatgaaggtatacagaagagaagtagaagaaaatgggattgttctggatcctttaaaa

SEQ ID NO: 194742 - DNA, 120 bp, Artificial Sequence
  ENSG00000113163_14 (sequence is synthesized)
gctacccatgcagttaaaggcgtcacaggacatgaagtctgcaattatttctggaatgttgacgttcgcaatgactgggaaacaactatagaaaactttcatgtggtggaaacattagct

SEQ ID NO: 194743 - DNA, 120 bp, Artificial Sequence
  ENSG00000113163_15 (sequence is synthesized)
gataatgcaatcatcatttatcaaacacacaagagggtgtggcctgcttctcagcgagacgtattatatctttctgtcattcgaaagataccagccttgactgaaaatgaccctgaaact

SEQ ID NO: 194744 - DNA, 120 bp, Artificial Sequence
  ENSG00000113163_16 (sequence is synthesized)
tggatagtttgtaatttttctgtggatcatgacagtgctcctctaaacaaccgatgtgtccgtgccaaaataaatgttgctatgatttgtcaaaccttggtaagcccaccagagggaaac

SEQ ID NO: 194745 - DNA, 120 bp, Artificial Sequence
  ENSG00000113163_17 (sequence is synthesized)
caggaaattagcagggacaacattctatgcaagattacatatgtagctaatgtgaaccctggaggatgggcaccagcctcagtgttaagggcagtggcaaagcgagagtatcctaaattt

SEQ ID NO: 194746 - DNA, 120 bp, Artificial Sequence
  ENSG00000113163_18 (sequence is synthesized)
ctaaaacgttttacttcttacgtccaagaaaaaactgcaggaaagcctattttgttctagtattaacagctcagaggatgaaacaggaaactgagtcataaaacactactacaaacaagc

SEQ ID NO: 194747 - DNA, 120 bp, Artificial Sequence
  ENSG00000113163_19 (sequence is synthesized)
ccaaggattttatcccagattttcaacccaaggatgagctgcaatataactatcactgttttgttggctgcctgccacagaatgaccactgaggaaataaagcgagctttggattcactg

SEQ ID NO: 194748 - DNA, 120 bp, Artificial Sequence
  ENSG00000113163_20 (sequence is synthesized)
aaagcctattttgttctagtattaacagtgactgaagcaaggctgtgtgacattccatgttggagaaaaaaagaaaaaaaaaagctgaatgctctaagctggaacgtaggatctatagcc

SEQ ID NO: 194749 - DNA, 120 bp, Artificial Sequence
  ENSG00000113163_21 (sequence is synthesized)
ttgtctgtggcccaagaccttggccttgtgtacaaaaatgacaaaatattgcaatagcaaagctgaacatctaacactagctatctcttgctagatctccttgctcagcatataactata

SEQ ID NO: 194750 - DNA, 120 bp, Artificial Sequence
  ENSG00000113163_22 (sequence is synthesized)
aatacatgtaaaattacatgtatatggctatatttttatttgcttgctcctagaagagaaaaaaaaatcaactttgaatcacaactaggaattgatgctttaatttttggatactttttc

SEQ ID NO: 194751 - DNA, 120 bp, Artificial Sequence
  ENSG00000113163_23 (sequence is synthesized)
agaatttttaatttactatggtccggcctaagatcctctgttgtatcaggttttgtgcacaaaagaaaagcacaaaagttgaatgcacatggggcatgtgctttctgtgcaccaaatatc

SEQ ID NO: 194752 - DNA, 120 bp, Artificial Sequence
  ENSG00000113163_24 (sequence is synthesized)
tagtattaacaggtactagaagatatgttttatctttttttaactttatttgactaatatgactgtcaatactaaaatttagttgttgaaagtatttactatgttttttgatgttcccct

SEQ ID NO: 194753 - DNA, 120 bp, Artificial Sequence
  ENSG00000113163_25 (sequence is synthesized)
atagagtattgtttcgttggtttttgttgttgtcgttgttgttgttttaaacagggtcttgctctgtttcctaagctgaagtgcaatgacaccatcacggctcactgcaacctcaacctc

SEQ ID NO: 194754 - DNA, 120 bp, Artificial Sequence
  ENSG00000113163_26 (sequence is synthesized)
tggcctcaaacaatcctctcatctcagccttcccagtagctgggagtccccacaggcatgtgccaccatgctcagctaattttttattttttgtagagataggggtcttgctatgttacc

SEQ ID NO: 194755 - DNA, 67 bp, Artificial Sequence
  ENSG00000113163_27 (sequence is synthesized)
tttttattttttgtagagataggggtcttgctatgttacccaagctggtcttgaactcctggcctca

SEQ ID NO: 194756 - DNA, 120 bp, Artificial Sequence
  ENSG00000113163_28 (sequence is synthesized)
acttaattcttttattgtttcctttttcttctaatgcttatgtaaagaaattttgatattatagaactgtagaattgtagaagtgcaaacttcctgtattctttcctttcccagaaactg

SEQ ID NO: 194757 - DNA, 120 bp, Artificial Sequence
  ENSG00000113163_29 (sequence is synthesized)
ttatttttgttgtatattcctccagatttttctgtgtatgtactgacatatttttgaatgttaaaatgtttatacttactattatacaaaattcttgttttataacctttttttcactta

SEQ ID NO: 194758 - DNA, 120 bp, Artificial Sequence
  ENSG00000113163_30 (sequence is synthesized)
acaatgtatcttgactatctttctttataagacatgagatgtgtaaaacatctcattcttttaacatctgttacatgcatgttgcagaatttattaactagtcccatgttaatgtctgag

SEQ ID NO: 194759 - DNA, 120 bp, Artificial Sequence
  ENSG00000113163_31 (sequence is synthesized)
ttggttccatatttttactgtcaaccagtacagcactgaacacctttatgcaaagaggtagaatctttaactttattttggtgttgttgagacaaagtttctctcttgctgcccaggctg

SEQ ID NO: 194760 - DNA, 89 bp, Artificial Sequence
  ENSG00000113163_32 (sequence is synthesized)
cctgctctcctgggcctcccaaaatgctgggtttacaggcgtgagccactgcactcagcccaaaatctttaactttttaaagtaagtga

SEQ ID NO: 194761 - DNA, 120 bp, Artificial Sequence
  ENSG00000113163_33 (sequence is synthesized)
tgcactcagcccaaaatctttaactttttaaagtaagtgatacgttaacatgattaaaagccaaaagtggccaggtgcagtgggtcacacctgtaatcccaacactttttgggagactga

SEQ ID NO: 194762 - DNA, 120 bp, Artificial Sequence
  ENSG00000113163_34 (sequence is synthesized)
ggtgggagaatggcttgaggccaggagttcaagtctagcctggataacatagcaagattccatcttgacaaaaaacaattaggcgtggtggtatacatgtatagtcctaggtacttggga

SEQ ID NO: 194763 - DNA, 120 bp, Artificial Sequence
  ENSG00000113163_35 (sequence is synthesized)
gtcaaaaaataaataaataaagtcaaaagtatgaaaaagttatacagtaaaatttaccctgtcttgcattcaccatatagtattaacatatgctattactagtttcttctagaaagtttt

SEQ ID NO: 194764 - DNA, 120 bp, Artificial Sequence
  ENSG00000113163_36 (sequence is synthesized)
taatgcttgaatgaacaaatacaagtgtattttctacacagatacactttttttgttgttaaagaagcagcagcatactataaacactgttcaacatcttatatttgcatttattttatc

SEQ ID NO: 194765 - DNA, 120 bp, Artificial Sequence
  ENSG00000113163_37 (sequence is synthesized)
ttgaaggtctcacatatttgtaaggagcttcctcattttgatggttatacagtatcccattgtatagatgtacataatttatttaatcagttctgcattggcgaatattacagtttccaa

SEQ ID NO: 194766 - DNA, 120 bp, Artificial Sequence
  ENSG00000113163_38 (sequence is synthesized)
tttctgccagagcagtgtcataattgtatccatatgtcattttgtacttgcaagtttatatgtgggaaaattaatagatgtggtactactggccctgctaggggtttgtgcataatttag

SEQ ID NO: 194767 - DNA, 120 bp, Artificial Sequence
  ENSG00000113163_39 (sequence is synthesized)
atactacttttcatagaggttatagtaattgaccatctcaacagcaataatgaattggagtccctgtgtcccacagtttttcatacaacgtgtaaaacaaaactttataactttcccaac

SEQ ID NO: 194768 - DNA, 120 bp, Artificial Sequence
  ENSG00000113163_40 (sequence is synthesized)
tcattaggtgaaaaatactctctcagtgtagttttaattgtattcctcttcttatgactgagtttaagcctgctttagtccattgagaatcttttgtatagtactatttctataaattct

SEQ ID NO: 194769 - DNA, 120 bp, Artificial Sequence
  ENSG00000113163_41 (sequence is synthesized)
attttgtaataacatttaaaatattagtagatattgccaattgtgatacacaaatggtaagcaataacatgaatattctctcattctcacctacactggatgttaaataattgactgaga

SEQ ID NO: 194770 - DNA, 120 bp, Artificial Sequence
  ENSG00000113163_42 (sequence is synthesized)
ttcttgagtccttttctttagctaaaaataatagtcaattatataatgaaataattttaaacaagtctgatttctaatgatgtttatagtatgtctttcttttaaaaaatgcaaaagcta

SEQ ID NO: 194771 - DNA, 120 bp, Artificial Sequence
  ENSG00000113163_43 (sequence is synthesized)
aaaagctaaatttattgtccgatactaactaatatcccatactaacataagggatattgcattgatgtctcagttgtttagctttatcccaggaaaaagggtatttgaaaatattaaata

SEQ ID NO: 194772 - DNA, 120 bp, Artificial Sequence
  ENSG00000113163_44 (sequence is synthesized)
ggttccagtcttagttacctgaatgattggtgttttggaatatagccttaccctttagggattctctcttcaagcacaagtgcactgcattcagtgtgctgacaatttttatatcttgta

SEQ ID NO: 194773 - DNA, 120 bp, Artificial Sequence
  ENSG00000113163_45 (sequence is synthesized)
ctttagaattgttatagctagatctggacacattacttcttatcgattctgagtctgtgccatatttatcaaataaaccagaaaactgatggcacgtgacagcaacaggcttatcaccct

SEQ ID NO: 194774 - DNA, 120 bp, Artificial Sequence
  ENSG00000113163_46 (sequence is synthesized)
gcttcgctgtgtgtctctttgccatggcctctagggtttttaaagtggtgctgtttcactctatccaagaccagattttgtttcactctaactatatctgccttctctcttcttcactat

SEQ ID NO: 194775 - DNA, 120 bp, Artificial Sequence
  ENSG00000113163_47 (sequence is synthesized)
gacctcactgaaacggcctccctcttgatgctttatgatgacttccttaccaaaggttctcagatattcaaccaagcaaggcagaaatacaactttgtattaaagcaagagaaatctgaa

SEQ ID NO: 194776 - DNA, 120 bp, Artificial Sequence
  ENSG00000113163_48 (sequence is synthesized)
tgcagttgtgtgtaaaacatgctctcaattatatttgagaagaataattttttaaacagttgaaagataaatggtaggatattagcagcatttgcttctagacttggatttagagcggtg

SEQ ID NO: 194777 - DNA, 120 bp, Artificial Sequence
  ENSG00000113163_49 (sequence is synthesized)
tttcattgactctctgtgtgtgtgcatgtgtatgttcacagatttttcatttgtggacctgggagggaggagcttggaatctgaaaaaattcatctctggggaagagaggtctattgttt

SEQ ID NO: 194778 - DNA, 120 bp, Artificial Sequence
  ENSG00000113163_50 (sequence is synthesized)
gtgggtacatgtatatgtgtgcaaagatacagctgaaaagattcattggcccaaactcagatttggctttttgagtccagattgagcttctttctaacaaagatccaaattcaaacctta

SEQ ID NO: 194779 - DNA, 120 bp, Artificial Sequence
  ENSG00000113163_51 (sequence is synthesized)
acatggtaaaatctttgttactgtaacgtaactttttttttttttttacaataattatggaagataaatgtatgaagtcgaacccagcattgaaaccctaggaaagcgaacattcttaat

SEQ ID NO: 194780 - DNA, 120 bp, Artificial Sequence
  ENSG00000113163_52 (sequence is synthesized)
tttggtgatggaaaaaaatagtaacattcaataatgtgtgtatcatctttagagaaagttctgtaaagagttaataagatccaaagttgtttaacagtaaaaactttatatatatattat

SEQ ID NO: 194781 - DNA, 78 bp, Artificial Sequence
  ENSG00000113163_53 (sequence is synthesized)
catctcactcctgtcgcccaggttggagtacactggagcgatctcagctcactgcagcctcaacttctcaagctcagg

SEQ ID NO: 194782 - DNA, 120 bp, Artificial Sequence
  ENSG00000113163_54 (sequence is synthesized)
actcctgtcgcccaggttggagtacactggagcgatctcagctcactgcagcctcaacttctcaagctcaggtgttcctcctacctccctgggtagctgggactataggcacacaccacc

SEQ ID NO: 194783 - DNA, 88 bp, Artificial Sequence
  ENSG00000113163_55 (sequence is synthesized)
acaccaccatgcccggctaattttttatacttttagtagagttggggtttcaccatgtttcccaagcctgcctcaacctcccaaagtg

SEQ ID NO: 194784 - DNA, 120 bp, Artificial Sequence
  ENSG00000113163_56 (sequence is synthesized)
aacttttaaactcatttgacaaagaggtctgagcatgtttgttgattaaataaggcaggcctctctctcatagcttgaatacattttttaaattcttggtaagtagtattgtatgtcata

SEQ ID NO: 194785 - DNA, 120 bp, Artificial Sequence
  ENSG00000113163_57 (sequence is synthesized)
atttttattgcaggctaagaggaaagaaatgccatgttgtggagtaaaaatccagagacctttcactgattacctctgctcacctatattgccctttttttttcaggtgcctgtgccccc

SEQ ID NO: 194786 - DNA, 120 bp, Artificial Sequence
  ENSG00000113163_58 (sequence is synthesized)
tttattttacacaactatgcaaattgtgaggccaaggatgtgactgcaaacaattaagatttgatttacatgaataagctttcttctccatgaaaatacactgtgtcacttcacacttgg

SEQ ID NO: 194787 - DNA, 120 bp, Artificial Sequence
  ENSG00000113163_59 (sequence is synthesized)
tctccatgaaaatacactgtgtcacttcacacttggtctaacacacacacaaaattctcaccctaggtggcacagatacactcagcatgcaatattaagtacaatttccattttattttt

SEQ ID NO: 194788 - DNA, 120 bp, Artificial Sequence
  ENSG00000113163_60 (sequence is synthesized)
cagctccttacatgggctttggtgggggtcatggggcagcacccgcaggtctaaattggggtggaggtgttcgatccttctccttcatgagatcgattcctgactactttgttgtgagtt

SEQ ID NO: 194789 - DNA, 120 bp, Artificial Sequence
  ENSG00000113163_61 (sequence is synthesized)
gcacaactcacacagtaatatagcttcacataacagcttgggaagcacatagacatcaaagacactcgcttcggaaatgtccctgactgctgcgaccttcactgtgtttcaaatgacgaa

SEQ ID NO: 194790 - DNA, 89 bp, Artificial Sequence
  ENSG00000113163_62 (sequence is synthesized)
gcatcaggcacggttcgtgcagcaaacaggctgcacgtggctgtggccctttttggcacaaccattgttccttcttttctttgtcatct

SEQ ID NO: 194791 - DNA, 120 bp, Artificial Sequence
  ENSG00000113163_63 (sequence is synthesized)
ggcctggactgtagagaggactgttcccgtttttttttctaacttttgaaaaattccatatacctttgattccttgctgatggaataagttcaaatttgtaaggttaataattttgcatt

SEQ ID NO: 194792 - DNA, 120 bp, Artificial Sequence
  ENSG00000113163_64 (sequence is synthesized)
cataatgataaattttaatagagattccatgcattccatgaatatggagggtgggagaactctgttctggtagtcttgcagctgttcgtagcaaacatactgctgagttttttacttgtc

SEQ ID NO: 194793 - DNA, 120 bp, Artificial Sequence
  ENSG00000113163_65 (sequence is synthesized)
ttttttttttttttttttccttcagtgactgaagcaaggctgtgtgacattccatgttggagaaaaaaagaaaaaaaaaagctgaatgctctaagctggaacgtaggatctatagccttg

SEQ ID NO: 194794 - DNA, 120 bp, Artificial Sequence
  ENSG00000113163_66 (sequence is synthesized)
atgttgtcatgtgtctcttaataactgagggctgtcagtaacctgtgattttgccttttctatagtcttactcccatgaagaaccttggttctgatggagaaagtgaaaagctttatttc

SEQ ID NO: 194795 - DNA, 120 bp, Artificial Sequence
  ENSG00000113163_67 (sequence is synthesized)
ttcccctagatatctttatatttctattatattttttagttgtgtactgtgtactagagatttttttcagtttgttatgaacacaatttggtaagccctaaattggttctgcctgtctcc

SEQ ID NO: 194796 - DNA, 120 bp, Artificial Sequence
  ENSG00000113163_68 (sequence is synthesized)
aaacagaaacatctgtacaaatcttgttggtatagactactttctggaaaatggtcaagataagttcatgttttcttgaaatttctaagatagtatatggtatcacttgtttaaagcaaa

SEQ ID NO: 194797 - DNA, 120 bp, Artificial Sequence
  ENSG00000113163_69 (sequence is synthesized)
ttgacatttaattcaatatttctggtattcagtaacgggtatatatgtttgttcttccagtttgggtcagtttaaaagatatgttgcaaagtatacatagaaaatgtgagcaatgcctct

SEQ ID NO: 194798 - DNA, 120 bp, Artificial Sequence
  ENSG00000113163_70 (sequence is synthesized)
ctttgccttttgatcagaaacttcagcagagcggtaaggattccacatgatttaaactgaaatgcttttctttgttgctgtaagaacttaaaatgtaaaatacctttttcagtttaagtc

SEQ ID NO: 194799 - DNA, 120 bp, Artificial Sequence
  ENSG00000113163_71 (sequence is synthesized)
ctgtaaacaacattgaagcatggagatgaggcaaggaatagtactcactgaagttgaaatgactgcccacttcaaaatcttcattgtgtttacacaccagtgtatttatacaaatcagag

SEQ ID NO: 194800 - DNA, 120 bp, Artificial Sequence
  ENSG00000113163_72 (sequence is synthesized)
gcattttgtagatgctttgctgacttgttcagctctgtaaaaacacagaaatcagacccattttgtaaagcggaaaatcatgttacatggaacatgtcctgtatatatcacatacatggt

SEQ ID NO: 194801 - DNA, 120 bp, Artificial Sequence
  ENSG00000113163_73 (sequence is synthesized)
aatggagtcttaatgataagtgcaagataataatttaatgatgggattagtctgatcgcttaatatgcacaatcctggaagtgaattacttgcatcagatatagtgatatttattattct

SEQ ID NO: 194802 - DNA, 120 bp, Artificial Sequence
  ENSG00000113163_74 (sequence is synthesized)
gtacagagagaaaaatacatataaaacatatgcttacattacatgcacgcggatttcatgctccataatcttttctattttttaatttacctttctgtaaatgatgtgcatggaatatgc

SEQ ID NO: 194803 - DNA, 120 bp, Artificial Sequence
  ENSG00000113163_75 (sequence is synthesized)
cttatagaaaaatgctgttcataatttgactacgtggaaaagtgcctatatggtggtaatgctagtaaggcaaataagacaaattatcatgttggtttactacatcaccagttaacattt

SEQ ID NO: 194804 - DNA, 120 bp, Artificial Sequence
  ENSG00000113163_76 (sequence is synthesized)
agatgctcccgggctttcgacaagccgccctggaaagcaggcccgtcatcttcagcggaaagctctctcacgtctgggcccgcaagcccggagggttcgtcataaacacacaaggcaagg

SEQ ID NO: 194805 - DNA, 120 bp, Artificial Sequence
  ENSG00000113163_77 (sequence is synthesized)
atagaagcgaggccgaggggctggtcacgcaactgtcaaacgaagcccacccaccgactgacaaggccccaaggggacaagcgatccccgcgcgggatactcacccgttacctcaggatc

SEQ ID NO: 194806 - DNA, 120 bp, Artificial Sequence
  ENSG00000113163_78 (sequence is synthesized)
gcgactacaactcccaggaggctgcgcgagcgacggaccaacgcccttcccagaatgcagcacagctgcatccctaccccgccctctcctttctccgctcctcctgcttttctacccgtc

SEQ ID NO: 194807 - DNA, 120 bp, Artificial Sequence
  ENSG00000113163_79 (sequence is synthesized)
gggggggttggggagggcaggtttattcaccatagccgctgataagaatcttcaaaaaaattctatatgcgcactataaatgtttctctgtttgccatttctggtaactatcatgaacac

SEQ ID NO: 194808 - DNA, 120 bp, Artificial Sequence
  ENSG00000113163_80 (sequence is synthesized)
agacagttaactctttcataactgaattggatagctttattttacagaagtatggcaagtttacaaagcaatatctaaatctaattatcattagttgcatttggactaaatgtgatgata

SEQ ID NO: 194809 - DNA, 120 bp, Artificial Sequence
  ENSG00000113163_81 (sequence is synthesized)
tacttttgcaattgattctgtaaataaaaggattacactaaaatatttgtattaaaagaagaaaagataacattttacctttagataactgcacttgtacctcactagagttaatcccac

SEQ ID NO: 194810 - DNA, 120 bp, Artificial Sequence
  ENSG00000113163_82 (sequence is synthesized)
ccaatcagattgagaaataaattggggaatgtggaaagagtccaaaagaggtcagaatttggagaggtactggccttctggacaacatttagaccctctacaattattttcattaagctg

SEQ ID NO: 194811 - DNA, 120 bp, Artificial Sequence
  ENSG00000113163_83 (sequence is synthesized)
attcctacatcctgaatattcatgttttctcatctacagatatttgtcttcccccaaactaaaagaaaaaaaactaccctttactctcttttctactcagttactcttttgtgctatgtt

SEQ ID NO: 194812 - DNA, 120 bp, Artificial Sequence
  ENSG00000113163_84 (sequence is synthesized)
agaaacttgaaatatattggtgatgtggggattttgtccctgactgcccactgtacaggacaagagagtacagtgtttcagttggaattcaggactcctggttttgaggtagaggatgat

SEQ ID NO: 194813 - DNA, 120 bp, Artificial Sequence
  ENSG00000113163_85 (sequence is synthesized)
cactgcagtacttggtttggaattgccacaggggtagctaaaccaaaggagggttatatctgcaagggaggtgtaagaaggcaaaataaggaaaaggaggaatgggttttctatttgttc

SEQ ID NO: 194814 - DNA, 120 bp, Artificial Sequence
  ENSG00000113163_86 (sequence is synthesized)
agtttcatcaactaatttatacacttaatacaacttcagtgtcaattgctattaagaaatttttagttgggctgagctggttctcttgtgaaattgtgctggttatctttaagcttatca

SEQ ID NO: 194815 - DNA, 120 bp, Artificial Sequence
  ENSG00000113163_87 (sequence is synthesized)
gttatttgtccaattaaacacttttcaccagtatttagtccgagttgtacagacgatgtatttggattttgtcatggttcatctacagactcaaaacataatcattttaaagtaccttgg

SEQ ID NO: 194816 - DNA, 120 bp, Artificial Sequence
  ENSG00000113163_88 (sequence is synthesized)
gagtgtgtagagtaacttctataatagctttatgatcctgatgatgttttttaaacacaataaagttggatcttccatgttacaatcacagaattaaaaccagtatttaaagtggaaaag

SEQ ID NO: 194817 - DNA, 120 bp, Artificial Sequence
  ENSG00000113163_89 (sequence is synthesized)
tattaaaatattatggacaaatatgctggcttgatttgttttccttaaccctgagatattgccctactctgaatagttaagagcttgaaattcagtgttcttcccgtaacccagttaggg

SEQ ID NO: 194818 - DNA, 77 bp, Artificial Sequence
  ENSG00000113163_90 (sequence is synthesized)
gagcttgaaattcagtgttcttcccgtaacccagttagggatcaagaaaactactgagttgcagcctaagtcaccca

SEQ ID NO: 194819 - DNA, 82 bp, Artificial Sequence
  ENSG00000113163_91 (sequence is synthesized)
cagccatcgcgcccagctcagttttttttttaacaaaatataacaggaggaatatatcaagtacatgacatgtaataaatat

SEQ ID NO: 194820 - DNA, 120 bp, Artificial Sequence
  ENSG00000113163_92 (sequence is synthesized)
acaggaggaatatatcaagtacatgacatgtaataaatattttgtgtatcttttgtcatatgtattacacatacgtgtgtaatgggttacagtttacaatgaatttcttactgtggatca

SEQ ID NO: 194821 - DNA, 120 bp, Artificial Sequence
  ENSG00000113163_93 (sequence is synthesized)
catccagaagttttaaaagattggtagagaagccatattcacttgggtgtttctaaaatggaagcacagtgctggtgaatgatacacacttattttgtaattgagctgtatgcatttaat

SEQ ID NO: 194822 - DNA, 120 bp, Artificial Sequence
  ENSG00000113163_94 (sequence is synthesized)
cataaataaataatctcatttatttaaatctcgtttaatctcagctccacttgttgcactcaggtaatttatgccctagaacaaccatgaaatgggaagtgtggacttccatttcactca

SEQ ID NO: 194823 - DNA, 120 bp, Artificial Sequence
  ENSG00000113163_95 (sequence is synthesized)
gtcagtggattcatattgaaaggcactgagcatatttctctcctagtgttcaaagatacatgccatccaaacaatgtgatctgtaaacaaaagccaactacttaatctggtgggatgctg

SEQ ID NO: 194824 - DNA, 120 bp, Artificial Sequence
  ENSG00000113163_96 (sequence is synthesized)
gagggaaaatctgacttgtgttgaatttgatgacagagaaatattatgtggtcctcattcctagagggattttctagggcacttttaactgtgcagtttttctttagacttgactttggc

SEQ ID NO: 194825 - DNA, 120 bp, Artificial Sequence
  ENSG00000113163_97 (sequence is synthesized)
atataacctgcaaataaggtgtagttctaactagcagtttcaaatgaggttgcttttataggatcttccagattttcttgccattattcgaacttggttacaacagagttcatactatca

SEQ ID NO: 194826 - DNA, 120 bp, Artificial Sequence
  ENSG00000113163_98 (sequence is synthesized)
tttatattgtctaccttttaagacacattttctgtgaacgttccacatctgtatactttgaatagccttgcacaaataccataagtgaagctactttatttggcctcttcattctctctt

SEQ ID NO: 194827 - DNA, 120 bp, Artificial Sequence
  ENSG00000113163_99 (sequence is synthesized)
cctatagaattctgtgaggttagtactagaacaaatctttaagatctctgaagttattagaagatgccaaaccaggattttcctgtcacccaggctctgtggttgatgaggtggtgtgtg

SEQ ID NO: 194828 - DNA, 120 bp, Artificial Sequence
  ENSG00000113163_100 (sequence is synthesized)
agggtatctccgccgtgtctgtaccggcactatgccttttctgactcctccccactcaacagtcctgtggaggtggtagcggtgattggtggtaccacccctgttttacagatgagggaa

SEQ ID NO: 194829 - DNA, 120 bp, Artificial Sequence
  ENSG00000113163_101 (sequence is synthesized)
caggttggggttacaaacctactgattccctgactcttaagtttttttttttcccattagactctactttttaatgcctatgtgtaatatctagaatatagtgtttgatggactagaaag

SEQ ID NO: 194830 - DNA, 120 bp, Artificial Sequence
  ENSG00000113163_102 (sequence is synthesized)
agctaacatgcttgaagactagcaattttggtgtatgggtcttagtcccacacttcaatattggcttcacaaaattccaaatacacatggttccttaacaatggttcgatttatgattgt

SEQ ID NO: 194831 - DNA, 120 bp, Artificial Sequence
  ENSG00000113163_103 (sequence is synthesized)
tcgactttatgcaaagcactacaaatacagtacactccaacttaccatggggctgcgttccgataaaccagtcatatatggaaaataccgtaagtcaaaagtacattttcagccgggggc

SEQ ID NO: 194832 - DNA, 89 bp, Artificial Sequence
  ENSG00000113163_104 (sequence is synthesized)
aagactgaagaccagcctgtctaacatggtgaaaccccttgtctctactaaaaataaaaaagttagctgggtgtggtggcatgcacctg

SEQ ID NO: 194833 - DNA, 120 bp, Artificial Sequence
  ENSG00000113163_105 (sequence is synthesized)
gcaagactctgtctccaaaaaaaaaaaagttttcaacttacgttattttcaacttgcagtgggcttatcagcacatagccacatcataaatggaggtgcttctgtcaaaagtacattatt

SEQ ID NO: 194834 - DNA, 120 bp, Artificial Sequence
  ENSG00000113163_106 (sequence is synthesized)
tctgtcaaaagtacattattgttttattttcaacttacagtggggcttatcagtatgtagccccatcataagtcaaggggcttttataacgatgtgtcttacaaaatcccaccagataca

SEQ ID NO: 194835 - DNA, 120 bp, Artificial Sequence
  ENSG00000113163_107 (sequence is synthesized)
cttaagaaaaaatcccactttggaggaccagattatgaagtatgaatttatattttgatcttagagaaacacatagatcatgtctatcacaaaagtgattttttaataatactcttgtaa

SEQ ID NO: 194836 - DNA, 120 bp, Artificial Sequence
  ENSG00000113163_108 (sequence is synthesized)
cctttaaatattctaaatatataattttttcctcagtgtttatgttaattcagtgtatatttcatgatatataaatgccaggcatgctcaaatatatatttcttattgcctacaaagttt

SEQ ID NO: 194837 - DNA, 120 bp, Artificial Sequence
  ENSG00000113163_109 (sequence is synthesized)
aggcttcaaaaggcttagtattaggcctgttcacttgataggacaaatttttatctcccctgtaaagatgatcatttttaatgttatctactttttttttttttttaacataaaagcaaa

SEQ ID NO: 194838 - DNA, 120 bp, Artificial Sequence
  ENSG00000113163_110 (sequence is synthesized)
atttatgattgttcgactttatgcaaagcactacaaatacagtacactccaacttaccatggggctgcgttccgataaaccagtcatatatggaaaataccctcagaggatgaaacagga

SEQ ID NO: 194839 - DNA, 120 bp, Artificial Sequence
  ENSG00000113163_111 (sequence is synthesized)
gacggacggacagacggatggatgaatggagtcagggtcttgctacattgccgaagctggcctcaagctcctaggctcaagctaacttcctgccccagcctaccgtgtagcgaggaccac

SEQ ID NO: 194840 - DNA, 120 bp, Artificial Sequence
  ENSG00000113163_112 (sequence is synthesized)
acttcctgccccagcctaccgtgtagcgaggaccacaggtgtgtgccactatgcacaactatttttttttattgtttgtagagatagcatctcactgtgttgcccaggctggtcttaaac

SEQ ID NO: 194841 - DNA, 120 bp, Artificial Sequence
  ENSG00000113163_113 (sequence is synthesized)
aaagtactgaaattatattggtgttcttaaagacaaatcttgaagaggtcagcttcaaaggtggtctcttgactggataaagttttgaaatgtcaatactaagattgttcccagtcctaa

SEQ ID NO: 194842 - DNA, 120 bp, Artificial Sequence
  ENSG00000113163_114 (sequence is synthesized)
gtaaactcaggatatgtgtaatgccaagtctaaattaaatctatcaaatgtaaggaataccaatcaacaaatgcctgatttgttttttataaaagtactttcattttaataaaagtactt

SEQ ID NO: 194843 - DNA, 120 bp, Artificial Sequence
  ENSG00000113163_115 (sequence is synthesized)
tcagatactctgcctacacttacctttgaaatcatgttcatccccatggcatcccctgacctggactggaaacggatataaaggttgcgtccagctatacttgtatgaagtttctgtaga

SEQ ID NO: 194844 - DNA, 120 bp, Artificial Sequence
  ENSG00000113163_116 (sequence is synthesized)
gtgctgatgctgtctctaaggatgaacttcaaagggataaaggttaattaggctattaccactatttttacttggagaatgaatggattaaaagcctcttgatctcaaagggtaatgtct

SEQ ID NO: 194845 - DNA, 120 bp, Artificial Sequence
  ENSG00000113163_117 (sequence is synthesized)
ttaagtgataaagtggtagaagatgatgaagatgactttcctacaacgcgttctgatggtgacttcttgcatagtaccaacggcaataaagaaaagttatttccacatgtgacaccaaaa

SEQ ID NO: 194846 - DNA, 120 bp, Artificial Sequence
  ENSG00000113163_118 (sequence is synthesized)
gcggagatgccaattggcagttggttgtagaagaaggagaaatgaagttttggaattatgttctctttaggtatacagaagagaagtagaagaaaatgggattgttctggatcctttaaa

SEQ ID NO: 194847 - DNA, 120 bp, Artificial Sequence
  ENSG00000113163_119 (sequence is synthesized)
cttgacagacaagataaaatagaagaacaggtatatctattattgaaaattctaagctgaaatttattttaacactataggcattccttggtgtatattatttcatgtaaatagaatttg

SEQ ID NO: 194848 - DNA, 120 bp, Artificial Sequence
  ENSG00000113163_120 (sequence is synthesized)
gtatattatttcatgtaaatagaatttgaacattgtgaacttaataacctagaagcttaactgtgaatacattgagtcacaaatgtaaaataatctttttttttttttttgagacagagt

SEQ ID NO: 194849 - DNA, 78 bp, Artificial Sequence
  ENSG00000113163_121 (sequence is synthesized)
tggtctcgaactccagagattacaggcatgagccatggtactggccgtaaaataatctttataagtcagttcctttat

SEQ ID NO: 194850 - DNA, 120 bp, Artificial Sequence
  ENSG00000113163_122 (sequence is synthesized)
tactggccgtaaaataatctttataagtcagttcctttatatgtgaatttccaagcaatagaaagaaaaccaataattgttaaaaggaaccatgcgtaattaacatgaacttaaatagaa

SEQ ID NO: 194851 - DNA, 120 bp, Artificial Sequence
  ENSG00000113163_123 (sequence is synthesized)
atgctctttttgcttatttccctttaagtgtccagcttaaaacattcttttaatataaagcatatatttagtctaagtaaaaagcttctttgaatttttcttcaccaagtatgatatgaa

SEQ ID NO: 194852 - DNA, 120 bp, Artificial Sequence
  ENSG00000113163_124 (sequence is synthesized)
aaggaagatgaccaaaaacttaaggtttttcatctatattagtattgtttttattaacccctttattaccttcactacttcaccttcagtttctttctcacttttgctttgttcagtgtt

SEQ ID NO: 194853 - DNA, 120 bp, Artificial Sequence
  ENSG00000113163_125 (sequence is synthesized)
ttgtcatcattattgagtgtatagcagttacacccagctgctgtggaaattgaagaaaagtatttcttaaacccattaactagcttcaagattaatttgatactttgtcttctttaattt

SEQ ID NO: 194854 - DNA, 120 bp, Artificial Sequence
  ENSG00000113163_126 (sequence is synthesized)
ggcaacagtacagttaccatacgttacaactagatggtacttaaggatgaattttgttatttcctccccttgtttaagctatgctagttatggtggaagcttaacctttttggggggcaa

SEQ ID NO: 194855 - DNA, 120 bp, Artificial Sequence
  ENSG00000113163_127 (sequence is synthesized)
ggctacagagtatcttgccaaataatcatgtatgtgtcagttttatactacaaatgaatttgcatagaaaagttggcttgttcgtttcttatcattgctaagacagtcatggctattatg

SEQ ID NO: 194856 - DNA, 120 bp, Artificial Sequence
  ENSG00000113163_128 (sequence is synthesized)
ctcttattggtctacctaagggtaaatcacctgcagtagtaactgcttctcatgtgtatctttcgttatttttttaaaaattactgataaaaagttcatgtcacattaatttgtaaagct

SEQ ID NO: 194857 - DNA, 120 bp, Artificial Sequence
  ENSG00000113163_129 (sequence is synthesized)
tattgctcattttttttatacccaaaagatgctatgtaccactcaagaagagtgggaacttttagttcctaaatgggctctacttttggaaacctaaagtactacctgaagtagcattat

SEQ ID NO: 194858 - DNA, 120 bp, Artificial Sequence
  ENSG00000113163_130 (sequence is synthesized)
ttatttgtttcccttagttttttgtctaggatgtgctgttttgggaaaaagtagtgaatgagtcaagacacctcagtcttactcttagttttacctctaactaactttgtagctatgaac

SEQ ID NO: 194859 - DNA, 120 bp, Artificial Sequence
  ENSG00000113163_131 (sequence is synthesized)
ttatcactgaattctctgggccttggttttctaatctgtgaaacaaaggagacaagatgattcaaaacatctcttctctctaaaatgctactctactgaatatcagtatggtgattgagt

SEQ ID NO: 194860 - DNA, 120 bp, Artificial Sequence
  ENSG00000113163_132 (sequence is synthesized)
tgggtttgagagaattgatgaacccttccgtaagctttagaaaaagaaatattcatggggccatccaatcaacttcattctattcttgacactgtactagatgctctgcaaaatagtcat

SEQ ID NO: 194861 - DNA, 120 bp, Artificial Sequence
  ENSG00000113163_133 (sequence is synthesized)
tgaacagagcattgtttttcttgcctaagagccaggcatgttgatatgacagagatacagtgtggtaatactctatagagtagtgagagcttcagtaatccataaaatcagttccataga

SEQ ID NO: 194862 - DNA, 120 bp, Artificial Sequence
  ENSG00000113163_134 (sequence is synthesized)
tttagatcatttccctcttcatattcagtgtatattgcacagatctctcaacaacacagccattaaatagatattctccaagtgacacttacatcacacatgtttgagtttacgttactt

SEQ ID NO: 194863 - DNA, 120 bp, Artificial Sequence
  ENSG00000113163_135 (sequence is synthesized)
gcaaacatagggaaagaaagatacatgggataaactggtgcatgagaaatgagatcttagcagttggttgaaataaatgagaacaactgaggcaaactaaagaggaagaagggcaagtgg

SEQ ID NO: 194864 - DNA, 120 bp, Artificial Sequence
  ENSG00000113163_136 (sequence is synthesized)
cagcttaacaggagtaagatgatgagatgaagggcagaataccttcatggagaggaggcaaagagatatacatgatatgttcttaggaacataactgaagcaaacaatgatattatttct

SEQ ID NO: 194865 - DNA, 120 bp, Artificial Sequence
  ENSG00000113163_137 (sequence is synthesized)
aattatatataaacctgtgagtcagccttccaggggcggcctgctaaggtagaatcattggaatgatttggccagggtttggataggagagaattggcagcagcgttaagattgacccat

SEQ ID NO: 194866 - DNA, 120 bp, Artificial Sequence
  ENSG00000113163_138 (sequence is synthesized)
gataaataatgctatgcaggtagcagggagtctgactaggagcaaaatcaacgaacttatcccttgcctaacatagtatctgtggagtcagaaagaagaggttaaattgggatatctgag

SEQ ID NO: 194867 - DNA, 120 bp, Artificial Sequence
  ENSG00000113163_139 (sequence is synthesized)
gcaagtatcaggatttgccatgtctgcggagtagtttcataattctaatggttataagcactaaggcgttcactaagtgaatgttggtagttccaggttatattatccattcttgagtta

SEQ ID NO: 194868 - DNA, 120 bp, Artificial Sequence
  ENSG00000113163_140 (sequence is synthesized)
cttcattcaacaaatatttattgagtgtcagctacataccaggaactgttctacgtgttcaggatacatccgtggataagataaagatccttgtccttgtagaatatacattctaatact

SEQ ID NO: 194869 - DNA, 120 bp, Artificial Sequence
  ENSG00000113163_141 (sequence is synthesized)
tttttccataaagtgattttactgtggtttttactacatattgttattttgcatagacatgtagtttttatctggtgggtatatcaaaccagtttaagggcttcaggaaaaaaaaatgtt

SEQ ID NO: 194870 - DNA, 120 bp, Artificial Sequence
  ENSG00000113163_142 (sequence is synthesized)
gttgaggctgggacagttactttgtaggttactgaatatttaaaaataatacatcttgtaagtaacattctaaaattttaacttaaaaatataaatgtaaattcatttttaaacttttta

SEQ ID NO: 194871 - DNA, 120 bp, Artificial Sequence
  ENSG00000113163_143 (sequence is synthesized)
acattgagctaatgccatctctttgtggagttgggagaagctgttctcatgttcctcacacatgatttgctatttacagttttgatttctctaatgtggaataaaagcctgaagataact

SEQ ID NO: 194872 - DNA, 120 bp, Artificial Sequence
  ENSG00000113163_144 (sequence is synthesized)
tttgaaaaactctaagtataggctccttctaactttttatgatttccccttatattttgcagttacatcacttttctccaattcaacaccctttaaaagaataactcaccttcgttgagt

SEQ ID NO: 194873 - DNA, 66 bp, Artificial Sequence
  ENSG00000113163_145 (sequence is synthesized)
attcaacaccctttaaaagaataactcaccttcgttgagtcattctacttagtttacatcttgctc

SEQ ID NO: 194874 - DNA, 120 bp, Artificial Sequence
  ENSG00000113194_0 (sequence is synthesized)
aggagcgtagaggcggcggcaaaatggcggcgcctgaggagcgggatctaacccaggagcagacagagaagctgctgcagtttcaggatctcactggcatcgaatctatggatcagtgtc

SEQ ID NO: 194875 - DNA, 120 bp, Artificial Sequence
  ENSG00000113194_1 (sequence is synthesized)
gccataccttggaacagcataactggaacatagaggctgctgtacaggacagattgaatgagcaagagggcgtacctagtgttttcaacccacctccatcacgacccctgcaggttaata

SEQ ID NO: 194876 - DNA, 120 bp, Artificial Sequence
  ENSG00000113194_2 (sequence is synthesized)
cagctgaccacaggatctacagctatgttgtctcaagacctcaaccaagggggctgcttggatggggttattacttgataatgcttccattccggtttacctattacacgatacttgata

SEQ ID NO: 194877 - DNA, 120 bp, Artificial Sequence
  ENSG00000113194_3 (sequence is synthesized)
tatttaggtttgctcttcgttttatacggcctgaccctcgcagccgggtcactgaccccgttggggacattgtttcatttatgcactcttttgaagagaaatatgggagggcacaccctg

SEQ ID NO: 194878 - DNA, 120 bp, Artificial Sequence
  ENSG00000113194_4 (sequence is synthesized)
tcttctaccagggaacgtacagccaggcacttaacgatgccaaaagggagcttcgctttcttttggtttatcttcatggagatgatcaccaggactctgatgagttttgtcgcaacacac

SEQ ID NO: 194879 - DNA, 120 bp, Artificial Sequence
  ENSG00000113194_5 (sequence is synthesized)
tctgtgcacctgaagttatttcactaataaacactaggatgctcttctgggcatgctctacaaacaaacctgagggatacagggtctcacaggctttacgagagaacacctatccattcc

SEQ ID NO: 194880 - DNA, 120 bp, Artificial Sequence
  ENSG00000113194_6 (sequence is synthesized)
tggccatgattatgctgaaggatcgaaggatgactgtggtgggacggctagaaggcctcattcaacctgatgacctcattaaccaactgacatttatcatggatgctaaccagacttacc

SEQ ID NO: 194881 - DNA, 120 bp, Artificial Sequence
  ENSG00000113194_7 (sequence is synthesized)
tggtgtcagaacgcctagaaagggaagaaagaaaccagacccaagtgctgagacaacagcaggatgaggcctacctggcctctctcagagctgaccaggagaaagaaagaaagaaacggg

SEQ ID NO: 194882 - DNA, 120 bp, Artificial Sequence
  ENSG00000113194_8 (sequence is synthesized)
aggagcgggagcgtaagcggcggaaggaggaggaggtgcaacagcaaaagttggcagaggagagacggcggcagaatttacaggaggaaaaggaaaggaagttggaatgcctgccccctg

SEQ ID NO: 194883 - DNA, 120 bp, Artificial Sequence
  ENSG00000113194_9 (sequence is synthesized)
aaccttcccctgatgaccctgaaagtgtcaagatcatcttcaaattacctaatgattctcgagtagagagacgattccacttttcacagtctctaacagtaatccacgacttcttattct

SEQ ID NO: 194884 - DNA, 120 bp, Artificial Sequence
  ENSG00000113194_10 (sequence is synthesized)
ccttgaaggaaagcccagaaaagtttcagattgaagccaattttcccaggcgagtgctgccctgcatcccttcagaggagtggcccaatccccctacgctacaggaggccggactcagcc

SEQ ID NO: 194885 - DNA, 120 bp, Artificial Sequence
  ENSG00000113194_11 (sequence is synthesized)
acacagaagttctttttgttcaggacctaactgacgaatgacatttttttcttcctgtcccctcctaccccagtccctaaaagaaatggggaaaaaagaaaacaacagcaagtcagaaaa

SEQ ID NO: 194886 - DNA, 120 bp, Artificial Sequence
  ENSG00000113194_12 (sequence is synthesized)
aaaaaacaagagagagaaattcatattattattattattataatacaatattttttttaaaagactgctgcatccttaggaaggatcagaaaccatgctgcccgtaagagtcacaacctg

SEQ ID NO: 194887 - DNA, 120 bp, Artificial Sequence
  ENSG00000113194_13 (sequence is synthesized)
tgtgtgcgcgcaaggttagcaacaaacgtacccgcttggcaagcccacccttcctgtggcctctgtgcacgcaccttccagtgaacagagactcttcaccttcgacccatccattgtccc

SEQ ID NO: 194888 - DNA, 120 bp, Artificial Sequence
  ENSG00000113194_14 (sequence is synthesized)
agctgggaaggggacattcccactagttctcattcattcttgcttttatgaaaaataaaagtgaaaaacctccatcaaccagctacttgcagcatctcctgaggacttgcttctcctgcc

SEQ ID NO: 194889 - DNA, 120 bp, Artificial Sequence
  ENSG00000113194_15 (sequence is synthesized)
tctggggaagagagggaagagaaagcacagagcagagaagcagagatgttccttgaactgcccacaagttttcaataacttttatttctgttttgtaatgaccaaaggaatgaggctgac

SEQ ID NO: 194890 - DNA, 120 bp, Artificial Sequence
  ENSG00000113194_16 (sequence is synthesized)
ataggtatatatatatatttttttcctttatttgataaagagccaattctttaaacccatgagtttatgccctgggctccttagcccacaatagtgtaataaaagtgccccgggctggtt

SEQ ID NO: 194891 - DNA, 120 bp, Artificial Sequence
  ENSG00000113194_17 (sequence is synthesized)
tgtgcttatttctgccattgtccctctcacgttcccagagaggtcattctttttggtccaactcttgctgtcctttcttaccacctgtgcaccccacttggagcagtgggaggaaatctg

SEQ ID NO: 194892 - DNA, 120 bp, Artificial Sequence
  ENSG00000113194_18 (sequence is synthesized)
tatgtggtggaactcacctttacacacaactgcagcttttccttggagtctgtaccaggtggtggttatggggtctgaaccaaaggatagcagctcttcattcctcttctgacatgtgca

SEQ ID NO: 194893 - DNA, 120 bp, Artificial Sequence
  ENSG00000113194_19 (sequence is synthesized)
tgctgctccccccagccctgggctttcctgaattgccaagcctggtgcctttccaaaggactagcagggcctgtggtggagccagcagaaccacaggagagtgccctgcctgtctcagtg

SEQ ID NO: 194894 - DNA, 120 bp, Artificial Sequence
  ENSG00000113194_20 (sequence is synthesized)
gaagtgtattattgttttaaggatagaaccagaggccttgaagggagccaagacagaactcccagcctgtgtaatctattggaaggcacattttcatttctgatgcagccaccttctgga

SEQ ID NO: 194895 - DNA, 120 bp, Artificial Sequence
  ENSG00000113194_21 (sequence is synthesized)
ggcagcttttatcctttctctctattgctatgttgaagtaatagggttttttttaacctctggatgtctcgtctgtggttgagtttatggtaatgggtacatgggtcaggccatgtatta

SEQ ID NO: 194896 - DNA, 120 bp, Artificial Sequence
  ENSG00000113194_22 (sequence is synthesized)
acagatgccagtgcgctctgacaagtattccaaagtgttctgtagctagactggtgcaggctcgttgtaccactgcaaccgactgacgttactgtagttcctagaatgctgtgagggcgg

SEQ ID NO: 194897 - DNA, 120 bp, Artificial Sequence
  ENSG00000113194_23 (sequence is synthesized)
ggggttcagatcaacataaagcctaacttgctggagttgtagtctcaaggctttctctcttgcttaactaaaacctaaggaccactgtttttggtagcaattatatggttactatccact

SEQ ID NO: 194898 - DNA, 120 bp, Artificial Sequence
  ENSG00000113194_24 (sequence is synthesized)
gcagtcctcagttgttggggtaaatcccacatggcagagtaaggcaccccacagaaattaacttggagagcctgagaaattcccagtggccttggcatagctgtctagaacaccatctct

SEQ ID NO: 194899 - DNA, 120 bp, Artificial Sequence
  ENSG00000113194_25 (sequence is synthesized)
aggaaaatttaattctgtccctggccagctattgttcttccacttcgttttctgctgtcccaaggccagatgagtggaatcaccatctgactgctgtcaataaaatgtatctggcgtgaa

SEQ ID NO: 194900 - DNA, 120 bp, Artificial Sequence
  ENSG00000113194_26 (sequence is synthesized)
cagcaggataacccatgttctccacataaggataaccttacgtgaaaccttcctgctgacaaccatgcagaggaatttttccacttaagtcagagccttcctccccatctggaattcaca

SEQ ID NO: 194901 - DNA, 120 bp, Artificial Sequence
  ENSG00000113194_27 (sequence is synthesized)
gctgttccctggcagcacacaggagggtattaaggacctttgtgaggctaggtacactgtccacacctctttggggaagttacgattttttttttccatcataattcagtctcttcttat

SEQ ID NO: 194902 - DNA, 120 bp, Artificial Sequence
  ENSG00000113194_28 (sequence is synthesized)
tctacagtgtgcactttatgcctctcgccttttgataatagttgttcagtgaaggaagtcagctgccagaatattaagaagggtctccctttatgtcagtacaactgttagggcggcctt

SEQ ID NO: 194903 - DNA, 120 bp, Artificial Sequence
  ENSG00000113194_29 (sequence is synthesized)
cccatttactttaggtttcaagaggattcaccggaagcacatgccccggtctagtcccatttgaaacagttctgctttactgagaccctaggccggtctccttgctgaccctagcgctgc

SEQ ID NO: 194904 - DNA, 120 bp, Artificial Sequence
  ENSG00000113194_30 (sequence is synthesized)
tgcctaggtgccatttcctttcctcctcagtcaaatacaggctgcacattttgtcacttaatgccagtacaatctgtgttactcctaaggacttttgggattttgatgagacctgcgagg

SEQ ID NO: 194905 - DNA, 120 bp, Artificial Sequence
  ENSG00000113194_31 (sequence is synthesized)
gagaagacactgagaagccagtgatctgcaagcatttgctcttgtttccacatcacctctgggatatttcagctgttgtttccaaatggcaaatcatcaactaaaagcacttgtttcaag

SEQ ID NO: 194906 - DNA, 120 bp, Artificial Sequence
  ENSG00000113194_32 (sequence is synthesized)
ttttgttctgcactcccacgactgaagttgtagattgagctgaataaccatgggaagtgaccaagcaaagacactcgattggagtcagttgaatatttgtaccctcagtggagcccttct

SEQ ID NO: 194907 - DNA, 120 bp, Artificial Sequence
  ENSG00000113194_33 (sequence is synthesized)
ggtcttttcttccacttctgcagaatttcctctagcaaatacttctttctccttgcttgcctccaccatgatatttgaataagagatggccagaggataacacttgtctcttaaaaacta

SEQ ID NO: 194908 - DNA, 120 bp, Artificial Sequence
  ENSG00000113194_34 (sequence is synthesized)
agctaaaaagaacctagaaccttcaattgagcagttgtgaaaattgctaatggtgccaaggccaagcaaagagtttcagaaaatgactgagaaggagcgataacccccagaatgcaaaat

SEQ ID NO: 194909 - DNA, 120 bp, Artificial Sequence
  ENSG00000113194_35 (sequence is synthesized)
caggggcatcattatccggtgcttgaacaaggagctccgctctacaactggtttttttaggacttgtgaggaacacagcaacggaaatccatccacaaaggatgcagtgccccaacttgt

SEQ ID NO: 194910 - DNA, 120 bp, Artificial Sequence
  ENSG00000113194_36 (sequence is synthesized)
actgcgcctgaatagtcatgtgataatttactgaagaaatctagtgtactttaaatttttttcataaaagtttacattgtattgtaggttaacattaaatgttttatagcaaaaacttca

SEQ ID NO: 194911 - DNA, 120 bp, Artificial Sequence
  ENSG00000113194_37 (sequence is synthesized)
ttgaatatgaataactattgcagacaattgttttcagctatttcagatgggaaagaataaggacataggttttaaggagagctaatgcaggttgctgtttgaacaactggagaaggatga

SEQ ID NO: 194912 - DNA, 120 bp, Artificial Sequence
  ENSG00000113194_38 (sequence is synthesized)
catggacagagagaagggggaattaaaggagttatgcaggccagcagaggaagaaatgatcccttttctgcttgcacaggaggaagaaatttatgaccctcatccttttaaatgatagcc

SEQ ID NO: 194913 - DNA, 120 bp, Artificial Sequence
  ENSG00000113194_39 (sequence is synthesized)
tgaacgctgggctgtagaatcaaatttataagtcattttgaaaatctttcttttggcttcacctgactatattacctaaaggaaaaaaaaacacatggtgctttttgttcatgtatttaa

SEQ ID NO: 194914 - DNA, 120 bp, Artificial Sequence
  ENSG00000113194_40 (sequence is synthesized)
gcgctagtgcggagagacaaggctccaggcacggaaaagcagatgccgggccggggttccagcgccgcagtcacggcggtggacggcaagctgtgcggacgactgggggcgccatgaatg

SEQ ID NO: 194915 - DNA, 120 bp, Artificial Sequence
  ENSG00000113194_41 (sequence is synthesized)
gtcgaggatccggggagccgagtccagatcttcctgcaagtgaccccgaagcggcaatggaacggtggccgaagtctgcccacagcttccgcttcgaaggcggcgtcggaaatgccgcgc

SEQ ID NO: 194916 - DNA, 120 bp, Artificial Sequence
  ENSG00000113194_42 (sequence is synthesized)
tggtatttcggaacggctgcgtctcccgagaaacctccaagagtatctgaggttgccggaaaatggttagagagcagccgaaatcagccgaatgccattcgggatgctccggagcttctc

SEQ ID NO: 194917 - DNA, 120 bp, Artificial Sequence
  ENSG00000113194_43 (sequence is synthesized)
gaggcacattcgggccctctcggctctgcaagactgcactggaatcttaggtctcctttcgtcgcctaatcttagcagatcctttcgtcgcctaaatggatctcactggcatcgaatcta

SEQ ID NO: 194918 - DNA, 120 bp, Artificial Sequence
  ENSG00000113194_44 (sequence is synthesized)
ttcttctgtgcatcaggccgctattagcttttagctttgcccatttattgtcaaaatatttacatactttgacctaaattactctatatcaggtaatctgttcttagagatgttcaaaat

SEQ ID NO: 194919 - DNA, 120 bp, Artificial Sequence
  ENSG00000113194_45 (sequence is synthesized)
aaagacaagggctgggtgcagtggctaacacctgaaatcctagcacgttaggaggctgaggcaggaggattacttgaatccagactgggcagcaaagcgagaccccatctctacaaaaaa

SEQ ID NO: 194920 - DNA, 120 bp, Artificial Sequence
  ENSG00000113196_0 (sequence is synthesized)
agaagggttaaacaggtctttgggcttcggcgacctcgcccgcggcagaaaccggtaagaagacagtgggctgcgcgtctcattttcagccttgcccggactctcccaaagccggcgccc

SEQ ID NO: 194921 - DNA, 120 bp, Artificial Sequence
  ENSG00000113196_1 (sequence is synthesized)
agtagtggctccagagcccacaggtggcccccggcagtctctggggcgcatggagcggcgttaatagggctggcggcgcaggccagtagccgctccaacatgaacctcgtgggcagctac

SEQ ID NO: 194922 - DNA, 120 bp, Artificial Sequence
  ENSG00000113196_2 (sequence is synthesized)
gcacaccatcaccaccatcaccacccgcaccctgcgcaccccatgctccacgaacccttcctcttcggtccggcctcgcgctgtcatcaggaaaggccctacttccagagctggctgctg

SEQ ID NO: 194923 - DNA, 120 bp, Artificial Sequence
  ENSG00000113196_3 (sequence is synthesized)
acttccagagctggctgctgagcccggctgacgctgccccggacttccctgcgggcgggccgccgcccgcggccgctgcagccgccaccgcctatggtcctgacgccaggcctgggcaga

SEQ ID NO: 194924 - DNA, 120 bp, Artificial Sequence
  ENSG00000113196_4 (sequence is synthesized)
cttggcggccgtcttggccggcggaaaggctcaggacccaagaaggagcggagacgcactgagagcattaacagcgcattcgcggagttgcgcgagtgcatccccaacgtgccggccgac

SEQ ID NO: 194925 - DNA, 120 bp, Artificial Sequence
  ENSG00000113196_5 (sequence is synthesized)
accaagctctccaagatcaagactctgcgcctagccaccagctacatcgcctacctgatggacgtgctggccaaggatgcacagtctggcgatcccgaggccttcaaggctgaactcaag

SEQ ID NO: 194926 - DNA, 120 bp, Artificial Sequence
  ENSG00000113196_6 (sequence is synthesized)
aaggcggatggcggccgtgagagcaagcggaaaagggagctgcagcagcacgaaggttttcctcctgccctgggcccagtcgagaagaggattaaaggacgcaccggctggccgcagcaa

SEQ ID NO: 194927 - DNA, 120 bp, Artificial Sequence
  ENSG00000113196_7 (sequence is synthesized)
cagtgagccgaggcccgcgccgaggacctggccaggccagccactcctgaagccccgggaggagaggaaggcagcggcgaacgccaggctctgggctccggcgactggtgctacgcatcc

SEQ ID NO: 194928 - DNA, 120 bp, Artificial Sequence
  ENSG00000113196_8 (sequence is synthesized)
cgcggagcttctgctgagcgccggcaggtcgtcggctgcaaccacacacttggatcgcacgtgcaatgtcctttgattttttttaatacattaagagaaagagaaatatatatatatcca

SEQ ID NO: 194929 - DNA, 120 bp, Artificial Sequence
  ENSG00000113196_9 (sequence is synthesized)
cccccagcccaaccgagggcggcccttggcggcaacatgcaagaaggagggactgtcgaacccaagggctcaaagacgcactcttccacccttttggagcgaatttagaacctcagccct

SEQ ID NO: 194930 - DNA, 120 bp, Artificial Sequence
  ENSG00000113196_10 (sequence is synthesized)
atctccatttccctatctggctctttctctcttgtccctccatatgatccgccccgacgccgtcttctctaattaaaatgcaataaggaatcaattcttttctgcctgagaaagagaacc

SEQ ID NO: 194931 - DNA, 120 bp, Artificial Sequence
  ENSG00000113196_11 (sequence is synthesized)
agacgcaggaagatgaaaggctgccctttgttcttcgaatcgtggtggttttattttatttttctttttgtcgctgcacttcctgtttagttccaagggaaacactttctctctttctct

SEQ ID NO: 194932 - DNA, 120 bp, Artificial Sequence
  ENSG00000113196_12 (sequence is synthesized)
gtctctctcttttcttccttcttttccttcctttttgtttctatctaaataaaagctttccctgtgttggaaagtttttatgtatttaaactacctaccatgcctgttgtgctcaggtgt

SEQ ID NO: 194933 - DNA, 120 bp, Artificial Sequence
  ENSG00000113196_13 (sequence is synthesized)
ttgttcatcctgccatccccaacccttttctacctcaagtctgtgtgaccactcacagcccccctcccttcgccaaagcagtgtctatgctcttgattaataaaacattttctgaaatca

SEQ ID NO: 194934 - DNA, 120 bp, Artificial Sequence
  ENSG00000113205_0 (sequence is synthesized)
agtgtggtaaaccagcggttgagagcccaggcagatttttgagccagcaagtctgagcctctggaaaggcttattcactaggccgtctacaaaggttgtggggcaaaagactgtttccca

SEQ ID NO: 194935 - DNA, 120 bp, Artificial Sequence
  ENSG00000113205_1 (sequence is synthesized)
gctctgtctgaggttcagcttggcgacattccctggaagagcgtgacggaaagtgcaatggaggcgggaggagagcgatttcttagacaaaggcaagtcttgcttctctttgtttttctg

SEQ ID NO: 194936 - DNA, 120 bp, Artificial Sequence
  ENSG00000113205_2 (sequence is synthesized)
ggagggtctctggctgggtccgagtcaagacgctattctgtggctgaggaaaaagagaagggctttttaatagccaacctagcaaaggatctgggactaagggtagaggaactggccgcg

SEQ ID NO: 194937 - DNA, 120 bp, Artificial Sequence
  ENSG00000113205_3 (sequence is synthesized)
aggggggcccaagttgtgtccaaagggaacaaacagcattttcagctcagtcatcagacaggtgatttgctcctgaatgagaaattggaccgggaggagctatgcggccccacagaacca

SEQ ID NO: 194938 - DNA, 120 bp, Artificial Sequence
  ENSG00000113205_4 (sequence is synthesized)
tgcatactacattttcagatattactgcaaaaccctttgcaattcgttacaaacgagctccgtatcatagatgtaaatgaccattctccggtattctttgaaaatgaaatgcatctgaaa

SEQ ID NO: 194939 - DNA, 120 bp, Artificial Sequence
  ENSG00000113205_5 (sequence is synthesized)
atcctagaaagcactctgccaggaacagtaattcctttgggaaatgctgaggacttggatgtgggaagaaacagcctccaaaactacactatcactccgaattcccacttccacgtactc

SEQ ID NO: 194940 - DNA, 120 bp, Artificial Sequence
  ENSG00000113205_6 (sequence is synthesized)
actcgcagtcgtagggacggaaggaagtacccggaactagtactggataaagcgctcgatccggaggagcagccggaactcagcttaacgctcaccgcgctggacggcggctctccccct

SEQ ID NO: 194941 - DNA, 120 bp, Artificial Sequence
  ENSG00000113205_7 (sequence is synthesized)
cggtctgggacagcccagataaacatccaggtcttagatataaacgacaatgcaccagaatttgcacagccgctctatgaggttgcagttctagagaatacccccgttaactctgtcatt

SEQ ID NO: 194942 - DNA, 120 bp, Artificial Sequence
  ENSG00000113205_8 (sequence is synthesized)
gtcactgtctcggcttctgacttagatacaggaagttttgggacaatatcatatgcattttttcatgcttctgaagaaattcgcaaaacttttcagctaaatccaattactggtgatatg

SEQ ID NO: 194943 - DNA, 120 bp, Artificial Sequence
  ENSG00000113205_9 (sequence is synthesized)
caactggtcaaatatttgaattttgaagcgattaatagttatgaagtcgacatcgaggccaaggatggcggaggcctatccggaaagtctacagtcatagtccaggtggttgatgtcaac

SEQ ID NO: 194944 - DNA, 120 bp, Artificial Sequence
  ENSG00000113205_10 (sequence is synthesized)
gacaacccaccggaactgaccttgtcttcagtaaacagccctattcctgagaactcgggagagactgtactggctgttttcagtgtttctgatctagactctggagacaacggaagagtg

SEQ ID NO: 194945 - DNA, 120 bp, Artificial Sequence
  ENSG00000113205_11 (sequence is synthesized)
atgtgttccattgagaacaatctccccttcttcctgaaaccatctgtagagaatttttacaccctagtgtcagaaggcgcgctggacagagagaccagatccgagtacaacattaccatc

SEQ ID NO: 194946 - DNA, 120 bp, Artificial Sequence
  ENSG00000113205_12 (sequence is synthesized)
actatcactgacctggggacacccaggctgaaaaccaagtacaacataaccgtgctggtctccgacgtcaatgacaacgcccccgccttcacccaaatctcctacaccctgttcgtccgc

SEQ ID NO: 194947 - DNA, 120 bp, Artificial Sequence
  ENSG00000113205_13 (sequence is synthesized)
tctcttccctggtctccatcaacgcggacaacggccacctgtttgccctcaggtcgctggactacgaggccctgcaggcgttcgagttccgcgtgggcgccacagaccgtggctccccgg

SEQ ID NO: 194948 - DNA, 90 bp, Artificial Sequence
  ENSG00000113205_14 (sequence is synthesized)
ctcaaggccacggagcccgggctgttcggcgtgtgggcgcacaatggcgaagacgcggccaagcacaggctggtggtgctggtcaaggac

SEQ ID NO: 194949 - DNA, 120 bp, Artificial Sequence
  ENSG00000113205_15 (sequence is synthesized)
cctggtggacggcttctcccagccctacctgcctctcccggaggcggcaccggcccaggcccaggccgacttgctcaccgtctacctggtggtggcattggcctcggtgtcttcgctctt

SEQ ID NO: 194950 - DNA, 120 bp, Artificial Sequence
  ENSG00000113205_16 (sequence is synthesized)
ggctgtgcaggaggagcagggcggcctcggtgggtcgctgctcggtgcccgagggcccctttccagggcagatggtggacgtgagcggcaccgggaccctgtcccagagctaccagtacg

SEQ ID NO: 194951 - DNA, 120 bp, Artificial Sequence
  ENSG00000113205_17 (sequence is synthesized)
gcggcaccgggaccctgtcccagagctaccagtacgaggtgtgtctgactggaggctccgggacaaatgagttcaagttcctgaagccaattatccccaacttcgttgctcagggtgcag

SEQ ID NO: 194952 - DNA, 120 bp, Artificial Sequence
  ENSG00000113205_18 (sequence is synthesized)
agagggttagcgaggcaaatcccagtttcaggaagagctttgaattcagttaagtgttaataaggatctactgagcctcgtcttagttaatctgtggaaagtccttttttactgctttgt

SEQ ID NO: 194953 - DNA, 120 bp, Artificial Sequence
  ENSG00000113205_19 (sequence is synthesized)
ccattggagaggtcttttttggtctggttcaaggcaagtagcaagaatagagcaaaatatcaaatccagggatggcttaggtttcattaacagtactggaaagtagttgtgtggctctga

SEQ ID NO: 194954 - DNA, 120 bp, Artificial Sequence
  ENSG00000113205_20 (sequence is synthesized)
atgttttgtatttcaatcgagaatccttagtcgatagaacattttgtttatatattgattctactttttctgtagttaatccttgcatattctcctttcatcctggcttgccaacgcagt

SEQ ID NO: 194955 - DNA, 120 bp, Artificial Sequence
  ENSG00000113205_21 (sequence is synthesized)
cttaattccgccttttttttttctaatggggagcaaaaagaaattcactgtcttttaatagtgatttcaaatagcttattaaaataactccattcaaattttacattataaagcaatgta

SEQ ID NO: 194956 - DNA, 120 bp, Artificial Sequence
  ENSG00000113205_22 (sequence is synthesized)
gagagagttccaaaccaccaattttataatttcccttgttgaatatattcatataatgtgttctataatatgcccaaagcagctttgtctatagttaacaaagttttaaggatagacaag

SEQ ID NO: 194957 - DNA, 120 bp, Artificial Sequence
  ENSG00000113205_23 (sequence is synthesized)
tgttttctttaataaatagtaatatatcatctttttagggatatagtactcaaatgaaagtaatttagttcattttctgtgttgacatttgcaattaatatttcaatattttatgtgctt

SEQ ID NO: 194958 - DNA, 120 bp, Artificial Sequence
  ENSG00000113205_24 (sequence is synthesized)
gcttatattggccaaaatatggacacaaatatagactaatatgggtaattaccctttggtttatctaaagtgtgttcatgatgactgaggaaaaaaattaaacctatgccatttaaaaaa

SEQ ID NO: 194959 - DNA, 120 bp, Artificial Sequence
  ENSG00000113209_0 (sequence is synthesized)
aagagtgtggatagtgggctctgcggataactcagacgccattaagctggggaatccaaactctaaaagaaggacgcattttaggtaagatctagtggctagatcttcagggtgggcttc

SEQ ID NO: 194960 - DNA, 120 bp, Artificial Sequence
  ENSG00000113209_1 (sequence is synthesized)
gttcttgtggaaatcagtcaagaaagatcggattcgcggttatttatgcaaatcatctgggtggattgtgtacggagttaaactgcgccttctggaccgggtctgaacaatggagactgc

SEQ ID NO: 194961 - DNA, 120 bp, Artificial Sequence
  ENSG00000113209_2 (sequence is synthesized)
gctagcaaaaacgccacagaaaaggcaagttatgtttcttgctatattgttgcttttgtgggaggctggctctgaggcagttaggtattccataccagaagaaacagaaagtggctattc

SEQ ID NO: 194962 - DNA, 120 bp, Artificial Sequence
  ENSG00000113209_3 (sequence is synthesized)
tgtggccaacctggcaaaagacctgggtcttggggtgggggaactggccactcggggcgcgcgaatgcattacaaaggaaacaaagagctcttgcagcttgatataaagaccggcaattt

SEQ ID NO: 194963 - DNA, 120 bp, Artificial Sequence
  ENSG00000113209_4 (sequence is synthesized)
gcttctatatgaaaaactagaccgggaggtgatgtgcggggcgacagaaccctgtatattgcatttccagctcttactagaaaatccagtgcagttttttcaaactgatctgcagctcac

SEQ ID NO: 194964 - DNA, 120 bp, Artificial Sequence
  ENSG00000113209_5 (sequence is synthesized)
agatataaatgaccatgccccagagttcccagagaaggaaatgctcctaaaaatcccagagagcacccagccagggactgtgtttcccttaaaaatagcccaggactttgacataggtag

SEQ ID NO: 194965 - DNA, 120 bp, Artificial Sequence
  ENSG00000113209_6 (sequence is synthesized)
caacactgttcagaactacacaatcagcccaaattcacactttcatgttgctacgcataatcgcggagatggcagaaaatacccagagctggtgctggacaaagcgctggaccgggagga

SEQ ID NO: 194966 - DNA, 120 bp, Artificial Sequence
  ENSG00000113209_7 (sequence is synthesized)
gcggcctgagctcagcttaacactcactgcactggacggtggggctccgcccaggtccgggaccaccacaattcgcattgtcgtcttggataataatgacaacgcccccgaatttttaca

SEQ ID NO: 194967 - DNA, 120 bp, Artificial Sequence
  ENSG00000113209_8 (sequence is synthesized)
atcattctatgaggtacaggtgcccgagaacagcccccttaactccttagttgtcgttgtctccgctcgagatttagatgcaggagcatatgggagtgtagcctatgctctattccaagg

SEQ ID NO: 194968 - DNA, 120 bp, Artificial Sequence
  ENSG00000113209_9 (sequence is synthesized)
cgatgaagttactcaaccatttgtaatagacgagaaaacagcagaaattcgcctgaaaagggcattggatttcgaggcaactccatattataacgtggaaattgtagccacagatggtgg

SEQ ID NO: 194969 - DNA, 120 bp, Artificial Sequence
  ENSG00000113209_10 (sequence is synthesized)
gggcctttcaggaaaatgcactgtggctatagaagtggtggatgtgaatgacaacgcccctgaactcaccatgtctacgctctccagccctaccccagaaaatgccccggaaactgtagt

SEQ ID NO: 194970 - DNA, 120 bp, Artificial Sequence
  ENSG00000113209_11 (sequence is synthesized)
tgccgttttcagtgtttctgatccagactccggggacaacggtaggatgatttgctccatccagaatgatctcccctttcttttgaagcccacattaaaaaacttttacaccctagtgac

SEQ ID NO: 194971 - DNA, 120 bp, Artificial Sequence
  ENSG00000113209_12 (sequence is synthesized)
acagagaacactggacagagagagccaagccgagtacaacatcaccatcactgtcaccgacatggggacacccaggctgaaaaccgagcacaacataacggtcctggtctccgacgtcaa

SEQ ID NO: 194972 - DNA, 87 bp, Artificial Sequence
  ENSG00000113209_13 (sequence is synthesized)
ttcgtccgagtcagcgccacagacagagactcaggcaccaacgcccaggtcacctactcgctgctgccgccccagaacccacacctg

SEQ ID NO: 194973 - DNA, 120 bp, Artificial Sequence
  ENSG00000113209_14 (sequence is synthesized)
ccctggtctccatcaacgcggacaacggccacctgtttgccctcaggtcgctggactacgaggccctgcaggcgttcgagttccgcgtgggagccacagaccgcggctccccggcgctga

SEQ ID NO: 194974 - DNA, 120 bp, Artificial Sequence
  ENSG00000113209_15 (sequence is synthesized)
tggtggacggcttctcccagccctacctgccgctgccggaggcggccccggcccaggcccaggccgactcgctcactgtctacctggtggtggcattggcctcggtgtcgtcgctcttcc

SEQ ID NO: 194975 - DNA, 120 bp, Artificial Sequence
  ENSG00000113209_16 (sequence is synthesized)
gcggctgtgcaggaggagcagggcggccccggtcggtcgctgctcggtgcccgagggcccctttccagggcatctggtggacgtgagcggcaccgggaccctatcccagagctaccacta

SEQ ID NO: 194976 - DNA, 120 bp, Artificial Sequence
  ENSG00000113209_17 (sequence is synthesized)
ccgggaccctatcccagagctaccactacgaggtgtgtttgaccggagactcaggggccggcgagttcaagttcctgaagccgattattcctaaccttttgccccagggcgctggtgaag

SEQ ID NO: 194977 - DNA, 120 bp, Artificial Sequence
  ENSG00000113209_18 (sequence is synthesized)
aaatagggaaaactgctgccttccggaatagctttggattaaattagagatctcgtgatgacgcgttgttttctgccatttatcccaaactttttcagatctagaattcgagagtgtcat

SEQ ID NO: 194978 - DNA, 120 bp, Artificial Sequence
  ENSG00000113209_19 (sequence is synthesized)
ggacaaaaatttcaccttgagattgagcttttatttccctttttaatggatttgtctgttgaacttcatgctgtccaagtgttgaaaagtcaattttatttcattgcatttatttacata

SEQ ID NO: 194979 - DNA, 120 bp, Artificial Sequence
  ENSG00000113209_20 (sequence is synthesized)
gtgtcattccaaatccatgcatgctgttgattttcctgagatttttttctcttcttgttggtatttgttgtgataaaccaccttaataaaatcaagtattaattttattttctatatatt

SEQ ID NO: 194980 - DNA, 120 bp, Artificial Sequence
  ENSG00000113209_21 (sequence is synthesized)
ctgcccattctatttcatcacactcttaagtattatatatttgatgctaaaatgcaaaaattaaaaatgtttcacatcatcatattttaattgtttaaaacaaagacaaatacatacata

SEQ ID NO: 194981 - DNA, 120 bp, Artificial Sequence
  ENSG00000113209_22 (sequence is synthesized)
tgctaacaaatgaaatatgtgaaaaaatatgtaaaaggaaacaatcttctatttactcttttttgcagccctgagtcctattagcaaactttttaaaaacagtttaattgaattattact

SEQ ID NO: 194982 - DNA, 120 bp, Artificial Sequence
  ENSG00000113209_23 (sequence is synthesized)
tacatgaagaaaaatgaacaaatcctttatgttcaactcaatatatattcacaaagtaacatatttattaccagcagcttgaagagaaaatgaaacatcactggcaccccaggtgccaca

SEQ ID NO: 194983 - DNA, 120 bp, Artificial Sequence
  ENSG00000113209_24 (sequence is synthesized)
caaattactccttacaatcactactaccccaagtatagcaaatatgctgacttccaataccatagtttaattttgcctcttctgaatttatataaatggagtaataaagtatgaactgct

SEQ ID NO: 194984 - DNA, 69 bp, Artificial Sequence
  ENSG00000113209_25 (sequence is synthesized)
ctcaaggccacggagcccgggctgttcagcgacgcggccaagcacaggctggtggtgctggtcaaggac

SEQ ID NO: 194985 - DNA, 120 bp, Artificial Sequence
  ENSG00000113211_0 (sequence is synthesized)
gagtgaatgaaagctctgcagactcggtggactccgtttcatccagaagccaagtaaaaatacagaccacgtttacagctaaagctgagatagatgtgtccgggaaggcagtcgtcgcca

SEQ ID NO: 194986 - DNA, 120 bp, Artificial Sequence
  ENSG00000113211_1 (sequence is synthesized)
gacaagttgtaagaacgaatttaaaaatctctgcaaagacatccgagagggtcgacggtagatgtggtgattgggagctgaaaaggatttttcttccgtattcagacataatagacatga

SEQ ID NO: 194987 - DNA, 120 bp, Artificial Sequence
  ENSG00000113211_2 (sequence is synthesized)
tgcaaactaaagtacagaacaagaaaaggcaagtggctttcttcattttattgatgctttggggagaggtgggttctgaatcgattcagtattccgtattggaggagacagaaagtggca

SEQ ID NO: 194988 - DNA, 120 bp, Artificial Sequence
  ENSG00000113211_3 (sequence is synthesized)
cgtttgtggccaacttgacaaaggacctgggactgagggtgggggagctggcttcgcggggcgctcgggttgttttcaaagggaacagacaacatttgcagtttgatccacagacccatg

SEQ ID NO: 194989 - DNA, 120 bp, Artificial Sequence
  ENSG00000113211_4 (sequence is synthesized)
atttactgctaaatgaaaaactggaccgggaggagctgtgtggctccactgagccgtgtgtgctacctttccaagtgttactggaaaaccccttgcagttttttcaggcttccttgcgag

SEQ ID NO: 194990 - DNA, 120 bp, Artificial Sequence
  ENSG00000113211_5 (sequence is synthesized)
tcagagatataaatgaccacgccccggaattccctgccagagaaatgctcctgaaaatatcagaaattactatgccaggaaagatatttcctttgaaaatggcacacgatttagacaccg

SEQ ID NO: 194991 - DNA, 120 bp, Artificial Sequence
  ENSG00000113211_6 (sequence is synthesized)
gcagcaacggccttcagaggtacacaatcagctccaaccctcacttccacgttctcacccgcaatcgcagcgaaggcaggaagttcccggagctggtgctagacaaaccgttggaccgcg

SEQ ID NO: 194992 - DNA, 120 bp, Artificial Sequence
  ENSG00000113211_7 (sequence is synthesized)
aggagcagccccaactcaggctaacgctgatcgcgctggatggcgggtctccgccccggtcagggacctccgagattcagatccaggttttggacatcaatgacaacgtccccgagtttg

SEQ ID NO: 194993 - DNA, 120 bp, Artificial Sequence
  ENSG00000113211_8 (sequence is synthesized)
ctcaggagctctatgaagcacaagtccctgagaacaaccccctcggctctctggttattaccgtctcagccagagatttagatgcaggatcgtttgggaaggtatcttacgccctgtttc

SEQ ID NO: 194994 - DNA, 120 bp, Artificial Sequence
  ENSG00000113211_9 (sequence is synthesized)
aagtcgatgacgtcaaccaacccttcgaaataaacgcaatcacaggagaaattcggctgagaaaggctttggattttgaggaaattcagtcttatgacgtggatgttgaggctacagatg

SEQ ID NO: 194995 - DNA, 120 bp, Artificial Sequence
  ENSG00000113211_10 (sequence is synthesized)
gtggaggcctatcaggaaaatgctctttagtcgtcagggtcctggacgtgaatgacaatgcccctgaactcaccatgtcgttcttcatcagcctcatcccagaaaacttaccagagatca

SEQ ID NO: 194996 - DNA, 120 bp, Artificial Sequence
  ENSG00000113211_11 (sequence is synthesized)
cagtggcagttttcagtgtttcagatgcagactctggacataaccaacaggttatttgttcaatagagaacaatctcccctttctactaagaccttccgtggagaatttctacaccctgg

SEQ ID NO: 194997 - DNA, 120 bp, Artificial Sequence
  ENSG00000113211_12 (sequence is synthesized)
taacagaaggcgcgctggacagagagagcagagccgagtacaacatcactatcacggtcactgatttggggacaccaaggctgaaaacccagcagagcataactgtgcaggtctccgacg

SEQ ID NO: 194998 - DNA, 120 bp, Artificial Sequence
  ENSG00000113211_13 (sequence is synthesized)
caacagccccgccctgcacatcggcagcgtcagcgccacagacagagactcaggcatcaacgcccaggtcacctactcgctgctgccgccccaggacccgcacctgcccctctcttccct

SEQ ID NO: 194999 - DNA, 120 bp, Artificial Sequence
  ENSG00000113211_14 (sequence is synthesized)
ccccaggacccgcacctgcccctctcttccctggtctccatcaacgcggacaacggccacctgtttgccctcaggtcgctggactacgaggccctgcagtctttcgagttccgcgtgggc

SEQ ID NO: 195000 - DNA, 89 bp, Artificial Sequence
  ENSG00000113211_15 (sequence is synthesized)
ggactacgaggccctgcagtctttcgagttccgcgtgggcgccacagaccgcggctccccggcgttgagcagcgaggcgctggtgcgct

SEQ ID NO: 195001 - DNA, 68 bp, Artificial Sequence
  ENSG00000113211_16 (sequence is synthesized)
ggtctgttcgggacgcagccaagcacaggctggtggtgcttgtcaaggacaatggcgagcctccgcgc

SEQ ID NO: 195002 - DNA, 120 bp, Artificial Sequence
  ENSG00000113211_17 (sequence is synthesized)
ctcctggtggacggcttctcccagccctacctgcctctccctgaggcggccccggcccaagcccaggccgactctctcaccgtctacctggtggtggcgttggcctcggtgtcgtcgctc

SEQ ID NO: 195003 - DNA, 75 bp, Artificial Sequence
  ENSG00000113211_18 (sequence is synthesized)
cggtgggtcgctactcggtgcccgagggtccctttccagggcatctggtggatgtgagcggcaccgggaccctat

SEQ ID NO: 195004 - DNA, 120 bp, Artificial Sequence
  ENSG00000113211_19 (sequence is synthesized)
ccagggcatctggtggatgtgagcggcaccgggaccctatcccagagctaccagtacaaggtgtgtctgacgggaggctcagaaacaaatgagttcaagttcctgaagccgattatgccc

SEQ ID NO: 195005 - DNA, 120 bp, Artificial Sequence
  ENSG00000113211_20 (sequence is synthesized)
aacttccctcctcagggcactgagagagaaatggaagaaacccccacctctcggaatagcttcccgttcagttaagtgtgggattattttactaaatcttacttatgtttggagatctct

SEQ ID NO: 195006 - DNA, 120 bp, Artificial Sequence
  ENSG00000113211_21 (sequence is synthesized)
tttaacttaaagttacatggtctgtttcttgtttattttacctctattctttaggttgaaattttatataaagtaagatactggtatcttagtatttcctgttcatgcttagtagtttat

SEQ ID NO: 195007 - DNA, 120 bp, Artificial Sequence
  ENSG00000113211_22 (sequence is synthesized)
tacttcacttgagggtacttgacaatatgaacaaaaagtaaatttttatttgcataattttaagcttttgaaattaaattatctattcttcccccccccaaaaaaaagtattgtaaatcc

SEQ ID NO: 195008 - DNA, 120 bp, Artificial Sequence
  ENSG00000113211_23 (sequence is synthesized)
ttaagtaaaattgtatttctagctattggtaagagttgtttcactattgctatgtaggactgtttaaaatgtgagtatctgatattatttaatcctccaatgtctcattttgcagtaact

SEQ ID NO: 195009 - DNA, 120 bp, Artificial Sequence
  ENSG00000113211_24 (sequence is synthesized)
cctacagtgtgtaacactaaaaataagaactaatgatggctaaacactaaagtagccattcatacttatgcatattttagtatcccataatagtcaatccaaaatttttgtgactataga

SEQ ID NO: 195010 - DNA, 120 bp, Artificial Sequence
  ENSG00000113211_25 (sequence is synthesized)
ctttactgaagtgtcaacacattagtttgtgagcctcatgtaagaacatgatggtctttttttaaaaaaaaagtcgtgccaattataagtgcttaataaatatttgctgaatgttactaa

SEQ ID NO: 195011 - DNA, 120 bp, Artificial Sequence
  ENSG00000113212_0 (sequence is synthesized)
agagcaaagaggcaatctgaagagaaaagcataggaaaggaaacagtggtaataggaattggggtaaaatgaggatccttccccacaaacattgctattattcagctcatttcaaaggat

SEQ ID NO: 195012 - DNA, 120 bp, Artificial Sequence
  ENSG00000113212_1 (sequence is synthesized)
tccgctgctgccatttgtgagagccgctggaggctgagtgaaagtcattttgaaagactgatccaaagaagaatggaggccagagtggagcgtgctgtgcagaaaaggcaagtcttattt

SEQ ID NO: 195013 - DNA, 120 bp, Artificial Sequence
  ENSG00000113212_2 (sequence is synthesized)
ctttgtgtatttctgggaatgtcttgggctggcgccgaaccgcttcggtattttgtggcggaggaaaccgagagaggcacctttcttaccaacttggcaaaagacctagggttaggggta

SEQ ID NO: 195014 - DNA, 120 bp, Artificial Sequence
  ENSG00000113212_3 (sequence is synthesized)
ggggaactgagagcccggggaactagaattgtttcagaccagaacatgcaaattttactgctcagttcgcttactggtgatctacttctaaatgagaaattggaccgagaggaactgtgt

SEQ ID NO: 195015 - DNA, 120 bp, Artificial Sequence
  ENSG00000113212_4 (sequence is synthesized)
ggccccagagagccctgtgtgctgcctttccagttgttattggaaaaaccttttcagattttccgtgctgaactatgggtcagagacatcaatgatcacgctccagtatttctagacaga

SEQ ID NO: 195016 - DNA, 120 bp, Artificial Sequence
  ENSG00000113212_5 (sequence is synthesized)
gagatttccttgaaaatattagaaagtaccactccaggggcggcatttctcctagagagtgcacaggattcagatgttggaaccaacagcctgagtaactacaccatcagccccaatgcc

SEQ ID NO: 195017 - DNA, 120 bp, Artificial Sequence
  ENSG00000113212_6 (sequence is synthesized)
tatttccatattaatgtccatgatagcggggaggggaatatctatcccgaattggtgctgaatcaagtgctggatcgggaagagataccagagttcagtttaaccctcaccgctttagac

SEQ ID NO: 195018 - DNA, 120 bp, Artificial Sequence
  ENSG00000113212_7 (sequence is synthesized)
ggcggctctcctccaagatcagggaccgccctcgtgcgcattctggttctagacgtaaatgacaacgcccctgattttgtgcggtcgctctacaaggtgcaggtgcccgaaaatagcccc

SEQ ID NO: 195019 - DNA, 120 bp, Artificial Sequence
  ENSG00000113212_8 (sequence is synthesized)
gttggttccatggttgtctccgtgtcagccagagatttagataccggaagtaatggggaaatagcctatgcattttcttacgccactgaaagaattctcaaaacgtttcaaatcaatcca

SEQ ID NO: 195020 - DNA, 120 bp, Artificial Sequence
  ENSG00000113212_9 (sequence is synthesized)
acatctggcagtcttcatcttaaagcgcaattggactatgaggcaattcaaacttacacattaactattcaggccaaagacggcggcgggctttctggaaaatgcactgtagtggttgat

SEQ ID NO: 195021 - DNA, 120 bp, Artificial Sequence
  ENSG00000113212_10 (sequence is synthesized)
gtaacagatataaacgataatcgacccgagctgctcctgtcttcacttactagcccaattgcagaaaactcacccgagacagtcgtggctgtttttaggattagagacagagattccggg

SEQ ID NO: 195022 - DNA, 120 bp, Artificial Sequence
  ENSG00000113212_11 (sequence is synthesized)
aacaatggaaagacagtgtgctccatccaggacgatgtccccttcatcctgaagccatctgtcgaaaacttctatactctggtaacagagaaacctttggatcgagagaggaacactgag

SEQ ID NO: 195023 - DNA, 120 bp, Artificial Sequence
  ENSG00000113212_12 (sequence is synthesized)
tacaacatcaccatcaccgtcaccgacttggggacacccaggctgaaaaccgagcacaacataaccgtgctggtctccgacgtcaatgacaacgctcccgccttcacccaaacctcctac

SEQ ID NO: 195024 - DNA, 120 bp, Artificial Sequence
  ENSG00000113212_13 (sequence is synthesized)
accctgtttgtccgtgagaacaacagccccgccctgcccatcggcagtgtcagcgccacagacagagactcgggcaccaacgcccaggtcatctactccctgctgccgtcccaggacccg

SEQ ID NO: 195025 - DNA, 120 bp, Artificial Sequence
  ENSG00000113212_14 (sequence is synthesized)
cacctgcccctcgcctccctggtctccatcaacgcggacaacggccacctgtttgccctcaggtccctggactacgaggccctgcaggcgttcgagttccgcgtgggcgccacagaccgc

SEQ ID NO: 195026 - DNA, 66 bp, Artificial Sequence
  ENSG00000113212_15 (sequence is synthesized)
ttcggcgtgtgggcgcacaatggcgaggtgcgtaccgccaggctgctgagcgagcgcgacgcagcc

SEQ ID NO: 195027 - DNA, 85 bp, Artificial Sequence
  ENSG00000113212_16 (sequence is synthesized)
cggagcccgggctattcggcgtgtgggcgcacaatggcgaggtgcgtaccgccaggctgctgagcgagcgcgacgcagccaagca

SEQ ID NO: 195028 - DNA, 120 bp, Artificial Sequence
  ENSG00000113212_17 (sequence is synthesized)
ggacggcttctcccagccctacctgcggctcccggaggcggccccggaccaggccaactcgctcaccgtctacctggtggtggcgttggcctcggtgtcttcgctcttcctcctctcggt

SEQ ID NO: 195029 - DNA, 120 bp, Artificial Sequence
  ENSG00000113212_18 (sequence is synthesized)
ggctgtgcaggaggagcagggcggccccggtgggtcgctgctcggtgcctgagggcccctttccacgacatctggtggacttgagcggcaccgggaccctatcccagagctaccagtatg

SEQ ID NO: 195030 - DNA, 120 bp, Artificial Sequence
  ENSG00000113212_19 (sequence is synthesized)
atcccagagctaccagtatgaggtgtgcctgactggaggctccgggacaaatgagttcaagtttctgaaaccaattatccccaacctgctaccccagagcacaggcagggaagtggaaga

SEQ ID NO: 195031 - DNA, 120 bp, Artificial Sequence
  ENSG00000113212_20 (sequence is synthesized)
aaatcgcccatttcagaataatttgggtttctgataaagaatgtaaactaaatccgcgtctgtgaatacgtttctgattaggaacttattgcgaggttcccttaagggagtgtctttaca

SEQ ID NO: 195032 - DNA, 120 bp, Artificial Sequence
  ENSG00000113212_21 (sequence is synthesized)
tcatttcaaatatgtactcttgaagtcaagcaataaatttctatacataaaataggatcctgatttagtatcaagaacccttcacaaagcatgaaatgtatatgtgtaatgttttatgtc

SEQ ID NO: 195033 - DNA, 120 bp, Artificial Sequence
  ENSG00000113212_22 (sequence is synthesized)
aaacaattatgcttaatatacagtctattaaatgtaagtcttgtttgagatattttaaattgctttccattgttttcaatctctactgagacttcctgagttgattagaaagctgtatga

SEQ ID NO: 195034 - DNA, 120 bp, Artificial Sequence
  ENSG00000113212_23 (sequence is synthesized)
gtgtacctaccctagtctcagaagcatagactgtagagtatctttttaagcatttttaaaaaatgcttttaatgcatcatacactattttaacacttttaatctgagaagaagcatatga

SEQ ID NO: 195035 - DNA, 120 bp, Artificial Sequence
  ENSG00000113212_24 (sequence is synthesized)
ggcatggtattttaggaatgaacaaatagatggtcttagagattcagtaagttcactaagttccactaactaataagtgacaaaactgagcatccatcccagatctgtctgactctgggt

SEQ ID NO: 195036 - DNA, 120 bp, Artificial Sequence
  ENSG00000113212_25 (sequence is synthesized)
cagtgaccctgctccgattccatactgttttctgtcattagatatcacctggcaagtttctgcctaattaaggagaagtcttttatcatatttatactgctgtccaatcttttctatatt

SEQ ID NO: 195037 - DNA, 120 bp, Artificial Sequence
  ENSG00000113212_26 (sequence is synthesized)
tagaaataataatgtacatatttatctatggttttattttcttatacaccaaaagtcctgcttttctgggtcaattttcaactattattactaatgctctgatctgtccaaactcaagcg

SEQ ID NO: 195038 - DNA, 120 bp, Artificial Sequence
  ENSG00000113212_27 (sequence is synthesized)
gaaaacaaaattgaaagggcaacctgtgccttctcctttcttcagaacatatgactttcatttcccagaaaaaagattaatggtcctgagtaggaatattacataattttgattgcatca

SEQ ID NO: 195039 - DNA, 120 bp, Artificial Sequence
  ENSG00000113212_28 (sequence is synthesized)
ttagttaattattttcttcatattgtagattttctgcagtcacccatacttaacatttgtaatacattttcctgatttgaaagtttgtttttaaaagttttctattaattatagtgcact

SEQ ID NO: 195040 - DNA, 120 bp, Artificial Sequence
  ENSG00000113212_29 (sequence is synthesized)
attgaatcaggaaaatttaagaaaaagaatagttagttttaaatgcataatatcaaagagaatcatagatgatcattaaatttttagaaattctcggaagttaaggagaagcactgtttt

SEQ ID NO: 195041 - DNA, 120 bp, Artificial Sequence
  ENSG00000113231_0 (sequence is synthesized)
gcggccgcgggcgcgggcgggcgcgcgggggagcccggccgagggatgggctgcgcccccagcatccatgtctcgcagagcggcgtgatctactgccgggactcggacgagtccagctcg

SEQ ID NO: 195042 - DNA, 120 bp, Artificial Sequence
  ENSG00000113231_1 (sequence is synthesized)
gagtccagctcgccccgccagaccaccagcgtgtcgcagggcccggcggcacccctgcccggcctcttcgtccagaccgacgccgccgacgccatccccccgagccgcgcgtcgggaccc

SEQ ID NO: 195043 - DNA, 120 bp, Artificial Sequence
  ENSG00000113231_2 (sequence is synthesized)
cagggcccgcaccgagctgggcagcggtagcagcgcgggttccgcagcccccgccgcgaccaccagcaggggccggaggcgccactgctgcagcagcgccgaggccgagactcagacctg

SEQ ID NO: 195044 - DNA, 120 bp, Artificial Sequence
  ENSG00000113231_3 (sequence is synthesized)
cagacctgctacaccagcgtgaagcaggtgtcttctgcggaggtgcgcatcgggcccatgagactgacgcaggaccctattcaggttttgctgatctttgcaaaggaagatagtcagagc

SEQ ID NO: 195045 - DNA, 120 bp, Artificial Sequence
  ENSG00000113231_4 (sequence is synthesized)
gatggcttctggtgggcctgcgacagagctggttatagatgcaatattgctcggactccagagtcagcccttgaatgctttcttgataagcatcatgaaattattgtaattgatcataga

SEQ ID NO: 195046 - DNA, 120 bp, Artificial Sequence
  ENSG00000113231_5 (sequence is synthesized)
caaactcagaacttcgatgcagaagcagtgtgcaggtcgatccgggccacaaatccctccgagcacacggtgatcctcgcagtggtttcgcgagtatcggatgaccatgaagaggcgtca

SEQ ID NO: 195047 - DNA, 120 bp, Artificial Sequence
  ENSG00000113231_6 (sequence is synthesized)
gtccttcctcttctccacgcaggcttcaacaggagatttatggagaatagcagcataattgcttgctataatgaactgattcaaatagaacatggggaagttcgctcccagttcaaatta

SEQ ID NO: 195048 - DNA, 120 bp, Artificial Sequence
  ENSG00000113231_7 (sequence is synthesized)
cgggcctgtaattcagtgtttacagcattagatcactgtcatgaagccatagaaataacaagcgatgaccacgtgattcagtatgtcaacccagccttcgaaaggatgatgggctaccac

SEQ ID NO: 195049 - DNA, 120 bp, Artificial Sequence
  ENSG00000113231_8 (sequence is synthesized)
aaaggtgagctcctgggaaaagaactcgctgatctgcccaaaagcgataagaaccgggcagaccttctcgacaccatcaatacatgcatcaagaagggaaaggagtggcagggggtttac

SEQ ID NO: 195050 - DNA, 120 bp, Artificial Sequence
  ENSG00000113231_9 (sequence is synthesized)
tatgccagacggaaatccggggacagcatccaacagcacgtgaagatcaccccagtgattggccaaggagggaaaattaggcattttgtctcgctcaagaaactgtgttgtaccactgac

SEQ ID NO: 195051 - DNA, 120 bp, Artificial Sequence
  ENSG00000113231_10 (sequence is synthesized)
aataataagcagattcacaagattcatcgtgattcaggagacaattctcagacagagcctcattcattcagatataagaacaggaggaaagagtccattgacgtgaaatcgatatcatct

SEQ ID NO: 195052 - DNA, 120 bp, Artificial Sequence
  ENSG00000113231_11 (sequence is synthesized)
cgaggcagtgatgcaccaagcctgcagaatcgtcgctatccgtccatggcgaggatccactccatgaccatcgaggctcccatcacaaaggttataaatataatcaatgcagcccaagaa

SEQ ID NO: 195053 - DNA, 120 bp, Artificial Sequence
  ENSG00000113231_12 (sequence is synthesized)
aacagcccagtcacagtagcggaagccttggacagagttctagagattttacggaccacagaactgtactcccctcagctgggtaccaaagatgaagatccccacaccagtgatcttgtt

SEQ ID NO: 195054 - DNA, 120 bp, Artificial Sequence
  ENSG00000113231_13 (sequence is synthesized)
ggaggcctgatgactgacggcttgagaagactgtcaggaaacgagtatgtgtttactaagaatgtgcaccagagtcacagtcaccttgcaatgccaataaccatcaatgatgttccccct

SEQ ID NO: 195055 - DNA, 120 bp, Artificial Sequence
  ENSG00000113231_14 (sequence is synthesized)
tgtatctctcaattacttgataatgaggagagttgggacttcaacatctttgaattggaagccattacgcataaaaggccattggtttatctgggcttaaaggtcttctctcggtttgga

SEQ ID NO: 195056 - DNA, 120 bp, Artificial Sequence
  ENSG00000113231_15 (sequence is synthesized)
gtatgtgaatttttaaactgttctgaaaccactcttcgggcctggttccaagtgatcgaagccaactaccactcttccaatgcctaccacaactccacccatgctgccgacgtcctgcac

SEQ ID NO: 195057 - DNA, 120 bp, Artificial Sequence
  ENSG00000113231_16 (sequence is synthesized)
gccaccgctttctttcttggaaaggaaagagtaaagggaagcctcgatcagttggatgaggtggcagccctcattgctgccacagtccatgacgtggatcacccgggaaggaccaactct

SEQ ID NO: 195058 - DNA, 120 bp, Artificial Sequence
  ENSG00000113231_17 (sequence is synthesized)
ttcctctgcaatgcaggcagtgagcttgctgtgctctacaatgacactgctgttctggagagtcaccacaccgccctggccttccagctcacggtcaaggacaccaaatgcaacattttc

SEQ ID NO: 195059 - DNA, 120 bp, Artificial Sequence
  ENSG00000113231_18 (sequence is synthesized)
aagaatattgacaggaaccattatcgaacgctgcgccaggctattattgacatggttttggcaacagagatgacaaaacactttgaacatgtgaataagtttgtgaacagcatcaacaag

SEQ ID NO: 195060 - DNA, 120 bp, Artificial Sequence
  ENSG00000113231_19 (sequence is synthesized)
ccaatggcagctgagattgaaggcagcgactgtgaatgcaaccctgctgggaagaacttccctgaaaaccaaatcctgatcaaacgcatgatgattaagtgtgctgacgtggccaaccca

SEQ ID NO: 195061 - DNA, 120 bp, Artificial Sequence
  ENSG00000113231_20 (sequence is synthesized)
tgccgccccttggacctgtgcattgaatgggctgggaggatctctgaggagtattttgcacagactgatgaagagaagagacagggactacctgtggtgatgccagtgtttgaccggaat

SEQ ID NO: 195062 - DNA, 120 bp, Artificial Sequence
  ENSG00000113231_21 (sequence is synthesized)
acctgtagcatccccaagtctcagatctctttcattgactacttcataacagacatgtttgatgcttgggatgcctttgcacatctgccagccctgatgcaacatttggctgacaactac

SEQ ID NO: 195063 - DNA, 120 bp, Artificial Sequence
  ENSG00000113231_22 (sequence is synthesized)
aaacactggaagacactagatgacctaaagtgcaaaagtttgaggcttccatctgacagctaaagccaagccacagagggggcctcttgaccgacaaaggacactgtgaatcacagtagc

SEQ ID NO: 195064 - DNA, 120 bp, Artificial Sequence
  ENSG00000113231_23 (sequence is synthesized)
gtaaacgagaggccttcctttctaatgacaatgacaggtattggtgaaggagctaatgtttaatatttgaccttgaatcattcaagtccccaaatttcattcttagaaagttatgttcca

SEQ ID NO: 195065 - DNA, 120 bp, Artificial Sequence
  ENSG00000113231_24 (sequence is synthesized)
cctgtgtacccttgtcaatccatggagctggttcactgtaactagcaggccacaggaagcaaagccttggtgcctgtgagctcatctcccaggatggtgactaagtagcttagctagtga

SEQ ID NO: 195066 - DNA, 120 bp, Artificial Sequence
  ENSG00000113231_25 (sequence is synthesized)
tcagctcatcctttaccataaaagtcatcattgctgtttagcttgactgttttcctcaagaacatcgatctgaaggattcataaggagcttatctgaacagatttatctaagaaaaaaaa

SEQ ID NO: 195067 - DNA, 120 bp, Artificial Sequence
  ENSG00000113231_26 (sequence is synthesized)
aaaacgacataaaataagtgaaacaactaggaccaaattacagataaactagttagcttcacagcctctatggctacatggttcttctggccgatggtatgacacctaagttagaacaca

SEQ ID NO: 195068 - DNA, 120 bp, Artificial Sequence
  ENSG00000113231_27 (sequence is synthesized)
gccttggctggtgggtgccctctctagactggtatcagcagcctgtgtaacccctttcctgtaaaaggggttcatcttaacaaagtcatccatgatgagggaaaaagtggcatttcattt

SEQ ID NO: 195069 - DNA, 120 bp, Artificial Sequence
  ENSG00000113231_28 (sequence is synthesized)
ttggggaatccatgagcttcctttatttctggctcacagaggcagccacgaggcactacaccaagtattatataaaagccattaaatttgaatgcccttggacaagcttttcttaaaaaa

SEQ ID NO: 195070 - DNA, 120 bp, Artificial Sequence
  ENSG00000113231_29 (sequence is synthesized)
aaaaaaaaaaagtttatatacatgtttaaaatttttattaaaatccaaattttctgggtgtaagcccatgcagtatgttgtgccatgcaccatctatacgtaatattttgggaggggata

SEQ ID NO: 195071 - DNA, 120 bp, Artificial Sequence
  ENSG00000113231_30 (sequence is synthesized)
ggggaagtttcaaggttcagatatttttaaccagtctatatttgaaatcatgccattagctttaacaatgttaaaattgtgtggtgtaaatatatcagaaaataggcatatggggaggca

SEQ ID NO: 195072 - DNA, 120 bp, Artificial Sequence
  ENSG00000113231_31 (sequence is synthesized)
gtaaatactattttaagctattaattgtatgctaaaagcttctaaagcacaagtgcatatttttatactgctcttttcacaactccctgtgatctacataaagtcagactcgagattttc

SEQ ID NO: 195073 - DNA, 120 bp, Artificial Sequence
  ENSG00000113231_32 (sequence is synthesized)
ctttctcttttaccagctgatccttcctatgtattataaatattagactccgtaaacaaacttcatttttctttctctgtacttcatgctgcatttttaaaaggtataaacaaacagaga

SEQ ID NO: 195074 - DNA, 120 bp, Artificial Sequence
  ENSG00000113231_33 (sequence is synthesized)
ctgaattaattgaatcagtaattacttttttccaatacaaattggaatgcagaatacttggaacttgtacatggggaaaaaatgacttatcactacataatgtgccaatgtttttttcta

SEQ ID NO: 195075 - DNA, 120 bp, Artificial Sequence
  ENSG00000113231_34 (sequence is synthesized)
tgttttgtaccaaaaatggaaaaatatgacaattccatgcaaagaaatgtatctaaattatttttgttagatgataagagaacttgcttggtcaggacagcagccagctttgtattgtaa

SEQ ID NO: 195076 - DNA, 120 bp, Artificial Sequence
  ENSG00000113231_35 (sequence is synthesized)
tgctatattatgtaaatgtgatgaaaatgtttttgtgaagtacttgtaactaaattcctacagccatttttcactcccaacagctgtttttattttacctctttggcctaaagttttcat

SEQ ID NO: 195077 - DNA, 120 bp, Artificial Sequence
  ENSG00000113231_36 (sequence is synthesized)
aatttcaaatttggggtttagtgtcctttatttcatgagtcacacactttgttttcagagcacattaaaatcaggatgccagaatcccatattaaggacctagctaacttgcctaggctt

SEQ ID NO: 195078 - DNA, 120 bp, Artificial Sequence
  ENSG00000113231_37 (sequence is synthesized)
cagaagcttgcttgaggcaaggacaatctttttctgatcatctcactttcagttctatttggtaagtaacatttatcaggtgtcagacatcttctatatgaaatatttacagcttactca

SEQ ID NO: 195079 - DNA, 120 bp, Artificial Sequence
  ENSG00000113231_38 (sequence is synthesized)
gttttatgtcaaatttcttgttaacttcaaactttttattagtaatgtgcaaatgtttaaaaatgctttaagacagctaggtactaaagcgtcaacaatttctgctctttaccagtgtaa

SEQ ID NO: 195080 - DNA, 120 bp, Artificial Sequence
  ENSG00000113231_39 (sequence is synthesized)
tctacggtataatcttctggcctgcgaactagtctattcttccacatagtcaacttgttagaaatacaggctttcagatgatatgtgtatcagatagtttatattatataaactattata

SEQ ID NO: 195081 - DNA, 120 bp, Artificial Sequence
  ENSG00000113231_40 (sequence is synthesized)
actgcctcttacacagagttgtttacttaaatgtcatgtgctgaggagggccgtattaggaaaatgcaacactctctaataatttccgtgactagtaagagaaggaagccagttataaaa

SEQ ID NO: 195082 - DNA, 120 bp, Artificial Sequence
  ENSG00000113231_41 (sequence is synthesized)
cactgctggaccagaatgaccctataatttcctaagatcattctttatttctaatttaagatttttaaatttacttgccctccatgtcaggactggttagcattctgggcaaaaaaaaaa

SEQ ID NO: 195083 - DNA, 120 bp, Artificial Sequence
  ENSG00000113231_42 (sequence is synthesized)
caagcctgtcagttcactcagaacctactcagctttagagagagaaacagaagggatgatcttgtgcccttgcgctatgtgaatatagccagagactgaggtaataaatatattttaaaa

SEQ ID NO: 195084 - DNA, 120 bp, Artificial Sequence
  ENSG00000113231_43 (sequence is synthesized)
taaaaatgacaagggatttgtacactgtaacactatgtagtgttacttctgctgttgcaagtatcttaactgttgaaagctaaactcaggaaatggagaaaatgtacataatatacattg

SEQ ID NO: 195085 - DNA, 120 bp, Artificial Sequence
  ENSG00000113231_44 (sequence is synthesized)
acccattattttattctaaattgaaagtccaacttttagcagcagtctacctgcaactactgaacaccatcaggtttgagtccctaccagaatctcccatcatactgttatcccccatct

SEQ ID NO: 195086 - DNA, 120 bp, Artificial Sequence
  ENSG00000113231_45 (sequence is synthesized)
ctgtgaccttagggcatgcatgaaaacaaaagcaatctagtccctagggttggagactgccctctagacagtttttcatggcagaaaattagaatacaagtatacctcattttattgcat

SEQ ID NO: 195087 - DNA, 120 bp, Artificial Sequence
  ENSG00000113231_46 (sequence is synthesized)
tctgcttcattgtgcttcaaagatactgccttttctacaaattgagggcttgtggccaccctgcatagagcaagtctatcggggcattttcccagcatgggctcactttgtgtaagtgtc

SEQ ID NO: 195088 - DNA, 120 bp, Artificial Sequence
  ENSG00000113231_47 (sequence is synthesized)
acattttggtaactcttagagtatttcaaatgtttttattcttgtatctgtcatggtggtctgtgatcagtgatctttgttactactgtaattgttttagggtactgcaaaccatgcccg

SEQ ID NO: 195089 - DNA, 120 bp, Artificial Sequence
  ENSG00000113231_48 (sequence is synthesized)
tataagacagtgaacttaattgataaatcttgtgtatattctaactgttccaccaactagcggtttccagtctctccctcttcttagacctccctattccctgagacacaacaatatcga

SEQ ID NO: 195090 - DNA, 120 bp, Artificial Sequence
  ENSG00000113231_49 (sequence is synthesized)
gtggcatgctggtgggcatagcttatggggaggtgcttctgccctgttctacctagtcctcaatttggccccatgtccgagtcccttctcctacctcactgccataccatcgtgggtttc

SEQ ID NO: 195091 - DNA, 120 bp, Artificial Sequence
  ENSG00000113231_50 (sequence is synthesized)
ctctccagagaatgctgtgaggaaccagtgagtgattccacctcaattttatgtggttttggggaagcggagcgagagaagagcaagtaaaaccaagaatctcttgccatacacacgtta

SEQ ID NO: 195092 - DNA, 120 bp, Artificial Sequence
  ENSG00000113231_51 (sequence is synthesized)
caggcaggacaattgtggctgttgttacttctgtatttactcagtttttaaaattaagctcttggcctaaagatccaacatgtaacttcaggggagtccttcattaattaatactacttt

SEQ ID NO: 195093 - DNA, 86 bp, Artificial Sequence
  ENSG00000113231_52 (sequence is synthesized)
tgtaacttcaggggagtccttcattaattaatactactttaaaccttagcacacatcgtctgggaatgacaaataagcatttcttt

SEQ ID NO: 195094 - DNA, 120 bp, Artificial Sequence
  ENSG00000113231_53 (sequence is synthesized)
gtatacatgtgccatgttggtgtgcatttctaaatgacttttaagcaaagatctagatgattgaggtactcagagatcaaaggtggagggaaggaaactgagattcaggaacacttgggg

SEQ ID NO: 195095 - DNA, 120 bp, Artificial Sequence
  ENSG00000113231_54 (sequence is synthesized)
ggggactagttcaagagccaggatatggccaagcattggaatttcgtccactctcttaacgctgcatctccaaggacctcaagcccagaaactcttctttaaaaggacggcttgagaaga

SEQ ID NO: 195096 - DNA, 120 bp, Artificial Sequence
  ENSG00000113231_55 (sequence is synthesized)
aataattcatatgcagtacaatgatatcacatgggtttccatttctgaaaaagtttgccaatccctggtctactggagcaggttggagaagctgtgagctcgttgaggaaagtgactaag

SEQ ID NO: 195097 - DNA, 120 bp, Artificial Sequence
  ENSG00000113231_56 (sequence is synthesized)
gacaaactcagaacttcgatgcagaagcagtgtgcaggtcgatccgggccacaaatccctccgagcacacggtgatcctcgcagtggtttcgcgagttgtgaggaatcctggtttgtatc

SEQ ID NO: 195098 - DNA, 120 bp, Artificial Sequence
  ENSG00000113240_0 (sequence is synthesized)
gacggcgctgccgccattttgtggggtgtttgtcgcagcggccgaggagggaagacggcagtttggcgacatttctcggccgaagggccatttgcttttgcggagatgcggcattccaaa

SEQ ID NO: 195099 - DNA, 120 bp, Artificial Sequence
  ENSG00000113240_1 (sequence is synthesized)
agaactcactgtcctgattgggatagcagagaaagctggggacatgaaagctatcgtggaagtcacaagcggaagaggagatctcatagtagcacacaagagaacaggcattgtaaacca

SEQ ID NO: 195100 - DNA, 120 bp, Artificial Sequence
  ENSG00000113240_2 (sequence is synthesized)
catcaccagtttaaagaatctgattgtcattatttagaagcaaggtccttgaatgagcgagattatcgggaccggagatacgttgacgaatacaggaatgactactgtgaaggatatgtt

SEQ ID NO: 195101 - DNA, 120 bp, Artificial Sequence
  ENSG00000113240_3 (sequence is synthesized)
cctagacattatcacagagacattgaaagcgggtatcgaatccactgcagtaaatcttcagtccgcagcaggagaagcagtcctaaaaggaagcgcaatagacactgttcaagtcatcag

SEQ ID NO: 195102 - DNA, 120 bp, Artificial Sequence
  ENSG00000113240_4 (sequence is synthesized)
tcacgttcgaagagccaccgaaggaaaagatccaggagtatagaggatgatgaggagggtcacctgatctgtcaaagtggagacgttctaagagcaagatatgaaatcgtggacactttg

SEQ ID NO: 195103 - DNA, 120 bp, Artificial Sequence
  ENSG00000113240_5 (sequence is synthesized)
ggtgaaggagcctttggcaaagttgtagagtgcattgatcatggcatggatggcatgcatgtagcagtgaaaatcgtaaaaaatgtaggccgttaccgtgaagcagctcgttcagaaatc

SEQ ID NO: 195104 - DNA, 120 bp, Artificial Sequence
  ENSG00000113240_6 (sequence is synthesized)
caagtattagagcacttaaatagtactgatcccaatagtgtcttccgatgtgtccagatgctagaatggtttgatcatcatggtcatgtttgtattgtgtttgaactactgggacttagt

SEQ ID NO: 195105 - DNA, 120 bp, Artificial Sequence
  ENSG00000113240_7 (sequence is synthesized)
acttacgatttcattaaagaaaacagctttctgccatttcaaattgaccacatcaggcagatggcgtatcagatctgccagtcaataaattttttacatcataataaattaacccataca

SEQ ID NO: 195106 - DNA, 120 bp, Artificial Sequence
  ENSG00000113240_8 (sequence is synthesized)
gatctgaagcctgaaaatattttgtttgtgaagtctgactatgtagtcaaatataattctaaaatgaaacgtgatgaacgcacactgaaaaacacagatatcaaagttgttgactttgga

SEQ ID NO: 195107 - DNA, 120 bp, Artificial Sequence
  ENSG00000113240_9 (sequence is synthesized)
agtgcaacgtatgatgatgaacatcacagtactttggtgtctacccggcactacagagctcccgaggtcattttggctttaggttggtctcagccttgtgatgtttggagcataggttgc

SEQ ID NO: 195108 - DNA, 120 bp, Artificial Sequence
  ENSG00000113240_10 (sequence is synthesized)
gattcagaaaacaagaaaacgcaagtattttcaccataaccagctagattgggatgaacacagttctgctggtagatatgttaggagacgctgcaaaccgttgaaggaatttatgctttg

SEQ ID NO: 195109 - DNA, 120 bp, Artificial Sequence
  ENSG00000113240_11 (sequence is synthesized)
tcatgatgaagaacatgagaaactgtttgacctggttcgaagaatgttagaatatgatccaactcaaagaattaccttggatgaagcattgcagcatcctttctttgacttattaaaaaa

SEQ ID NO: 195110 - DNA, 120 bp, Artificial Sequence
  ENSG00000113240_12 (sequence is synthesized)
gaaatgaaatgggaatcagtggtcttactatatacttctctagaagagattacttaagactgtgtcagtcaactaaacattctaatatttttgtaaacattaaattattttgtacagtta

SEQ ID NO: 195111 - DNA, 120 bp, Artificial Sequence
  ENSG00000113240_13 (sequence is synthesized)
agtgtaaatattgtatgttttgtatcaatagcataattaacttgttaagcaagtatggtcttgataatgcattagaaaaattaaaattaatttttctttttgaaattaccatttttaaat

SEQ ID NO: 195112 - DNA, 120 bp, Artificial Sequence
  ENSG00000113240_14 (sequence is synthesized)
acctttgaaatatcctttgtgtccagtgataaatgtgattgatcttgccttttgtacatggaggtcacctctgaagtgattttttttgagtaaaaggaaatcttgactactttatattct

SEQ ID NO: 195113 - DNA, 120 bp, Artificial Sequence
  ENSG00000113240_15 (sequence is synthesized)
taaaggaatattctttatatacttcaaatttagaacttaactttaaaagtttttcttctgtaattgttgaacgggtgattattattaactctagataagcaggtactagaaaccaaaact

SEQ ID NO: 195114 - DNA, 120 bp, Artificial Sequence
  ENSG00000113240_16 (sequence is synthesized)
cagaaaatgtttactgttagaattctattaaattttaagtgttgtattctttttcattgggtgatgtcagggtgataaccagacattcatggaaaggcatgcagtttgtccattgtgaca

SEQ ID NO: 195115 - DNA, 120 bp, Artificial Sequence
  ENSG00000113240_17 (sequence is synthesized)
gtttgtttaataaaaccacatacacactttatttaagattaaaatctaactggaaagtcagcttggaaaatggacatttccaagtatgtttggtgagtcacagatataaaaatagaaatt

SEQ ID NO: 195116 - DNA, 120 bp, Artificial Sequence
  ENSG00000113240_18 (sequence is synthesized)
ctgatgagaggtttcagtttttaataccaagtccttaggagtcttaacattggccagcatctgtttatcaaatgacataaatacgtaaacctataagaattaagtttattaattaggcaa

SEQ ID NO: 195117 - DNA, 120 bp, Artificial Sequence
  ENSG00000113240_19 (sequence is synthesized)
tttatgtctgtgataattcttacgggagaaagaggatttgattggaaagcagtttgggaagaaagtgctgctgaaatttccagaatttaattgattggttacataaactttttgacttca

SEQ ID NO: 195118 - DNA, 120 bp, Artificial Sequence
  ENSG00000113240_20 (sequence is synthesized)
gcagaaagaataatctttttaagaatagtttgtcagcggggggctaaagaactcttcattgcttttttattttgctttttgtgggtttgtttgttcttttatatttcttcttttctgtag

SEQ ID NO: 195119 - DNA, 120 bp, Artificial Sequence
  ENSG00000113240_21 (sequence is synthesized)
aatttaaatatttctattctaaagttccaaaataatcagtggaatttgagattagagcaagaaagatagctctatctaattgtttttgtagcagctgaaactaaaataatttgagtgctg

SEQ ID NO: 195120 - DNA, 120 bp, Artificial Sequence
  ENSG00000113240_22 (sequence is synthesized)
tgattcagaaaacaaggtatgttttaagattcaagacttttgttggatatgtgcaatagcatatattcaaactacagaaaacccaacgttgttgtaatactgattccaaggactatagat

SEQ ID NO: 195121 - DNA, 120 bp, Artificial Sequence
  ENSG00000113240_23 (sequence is synthesized)
acccaacgttgttgtaatactgattccaaggactatagattttgacttttttttttttttctgtactggaggtaacttctaacttcatcttactcctttttttttttttgagatggagtc

SEQ ID NO: 195122 - DNA, 120 bp, Artificial Sequence
  ENSG00000113240_24 (sequence is synthesized)
ataataaaaaatatttaccttgtgatctagtgcaggggtccccaacccctcggaactgggctgtacaacaggaggtgagtggcgggtgagtgagcattattgctgcctgagctgcacctc

SEQ ID NO: 195123 - DNA, 80 bp, Artificial Sequence
  ENSG00000113240_25 (sequence is synthesized)
atgtgaaccctattgtgaactgcgcacgtgagggatctacgttgcatgaaggttccttatgagaatctaatgcctgatga

SEQ ID NO: 195124 - DNA, 120 bp, Artificial Sequence
  ENSG00000113240_26 (sequence is synthesized)
aggtggaagtttgattccaaaccatcatccctcctccccggatctgcttccatgaaaccggtccctggttccaaaagggttgaggaccactgatctagtaaacaaaatggcttttgggtt

SEQ ID NO: 195125 - DNA, 120 bp, Artificial Sequence
  ENSG00000113240_27 (sequence is synthesized)
ttttttgttttttttttttttttaactcaagtttacgtttgcataagtgttttcttaaggcgatgtaaaaataatacatagaatatggaaaagcttgtgttttggaatcatatcactcta

SEQ ID NO: 195126 - DNA, 120 bp, Artificial Sequence
  ENSG00000113240_28 (sequence is synthesized)
agtgtgaaatttattctgtccttaaccagctgtatattcttagacaaggtggtatttccaaacacagcttcatcgcagaagccaccgagggagttctttaaagatttccagccccattct

SEQ ID NO: 195127 - DNA, 120 bp, Artificial Sequence
  ENSG00000113240_29 (sequence is synthesized)
agatctagtgaaaacagaattttaggactggatccagggggcccctagttttaagctgacattgttccatatgtgataggaacaacttagttgagagactaaaacctcacagggtggagg

SEQ ID NO: 195128 - DNA, 120 bp, Artificial Sequence
  ENSG00000113240_30 (sequence is synthesized)
atatgaggtgtccgatatataattgttgctgaggtttttaaaaattgtatgcatctatattatataagtctatacacttagagagagctgctttccatgtctcccctcatgggtgcaggg

SEQ ID NO: 195129 - DNA, 120 bp, Artificial Sequence
  ENSG00000113240_31 (sequence is synthesized)
taaagatacgactcttgttattttactaatccagactttttttttttttctgtagaaaacgcaagtattttcaccataaccagctagattgggatgaacacagttctgctggtagatatg

SEQ ID NO: 195130 - DNA, 120 bp, Artificial Sequence
  ENSG00000113240_32 (sequence is synthesized)
ttaggagacgctgcaaaccgttgaaggtaaaagaaaaaagattaaaggttaaataaaccacgtgtttgcactattaataattttttttaaaacaaaaacatttctcccccaggaatttat

SEQ ID NO: 195131 - DNA, 120 bp, Artificial Sequence
  ENSG00000113240_33 (sequence is synthesized)
tgattggtaaattaactcttgaactactagcattttagctctaatagttttaaatgatttgtcatttgcttatatagctttcatctgtcaaattgttttataattcagtcaacaaatatt

SEQ ID NO: 195132 - DNA, 120 bp, Artificial Sequence
  ENSG00000113240_34 (sequence is synthesized)
cgtttagaaaatatttgagtacttattttagataggcgctgaggctacagctgtaaataaaacaaagttcttatccttatgtatgtctgtctgcctgggagtggtaggagacagttgatc

SEQ ID NO: 195133 - DNA, 120 bp, Artificial Sequence
  ENSG00000113240_35 (sequence is synthesized)
agtaagtgaatgtgaaatgtattaaataacatggtgagtcccaactgccagtaacgtgattagggagatgacacacaaaaagttaagtaatagtgatagaatgcccaatgagtaccttta

SEQ ID NO: 195134 - DNA, 120 bp, Artificial Sequence
  ENSG00000113240_36 (sequence is synthesized)
acttgtatgtaggagggagatgggtatgttgtagtgctcattgtttcagaaataaggtagggttttataggggaggagttattccaacagagaaaagcagcatgtattattagtcactta

SEQ ID NO: 195135 - DNA, 120 bp, Artificial Sequence
  ENSG00000113240_37 (sequence is synthesized)
taccatgtcgtacaggttatatttgtagatgaggccaagggatatgtttgggatttttagaagctggctttatttaagaactattcttttgcataggtagtagctagtaatttgggaaat

SEQ ID NO: 195136 - DNA, 120 bp, Artificial Sequence
  ENSG00000113240_38 (sequence is synthesized)
aaaacttgcaacagcatgtgtgctgttttattgtattcttaccagtgtacaatttggaggtaatatatttatatagaattaaaggaatcttaaagttctaaatgattaaagaaaggctag

SEQ ID NO: 195137 - DNA, 120 bp, Artificial Sequence
  ENSG00000113240_39 (sequence is synthesized)
gtaagttttcactctttcattaatttccctttttcgtttgttttgttggttctgttttctcgttttgtgcagatgttccattgggactgtttaccagattgctttctaaattagccagct

SEQ ID NO: 195138 - DNA, 120 bp, Artificial Sequence
  ENSG00000113240_40 (sequence is synthesized)
ggggttactttaaaaaacagtatgtaatttctttccttctccacgttaacagacttgttctgccaaacagcttatttgtagtcagtgcagacaaatcatgcttcatacgcattgttatat

SEQ ID NO: 195139 - DNA, 120 bp, Artificial Sequence
  ENSG00000113240_41 (sequence is synthesized)
aaggggaagggggaaggtttatgacaggatttcagagaccagagataattaataattaatgtacagtacactaaaaaaaaccatctgtaccccactattaataaatacaaaaaaccctaa

SEQ ID NO: 195140 - DNA, 120 bp, Artificial Sequence
  ENSG00000113240_42 (sequence is synthesized)
ggcttaacgtcatagtactggttattcataggataattatacgttgtatatatagaaaggaagtgatatgagtgatgaacagttcatttgtgctcatagttaactacgtaaacatgatac

SEQ ID NO: 195141 - DNA, 120 bp, Artificial Sequence
  ENSG00000113240_43 (sequence is synthesized)
tgagtccagttaaccaccaggccagtgcctgctttgatatttgtaccagatgtgtttggtggtcagcgtttaccatgatccagaatattctaatttttgaaggtcaaaaactttgagtgt

SEQ ID NO: 195142 - DNA, 120 bp, Artificial Sequence
  ENSG00000113240_44 (sequence is synthesized)
ttttataaaataacaaaaaactgaaaaatgcagaaaagtataaagatggtaatctctgtaggaaattagtccccattatttagctgtaaaattataattaaaaaaaaaatctttgtttct

SEQ ID NO: 195143 - DNA, 120 bp, Artificial Sequence
  ENSG00000113240_45 (sequence is synthesized)
tatatatataaaatactatttggatatattataattgtatttatattacttaaatccttaaaggaaacctccaaattcttgtagctgatctgtatatttattagctagccctcatttgcc

SEQ ID NO: 195144 - DNA, 120 bp, Artificial Sequence
  ENSG00000113240_46 (sequence is synthesized)
tttattagctagccctcatttgcccacatttcctcatattctgcagaccagataatgagtttattgattttaataataaaactatttttttatttgtaacatattcttatgaaaaaatca

SEQ ID NO: 195145 - DNA, 120 bp, Artificial Sequence
  ENSG00000113240_47 (sequence is synthesized)
tgcacccatatcttttctttcatcttaagcattttttttttcttagaaaccctttatctggtacttgaaaataaatgtgaaatattgcactggtggacacctgaatgttactaacctgca

SEQ ID NO: 195146 - DNA, 120 bp, Artificial Sequence
  ENSG00000113240_48 (sequence is synthesized)
tagagcatagttccatagtccagtgcatcattgtctgcaatgaattcttttgaagttgtgaaaatgggtgctgaatgggaaacatccaaaaagtctgcccccccctttttttttttaaca

SEQ ID NO: 195147 - DNA, 120 bp, Artificial Sequence
  ENSG00000113240_49 (sequence is synthesized)
ctcagacatcttcacctgcttgaacagtgaactttgaattagtttctccccaagttttcttcagtaaaactagtttttattagattgaacattgaaattaactagcctttattttcccct

SEQ ID NO: 195148 - DNA, 120 bp, Artificial Sequence
  ENSG00000113240_50 (sequence is synthesized)
tttattttaatcatgtatattttaaaatattgctaaattagaataatttcaaatagtcttgacattttaaaacatttttctgaaaaactagacatctcaattcacagcatatgctgttta

SEQ ID NO: 195149 - DNA, 120 bp, Artificial Sequence
  ENSG00000113240_51 (sequence is synthesized)
tagcaagagataagtaaatcatgacattgcattctttaaatttcagacttcaattaaatcagtattttaaagagacaattgtgttgtttttttctattgccactttaagtatcttatctg

SEQ ID NO: 195150 - DNA, 120 bp, Artificial Sequence
  ENSG00000113240_52 (sequence is synthesized)
aaaatctgttccttgccatgtttttcttctgtaacataaactgtgccctgtgaatttctggggactgaatttgaaattgctcctgccaactgttcgtggcctggtgcttatctgaatgcc

SEQ ID NO: 195151 - DNA, 120 bp, Artificial Sequence
  ENSG00000113240_53 (sequence is synthesized)
tatctccccagcctggatttgatgctagccctattgggtagtagttgtaaagatgcttctatttctgcctaaaccagccccctgggaaaaagaatgacagcatattctggggaaaggaaa

SEQ ID NO: 195152 - DNA, 120 bp, Artificial Sequence
  ENSG00000113240_54 (sequence is synthesized)
ggggttggtgagggcaatctagtcaacatccgtcactccattgcttgttaggcttattttagccgatgtgtctgactgggcaggtgtcccctctctccctcagtgctccatgtgcatccc

SEQ ID NO: 195153 - DNA, 120 bp, Artificial Sequence
  ENSG00000113240_55 (sequence is synthesized)
ttcttattgaatattaccttggtttcacagtctttcagaagtttgccaacctctgctctagaagcataccattccagctactcatgatagtaaagagcacctggcaatgatggaacgaat

SEQ ID NO: 195154 - DNA, 120 bp, Artificial Sequence
  ENSG00000113240_56 (sequence is synthesized)
gattgatgttccattgggactgtttaccagattgctttctaaattagccagctggggttactttaaaaaacagacctgtgtggatataaaaacgaatgcccttaccctcatccgtcttgg

SEQ ID NO: 195155 - DNA, 120 bp, Artificial Sequence
  ENSG00000113240_57 (sequence is synthesized)
ctatttgaaaggctatagtgaaatattcactgggcattcagtggatattttaaaaaattaaatcagtctgttcatcctgtctaccctgtccatagcctgtgtaattctgtagactttgtt

SEQ ID NO: 195156 - DNA, 120 bp, Artificial Sequence
  ENSG00000113240_58 (sequence is synthesized)
tatataatctctcagccttggtcattggccattatctattgaagagactctcatccttttagtttgtcctcatggtgttcactccatgttttgttactctatacgttgtttatggcttag

SEQ ID NO: 195157 - DNA, 120 bp, Artificial Sequence
  ENSG00000113240_59 (sequence is synthesized)
cagctctaattccatgcagtattccagctaaagattgttagtgctagttttttctaatagaaggattttggacttttatgggaaggatgcccttaagagtatggtcacgtctagcttatt

SEQ ID NO: 195158 - DNA, 120 bp, Artificial Sequence
  ENSG00000113240_60 (sequence is synthesized)
gtattggtgatctctccctgacagttccaagccaactgatcagatatctgacctagactacccacagtcttacccaaatatcctgagttgtttctccaataaatacaacttaaagctgat

SEQ ID NO: 195159 - DNA, 120 bp, Artificial Sequence
  ENSG00000113248_0 (sequence is synthesized)
agacctctttcagcctaagaggaaagcctgttagcagagcacggaccagtgtctccggagaatgctattctcctacatttccgaacaggttatcaacgcacagatcgatcactgcctctg

SEQ ID NO: 195160 - DNA, 120 bp, Artificial Sequence
  ENSG00000113248_1 (sequence is synthesized)
tcccatcgctccctgaagtagctctgactccggttccttgaaaggggcgtgtacagaagtaaagatggagcctgcaggggagcgctttcccgaacaaaggcaagtcctgattctccttct

SEQ ID NO: 195161 - DNA, 120 bp, Artificial Sequence
  ENSG00000113248_2 (sequence is synthesized)
tttactggaagtgactctggcaggctgggaaccccgtcgctattctgtgatggaggaaacagagagaggttcttttgtagccaacctggccaatgacctagggctgggagtgggggagct

SEQ ID NO: 195162 - DNA, 120 bp, Artificial Sequence
  ENSG00000113248_3 (sequence is synthesized)
agccgagcggggagcccgggtagtttctgaggataacgaacaaggcttgcagcttgatctgcagaccgggcagttgatattaaatgagaagctggaccgggagaagctgtgtggccctac

SEQ ID NO: 195163 - DNA, 120 bp, Artificial Sequence
  ENSG00000113248_4 (sequence is synthesized)
tgagccctgtataatgcatttccaagtgttactgaaaaaacctttggaagtatttcgagctgaactactagtgacagacataaacgatcattctcctgagtttcctgaaagagaaatgac

SEQ ID NO: 195164 - DNA, 120 bp, Artificial Sequence
  ENSG00000113248_5 (sequence is synthesized)
cctgaaaatcccagaaactagctcccttgggactgtgtttcctctgaaaaaagctcgggacttggacgtgggcagcaataatgttcaaaactacaatatttctcccaattctcatttcca

SEQ ID NO: 195165 - DNA, 120 bp, Artificial Sequence
  ENSG00000113248_6 (sequence is synthesized)
tgtttccactcgcacccgaggggatggcaggaaatacccagagctggtgctggacacagaactggatcgcgaggagcaggccgagctcagattaaccttgacagcggtggacggtggctc

SEQ ID NO: 195166 - DNA, 120 bp, Artificial Sequence
  ENSG00000113248_7 (sequence is synthesized)
tccaccccgatctggcaccgtccagatcctcatcttggtcttggacgccaatgacaatgccccggagtttgtgcaggcgctctacgaggtgcaggtcccagagaacagcccagtaggctc

SEQ ID NO: 195167 - DNA, 120 bp, Artificial Sequence
  ENSG00000113248_8 (sequence is synthesized)
cctagttgtcaaggtctctgctagggatttagacactgggacaaatggagagatatcatactccctttattacagctctcaggagatagacaaaccttttgagctaagcagcctttcagg

SEQ ID NO: 195168 - DNA, 120 bp, Artificial Sequence
  ENSG00000113248_9 (sequence is synthesized)
agaaattcgactaattaaaaaactagattttgagacaatgtcttcgtatgatctagatatagaggcatctgatggcgggggactttctggaaaatgctctgtctctgttaaggtgctgga

SEQ ID NO: 195169 - DNA, 120 bp, Artificial Sequence
  ENSG00000113248_10 (sequence is synthesized)
tgttaacgataacttcccggaactaagtatttcatcacttaccagccctattcccgagaattctccagagacagaagtggccctgtttaggattagagaccgagactctggggaaaatgg

SEQ ID NO: 195170 - DNA, 120 bp, Artificial Sequence
  ENSG00000113248_11 (sequence is synthesized)
aaaaatgatttgctcaattcaggatgatgttccttttaagctaaaaccttctgttgagaatttctacaggctggtaacagaaggggcgctggacagagagaccagagccgagtacaacat

SEQ ID NO: 195171 - DNA, 120 bp, Artificial Sequence
  ENSG00000113248_12 (sequence is synthesized)
caccatcaccatcacagacttggggactccaaggctgaaaaccgagcagagcataaccgtgctggtgtcggacgtcaatgacaacgcccccgccttcacccaaacctcctacaccctgtt

SEQ ID NO: 195172 - DNA, 120 bp, Artificial Sequence
  ENSG00000113248_13 (sequence is synthesized)
caacagccccgccctgcacatcggcagtgtcagcgccacagacagagactcgggcaccaacgcccaggtcacctactcgctgctgccgccccgggacccgcacctgcccctcacctccct

SEQ ID NO: 195173 - DNA, 120 bp, Artificial Sequence
  ENSG00000113248_14 (sequence is synthesized)
cctcacctccctggtctccattaacacggacaacggccacctgttcgctctccagtcgctggactacgaggccctgcaggctttcgagttccgcgtgggcgccacagaccgcggcttccc

SEQ ID NO: 195174 - DNA, 67 bp, Artificial Sequence
  ENSG00000113248_15 (sequence is synthesized)
ctttcgagttccgcgtgggcgccacagaccgcggcttcccggcgctgagcagcgaggcgctggtgcg

SEQ ID NO: 195175 - DNA, 68 bp, Artificial Sequence
  ENSG00000113248_16 (sequence is synthesized)
acggagcccgggctgttcgggacgtggccaagcacaggctagtggtgctggtcaaggacaatggcgag

SEQ ID NO: 195176 - DNA, 120 bp, Artificial Sequence
  ENSG00000113248_17 (sequence is synthesized)
tggacggcttctctcagccctacctgccgctcccagaggcggccccggcccaagcccaggccgactcgcttaccgtctacctggtggtggcattggcctcggtgtcttcgctcttcctct

SEQ ID NO: 195177 - DNA, 120 bp, Artificial Sequence
  ENSG00000113248_18 (sequence is synthesized)
gctgtgcaggaggagcagggcggcctcagtgggtcgctgctcggtgcccgagggcccctttccagggcatctggtggacgtgagcggcaccgggaccctttcccagagctaccagtacga

SEQ ID NO: 195178 - DNA, 120 bp, Artificial Sequence
  ENSG00000113248_19 (sequence is synthesized)
ggaccctttcccagagctaccagtacgaggtgtgtctgacgggaggctctgaaagtaatgatttcaagttcttgaagcctatattcccaaatattgtaagccaggactctaggaggaaat

SEQ ID NO: 195179 - DNA, 120 bp, Artificial Sequence
  ENSG00000113248_20 (sequence is synthesized)
cagaatttctagaataatgtaggtatctgtagctttccgaccgtctgttaattttgtcttcctcacttttcaccttagttttttttaaccctttagtaatcttgaattctactttttttt

SEQ ID NO: 195180 - DNA, 120 bp, Artificial Sequence
  ENSG00000113248_21 (sequence is synthesized)
atgttactcatttcctttgtctgattgttagttttcaaattattgtattattataaatattttatatcaggaaagttcatatttctgaataaattaatagtattcattcctgaagggtga

SEQ ID NO: 195181 - DNA, 120 bp, Artificial Sequence
  ENSG00000113248_22 (sequence is synthesized)
atagtattcattcctgaagggtgatatgaaagttaaccccacctaataaacataactctaattctgaaattacctttcacactatatgacactacataagaatgtatgatttttgaagtc

SEQ ID NO: 195182 - DNA, 120 bp, Artificial Sequence
  ENSG00000113248_23 (sequence is synthesized)
atattttaagttttttttatagtttttcttattcacacagcttgactttttgacaaaagtttggggtgtaatcatttcatatttatccatgtgtaatttcttccaagcttcatatttgga

SEQ ID NO: 195183 - DNA, 120 bp, Artificial Sequence
  ENSG00000113248_24 (sequence is synthesized)
gttttgttttttccaataaggagcaacatggataagtttaagctactcttttcaaggtcacacttgtaagcattagattttcattctaaaacacatatgtcatctcataaaaatatatct

SEQ ID NO: 195184 - DNA, 120 bp, Artificial Sequence
  ENSG00000113248_25 (sequence is synthesized)
gcgtaatgtattctgtctcatgtaaattaacatagaaaagactaatgggttcttccttatctctatctaatgttatgatcctattggggggactggacaggctttctaatacccagattt

SEQ ID NO: 195185 - DNA, 120 bp, Artificial Sequence
  ENSG00000113248_26 (sequence is synthesized)
actgtgtttaaggtgttcgtataaggccaatagacactaggaccaagtaatgcatctcctgcaatttcctcttttcacagcaggaaaatcttaacgagttccaaattctgggcttagagg

SEQ ID NO: 195186 - DNA, 120 bp, Artificial Sequence
  ENSG00000113248_27 (sequence is synthesized)
agcttctgatggtacagtatgccaacatctacttgttttggatggcaacattgttctgattcataaggaatttgaaagaaaatacattgtagaattaatattagttaaccaaacaaaatt

SEQ ID NO: 195187 - DNA, 120 bp, Artificial Sequence
  ENSG00000113248_28 (sequence is synthesized)
tattaaaggatatgttggtgaaggagttgaattatttgaggaaaaaacatctgctctcttgtcaggacttttctgtctccaggagcttctcaactttgcagatactctagaatggtattg

SEQ ID NO: 195188 - DNA, 120 bp, Artificial Sequence
  ENSG00000113248_29 (sequence is synthesized)
catgcaaaataatgaccgccaagatgttcctgccctaatccccagaacctatgaatatgttatattgcaaagaaattaaggttcaaacagaattaaggttgccaatcagctaaacttaaa

SEQ ID NO: 195189 - DNA, 120 bp, Artificial Sequence
  ENSG00000113248_30 (sequence is synthesized)
atagggagactctcctagataatctgggtgggtctatttcaatcagtggaaaggccataaaagcagagttgagtcttccgtgagatgaaaataaattttgtttaaggacagcagcttcag

SEQ ID NO: 195190 - DNA, 120 bp, Artificial Sequence
  ENSG00000113248_31 (sequence is synthesized)
cttatgccccagaattccagcctgcccctcctaactgcctgctgtacagattttggacttgtccagccacgtttcaaaactgagtaagtcacttccttgcaataaattgattactacaca

SEQ ID NO: 195191 - DNA, 89 bp, Artificial Sequence
  ENSG00000113249_0 (sequence is synthesized)
gctactgtttcctttttgtttgttcccctgataccctgtatcaggaccaggagtcagtttggcggttatgtgtggggaagaagctggga

SEQ ID NO: 195192 - DNA, 120 bp, Artificial Sequence
  ENSG00000113249_1 (sequence is synthesized)
ggagtcagtttggcggttatgtgtggggaagaagctgggaagtcaggggctgtttctgtggacagctttccctgtcctttggaaggcacagagctctcagctgcagggaactaacagagc

SEQ ID NO: 195193 - DNA, 120 bp, Artificial Sequence
  ENSG00000113249_2 (sequence is synthesized)
tctgaagccgttatatgtggtcttctctcatttccagcagagcaggctcatatgaatcaaccaactgggtgaaaagataagttgcaatctgagatttaagacttgatcagataccatctg

SEQ ID NO: 195194 - DNA, 120 bp, Artificial Sequence
  ENSG00000113249_3 (sequence is synthesized)
gtggagggtaccaaccagcctgtctgctcattttccttcaggctgatcccataatgcatcctcaagtggtcatcttaagcctcatcctacatctggcagattctgtagctggttctgtaa

SEQ ID NO: 195195 - DNA, 120 bp, Artificial Sequence
  ENSG00000113249_4 (sequence is synthesized)
aggttggtggagaggcaggtccatctgtcacactaccctgccactacagtggagctgtcacatccatgtgctggaatagaggctcatgttctctattcacatgccaaaatggcattgtct

SEQ ID NO: 195196 - DNA, 120 bp, Artificial Sequence
  ENSG00000113249_5 (sequence is synthesized)
ggaccaatggaacccacgtcacctatcggaaggacacacgctataagctattgggggacctttcaagaagggatgtctctttgaccatagaaaatacagctgtgtctgacagtggcgtat

SEQ ID NO: 195197 - DNA, 120 bp, Artificial Sequence
  ENSG00000113249_6 (sequence is synthesized)
tcaccgtatcattggagattgtgccacccaaggtcacgactactccaattgtcacaactgttccaaccgtcacgactgttcgaacgagcaccactgttccaacgacaacgactgttccaa

SEQ ID NO: 195198 - DNA, 120 bp, Artificial Sequence
  ENSG00000113249_7 (sequence is synthesized)
tgacgactgttccaacgacaactgttccaacaacaatgagcattccaacgacaacgactgttctgacgacaatgactgtttcaacgacaacgagcgttccaacgacaacgagcattccaa

SEQ ID NO: 195199 - DNA, 120 bp, Artificial Sequence
  ENSG00000113249_8 (sequence is synthesized)
caacaacaagtgttccagtgacaacaactgtctctacctttgttcctccaatgcctttgcccaggcagaaccatgaaccagtagccacttcaccatcttcacctcagccagcagaaaccc

SEQ ID NO: 195200 - DNA, 120 bp, Artificial Sequence
  ENSG00000113249_9 (sequence is synthesized)
accctacgacactgcagggagcaataaggagagaacccaccagctcaccattgtactcttacacaacagatgggaatgacaccgtgacagagtcttcagatggcctttggaataacaatc

SEQ ID NO: 195201 - DNA, 120 bp, Artificial Sequence
  ENSG00000113249_10 (sequence is synthesized)
aaactcaactgttcctagaacatagtctactgacggccaataccactaaaggaatctatgctggagtctgtatttctgtcttggtgcttcttgctcttttgggtgtcatcattgccaaaa

SEQ ID NO: 195202 - DNA, 120 bp, Artificial Sequence
  ENSG00000113249_11 (sequence is synthesized)
agtatttcttcaaaaaggaggttcaacaactaagtgtttcatttagcagccttcaaattaaagctttgcaaaatgcagttgaaaaggaagtccaagcagaagacaatatctacattgaga

SEQ ID NO: 195203 - DNA, 120 bp, Artificial Sequence
  ENSG00000113249_12 (sequence is synthesized)
atagtctttatgccacggactaagacccagtggtgctctttgagagtttacgcccatgagtgcagaagactgaacagacatcagcacatcagacgtcttttagaccccaagacaattttt

SEQ ID NO: 195204 - DNA, 120 bp, Artificial Sequence
  ENSG00000113249_13 (sequence is synthesized)
ctgtttcagtttcatctggcattccaacatgtcagtgatactgggtagagtaactctctcactccaaactgtgtatagtcaacctcatcattaatgtagtcctaattttttatgctaaaa

SEQ ID NO: 195205 - DNA, 120 bp, Artificial Sequence
  ENSG00000113249_14 (sequence is synthesized)
gctattactgcatatgatgtaggtttagttttccaagttcttccgtggccctttttgcttattatatcaatccttggtgggagatagaggaagcatttttagtgctattttacaactgag

SEQ ID NO: 195206 - DNA, 64 bp, Artificial Sequence
  ENSG00000113249_15 (sequence is synthesized)
gatcccataatgcatcctcaagtggtcatcttaagcctcatcctacatctggcagattctgtag

SEQ ID NO: 195207 - DNA, 120 bp, Artificial Sequence
  ENSG00000113262_0 (sequence is synthesized)
cggaggcccgggcaggccggctgagctaactccccagagccgaagtggaaggcgcgccccgagcgccttctccccaggaccccggtgtccctccccgcgccccgagcccgcgctctcctt

SEQ ID NO: 195208 - DNA, 120 bp, Artificial Sequence
  ENSG00000113262_1 (sequence is synthesized)
ccttcccccgccctcagagcgctccccgcccctctgtctccccgcagcccgctagacgagccgatggcgcggccccggagagcccgggagccgctgctcgtggcgctgctgccgctggcg

SEQ ID NO: 195209 - DNA, 80 bp, Artificial Sequence
  ENSG00000113262_2 (sequence is synthesized)
gcggcctgacgctgggcggcctgttcccggtgcacgcgcggggcgcggcgggccgggcgtgcgggcagctgaagaaggag

SEQ ID NO: 195210 - DNA, 120 bp, Artificial Sequence
  ENSG00000113262_3 (sequence is synthesized)
agaaggagcagggcgtgcaccggctggaggccatgctgtacgcgctggaccgcgtcaacgccgaccccgagctgctgcccggcgtgcgcctgggcgcgcggctgctggacacctgctcgc

SEQ ID NO: 195211 - DNA, 120 bp, Artificial Sequence
  ENSG00000113262_4 (sequence is synthesized)
gggacacctacgcgctggagcaggcgctgagcttcgtgcaggcgctgatccgcggccgcggcgacggcgacgaggtgggcgtgcgctgcccgggaggcgtccctccgctgcgccccgcgc

SEQ ID NO: 195212 - DNA, 120 bp, Artificial Sequence
  ENSG00000113262_5 (sequence is synthesized)
cccccgagcgcgtcgtggccgtcgtgggcgcctcggccagctccgtctccatcatggtcgccaacgtgctgcgcctgtttgcgataccccagatcagctatgcctccacagccccggagc

SEQ ID NO: 195213 - DNA, 120 bp, Artificial Sequence
  ENSG00000113262_6 (sequence is synthesized)
tcagcgactccacacgctatgacttcttctcccgggtggtgccacccgactcctaccaggcgcaggccatggtggacatcgtgagggcactgggatggaactatgtgtccacgctggcct

SEQ ID NO: 195214 - DNA, 120 bp, Artificial Sequence
  ENSG00000113262_7 (sequence is synthesized)
ccgagggcaactatggcgaaagtggggttgaggccttcgttcagatctcccgagaggctgggggggtctgtattgcccagtctatcaagattcccagggaaccaaagccaggagagttca

SEQ ID NO: 195215 - DNA, 120 bp, Artificial Sequence
  ENSG00000113262_8 (sequence is synthesized)
gcaaggtgatcaggagactcatggagacgcccaacgcccggggcatcatcatctttgccaatgaggatgacatcaggcgggtcctggaggcagctcgccaggccaacctgaccggccact

SEQ ID NO: 195216 - DNA, 120 bp, Artificial Sequence
  ENSG00000113262_9 (sequence is synthesized)
tcctgtgggtcggctcagacagctggggagccaagacctcacccatcttgagcctggaggacgtggccgttggggccatcaccatcctgcccaaaagggcctccatcgacggatttgacc

SEQ ID NO: 195217 - DNA, 120 bp, Artificial Sequence
  ENSG00000113262_10 (sequence is synthesized)
agtacttcatgactcgatccctggagaacaaccgcaggaacatctggttcgccgagttctgggaagagaattttaactgcaaactgaccagctcaggtacccagtcagacgattccaccc

SEQ ID NO: 195218 - DNA, 120 bp, Artificial Sequence
  ENSG00000113262_11 (sequence is synthesized)
gcaaatgcacaggcgaggaacgcatcggccgggactccacctacgagcaggagggcaaggtgcagtttgtgattgatgcggtgtacgccattgcccacgccctccacagcatgcaccagg

SEQ ID NO: 195219 - DNA, 120 bp, Artificial Sequence
  ENSG00000113262_12 (sequence is synthesized)
cgctctgccctgggcacacaggcctgtgcccggcgatggaacccactgatgggcggatgcttctgcagtacattcgagctgtccgcttcaatggcagcgcaggaacccctgtgatgttca

SEQ ID NO: 195220 - DNA, 120 bp, Artificial Sequence
  ENSG00000113262_13 (sequence is synthesized)
acgagaacggagatgcgcccgggcggtacgacatcttccagtaccaggcgaccaatggcagtgccagcagtggcgggtaccaggcagtgggccagtgggcagagaccctcagactggatg

SEQ ID NO: 195221 - DNA, 120 bp, Artificial Sequence
  ENSG00000113262_14 (sequence is synthesized)
tggaggccctgcagtggtctggcgacccccacgaggtgccctcgtctctgtgcagcctgccctgcgggccgggggagcggaagaagatggtgaagggcgtcccctgctgttggcactgcg

SEQ ID NO: 195222 - DNA, 120 bp, Artificial Sequence
  ENSG00000113262_15 (sequence is synthesized)
aggcctgtgacgggtaccgcttccaggtggacgagttcacatgcgaggcctgtcctggggacatgaggcccacgcccaaccacacgggctgccgccccacacctgtggtgcgcctgagct

SEQ ID NO: 195223 - DNA, 120 bp, Artificial Sequence
  ENSG00000113262_16 (sequence is synthesized)
ggtcctccccctgggcagccccgccgctcctcctggccgtgctgggcatcgtggccactaccacggtggtggccaccttcgtgcggtacaacaacacgcccatcgtccgggcctcgggcc

SEQ ID NO: 195224 - DNA, 120 bp, Artificial Sequence
  ENSG00000113262_17 (sequence is synthesized)
gagagctcagctacgtcctcctcaccggcatcttcctcatctacgccatcaccttcctcatggtggctgagcctggggccgcggtctgtgccgcccgcaggctcttcctgggcctgggca

SEQ ID NO: 195225 - DNA, 120 bp, Artificial Sequence
  ENSG00000113262_18 (sequence is synthesized)
cgaccctcagctactctgccctgctcaccaagaccaaccgtatctaccgcatctttgagcagggcaagcgctcggtcacaccccctcccttcatcagccccacctcacagctggtcatca

SEQ ID NO: 195226 - DNA, 120 bp, Artificial Sequence
  ENSG00000113262_19 (sequence is synthesized)
ccttcagcctcacctccctgcaggtggtggggatgatagcatggctgggggcccggcccccacacagcgtgattgactatgaggaacagcggacggtggaccccgagcaggccagagggg

SEQ ID NO: 195227 - DNA, 120 bp, Artificial Sequence
  ENSG00000113262_20 (sequence is synthesized)
tgctcaagtgcgacatgtcggatctgtctctcatcggctgcctgggctacagcctcctgctcatggtcacgtgcacagtgtacgccatcaaggcccgtggcgtgcccgagaccttcaacg

SEQ ID NO: 195228 - DNA, 120 bp, Artificial Sequence
  ENSG00000113262_21 (sequence is synthesized)
aggccaagcccatcggcttcaccatgtacaccacctgcatcatctggctggcattcgtgcccatcttctttggcactgcccagtcagctgaaaagatctacatccagacaaccacgctaa

SEQ ID NO: 195229 - DNA, 120 bp, Artificial Sequence
  ENSG00000113262_22 (sequence is synthesized)
ccgtgtccttgagcctgagtgcctcggtgtccctcggcatgctctacgtacccaaaacctacgtcatcctcttccatccagagcagaatgtgcagaagcgaaagcggagcctcaaggcca

SEQ ID NO: 195230 - DNA, 120 bp, Artificial Sequence
  ENSG00000113262_23 (sequence is synthesized)
cctccacggtggcagccccacccaagggcgaggatgcagaggcccacaagtagcagggcaggtgggaacgggactgcttgctgcctctcctttcttcctcttgcctcgaggtggaagctg

SEQ ID NO: 195231 - DNA, 120 bp, Artificial Sequence
  ENSG00000113262_24 (sequence is synthesized)
tatagagcccgggtccacggtgaacagtcagtggcagggagtttgccaagaccatgctccgcgtcggtggggctggccttgagaaggaactggacccagctctaccccgattccagcatg

SEQ ID NO: 195232 - DNA, 120 bp, Artificial Sequence
  ENSG00000113262_25 (sequence is synthesized)
agaccagactcgcttcccatggtgggaaacagccaccgagaaggttctagctctagaaagggactaaacttattctctcatccgaagtccaaagaggatgatgaagccctgggctttgcc

SEQ ID NO: 195233 - DNA, 120 bp, Artificial Sequence
  ENSG00000113262_26 (sequence is synthesized)
tggtttgcgggagatttcctcccctcagtcaacccccataacctggggattgggcagtgtggaagaacgtgtagaccccagaatgaaacatggggttggagtggaggaggagctgtctca

SEQ ID NO: 195234 - DNA, 120 bp, Artificial Sequence
  ENSG00000113262_27 (sequence is synthesized)
gcaagaggagacctggggctgtgcatctggatggaggcactcaggcctgggtaggattcctctggcacggagggagagaccctgggtgagacccctgtgagcatgggaagggcctgcagt

SEQ ID NO: 195235 - DNA, 120 bp, Artificial Sequence
  ENSG00000113262_28 (sequence is synthesized)
gggcgcgggagtgagctgaggaactggggtgcgcccccatgagattcccaatgccatgggctttcccccatccccccgggattgggcaaggtcagacttagagtacagctgttttcctcc

SEQ ID NO: 195236 - DNA, 69 bp, Artificial Sequence
  ENSG00000113262_29 (sequence is synthesized)
attgggcaaggtcagacttagagtacagctgttttcctcccctctgtgtactcccttaaatcaccccaa

SEQ ID NO: 195237 - DNA, 120 bp, Artificial Sequence
  ENSG00000113262_30 (sequence is synthesized)
gaaattcagatacacgtgtgtaatgttagtgatgtgagaacaaggagcaggggtgcatttgtgttgtgttcgggttggggatgggtttaggagctccaggttgggagcagtgacagagag

SEQ ID NO: 195238 - DNA, 120 bp, Artificial Sequence
  ENSG00000113262_31 (sequence is synthesized)
tcatggccgtggtgagggtgaatcccaagtggatggctcaggacgggtatggaaacccttcattcctcataggtactgggaagtccatttgcaagctgagcgccaggcctggggaggaag

SEQ ID NO: 195239 - DNA, 120 bp, Artificial Sequence
  ENSG00000113262_32 (sequence is synthesized)
aggcttgggctgcagatgcacgcacatttgtttttcactgatagtttttacaaaaagcttggtttaagttatggagttttatgtccctgggagtagaatttacatttgttaaattgacca

SEQ ID NO: 195240 - DNA, 120 bp, Artificial Sequence
  ENSG00000113262_33 (sequence is synthesized)
ctgtttaagatcagtatacattctctagtctgtgatgtctggagctagttttgagggtgaaccacactttatccaacatacaaactttcccatgcagcttctctggtgcgcagttggttt

SEQ ID NO: 195241 - DNA, 120 bp, Artificial Sequence
  ENSG00000113262_34 (sequence is synthesized)
tgaccgtgggactaggtgcttctgcaggttttaagtaattaacttaaaagcttctcctctgagaaacatttctgttgcgctactgactctccttctccacatttgttgtgttcctagggc

SEQ ID NO: 195242 - DNA, 120 bp, Artificial Sequence
  ENSG00000113262_35 (sequence is synthesized)
ttctctatagtgcacattaggacgtttcatttgttgctgaatgctttccagaattatttattccatagggtttctctcctgtgcagctctctcatgggtaatggggcgtgttttcttgcc

SEQ ID NO: 195243 - DNA, 120 bp, Artificial Sequence
  ENSG00000113262_36 (sequence is synthesized)
aaaggcggttccaccctcgtgattgtatagggctcttctcctgtatgaactctgagatcagtgagctctgatctccaagggaaagttttcctgcatttgctgttttctcatgtctctccc

SEQ ID NO: 195244 - DNA, 120 bp, Artificial Sequence
  ENSG00000113262_37 (sequence is synthesized)
agtgtgaattctttggtgtgcagtgcgctctggcttctagctgaaaacttttccacagttttacattcatgtggttttctccactgtgaactctgtgattcagaatcagaagcagttctt

SEQ ID NO: 195245 - DNA, 120 bp, Artificial Sequence
  ENSG00000113262_38 (sequence is synthesized)
agtagaggcatttctacactgattgcactgaggatttctccccagtgtgaagtttctggcatagagtcctggcttcccgcagacgactttcacactctgccatgttcatgcctgtgggcc

SEQ ID NO: 195246 - DNA, 120 bp, Artificial Sequence
  ENSG00000113262_39 (sequence is synthesized)
tctctggcaggaactctgatgcaccgcgaggcccatgtactcctgtggctttctcacattcggtctacttgcagggtatctccacagcatgcaccattctgggtacagggggacatcctc

SEQ ID NO: 195247 - DNA, 120 bp, Artificial Sequence
  ENSG00000113262_40 (sequence is synthesized)
tgttactgaagatgttgtcatatttagtaccttcacaaggtttctctccttccagaattttctgatgtacacaaataactgacttccacaagagggcttttccacactcggtgtgtgcat

SEQ ID NO: 195248 - DNA, 120 bp, Artificial Sequence
  ENSG00000113262_41 (sequence is synthesized)
tccacactcggtgtgtgcatacagtttctgcctgtgatcatttctttatgttattattttattttttcgagatagggtcttgctcaatttcttaggctggagtgcagtggcacgatcata

SEQ ID NO: 195249 - DNA, 120 bp, Artificial Sequence
  ENSG00000113262_42 (sequence is synthesized)
catagctcactgaagtttcgacctgggctcaagcaatcctcccgcttcagcctcctgagtagctggtgcgcacgaccatacccagctaatgttttattttttgtagagacgaggtctcac

SEQ ID NO: 195250 - DNA, 120 bp, Artificial Sequence
  ENSG00000113262_43 (sequence is synthesized)
cttctgagctcgagcgatcctcctgcctccacctcccaaagtgttcggattacaaacgtgagccatcgcacctagcctctttgatcatttctgtggtgttcagtggaggttgacagctcc

SEQ ID NO: 195251 - DNA, 120 bp, Artificial Sequence
  ENSG00000113262_44 (sequence is synthesized)
ctaaagattttcctgtttttttgcatgcatgggtttgaattctttgaggtccaatttatttggacccctgaataaagttttgtgggttttcttctatgtgtggaatttataaggcattct

SEQ ID NO: 195252 - DNA, 120 bp, Artificial Sequence
  ENSG00000113262_45 (sequence is synthesized)
tccagtgtggtttctcttatgtcgagtgagagctgacctgcaccgaaggttttgtcccatttgttgcccttgaattatttgtatgaattatatgttccagtgaaaatggagttctgggtt

SEQ ID NO: 195253 - DNA, 120 bp, Artificial Sequence
  ENSG00000113262_46 (sequence is synthesized)
ggaggcttattccatgtttacacaattaaaattgcagtgttcctctctgggatgagagctctaaagcagagtaagattacgttctgatgtaagctttaaccacctatttataaggtctca

SEQ ID NO: 195254 - DNA, 120 bp, Artificial Sequence
  ENSG00000113262_47 (sequence is synthesized)
cctgtggtccactgtgttgagacttctacagaagagcttctgtatagtaaccattttcttaggctgtctcacttgtgtgaatcttctgacacatttattatagctttgtcccatttctta

SEQ ID NO: 195255 - DNA, 120 bp, Artificial Sequence
  ENSG00000113262_48 (sequence is synthesized)
tcctttttgctctttagaaatttccctttaatttattacattcattgcttactgtaaagagtccaggtaactgactttattcagttacttcctgttcaataaatttaacttttcccaaaa

SEQ ID NO: 195256 - DNA, 120 bp, Artificial Sequence
  ENSG00000113262_49 (sequence is synthesized)
gagatggggagttaggtgcagagagcgttggcacagtgagcaccgcagctcgagtggctgcctcagacccagagcccgaggagactttatacggagccagaacgaccccgcggggttcca

SEQ ID NO: 195257 - DNA, 120 bp, Artificial Sequence
  ENSG00000113262_50 (sequence is synthesized)
tcctcccaagcaataggcgggagtgggagctgcgaggaaagccggcccctcccctccctccatccaaggcagtgtgggctgtttgtttcatgccattctgggtgtgaatcctgatgccca

SEQ ID NO: 195258 - DNA, 120 bp, Artificial Sequence
  ENSG00000113262_51 (sequence is synthesized)
cacatgccagctgcatgcacttgggcaactcaactcactcctcgagggctgtttctcgactgcagggtgttggcctcggccgcatctgtcacagacttgtcctgaaccgacagcggctgg

SEQ ID NO: 195259 - DNA, 120 bp, Artificial Sequence
  ENSG00000113262_52 (sequence is synthesized)
cccagtcagctgaaaaggtaatgaggtccccaggaggtctcgctgcctgtttcctgcctgtcaggctggtcgattcattcatgagattaaatgcttgttcgtgcttttgtttatcccgta

SEQ ID NO: 195260 - DNA, 120 bp, Artificial Sequence
  ENSG00000113262_53 (sequence is synthesized)
tgcctttgggagaagcacaaaaagctgctgcttctgggtgggcagatgactgcaaagcatcccttccagcaggatcacatggccctgctccaggtgctcggcatggcactggcatgcagg

SEQ ID NO: 195261 - DNA, 120 bp, Artificial Sequence
  ENSG00000113262_54 (sequence is synthesized)
ctggattccagctccacccctgcccccaatcaggcgctctcgtacagtgaacaaccagcacgaacgtgtggggcagcccttccagggtcccgcctttatgcaggtggcttcgttcctgtt

SEQ ID NO: 195262 - DNA, 120 bp, Artificial Sequence
  ENSG00000113262_55 (sequence is synthesized)
ccccagctttccttggcttgaggttgtgcttcctgtcatgtgagggagtggtaactccatctcctccctgtgagggcctgcacagactccagtactcctcggcatcagctcccattcctg

SEQ ID NO: 195263 - DNA, 120 bp, Artificial Sequence
  ENSG00000113262_56 (sequence is synthesized)
ctcctccccactgagtgctcctttgtttctcttgcctgtggcgtgccctgattttgaagctcagtacacgtgaggaggctagagaggcgatgcgagtagggcctcagttccagagcttcc

SEQ ID NO: 195264 - DNA, 120 bp, Artificial Sequence
  ENSG00000113262_57 (sequence is synthesized)
ggccacatccatctaccttgaaggggcgcagtaaatggcattggtaatggctagaatgcaggaagaggacaccaagctgccccttatgcacactgcactgatgttgccaacatatacggg

SEQ ID NO: 195265 - DNA, 120 bp, Artificial Sequence
  ENSG00000113262_58 (sequence is synthesized)
cggcacagcccttctccgcagctgccaggtcacgggcctttggacggacccctcttgggctgcccctgcctgggctgccatcccctcttctccactgagtgctcctgagagccaccacga

SEQ ID NO: 195266 - DNA, 120 bp, Artificial Sequence
  ENSG00000113262_59 (sequence is synthesized)
agaggtggagcatcccctccataggccagagcctcaaggggatcctgacccgcaggggcctctgtcagggctggaatggatttgtccctggaaagtgctgtgtctgatgcagtgttggct

SEQ ID NO: 195267 - DNA, 120 bp, Artificial Sequence
  ENSG00000113262_60 (sequence is synthesized)
tgcttctttatacagatattgtttcataaaacttcttcaaaaatggaataaaatgcacaattccaagtgaatcttctcatcattttatagaatgaaactgcttcacaaatactctttgtt

SEQ ID NO: 195268 - DNA, 120 bp, Artificial Sequence
  ENSG00000113262_61 (sequence is synthesized)
atattgatacctttgtttctaaacgtgaaaaattccaaactaaatattttctatctcttgggctttgacaggggaaaaactgctgtagtatggacagccagagtggaatactgatgctta

SEQ ID NO: 195269 - DNA, 120 bp, Artificial Sequence
  ENSG00000113262_62 (sequence is synthesized)
ttacaagtagcttggggggtttcaaaaatgacattccaccctgtggagaaaaggctgaagaaatgtaagggataggaaccaagaaggaataaggctctgataagaagaaactgaccagtt

SEQ ID NO: 195270 - DNA, 120 bp, Artificial Sequence
  ENSG00000113262_63 (sequence is synthesized)
ataaggctctgataagaagaaactgaccagttggatagaattctaaaaggcacgcaagggtgtagagaagtaaattagtaaaaggactggatctggctgagtgcagtggctcatgcctgt

SEQ ID NO: 195271 - DNA, 73 bp, Artificial Sequence
  ENSG00000113262_64 (sequence is synthesized)
atggcgaaacaccatctcggcaaaactctgcaatcccagttactcggggggctgaggctggagaatcgcttga

SEQ ID NO: 195272 - DNA, 75 bp, Artificial Sequence
  ENSG00000113262_65 (sequence is synthesized)
acaaaattagctgggcatggtggcacatgtctgcaatcccagttactcgggtgtgagttgagatcgtgccattgc

SEQ ID NO: 195273 - DNA, 120 bp, Artificial Sequence
  ENSG00000113263_0 (sequence is synthesized)
gttgatagaaagataacgttgaaggcaagttgcccttgagcagctctctgaagatcaactgcctccacattgcattctttgccccaaaactctttcctttggttgtgctaagaggtgatg

SEQ ID NO: 195274 - DNA, 120 bp, Artificial Sequence
  ENSG00000113263_1 (sequence is synthesized)
cccaaggtgcaccacctttcaagaactggatcatgaacaactttatcctcctggaagaacagctcatcaagaaatcccaacaaaagagaagaacttctccctcgaactttaaagtccgct

SEQ ID NO: 195275 - DNA, 120 bp, Artificial Sequence
  ENSG00000113263_2 (sequence is synthesized)
tctttgtgttaaccaaagccagcctggcatactttgaagatcgtcatgggaagaagcgcacgctgaaggggtccattgagctctcccgaatcaaatgtgttgagattgtgaaaagtgaca

SEQ ID NO: 195276 - DNA, 120 bp, Artificial Sequence
  ENSG00000113263_3 (sequence is synthesized)
tcagcatcccatgccactataaatacccgtttcaggtggtgcatgacaactacctcctatatgtgtttgctccagatcgtgagagccggcagcgctgggtgctggcccttaaagaagaaa

SEQ ID NO: 195277 - DNA, 120 bp, Artificial Sequence
  ENSG00000113263_4 (sequence is synthesized)
cgaggaataataacagtttggtgcctaaatatcatcctaatttctggatggatgggaagtggaggtgctgttctcagctggagaagcttgcaacaggctgtgcccaatatgatccaacca

SEQ ID NO: 195278 - DNA, 120 bp, Artificial Sequence
  ENSG00000113263_5 (sequence is synthesized)
agaatgcttcaaagaagcctcttcctcctactcctgaagacaacaggcgaccactttgggaacctgaagaaactgtggtcattgccttatatgactaccaaaccaatgatcctcaggaac

SEQ ID NO: 195279 - DNA, 120 bp, Artificial Sequence
  ENSG00000113263_6 (sequence is synthesized)
tcgcactgcggcgcaacgaagagtactgcctgctggacagttctgagattcactggtggagagtccaggacaggaatgggcatgaaggatatgtaccaagcagttatctggtggaaaaat

SEQ ID NO: 195280 - DNA, 120 bp, Artificial Sequence
  ENSG00000113263_7 (sequence is synthesized)
ctccaaataatctggaaacctatgagtggtacaataagagtatcagccgagacaaagctgaaaaacttcttttggacacaggcaaagaaggagccttcatggtaagggattccaggactg

SEQ ID NO: 195281 - DNA, 120 bp, Artificial Sequence
  ENSG00000113263_8 (sequence is synthesized)
caggaacatacaccgtgtctgttttcaccaaggctgttgtaagtgagaacaatccctgtataaagcattatcacatcaaggaaacaaatgacaatcctaagcgatactatgtggctgaaa

SEQ ID NO: 195282 - DNA, 120 bp, Artificial Sequence
  ENSG00000113263_9 (sequence is synthesized)
agtatgtgttcgattccatccctcttctcatcaactatcaccaacataatggaggaggcctggtgactcgactccggtatccagtttgttttgggaggcagaaagccccagttacagcag

SEQ ID NO: 195283 - DNA, 120 bp, Artificial Sequence
  ENSG00000113263_10 (sequence is synthesized)
ggctgagatacgggaaatgggtgatcgacccctcagagctcacttttgtgcaagagattggcagtgggcaatttgggttggtgcatctgggctactggctcaacaaggacaaggtggcta

SEQ ID NO: 195284 - DNA, 120 bp, Artificial Sequence
  ENSG00000113263_11 (sequence is synthesized)
tcaaaaccattcgggaaggggctatgtcagaagaggacttcatagaggaggctgaagtaatgatgaaactctctcatcccaaactggtgcagctgtatggggtgtgcctggagcaggccc

SEQ ID NO: 195285 - DNA, 120 bp, Artificial Sequence
  ENSG00000113263_12 (sequence is synthesized)
ccatctgcctggtgtttgagttcatggagcacggctgcctgtcagattatctacgcacccagcggggactttttgctgcagagaccctgctgggcatgtgtctggatgtgtgtgagggca

SEQ ID NO: 195286 - DNA, 120 bp, Artificial Sequence
  ENSG00000113263_13 (sequence is synthesized)
tggcctacctggaagaggcatgtgtcatccacagagacttggctgccagaaattgtttggtgggagaaaaccaagtcatcaaggtgtctgactttgggatgacaaggttcgttctggatg

SEQ ID NO: 195287 - DNA, 120 bp, Artificial Sequence
  ENSG00000113263_14 (sequence is synthesized)
atcagtacaccagttccacaggcaccaaattcccggtgaagtgggcatccccagaggttttctctttcagtcgctatagcagcaagtccgatgtgtggtcatttggtgtgctgatgtggg

SEQ ID NO: 195288 - DNA, 120 bp, Artificial Sequence
  ENSG00000113263_15 (sequence is synthesized)
aagttttcagtgaaggcaaaatcccgtatgaaaaccgaagcaactcagaggtggtggaagacatcagtaccggatttcggttgtacaagccccggctggcctccacacacgtctaccaga

SEQ ID NO: 195289 - DNA, 120 bp, Artificial Sequence
  ENSG00000113263_16 (sequence is synthesized)
ttatgaatcactgctggaaagagagaccagaagatcggccagccttctccagactgctgcgtcaactggctgaaattgcagaatcaggactttagtagagactgagtaccaggccacggg

SEQ ID NO: 195290 - DNA, 120 bp, Artificial Sequence
  ENSG00000113263_17 (sequence is synthesized)
ctgcagatcctgaatggaggaaggatatgtcctcattccatagagcattagaagctgccaccagcccaggaccctccagaggcagcctggcctgtggcatcagtccctgagtcaccatgg

SEQ ID NO: 195291 - DNA, 120 bp, Artificial Sequence
  ENSG00000113263_18 (sequence is synthesized)
ctctgcccttcctctagcctcttgtcacatgtggtgcacaaacctcaacctgacagctttcagacagcattcttgcacttcttagcaacagagagagacatgagtaagacccagattgct

SEQ ID NO: 195292 - DNA, 120 bp, Artificial Sequence
  ENSG00000113263_19 (sequence is synthesized)
atttttattgttatttttaacatgaatctaaagtttatggttccagggactttttatttgacccaacaacacagtatcccaggatatggaggcaaggggaacaaagagcatgagtctttt

SEQ ID NO: 195293 - DNA, 120 bp, Artificial Sequence
  ENSG00000113263_20 (sequence is synthesized)
tccaagaaaactggtgagttaagtaagattagagtgagtgtgctctgttgctgtgatgctgtcagccacagcttcctgccgtagagaatgatagagcagctgctcacacaggaggccgga

SEQ ID NO: 195294 - DNA, 120 bp, Artificial Sequence
  ENSG00000113263_21 (sequence is synthesized)
tattctgagaagcagctttatgaggttttacagagtatgctgctacctctctccttgaagggagcatggcgagacccattggatggattggggtgaacagttcaggtcccatgcttggag

SEQ ID NO: 195295 - DNA, 120 bp, Artificial Sequence
  ENSG00000113263_22 (sequence is synthesized)
cattgggtatctgatgtctgcaccagaacaagagaacctctgacggtggagaaccatgtggtgcaagaagagatcttaggtctcttcttttataccaagctcatcttttataccaagctg

SEQ ID NO: 195296 - DNA, 120 bp, Artificial Sequence
  ENSG00000113263_23 (sequence is synthesized)
tgcaggtgactatgcctcctcttctgcacagaatgcttccaccagcatcctgagaagaaatgattacttctgaaaaacatccttttttccagcctctgggaatcagccccccctctctgc

SEQ ID NO: 195297 - DNA, 120 bp, Artificial Sequence
  ENSG00000113263_24 (sequence is synthesized)
actatccgatcctcatcaacagagggcagcattgtgttggtcaatgttcccttggcgagcaattgaaacttgtttaggccctagggttgagcaattttaaggttgagactccaagtctcc

SEQ ID NO: 195298 - DNA, 120 bp, Artificial Sequence
  ENSG00000113263_25 (sequence is synthesized)
taaaattctaggagagaaataaagagtctgtttttgctcaaaccatcaggatggaaacagtcaggcactgactggggtgcttccaagaggcatgagagtgcctactctggcttgagcact

SEQ ID NO: 195299 - DNA, 120 bp, Artificial Sequence
  ENSG00000113263_26 (sequence is synthesized)
tctatatgcaaggtgaatatgtactgagctaggagacttccctgcaaaatctctgttcaccctgggttcacatccccatgaggtaatattattattcccattttacaaataatgtaactg

SEQ ID NO: 195300 - DNA, 120 bp, Artificial Sequence
  ENSG00000113263_27 (sequence is synthesized)
aggctttaaaaagccaagacatctgcccaaagtgatggaactagaaagtctagagctggtattctagcccaaatctgtctgaccgcaatacacagattctttattcctattcgacactgg

SEQ ID NO: 195301 - DNA, 120 bp, Artificial Sequence
  ENSG00000113263_28 (sequence is synthesized)
cttctactgaaaatgaaacggattgcagagggaataaatacaaagatggaaagccagtaaagaagtcagtatagaaccactagcgaatagtgttgctctggcacagaccactgtggttga

SEQ ID NO: 195302 - DNA, 120 bp, Artificial Sequence
  ENSG00000113263_29 (sequence is synthesized)
tggcatggccctccaacttggaataggattttccttttcctattctgtatccttaccttggtcatgttaatgactttggagttattcagttaatgaccctttaattctcacaaccaacca

SEQ ID NO: 195303 - DNA, 120 bp, Artificial Sequence
  ENSG00000113263_30 (sequence is synthesized)
gtcatgttgcttgaagccatttatagacgagcttcaaagcaactttaaaagattcttctgtagaagtatgagttcttcctttaattatcattccaactttcagctgtagtcttcttgaac

SEQ ID NO: 195304 - DNA, 120 bp, Artificial Sequence
  ENSG00000113263_31 (sequence is synthesized)
acttcatgaggagggacattccctgatataagagaggatggtgttgcaattggctctttctaaatcatgtgacgttttgactggcttgagattcagatgcataatttttaattataatta

SEQ ID NO: 195305 - DNA, 120 bp, Artificial Sequence
  ENSG00000113263_32 (sequence is synthesized)
ttgtgaagtggagagcctcaagataaaactctgtcattcagaagatgattttactcagcttatccaaaattatctctgtttactttttagaattttgtacattatcttttgggatcctta

SEQ ID NO: 195306 - DNA, 120 bp, Artificial Sequence
  ENSG00000113263_33 (sequence is synthesized)
attagagatgatttctggaacattcagtctagaaagaaaacattggaattgactgatctctgtggtttggtttagaaaattcccctgtgcatggtattacctttttcaagctcagattca

SEQ ID NO: 195307 - DNA, 120 bp, Artificial Sequence
  ENSG00000113263_34 (sequence is synthesized)
tctaatcctcaactgtacatgtgtacattcttcacctcctggtgccctatcccgcaaaatgggcttcctgcctggtttttctcttctcacattttttaaatggtcccctgtgtttgtaga

SEQ ID NO: 195308 - DNA, 120 bp, Artificial Sequence
  ENSG00000113263_35 (sequence is synthesized)
gaactcccttatacagagttttggttctagttttatttcgtagattttgcattttgtaccttttgagactatgtatttatatttggatcagatgcatatttattaatgtacagtcactgc

SEQ ID NO: 195309 - DNA, 120 bp, Artificial Sequence
  ENSG00000113263_36 (sequence is synthesized)
tagtgttcaaaataaaaatgttacaaatacctgttatcctttgtagagcacacagagttaaaagttgaatatagcaatattaaagctgcattttaataaatatggtgcatagggcctcgg

SEQ ID NO: 195310 - DNA, 120 bp, Artificial Sequence
  ENSG00000113263_37 (sequence is synthesized)
ctattgcacagagaatacaatcaaactcttcacagtggtctccaaggcccaccataatctgatcatgcccacctcccccttctcagctcctacccatctctcctccagtccatgacatgc

SEQ ID NO: 195311 - DNA, 120 bp, Artificial Sequence
  ENSG00000113263_38 (sequence is synthesized)
cagccacactggcctctgctcatcttcacacacacagctgactccttgccatttttcaggtctcagctccaatgacatgtttttgttttggggagggaatgaatattattttcatccaaa

SEQ ID NO: 195312 - DNA, 120 bp, Artificial Sequence
  ENSG00000113263_39 (sequence is synthesized)
ccataaattagacaaaatgaccattggctattttggtaccataatattttcggcatttttgggagactgagtttaggccatctcaccccttgtctttttcctccaggaaactctctcatc

SEQ ID NO: 195313 - DNA, 120 bp, Artificial Sequence
  ENSG00000113263_40 (sequence is synthesized)
ataaagaaagtctaccagaggaaggcagactgtctccccagacaccccgatgaaaggaggcattttacctccttttttatgtctttgcttggttttgttgtctctcttccccagcgacca

SEQ ID NO: 195314 - DNA, 120 bp, Artificial Sequence
  ENSG00000113263_41 (sequence is synthesized)
tctagaactcctggactcaagtgatcctcttgcctcggcctacgaaagtactgggattacaagcatgagccactacacccaactctgttctgtgccttataaacgaggaataataacagt

SEQ ID NO: 195315 - DNA, 120 bp, Artificial Sequence
  ENSG00000113263_42 (sequence is synthesized)
atccctcttctcatcaactatcaccaacataatggaggaggtaagctctagagcaggggtggacccgggccgcccagcaggaggtgagcagcaggtgagcaagcattactgcctgagctc

SEQ ID NO: 195316 - DNA, 120 bp, Artificial Sequence
  ENSG00000113263_43 (sequence is synthesized)
tgccttctgtcagatcagcgtcattagattctcataagagtgcaagccctattgtgaacagcacttgtgggatctaggttgtgtgctccttataagaatcaaatgcctgatgatctgaga

SEQ ID NO: 195317 - DNA, 87 bp, Artificial Sequence
  ENSG00000113263_44 (sequence is synthesized)
gatgatctgagatggaacagtttcatcctgaaagcaaccccctgccacatccctccatggataaactgtcttccacaaagccgacta

SEQ ID NO: 195318 - DNA, 76 bp, Artificial Sequence
  ENSG00000113263_45 (sequence is synthesized)
gccaaaaaggttggggactgctgctctagaggacaaagccagagggcacctgggttagacttttttgaattgctat

SEQ ID NO: 195319 - DNA, 120 bp, Artificial Sequence
  ENSG00000113263_46 (sequence is synthesized)
ttcttggcttttagggagccctcaggaagctttcagtcatggcagaaggcaaaaggggagcaggagtatcacatggcaggagcaggagcgaggagggagaagatgccacagacatttaaa

SEQ ID NO: 195320 - DNA, 120 bp, Artificial Sequence
  ENSG00000113263_47 (sequence is synthesized)
caaccaggtcttgcatgaactcagagtgataactcatttattatcacaaggacagtgacagcaccaaggcatttgtgatggatcccacctaatgacccaaacaccacctcccatcccacc

SEQ ID NO: 195321 - DNA, 87 bp, Artificial Sequence
  ENSG00000113263_48 (sequence is synthesized)
gatcccacctaatgacccaaacaccacctcccatcccaccaggccccacctccaacatagggcttttcttttcttttctttcttttc

SEQ ID NO: 195322 - DNA, 69 bp, Artificial Sequence
  ENSG00000113263_49 (sequence is synthesized)
tactgctgggattacaggtgtaagccacagtgcccagccagggattacatttcaacatgagatttggag

SEQ ID NO: 195323 - DNA, 120 bp, Artificial Sequence
  ENSG00000113263_50 (sequence is synthesized)
ggaggggacaaacatccaaactatatcagcacccacacaggagacttaatgaaaactggcaaaagctcgccctggcttctttttgactataaataataaataaatatacaaatagaaaaa

SEQ ID NO: 195324 - DNA, 120 bp, Artificial Sequence
  ENSG00000113263_51 (sequence is synthesized)
ataataaataaatatacaaatagaaaaatatgacaaatatttaattatattatatatcttctattagcaagctatcttgtggaaataatggaattttaccacttgcccatctgtgcttat

SEQ ID NO: 195325 - DNA, 120 bp, Artificial Sequence
  ENSG00000113263_52 (sequence is synthesized)
gatgttttcaaggaggatatgatatcaataattaggctttgggatttgttttccagaataaaattagcttttgcgtctgatgatgattattattttttttagtgatttaagttagatggt

SEQ ID NO: 195326 - DNA, 60 bp, Artificial Sequence
  ENSG00000113263_53 (sequence is synthesized)
catggtgaaaccccatctctactgaaaattcaaaaaattagctgagcttactggcgggca

SEQ ID NO: 195327 - DNA, 78 bp, Artificial Sequence
  ENSG00000113263_54 (sequence is synthesized)
aggttgcagtgagctgagatcaagccactacactccagcctgggtgacacagtcactggagtgttatctccaatggct

SEQ ID NO: 195328 - DNA, 120 bp, Artificial Sequence
  ENSG00000113263_55 (sequence is synthesized)
acacactggagtgttatctccaatggctttttcaatgcaacagtctataatactaattaggggtcaggtactctccctattgaagaacagttttaagaggattaacaacatcaaaacatt

SEQ ID NO: 195329 - DNA, 120 bp, Artificial Sequence
  ENSG00000113263_56 (sequence is synthesized)
tatccctgatgttaacatttcctatcacatcaggttgcattagagcctatctttggttagacaacaccaaggatttctaattagaactcaagaatgaagataaacttactcatcttgata

SEQ ID NO: 195330 - DNA, 120 bp, Artificial Sequence
  ENSG00000113263_57 (sequence is synthesized)
gtggatcttacacattcaactttccagttaacttccagcggcatttgtgaggcttaattaacatttgtaaagctccatgatgcccttgtatgacagcactgcagtaaagcaaaggactgt

SEQ ID NO: 195331 - DNA, 120 bp, Artificial Sequence
  ENSG00000113263_58 (sequence is synthesized)
accaaagccagcctggcatactttgaagatcgtcatgggatataagcacagaggagcagggaagatggtcaaaagagatcccaggcccccacgttctgccagagcacagtgagcaaatga

SEQ ID NO: 195332 - DNA, 120 bp, Artificial Sequence
  ENSG00000113263_59 (sequence is synthesized)
gcctcctgccacaaactgaacccacatttctctcaatccaagaaaaggctgttctaattccaaacaagctcattgtaaacctcaataacatgaagttagtattgttcacgttgctttcca

SEQ ID NO: 195333 - DNA, 120 bp, Artificial Sequence
  ENSG00000113263_60 (sequence is synthesized)
ctggttcctaacacataattaactgctgttggaatgaatctttgtccccttgcctccgtgcctgctggacttcatatctgtgtattaatagtcacttttgtttggcgatcttgtgaaaaa

SEQ ID NO: 195334 - DNA, 120 bp, Artificial Sequence
  ENSG00000113263_61 (sequence is synthesized)
tgcagactaatttttaatccttaaagagataatacattcacataattttatttttattttttcagataatggcctttcgccatgtggcacatttcaataattttaaaaaaacagttgcaa

SEQ ID NO: 195335 - DNA, 120 bp, Artificial Sequence
  ENSG00000113263_62 (sequence is synthesized)
aatgttatgcagtaacaaatctcccatctttgtcccaagtcacattgctgtcctacatcacagcaaccacgatagttaatttcttataagttcttccaataatactttatacatatactt

SEQ ID NO: 195336 - DNA, 120 bp, Artificial Sequence
  ENSG00000113263_63 (sequence is synthesized)
gtaatactaataaacattcttcttttcttcctttttaaatagtagtaacatactctgcacacacttcttaacttttcttttagttggttaacaatgtatcctggagattgatccacactg

SEQ ID NO: 195337 - DNA, 120 bp, Artificial Sequence
  ENSG00000113263_64 (sequence is synthesized)
atacacaaagatattcttcattctgtttatggttgcataatacttcattgtatgcatgaaaaatttcttttaatgaaggttggtctgtttccagtttttgttattatgcacaatgagaaa

SEQ ID NO: 195338 - DNA, 120 bp, Artificial Sequence
  ENSG00000113263_65 (sequence is synthesized)
cctttaacgaaattctagctccgcctcagaccgatccctcgctgttgcgcctacgtcccccatggaggttttgaacgcactcattgaagagtagctgtgggctgtgtaataagaagaagc

SEQ ID NO: 195339 - DNA, 120 bp, Artificial Sequence
  ENSG00000113263_66 (sequence is synthesized)
aatcactgacactcttgatcctatagtagggttgggttccacaatagaatagagtgtggtgtgagagcagctgatggctgatttctcttttggggttggtggaagttcccaagttttcat

SEQ ID NO: 195340 - DNA, 120 bp, Artificial Sequence
  ENSG00000113269_0 (sequence is synthesized)
cggctgccggagggacgatgagctgcgcggggcgggcgggccctgcccggctcgccgcgctcgccctgctgacctgcagcctgtggccggcacgggcagacaacgcgagccaggagtact

SEQ ID NO: 195341 - DNA, 120 bp, Artificial Sequence
  ENSG00000113269_1 (sequence is synthesized)
ctgtggccggcacgggcagacaacgcgagccaggagtactacacggcgctcatcaacgtgacggtgcaggagcccggccgcggcgccccgctcacgtttcgcatcgaccgcgggcgctac

SEQ ID NO: 195342 - DNA, 120 bp, Artificial Sequence
  ENSG00000113269_2 (sequence is synthesized)
gggcttgactcccccaaggccgaggtccgcggccaggtgctggcgccgctgcccctccacggagttgctgatcatctgggctgtgatccacaaacccggttctttgtccctcctaatatc

SEQ ID NO: 195343 - DNA, 120 bp, Artificial Sequence
  ENSG00000113269_3 (sequence is synthesized)
aaacagtggattgccttgctgcagaggggaaactgcacgtttaaagagaaaatatcacgggccgctttccacaatgcagttgctgtagtcatctacaataataaatccaaagaggagcca

SEQ ID NO: 195344 - DNA, 120 bp, Artificial Sequence
  ENSG00000113269_4 (sequence is synthesized)
gttaccatgactcatccaggcactggagatattattgctgtcatgataacagaattgaggggtaaggatattttgagttatctggagaaaaacatctctgtacaaatgacaatagctgtt

SEQ ID NO: 195345 - DNA, 120 bp, Artificial Sequence
  ENSG00000113269_5 (sequence is synthesized)
ggaactcgaatgccaccgaagaacttcagccgtggctctctagtcttcgtgtcaatatcctttattgttttgatgattatttcttcagcatggctcatattctacttcattcagaagatc

SEQ ID NO: 195346 - DNA, 120 bp, Artificial Sequence
  ENSG00000113269_6 (sequence is synthesized)
aggtacacaaatgcacgcgacaggaaccagcgtcgtctcggagatgcagccaagaaagccatcagtaaattgacaaccaggacagtaaagaagggtgacaaggaaactgacccagacttt

SEQ ID NO: 195347 - DNA, 120 bp, Artificial Sequence
  ENSG00000113269_7 (sequence is synthesized)
tgaacattgtacctgtcctatgtgcaaacttaatatattgaaggccctgggaattgtgccgaatttgccatgtactgataacgtagcattcgatatggaaaggctcaccagaacccaagc

SEQ ID NO: 195348 - DNA, 120 bp, Artificial Sequence
  ENSG00000113269_8 (sequence is synthesized)
tgttaaccgaagatcagccctcggcgacctcgccggcgacaactcccttggccttgagccacttcgaacttcggggatctcacctcttcctcaggatggggagctcactccgagaacagg

SEQ ID NO: 195349 - DNA, 120 bp, Artificial Sequence
  ENSG00000113269_9 (sequence is synthesized)
agaaatcaacattgcagtaacaaaagaatggtttattattgccagttttggcctcctcagtgccctcacactctgctacatgatcatcagagccacagctagcttgaatgctaatgaggt

SEQ ID NO: 195350 - DNA, 120 bp, Artificial Sequence
  ENSG00000113269_10 (sequence is synthesized)
agaatggttttgaagaagaaaaaacctgctttctgactgattttgccttgaaggaaaaaagaacctatttttgtgcatcatttaccaatcatgccacacaagcatttatttttagtacat

SEQ ID NO: 195351 - DNA, 120 bp, Artificial Sequence
  ENSG00000113269_11 (sequence is synthesized)
tttattttttcataaaattgctaatgccaaagctttgtattaaaagaaataaataataaaataaaaagtctgtgctgttgagtcttattaaccagacctgtgttttgagggctgatttga

SEQ ID NO: 195352 - DNA, 120 bp, Artificial Sequence
  ENSG00000113269_12 (sequence is synthesized)
agctcgcagacccagattgcatttgtttgtgtttcagagacagaatgtgctcctggctcccgtgagaggaacagggattgacacttactattggtgtcttcacattggctcctacccaca

SEQ ID NO: 195353 - DNA, 120 bp, Artificial Sequence
  ENSG00000113269_13 (sequence is synthesized)
tagggcgcaagagcggggacatcctgctggtgatgccgcttaggatggtcagttgatttactcattcttcaagggggacattcactctgtgataatttcttctctgtggttgatcagcct

SEQ ID NO: 195354 - DNA, 120 bp, Artificial Sequence
  ENSG00000113269_14 (sequence is synthesized)
ccaccagagctgcagcacccccagcagcagggacttgtaacatttgctccccactgtgcccctgcacccaacagagtgctttgcacatcgtaagtgctcaataaatatttgtggaatgaa

SEQ ID NO: 195355 - DNA, 120 bp, Artificial Sequence
  ENSG00000113269_15 (sequence is synthesized)
ccctcggagtctggtgtatgaaagtgaattctccaccatcgaaccttctttggacatgtatgatgagaacaaaacctgaattttaaacatggcctggctgttggggtcactgcttttgtg

SEQ ID NO: 195356 - DNA, 120 bp, Artificial Sequence
  ENSG00000113269_16 (sequence is synthesized)
atttgatttctgatcacctttcttattttgtattctcctgtcagcatccgttttggaagaatggcagcactttccaagcacaggttggggttcagggttaatttgcaaagttcccccaag

SEQ ID NO: 195357 - DNA, 120 bp, Artificial Sequence
  ENSG00000113269_17 (sequence is synthesized)
gtgaggctttgaggacagtagcattgcccaggtgagccttgtggtattgaaaacccgcccaagctgatcattgaaggtgggcgcccagcaaggctggctgtttccagagaagaggccggg

SEQ ID NO: 195358 - DNA, 120 bp, Artificial Sequence
  ENSG00000113269_18 (sequence is synthesized)
cccaggattaatgttgcattgcagacgcatctctgaacaatcacatgctgttctgcaccagggaagctggggtttttaacatccttttgtggtccctgcttacgatgcatactgccctgt

SEQ ID NO: 195359 - DNA, 120 bp, Artificial Sequence
  ENSG00000113269_19 (sequence is synthesized)
gggagaagcttcctacccgcgtggagtacaggtgctgctccctgacctggctctggatgttcccctctcgcttattctacttcctgctgaagggccccttctaaagggggttgagagaag

SEQ ID NO: 195360 - DNA, 120 bp, Artificial Sequence
  ENSG00000113269_20 (sequence is synthesized)
gccttgcctttgtatctcctctgagactctgaccacccacttcctgccagggcagggccgtgggagacccaggccgtggggccgggtctgtgtgcggggccaggcagccgtctgcgtcgc

SEQ ID NO: 195361 - DNA, 120 bp, Artificial Sequence
  ENSG00000113269_21 (sequence is synthesized)
tgttttccagcctccgtgttgagcatgacgtaaagtgacaagtgtttaagtcagcacgaaaacactgaaggcccctccgtccctgcagcctgtgaacacgtctactcggccacccgtcag

SEQ ID NO: 195362 - DNA, 120 bp, Artificial Sequence
  ENSG00000113269_22 (sequence is synthesized)
tatagggagtgtgtgtatagggaggtggcacctgggagcccagcccagcagtgtctctgggcacagtgatttcagggggatggccagcagttgtgaaagacagaatgatctggaatgtct

SEQ ID NO: 195363 - DNA, 120 bp, Artificial Sequence
  ENSG00000113269_23 (sequence is synthesized)
cattgggaagaccaaacccccttctcgctgcagataccagataagcacccatcttcactgtccactgtgcagcccagtcccctccagcagccccagcacagcatgaagaaggcacatgag

SEQ ID NO: 195364 - DNA, 120 bp, Artificial Sequence
  ENSG00000113269_24 (sequence is synthesized)
caccggccgacaggcttacaggacagggtgcagtggccagcatcccaggcatcagggacatgtgggatcttcccacacacctgggatgacatcgaattaacatgatgagaaaattgcatc

SEQ ID NO: 195365 - DNA, 120 bp, Artificial Sequence
  ENSG00000113269_25 (sequence is synthesized)
ttactgctaatcccagtacagaaccactatgggcaaatttataaaactaatctgcacaccctctttgcaaaaggacacacctgagttgagtctgcctctcattggcatgagctttgtggg

SEQ ID NO: 195366 - DNA, 120 bp, Artificial Sequence
  ENSG00000113269_26 (sequence is synthesized)
ggcgtgaggcgcacagacccttgctgtgagaacaggaaccccagtctccacatgcccagggtcagatccgacagcaaacgaagcagatgcgtgaatcccctgccctgttctcactgactg

SEQ ID NO: 195367 - DNA, 120 bp, Artificial Sequence
  ENSG00000113269_27 (sequence is synthesized)
tggaatatacgtttgaagtgaacacttgccatttttccacgtgcagcttctcctaaagtgtcttttctcctaacgcgtcaataacgcctcagacacaggtgtgcctgaaggaaacctgca

SEQ ID NO: 195368 - DNA, 120 bp, Artificial Sequence
  ENSG00000113269_28 (sequence is synthesized)
gagccccggatggggacaggcttcaggagcattgtcagagagcgggcagcggcatttcgttttcgctcatttgaggctagaatggtgcagattttaaaggtcttagcagcttttgtgttt

SEQ ID NO: 195369 - DNA, 120 bp, Artificial Sequence
  ENSG00000113269_29 (sequence is synthesized)
taccttttaccaagggctttgggggtttttttgttttgtttttctttatgatagtcttcgtactataaaaatattttcaatgagcagcttcaatatagcatcgttcagaaaagcaggttt

SEQ ID NO: 195370 - DNA, 120 bp, Artificial Sequence
  ENSG00000113269_30 (sequence is synthesized)
ccccattgggctctcagagagagggtgagtctgcaggaagctggagcccatttgctggaggttccagacacgcgtctgcatttgtatgtgtttgacccacctgaaaggtaggagagctca

SEQ ID NO: 195371 - DNA, 120 bp, Artificial Sequence
  ENSG00000113269_31 (sequence is synthesized)
gttcggatcattgccgtgttgtctataccacctccttgttttcccaaaccaaaacgcagatcctgatgtagcattttctcctgatttgaggtcttaccaatgtgtatacgttaaattcca

SEQ ID NO: 195372 - DNA, 120 bp, Artificial Sequence
  ENSG00000113269_32 (sequence is synthesized)
ctcaagacagtttctttactgaaaaggtatgaaattacgtgagaagaagtacaaatttcaggcccctagaatctgtctattaatataacatttgaatttctgggaaatctggggcacaca

SEQ ID NO: 195373 - DNA, 120 bp, Artificial Sequence
  ENSG00000113269_33 (sequence is synthesized)
ttcacggtagaataacaaggaggcattgcttgcaggggagcgtactcagaacagtgctgtggatcctggcttgacacccttttctggaaaattggggtcactctctggctcagctacaga

SEQ ID NO: 195374 - DNA, 120 bp, Artificial Sequence
  ENSG00000113269_34 (sequence is synthesized)
atggcctgtctttgtcaggagggacactaacttctcattaaggccatgctcttcaggaacagagaggatgatttggtttttggtttcaggtttttatttttatttttgttttgagacagt

SEQ ID NO: 195375 - DNA, 63 bp, Artificial Sequence
  ENSG00000113269_35 (sequence is synthesized)
gaagggcagtggcgcaaaccgagtagctggcaccacaggcacgtgccaccacacccagctaat

SEQ ID NO: 195376 - DNA, 67 bp, Artificial Sequence
  ENSG00000113269_36 (sequence is synthesized)
tatgggacccacctcggcctcccaaagttccgggattccagttgtgagccaccatgcccagccaaga

SEQ ID NO: 195377 - DNA, 120 bp, Artificial Sequence
  ENSG00000113269_37 (sequence is synthesized)
ttccgggattccagttgtgagccaccatgcccagccaagaatggcattttttttttaatcccaaataacagcctctttactagctgctatgctgggggaaatccctgctaagtcgggacc

SEQ ID NO: 195378 - DNA, 120 bp, Artificial Sequence
  ENSG00000113269_38 (sequence is synthesized)
ctggcaggaagtggccggggctgcttgtccggtgagcattgtgaagacacacgtcgccacatgggcagcgcttccctgaggcgcttggggagcagtgttccgcctgctgcaggtgtgatg

SEQ ID NO: 195379 - DNA, 120 bp, Artificial Sequence
  ENSG00000113269_39 (sequence is synthesized)
gggtgcagagagtgagtgcctccgtggttgcaagtcttgccaccagcagcggttattaggaaatgtatgataacctcagtcattgttgaggggggaactgtttgaagtaaggaagaggct

SEQ ID NO: 195380 - DNA, 120 bp, Artificial Sequence
  ENSG00000113269_40 (sequence is synthesized)
gaggagtcagctatttacaccacacatccacccccctgcctccagtggactgctgtgagctgggcctgtgcccgggtgaggagaccatgggcctgtgtggcaggatcagcaagtctaggg

SEQ ID NO: 195381 - DNA, 120 bp, Artificial Sequence
  ENSG00000113269_41 (sequence is synthesized)
gtggcaggatcagcaagtctagggccagggcagccatcagcatcctctgggagttggttgtgactattgaaatgcaaatgcttccgctttggtgattttttttttttttgagacggagtc

SEQ ID NO: 195382 - DNA, 120 bp, Artificial Sequence
  ENSG00000113269_42 (sequence is synthesized)
ctggccaagctttggtgacttttaacatcctaagggaggagtaacccctctttcctgttaatccagagggaggggagggaaggccagatagccagggcttccagcgcaggaggcagagct

SEQ ID NO: 195383 - DNA, 120 bp, Artificial Sequence
  ENSG00000113269_43 (sequence is synthesized)
tggcagccactgatggtggtaagcatgtctgcccagggctgcctgcctctgccctcctcttgggaagacaagctctgcccccagctaaaaactcctcacaaccctgatgagccttgcttt

SEQ ID NO: 195384 - DNA, 120 bp, Artificial Sequence
  ENSG00000113269_44 (sequence is synthesized)
atgcggcaacagccccagctgccagtgagtctgatgatatttggaaaagtatttttaaaaacgagattactgaattttacaagcttgacattttctattggctttataagctcttctcat

SEQ ID NO: 195385 - DNA, 120 bp, Artificial Sequence
  ENSG00000113269_45 (sequence is synthesized)
tcatgtttttattaccctcacatccaatccgttcgagctacacgctaaatcaaattggtattttatatttttatttttttagaggcaggatctcgctctgtcacccaggcaggagtgcag

SEQ ID NO: 195386 - DNA, 120 bp, Artificial Sequence
  ENSG00000113269_46 (sequence is synthesized)
gcctccccagtagctgggaccacaggctcatgccacgcacgcccggctgaagctagttttaactgaagaaaactcaaagtgttctctcgccgttaacctttattattgaggcattggctc

SEQ ID NO: 195387 - DNA, 120 bp, Artificial Sequence
  ENSG00000113269_47 (sequence is synthesized)
tctcgccgttaacctttattattgaggcattggctctgctataggaaaacgaggtgacgttaatgtcggtggttgacattaaccactggcaagtgacagtgtggctccttgacaagtggt

SEQ ID NO: 195388 - DNA, 120 bp, Artificial Sequence
  ENSG00000113269_48 (sequence is synthesized)
tgctgctcataaatgtcatgaaacaaaaacactgattttagagaagtgggattctacagttaatatcgccagcaaacttttattaagctctcactctgtgccaaacacatgcttgaagtt

SEQ ID NO: 195389 - DNA, 120 bp, Artificial Sequence
  ENSG00000113269_49 (sequence is synthesized)
ggggtgaatctgtgaccattaagatgttggctgttcatgggcacgttatcaagcaactggggtgtgagagcgaatgataagagggtgaatctggatgaggagggacttccagggcacagg

SEQ ID NO: 195390 - DNA, 120 bp, Artificial Sequence
  ENSG00000113269_50 (sequence is synthesized)
tggaggagaggcattgcagccatagagaggcccaagggaacagtcaagacaaggcggggacagtggccaggaggcgagggcagcacttcctgggcagggaaggcttgccagggagaccag

SEQ ID NO: 195391 - DNA, 120 bp, Artificial Sequence
  ENSG00000113269_51 (sequence is synthesized)
actcctgtctctgtttggaaagaaaaggaaccgcactgggggtcagggaggctaggcacggcaccagcctgggatgccagtcccgcctgaggggccaaggcaaaggggaagcattcacag

SEQ ID NO: 195392 - DNA, 120 bp, Artificial Sequence
  ENSG00000113269_52 (sequence is synthesized)
accccacaccaggctctgacgccaagtggaagaagagggagatagaagcagaagcctgggcttccaggcctggttcctgggcgggtgttgatgggacccagggagagtcctgtggggata

SEQ ID NO: 195393 - DNA, 120 bp, Artificial Sequence
  ENSG00000113269_53 (sequence is synthesized)
ctttgggtctgggctggcaggggctctggaaggagaggcatggaggtgcgaacctggtgcccaggtggaggtgcagtgggggtaaggtggccaggctgcagacccctgcatcagaatgcc

SEQ ID NO: 195394 - DNA, 120 bp, Artificial Sequence
  ENSG00000113269_54 (sequence is synthesized)
ggtaaggtggccaggctgcagacccctgcatcagaatgcctgcgaagctgtgggttttttgtttgtttgtttgttttatttcgagacagggtgtcactctgtcgcccagactggagtgca

SEQ ID NO: 195395 - DNA, 82 bp, Artificial Sequence
  ENSG00000113269_55 (sequence is synthesized)
tcctcccaagtgctggaattacaggtgtgagccgcaccagcctgttttttaattttatttagagacagggtctcactctgtt

SEQ ID NO: 195396 - DNA, 120 bp, Artificial Sequence
  ENSG00000113269_56 (sequence is synthesized)
gtgtaatcttggctcactgcagcctcaacttccagcgctaaagcaatcctcccacctctgcctcccgagtaactgggactacacacgcatgccactacacccaggtaatttttaaaaatt

SEQ ID NO: 195397 - DNA, 120 bp, Artificial Sequence
  ENSG00000113269_57 (sequence is synthesized)
ccaggtaatttttaaaaattttttttagagacagagcttctccatgttgcccaggctagcctcaaactcctgggctccagtgaccctcccgccttagtgtctcaaagtgctgggattaca

SEQ ID NO: 195398 - DNA, 120 bp, Artificial Sequence
  ENSG00000113269_58 (sequence is synthesized)
ggtatgagccaccacgcccggtcagaagctgtgtttttaagtggacataccatcttgtcctgctgaagtatctccatgtaatcacaatatctatgtcacccaaatctcctccttcctcct

SEQ ID NO: 195399 - DNA, 120 bp, Artificial Sequence
  ENSG00000113269_59 (sequence is synthesized)
ccctcccccaaaacacccccacaggcatgcataccctcccatgcgctggaggcagaatctcccaaggggagctggccaggagaggtgtccctgagttcagatggaggtggaagccagagt

SEQ ID NO: 195400 - DNA, 120 bp, Artificial Sequence
  ENSG00000113269_60 (sequence is synthesized)
ggggctgggaccacccagtgacatgaggatggggcttgggataaagccctggggacactgacatttaaagtgtggacagaaggagctactgaaggcaatggatttagaaaagcaattgag

SEQ ID NO: 195401 - DNA, 120 bp, Artificial Sequence
  ENSG00000113269_61 (sequence is synthesized)
tatgatttccttcttcaagaaaggctgtccaactagctctcacttcctctcgtgtgttcagtgtcacccggaagcagagtttaatgtgactaaagtcaacattggctcacactgtcaggg

SEQ ID NO: 195402 - DNA, 120 bp, Artificial Sequence
  ENSG00000113269_62 (sequence is synthesized)
agtgtgggaagatgagtaaggactcatcgcagggcgatacccacagcttaaaataggcaccttcccctcccaggtctggttagggcagttgttacatatgaggggcgtggagttttgtct

SEQ ID NO: 195403 - DNA, 120 bp, Artificial Sequence
  ENSG00000113269_63 (sequence is synthesized)
tgtattttggccttgttggtaaagcattccaaagcttcgacacaccctcctttcagcccattaggaaaggctgttgattgtaatattcacacagctccctgggctatggttaagagcctt

SEQ ID NO: 195404 - DNA, 120 bp, Artificial Sequence
  ENSG00000113269_64 (sequence is synthesized)
gcagaaggactgggagaagccctgtgtgtttgaagtattgtagcatcagaaaaaaacaccggaagaaggcaggtggggacaaggtgcctatgtctgctccttggaattcctttccttact

SEQ ID NO: 195405 - DNA, 120 bp, Artificial Sequence
  ENSG00000113269_65 (sequence is synthesized)
gtccgaggcaactacagggaaagcaaagcgtgagcccccaaatccacacctgggaggaacgttcccctttgcaaggcatgggactggctggccctgtgtctcacgggggctctgagtttt

SEQ ID NO: 195406 - DNA, 120 bp, Artificial Sequence
  ENSG00000113269_66 (sequence is synthesized)
gaggtcacactagcctcctgaggcctggctgagagggctgggttgggggtcaggaggccccctgtagccacgaagctcctctggggcattgttaaaggttcaccctcttttttgtgggta

SEQ ID NO: 195407 - DNA, 120 bp, Artificial Sequence
  ENSG00000113269_67 (sequence is synthesized)
tcctggaagatctcaagaaactgagcttggaagaagagaggctgagagggtctcccgccgcctgcgttctctgcagctatggccccacagcctccagtgaccatggaggggaaggtgcca

SEQ ID NO: 195408 - DNA, 120 bp, Artificial Sequence
  ENSG00000113269_68 (sequence is synthesized)
cccgccttggctgctgaaagggtgatgctcttatgcctgagtcttggctcctgtggtcctgcagagaccctgtgggggccgcccggtcgtcacctgcactcatcttgggttttccttcct

SEQ ID NO: 195409 - DNA, 120 bp, Artificial Sequence
  ENSG00000113269_69 (sequence is synthesized)
tttccaccctaagctgaaggtatttttttcctgttttcttcactctaacttggggaagaaggaagatcctttatggaaaagaaaaaaaaaaaagcacctttgaacgtcctgcaacttgag

SEQ ID NO: 195410 - DNA, 120 bp, Artificial Sequence
  ENSG00000113269_70 (sequence is synthesized)
tttcaagctttcagaaggattcggtgctgctggcctgctcagacctccgcctgggctgtggagttcctcctgttggcccctcctctctgtaccacaaaagctctaggcggcccagccacc

SEQ ID NO: 195411 - DNA, 120 bp, Artificial Sequence
  ENSG00000113269_71 (sequence is synthesized)
cctgtgaaagcggcgcccgtagccagacgccaaggctgccgtcccgagccgagggtggcaccttgcccagcgcacgtgcattctcctgtgggaactcggagggcatgtggtgagcagtct

SEQ ID NO: 195412 - DNA, 120 bp, Artificial Sequence
  ENSG00000113269_72 (sequence is synthesized)
cctgtcagttgaggtggaggctcccggcccatctttgctctcctcaggctgcccagctcctggcggcacatggtggcctggcaaagctgacttggcctcctcagttccccacccatccgc

SEQ ID NO: 195413 - DNA, 120 bp, Artificial Sequence
  ENSG00000113269_73 (sequence is synthesized)
ggatcatcgccttccctagccacctctctctatagccaccgacatctgcggagcgtcacagactggttctgagctgtggtttacaaattcaacccaacacagagtgaattcaaatttgct

SEQ ID NO: 195414 - DNA, 120 bp, Artificial Sequence
  ENSG00000113269_74 (sequence is synthesized)
tttggaacagcctttatctccaattaagtgcaagtatatttacactatgtgatattaaaggacttctccaatgactgggaggtactgaaccaagatgtttgtaaagaaacggtggggtga

SEQ ID NO: 195415 - DNA, 120 bp, Artificial Sequence
  ENSG00000113269_75 (sequence is synthesized)
ggtggttaggtagaatataccgtcctggccatttctcttccttcaggcgagtaagcgctccttcagcagaaaggctgcggattgctggctgtgctctgtggactgggccagtaggtgtgg

SEQ ID NO: 195416 - DNA, 120 bp, Artificial Sequence
  ENSG00000113269_76 (sequence is synthesized)
cccaggtccaggtcctggcacctctgctgagtgcccagcctgagatgacacatgccatcctggagagaagcagagagggtgctgtctccaggcgttctccagacagcctgggcctggctt

SEQ ID NO: 195417 - DNA, 120 bp, Artificial Sequence
  ENSG00000113269_77 (sequence is synthesized)
gctgagccagctgcaggaggggatctcctgactggggcttgggaccagatctgctgcagagaggcaataactctgtctaaaaagaaaacttgtcccgtgtgattacaaaaacaggaaaag

SEQ ID NO: 195418 - DNA, 120 bp, Artificial Sequence
  ENSG00000113269_78 (sequence is synthesized)
gctccaagctaggaaatgagatttgaggtatggagaacattctcacctgatggaagcatcctgttcctgtacaggaggaggagctggtgcaagccctaggccacatatgtcacagttgtt

SEQ ID NO: 195419 - DNA, 120 bp, Artificial Sequence
  ENSG00000113269_79 (sequence is synthesized)
ttggaccctccgtagcttttatactcataaaatattaaagttgcccctttcatatttgggtcattgaaagagcccaccgtactctaggttcctgctcactatgcacaacatctcagaaga

SEQ ID NO: 195420 - DNA, 120 bp, Artificial Sequence
  ENSG00000113269_80 (sequence is synthesized)
tggcgtacaaaactatttttctaactatagcacaggtaatgtgggggtggggaggcttgggatatacctaaatgtggcaaatgatttatcttccaccttgagggatgaaaaggaaactat

SEQ ID NO: 195421 - DNA, 120 bp, Artificial Sequence
  ENSG00000113269_81 (sequence is synthesized)
gcacttgaattttaattaaaattttaatttaattcattggatagcttgtgccagaaagaacagtcaatattcaagaagcaaaactgacgattagctcagtttcgggcctccctgtcgggg

SEQ ID NO: 195422 - DNA, 120 bp, Artificial Sequence
  ENSG00000113269_82 (sequence is synthesized)
gagttttcttgtctggaacacaaacacctacaagtagagtgtgagctggttcttgacaatcagatctcatcaaccctttgaaatgttctgggcagcacagctccttggtctgcatggttg

SEQ ID NO: 195423 - DNA, 120 bp, Artificial Sequence
  ENSG00000113269_83 (sequence is synthesized)
gtgtaagtataatcaagtagtgaaattgtatggtatatacctatatgccaacagtgtacacccgtatgtgcagaatttgctaatataaccatttcaataaaaacctattgaaaaagctga

SEQ ID NO: 195424 - DNA, 120 bp, Artificial Sequence
  ENSG00000113269_84 (sequence is synthesized)
ggactttgtgttccgctgaccctcctcggggcgcttcctcccgtgccgcccttcccctcccccgccgcgtccttgcgaggcgcctcccattcggtgggaccgacccggggggatggaggg

SEQ ID NO: 195425 - DNA, 120 bp, Artificial Sequence
  ENSG00000113269_85 (sequence is synthesized)
ggcacgcttctacaaccctcctgggaccccgaagagacgcccgcgtgcgacctgagacgccgccctcgccgagggcccatgggcgcgtccccacaggcgggcagtggacgtgagggcggc

SEQ ID NO: 195426 - DNA, 120 bp, Artificial Sequence
  ENSG00000113269_86 (sequence is synthesized)
gctgtgatgtttcaaatgtttattcgacacaaaatgcagcaattatgacacctaacttttttactgctggagaattgaagacctatagttctatatttctgtttgacctaacagggtgtt

SEQ ID NO: 195427 - DNA, 120 bp, Artificial Sequence
  ENSG00000113269_87 (sequence is synthesized)
ctaacactttttacttttcaaccagaatgctgaatcttgatacagccaccattttttctattttatcattctcttatatgtaggacatggagagggatgtagtaaaatagagactttata

SEQ ID NO: 195428 - DNA, 120 bp, Artificial Sequence
  ENSG00000113269_88 (sequence is synthesized)
aggaaactgacccagactttgatcattgtgcagtctgcatagagagctataagcagaatgatgtcgtccgaattctcccctgcaaactacatctccaagcccttcagtgagacttccatc

SEQ ID NO: 195429 - DNA, 120 bp, Artificial Sequence
  ENSG00000113269_89 (sequence is synthesized)
gagctcacctggctctgggtacaacaactccagggacttggattaaatctttttctaaacctggattatgcaaaatggaaagaactgatacctgctttgtgcctgctgtggttcagatgc

SEQ ID NO: 195430 - DNA, 120 bp, Artificial Sequence
  ENSG00000113269_90 (sequence is synthesized)
gatagcaggttccagggtcgcacaattcagaaatggcagagctgtgtcaaggcctgcctttaatgtggtgctccccacatgggaccaagccttcctccatgaggaaaggactcgcctgtg

SEQ ID NO: 195431 - DNA, 120 bp, Artificial Sequence
  ENSG00000113269_91 (sequence is synthesized)
cctggttgccctggaaacagcatgttggtttctcctgtggctcctctcaagctggggagcatgaaactaagatacacagttctgagtatcaattggataaataggaaatcacctgccaag

SEQ ID NO: 195432 - DNA, 120 bp, Artificial Sequence
  ENSG00000113269_92 (sequence is synthesized)
aagcctaaaaccaaagagtttgcctcttcctcctcccttccctttaaaagacatccacacaactccagccttataatatggagcatgtgaattaataaaataattgtgagttgttatctc

SEQ ID NO: 195433 - DNA, 120 bp, Artificial Sequence
  ENSG00000113269_93 (sequence is synthesized)
gaaagaaggttataaatatgcttagtctactttactgtcatttacattaacaatgaaaaaaatctatgtccttgtgcaattttatatacatattttcaccgcacactttttggtggctac

SEQ ID NO: 195434 - DNA, 120 bp, Artificial Sequence
  ENSG00000113269_94 (sequence is synthesized)
actcctcacagacctcaggacctaaatggaagaaatggttgagccatgctttcctttctcccttgcagctttcaccagtacttccactaaccttctccagttagtagctctctggcaaac

SEQ ID NO: 195435 - DNA, 120 bp, Artificial Sequence
  ENSG00000113269_95 (sequence is synthesized)
ggcctttcagcagagagatattcctagtggctgcgaagttgcttgctgtggtagggcatgaaggcaggaagatagattaggtaaaaatagggagttgaaggagcaagtcagggtggcgag

SEQ ID NO: 195436 - DNA, 120 bp, Artificial Sequence
  ENSG00000113269_96 (sequence is synthesized)
caggagctgaaatcaggagttgctagagagttgtgtaataaccaaagcttatatggtttgaagcagagatctggagctcagcagaaagaaaaagatcaacgctaacagcttgatttgggg

SEQ ID NO: 195437 - DNA, 120 bp, Artificial Sequence
  ENSG00000113269_97 (sequence is synthesized)
tgcagagagggcagcaggagctcgggcagcgcaggggcttgtcaaaaggtcataggctgtttttacacctgatgcaaggacagaaacacacacaaggtctggaggattcctgtgagacag

SEQ ID NO: 195438 - DNA, 120 bp, Artificial Sequence
  ENSG00000113272_0 (sequence is synthesized)
cctttcctttccgcgtgtagaatgtggggcgcctgtaaagttaaggttcacgattccttggccaccatttccatcactctgagacggtacctgagattgggggcgaccatggcaaaaagc

SEQ ID NO: 195439 - DNA, 120 bp, Artificial Sequence
  ENSG00000113272_1 (sequence is synthesized)
aagttcgagtacgtgagggacttcgaggctgacgacacctgcctggcacactgctgggtggtagtgcggctggacggccggaatttccatcggtttgctgagaagcacaactttgcaaaa

SEQ ID NO: 195440 - DNA, 120 bp, Artificial Sequence
  ENSG00000113272_2 (sequence is synthesized)
cccaatgacagccgtgctctccagctgatgaccaaatgtgcgcagactgtgatggaagaactagaggatattgtgatcgcgtatggacagagtgatgagtacagctttgtgttcaagcgg

SEQ ID NO: 195441 - DNA, 120 bp, Artificial Sequence
  ENSG00000113272_3 (sequence is synthesized)
aaaaccaattggtttaaaagaagagccagtaagttcatgactcacgtggcctcccagtttgcctccagctatgtgttttattggcgggattactttgaggaccagccccttctgtatccc

SEQ ID NO: 195442 - DNA, 120 bp, Artificial Sequence
  ENSG00000113272_4 (sequence is synthesized)
ccaggctttgacggaagagtcgtggtgtatcccagcaaccagactttaaaggactacctcagctggcgacaagcagattgtcacatcaataatctttataatacagttttctgggcactt

SEQ ID NO: 195443 - DNA, 120 bp, Artificial Sequence
  ENSG00000113272_5 (sequence is synthesized)
atacaacaatctggactaacaccagtacaagcccaagggagattacagggaactcttgcagcagacaagaatgagattttgttttctgaattcaacatcaactataataatgagctgccg

SEQ ID NO: 195444 - DNA, 120 bp, Artificial Sequence
  ENSG00000113272_6 (sequence is synthesized)
atgtataggaaagggactgtgttgatatggcagaaggtggatgaagtgatgacaaaagaaattaagctgccaacagaaatggaaggaaaaaagatggcagtgacccggaccaggacaaag

SEQ ID NO: 195445 - DNA, 120 bp, Artificial Sequence
  ENSG00000113272_7 (sequence is synthesized)
ccagtgcccttgcactgcgatatcatcggggatgctttctggaaggaacatccagagattctagatgaagacagctgacccttttgcgcttcagttctggtgtgcttaaccatgcaagcc

SEQ ID NO: 195446 - DNA, 120 bp, Artificial Sequence
  ENSG00000113272_8 (sequence is synthesized)
ctcccacctcccagggctccttgccttaggtggctgtagcatccctaccacccaggacactggtgcgaatgacacaactcaagttgggaggggaacagggaaggaagggatggatggggg

SEQ ID NO: 195447 - DNA, 120 bp, Artificial Sequence
  ENSG00000113272_9 (sequence is synthesized)
tggtgtatcttactctgtttaagcagaacaccttgtttgcggtgttggaacatggttcctttggcagaagtgctttttttttaatcgcagtactatttttataaagcaagaactattcca

SEQ ID NO: 195448 - DNA, 120 bp, Artificial Sequence
  ENSG00000113272_10 (sequence is synthesized)
tgccttggagaatgaatcatttttagattgtgacataaatcttgtaaaaacctgtcagttattttcatctatgagagaagaggagcccaaactctcgcccacctgttcttaaccagaaaa

SEQ ID NO: 195449 - DNA, 120 bp, Artificial Sequence
  ENSG00000113272_11 (sequence is synthesized)
cccactgactttgaaaatctcacctctgccacccatctacttgcattcgtctttggcagacctcaagataaatatgggttaatgcctgcatgatgcctctgaattcaggaattgcaggga

SEQ ID NO: 195450 - DNA, 120 bp, Artificial Sequence
  ENSG00000113272_12 (sequence is synthesized)
cggggctttgtgccagtctctaagttggcaactttggctgaacaaatgagtagtggcttcagtgtccttgcgtacacattctgtggattgatttaatggagttgtcagcatgatcatcat

SEQ ID NO: 195451 - DNA, 120 bp, Artificial Sequence
  ENSG00000113272_13 (sequence is synthesized)
cttctagccaggggcatagttgccaaggccatttacctctttctaagaagaaacagaattatgtgtatatatgagagaaagaaacaagaatgcgtgaatgaggatgaagaaacatttacc

SEQ ID NO: 195452 - DNA, 120 bp, Artificial Sequence
  ENSG00000113272_14 (sequence is synthesized)
ccatgtactcaagacatttcagttttaaaagtcactttcctattagacttcttgaaaaacattctcacatagcctctatgtaatcagacaaatgacatttgatttcaagagcagaggggt

SEQ ID NO: 195453 - DNA, 120 bp, Artificial Sequence
  ENSG00000113272_15 (sequence is synthesized)
aaacatcctctgctaatcgacaggtagcaggtgtcagaggaggcataatattaatagcgccaccttctgttgggtcagtggagatgggtgaggaacagcacagagcagcagggatcatca

SEQ ID NO: 195454 - DNA, 120 bp, Artificial Sequence
  ENSG00000113272_16 (sequence is synthesized)
catgcagccaaacttggcctctgaagggggaaggtagtgggaataggtggtgagagaactcacatttttctcttgtcctggttttatatttcggagggaaaggattatttggccccatta

SEQ ID NO: 195455 - DNA, 63 bp, Artificial Sequence
  ENSG00000113272_17 (sequence is synthesized)
ctcaggaggcggaacatctcaaaaaaaaaaaaaaaagacatggctgggcatggtggctcacac

SEQ ID NO: 195456 - DNA, 86 bp, Artificial Sequence
  ENSG00000113272_18 (sequence is synthesized)
ccagcactttggggggctgaggcaggtagatcacttcaggccaggagtccaagaccagcacgtccaacatggcaaaacccagtctg

SEQ ID NO: 195457 - DNA, 120 bp, Artificial Sequence
  ENSG00000113272_19 (sequence is synthesized)
aaaaattaagagacagcccgtgtcccagtccctcgtcttgcactgcagaatttacatctaagaagaaaatgtatttttgaaagggtgatggctggcctcatccctcactaattgacaacc

SEQ ID NO: 195458 - DNA, 120 bp, Artificial Sequence
  ENSG00000113272_20 (sequence is synthesized)
catctgtcgatgccattttttcccttcctgttctcactccacagaaagaggagatacggttcttgtttggtaattgctaaaatctctttgaggaaagaaataaagatgtcaactcctttg

SEQ ID NO: 195459 - DNA, 120 bp, Artificial Sequence
  ENSG00000113272_21 (sequence is synthesized)
tgagattttgttttctgaattcaacatcaactataataatgagctgccgatgtataggaaagggactgtgttgatatggcagaagtaccaaggagtaccttgagagctagtcattccact

SEQ ID NO: 195460 - DNA, 120 bp, Artificial Sequence
  ENSG00000113273_0 (sequence is synthesized)
attctatcagcggtacaaggggctggtggcgccacaggcgctgggaccgcgggcggacaaggatgggtccgcgcggcgcggcgagcttgccccgaggccccggacctcggcggctgctcc

SEQ ID NO: 195461 - DNA, 120 bp, Artificial Sequence
  ENSG00000113273_1 (sequence is synthesized)
tccccgtcgtcctcccgctgctgctgctgctgttgttggcgccgccgggctcgggcgccggggccagccggccgccccacctggtcttcttgctggcagacgacctaggctggaacgacg

SEQ ID NO: 195462 - DNA, 120 bp, Artificial Sequence
  ENSG00000113273_2 (sequence is synthesized)
tcggcttccacggctcccgcatccgcacgccgcacctggacgcgctggcggccggcggggtgctcctggacaactactacacgcagccgctgtgcacgccgtcgcggagccagctgctca

SEQ ID NO: 195463 - DNA, 120 bp, Artificial Sequence
  ENSG00000113273_3 (sequence is synthesized)
ctggccgctaccagatccgtacaggtttacagcaccaaataatctggccctgtcagcccagctgtgttcctctggatgaaaaactcctgccccagctcctaaaagaagcaggttatacta

SEQ ID NO: 195464 - DNA, 120 bp, Artificial Sequence
  ENSG00000113273_4 (sequence is synthesized)
cccatatggtcggaaaatggcacctgggaatgtaccggaaagaatgccttccaacccgccgaggatttgatacctactttggatatctcctgggtagtgaagattattattcccatgaac

SEQ ID NO: 195465 - DNA, 120 bp, Artificial Sequence
  ENSG00000113273_5 (sequence is synthesized)
gctgtacattaattgacgctctgaatgtcacacgatgtgctcttgattttcgagatggcgaagaagttgcaacaggatataaaaatatgtattcaacaaacatattcaccaaaagggcta

SEQ ID NO: 195466 - DNA, 120 bp, Artificial Sequence
  ENSG00000113273_6 (sequence is synthesized)
tagccctcataactaaccatccaccagagaagcctctgtttctctaccttgctctccagtctgtgcatgagccccttcaggtccctgaggaatacttgaagccatatgactttatccaag

SEQ ID NO: 195467 - DNA, 120 bp, Artificial Sequence
  ENSG00000113273_7 (sequence is synthesized)
acaagaacaggcatcactatgcaggaatggtgtcccttatggatgaagcagtaggaaatgtcactgcagctttaaaaagcagtgggctctggaacaacacggtgttcatcttttctacag

SEQ ID NO: 195468 - DNA, 120 bp, Artificial Sequence
  ENSG00000113273_8 (sequence is synthesized)
ataacggagggcagactttggcagggggtaataactggccccttcgaggaagaaaatggagcctgtgggaaggaggcgtccgaggggtgggctttgtggcaagccccttgctgaagcaga

SEQ ID NO: 195469 - DNA, 120 bp, Artificial Sequence
  ENSG00000113273_9 (sequence is synthesized)
agggcgtgaagaaccgggagctcatccacatctctgactggctgccaacactcgtgaagctggccaggggacacaccaatggcacaaagcctctggatggcttcgacgtgtggaaaacca

SEQ ID NO: 195470 - DNA, 120 bp, Artificial Sequence
  ENSG00000113273_10 (sequence is synthesized)
tcagtgaaggaagcccatcccccagaattgagctgctgcataatattgacccgaacttcgtggactcttcaccgtgtcccaggaacagcatggctccagcaaaggatgactcttctcttc

SEQ ID NO: 195471 - DNA, 120 bp, Artificial Sequence
  ENSG00000113273_11 (sequence is synthesized)
cagaatattcagcctttaacacatctgtccatgctgcaattagacatggaaattggaaactcctcacgggctacccaggctgtggttactggttccctccaccgtctcaatacaatgttt

SEQ ID NO: 195472 - DNA, 120 bp, Artificial Sequence
  ENSG00000113273_12 (sequence is synthesized)
ctgagataccctcatcagacccaccaaccaagaccctctggctctttgatattgatcgggaccctgaagaaagacatgacctgtccagagaatatcctcacatcgtcacaaagctcctgt

SEQ ID NO: 195473 - DNA, 120 bp, Artificial Sequence
  ENSG00000113273_13 (sequence is synthesized)
cccgcctacagttctaccataaacactcagtccccgtgtacttccctgcacaggacccccgctgtgatcccaaggccactggggtgtggggcccttggatgtaggatttcagggaggcta

SEQ ID NO: 195474 - DNA, 120 bp, Artificial Sequence
  ENSG00000113273_14 (sequence is synthesized)
gaaaacctttcaattggaagttggacctcaggccttttctcacgactcttgtctcatttgttatcccaacctgggttcacttggcccttctcttgctcttaaaccacaccgaggtgtcta

SEQ ID NO: 195475 - DNA, 120 bp, Artificial Sequence
  ENSG00000113273_15 (sequence is synthesized)
atttcaacccctaatgcatttaagaagctgataaaatctgcaacactcctgctgttggctggagcatgtgtctagaggtgggggtggctgggtttatccccctttcctaagccttgggac

SEQ ID NO: 195476 - DNA, 120 bp, Artificial Sequence
  ENSG00000113273_16 (sequence is synthesized)
agctgggaacttaacttgaaataggaagttctcactgaatcctggaggctggaacagctggctcttttagactcacaagtcagacgttcgattcccctctgccaatagccagttttattg

SEQ ID NO: 195477 - DNA, 120 bp, Artificial Sequence
  ENSG00000113273_17 (sequence is synthesized)
gagtgaatcacatttcttacgcaaatgaagggagcagacagtgattaatggttctgttggccaaggcttctccctgtcggtgaaggatcatgttcaggcactccaagtgaaccacccctc

SEQ ID NO: 195478 - DNA, 120 bp, Artificial Sequence
  ENSG00000113273_18 (sequence is synthesized)
ttggttcaccccttactcacttatctcatcacagagcataaggcccattttgttgttcaggtcaacagcaaaatgcctgcaccatgactgtggcttttaaaataaagaaatgtgttttta

SEQ ID NO: 195479 - DNA, 120 bp, Artificial Sequence
  ENSG00000113273_19 (sequence is synthesized)
tcgtaatttatttccccccagccattgctcactctgtctagacttcctgccacttccaattcttctgtggcttttcctgcctttccttttgacctcagtagtcctatccctgggaaggcc

SEQ ID NO: 195480 - DNA, 120 bp, Artificial Sequence
  ENSG00000113273_20 (sequence is synthesized)
gccttacttttgcccctagggctgaagctagaggcctccccgtaataggcggtggagttgctctgtgaggatgttcatggtagacactaagagggctgggtgggagatgcttggctctgt

SEQ ID NO: 195481 - DNA, 120 bp, Artificial Sequence
  ENSG00000113273_21 (sequence is synthesized)
ggcatctgttcagcgaggcttttcctatattgcatggagttagtcattgtgattgtagctttatttcataatatattaagacttgcactgctatttactagcagtgagaagaaacctcag

SEQ ID NO: 195482 - DNA, 120 bp, Artificial Sequence
  ENSG00000113273_22 (sequence is synthesized)
gaaaggatatgaaaaagcaagtggccagtgtctgggatactgggccttggtaaagcagaggagggcacacccacagtcctcttattctctgttttactgcttgttttgaggttctggggt

SEQ ID NO: 195483 - DNA, 120 bp, Artificial Sequence
  ENSG00000113273_23 (sequence is synthesized)
ctggcaaagaggatgcagtttgacacctgcagccctttctcaatcccactaatgtcttactaatgtggaacagtccatattagctccagagagtgtcaaacccagagaaatgtgtgcaaa

SEQ ID NO: 195484 - DNA, 120 bp, Artificial Sequence
  ENSG00000113273_24 (sequence is synthesized)
aatgatactcttttctgcattagccccaccattgtgttcaccaatgcttggaacactgcctgaaggcactcattttttaatttttattttatttttaattttttatatctttatgagacg

SEQ ID NO: 195485 - DNA, 120 bp, Artificial Sequence
  ENSG00000113273_25 (sequence is synthesized)
tttttattttatttttaattttttatatctttatgagacgatctcactctgtcaccaggttggagtacagtggtacaatcacaactcaccgtagcctcaaactcctgggctcaagtgatt

SEQ ID NO: 195486 - DNA, 120 bp, Artificial Sequence
  ENSG00000113273_26 (sequence is synthesized)
ataccgccacacccagctaattttattttttgaaaagacaaggttccctatgttgcccagctggtcttaaactcctgggctccagcaattatcccagcttgggctccaaaagtgctggga

SEQ ID NO: 195487 - DNA, 120 bp, Artificial Sequence
  ENSG00000113273_27 (sequence is synthesized)
ttacaggcatgagtcaccatgcctggcctcattttttaaaacaaatgaataaatggacaaatgagtaaatgagaaagtctcacaccatgaaagatgctagtccaatgagctgaatacaga

SEQ ID NO: 195488 - DNA, 120 bp, Artificial Sequence
  ENSG00000113273_28 (sequence is synthesized)
ggtaatataaatgtcttccagctgttgcttttctgttctcaagctgcccctcctggggtaggagcataatctacatcactgggcagtcacaggacactctatagcaaggttgtagcgtcc

SEQ ID NO: 195489 - DNA, 120 bp, Artificial Sequence
  ENSG00000113273_29 (sequence is synthesized)
tctccagtggggggagaaaaggaactgtgcctaccaaaggtactctcttgtcagcaatttccatttctatactttatgggacactagaaactaaaagcaacaaataatctgatataagtc

SEQ ID NO: 195490 - DNA, 120 bp, Artificial Sequence
  ENSG00000113273_30 (sequence is synthesized)
cttgtatagtcatccttcaattcagtagcaatattttctggtcactactaacctgtattgtattaaaatgagactattggaaggaaatggtgctaaaactaataacatctcttaccaacc

SEQ ID NO: 195491 - DNA, 120 bp, Artificial Sequence
  ENSG00000113273_31 (sequence is synthesized)
tttacccaactcctgggttggcaaacagctgaccaaactgccatcacctcccacttggaagtgtatggccgacagcatgaaatagctgagcccagatgttccttctgcatcctccgaatc

SEQ ID NO: 195492 - DNA, 120 bp, Artificial Sequence
  ENSG00000113273_32 (sequence is synthesized)
ccagggctgggtgtaggtagccgttggaggccatcgctacagggcacctatctgttatcgctgctgtcctcccaacagctgtctccagttctagttccttggttttcaggcacagtgggg

SEQ ID NO: 195493 - DNA, 120 bp, Artificial Sequence
  ENSG00000113273_33 (sequence is synthesized)
gatgttctgcacccagtggacttcaaaagagttttgaagacttaattttttgtaaaacaagtacttgagattttggtttatccataatagaatgtatttcattagattctctgattctat

SEQ ID NO: 195494 - DNA, 120 bp, Artificial Sequence
  ENSG00000113273_34 (sequence is synthesized)
tttttttacctttacagaaggttttgcttatttaattgtgagctcatttttctttgttacttttgtccccccagatttgggggacaaaataaaattaatcttttaaaatgtgtcagccat

SEQ ID NO: 195495 - DNA, 120 bp, Artificial Sequence
  ENSG00000113273_35 (sequence is synthesized)
atgtatggggcttccatttggggtgaggagaaagttctggaactagatagtggtcatggttatacaacatcataaatgcaattactgccactgaattgtatgttttaaagtggttaaaat

SEQ ID NO: 195496 - DNA, 120 bp, Artificial Sequence
  ENSG00000113273_36 (sequence is synthesized)
cactgaattgtatgttttaaagtggttaaaatgttaagttttatgttttattacaatttttaaatgtgtcaaccaactttatagtacataaattatatctcagtaaagctgttaaataaa

SEQ ID NO: 195497 - DNA, 120 bp, Artificial Sequence
  ENSG00000113273_37 (sequence is synthesized)
tcctgcctctcaggaagctgtattctagttgggggagaaagatgttggacaaatgaacacacagatgagcaagatgactgccagttgtgataagtgccaggaaggcaaaaaagtatgttg

SEQ ID NO: 195498 - DNA, 120 bp, Artificial Sequence
  ENSG00000113273_38 (sequence is synthesized)
tttttcctgtttaacccccacagtgtagagcaatagcccccaaggttgggaggcacatgccttagaggttgcaagatgttcccttggagtacaggaagaaaatttcaatcttgtatttgt

SEQ ID NO: 195499 - DNA, 120 bp, Artificial Sequence
  ENSG00000113273_39 (sequence is synthesized)
catcctttttaaagtatatgttttttaagacacataatatattagtagacttgtacataaatctaatttataaataaatatgcatatattggaggtattatttttacgggtggaatgacc

SEQ ID NO: 195500 - DNA, 120 bp, Artificial Sequence
  ENSG00000113273_40 (sequence is synthesized)
tttttacgggtggaatgacctagtgcaatggttttcaacctctgtttggtgttacagctctgtttggggttagcagctgattgactgtcccttagtggccagggggagaggacttcctca

SEQ ID NO: 195501 - DNA, 120 bp, Artificial Sequence
  ENSG00000113273_41 (sequence is synthesized)
ggccatctcttcatcccactccaggtatcccagctcaagaatagcaggtttcaggtctctagttataggaaatacacaatggagtatttaggagcaaaaagccatgatatatttaacata

SEQ ID NO: 195502 - DNA, 90 bp, Artificial Sequence
  ENSG00000113273_42 (sequence is synthesized)
ccctcaaatggttcagaaaaaaatcatgtgcacagagagaattcaaatggactgcaaaattaaataaaagaatataggtaaggtgcataa

SEQ ID NO: 195503 - DNA, 120 bp, Artificial Sequence
  ENSG00000113273_43 (sequence is synthesized)
ataaatgaatgtgaaaggctatttagacctctgccttttcaccgtcctcccacctgccacaggctgggctcttgtgctagaaatgacttgctagctagacatcatggttcaggatctgag

SEQ ID NO: 195504 - DNA, 120 bp, Artificial Sequence
  ENSG00000113273_44 (sequence is synthesized)
tcagaggaaaccacagtgcaaatttaattgccggggaagataacgggccttggtgccctccaagcgtcagctgagtttccaagaagccgggcagcgggcgcccgcgggttcgtctctggc

SEQ ID NO: 195505 - DNA, 120 bp, Artificial Sequence
  ENSG00000113273_45 (sequence is synthesized)
tgctgctgtgtgattgttgagactgaagttctgaaagcaccagtgtttgccggatctgtctccagcttgtctctacaaggtcatttccaaaagactgtcaaaagaatggcatgtcccgcc

SEQ ID NO: 195506 - DNA, 120 bp, Artificial Sequence
  ENSG00000113273_46 (sequence is synthesized)
ccattgagcaagaatgatagcttttgtgttaaaatgatagttcagcttacaaatacatgatttttaagaaaaataagtgcctttagagacattgtaagtatatatatttttaaattataa

SEQ ID NO: 195507 - DNA, 120 bp, Artificial Sequence
  ENSG00000113273_47 (sequence is synthesized)
atttgagattgtgggcctgtgttttacgtgaagaacaagattgtcctcagcccatcgccctccatggaaggtctttgaagctgcgacgttttgcttagaagtaggctagggtattgttag

SEQ ID NO: 195508 - DNA, 120 bp, Artificial Sequence
  ENSG00000113273_48 (sequence is synthesized)
cttcctgcagggggtcagggaactagtcctgttgtctgctggaagaatggaggacaaaacagcagggaaaaagctggaataggaactagggatatgtttatttccatttattagcaagta

SEQ ID NO: 195509 - DNA, 120 bp, Artificial Sequence
  ENSG00000113273_49 (sequence is synthesized)
cactgcacccacatttccagaaggccaacaactgactagaatcaaatagctgctgccttctgtagatgaagtatccacccttcaaatcttcaatctctattgttcccaagttccaataca

SEQ ID NO: 195510 - DNA, 120 bp, Artificial Sequence
  ENSG00000113273_50 (sequence is synthesized)
gatccactgcactcatttaggttacctacttagtctctgtaggcatttaagtttatagtccctgctgaacataatcatagtattcaacactctggaaataccatactttgaccaatttcc

SEQ ID NO: 195511 - DNA, 120 bp, Artificial Sequence
  ENSG00000113273_51 (sequence is synthesized)
agttgcaaaatatatagattatttcttatctttttatattatcaatttttctgtaattaataattaatgttaaaaaatagtagggttcagcagcctaagattagtttttacaaaggaagt

SEQ ID NO: 195512 - DNA, 120 bp, Artificial Sequence
  ENSG00000113273_52 (sequence is synthesized)
ttgatagctattcaagtttaaacattaaagtttaaagtcctgtgagttcaggaatggatagaagaagtgttcagccaggccgctcaacctctcacaacgtggagtctatgggttcctctc

SEQ ID NO: 195513 - DNA, 120 bp, Artificial Sequence
  ENSG00000113273_53 (sequence is synthesized)
taatgggcctcacccagaagggtgagactagggaaggtcctcatctcttacaaacccaagggaaaatctgatttaattagctttataaccttctttcaattattttgcaactcaaagttc

SEQ ID NO: 195514 - DNA, 120 bp, Artificial Sequence
  ENSG00000113273_54 (sequence is synthesized)
catgttttccttcgagaatttattaaattttaaagatcacttttcaagcagcaacatttatagtattgggtagccatttcttcaccatttctaaacattattttggttcttatgagtcat

SEQ ID NO: 195515 - DNA, 120 bp, Artificial Sequence
  ENSG00000113273_55 (sequence is synthesized)
attattttcatattattttaaaatcctcactagcctcaaattgttccctcttattcttgcctgaaaagttgatttgtcagtttggagacagtgatcagtttatgatttgtcatttcaaga

SEQ ID NO: 195516 - DNA, 120 bp, Artificial Sequence
  ENSG00000113273_56 (sequence is synthesized)
acactctacagcatccaagtcacagaaaaagtaatgccactgaacagctaagctgagaagcaaagcagtaaaaccttttctctcaccagaaattttgaagctttgtgctcattatgtgct

SEQ ID NO: 195517 - DNA, 120 bp, Artificial Sequence
  ENSG00000113273_57 (sequence is synthesized)
cattcatatgcgatgacttttttttctttttctttgaaacatttctgcctctatccatgatctaaacttgatatgttaaatttaaatttaatttccccaagcgtgagtactatatgtcat

SEQ ID NO: 195518 - DNA, 73 bp, Artificial Sequence
  ENSG00000113273_58 (sequence is synthesized)
tttaaatttaatttccccaagcgtgagtactatatgtcattgtagataatttgcaaactacaaaaaataaaaa

SEQ ID NO: 195519 - DNA, 120 bp, Artificial Sequence
  ENSG00000113273_59 (sequence is synthesized)
agatatttcaggctaactagatactgtgtgcttcttagtgtcactgcttagtgggggagccagctctgagtggggtcatatccggacaagcgaatgagctatttattcaatgaccacgca

SEQ ID NO: 195520 - DNA, 120 bp, Artificial Sequence
  ENSG00000113273_60 (sequence is synthesized)
gcctgagtgctcgctgctgttgtagctaccaccaactttctactgaagatgataacccagggcataagaaatgacttcagacccaaggttctgaaagggcccctcaaggcctcgggtggc

SEQ ID NO: 195521 - DNA, 120 bp, Artificial Sequence
  ENSG00000113273_61 (sequence is synthesized)
tcctgcagaagtggcagaagaggcgggaactaggaacctggcatcataggaaaagtgccttctccaagaaagaaggggccccaggaggctgtcttacttagatcaaccataaactaccac

SEQ ID NO: 195522 - DNA, 120 bp, Artificial Sequence
  ENSG00000113273_62 (sequence is synthesized)
agatgggtcatttcttatattatttcaaaatatctttgaagatgagaattcatttgtgtccttcatagaccaaagttctttgtgttaccttttcccaaaagtaaattcctttccctttat

SEQ ID NO: 195523 - DNA, 120 bp, Artificial Sequence
  ENSG00000113273_63 (sequence is synthesized)
tcattccttgtggaaataaaatgcaagccctttatacttgtcttacagtaatatggcacatgtagcttacttttgagcatcccagtgaataatgtttggaacttttcttattacctaata

SEQ ID NO: 195524 - DNA, 120 bp, Artificial Sequence
  ENSG00000113273_64 (sequence is synthesized)
gcatatagagaagagtgaagtcagctaaaaacagaaattttgaaaagccatcttcaggaaaatgtaggcccagatgctttcctccaccttttttgacaggctgccacatacagtttcaca

SEQ ID NO: 195525 - DNA, 120 bp, Artificial Sequence
  ENSG00000113282_0 (sequence is synthesized)
acttccgctccacgcagcgcctgtgctgccgcgtctcgacgtgtcaccggcggcgccgctgctgtggcaaaggaaggagctgactgggggagttcgaggcggcgggcggcggtgaccccg

SEQ ID NO: 195526 - DNA, 120 bp, Artificial Sequence
  ENSG00000113282_1 (sequence is synthesized)
gcctggaactgccccggtacggaagtgttccggggtccgtggggagcaggagagggaggcggcggaccgtcccgcgcggggcacgatgttgaacatgtggaaggtgcgcgagctggtgga

SEQ ID NO: 195527 - DNA, 120 bp, Artificial Sequence
  ENSG00000113282_2 (sequence is synthesized)
caaagccaccaatgttgttatgaattattcagagatcgagtctaaggttcgagaggcaacgaacgatgatccttggggaccttctgggcaactcatgggagagattgccaaggctacatt

SEQ ID NO: 195528 - DNA, 120 bp, Artificial Sequence
  ENSG00000113282_3 (sequence is synthesized)
tatgtatgaacaatttccagaacttatgaacatgctttggtcacgaatgttaaaagacaacaaaaagaattggagaagagtttataagtcgttgctgctcctagcttacctcataaggaa

SEQ ID NO: 195529 - DNA, 120 bp, Artificial Sequence
  ENSG00000113282_4 (sequence is synthesized)
tggatcagagcgtgttgttacaagtgccagagaacacatttatgatttacgatccctggaaaattaccactttgtagatgagcatggtaaggatcaaggtataaatattcgacagaaggt

SEQ ID NO: 195530 - DNA, 120 bp, Artificial Sequence
  ENSG00000113282_5 (sequence is synthesized)
gaaggaattggttgaatttgcccaggatgacgacaggcttcgtgaagagcgaaagaaagcaaagaagaacaaagacaagtatgttggggtttcctcagacagtgttggaggattcagata

SEQ ID NO: 195531 - DNA, 120 bp, Artificial Sequence
  ENSG00000113282_6 (sequence is synthesized)
cagtgaaagatatgatcctgagcccaaatcaaaatgggatgaggagtgggataaaaacaagagtgcttttccattcagtgataaattaggtgagctgagtgataaaattggaagcacaat

SEQ ID NO: 195532 - DNA, 120 bp, Artificial Sequence
  ENSG00000113282_7 (sequence is synthesized)
tgatgacaccatcagcaagttccggaggaaagatagagaagactctccagaaagatgcagcgacagcgatgaggaaaagaaagcgagaagaggcagatctcccaaaggtgaattcaaaga

SEQ ID NO: 195533 - DNA, 120 bp, Artificial Sequence
  ENSG00000113282_8 (sequence is synthesized)
tgaagaggagactgtgacgacaaagcatattcatatcacacaggccacagagaccaccacaaccagacacaagcgcacagcaaatccttccaaaaccattgatcttggagcagcagcaca

SEQ ID NO: 195534 - DNA, 120 bp, Artificial Sequence
  ENSG00000113282_9 (sequence is synthesized)
ttacacaggggacaaagcaagtccagatcagaatgcttcaacccacacacctcagtcttcagttaagacttcagtgcctagcagcaagtcatctggtgaccttgttgatctgtttgatgg

SEQ ID NO: 195535 - DNA, 120 bp, Artificial Sequence
  ENSG00000113282_10 (sequence is synthesized)
caccagccagtcaacaggaggatcagctgatttattcggaggatttgctgactttggctcagctgctgcatcaggcagtttcccttcccaagtaacagcaacaagtgggaatggagactt

SEQ ID NO: 195536 - DNA, 120 bp, Artificial Sequence
  ENSG00000113282_11 (sequence is synthesized)
tggtgactggagtgccttcaaccaagccccatcaggccctgttgcttccagtggcgagttctttggcagtgcctcacagccagcggtagaacttgttagtggctcacaatcagctctagg

SEQ ID NO: 195537 - DNA, 120 bp, Artificial Sequence
  ENSG00000113282_12 (sequence is synthesized)
cccacctcctgctgcctcaaattcttcagacctgtttgatcttatgggctcgtcccaggcaaccatgacatcttcccagagtatgaatttctctatgatgagcactaacactgtgggact

SEQ ID NO: 195538 - DNA, 120 bp, Artificial Sequence
  ENSG00000113282_13 (sequence is synthesized)
tggtttgcctatgtcaagatcacagaatacagatatggtccagaaatcagtcagcaaaaccttgccctctacttggtctgaccccagtgtaaacatcagcctagacaacttactacctgg

SEQ ID NO: 195539 - DNA, 120 bp, Artificial Sequence
  ENSG00000113282_14 (sequence is synthesized)
tgactcaaagttttggagctgtgaacctcagttctccatcgaacatgcttcctgtccggccccaaactaatgctttgatagggggacccatgcctatgagcatgcccaatgtgatgactg

SEQ ID NO: 195540 - DNA, 120 bp, Artificial Sequence
  ENSG00000113282_15 (sequence is synthesized)
gcaccatgggaatggcccctcttggaaatactccgatgatgaaccagagcatgatgggcatgaacatgaacatagggatgtccgctgctgggatgggcttgacaggcacaatgggaatgg

SEQ ID NO: 195541 - DNA, 120 bp, Artificial Sequence
  ENSG00000113282_16 (sequence is synthesized)
gcatgcccaacatagccatgacttctggaactgtgcaacccaagcaagatgcctttgcaaatttcgccaattttagcaaataagagattgtaaaagaagcagattgaatgaagaattttt

SEQ ID NO: 195542 - DNA, 120 bp, Artificial Sequence
  ENSG00000113282_17 (sequence is synthesized)
agctgtgcagataggtgatgttgggatggaaaatgctaatcaactaccctttcttttatcaagtaattaaaataaatctacataaagaaccaaaaaggctgttttataaaagtgaaatat

SEQ ID NO: 195543 - DNA, 120 bp, Artificial Sequence
  ENSG00000113282_18 (sequence is synthesized)
ccagtatttcagagggccaggcaagagcacttcagatgaggcagtcaaaatcatttttttccagtgaggatagaccacaagtgggtggtgagaccattgaaagcctttatcaactgaaga

SEQ ID NO: 195544 - DNA, 120 bp, Artificial Sequence
  ENSG00000113282_19 (sequence is synthesized)
gtccatttaacagcataatttgtgggaagactggaatagggctgaataaatgtgtttgaatctctaattttatactttcttttcctgaggaacttgatttttctgtccctggatcgcctt

SEQ ID NO: 195545 - DNA, 120 bp, Artificial Sequence
  ENSG00000113282_20 (sequence is synthesized)
gtcataattgggtctgttccttttactaccactcttgagtccatatatgaaatcattaaagttggatgatcagttttttataaaaatatatatttttgtccaagaaaaaaaaaagcatac

SEQ ID NO: 195546 - DNA, 120 bp, Artificial Sequence
  ENSG00000113282_21 (sequence is synthesized)
atatgtgattatggctaaatcaaaggtaactggaatgtatatacttttgctaatgttccagcaacactgctattatactatccaaatttttattgtaacaaaacctctttaagcaattgg

SEQ ID NO: 195547 - DNA, 120 bp, Artificial Sequence
  ENSG00000113282_22 (sequence is synthesized)
tgattgccatgggacttttcccatgtcttctgctgtaattatcctgtgcagaactaggaagaaatttttttcaggactgctctatggtttcctttaaaagaaaaaaacttctgtttgttt

SEQ ID NO: 195548 - DNA, 120 bp, Artificial Sequence
  ENSG00000113282_23 (sequence is synthesized)
ttagcagtcattatttacaatttgcagtgattaacttggcaaggcttccttccgtgtttatccctgtagccatcatttaagtcaggaacagtcagaaaaatatttattttattttttttt

SEQ ID NO: 195549 - DNA, 120 bp, Artificial Sequence
  ENSG00000113282_24 (sequence is synthesized)
tgggtgtctgcaaaggtaaaaatccattaaaaccttaagttaaatataaatgttacaactcaatgtttgcttttagattttatacagtatttgttttgttttggttttgagtgtatataa

SEQ ID NO: 195550 - DNA, 120 bp, Artificial Sequence
  ENSG00000113282_25 (sequence is synthesized)
tgcagcattagcaatatggttccaatagaggagttaaatatatattgttaaaggagacctgtagcagtcaaagattttattgatttaatgacaaaggaaattaatgaaaatgtttttgtt

SEQ ID NO: 195551 - DNA, 120 bp, Artificial Sequence
  ENSG00000113282_26 (sequence is synthesized)
tttctgctgtaattctgcattaagctcacatgaaaatcatgattctagagtttggaatgcaaaattaattgttttaccctcaagctgggaatatttttcaaaataaatactataatatag

SEQ ID NO: 195552 - DNA, 120 bp, Artificial Sequence
  ENSG00000113282_27 (sequence is synthesized)
ccattatattcataatgttctgttatacataacattaaaatgttcattaaaatcaatgttgaactgctttttctttcgttctgttagacatttgagaccatttggggaaaaaataattat

SEQ ID NO: 195553 - DNA, 120 bp, Artificial Sequence
  ENSG00000113282_28 (sequence is synthesized)
agtttgggcaaagtaatttttataaataatttaaaattatttaatgacttctctattctttcctatcagactctactgttaggaattaaaaatgaagcagcaaagatatcctgacctgct

SEQ ID NO: 195554 - DNA, 120 bp, Artificial Sequence
  ENSG00000113282_29 (sequence is synthesized)
ccattcttgctaatgttccatctacaacatttctaattaggcagaaattcatgtacttcagctaagtggtaatgaaaagtgattcatttgctgaataagagatgagagtgagtgtaatta

SEQ ID NO: 195555 - DNA, 120 bp, Artificial Sequence
  ENSG00000113282_30 (sequence is synthesized)
gctgactgcggtttttaatctttcaacaattcaatgtgtttaacttagtttcaaagaataggagctttcaagtgttgttacttcagagcaatcaagccagcctctggtggccgcatagta

SEQ ID NO: 195556 - DNA, 120 bp, Artificial Sequence
  ENSG00000113282_31 (sequence is synthesized)
gaatatggtccctgatatttaaaaccgatcatcttaagtaaattttttctttaagaagtatatcttcactttctcaaatatgtatggttcttagacgaagtaaatgtttatctgaacctt

SEQ ID NO: 195557 - DNA, 120 bp, Artificial Sequence
  ENSG00000113282_32 (sequence is synthesized)
ctcttttatggagtaaacactacgggggaaaacccgtccaccaaaactattgtattgatatttctccctctctctgcttaaaataattgttttgttttgttttgttgtttgttgcttttt

SEQ ID NO: 195558 - DNA, 81 bp, Artificial Sequence
  ENSG00000113282_33 (sequence is synthesized)
aaataattgttttgttttgttttgttgtttgttgctttttgagacagcgtctcactgtgttgcccaatctggagcgcgagc

SEQ ID NO: 195559 - DNA, 120 bp, Artificial Sequence
  ENSG00000113282_34 (sequence is synthesized)
ctgctcgccaccatgctcagtttaatattttaaggttttgtagagacgaagtctcactatattgcccaggctgatctctcaactcctgggctcaagcgatcctgctacctcatcctccca

SEQ ID NO: 195560 - DNA, 120 bp, Artificial Sequence
  ENSG00000113282_35 (sequence is synthesized)
gctgggatttacaggcatgagccaccacaccagactctaaaatgattttatacaagtggacttcatctcttccctttttatttttaaaaattacaagcatacggaaaatttgccccattt

SEQ ID NO: 195561 - DNA, 120 bp, Artificial Sequence
  ENSG00000113282_36 (sequence is synthesized)
attttctttctctctctctctctcgttcttttttatttgtttgttgtgtactgtttgttcatctgtatcatctgagaggaagttgcaatcatgacattttgcccctaaaatacttcagcc

SEQ ID NO: 195562 - DNA, 120 bp, Artificial Sequence
  ENSG00000113282_37 (sequence is synthesized)
tatatctctttacaaggacattctcctttatgattgtgatacaatcatacttgggatttaacattaaaacagtattaatgttaatatacagaccacattcagatttccccagtgtctcaa

SEQ ID NO: 195563 - DNA, 120 bp, Artificial Sequence
  ENSG00000113282_38 (sequence is synthesized)
ttctgtcatttcaggatagcaattaaaaaaaaaatccggggtccaatcaaggatcctgcattttatttacttgtcttgtgaatatcttattccccagcagcattttactcaggttttaga

SEQ ID NO: 195564 - DNA, 120 bp, Artificial Sequence
  ENSG00000113282_39 (sequence is synthesized)
atccattgaagactccttataaagagcataattggctagataagttgtattatttccacattatgcttgtgaaatattagtgagataattttaacaacagatacagtgtcatttatctta

SEQ ID NO: 195565 - DNA, 120 bp, Artificial Sequence
  ENSG00000113282_40 (sequence is synthesized)
ctagatataggactgaggaagggaaaagagtctatggtagctcatagggaacatagtgacatgaaaatctaggtcaacagactagctttagcttttgtgaggcatctgggcctctaatat

SEQ ID NO: 195566 - DNA, 120 bp, Artificial Sequence
  ENSG00000113282_41 (sequence is synthesized)
gagttaagcataaagtcagtctactttatttgcagtcttaattgtaactgtcataattctttgcattggtacatttttaattattcttcctcttcctgttccttttttctgtccttttca

SEQ ID NO: 195567 - DNA, 120 bp, Artificial Sequence
  ENSG00000113282_42 (sequence is synthesized)
gttatcctcaataaccactaggaacctctgcttctttctcctgaatttcttctttctcctacattgttccatatattaatcagttcagttagtgttgctcactttagatagtaaaagtat

SEQ ID NO: 195568 - DNA, 120 bp, Artificial Sequence
  ENSG00000113282_43 (sequence is synthesized)
acacagaacagcaaaatgtcaggatatgtgaaatataaattgctttttgacagttttgccttatatccttgtataatgtgagacatcatatcctgaattctctgttttgttttgttgttt

SEQ ID NO: 195569 - DNA, 120 bp, Artificial Sequence
  ENSG00000113282_44 (sequence is synthesized)
gctgggattacaggcataagtcactgcgcctggcctctgaattctgttttgaaagaataaatgtccacttgtgtatctccttaaagctgtactaacctaaaatcggtagttcccctgggc

SEQ ID NO: 195570 - DNA, 120 bp, Artificial Sequence
  ENSG00000113282_45 (sequence is synthesized)
ccctgggcatttgccagggatggtggcttctagactttgagtgatgggagaataattgttagtgtaggtaagttgttggttttatccacctcaaacctgattgggacttcagaggaacct

SEQ ID NO: 195571 - DNA, 120 bp, Artificial Sequence
  ENSG00000113282_46 (sequence is synthesized)
ctttgggaagctaatgattcagggtattgaagacattagcatagaacattagtggttctttttgtttcagaagttcattgttgtgattaaattgccatctgataatttttatagaacaga

SEQ ID NO: 195572 - DNA, 80 bp, Artificial Sequence
  ENSG00000113296_0 (sequence is synthesized)
agcagccagctccccagcaccgcacggcggggacgcgagcgcgcccccgacggcagcccggacgccgagcacgggtcacc

SEQ ID NO: 195573 - DNA, 120 bp, Artificial Sequence
  ENSG00000113296_1 (sequence is synthesized)
ccaggcggggccaacgccgccgtcgcccccggcctcgcggggagcaggaagagccaacatgctggccccgcgcggagccgccgtcctcctgctgcacctggtcctgcagcggtggctagc

SEQ ID NO: 195574 - DNA, 120 bp, Artificial Sequence
  ENSG00000113296_2 (sequence is synthesized)
gcggtggctagcggcaggcgcccaggccaccccccaggtctttgaccttctcccatcttccagtcagaggctaaacccaggcgctctgctgccagtcctgacagaccccgccctgaatga

SEQ ID NO: 195575 - DNA, 120 bp, Artificial Sequence
  ENSG00000113296_3 (sequence is synthesized)
tctctatgtgatttccaccttcaagctgcagactaaaagttcagccaccatcttcggtctttactcttcaactgacaacagtaaatattttgaatttactgtgatgggacgcttaaacaa

SEQ ID NO: 195576 - DNA, 120 bp, Artificial Sequence
  ENSG00000113296_4 (sequence is synthesized)
agccatcctccgttacctgaagaacgatgggaaggtgcatttggtggttttcaacaacctgcagctggcagacggaaggcggcacaggatcctcctgaggctgagcaatttgcagcgagg

SEQ ID NO: 195577 - DNA, 120 bp, Artificial Sequence
  ENSG00000113296_5 (sequence is synthesized)
ggccggctccctagagctctacctggactgcatccaggtggattccgttcacaatctccccagggcctttgctggcccctcccagaaacctgagaccattgaattgaggactttccagag

SEQ ID NO: 195578 - DNA, 120 bp, Artificial Sequence
  ENSG00000113296_6 (sequence is synthesized)
gaagccacaggacttcttggaagagctgaagctggtggtgagaggctcactgttccaggtggccagcctgcaagactgcttcctgcagcagagtgagccactggctgccacaggcacagg

SEQ ID NO: 195579 - DNA, 120 bp, Artificial Sequence
  ENSG00000113296_7 (sequence is synthesized)
ggactttaaccggcagttcttgggtcaaatgacacaattaaaccaactcctgggagaggtgaaggaccttctgagacagcaggttaaggaaacatcatttttgcgaaacaccatagctga

SEQ ID NO: 195580 - DNA, 120 bp, Artificial Sequence
  ENSG00000113296_8 (sequence is synthesized)
atgccaggcttgcggtcctctcaagtttcagtctccgaccccaagcacggtggtgcccccggctccccctgcaccgccaacacgcccacctcgtcggtgtgactccaacccatgtttccg

SEQ ID NO: 195581 - DNA, 120 bp, Artificial Sequence
  ENSG00000113296_9 (sequence is synthesized)
aggtgtccaatgtaccgacagtagagatggcttccagtgtgggccctgccccgagggctacacaggaaacgggatcacctgtattgatgttgatgagtgcaaataccatccctgctaccc

SEQ ID NO: 195582 - DNA, 120 bp, Artificial Sequence
  ENSG00000113296_10 (sequence is synthesized)
gggcgtgcactgcataaatttgtctcctggcttcagatgtgacgcctgcccagtgggcttcacagggcccatggtgcagggtgttgggatcagttttgccaagtcaaacaagcaggtctg

SEQ ID NO: 195583 - DNA, 120 bp, Artificial Sequence
  ENSG00000113296_11 (sequence is synthesized)
cactgacattgatgagtgtcgaaatggagcgtgcgttcccaactcgatctgcgttaatactttgggatcttaccgctgtgggccttgtaagccggggtatactggtgatcagataagggg

SEQ ID NO: 195584 - DNA, 120 bp, Artificial Sequence
  ENSG00000113296_12 (sequence is synthesized)
atgcaaagcggaaagaaactgcagaaacccagagctgaacccttgcagtgtgaatgcccagtgcattgaagagaggcagggggatgtgacatgtgtgtgtggagtcggttgggctggaga

SEQ ID NO: 195585 - DNA, 120 bp, Artificial Sequence
  ENSG00000113296_13 (sequence is synthesized)
aaattctggccaagaagatgcagacagagatggcattggcgacgcttgtgacgaggatgctgacggagatgggatcctgaatgagcaggataactgtgtcctgattcataatgtggacca

SEQ ID NO: 195586 - DNA, 120 bp, Artificial Sequence
  ENSG00000113296_14 (sequence is synthesized)
aaggaacagcgataaagatatctttggggatgcctgtgataactgcctgagtgtcttaaataacgaccagaaagacaccgatggggatggaagaggagatgcctgtgatgatgacatgga

SEQ ID NO: 195587 - DNA, 120 bp, Artificial Sequence
  ENSG00000113296_15 (sequence is synthesized)
tggagatggaataaaaaacattctggacaactgcccaaaatttcccaatcgtgaccaacgggacaaggatggtgatggtgtgggggatgcctgtgacagttgtcctgatgtcagcaaccc

SEQ ID NO: 195588 - DNA, 120 bp, Artificial Sequence
  ENSG00000113296_16 (sequence is synthesized)
taaccagtctgatgtggataatgatctggttggggactcctgtgacaccaatcaggacagtgatggagatgggcaccaggacagcacagacaactgccccaccgtcattaacagtgccca

SEQ ID NO: 195589 - DNA, 120 bp, Artificial Sequence
  ENSG00000113296_17 (sequence is synthesized)
gctggacaccgataaggatggaattggtgacgagtgtgatgatgatgatgacaatgatggtatcccagacctggtgccccctggaccagacaactgccggctggtccccaacccagccca

SEQ ID NO: 195590 - DNA, 120 bp, Artificial Sequence
  ENSG00000113296_18 (sequence is synthesized)
ggaggatagcaacagcgacggagtgggagacatctgtgagtctgactttgaccaggaccaggtcatcgatcggatcgacgtctgcccagagaacgcagaggtcaccctgaccgacttcag

SEQ ID NO: 195591 - DNA, 120 bp, Artificial Sequence
  ENSG00000113296_19 (sequence is synthesized)
ggcttaccagaccgtggtcctggatcctgaaggggatgcccagatcgatcccaactgggtggtcctgaaccagggcatggagattgtacagaccatgaacagtgatcctggcctggcagt

SEQ ID NO: 195592 - DNA, 120 bp, Artificial Sequence
  ENSG00000113296_20 (sequence is synthesized)
ggggtacacagcttttaatggagttgacttcgaagggaccttccatgtgaatacccagacagatgatgactatgcaggctttatctttggctaccaagatagctccagcttctacgtggt

SEQ ID NO: 195593 - DNA, 120 bp, Artificial Sequence
  ENSG00000113296_21 (sequence is synthesized)
catgtggaagcagacggagcagacatattggcaagccaccccattccgagcagttgcagaacctggcattcagctcaaggctgtgaagtctaagacaggtccaggggagcatctccggaa

SEQ ID NO: 195594 - DNA, 120 bp, Artificial Sequence
  ENSG00000113296_22 (sequence is synthesized)
ctccctgtggcacacgggggacaccagtgaccaggtcaggctgctgtggaaggactccaggaatgtgggctggaaggacaaggtgtcctaccgctggttcctacagcacaggccccaggt

SEQ ID NO: 195595 - DNA, 120 bp, Artificial Sequence
  ENSG00000113296_23 (sequence is synthesized)
gggctacatcagggtacgattttatgaaggctctgagttggtggctgactctggcgtcaccatagacaccacaatgcgtggaggccgacttggcgttttctgcttctctcaagaaaacat

SEQ ID NO: 195596 - DNA, 120 bp, Artificial Sequence
  ENSG00000113296_24 (sequence is synthesized)
catctggtccaacctcaagtatcgctgcaatgacaccatccctgaggacttccaagagtttcaaacccagaatttcgaccgcttcgataattaaaccaaggaagcaatctgtaactgctt

SEQ ID NO: 195597 - DNA, 120 bp, Artificial Sequence
  ENSG00000113296_25 (sequence is synthesized)
ttcggaacactaaaaccatatatattttaacttcaattttctttagcttttaccaacccaaatatatcaaaacgttttatgtgaatgtggcaataaaggagaagagatcatttttaaaaa

SEQ ID NO: 195598 - DNA, 120 bp, Artificial Sequence
  ENSG00000113296_26 (sequence is synthesized)
cagtctgatgtggataatgatctggttggggactcctgtgacaccaatcaggacagtggaattgttctgtggaagtgagttttgtgaaccctcctagctcaacacgatggagtcccacat

SEQ ID NO: 195599 - DNA, 120 bp, Artificial Sequence
  ENSG00000113296_27 (sequence is synthesized)
taagactcaaggctggatcaactgatcagattctggaagaacatcaccaaaaacagacgtgtgtcactcagccctagcggcacctgcaacccaagttggttgaatctgcggatacggaac

SEQ ID NO: 195600 - DNA, 120 bp, Artificial Sequence
  ENSG00000113296_28 (sequence is synthesized)
ggcctgactgtactagctaagtgaacttaaacatatttcccagtctcttcacatctcaacttcttcatctgcaaagaggagataaataaatgcatcgcacaggttatggtgaaaaatcaa

SEQ ID NO: 195601 - DNA, 120 bp, Artificial Sequence
  ENSG00000113296_29 (sequence is synthesized)
gataatgtagagtaaccatgagaggtctcagactccaggacacctcttggaggcagggcagactcatcttcaggtggcccctcagcccagaaagtcaggtggacagagaaggagagttct

SEQ ID NO: 195602 - DNA, 120 bp, Artificial Sequence
  ENSG00000113296_30 (sequence is synthesized)
gagaagtcctttagaccagcactgagcccggcctacacactctcctcgagaaggcgtggccctgttcactttgcccttctccccatggcgttcagtgatggagatgggcaccaggacagc

SEQ ID NO: 195603 - DNA, 120 bp, Artificial Sequence
  ENSG00000113296_31 (sequence is synthesized)
ggagcgatgtatgcccagagtctgctcttgacatccctgagaaagacgcagaattactctacttgccctgccacctgcattttctgctctgactttgcttgaacgacaaaaagaaagttt

SEQ ID NO: 195604 - DNA, 120 bp, Artificial Sequence
  ENSG00000113296_32 (sequence is synthesized)
aatttgggggctcttgagagatgagagaaacaacgactggagggattaagaagaactcttaggagcagcttggcctaaaggctgtgtgggacgtgcctgctttgccttcgccttccacca

SEQ ID NO: 195605 - DNA, 120 bp, Artificial Sequence
  ENSG00000113296_33 (sequence is synthesized)
aagtttttaagcatggtatctagacaaggcaactcacatgacaataagacacaaaactttctcactcaagatagcaggtttggtttggtttgatttttaactcaagtttgatagtgtgac

SEQ ID NO: 195606 - DNA, 120 bp, Artificial Sequence
  ENSG00000113296_34 (sequence is synthesized)
caacatcatgttaggccttgtgagagacagaagttgggaagaaacaccccccacccccctccacacacacacggacacacacggtccctgccctcaaggacttccagtctagtaagtaag

SEQ ID NO: 195607 - DNA, 120 bp, Artificial Sequence
  ENSG00000113296_35 (sequence is synthesized)
ctcatatggtgcctgaggttttgagcttccttaaggttacttggccccttcaagactgttctgaactccctcaactctctctgcagggcatggagattgtacagaccatgaacagtgatc

SEQ ID NO: 195608 - DNA, 120 bp, Artificial Sequence
  ENSG00000113300_0 (sequence is synthesized)
gagggacggcggccgccgccatgatgcttgtttgctttcaatgaaaacgaggggggcgcggaggaggaggcggcggcgtcggtggcggcggcgacggcggcgcggaggcgaaggcagcgg

SEQ ID NO: 195609 - DNA, 120 bp, Artificial Sequence
  ENSG00000113300_1 (sequence is synthesized)
cgggcgcagcgaggagggcgaggccgggggccgagagggcgggagggcgtagtggcggcccgtcggggcggctgaggcgggcagccgaagcagtggctctcggagggggaacaaagagca

SEQ ID NO: 195610 - DNA, 120 bp, Artificial Sequence
  ENSG00000113300_2 (sequence is synthesized)
gcgactaaggcggcagaggagcggcggcggtggcggcgctgcagcagcgggcgggactggtatggtggttccacagggcagaccccgctgcactcacagggaggaggaggcggcagcggc

SEQ ID NO: 195611 - DNA, 120 bp, Artificial Sequence
  ENSG00000113300_3 (sequence is synthesized)
ggaggaaggcggcgcaccccgagaggcatgcccaaagaaaaatacgagccccctgaccctcggaggatgtatacaattatgtcttctgaggaagcagcaaatggaaagaaatcccactgg

SEQ ID NO: 195612 - DNA, 120 bp, Artificial Sequence
  ENSG00000113300_4 (sequence is synthesized)
gcagagcttgaaataagtggaaaagtaagaagcttaagcgcatctttgtggtcactaactcacctgacagctttgcatttgagtgacaattccctgtcccgaattccttcagacattgcc

SEQ ID NO: 195613 - DNA, 120 bp, Artificial Sequence
  ENSG00000113300_5 (sequence is synthesized)
aagcttcacaatctggtgtatttggacctgtcatctaataaaattcgtagcttacccgcagaactcggaaacatggtatcactcagggagctccatttaaataacaacctgttacgagtt

SEQ ID NO: 195614 - DNA, 120 bp, Artificial Sequence
  ENSG00000113300_6 (sequence is synthesized)
ctaccttttgagctgggaaaactgtttcagttgcagactttaggcctgaaaggaaatccccttacccaggatatattgaacctttatcaggaaccagatggaacaagacggctgctgaac

SEQ ID NO: 195615 - DNA, 120 bp, Artificial Sequence
  ENSG00000113300_7 (sequence is synthesized)
tatttgcttgataatttgtcaggtactgcaaaaagaattacaacagaacaaccacctccaaggtcttggattatgttacaagaaccagataggacaaggccaactgccttgttttctgtc

SEQ ID NO: 195616 - DNA, 120 bp, Artificial Sequence
  ENSG00000113300_8 (sequence is synthesized)
atgtgctataatgttctttgtgataaatatgcgacccggcagttatacggctactgtccatcatgggcgctaaactgggactacaggaaaaaggccattattcaagaaatcttgagctgc

SEQ ID NO: 195617 - DNA, 120 bp, Artificial Sequence
  ENSG00000113300_9 (sequence is synthesized)
aatgctgatatcgtaagtcttcaggaggttgaaacggaacagtattacagtttttttctggtagagctgaaagaacgtggctataatggattcttcagtcctaagtctagagctaggaca

SEQ ID NO: 195618 - DNA, 120 bp, Artificial Sequence
  ENSG00000113300_10 (sequence is synthesized)
atgtcagaacaagaaaggaaacatgttgatggctgtgcaatattcttcaagacagaaaaatttactttggttcagaaacacactgttgaatttaatcagctagccatggcaaattctgag

SEQ ID NO: 195619 - DNA, 120 bp, Artificial Sequence
  ENSG00000113300_11 (sequence is synthesized)
gggtctgaagctatgctgaacagagtcatgacaaaagataacattggggttgcagtactgctagaacttcggaaggaatcgattgaaatgccgtccggaaagccacatcttggaacagaa

SEQ ID NO: 195620 - DNA, 120 bp, Artificial Sequence
  ENSG00000113300_12 (sequence is synthesized)
aaacaacttattcttgtggctaacgcccacatgcattgggaccctgaatactctgatgtgaagttggtacaaactatgatgttcctctcagaagtgaagaacattattgataaagcctct

SEQ ID NO: 195621 - DNA, 120 bp, Artificial Sequence
  ENSG00000113300_13 (sequence is synthesized)
cgcaacctcaaatccagtgttttgggagaatttggaactattccacttgtgttatgtgcagatcttaattctttgccagactctggtgttgtagaatatttgagcacaggtggagtagaa

SEQ ID NO: 195622 - DNA, 120 bp, Artificial Sequence
  ENSG00000113300_14 (sequence is synthesized)
acaaatcacaaagactttaaggagttgaggtataatgaaagtctcacaaacttcagctgtcatgggaagaatggaaccaccaatggaaggatcactcatggtttcaagttacagagtgcc

SEQ ID NO: 195623 - DNA, 120 bp, Artificial Sequence
  ENSG00000113300_15 (sequence is synthesized)
tatgagagtggcctgatgccttacacgaattacacatttgatttcaagggtataatagactacattttctattctaaacctcagctgaacaccttaggcatcctgggccctctggaccac

SEQ ID NO: 195624 - DNA, 120 bp, Artificial Sequence
  ENSG00000113300_16 (sequence is synthesized)
cactggctggttgagaataacatcagtggctgcccgcaccccctcatcccctctgaccacttctcactttttgcacaactggagctcttactgcctttcctgccccaagtcaacggcatc

SEQ ID NO: 195625 - DNA, 120 bp, Artificial Sequence
  ENSG00000113300_17 (sequence is synthesized)
caccttcctggcaggaggtagtcaagcaccttcagaggacagccttgattcacttgtaaacttgtgaaaatctgaacataggggagtgaggtatggccactgaggatttttgcttgctta

SEQ ID NO: 195626 - DNA, 120 bp, Artificial Sequence
  ENSG00000113300_18 (sequence is synthesized)
agaatgatttggactttcaatctgattatttgataaggatatagtatgaaagccaggtgctagcaacagacaaattctgagcccaatatgctttatactgctagacagggattggtgtgt

SEQ ID NO: 195627 - DNA, 120 bp, Artificial Sequence
  ENSG00000113300_19 (sequence is synthesized)
ttgcacctgtctttcatttgtcataagagattttcctatttcttctacccaatagaatattttcatgcctggaaataggaaaatgtgtgaacagcgtattctcttcacacagaaatctgt

SEQ ID NO: 195628 - DNA, 120 bp, Artificial Sequence
  ENSG00000113300_20 (sequence is synthesized)
agcactgcttttttgaggccagtagcaacatccagagatcattcttccatactttactccctcctttttcagacttgtttgtaaagtacagaatctgaatttagcctttatgattgtata

SEQ ID NO: 195629 - DNA, 120 bp, Artificial Sequence
  ENSG00000113300_21 (sequence is synthesized)
tgatccacagaagacctgatttatgaaattttgtactaaaatcatttggaaatgattgtattgtaaactgaggctaaatttttttttaaacctgtttcatgtgttataaaggccagcttg

SEQ ID NO: 195630 - DNA, 120 bp, Artificial Sequence
  ENSG00000113300_22 (sequence is synthesized)
taaaagaagctgcaacagactttctctgctcatgatttgcactcttagggttttgttagcccttttgtactactttctttttaaattgagaacatggttctttacatataaatctgcttc

SEQ ID NO: 195631 - DNA, 120 bp, Artificial Sequence
  ENSG00000113300_23 (sequence is synthesized)
aaccttaggatgttttcagaccagaggcaacttattcatgaatttttatgaaaactatctactaggacagataagctgaacagtgatgatctgtagacatttatggactgaatgtaatgg

SEQ ID NO: 195632 - DNA, 120 bp, Artificial Sequence
  ENSG00000113300_24 (sequence is synthesized)
ttgatatatgtacattctgatatttttaaatctttaactttttaaagttaaaaacctacagctgcttaggtccagcttcttaactctttttgagacacttcctgtcctatctccactgtg

SEQ ID NO: 195633 - DNA, 120 bp, Artificial Sequence
  ENSG00000113300_25 (sequence is synthesized)
attttatgaaaatgcttttgtatgagctgtggctttttcccattgtgaagcattgaatatcacattttggaacatgttatagggtgagtccctggatctttgctcaccagatccaagcac

SEQ ID NO: 195634 - DNA, 120 bp, Artificial Sequence
  ENSG00000113300_26 (sequence is synthesized)
tgcttctcggtgtcattgcagtgtgctgcttgtcacccagaatactactatcatgtgaattctttttgtcgtcagtgtcttttccttagtctttttgttgttgttgttgttgttgtttta

SEQ ID NO: 195635 - DNA, 120 bp, Artificial Sequence
  ENSG00000113300_27 (sequence is synthesized)
atcattccttttttaagaagaagtaattttccatttatgaagcagtatgaattagatgtattttcaaaacaggtccctaagacaattcttcagatcatttttaaaatgactaagtcattt

SEQ ID NO: 195636 - DNA, 120 bp, Artificial Sequence
  ENSG00000113300_28 (sequence is synthesized)
tagtatgtcaagcaagataaaaattacatcataccgtctattttgcccatagtgccatttagagatgaaaaccagctttaactttgcaaagtgaacatgtacatggtctgctctcattta

SEQ ID NO: 195637 - DNA, 120 bp, Artificial Sequence
  ENSG00000113300_29 (sequence is synthesized)
ttcattcttctctcaaaagtcaaatgaatgcagagggagcttggtcaaactgcttttgtttcaactgcaggcaggggagcaaaaggacgccatgtgagcattaggaaaaaaaatactcac

SEQ ID NO: 195638 - DNA, 120 bp, Artificial Sequence
  ENSG00000113300_30 (sequence is synthesized)
tcttactaacaatttttatacagaaaatgagtcattttggaaatgattcttatgttttttttttttctccttttagaaaattctccaaaaggttttgatgttgaatcttggtcttggacc

SEQ ID NO: 195639 - DNA, 120 bp, Artificial Sequence
  ENSG00000113300_31 (sequence is synthesized)
tgttttttcctttgagggttttttgttttttgttttttctaggatttcattgtgatgttttggttttgttttttgctttttgtttaagttgtgctgacaccaaacacatccagtttataa

SEQ ID NO: 195640 - DNA, 120 bp, Artificial Sequence
  ENSG00000113300_32 (sequence is synthesized)
tcagtacattggaaagctggtattgatgtagaaccagtgcataactttttatggggttttgttattggtttttttttgtaaagtgtgaataaaaggtatgtttactcatttttcctgaac

SEQ ID NO: 195641 - DNA, 120 bp, Artificial Sequence
  ENSG00000113300_33 (sequence is synthesized)
actgtgttggtaatgtgcatcatgacaatttccagtgaaggtgagctggagctggttggactaatgagactgaggaagcagcttttcctacgatctgcattatgtaatcacaggtccaga

SEQ ID NO: 195642 - DNA, 120 bp, Artificial Sequence
  ENSG00000113300_34 (sequence is synthesized)
gagctttatggaagcgggagaggaggagcacttactcatgttgtatttgttaatggaggatgtcatcttttcatagatgctggaactagagtgcacttgttagatgctaaaggtttgagc

SEQ ID NO: 195643 - DNA, 120 bp, Artificial Sequence
  ENSG00000113300_35 (sequence is synthesized)
tttacacaaaatgtcttcatctgtatttgttattgtctacaatatatttgaatttggggcagcatattaagatgtaatggcctgttatgtcttgaaaatacttgttttgcctcttccagg

SEQ ID NO: 195644 - DNA, 120 bp, Artificial Sequence
  ENSG00000113300_36 (sequence is synthesized)
catactgcattctgtggatcagtttgaacagcttctccaccttatttggacagtgataaattgaaccaagagtgtagatttacaagtgtaaccttcaaaagaggaagaactatttggggt

SEQ ID NO: 195645 - DNA, 120 bp, Artificial Sequence
  ENSG00000113300_37 (sequence is synthesized)
ctgtaggtaatgaacagtcacaccaaaatagactatgatgcttttgttaagaaaggtttcatgttttagatattttccgtgtcctaaataattttcaataatctataatccctaaaatgc

SEQ ID NO: 195646 - DNA, 120 bp, Artificial Sequence
  ENSG00000113300_38 (sequence is synthesized)
aataaaaactagtatgttttcacggtgtatattttttttcaaaaattctgtaacaaatatatttaatgtgttgccataatgtcatttcagtatttttgctggataaatccattttagaaa

SEQ ID NO: 195647 - DNA, 120 bp, Artificial Sequence
  ENSG00000113300_39 (sequence is synthesized)
tgtcttacaaaaagtttagggcatgttttctgttttaaagaccagaagtttgaaggcacccaaatccttgtcgccaatctcctgaagtacagctttaccatattagtggtcattatttat

SEQ ID NO: 195648 - DNA, 120 bp, Artificial Sequence
  ENSG00000113300_40 (sequence is synthesized)
gctttgagagtttcaatattgttcgtcaagttaacttatggcataatttaagctaaagttgtagaaatgaattgttgagtgcaactttcatagtcccaaagataggcagagaacatctcc

SEQ ID NO: 195649 - DNA, 120 bp, Artificial Sequence
  ENSG00000113300_41 (sequence is synthesized)
gtgtgtgtgtgtgtgtgtgtgtttaatatgatttagtgacaaccaggaaaacttacttgggattattagcactttcaaacttagggacattattaaattggatggaatgcacttctaaat

SEQ ID NO: 195650 - DNA, 120 bp, Artificial Sequence
  ENSG00000113300_42 (sequence is synthesized)
gaatgcacttctaaatgtttaaattaaaatttcaaagctctttcgagattcaggttctcaataataatattcaagttttagagtttcactttgtactatttaaatttatggaactagttt

SEQ ID NO: 195651 - DNA, 120 bp, Artificial Sequence
  ENSG00000113300_43 (sequence is synthesized)
ccatactgacttgtaaggttttggggtcatatataaggactaaagccaagctaggcaaaacaatgacagcaccgttttttcagtgaagctctcagaatgtccagtacagatgttgcagat

SEQ ID NO: 195652 - DNA, 120 bp, Artificial Sequence
  ENSG00000113300_44 (sequence is synthesized)
aattccaagaactccttcagcaggtgttcttcaccattcgtaaacagtattttaagatgttcactttgctcttctttttggttacatacattttaataactggtatgttgaagtagtgtc

SEQ ID NO: 195653 - DNA, 120 bp, Artificial Sequence
  ENSG00000113300_45 (sequence is synthesized)
taaaagtatctagtctttattcacagtacattatattgtgtgatgcactggactaactcttgtttaccattcatgtaacaaaacccagcacattatctgcactataagctcaaagaatgt

SEQ ID NO: 195654 - DNA, 120 bp, Artificial Sequence
  ENSG00000113300_46 (sequence is synthesized)
cacatccgcccagacagctctttgatgagggtgatgggaactgaataaaccatacggactggcagtaacaagggcttttactgttctgttcagtggaaccttcttggtcaaattgtaatt

SEQ ID NO: 195655 - DNA, 120 bp, Artificial Sequence
  ENSG00000113300_47 (sequence is synthesized)
agctagcattatatttatatacagggtcttttttctttaccgatgtattttcctactcatagccaaccaataaattcagtatctgtttcaaatattttagaagtgtagtttgtatagctg

SEQ ID NO: 195656 - DNA, 120 bp, Artificial Sequence
  ENSG00000113300_48 (sequence is synthesized)
tagtactgaggtttgaggaaaaataaatgttgatcagcagaccacgtatttaaaattctgaatcttctgggacagggttgtaactcagccttccaaagggaagagtgcagggggacgggg

SEQ ID NO: 195657 - DNA, 120 bp, Artificial Sequence
  ENSG00000113300_49 (sequence is synthesized)
ccatgatatggggaaatggtgtaaactaatgtatttctttattggctgttattctgtataacactcatatctttgccaaagttcaattttatatttaggcaactgatggtccttttgcat

SEQ ID NO: 195658 - DNA, 120 bp, Artificial Sequence
  ENSG00000113300_50 (sequence is synthesized)
ttaggattttcgttgttgttaccttatacctcatgatataaggaatgggctcatgtgtcttccgtcttttggaaggaggttgacatattttaaataaatgcttttaaatacagtagcaaa

SEQ ID NO: 195659 - DNA, 120 bp, Artificial Sequence
  ENSG00000113300_51 (sequence is synthesized)
gcgcaccccgagagcactaatcgctattttctttggaaacttcctttgattctttacctccttcaccttccccgaagagcctgctaaccaacacctgtggccttctgtttttaactgttg

SEQ ID NO: 195660 - DNA, 120 bp, Artificial Sequence
  ENSG00000113300_52 (sequence is synthesized)
cggcgcaccccgagaggtggattgtctcattgttagtgctgaatcttcttgcctacttgtatctgggaatttaactttgaagaggaagagagtgaatatgaataactgaaaaataaaatg

SEQ ID NO: 195661 - DNA, 120 bp, Artificial Sequence
  ENSG00000113300_53 (sequence is synthesized)
gcatgcccaaagaaaaatacgagccccctgaccctcggaggatgtatacaattatgtcttctgaggaagcagcaaatggaaagaaatcccactgggcagagcttgaaataagtggaaatc

SEQ ID NO: 195662 - DNA, 120 bp, Artificial Sequence
  ENSG00000113300_54 (sequence is synthesized)
cccttacccaggatatattgaacctttatcaggaaccagatggaacaagacggctgctgaactatttgcttgataatttgtcagttacaacagaacaaccacctccaaggtcttggatta

SEQ ID NO: 195663 - DNA, 120 bp, Artificial Sequence
  ENSG00000113300_55 (sequence is synthesized)
cttgataatttgtcaggtactgcaaaaagaagtaagtggttatttgtttaaacctttttattaggaagacgtgtaagaatattgcttaattctgtattttctattcaactagttacaaca

SEQ ID NO: 195664 - DNA, 120 bp, Artificial Sequence
  ENSG00000113302_0 (sequence is synthesized)
gggcatacagttgttccatcccgacatgaactcagcctcccgtctgaccgccccttggccttccttcttcctcgatctgtggaacccagggaatctgcctagtgctgtctccaagcacct

SEQ ID NO: 195665 - DNA, 120 bp, Artificial Sequence
  ENSG00000113302_1 (sequence is synthesized)
tggccatgatgtaaacccagagaaattagcatctccatctccttccttattccccacccaaaagtcatttcctcttagttcattacctgggattttgatgtctatgttccctcctcgtta

SEQ ID NO: 195666 - DNA, 120 bp, Artificial Sequence
  ENSG00000113302_2 (sequence is synthesized)
ttgatacacacacagagagagacaaacaaaaaaggaacttcttgaaattcccccagaaggttttgagagttgttttcaatgttgcaacaagtcagtttctagtttaagtttccatcagaa

SEQ ID NO: 195667 - DNA, 120 bp, Artificial Sequence
  ENSG00000113302_3 (sequence is synthesized)
aggagtagagtatataagttccagtaccagcaacagcagcagaagaaacaacatctgtttcagggccattggactctccgtcctgcccagagcaagatgtgtcaccagcagttggtcatc

SEQ ID NO: 195668 - DNA, 120 bp, Artificial Sequence
  ENSG00000113302_4 (sequence is synthesized)
tcttggttttccctggtttttctggcatctcccctcgtggccatatgggaactgaagaaagatgtttatgtcgtagaattggattggtatccggatgcccctggagaaatggtggtcctc

SEQ ID NO: 195669 - DNA, 120 bp, Artificial Sequence
  ENSG00000113302_5 (sequence is synthesized)
acctgtgacacccctgaagaagatggtatcacctggaccttggaccagagcagtgaggtcttaggctctggcaaaaccctgaccatccaagtcaaagagtttggagatgctggccagtac

SEQ ID NO: 195670 - DNA, 120 bp, Artificial Sequence
  ENSG00000113302_6 (sequence is synthesized)
acctgtcacaaaggaggcgaggttctaagccattcgctcctgctgcttcacaaaaaggaagatggaatttggtccactgatattttaaaggaccagaaagaacccaaaaataagaccttt

SEQ ID NO: 195671 - DNA, 120 bp, Artificial Sequence
  ENSG00000113302_7 (sequence is synthesized)
ctaagatgcgaggccaagaattattctggacgtttcacctgctggtggctgacgacaatcagtactgatttgacattcagtgtcaaaagcagcagaggctcttctgacccccaaggggtg

SEQ ID NO: 195672 - DNA, 120 bp, Artificial Sequence
  ENSG00000113302_8 (sequence is synthesized)
acgtgcggagctgctacactctctgcagagagagtcagaggggacaacaaggagtatgagtactcagtggagtgccaggaggacagtgcctgcccagctgctgaggagagtctgcccatt

SEQ ID NO: 195673 - DNA, 120 bp, Artificial Sequence
  ENSG00000113302_9 (sequence is synthesized)
gaggtcatggtggatgccgttcacaagctcaagtatgaaaactacaccagcagcttcttcatcagggacatcatcaaacctgacccacccaagaacttgcagctgaagccattaaagaat

SEQ ID NO: 195674 - DNA, 120 bp, Artificial Sequence
  ENSG00000113302_10 (sequence is synthesized)
tctcggcaggtggaggtcagctgggagtaccctgacacctggagtactccacattcctacttctccctgacattctgcgttcaggtccagggcaagagcaagagagaaaagaaagataga

SEQ ID NO: 195675 - DNA, 120 bp, Artificial Sequence
  ENSG00000113302_11 (sequence is synthesized)
tcttcacggacaagacctcagccacggtcatctgccgcaaaaatgccagcattagcgtgcgggcccaggaccgctactatagctcatcttggagcgaatgggcatctgtgccctgcagtt

SEQ ID NO: 195676 - DNA, 120 bp, Artificial Sequence
  ENSG00000113302_12 (sequence is synthesized)
aggttctgatccaggatgaaaatttggaggaaaagtggaagatattaagcaaaatgtttaaagacacaacggaatagacccaaaaagataatttctatctgatttgctttaaaacgtttt

SEQ ID NO: 195677 - DNA, 120 bp, Artificial Sequence
  ENSG00000113302_13 (sequence is synthesized)
tttaggatcacaatgatatctttgctgtatttgtatagttagatgctaaatgctcattgaaacaatcagctaatttatgtatagattttccagctctcaagttgccatgggccttcatgc

SEQ ID NO: 195678 - DNA, 120 bp, Artificial Sequence
  ENSG00000113302_14 (sequence is synthesized)
tatttaaatatttaagtaatttatgtatttattagtatattactgttatttaacgtttgtctgccaggatgtatggaatgtttcatactcttatgacctgatccatcaggatcagtccct

SEQ ID NO: 195679 - DNA, 120 bp, Artificial Sequence
  ENSG00000113302_15 (sequence is synthesized)
attatgcaaaatgtgaatttaattttatttgtactgacaacttttcaagcaaggctgcaagtacatcagttttatgacaatcaggaagaatgcagtgttctgataccagtgccatcatac

SEQ ID NO: 195680 - DNA, 120 bp, Artificial Sequence
  ENSG00000113302_16 (sequence is synthesized)
acttgtgatggatgggaacgcaagagatacttacatggaaacctgacaatgcaaacctgttgagaagatccaggagaacaagatgctagttcccatgtctgtgaagacttcctggagatg

SEQ ID NO: 195681 - DNA, 120 bp, Artificial Sequence
  ENSG00000113302_17 (sequence is synthesized)
gtgttgataaagcaatttagggccacttacacttctaagcaagtttaatctttggatgcctgaattttaaaagggctagaaaaaaatgattgaccagcctgggaaacataacaagacccc

SEQ ID NO: 195682 - DNA, 120 bp, Artificial Sequence
  ENSG00000113302_18 (sequence is synthesized)
gggaaacataacaagaccccgtctctacaaaaaaaatttaaaattagccaggcgtggtggctcatgcttgtggtcccagctgttcaggaggatgaggcaggaggatctcttgagcccagg

SEQ ID NO: 195683 - DNA, 120 bp, Artificial Sequence
  ENSG00000113302_19 (sequence is synthesized)
aatgagaccctgtctcaaaaaaaaaaatgattgaaattaaaattcagctttagcttccatggcagtcctcacccccacctctctaaaagacacaggaggatgacacagaaacaccgtaag

SEQ ID NO: 195684 - DNA, 120 bp, Artificial Sequence
  ENSG00000113302_20 (sequence is synthesized)
aaaagacacaggaggatgacacagaaacaccgtaagtgtctggaaggcaaaaagatcttaagattcaagagagaggacaagtagttatggctaaggacatgaaattgtcagaatggcagg

SEQ ID NO: 195685 - DNA, 120 bp, Artificial Sequence
  ENSG00000113302_21 (sequence is synthesized)
tggcttcttaacagccctgtgagaagcagacagatgcaaagaaaatctggaatccctttctcattagcatgaatgaacctgatacacaattatgaccagaaaatatggctccatgaaggt

SEQ ID NO: 195686 - DNA, 120 bp, Artificial Sequence
  ENSG00000113302_22 (sequence is synthesized)
gctacttttaagtaatgtatgtgcgctctgtaaagtgattacatttgtttcctgtttgtttatttatttatttatttttgcattctgaggctgaactaataaaaactcttctttgtaatc

SEQ ID NO: 195687 - DNA, 120 bp, Artificial Sequence
  ENSG00000113303_0 (sequence is synthesized)
agaacagcgcagtttgccctccgctcacgcagagcctctccgtggcttccgcaccttgagcattaggccagttctcctcttctctctaatccatccgtcacctctcctgtcatccgtttc

SEQ ID NO: 195688 - DNA, 120 bp, Artificial Sequence
  ENSG00000113303_1 (sequence is synthesized)
catgccgtgaggtccattcacagaacacatccatggctctcatgctcagtttggttctgagtctcctcaagctgggatcagggcagtggcaggtgtttgggccagacaagcctgtccagg

SEQ ID NO: 195689 - DNA, 120 bp, Artificial Sequence
  ENSG00000113303_2 (sequence is synthesized)
ccttggtgggggaggacgcagcattctcctgtttcctgtctcctaagaccaatgcagaggccatggaagtgcggttcttcaggggccagttctctagcgtggtccacctctacagggacg

SEQ ID NO: 195690 - DNA, 120 bp, Artificial Sequence
  ENSG00000113303_3 (sequence is synthesized)
ggaaggaccagccatttatgcagatgccacagtatcaaggcaggacaaaactggtgaaggattctattgcggaggggcgcatctctctgaggctggaaaacattactgtgttggatgctg

SEQ ID NO: 195691 - DNA, 120 bp, Artificial Sequence
  ENSG00000113303_4 (sequence is synthesized)
gcctctatgggtgcaggattagttcccagtcttactaccagaaggccatctgggagctacaggtgtcagcactgggctcagttcctctcatttccatcacgggatatgttgatagagaca

SEQ ID NO: 195692 - DNA, 120 bp, Artificial Sequence
  ENSG00000113303_5 (sequence is synthesized)
tccagctactctgtcagtcctcgggctggttcccccggcccacagcgaagtggaaaggtccacaaggacaggatttgtccacagactccaggacaaacagagacatgcatggcctgtttg

SEQ ID NO: 195693 - DNA, 120 bp, Artificial Sequence
  ENSG00000113303_6 (sequence is synthesized)
atgtggagatctctctgaccgtccaagagaacgccgggagcatatcctgttccatgcggcatgctcatctgagccgagaggtggaatccagggtacagataggagatacctttttcgagc

SEQ ID NO: 195694 - DNA, 120 bp, Artificial Sequence
  ENSG00000113303_7 (sequence is synthesized)
ctatatcgtggcacctggctaccaaagtactgggaatactctgctgtggcctattttttggcattgttggactgaagattttcttctccaaattccagtggaaaatccaggcggaactgg

SEQ ID NO: 195695 - DNA, 120 bp, Artificial Sequence
  ENSG00000113303_8 (sequence is synthesized)
cgtttctgatctgaaaactgtaacccatagaaaagctccccaggaggtgcctcactctgagaagagatttacaaggaagagtgtggtggcttctcagagtttccaagcagggaaacatta

SEQ ID NO: 195696 - DNA, 120 bp, Artificial Sequence
  ENSG00000113303_9 (sequence is synthesized)
ctgggaggtggacggaggacacaataaaaggtggcgcgtgggagtgtgccgggatgatgtggacaggaggaaggagtacgtgactttgtctcccgatcatgggtactgggtcctcagact

SEQ ID NO: 195697 - DNA, 120 bp, Artificial Sequence
  ENSG00000113303_10 (sequence is synthesized)
gaatggagaacatttgtatttcacattaaatccccgttttatcagcgtcttccccaggaccccacctacaaaaataggggtcttcctggactatgagtgtgggaccatctccttcttcaa

SEQ ID NO: 195698 - DNA, 120 bp, Artificial Sequence
  ENSG00000113303_11 (sequence is synthesized)
cataaatgaccagtcccttatttataccctgacatgtcggtttgaaggcttattgaggccctacattgagtatccgtcctataatgagcaaaatggaactcccatagtcatctgcccagt

SEQ ID NO: 195699 - DNA, 120 bp, Artificial Sequence
  ENSG00000113303_12 (sequence is synthesized)
cacccaggaatcagagaaagaggcctcttggcaaagggcctctgcaatcccagagacaagcaacagtgagtcctcctcacaggcaaccacgcccttcctccccaggggtgaaatgtagga

SEQ ID NO: 195700 - DNA, 120 bp, Artificial Sequence
  ENSG00000113303_13 (sequence is synthesized)
tgaatcacatcccacattcttctttagggatattaaggtctctctcccagatccaaagtcccgcagcagccggccaaggtggcttccagatgaagggggactggcctgtccacatgggag

SEQ ID NO: 195701 - DNA, 120 bp, Artificial Sequence
  ENSG00000113303_14 (sequence is synthesized)
tcaggtgtcatggctgccctgagctgggagggaagaaggctgacattacatttagtttgctctcactccatctggctaagtgatcttgaaataccacctctcaggtgaagaaccgtcagg

SEQ ID NO: 195702 - DNA, 120 bp, Artificial Sequence
  ENSG00000113303_15 (sequence is synthesized)
aattcccatctcacaggctgtggtgtagattaagtagacaaggaatgtgaataatgcttagatcttattgatgacagagtgtatcctaatggtttgttcattatattacactttcagtaa

SEQ ID NO: 195703 - DNA, 120 bp, Artificial Sequence
  ENSG00000113303_16 (sequence is synthesized)
taggagtgtaagcgagagagagaagcatgggccggtgccttattcatggttccagcagggacaggatcagagatgctcccacatccagctgcttctcttcttctagtcctagcctccagg

SEQ ID NO: 195704 - DNA, 120 bp, Artificial Sequence
  ENSG00000113303_17 (sequence is synthesized)
gcctgagagggtgacagtgggacagaatctcaggtggacatgagagggggaactgaacagggacagatacgggaacacagagtgatgctgagacccatcctgcctgcagatggagaaact

SEQ ID NO: 195705 - DNA, 120 bp, Artificial Sequence
  ENSG00000113303_18 (sequence is synthesized)
ggatgcttgatcgcccccaagggttcagtgcccccagacacacttctttcccttggtctagaaggggagaagacaggggctgggtaaacgggagacgggggggtctttggcacagtttca

SEQ ID NO: 195706 - DNA, 120 bp, Artificial Sequence
  ENSG00000113303_19 (sequence is synthesized)
gggaattgagggcactagtgactggtcaggggtctgagctgaggggaaggaagtaaagtcaggcagaaaattctgagtgggaggaagttagatagtggggtccctccagctcttatgaat

SEQ ID NO: 195707 - DNA, 120 bp, Artificial Sequence
  ENSG00000113303_20 (sequence is synthesized)
cttcacagtgaaatgtatttgacggggctgggtgcagtggctcaagcccgtaatcccaacaccttgagaggctgagacaggaggattgcttgagtccaggagctcgagaccagcctgggc

SEQ ID NO: 195708 - DNA, 120 bp, Artificial Sequence
  ENSG00000113303_21 (sequence is synthesized)
aagtaatcatccttctctagggtattctaacatctcttcctctggaaatatcaactacgacagccccttgctacttcatttaggtcaaataataaggggatgaatgattttcagtaccta

SEQ ID NO: 195709 - DNA, 120 bp, Artificial Sequence
  ENSG00000113303_22 (sequence is synthesized)
tagagagagcttggataattttccatgaacaccaccaagactcctattaaaaagttttaatgtggtgaacaaattcataaaggaggaagcaaaagtgactgacaataagataaaattata

SEQ ID NO: 195710 - DNA, 120 bp, Artificial Sequence
  ENSG00000113303_23 (sequence is synthesized)
ttcagtctcaataagacttttcacccccaaaaccaatttcctcctccttgggagtgacacttccccttgggggtgaggccacccccgcctcccctcccagctgccttctcccatctccat

SEQ ID NO: 195711 - DNA, 120 bp, Artificial Sequence
  ENSG00000113303_24 (sequence is synthesized)
ccccacctccacagcatcccagctgttgtccctctccttagcatgcaccttcctgatctcttgctccaccccagagagccacactccgtgcaggagctggggagacgagcacatataagt

SEQ ID NO: 195712 - DNA, 120 bp, Artificial Sequence
  ENSG00000113303_25 (sequence is synthesized)
gtcctaggagaggccctgcccttcacacctgcagctcgtcccacctgtgcaaggagccagcgtcgtgtttgtgccttgtacactcctgtgtccaccactgaatatactgtttctgtttca

SEQ ID NO: 195713 - DNA, 120 bp, Artificial Sequence
  ENSG00000113303_26 (sequence is synthesized)
ttgagcctctggacgaccctggctgcaggctggacaggaagcaccggcaggtggaggagagcagctgctcgctctctccatccactgctcatgagttacccctcggacatctggagggct

SEQ ID NO: 195714 - DNA, 120 bp, Artificial Sequence
  ENSG00000113303_27 (sequence is synthesized)
taggataggccccggggcctggaagtccccacaaattgtctgtgcctgttgcccgttggtttgctgtgtgtgtggtgggggaaggtgttgatcatgagctctgagggtgtctgggccaca

SEQ ID NO: 195715 - DNA, 120 bp, Artificial Sequence
  ENSG00000113303_28 (sequence is synthesized)
gtgaggaacctgagaaaaatttgtgggtgatcctcgacctcccctggcctgatgctttgagactttatccagttctgtatcaaccactaaatagtctgctttttgttttgtgggaactcc

SEQ ID NO: 195716 - DNA, 120 bp, Artificial Sequence
  ENSG00000113303_29 (sequence is synthesized)
aggataaactgggtgagagtgttaccactcgcagggattccctcccacgccctccctgggcccccgctctgtgacgtcagcctcttacatgttttttgtttttgtttttgtttttcagac

SEQ ID NO: 195717 - DNA, 120 bp, Artificial Sequence
  ENSG00000113303_30 (sequence is synthesized)
gtttccatgccgtgaggtccattcacagaacacatccatggctctcatgctcagtttggttctgagtctcctcaagctgggatcagcactgggctcagttcctctcatttccatcacggg

SEQ ID NO: 195718 - DNA, 120 bp, Artificial Sequence
  ENSG00000113312_0 (sequence is synthesized)
ggaagtaggagctctcagaggctaagaaggtggagaccggagaagctgtgaggttctttagcgtcacctccctcactgggcagcatgggggagaagtcagagaactgtggggttccagag

SEQ ID NO: 195719 - DNA, 120 bp, Artificial Sequence
  ENSG00000113312_1 (sequence is synthesized)
gatctgttaaatggtttgaaggttacagatactcaggaagccgagtgtgctggccctccagttcctgatcccaaaaatcagcattcccagagtaagctgctcagggatgatgaggcccat

SEQ ID NO: 195720 - DNA, 120 bp, Artificial Sequence
  ENSG00000113312_2 (sequence is synthesized)
ctccaggaggaccagggagaagaggagtgttttcatgactgcagtgcctcatttgaggaggagccaggagcggacaaggttgagaacaaatctaatgaagatgtgaattcctctgaacta

SEQ ID NO: 195721 - DNA, 120 bp, Artificial Sequence
  ENSG00000113312_3 (sequence is synthesized)
gatgaagaatacctaatagaactggaaaaaaacatgtcggatgaagagaaacagaaaagaagagaagagagcactagactaaaggaggagggaaatgaacagtttaagaaaggagattat

SEQ ID NO: 195722 - DNA, 120 bp, Artificial Sequence
  ENSG00000113312_4 (sequence is synthesized)
atagaagctgaaagttcttatagtcgagccctcgaaatgtgcccatcctgcttccaaaaggagaggtcgattctattttcaaatagagctgcagcaaggatgaaacaggacaagaaagaa

SEQ ID NO: 195723 - DNA, 120 bp, Artificial Sequence
  ENSG00000113312_5 (sequence is synthesized)
atggccatcaatgactgcagcaaagcaattcaattaaaccccagctatatcagggcaatattgaggagagcagagttgtatgagaagacggacaagctagatgaagccctggaagactat

SEQ ID NO: 195724 - DNA, 120 bp, Artificial Sequence
  ENSG00000113312_6 (sequence is synthesized)
aatctatattagaaaaagatccatcaatacatcaagcaagagaagcttgtatgagattacctaagcaaattgaagaacgtaatgaaagactaaaagaagagatgttaggtaaattaaaag

SEQ ID NO: 195725 - DNA, 120 bp, Artificial Sequence
  ENSG00000113312_7 (sequence is synthesized)
atcttgggaacttggttctccgaccttttgggctctccacggaaaatttccagatcaaacaggattcctctaccggctcgtactccatcaatttcgttcaaaatccaaataataacagat

SEQ ID NO: 195726 - DNA, 120 bp, Artificial Sequence
  ENSG00000113312_8 (sequence is synthesized)
aacaaagataacaaaagctttacaagctgacttggaattgtgtgctgcttgctgttagctaggggaaaggccctgccaatgtttaacttttaaaagcatcttatctaaaagaaaggctat

SEQ ID NO: 195727 - DNA, 120 bp, Artificial Sequence
  ENSG00000113312_9 (sequence is synthesized)
ccagtagagcccagtgctcccttgtccctcttttatgatcagggtgaaatgtacttcctgatgtaatgaacctaatttgatttccattttaaggtggtgtctgtgcagctggtgtccccg

SEQ ID NO: 195728 - DNA, 120 bp, Artificial Sequence
  ENSG00000113312_10 (sequence is synthesized)
attctggctgtcctatgtccaggaagaagcccatttgttgaggctgaccttcctgatcatacacacacacagcccagcaaaagcctctcctgaaccaaacaaacctgttggttgggagac

SEQ ID NO: 195729 - DNA, 120 bp, Artificial Sequence
  ENSG00000113312_11 (sequence is synthesized)
tgcccagacatgattgatgacgggttcccgcctgctgtcccctccctgatcacacagctaacgaggctgcctccagcatttcctgatttcctctgtggtaataaaagctttctgtgctta

SEQ ID NO: 195730 - DNA, 120 bp, Artificial Sequence
  ENSG00000113312_12 (sequence is synthesized)
atcgacggaagtgcacctgactgagcggaagtaggagctctcagaggctaagaaggtggagaccggagaagctgtgagctttagcgtcacctccctcactgggcagcatgggggagaagt

SEQ ID NO: 195731 - DNA, 120 bp, Artificial Sequence
  ENSG00000113312_13 (sequence is synthesized)
ctgggattacaggcgtgagccgccgtccccggccttaagttgcatttttaatactttatgaagactctaaaatgagagacttgataacttctaggattagtaccctgacacaatttaagg

SEQ ID NO: 195732 - DNA, 120 bp, Artificial Sequence
  ENSG00000113312_14 (sequence is synthesized)
cacaatttaaggagcatattatattctaagtttttcaaggaaatgatggtttaactgctttaagaggtaaagatgaagaatttctgaaaggcaggtttgcaagctcagcatccctgactc

SEQ ID NO: 195733 - DNA, 120 bp, Artificial Sequence
  ENSG00000113312_15 (sequence is synthesized)
gttcctttaaagagagaagaaaagaagaaatgatttttactgcgccagacttaatagactgttaccatcttttaactcaaaaccttcatcctatgaatggaaaacagtgcttctgagatc

SEQ ID NO: 195734 - DNA, 120 bp, Artificial Sequence
  ENSG00000113318_0 (sequence is synthesized)
agacgcctgggaactgcggccgcgggctcgcgctcctcgccaggccctgccgccgggctgccatccttgccctgccatgtctcgccggaagcctgcgtcgggcggcctcgctgcctccag

SEQ ID NO: 195735 - DNA, 120 bp, Artificial Sequence
  ENSG00000113318_1 (sequence is synthesized)
ctcagcccctgcgaggcaagcggttttgagccgattcttccagtctacgggaagcctgaaatccacctcctcctccacaggtgcagccgaccaggtggaccctggcgctgcagcggctgc

SEQ ID NO: 195736 - DNA, 120 bp, Artificial Sequence
  ENSG00000113318_2 (sequence is synthesized)
agcggccgcagcggccgcagcgcccccagcgcccccagctcccgccttcccgccccagctgccgccgcacatagctacagaaattgacagaagaaagaagagaccattggaaaatgatgg

SEQ ID NO: 195737 - DNA, 120 bp, Artificial Sequence
  ENSG00000113318_3 (sequence is synthesized)
gcctgttaaaaagaaagtaaagaaagtccaacaaaaggaaggaggaagtgatctgggaatgtctggcaactctgagccaaagaaatgtctgaggaccaggaatgtttcaaagtctctgga

SEQ ID NO: 195738 - DNA, 120 bp, Artificial Sequence
  ENSG00000113318_4 (sequence is synthesized)
aaaattgaaagaattctgctgcgattctgcccttcctcaaagtagagtccagacagaatctctgcaggagagatttgcagttctgccaaaatgtactgattttgatgatatcagtcttct

SEQ ID NO: 195739 - DNA, 120 bp, Artificial Sequence
  ENSG00000113318_5 (sequence is synthesized)
acacgcaaagaatgcagtttcttctgaagattcgaaacgtcaaattaatcaaaaggacacaacactttttgatctcagtcagtttggatcatcaaatacaagtcatgaaaatttacagaa

SEQ ID NO: 195740 - DNA, 120 bp, Artificial Sequence
  ENSG00000113318_6 (sequence is synthesized)
aactgcttccaaatcagctaacaaacggtccaaaagcatctatacgccgctagaattacaatacatagaaatgaagcagcagcacaaagatgcagttttgtgtgtggaatgtggatataa

SEQ ID NO: 195741 - DNA, 120 bp, Artificial Sequence
  ENSG00000113318_7 (sequence is synthesized)
gtatagattctttggggaagatgcagagattgcagcccgagagctcaatatttattgccatttagatcacaactttatgacagcaagtatacctactcacagactgtttgttcatgtacg

SEQ ID NO: 195742 - DNA, 120 bp, Artificial Sequence
  ENSG00000113318_8 (sequence is synthesized)
ccgcctggtggcaaaaggatataaggtgggagttgtgaagcaaactgaaactgcagcattaaaggccattggagacaacagaagttcactcttttcccggaaattgactgccctttatac

SEQ ID NO: 195743 - DNA, 120 bp, Artificial Sequence
  ENSG00000113318_9 (sequence is synthesized)
aaaatctacacttattggagaagatgtgaatcccctaatcaagctggatgatgctgtaaatgttgatgagataatgactgatacttctaccagctatcttctgtgcatctctgaaaataa

SEQ ID NO: 195744 - DNA, 120 bp, Artificial Sequence
  ENSG00000113318_10 (sequence is synthesized)
ggaaaatgttagggacaaaaaaaagggcaacatttttattggcattgtgggagtgcagcctgccacaggcgaggttgtgtttgatagtttccaggactctgcttctcgttcagagctaga

SEQ ID NO: 195745 - DNA, 120 bp, Artificial Sequence
  ENSG00000113318_11 (sequence is synthesized)
aacccggatgtcaagcctgcagccagtagagctgctgcttccttcggccttgtccgagcaaacagaggcgctcatccacagagccacatctgttagtgtgcaggatgacagaattcgagt

SEQ ID NO: 195746 - DNA, 120 bp, Artificial Sequence
  ENSG00000113318_12 (sequence is synthesized)
cgaaaggatggataacatttattttgaatacagccatgctttccaggcagttacagagttttatgcaaaagatacagttgacatcaaaggttctcaaattatttctggcattgttaactt

SEQ ID NO: 195747 - DNA, 120 bp, Artificial Sequence
  ENSG00000113318_13 (sequence is synthesized)
agagaagcctgtgatttgctctttggctgccatcataaaatacctcaaagaattcaacttggaaaagatgctctccaaacctgagaattttaaacagctatcaagtaaaatggaatttat

SEQ ID NO: 195748 - DNA, 120 bp, Artificial Sequence
  ENSG00000113318_14 (sequence is synthesized)
gacaattaatggaacaacattaaggaatctggaaatcctacagaatcagactgatatgaaaaccaaaggaagtttgctgtgggttttagaccacactaaaacttcatttgggagacggaa

SEQ ID NO: 195749 - DNA, 120 bp, Artificial Sequence
  ENSG00000113318_15 (sequence is synthesized)
gttaaagaagtgggtgacccagccactccttaaattaagggaaataaatgcccggcttgatgctgtatcggaagttctccattcagaatctagtgtgtttggtcagatagaaaatcatct

SEQ ID NO: 195750 - DNA, 120 bp, Artificial Sequence
  ENSG00000113318_16 (sequence is synthesized)
acgtaaattgcccgacatagagaggggactctgtagcatttatcacaaaaaatgttctacccaagagttcttcttgattgtcaaaactttatatcacctaaagtcagaatttcaagcaat

SEQ ID NO: 195751 - DNA, 120 bp, Artificial Sequence
  ENSG00000113318_17 (sequence is synthesized)
aatacctgctgttaattcccacattcagtcagacttgctccggaccgttattttagaaattcctgaactcctcagtccagtggagcattacttaaagatactcaatgaacaagctgccaa

SEQ ID NO: 195752 - DNA, 120 bp, Artificial Sequence
  ENSG00000113318_18 (sequence is synthesized)
tggggataaaactgaattatttaaagacctttctgacttccctttaataaaaaagaggaaggatgaaattcaaggtgttattgacgagatccgaatgcatttgcaagaaatacgaaaaat

SEQ ID NO: 195753 - DNA, 120 bp, Artificial Sequence
  ENSG00000113318_19 (sequence is synthesized)
actaaaaaatccttctgcacaatatgtgacagtatcaggacaggagtttatgatagaaataaagaactctgctgtatcttgtataccaactgattgggtaaaggttggaagcacaaaagc

SEQ ID NO: 195754 - DNA, 120 bp, Artificial Sequence
  ENSG00000113318_20 (sequence is synthesized)
tgtgagccgctttcactctccttttattgtagaaaattacagacatctgaatcagctccgggagcagctagtccttgactgcagtgctgaatggcttgattttctagagaaattcagtga

SEQ ID NO: 195755 - DNA, 120 bp, Artificial Sequence
  ENSG00000113318_21 (sequence is synthesized)
acattatcactccttgtgtaaagcagtgcatcacctagcaactgttgactgcattttctccctggccaaggtcgctaagcaaggagattactgcagaccaactgtacaagaagaaagaaa

SEQ ID NO: 195756 - DNA, 120 bp, Artificial Sequence
  ENSG00000113318_22 (sequence is synthesized)
aattgtaataaaaaatggaaggcaccctgtgattgatgtgttgctgggagaacaggatcaatatgtcccaaataatacagatttatcagaggactcagagagagtaatgataattaccgg

SEQ ID NO: 195757 - DNA, 120 bp, Artificial Sequence
  ENSG00000113318_23 (sequence is synthesized)
accaaacatgggtggaaagagctcctacataaaacaagttgcattgattaccatcatggctcagattggctcctatgttcctgcagaagaagcgacaattgggattgtggatggcatttt

SEQ ID NO: 195758 - DNA, 120 bp, Artificial Sequence
  ENSG00000113318_24 (sequence is synthesized)
cacaaggatgggtgctgcagacaatatatataaaggacagagtacatttatggaagaactgactgacacagcagaaataatcagaaaagcaacatcacagtccttggttatcttggatga

SEQ ID NO: 195759 - DNA, 120 bp, Artificial Sequence
  ENSG00000113318_25 (sequence is synthesized)
actaggaagagggacgagcactcatgatggaattgccattgcctatgctacacttgagtatttcatcagagatgtgaaatccttaaccctgtttgtcacccattatccgccagtttgtga

SEQ ID NO: 195760 - DNA, 120 bp, Artificial Sequence
  ENSG00000113318_26 (sequence is synthesized)
actagaaaaaaattactcacaccaggtggggaattaccacatgggattcttggtcagtgaggatgaaagcaaactggatccaggcgcagcagaacaagtccctgattttgtcaccttcct

SEQ ID NO: 195761 - DNA, 120 bp, Artificial Sequence
  ENSG00000113318_27 (sequence is synthesized)
ttaccaaataactagaggaattgcagcaaggagttatggattaaatgtggctaaactagcagatgttcctggagaaattttgaagaaagcagctcacaagtcaaaagagctggaaggatt

SEQ ID NO: 195762 - DNA, 120 bp, Artificial Sequence
  ENSG00000113318_28 (sequence is synthesized)
aataaatacgaaaagaaagagactcaagtattttgcaaagttatggacgatgcataatgcacaagacctgcagaagtggacagaggagttcaacatggaagaaacacagacttctcttct

SEQ ID NO: 195763 - DNA, 120 bp, Artificial Sequence
  ENSG00000113318_29 (sequence is synthesized)
tcattaaaatgaagactacatttgtgaacaaaaaatggagaattaaaaataccaactgtacaaaataactctccagtaacagcctatctttgtgtgacatgtgagcataaaattatgacc

SEQ ID NO: 195764 - DNA, 120 bp, Artificial Sequence
  ENSG00000113318_30 (sequence is synthesized)
atggtatattcctattggaaacagagaggtttttctgaagacagtctttttcaagtttctgtcttcctaacttttctacgtataaacactcttgaatagacttccactttgtaattagaa

SEQ ID NO: 195765 - DNA, 120 bp, Artificial Sequence
  ENSG00000113318_31 (sequence is synthesized)
aattttatggacagtaagtccagtaaagccttaagtggcagaatataattcccaagcttttggagggtgatataaaaatttacttgatatttttatttgtttcagttcagataattggca

SEQ ID NO: 195766 - DNA, 120 bp, Artificial Sequence
  ENSG00000113318_32 (sequence is synthesized)
actgggtgaatctggcaggaatctatccattgaactaaaataattttattatgcaaccagtttatccaccaagaacataagaattttttataagtagaaagaattggccaggcatggtgg

SEQ ID NO: 195767 - DNA, 73 bp, Artificial Sequence
  ENSG00000113318_33 (sequence is synthesized)
ttatcaagcttttaaaaactagagcacagaaggaataaggtcatgaaatttaaaaggttaaatattgtcatag

SEQ ID NO: 195768 - DNA, 120 bp, Artificial Sequence
  ENSG00000113318_34 (sequence is synthesized)
aataaggtcatgaaatttaaaaggttaaatattgtcataggattaagcagtttaaagattgttggatgaaattatttgtcattcattcaagtaataaatatttaatgaatacttgctata

SEQ ID NO: 195769 - DNA, 120 bp, Artificial Sequence
  ENSG00000113318_35 (sequence is synthesized)
acttccgtttgaggagataggcaaaggttatgcaggtttttaatggcaggcctgagacaggaactcaggtctcctgactcccattctgatgagggggcttgtgggcaaggggctacagaa

SEQ ID NO: 195770 - DNA, 120 bp, Artificial Sequence
  ENSG00000113318_36 (sequence is synthesized)
acttccgtttgaggagataggcaaaggttatgcaggtttttaatggcaggcctgagacaggaactcaggtctcctgactcccattctgatgagggggcttgtgggcaaggggtgcgtctt

SEQ ID NO: 195771 - DNA, 120 bp, Artificial Sequence
  ENSG00000113318_37 (sequence is synthesized)
ttaacctccatcctttttttttttccttggtggtcgaagagttttactgattttttaaaaaagtgctggattgggtgactagaagaaagctgcccttaggtctccagtttttaagactgc

SEQ ID NO: 195772 - DNA, 120 bp, Artificial Sequence
  ENSG00000113318_38 (sequence is synthesized)
tgcagttccccagtgaactctttttgtagtttagattataaagtctgaaatacagtttgggtggataaagtttcttaggatggtatagatgtgactaatcatggagtccttcctgttgcc

SEQ ID NO: 195773 - DNA, 120 bp, Artificial Sequence
  ENSG00000113318_39 (sequence is synthesized)
atccttcaacgcaataagctacagaaattgacagaagaaagaagagaccattggaaaatgatgggcctgttaaaaagaaagtaaagaaagtccaacaaaaggaaggaggaagtgatctgg

SEQ ID NO: 195774 - DNA, 120 bp, Artificial Sequence
  ENSG00000113318_40 (sequence is synthesized)
tttattcagcactactttataggttgagtacctgttttatactaggcactgttccaggcattgaatacagcagaaataacactgacaaaagttcccatcctcatggatcctagtgagcag

SEQ ID NO: 195775 - DNA, 80 bp, Artificial Sequence
  ENSG00000113319_0 (sequence is synthesized)
agtccttccccggctgccgccccagcccgccgcgggggctcggctcccgcaactttgggcgaagcggcggccggctcggg

SEQ ID NO: 195776 - DNA, 80 bp, Artificial Sequence
  ENSG00000113319_1 (sequence is synthesized)
ggcttggggggctccgggggctcggccgggagggtggtggttagggcggagagcgtgcctcggccccagcccgcgcccct

SEQ ID NO: 195777 - DNA, 120 bp, Artificial Sequence
  ENSG00000113319_2 (sequence is synthesized)
cccttcgccggccgggacctgagcggtcgcgccctcgagggagccagctgggccatggccgcgaggcaggggtgagaccggcggccacccgtgagccctccgcacccgcaccatgcagaa

SEQ ID NO: 195778 - DNA, 120 bp, Artificial Sequence
  ENSG00000113319_3 (sequence is synthesized)
cctccgcacccgcaccatgcagaagagcgtgcgctacaacgaggggcacgccctgtacctggcctttctggcgcgcaaggagggcaccaagcgcggcttcctgagtaagaagacggccga

SEQ ID NO: 195779 - DNA, 120 bp, Artificial Sequence
  ENSG00000113319_4 (sequence is synthesized)
ggcgagccgctggcacgagaagtggttcgccctctaccagaatgtgctcttctacttcgagggcgagcagagctgccgcccggcgggcatgtacctcctggagggctgcagctgcgaacg

SEQ ID NO: 195780 - DNA, 120 bp, Artificial Sequence
  ENSG00000113319_5 (sequence is synthesized)
aacgcccgcgccacccagggccggcgccgggcagggaggcgtccgagacgcgctggacaagcagtattactttactgttctttttggccatgaaggtcagaagccactggagctgcgctg

SEQ ID NO: 195781 - DNA, 120 bp, Artificial Sequence
  ENSG00000113319_6 (sequence is synthesized)
tgaggaggagcaggatggtaaagagtggatggaggccattcaccaagccagttatgcagacattttgattgagagggaagtattaatgcagaagtacattcatctagttcagatcgtaga

SEQ ID NO: 195782 - DNA, 120 bp, Artificial Sequence
  ENSG00000113319_7 (sequence is synthesized)
gacagaaaaaattgcagctaaccaactccgacatcaacttgaagatcaagacacagaaatcgaaaggcttaaatcagagattattgctcttaataaaaccaaagaacgaatgcgacctta

SEQ ID NO: 195783 - DNA, 120 bp, Artificial Sequence
  ENSG00000113319_8 (sequence is synthesized)
ccaaagcaaccaagaagacgaagatccagacatcaagaagattaaaaaggttcagagcttcatgcgaggatggttgtgcagaaggaaatggaagaccatcgtgcaggattacatttgttc

SEQ ID NO: 195784 - DNA, 120 bp, Artificial Sequence
  ENSG00000113319_9 (sequence is synthesized)
tcctcatgctgaaagtatgaggaagagaaaccagattgtgttcaccatggtggaggcagagtcagagtacgttcaccagctctacatcctggtcaatggctttctccggcccctgcgtat

SEQ ID NO: 195785 - DNA, 120 bp, Artificial Sequence
  ENSG00000113319_10 (sequence is synthesized)
ggccgccagctccaagaagccccccatcagccacgacgacgtcagcagtatttttcttaacagtgaaacaatcatgtttcttcatgaaatatttcatcaaggactaaaggcaaggatagc

SEQ ID NO: 195786 - DNA, 120 bp, Artificial Sequence
  ENSG00000113319_11 (sequence is synthesized)
aaactggcccactttaattttagctgatctgtttgatattttgctccccatgctgaacatttatcaagaatttgtgcgtaatcaccagtacagcctgcaagttctcgccaattgtaagca

SEQ ID NO: 195787 - DNA, 120 bp, Artificial Sequence
  ENSG00000113319_12 (sequence is synthesized)
aaacagagattttgacaaactcttaaaacagtatgaagccaatccagcctgtgaggggaggatgctggagacattcttgacctatcccatgtttcagatccccagatatatcatcacact

SEQ ID NO: 195788 - DNA, 120 bp, Artificial Sequence
  ENSG00000113319_13 (sequence is synthesized)
ccatgagctccttgctcacacaccccatgagcatgtggaaaggaaaagcctggagtttgccaaatcaaagctagaggaactatccagagtaatgcacgatgaagtcagcgacactgaaaa

SEQ ID NO: 195789 - DNA, 120 bp, Artificial Sequence
  ENSG00000113319_14 (sequence is synthesized)
cataaggaaaaaccttgccatcgaaagaatgatcgtggagggctgtgacatcttgctggacaccagccaaacgttcatccgccaaggttctcttattcaagtaccttccgttgagagggg

SEQ ID NO: 195790 - DNA, 120 bp, Artificial Sequence
  ENSG00000113319_15 (sequence is synthesized)
gaaacttagtaaagttcgcctgggttcgttgtctttgaaaaaggaaggagagagacaatgcttcttatttacaaaacactttttaatatgtacaagaagttcaggagggaagcttcatct

SEQ ID NO: 195791 - DNA, 120 bp, Artificial Sequence
  ENSG00000113319_16 (sequence is synthesized)
gctcaagacaggtggggttctgtctctaatagactgcacattgattgaggagccagatgcaagcgatgatgactctaaaggttctgggcaagtgtttgggcacctggattttaaaatagt

SEQ ID NO: 195792 - DNA, 120 bp, Artificial Sequence
  ENSG00000113319_17 (sequence is synthesized)
ggtggagcctcctgacgctgccgccttcactgttgtcttgttagcaccctcacgccaggagaaagctgcctggatgagtgacatcagtcagtgtgtggacaatatacgatgtaatggttt

SEQ ID NO: 195793 - DNA, 120 bp, Artificial Sequence
  ENSG00000113319_18 (sequence is synthesized)
aatgactatagtgtttgaagagaattccaaagtcactgtgccacatatgattaagtctgatgcccgtcttcataaagacgacactgacatttgcttcagtaaaacactcaactcctgcaa

SEQ ID NO: 195794 - DNA, 120 bp, Artificial Sequence
  ENSG00000113319_19 (sequence is synthesized)
agtgccccagatccgttatgccagcgtggagcgcctcttggaacgactgacagacttgcggtttcttagtattgatttcctcaacacctttctgcacacctatcgtattttcactactgc

SEQ ID NO: 195795 - DNA, 120 bp, Artificial Sequence
  ENSG00000113319_20 (sequence is synthesized)
cgctgtggtgctggggaaactctccgacatatacaagaggcctttcacctccatccctgtcaggtcattggaattgttttttgctaccagccagaacaacagaggtgaacatttggtgga

SEQ ID NO: 195796 - DNA, 120 bp, Artificial Sequence
  ENSG00000113319_21 (sequence is synthesized)
tggcaaatccccacgtctgtgtcgcaaattctcttccccgccaccactggctgtgtccagaacatcttccccagtgagggccagaaagctgtctttgacttctcccttgaactcaaagat

SEQ ID NO: 195797 - DNA, 120 bp, Artificial Sequence
  ENSG00000113319_22 (sequence is synthesized)
aggagcattggacctgacaacttccagcagtcccaccaccaccacccagagtcccgctgcgtctccaccaccacacactggtcagataccactggatctcagcagaggcctctcttctcc

SEQ ID NO: 195798 - DNA, 120 bp, Artificial Sequence
  ENSG00000113319_23 (sequence is synthesized)
agagcaaagcccgggaacggtagaagagaatgtcgataacccacgcgtggatctgtgtaacaagctaaaacgaagtattcaaaaagcagtcctagagtctgcaccagcggaccgagcagg

SEQ ID NO: 195799 - DNA, 120 bp, Artificial Sequence
  ENSG00000113319_24 (sequence is synthesized)
agtggaaagctcccctgcagcggacaccacagaactttcaccttgcagatccccctcaactcctcggcacctccgctatcgacagcctggaggacagacggcggacaatgcccactgctc

SEQ ID NO: 195800 - DNA, 120 bp, Artificial Sequence
  ENSG00000113319_25 (sequence is synthesized)
tgtttcaccggcttctgcttttgcaatagccacagctgcagcaggacatgggagtccaccaggctttaacaacaccgagagaacatgtgataaagagtttattatacggagaacggctac

SEQ ID NO: 195801 - DNA, 120 bp, Artificial Sequence
  ENSG00000113319_26 (sequence is synthesized)
caatcgagttctgaacgtcctccgtcactgggtctcaaagcacgcacaggatttcgaactcaacaatgaactaaagatgaatgtcctaaatttgctagaagaagttttgcgagacccaga

SEQ ID NO: 195802 - DNA, 120 bp, Artificial Sequence
  ENSG00000113319_27 (sequence is synthesized)
ccttcttccccaagaaaggaaagccgccgcgaatatcctcagggccctttcacaagatgaccaagatgacatccacctaaaattagaggatataattcaaatgactgactgcatgaaggc

SEQ ID NO: 195803 - DNA, 120 bp, Artificial Sequence
  ENSG00000113319_28 (sequence is synthesized)
cgaatgctttgagtccttgtcggccatggagctggcagaacagatcaccctcctggaccatgtcattttcagaagcattccctacgaggagtttcttgggcaggggtggatgaagctgga

SEQ ID NO: 195804 - DNA, 120 bp, Artificial Sequence
  ENSG00000113319_29 (sequence is synthesized)
taaaaacgaaagaactccttacattatgaaaaccagccaacacttcaatgacatgagtaacctggtggcctcccagataatgaactatgctgatgtcagctcccgtgccaacgccatcga

SEQ ID NO: 195805 - DNA, 120 bp, Artificial Sequence
  ENSG00000113319_30 (sequence is synthesized)
gaaatgggtggcagtggcggacatctgccgatgcctgcacaactacaacggcgtgctggagatcacctcggccttaaacagaagtgccatctacaggctgaagaaaacctgggccaaggt

SEQ ID NO: 195806 - DNA, 120 bp, Artificial Sequence
  ENSG00000113319_31 (sequence is synthesized)
ctctaagcagacaaaagctctaatggacaaacttcaaaagactgtttcctctgaaggaagatttaaaaatcttagagaaacccttaaaaattgtaaccctcctgcagttccttatcttgg

SEQ ID NO: 195807 - DNA, 120 bp, Artificial Sequence
  ENSG00000113319_32 (sequence is synthesized)
gatgtacttgacagacctggcatttattgaagaaggaacaccaaactttactgaggaaggccttgtcaatttctccaaaatgagaatgatatcacacatcatcagagagatacgccagtt

SEQ ID NO: 195808 - DNA, 120 bp, Artificial Sequence
  ENSG00000113319_33 (sequence is synthesized)
ccagcagacttcctacagaatagatcatcagccaaaggtcgcacagtacttgcttgacaaagaccttatcatagatgaagatacgctatatgagctgtcactaaaaattgaacctcgact

SEQ ID NO: 195809 - DNA, 120 bp, Artificial Sequence
  ENSG00000113319_34 (sequence is synthesized)
ccctgcttgaagatctggccttgcccctgagtccacgggatgttcatggaaagcaggacagacagaattgtgtatgccttgcctatcacggtacagcacgaagccaggctcctttctcca

SEQ ID NO: 195810 - DNA, 120 bp, Artificial Sequence
  ENSG00000113319_35 (sequence is synthesized)
gggtgggaaggtgaaagatggctatttagaaagctggtggcacgttttacataagggaatgtcagatgggagatgctagttgccattttaacaaagcaggtaaatcggtaaattttaaac

SEQ ID NO: 195811 - DNA, 120 bp, Artificial Sequence
  ENSG00000113319_36 (sequence is synthesized)
tctgtccatgttctgttagaactcagggacaaggatccatgaaaaagacctgtgatgtttctctggcgctttactggcctgggcacacctaccaatcttctaggatttgactggttccat

SEQ ID NO: 195812 - DNA, 120 bp, Artificial Sequence
  ENSG00000113319_37 (sequence is synthesized)
tacatttccttttggtataagcttcacagaaaagctgacacttcctctacagagatggaccaaaacataagcaatttcagtctacagcatgtgcatggttgtcagtgcattctaaatatt

SEQ ID NO: 195813 - DNA, 120 bp, Artificial Sequence
  ENSG00000113319_38 (sequence is synthesized)
tctatgtgaggaatggtaccttctgaaactgcctttccagtctttaggcaatgggataggaaagaaagaatgaaacacaaatggatttgtatgtaacatttccttaattaaatgcagtag

SEQ ID NO: 195814 - DNA, 120 bp, Artificial Sequence
  ENSG00000113319_39 (sequence is synthesized)
gctgtgccccagaggattccagacagtggctggctgaggtgggtggggagcttttccttgagactgttggtcctaagaagccagcccttttggagaggcagctgcaaaaaggtgcacgcc

SEQ ID NO: 195815 - DNA, 120 bp, Artificial Sequence
  ENSG00000113319_40 (sequence is synthesized)
catctcaccgacaaaactgtggaacagaaggccaccaagtgctgtggggaatcatgggtttcagtgctgagtgaaaatctatacctaaaaatcatctctgcaccttgctttgtttgtttt

SEQ ID NO: 195816 - DNA, 120 bp, Artificial Sequence
  ENSG00000113319_41 (sequence is synthesized)
ctttccccactcatagtactgcaggaatctattctcatttacacagacctttttttaggcttactatgaacattggctgtattttttttaaacagtttagtgaaattttcttttcaaaac

SEQ ID NO: 195817 - DNA, 120 bp, Artificial Sequence
  ENSG00000113319_42 (sequence is synthesized)
ccacacttccatatgctgttcgtagatctctttctttaaaaactgatgttgagagatctctgagaatattataagtgcatgggaaatgggcccaaccaccgaacagctcttacattacaa

SEQ ID NO: 195818 - DNA, 120 bp, Artificial Sequence
  ENSG00000113319_43 (sequence is synthesized)
aaccaaatgcaagggttagtcctgctacctgaggctggggaagtgaccttccttttcccaagattgtcagttgttgaagaaatagggctatctcattgtttacctccctcttctcttctc

SEQ ID NO: 195819 - DNA, 120 bp, Artificial Sequence
  ENSG00000113319_44 (sequence is synthesized)
agggagactgctgctttaaaagaaggaagagaaaaaatatagttctatttccctgaacctgttgcacctgacattttctcttagcagcatgaaacttattgatgctgacaatgaaaaatg

SEQ ID NO: 195820 - DNA, 120 bp, Artificial Sequence
  ENSG00000113319_45 (sequence is synthesized)
gatctgtctggctgctttccctctttccttgcactttaattatgttgctagagctaacagactaataaattccacctgctggctcttaagactcagtgaaagagctagcattggtaatgc

SEQ ID NO: 195821 - DNA, 120 bp, Artificial Sequence
  ENSG00000113319_46 (sequence is synthesized)
accatagaggtagagaatgtacactttctgcacggtaagtgccatctctgtatgtaactatatagtgaaatatcaactaagtaaaagaaaatataatatttgaagaccattcccaaaata

SEQ ID NO: 195822 - DNA, 120 bp, Artificial Sequence
  ENSG00000113319_47 (sequence is synthesized)
ttttcaatagttcatattagccaacagtgtagcactcaacccaaggagggttccttatggatgctttctttttcttttttaaagttgcttgtttgttctctttagtttcaaataagaggt

SEQ ID NO: 195823 - DNA, 120 bp, Artificial Sequence
  ENSG00000113319_48 (sequence is synthesized)
tgacgcatcttgatgcatgatgagaagcatgggctgtttggatcctaacaacgcataacttgtgatttatttctcagtgctccagaaactgagggtttgaaataatatgtatcagttgca

SEQ ID NO: 195824 - DNA, 120 bp, Artificial Sequence
  ENSG00000113319_49 (sequence is synthesized)
ccaaacacctcaaggtcttgcagaagaaaagtaaaggttagctttcatggctcaaaagcatagtcctgaagggtgaactaaaaccgggacaaatctgtgagaggaccacacacatactag

SEQ ID NO: 195825 - DNA, 120 bp, Artificial Sequence
  ENSG00000113319_50 (sequence is synthesized)
tttcgggccaaacaacacgtggaaaggtgcatgcattctactctgccttggagttgccagagtccttcagagggaaagggatggttctgtgtgcactttttctggaagttcggactcatt

SEQ ID NO: 195826 - DNA, 120 bp, Artificial Sequence
  ENSG00000113319_51 (sequence is synthesized)
tctttgacccaaatgttccagagacactgcagccattcttattaacaaaaaataagacaggagtttccaaatgctccttcccttttggatcgcagcttttcttcaactagtgacaaagct

SEQ ID NO: 195827 - DNA, 120 bp, Artificial Sequence
  ENSG00000113319_52 (sequence is synthesized)
tttgcgcctatttcctgcaggatgttggaactgccccgcactggtcatattaggcactgtcaattgctatgctgacttttagggggtttttgtttgtttgaaaaacagggtctcaccatg

SEQ ID NO: 195828 - DNA, 120 bp, Artificial Sequence
  ENSG00000113319_53 (sequence is synthesized)
gtctcgaactcctggactcaagcaatcttcctgcctcagcctctcaagcagctgggactgcaggggtgtgccactcactagcctttcgcatttttgtttgagaattacaccactttctgg

SEQ ID NO: 195829 - DNA, 120 bp, Artificial Sequence
  ENSG00000113319_54 (sequence is synthesized)
accactttctggagtctgcagccttcctggagctgcaagagggcaagagagagagctccacctctgagggagtgtctgttgatgacctgcactattcgtgtgccagctgggagaggaatg

SEQ ID NO: 195830 - DNA, 120 bp, Artificial Sequence
  ENSG00000113319_55 (sequence is synthesized)
cacattttaaaatcccttcaatttggtcaaattaaaaatccccaagagcaatttgcagtgttttttctggtcgttaaagtacccatcctcttctgcctacacacaaagcatgcattccca

SEQ ID NO: 195831 - DNA, 120 bp, Artificial Sequence
  ENSG00000113319_56 (sequence is synthesized)
gctgcatctgcctctagtccattatggagacccatttctaagaggagatgggaggtcaacctctaacagccaagtagcgaacatgtatactgtaaaattaacctagaaaatcagaagaaa

SEQ ID NO: 195832 - DNA, 120 bp, Artificial Sequence
  ENSG00000113319_57 (sequence is synthesized)
aatccaatttcatgctttcgaatgaatgcccacattttgtactgtcaacgaaattatcttggagcttttaggggatgccttttcgttattaactgagacatctagttttgctacagggac

SEQ ID NO: 195833 - DNA, 120 bp, Artificial Sequence
  ENSG00000113319_58 (sequence is synthesized)
aaatctcttacctaatccaatatattatttgacagattcaggcatgaagtaaaacgtcgtcacttttccttagtgcttttctgaaggaatttaaagacggaattttaaacggccattgca

SEQ ID NO: 195834 - DNA, 120 bp, Artificial Sequence
  ENSG00000113319_59 (sequence is synthesized)
atattttcaagtggctctcataccaagtcccattactgtttgttaaatttcagtacgtcttaaagtactacttataaacaaatgaaactcagagaaactgaatcacctggaagagaaaaa

SEQ ID NO: 195835 - DNA, 120 bp, Artificial Sequence
  ENSG00000113319_60 (sequence is synthesized)
tccattatggtcccatgtggagtgaataatgatggatcagcaccctttctctcatgttattgtataagacgagacttttgggccagcagcgattgggcagcttttaaattcttaactgaa

SEQ ID NO: 195836 - DNA, 120 bp, Artificial Sequence
  ENSG00000113319_61 (sequence is synthesized)
aagagtaatgcaatacagggattattcccaataaaattaacttttatttaaaagcaagagattttacttagcttttttttttcaaagtttgattttatccccttgaaaaaaaatctcttc

SEQ ID NO: 195837 - DNA, 120 bp, Artificial Sequence
  ENSG00000113319_62 (sequence is synthesized)
actttaaagtataaaggtttttaaaaatccaattgcaaaatgtattatttttacaactatcgaaaaggcataaaagagaacatactatttatggctgaagggtatagccaggctaatgtg

SEQ ID NO: 195838 - DNA, 120 bp, Artificial Sequence
  ENSG00000113319_63 (sequence is synthesized)
cacagagggaatcaataaataaaactctttttcatttcagtaagaaatcagattgtaagtttaatggctccattatagataccaccgtgtaatagaagacttaagtcaatgaaatctaat

SEQ ID NO: 195839 - DNA, 120 bp, Artificial Sequence
  ENSG00000113319_64 (sequence is synthesized)
cagtgtgtcatttctcagcggccattggtgacttaaaattaagatgaggcagagccaaaatggaaaacagtcattttgttgtaggtataaacacatgaacgattcagaaaattattcatc

SEQ ID NO: 195840 - DNA, 120 bp, Artificial Sequence
  ENSG00000113319_65 (sequence is synthesized)
tcagctgccatgcagcatgacattaacattaggattgatagcactagtctgatctgctcaaggaaaataatagttctattatacttaatgatgttggtttttacacagctcatttcattt

SEQ ID NO: 195841 - DNA, 120 bp, Artificial Sequence
  ENSG00000113319_66 (sequence is synthesized)
ttcactagaaagccagttatgaaagagagctggcctaggcatcccggccctgagtcctaggcccagtctccaactggaaaaccttaggctggtgtttacacatccctgagcctcagtttc

SEQ ID NO: 195842 - DNA, 120 bp, Artificial Sequence
  ENSG00000113319_67 (sequence is synthesized)
ctcatctgcaaaacggtgtgaatagtaatccctgtgctgcttatctcacagggctattgtgaggaccaaatggattagactgtaaactgcaaagtgctgtccgcacatgaggtcatctga

SEQ ID NO: 195843 - DNA, 120 bp, Artificial Sequence
  ENSG00000113319_68 (sequence is synthesized)
ttactgtcctcagatctcttttgtagaggatttcaatgtatttctttatcatttgagtgtgtgtgtgatggacgaatatgtgtgtgagtttgagaagcatatcgttcgtgtccagttact

SEQ ID NO: 195844 - DNA, 120 bp, Artificial Sequence
  ENSG00000113319_69 (sequence is synthesized)
ttgcaaatttgtggacatttgtgattggacagaggggtttgtgctgtggcctaacacttgccaagtgaggtgtaggttatgcctatatgcaaattaaacttcacctttcttgaatattca

SEQ ID NO: 195845 - DNA, 120 bp, Artificial Sequence
  ENSG00000113319_70 (sequence is synthesized)
gaaaggcagccacttctttatccatctagcatctgacttgtgaggttaggggtcccacagcctgagaggaggtgggaacctcccatccttcccagcaggagcctcgatggctgcacagag

SEQ ID NO: 195846 - DNA, 120 bp, Artificial Sequence
  ENSG00000113319_71 (sequence is synthesized)
ttttcctaaggatgtctgtgagtctggggtgccatgtggtttggaagactacaggccaatggccagaaccaggggctctgagctgagtgtcactgcatgtggggaccacaggacattgca

SEQ ID NO: 195847 - DNA, 120 bp, Artificial Sequence
  ENSG00000113319_72 (sequence is synthesized)
ggcagccaccttcaggcgaggggatggacatatcactggactcctgacaaggtcttggcgggctcaccactggcagctggggctgagttttgggccaacatttctgctagcccagatccc

SEQ ID NO: 195848 - DNA, 120 bp, Artificial Sequence
  ENSG00000113319_73 (sequence is synthesized)
cggtcacactttacacagtcacttcttataaacactttcattggtgataccatgcttggggtaaagttcatgtttcccccatctcagcaccaaaggaagagagtgtgcataaaaagtggg

SEQ ID NO: 195849 - DNA, 120 bp, Artificial Sequence
  ENSG00000113319_74 (sequence is synthesized)
tgtttcctgaggatctcattggaccacctttgtaggcagagcttcctgtgtgtatggctataatccagcatttcccaaatcatgaaatggaccaactttgtgttccagattattgctctt

SEQ ID NO: 195850 - DNA, 120 bp, Artificial Sequence
  ENSG00000113319_75 (sequence is synthesized)
ggtcggcctggcccacggccgtggcagtgccaagtgctgacgatacccaggccaaggcccaggagaaacttgcgttgctcaaagccctttcacataagactggggaccatgtccgaagtg

SEQ ID NO: 195851 - DNA, 120 bp, Artificial Sequence
  ENSG00000113319_76 (sequence is synthesized)
aaaacagctgtctgttgttcccatttttcatcagcacttccggatccgccccacacgatataatttgattcaactggtaactcccgttgccagatgaaatgtctctgatggacacttgcc

SEQ ID NO: 195852 - DNA, 120 bp, Artificial Sequence
  ENSG00000113319_77 (sequence is synthesized)
acgctttggtaatgcagaagctgtcgtgtttgcgaagtgtgctttgggggcatcactcgataaattaagcttttgaagagttgaagatatttgtgccggaaactgtggagaagcaacagc

SEQ ID NO: 195853 - DNA, 120 bp, Artificial Sequence
  ENSG00000113319_78 (sequence is synthesized)
ctgacagtgcctatttctcctcggctgttatttcaaaatgcaagacgtaaaccacatcccaagttatttttttagtgcttaggtcctctgggggaggggagaatgccccaggcaattgat

SEQ ID NO: 195854 - DNA, 120 bp, Artificial Sequence
  ENSG00000113319_79 (sequence is synthesized)
ttgagacaatatattgcacacatttataattttgaatttggtgaggagtggaatataaatttggaactcaaattaatcgttaatgtagtttctgtttataatgtgccaatacatttgaag

SEQ ID NO: 195855 - DNA, 120 bp, Artificial Sequence
  ENSG00000113319_80 (sequence is synthesized)
atatttgtgttgccattgcctaccataatgtactgcttaaaatctctttttacctcatcaagaacaagacaatgttttgtgcacattaatttttgcacagactactttaaaagtttaatg

SEQ ID NO: 195856 - DNA, 120 bp, Artificial Sequence
  ENSG00000113319_81 (sequence is synthesized)
catgccattctattttccattatttatttacaaggagaaaccacacatatgttaaagtttgggagtgtattttaggaaatgattccttttctcatttttggctttagatattcttttttc

SEQ ID NO: 195857 - DNA, 120 bp, Artificial Sequence
  ENSG00000113319_82 (sequence is synthesized)
tttaaataagggtggaatataatgctgacaacatcaggcccttgtaatgcctcctctattcctctgcacagactgtgtccccacattggcttcctgcctgccagcctctgtgcctttcct

SEQ ID NO: 195858 - DNA, 120 bp, Artificial Sequence
  ENSG00000113319_83 (sequence is synthesized)
tgtgctgtccccagcctgggggctgggaatgtccttatccatttcttttgtgcctgttgaagttctgcttgtcccaccaggctcagatcagatacctcgaaggagccttttataatttcc

SEQ ID NO: 195859 - DNA, 120 bp, Artificial Sequence
  ENSG00000113319_84 (sequence is synthesized)
tcttcttcctcctcccctctcctccagttagaatggatttaccttccacttgtttccaaggcactttactcctggtgcgtgtatttcatcctcttgcttgtatacctctctctcctggtt

SEQ ID NO: 195860 - DNA, 120 bp, Artificial Sequence
  ENSG00000113319_85 (sequence is synthesized)
actgtaaactctgaagggcagcacttaaggaattctctctgccttaccttgtctagtatgatgctttttgttacagatacctggaaaatgggcgttgaattaaattatttactgaattgc

SEQ ID NO: 195861 - DNA, 120 bp, Artificial Sequence
  ENSG00000113319_86 (sequence is synthesized)
atggcttcaatggcaaataaatagctagaaaagaagccatttcttttctgcctgacaaggaaatgaaaatatgggatcttccatttttgtggacttgcatccttgtggtgatttattcat

SEQ ID NO: 195862 - DNA, 120 bp, Artificial Sequence
  ENSG00000113319_87 (sequence is synthesized)
acgttcattagctctatgctatatcaattaatagcatattaagtctctccctatttgtaacacatctcttactttatgaaactctggatcattcattgactctttgaacatttattgagg

SEQ ID NO: 195863 - DNA, 120 bp, Artificial Sequence
  ENSG00000113319_88 (sequence is synthesized)
aatcaccatgtgctgtcaggtattgtgcaggtaccaggaatacgaccatggttcttgctctcagggagaataggcaggctcatagggagcaaaaggaagtaaacagctaaatgcaaaaaa

SEQ ID NO: 195864 - DNA, 120 bp, Artificial Sequence
  ENSG00000113327_0 (sequence is synthesized)
gaccacaaaccttctgtcattgatgatgtagcttctgggcttgctaaagcatctcttgtccccatgaatgccagtccttgcatgctggtgtgtgcagtaaagggttaaaaagctttggaa

SEQ ID NO: 195865 - DNA, 120 bp, Artificial Sequence
  ENSG00000113327_1 (sequence is synthesized)
agacaccacgcatgtgttaattcgtgctgcagcagcgtgcatcacttccactttgacctcatagttaatctgcgtgatagttaatcacgcagagtctctagtgatttttttcctatttat

SEQ ID NO: 195866 - DNA, 120 bp, Artificial Sequence
  ENSG00000113327_2 (sequence is synthesized)
tttaaatacacacacccacagggctctgccccctgtaaaagaaaaaaaatcaaaacaaacaaataaataaccccaaagagatggacccaggggagaacgcgtaagtgtgaggggcatgag

SEQ ID NO: 195867 - DNA, 120 bp, Artificial Sequence
  ENSG00000113327_3 (sequence is synthesized)
tatacacgagtgtgcgtgtctttccctctcccttatttgtctccgtatgagtctctccttgtaccctccccctgcctcgatgatattactcccccagacttggaagccgctgccagagtg

SEQ ID NO: 195868 - DNA, 120 bp, Artificial Sequence
  ENSG00000113327_4 (sequence is synthesized)
acgctttgatggtatctgcaagcgtttttgctgatcttatctctgccccctgaatattaattccctaatctggtagcaatccatctccccagtgaaggacctactagaggcaggtggggg

SEQ ID NO: 195869 - DNA, 120 bp, Artificial Sequence
  ENSG00000113327_5 (sequence is synthesized)
gagccaccatcagatcataagcataagaataatacaaaggggagggattcttctgcaaccaagaggcaagaggcgagagaaggaaaaaaaaaaaagcgatgagttcgccaaatatatgga

SEQ ID NO: 195870 - DNA, 120 bp, Artificial Sequence
  ENSG00000113327_6 (sequence is synthesized)
gcacaggaagctcagtctactcgactcctgtattttcacagaaaatgacggtgtggattctgctcctgctgtcgctctaccctggcttcactagccagaaatctgatgatgactatgaag

SEQ ID NO: 195871 - DNA, 120 bp, Artificial Sequence
  ENSG00000113327_7 (sequence is synthesized)
attatgcttctaacaaaacatgggtcttgactccaaaagttcctgagggtgatgtcactgtcatcttaaacaacctgctggaaggatatgacaataaacttcggcctgatataggagtga

SEQ ID NO: 195872 - DNA, 120 bp, Artificial Sequence
  ENSG00000113327_8 (sequence is synthesized)
agccaacgttaattcacacagacatgtatgtgaatagcattggtccagtgaacgctatcaatatggaatacactattgatatattttttgcgcaaacgtggtatgacagacgtttgaaat

SEQ ID NO: 195873 - DNA, 120 bp, Artificial Sequence
  ENSG00000113327_9 (sequence is synthesized)
ttaacagcaccattaaagtcctccgattgaacagcaacatggtggggaaaatctggattccagacactttcttcagaaattccaaaaaagctgatgcacactggatcaccacccccaaca

SEQ ID NO: 195874 - DNA, 120 bp, Artificial Sequence
  ENSG00000113327_10 (sequence is synthesized)
ggatgctgagaatttggaatgatggtcgagtgctctacaccctaaggttgacaattgatgctgagtgccaattacaattgcacaactttccaatggatgaacactcctgccccttggagt

SEQ ID NO: 195875 - DNA, 120 bp, Artificial Sequence
  ENSG00000113327_11 (sequence is synthesized)
tctccagttatggctatccacgtgaagaaattgtttatcaatggaagcgaagttctgttgaagtgggcgacacaagatcctggaggctttatcaattctcatttgttggtctaagaaata

SEQ ID NO: 195876 - DNA, 120 bp, Artificial Sequence
  ENSG00000113327_12 (sequence is synthesized)
ccaccgaagtagtgaagacaacttccggagattatgtggtcatgtctgtctactttgatctgagcagaagaatgggatactttaccatccagacctatatcccctgcacactcattgtcg

SEQ ID NO: 195877 - DNA, 120 bp, Artificial Sequence
  ENSG00000113327_13 (sequence is synthesized)
tcctatcctgggtgtctttctggatcaataaggatgctgttccagccagaacatctttaggtatcaccactgtcctgacaatgaccaccctcagcaccattgcccggaaatcgctcccca

SEQ ID NO: 195878 - DNA, 120 bp, Artificial Sequence
  ENSG00000113327_14 (sequence is synthesized)
aggtctcctatgtcacagcgatggatctctttgtatctgtttgtttcatctttgtcttctctgctctggtggagtatggcaccttgcattattttgtcagcaaccggaaaccaagcaagg

SEQ ID NO: 195879 - DNA, 120 bp, Artificial Sequence
  ENSG00000113327_15 (sequence is synthesized)
acaaagataaaaagaagaaaaaccctcttcttcggatgttttccttcaaggcccctaccattgatatccgcccaagatcagcaaccattcaaatgaataatgctacacaccttcaagaga

SEQ ID NO: 195880 - DNA, 120 bp, Artificial Sequence
  ENSG00000113327_16 (sequence is synthesized)
gagatgaagagtacggctatgagtgtctggacggcaaggactgtgccagttttttctgctgttttgaagattgtcgaacaggagcttggagacatgggaggatacatatccgcattgcca

SEQ ID NO: 195881 - DNA, 120 bp, Artificial Sequence
  ENSG00000113327_17 (sequence is synthesized)
aaatggactcctatgctcggatcttcttccccactgccttctgcctgtttaatctggtctattgggtctcctacctctacctgtgaggaggtatgggttttactgatatggttcttattc

SEQ ID NO: 195882 - DNA, 120 bp, Artificial Sequence
  ENSG00000113327_18 (sequence is synthesized)
actgagtctcatggagagatgtctgttctaagtccacttaaataatcctctatgtggttgataatgatctgaatctgtttctatgtccaaacctggtaaattttataatgtcatattgtt

SEQ ID NO: 195883 - DNA, 120 bp, Artificial Sequence
  ENSG00000113327_19 (sequence is synthesized)
tgtgcccagccctcctttggttagtgtactttgaacttcgatgtttgctgtgtttcaaacctgcaaggcaaagtaaaattagagcaagaacattcaaaccaaataagatatttttcagct

SEQ ID NO: 195884 - DNA, 120 bp, Artificial Sequence
  ENSG00000113327_20 (sequence is synthesized)
acagcaaataaaacagtgaaagccctgactatttacagtagtggtatccttactagattcataatgcaattagatagaaaaggtccaaaactgtaccctatgttcactccgggtcaagtt

SEQ ID NO: 195885 - DNA, 120 bp, Artificial Sequence
  ENSG00000113327_21 (sequence is synthesized)
gtgataaatttgatcccaatagaatacctccctcatttaagaaaaatcataactcactttaaatatgaaagcctagtccagaaatctattacacctttatctcaagataggaagaaaatt

SEQ ID NO: 195886 - DNA, 120 bp, Artificial Sequence
  ENSG00000113327_22 (sequence is synthesized)
tcctccacattcatgtacaatgatgtaaatatttcaataacttagaatgcttcaagtttagtgcatgcatctctttagatccaaaataaatggactgaagttatcatcctattgtctttt

SEQ ID NO: 195887 - DNA, 120 bp, Artificial Sequence
  ENSG00000113327_23 (sequence is synthesized)
attttgtgtccttgggctataaaagattcctgaatgtaattataaggatttgggtttggaaatggagggaggaattttcattgccttctccctcatgcatgaagattcgaacagcttatt

SEQ ID NO: 195888 - DNA, 120 bp, Artificial Sequence
  ENSG00000113327_24 (sequence is synthesized)
ttttccttgtatgacatattacaacactttaagtaaaatatagactggataatcaacatttgccacctctaaatatgcccaatttcataactagagtataaagtaattgtatgtgcttgc

SEQ ID NO: 195889 - DNA, 120 bp, Artificial Sequence
  ENSG00000113327_25 (sequence is synthesized)
cgctatttttttcttccttttaggatgatagatcataacagaacttattctccatctcaagatctgcttctagtgattgtgagtgccttgtgggcagaatccttgtcatttcctctttgg

SEQ ID NO: 195890 - DNA, 120 bp, Artificial Sequence
  ENSG00000113327_26 (sequence is synthesized)
gtctgtagcaccttgcatagtgcctggcatatagttggtgctcaataaatatggtttgaagtgaattgccctcacatgcttctggcaaatctctgtgctggcctgaaaccagtgactcat

SEQ ID NO: 195891 - DNA, 120 bp, Artificial Sequence
  ENSG00000113327_27 (sequence is synthesized)
cttctcacataggtgttgtcaagtgatatttgattttgtaaaaataaccagtaggatccaaagaactttagctatttatgttcatcttcaaaaaattattttaggcaaagtccatactcc

SEQ ID NO: 195892 - DNA, 120 bp, Artificial Sequence
  ENSG00000113327_28 (sequence is synthesized)
ttttaaaacaatatttatgtcctatgtttgtgtatagacatgactctactagggcataattagagtttgtgtattatttttccaggtttggggatgagtcagtccttgcccatccacaat

SEQ ID NO: 195893 - DNA, 120 bp, Artificial Sequence
  ENSG00000113327_29 (sequence is synthesized)
tttgtttgtgaacttataacaggaataagcaaaattcatacctgactagtgttcagaatgtagcattctgtgcgaaaaagtattgaagattagcttttaaaaactgaaaaaaaaaaatga

SEQ ID NO: 195894 - DNA, 120 bp, Artificial Sequence
  ENSG00000113327_30 (sequence is synthesized)
atgactcacatagaggttgagccaatgactgtggcctcattagattacattgtagttaaacaaagcaatttctccagacttaaaacatgatgagttgagctctatcttcatgtactcatc

SEQ ID NO: 195895 - DNA, 120 bp, Artificial Sequence
  ENSG00000113327_31 (sequence is synthesized)
ctgaatccttatttttctaaaatagcaccctttgttaattatttttatggaaattattactctgtcataattaaatcatagctagtataactttacagataacctaaaaagaatagaaaa

SEQ ID NO: 195896 - DNA, 120 bp, Artificial Sequence
  ENSG00000113327_32 (sequence is synthesized)
gaagagagagtggctttgtcagtataaaaccatgtaaagtcatcatcaagtcatctggatgaatcttgaaacacatttagctgccagttttacaaacctttaatatatcagtgctccagt

SEQ ID NO: 195897 - DNA, 120 bp, Artificial Sequence
  ENSG00000113327_33 (sequence is synthesized)
atataacctcaaacaaatgtaaatagaacgaattattttcttgttttgaattgtcaatatattaaatgttgactctttgggagagttgttggcaagtttcaatggtgagaaacattattg

SEQ ID NO: 195898 - DNA, 120 bp, Artificial Sequence
  ENSG00000113327_34 (sequence is synthesized)
tcaacttgaaatgtgttctgtaatggggacactacaaaaagctagctttccaatgtgtgcatagtattggcaatatgaatatatattatatataatctaatacttattataagctgctcc

SEQ ID NO: 195899 - DNA, 120 bp, Artificial Sequence
  ENSG00000113327_35 (sequence is synthesized)
ctgtctatgtatttggaaaccttttcacaaagggaattgcctaacatgtggacttttacaataaaaatgctgcattctaatccatggtggcatctcagtagtctggtgggactgtttgtc

SEQ ID NO: 195900 - DNA, 120 bp, Artificial Sequence
  ENSG00000113327_36 (sequence is synthesized)
ttagagattgtgacctctctttcctgcctcatttccccaaatcccctctcagtgagctttatctgtgagctgtgtgactgtgttttgcatggcggtactcttcacctcaaaaaaattaag

SEQ ID NO: 195901 - DNA, 120 bp, Artificial Sequence
  ENSG00000113327_37 (sequence is synthesized)
agaggcatgtgggttgtagagtgaagaagaaaggcagacatgtaataaagtaagtaaaaattcaagtcttctctacctcaagaatttcggtgtggttaacattaattccagtgccagaca

SEQ ID NO: 195902 - DNA, 120 bp, Artificial Sequence
  ENSG00000113327_38 (sequence is synthesized)
aagttgggatcccagctttactatttaccagttgttagacaattgtcaattcagactttagaatcctccattaaaaataatttatgtatttgtttatttgtttagagatggggtgtccct

SEQ ID NO: 195903 - DNA, 120 bp, Artificial Sequence
  ENSG00000113327_39 (sequence is synthesized)
tttagagatggggtgtccctctgtcactcagtctgaagtatagtggcacagtcatagctcactgaagcctcaaacttctgagctaaagcattcctcctgcctcagcctcctgaatagctg

SEQ ID NO: 195904 - DNA, 120 bp, Artificial Sequence
  ENSG00000113327_40 (sequence is synthesized)
catgcccagctagaagtctccattttagcagctataaattagatataccaatgctaacctatgtagtgacactcaacaaatggtcaaaagctctctccctcacttccgatgccttccatg

SEQ ID NO: 195905 - DNA, 120 bp, Artificial Sequence
  ENSG00000113327_41 (sequence is synthesized)
cactgctgtcatgctcccttcatcctatcaaactagcttccctaatagaatccagcattaggcatataagcctttaagtgactctacatcactctatttttatttttaggaaatatttgc

SEQ ID NO: 195906 - DNA, 120 bp, Artificial Sequence
  ENSG00000113327_42 (sequence is synthesized)
attgcaagtcttttaaactatatgtgggaaatttctgtctcattggaaaaaaacttacacattacattagttatttttaaggccaaagaactgttatttgtaccctcaaaatttacaaac

SEQ ID NO: 195907 - DNA, 120 bp, Artificial Sequence
  ENSG00000113327_43 (sequence is synthesized)
atacaaagttgattagccctactccagagacaatgtcatgttttcttgaactcttttgaaattctcccaggaatataatattatcttcacaacacagctgccctaaccatccttggcccc

SEQ ID NO: 195908 - DNA, 120 bp, Artificial Sequence
  ENSG00000113327_44 (sequence is synthesized)
attctcttggcccctcatatcttcctgcatctaatttaatcatctatttctcaccttccaaacctataaaaatatagttttcacttagatgttgtctgctgtctaactcaatgccctgaa

SEQ ID NO: 195909 - DNA, 120 bp, Artificial Sequence
  ENSG00000113327_45 (sequence is synthesized)
ctttagctgaattcatatctttatatggccttcattccttgcattaagtctcaatattattctgactagtagcaaaaatttttgtctgcaatgaaggtcaaattaagttaacaaaatgat

SEQ ID NO: 195910 - DNA, 120 bp, Artificial Sequence
  ENSG00000113327_46 (sequence is synthesized)
gtggtcttcagggattatgtcaaaaattgctatctctatgctttgtcactatgaatctttgtcaaaggtgtagaatatgggggaatgacgtagaccaagagctcggctatgttttctagt

SEQ ID NO: 195911 - DNA, 120 bp, Artificial Sequence
  ENSG00000113327_47 (sequence is synthesized)
gctcagtgaactgccaaaggtcacacagctagttaatgacagatcagggggtcatctaagcattgctctttccactgtgtctcacagtatttcagaatttagaagtaaaattctggaata

SEQ ID NO: 195912 - DNA, 120 bp, Artificial Sequence
  ENSG00000113327_48 (sequence is synthesized)
gacaggaatttgagaatacctagtaacagagggaagtcaatgggttttgtatttattttattccttctcatgtgaaatgaccaattgatatttaatattacccatactgctttcagaatg

SEQ ID NO: 195913 - DNA, 120 bp, Artificial Sequence
  ENSG00000113327_49 (sequence is synthesized)
ctgtttcaaagaaacatctaaacaactccagacctagagttagcctttgtcctttgggatatgtggcagtagacaaccaaaaagtttccatggctaggatctgcaggctcattctttcta

SEQ ID NO: 195914 - DNA, 120 bp, Artificial Sequence
  ENSG00000113327_50 (sequence is synthesized)
ctatttaagcaaagtggtggggaatgacctaactattatgattctttctaaggttacagattataagccaattgcaaaatccagttgtaactttcttttgccacattttggataataaag

SEQ ID NO: 195915 - DNA, 120 bp, Artificial Sequence
  ENSG00000113327_51 (sequence is synthesized)
aaatagtttcctctaattatggtttgtgtaactaattggaaaagcagaggctcttgctccagattaactaggttcaaatatcagccctgtcaacttttgtctgccttagttttctcacct

SEQ ID NO: 195916 - DNA, 120 bp, Artificial Sequence
  ENSG00000113327_52 (sequence is synthesized)
gaaaaatggagataatattggtgtgtatctcagactttattataaggagaaacttagttaataccaaagaattactggatgctagtaattttcctcagtaaggatataaagtttcagaaa

SEQ ID NO: 195917 - DNA, 120 bp, Artificial Sequence
  ENSG00000113327_53 (sequence is synthesized)
atacagggtacaagaaccatatctactttgcttaaaaatattgatcatcatttgtgaggactctcttttctcataaaaaaaaaagtcactggaccggggatagaaatttcatttaacatc

SEQ ID NO: 195918 - DNA, 120 bp, Artificial Sequence
  ENSG00000113327_54 (sequence is synthesized)
tggggatttccaaatattcctatcttgatgatattcagtttcttacgtaaacaagggaatttggcccctttttctccagcagatttttattcgatcacttctctgctatttgctatggcc

SEQ ID NO: 195919 - DNA, 120 bp, Artificial Sequence
  ENSG00000113327_55 (sequence is synthesized)
tgatgtgattgattaccatctaacattctgactctattaaactctgtcttatctccatacaggtatcttggctcatttatcttatttccaccctgagacttctctaaaaaagcacaattt

SEQ ID NO: 195920 - DNA, 120 bp, Artificial Sequence
  ENSG00000113327_56 (sequence is synthesized)
tcctagaatgtcgtcctctgctcaacagattcaacagtctctaattaaagactctacctggtctgtaaggtcttcccagtttcactaaagttcaatatgctattttcttttatctcttcc

SEQ ID NO: 195921 - DNA, 120 bp, Artificial Sequence
  ENSG00000113327_57 (sequence is synthesized)
agttcttgatgtgacttttgaatggcctaatcctaatgtttatcttagctaaatacttacattcatccaatcctctttgtaaacaaacattaaatgtacaatgctgtgacaagaatatat

SEQ ID NO: 195922 - DNA, 120 bp, Artificial Sequence
  ENSG00000113327_58 (sequence is synthesized)
tataaataattcactatcaattggcatcttaaatcaggttgtttatcttctatctccatgctctataaatttgcctcgcagtttttttttttctgagacttgtgtgttttatgggtgtgg

SEQ ID NO: 195923 - DNA, 120 bp, Artificial Sequence
  ENSG00000113327_59 (sequence is synthesized)
aattaagttcctcatcaaataggttttaattaagcatctatacattcagcttaatataaagttttcagtaaattcatgccatgggcctaatatagggccctgtgagtgcaggaagaggta

SEQ ID NO: 195924 - DNA, 120 bp, Artificial Sequence
  ENSG00000113327_60 (sequence is synthesized)
aatttcaggtatgctttgccctgaaatgcccataatatgatagaggagtcagaaaagaatacaaataactctaatggagctgcacacaagtagttgtagatagaataagtcatattctaa

SEQ ID NO: 195925 - DNA, 120 bp, Artificial Sequence
  ENSG00000113327_61 (sequence is synthesized)
ctgtgagtgaagtcagaaaagggtttctctgtataaaaagcattcctctacatgtaaggaggtcccatcactgctcaaaatccccctttctgtaattactaataaaaatcctatagacta

SEQ ID NO: 195926 - DNA, 120 bp, Artificial Sequence
  ENSG00000113327_62 (sequence is synthesized)
tttgaaaactatgtacatgtacataacaatattgttcttaatccattagcaagagttagtcactaaaatagtatttatctttctatttttgttttcctccatatgtatttacagctgagg

SEQ ID NO: 195927 - DNA, 120 bp, Artificial Sequence
  ENSG00000113327_63 (sequence is synthesized)
gttttttccccacatatatttaaacacacggattagacaggtgaatagaagtatagatatggacatacatctgctttgaagtctcatttttccacactattatatatgtgtgtgtgagta

SEQ ID NO: 195928 - DNA, 120 bp, Artificial Sequence
  ENSG00000113327_64 (sequence is synthesized)
tatttaacataacattttctggctttccattattatatcacaggactgtgtcataatttatttagtcaatcctttatttctgaaaatttgcattatttcttatttttgttgctgtaagta

SEQ ID NO: 195929 - DNA, 120 bp, Artificial Sequence
  ENSG00000113327_65 (sequence is synthesized)
atattacaaaactgtttttgttgctataagtaatattacaaaaatatttttgtcacaggcatatatatatattcctctattttcatagaatatatccctaaaacatgagctttgctgaat

SEQ ID NO: 195930 - DNA, 120 bp, Artificial Sequence
  ENSG00000113327_66 (sequence is synthesized)
taaaatgtataagcatttaacaattagagtcctgacagaaaacaaatggtatactccaaggagtaattgaagaaaaattaatgaagggttacttacaaagattaggcaaggttaaagtct

SEQ ID NO: 195931 - DNA, 120 bp, Artificial Sequence
  ENSG00000113327_67 (sequence is synthesized)
accaattataggatggtttagtacaacaggtctagcagttgtcaactgaactagttacctatatccgttgtacaaatttcaatgaactcagtgacttagaacaacaaaaattcattatca

SEQ ID NO: 195932 - DNA, 120 bp, Artificial Sequence
  ENSG00000113327_68 (sequence is synthesized)
taattaatttcagaaggtcagaaatttcagtggctgaagtcaagatgtgagcaaggctgcattccttctgaaggatctaggggagaattaatttcttgacttttccatgttctagagtcc

SEQ ID NO: 195933 - DNA, 120 bp, Artificial Sequence
  ENSG00000113327_69 (sequence is synthesized)
tcttgaattccttggcttgtggctcatgttcacctttaaagcaagcaactgcatcactcagtccctttccttcatctttcctctggctctgacctcaagcctcctacttacaaagaccct

SEQ ID NO: 195934 - DNA, 120 bp, Artificial Sequence
  ENSG00000113327_70 (sequence is synthesized)
tgagattacattggacccacccaaataatccaagatgatcttgtcttcagatccttaaccatgcctgcaaactcccttttaccacgtaagatatatgtacagtttgcagggattcgaaca

SEQ ID NO: 195935 - DNA, 120 bp, Artificial Sequence
  ENSG00000113327_71 (sequence is synthesized)
aggacatttttggggacctattattttgcctaccacactaccttagtcattaaagtacaaaaggaagggacagttacaggacctagaaagagctgtagaacaggagccgtgactttaaac

SEQ ID NO: 195936 - DNA, 120 bp, Artificial Sequence
  ENSG00000113327_72 (sequence is synthesized)
taatacaaccactgcccaacagcggccagtcaaggagggagagtaggaataagtaatcagaattctctcttctcctacctaaagtatatctaattggtcaaagcaaatggaaactagtgg

SEQ ID NO: 195937 - DNA, 120 bp, Artificial Sequence
  ENSG00000113327_73 (sequence is synthesized)
acagggaaatgcagatagggtgggccagaggtcagccttatggggcacaccatgtggtgaagaactctgaagaatggatccagagaaatgactggaaattatccagaaaacctctccaaa

SEQ ID NO: 195938 - DNA, 120 bp, Artificial Sequence
  ENSG00000113327_74 (sequence is synthesized)
aatcagcataagtggtacaaaagaaagcttctttacttgtaccctacttaacataaatttctgaaataaagaagaaatttagggttttcaaatagatttctatgccatggaaaaagtagt

SEQ ID NO: 195939 - DNA, 120 bp, Artificial Sequence
  ENSG00000113327_75 (sequence is synthesized)
ctttaaaagttattacactggaatattacagatccatatattttatattgggtaatctgttcaacctgaagaacttttcaataggctttaaagctataaagcaaatgcctttatacaaca

SEQ ID NO: 195940 - DNA, 120 bp, Artificial Sequence
  ENSG00000113327_76 (sequence is synthesized)
ctttctgggagttaatgtgggttaatagacatgcccttctggtgagtcctgtggcaagggtgccaattcagtcagtgatttgcaggccacagcaccctcgagctattttcacgaagggtg

SEQ ID NO: 195941 - DNA, 120 bp, Artificial Sequence
  ENSG00000113327_77 (sequence is synthesized)
gaccttctgagccaatatttctcatctgttattgcagaacttaaaaagggacagggcttctgagtcactgagagcccaagggtacaattctatactgggttcaaggctgaaaatagcaaa

SEQ ID NO: 195942 - DNA, 120 bp, Artificial Sequence
  ENSG00000113327_78 (sequence is synthesized)
accacagatctatttctgtaaacacaatgactgtaaggacaactacaacttaatttggacaacttaaactaaagtgactaaagcaaaccatttggaaaacagactagcttagtactgaca

SEQ ID NO: 195943 - DNA, 120 bp, Artificial Sequence
  ENSG00000113327_79 (sequence is synthesized)
ctctgaacacagcctcttatagtgtacaagactatgactttctcattgacagccttcccatcctcttaaagtcatgggggaaactgagtccttattagggctagattgtgaaccctgttg

SEQ ID NO: 195944 - DNA, 120 bp, Artificial Sequence
  ENSG00000113327_80 (sequence is synthesized)
aacaaaaaagaaggacaattttacacggcacttaaatttagctattctcttctaaacctccattgattctgcatctcccctttcattctttcaatctcttttttttcttcaaaaagactt

SEQ ID NO: 195945 - DNA, 120 bp, Artificial Sequence
  ENSG00000113327_81 (sequence is synthesized)
gatgtcactgtgaagcaatgaagatgtgattcaattcaataagtatgttgagtgcctaccatatgccaagaactgccctatgcattggagatatcttggtaaaaattaatggctcaggcc

SEQ ID NO: 195946 - DNA, 120 bp, Artificial Sequence
  ENSG00000113327_82 (sequence is synthesized)
ctatccttacagaatttacaatataatgcaaaaagaggtgagaaatgtgaaattcagtgggtggttagtattattaatgcagaggtaaacatctgatcacaaaagcctcacccttcccca

SEQ ID NO: 195947 - DNA, 120 bp, Artificial Sequence
  ENSG00000113327_83 (sequence is synthesized)
aattctgtatatataaatgtatggggtaggcttaagctgatattcttcaattaacattaatagatttatttcttagatatagaaaataaacctataaagtagtggatcgtggggtttctt

SEQ ID NO: 195948 - DNA, 120 bp, Artificial Sequence
  ENSG00000113327_84 (sequence is synthesized)
taggataatacttttttcatttttaaaaattgctagtatctgctagaggattgaatcaggttttttttcattataaatgtcttttcaggtatgtatatgaaattacacaggcaacatgta

SEQ ID NO: 195949 - DNA, 120 bp, Artificial Sequence
  ENSG00000113327_85 (sequence is synthesized)
tttcttttgaaaacacattggttttcaggcatagtgatcttttaccaagggactaaacgatagagaatcttaaagtgctctcagtggtgttttatattaaatagttgacttccctagttt

SEQ ID NO: 195950 - DNA, 120 bp, Artificial Sequence
  ENSG00000113327_86 (sequence is synthesized)
ggcattgtggaattagtaccaattattaaagtaataaattcttgctgctaccatgaaagttggggctttcaaacttgtattgatctatgataagcaataattgtacattttaagctaata

SEQ ID NO: 195951 - DNA, 120 bp, Artificial Sequence
  ENSG00000113327_87 (sequence is synthesized)
tacatgcaccatgcatatccatgcatttgcaatatacatacttgatgcaacatttcttgtaaagctatagcttctcaaagtgagggccaaagtttacacttctaaatctttattgcctaa

SEQ ID NO: 195952 - DNA, 120 bp, Artificial Sequence
  ENSG00000113327_88 (sequence is synthesized)
cacagtgcctgacccataatagccacttgagagatgaagtttttaaaatacagtttgtcaaatggatgctgctggactattatttgtaaagtttttatttaaaatacccattctattttt

SEQ ID NO: 195953 - DNA, 73 bp, Artificial Sequence
  ENSG00000113327_89 (sequence is synthesized)
atatcacaacattctaaagcatcctttcacaaatcttcccccagaagagtaccattaacttgatgaacataat

SEQ ID NO: 195954 - DNA, 120 bp, Artificial Sequence
  ENSG00000113327_90 (sequence is synthesized)
tcttcccccagaagagtaccattaacttgatgaacataatcaaaagtaatcctcagatgttaatgtgagagtatcatcaaaggcagtatctactgaaaatccccatgaaatttaagacaa

SEQ ID NO: 195955 - DNA, 120 bp, Artificial Sequence
  ENSG00000113327_91 (sequence is synthesized)
cttactgagatttgttatttagcaattaactatcaatggtaaccaatcaactcaattagttgtggggacaaacaagaaacatatttccttaaatgagattttgccaggtaaaattctaac

SEQ ID NO: 195956 - DNA, 120 bp, Artificial Sequence
  ENSG00000113327_92 (sequence is synthesized)
aagggtcaagactaaaattactttctttcttgataaaaatatggtttggatgtttgttctctacaaatctcatgtggaaatgtgaaccccagtgttggatatggggcctggtaggagact

SEQ ID NO: 195957 - DNA, 120 bp, Artificial Sequence
  ENSG00000113327_93 (sequence is synthesized)
attggatcataaggcaaatgtctcatgaatgctttagcaccatcctcctaatggtaagtgagttctcgctcagctacttcacaaaatatctggttgttgtaaagattctgggacttcctc

SEQ ID NO: 195958 - DNA, 120 bp, Artificial Sequence
  ENSG00000113327_94 (sequence is synthesized)
cttctgtatcttgctccatttctcatcatgtggcgtgctgctcctgcttcaccttcttctatgagtgaaagctccctgaggcctcaccagaagccaagcagatatcagcaccatgcttcc

SEQ ID NO: 195959 - DNA, 80 bp, Artificial Sequence
  ENSG00000113327_95 (sequence is synthesized)
cttcatatggactaatacaacaagttagcaattattcgtaattgtcttaacatctttaagccctcactgaacccaatttg

SEQ ID NO: 195960 - DNA, 120 bp, Artificial Sequence
  ENSG00000113327_96 (sequence is synthesized)
attgtcttaacatctttaagccctcactgaacccaatttggaaagtttattgtaattttttgcataatgtcttaatacttaatccaaggtagaaaaataaaaggatgataattttctggt

SEQ ID NO: 195961 - DNA, 120 bp, Artificial Sequence
  ENSG00000113327_97 (sequence is synthesized)
attccttctccatttgtatcctccctcacctacagtctttctgattgccatgttaattaattgaaagaagcataacaaatttcaaagttgtattaagttatgttactgacttcgatgatt

SEQ ID NO: 195962 - DNA, 120 bp, Artificial Sequence
  ENSG00000113327_98 (sequence is synthesized)
ttgaccatctctttcatcttaatcccagcttgctccgattagggtgattcctgcaaaagaagggctgattttattaagaattacaataggtttccttgagttgcaaacttttaatatatt

SEQ ID NO: 195963 - DNA, 120 bp, Artificial Sequence
  ENSG00000113327_99 (sequence is synthesized)
ggttgcatagagccttttttttttttgtaagggattgtaaagccaaccctggactcaatagaaaaggtgcaatctttaattatatatcctcttcctttctctcctatgggcctaggaagg

SEQ ID NO: 195964 - DNA, 120 bp, Artificial Sequence
  ENSG00000113327_100 (sequence is synthesized)
gactatagcagcacattgctagttaaggcctgccccacaggacaattatttcattgataaaatatatgtgaactactacttgacacacataagatcaaatataaaaccattatttttaca

SEQ ID NO: 195965 - DNA, 120 bp, Artificial Sequence
  ENSG00000113327_101 (sequence is synthesized)
tttattatttttatcagatagataatagaatgtagcaagaggatccatgatgatctaacacagattatgctttagtaacctttacaaatatttcctgcctgaatcaaagccaagcaaacc

SEQ ID NO: 195966 - DNA, 120 bp, Artificial Sequence
  ENSG00000113327_102 (sequence is synthesized)
taaatttcccaaaacattttccttactatttgttcagcatccatgaaaggtcaattgcttcttttacattttttgtctgccagttgtacatattggacagaataaaaatctgattataga

SEQ ID NO: 195967 - DNA, 120 bp, Artificial Sequence
  ENSG00000113327_103 (sequence is synthesized)
ttttaaaagtatgtttgtagaaatgtaatttctcaaccagggagtccaccaagtcatagtaatcacagtttgaaaaacgttgatgatcagagaagtaatcacctgtttatcacttcatca

SEQ ID NO: 195968 - DNA, 120 bp, Artificial Sequence
  ENSG00000113327_104 (sequence is synthesized)
ataccagaggaaaccagaggaaaaatatcactggacatcatatttacctagaaaaattctcattataaaacttatttcatgttttcctgaatccaagaatgaaatatatttaattataaa

SEQ ID NO: 195969 - DNA, 120 bp, Artificial Sequence
  ENSG00000113327_105 (sequence is synthesized)
gttaaagcttccctgtgctttagagagataagccttcctttcttttaatactccaattgggactacttctttcttgcgtcagctaaaattcaagaactgttgatttctctgccatcaggt

SEQ ID NO: 195970 - DNA, 120 bp, Artificial Sequence
  ENSG00000113327_106 (sequence is synthesized)
ggccagttgaaaatgatcctctgaacccaaacacaatttaatattactcattgctatcagaataattcagtcaccagcacattctctgcctcatatcatcatttttgttgttgttgttgt

SEQ ID NO: 195971 - DNA, 120 bp, Artificial Sequence
  ENSG00000113327_107 (sequence is synthesized)
tgttttgttttgttttgttttggacagggtctcgttctattgcccaggctggaatgtgcagtggtgtgatctcggctcactacagccttcgcttctggggctcaactgatcctcccacct

SEQ ID NO: 195972 - DNA, 120 bp, Artificial Sequence
  ENSG00000113327_108 (sequence is synthesized)
tggcctccagagtagctgggatttcaggcacgcaccaccatacccagctaatttctgtattttttgtagagatggggcgtcgccatgttgcccaagctggatattatcactgttttcctc

SEQ ID NO: 195973 - DNA, 120 bp, Artificial Sequence
  ENSG00000113327_109 (sequence is synthesized)
aattttcatcacatactatcatatctctctccatcccctccatcccttctagggactctctcttttttttcctccctctttaattaatataaacatataatagataaagctgcatcaaaa

SEQ ID NO: 195974 - DNA, 120 bp, Artificial Sequence
  ENSG00000113327_110 (sequence is synthesized)
ggaacagaaagggggaactatgtgggattttattccaagtactcaatcagtgttcataatcaaactaatctttacatggcattattatttattatcacataataattagtattattagta

SEQ ID NO: 195975 - DNA, 120 bp, Artificial Sequence
  ENSG00000113327_111 (sequence is synthesized)
gacaaactgttaaaatgatttctgatttttatttattttcttgaaaaagttaattctgcagttgacttcataataatgtttatccattcaacaaatatacattgaccatcaattctgtga

SEQ ID NO: 195976 - DNA, 120 bp, Artificial Sequence
  ENSG00000113327_112 (sequence is synthesized)
gataagtactattatcctccctataagaggacaaacaatttaggaggaaaaatatacacttgtccagggtagaatggctgggaaatggtactcataaccactactttatctcacctcccc

SEQ ID NO: 195977 - DNA, 120 bp, Artificial Sequence
  ENSG00000113327_113 (sequence is synthesized)
agtgtgatgtcttcaatgaatactctctgttctattagtacaagctcattgatatcttcctcttagcatttctacttactactgctttgaattgtgtatttctgtgtatattaaaatgga

SEQ ID NO: 195978 - DNA, 120 bp, Artificial Sequence
  ENSG00000113327_114 (sequence is synthesized)
gtcccaacaaattgagaaagaaagataataaataatttaggttacgttttccaactatcttccacttcaaatgcattctttggagaagttttgagtctgtactgtcttattattttctgt

SEQ ID NO: 195979 - DNA, 120 bp, Artificial Sequence
  ENSG00000113327_115 (sequence is synthesized)
ttctatgtgactcaaaatcttgctctgttaactgcctttcactgtgatacaagactttgtatttctactatttattatagactggtcacttggtatgcactattccagatgatgtaaagt

SEQ ID NO: 195980 - DNA, 120 bp, Artificial Sequence
  ENSG00000113327_116 (sequence is synthesized)
atgcatatggcatatataaaatcacatgtagtataccttctatgtcatttaaattattttcaagagtaaatttgacctttggatttttgaatctaacttcccattaggatgcaaagtcat

SEQ ID NO: 195981 - DNA, 120 bp, Artificial Sequence
  ENSG00000113327_117 (sequence is synthesized)
tgcaatttatgttctcattgcaatgccctttggtccaagatcctcatttagcttgtaactatctttctcagtctttacctcagtgtcatgttcatagaagatggttgctacatatgctaa

SEQ ID NO: 195982 - DNA, 120 bp, Artificial Sequence
  ENSG00000113327_118 (sequence is synthesized)
attagcctatctgcaggctaaggctcagcagtttgggctccaagatgaaaacagcatgtatgagtttagccaggccataacgattcatttacagtcattagttacttgagagagactcaa

SEQ ID NO: 195983 - DNA, 120 bp, Artificial Sequence
  ENSG00000113327_119 (sequence is synthesized)
gtctgtttctattttctgtgtcagagttcttatgcaaatataattacctgctctctttattttgtggagactaaagccatttttgagaaatgtgaccttcttcttgttgctattattcca

SEQ ID NO: 195984 - DNA, 68 bp, Artificial Sequence
  ENSG00000113327_120 (sequence is synthesized)
ttttgagaaatgtgaccttcttcttgttgctattattccaggtttcactgattttttgagatggagtg

SEQ ID NO: 195985 - DNA, 120 bp, Artificial Sequence
  ENSG00000113327_121 (sequence is synthesized)
ttaaattaaaacttccatctcaggcattccactaggaagctataaggtccttgaagtttcaaggctgactacatttttgcaaatgatttagtgtgtgtatggaggtggaatgtgggtatt

SEQ ID NO: 195986 - DNA, 120 bp, Artificial Sequence
  ENSG00000113327_122 (sequence is synthesized)
gtcaccagataatttctattgatttcattctcgaaatgtatctttttgtttttaaaacaaatgatttactattatatgggcaagttagttagcctccttgtgtgttttatatatatatat

SEQ ID NO: 195987 - DNA, 120 bp, Artificial Sequence
  ENSG00000113327_123 (sequence is synthesized)
gtagtgtattatttaaaaacacttgtcttatggggctcctatgagaaataaatgtggcaatgaagggcaaaacaaaaaatcccaaaatattacatagtactctacacatgaatgtactta

SEQ ID NO: 195988 - DNA, 120 bp, Artificial Sequence
  ENSG00000113327_124 (sequence is synthesized)
acattagtagttggtgatgatagttgattttgatgatttatacagtttccagcctggattgacttcagtgccacaatttgaaaacagggaggatgacttctacttgcaaccaaactttaa

SEQ ID NO: 195989 - DNA, 120 bp, Artificial Sequence
  ENSG00000113327_125 (sequence is synthesized)
atagtgaggatgaagcataaacacaaatgcctaaagcaactgttttttattgtgagtgttgaggagagcacatagttacccatttacacacctgaacaaagtggctggctcatagaaatc

SEQ ID NO: 195990 - DNA, 120 bp, Artificial Sequence
  ENSG00000113327_126 (sequence is synthesized)
cccatgaaagttaaggtccattcccttccaagatatgggcaaagagaatcacctgacaatcctggatcatggccttctgctttgagagccgtaataacgctctacctatccaacccagag

SEQ ID NO: 195991 - DNA, 120 bp, Artificial Sequence
  ENSG00000113327_127 (sequence is synthesized)
actttggaggttgaattgtaaggaaggaatttagctgattctaggttgtattctgatgcagctgcagaaacccaagtgaaatactacaagagtaatgtgtttatttgaatgtaagacttt

SEQ ID NO: 195992 - DNA, 120 bp, Artificial Sequence
  ENSG00000113327_128 (sequence is synthesized)
ggaacatggaaagaaagaaacatcattattcttgatttaaaaaatgctttctttaattgctcaaatatttacaatgctttatgcagtccttcccttccctgtctgttttgcctctctctg

SEQ ID NO: 195993 - DNA, 120 bp, Artificial Sequence
  ENSG00000113327_129 (sequence is synthesized)
actttccattttctctatccttgttttattttccttgttgtgttgtttttgtttgctccctcttgttcactttccatttcactctccctcaagaaggtggttctattgagagttggcata

SEQ ID NO: 195994 - DNA, 120 bp, Artificial Sequence
  ENSG00000113327_130 (sequence is synthesized)
ttacctgccagctataacaaggacatgaggactggctttcaaacaagttctgatgagtcctttggaaaaagccccttggccctctctgtcagctacgccattgcagagtagattttgttg

SEQ ID NO: 195995 - DNA, 120 bp, Artificial Sequence
  ENSG00000113327_131 (sequence is synthesized)
caaagatagaggcagattcccttattcagggtcatggaaatggcagaagaagaaaaggcagaggagaacaggataaaaatttgagaaaatgaaattacctgagaatttcatgcacttctt

SEQ ID NO: 195996 - DNA, 120 bp, Artificial Sequence
  ENSG00000113327_132 (sequence is synthesized)
tttaggcaattagatgattcatcagaactagcaagaaaataaactaggaatgagaagctgaaagtttattttcctgtttaatatgccttttggataattgtgtcaagactcacctattaa

SEQ ID NO: 195997 - DNA, 120 bp, Artificial Sequence
  ENSG00000113327_133 (sequence is synthesized)
gttatccgtgatgataattagaaaatagaatcatagtatttttaaacaggggaaccaggcaatagaaaacttccttgcaattgaacaactctggcttcttcagtcaagtaattgtagatt

SEQ ID NO: 195998 - DNA, 120 bp, Artificial Sequence
  ENSG00000113327_134 (sequence is synthesized)
aatttattaaaaatttcactagtaattacaaaattacacttaactttaagcaaatactttatcccaagctcagaactctccttctgtgtttataatttcagttcatttcacttactgtgt

SEQ ID NO: 195999 - DNA, 120 bp, Artificial Sequence
  ENSG00000113327_135 (sequence is synthesized)
tttcaaaatgtatttttaatttatcttgtctctctctttttttttcattttttttctcctttttattaaaaacaaatgcaattctcttttctgtctacaaacccaaagcttcttcggatg

SEQ ID NO: 196000 - DNA, 120 bp, Artificial Sequence
  ENSG00000113327_136 (sequence is synthesized)
gctaaatttaactattaatgcttacatggtgttttattttgttttatgagtagacatttaagcattctactagagataatatgttggagaaagttctacagacttctagagttgattcag

SEQ ID NO: 196001 - DNA, 120 bp, Artificial Sequence
  ENSG00000113327_137 (sequence is synthesized)
caactatacactaattcacataggttttaatcttacaccaagcccaaaagctataatccctgtgagatgtcataggtaaagaaggctgctttatccatcaaagccaaaatgagcttcctc

SEQ ID NO: 196002 - DNA, 120 bp, Artificial Sequence
  ENSG00000113327_138 (sequence is synthesized)
ttttcagatgaaaatgggattgagtcttactgattacgactaccaagtttgtactcttttaaaactaaaatttaactctgtaaatcttaattcaaaatgtattggttcattactgtttgt

SEQ ID NO: 196003 - DNA, 120 bp, Artificial Sequence
  ENSG00000113327_139 (sequence is synthesized)
aaacttaatgatttctgtttttctgaacactacctgtaagttctgtaagaacaatattctttttgaaaggctttgagttaaaatatccattccttatttccagagtgatccctgagcctt

SEQ ID NO: 196004 - DNA, 120 bp, Artificial Sequence
  ENSG00000113327_140 (sequence is synthesized)
ttggctctactataatgtgttgcaatgagatttctattcaaatataatagctgattctgagacgttagaatttctgtttagattatgctaaaatgaaatcatccaaattaacattaaata

SEQ ID NO: 196005 - DNA, 120 bp, Artificial Sequence
  ENSG00000113327_141 (sequence is synthesized)
tatcatttagttgcatagaaatttaccaactggtctagcaggaaatttgacaagtagtaaccttcttttctcaatttccattcacatgtaggtaaacattgttgacattcttaagcttat

SEQ ID NO: 196006 - DNA, 120 bp, Artificial Sequence
  ENSG00000113327_142 (sequence is synthesized)
agatggtgaatattagaaaaagaatcatagtcctttaaaacataagccataccattgtggtatacaatcaggaaaattctgtatttatatatattttaacattttctattaacatttaat

SEQ ID NO: 196007 - DNA, 120 bp, Artificial Sequence
  ENSG00000113327_143 (sequence is synthesized)
acatttgctcagagtaatgggttttctatttgcctataactaagcatgacacaatatttgatttcagaattgatgcatttttatttctctgttccactcacatgcagcaccatcaaatgc

SEQ ID NO: 196008 - DNA, 120 bp, Artificial Sequence
  ENSG00000113327_144 (sequence is synthesized)
cttttggtgttcaatctccttgctatagctattagcttgatgatattattttcagctgcactgcttaagctcaaaatttgaaatctgcaaatgtgctatctttctaagttcaattttacc

SEQ ID NO: 196009 - DNA, 120 bp, Artificial Sequence
  ENSG00000113327_145 (sequence is synthesized)
attgtagatcatgatgtcatagcaatttcctgagtacccattttcagattcatcatcacattggtgacattgtggaaaaacagcctaggatctctcgagaacaactaactgatccctctc

SEQ ID NO: 196010 - DNA, 120 bp, Artificial Sequence
  ENSG00000113327_146 (sequence is synthesized)
ctactcgactcctgtattttcacagaaaatgacggtgtggattctgctcctgctgtcgctctaccctggaagaaaactttcttcttacccacataaattgagatttgaaaatgaatgaag

SEQ ID NO: 196011 - DNA, 120 bp, Artificial Sequence
  ENSG00000113327_147 (sequence is synthesized)
atgatggtcgagtgctctacaccctaaggtattcttttgcaaaaggaaaggagtaattgttaggaagaaaacaaacaaacacaaaaatcaaccttaagtctctaaaagaaaaaaaaaaaa

SEQ ID NO: 196012 - DNA, 120 bp, Artificial Sequence
  ENSG00000113327_148 (sequence is synthesized)
ggaaataaatttcaagactgcatcagggttggcatgctatcaattagtatatgacatcaaaacattagttttttctttttgttatcaatgagctttttcaaagcactaattataggcaaa

SEQ ID NO: 196013 - DNA, 120 bp, Artificial Sequence
  ENSG00000113327_149 (sequence is synthesized)
gcttattttccacaactgctgtgaaaactattttttgtcacaactgacctgaaatttcctttgtcttgcaagatcatctgacctttgcacctacgctttgcactcttatgcttggcaata

SEQ ID NO: 196014 - DNA, 120 bp, Artificial Sequence
  ENSG00000113327_150 (sequence is synthesized)
tcttcatttccaaggaaatagttgctaaaagagaatttttgaggtgtatgtctccatacatccttctctttttagcttcacaatagcaggcacctagaatctattatctttcatctcctg

SEQ ID NO: 196015 - DNA, 120 bp, Artificial Sequence
  ENSG00000113327_151 (sequence is synthesized)
gcaccccacttcccattatgttaataggctatttaaattaatttgttgtctatcttgggaatagacatgggagaaagttgaaggagctatggttcagcctctgaaattaaattctgaaat

SEQ ID NO: 196016 - DNA, 120 bp, Artificial Sequence
  ENSG00000113327_152 (sequence is synthesized)
taaattgtgaaattagagtaaaatgctaccttaataaaataattattttatgccattaccttagcacttcatactttgcatttaaaacatttttacattgaattttctcattggtgggaa

SEQ ID NO: 196017 - DNA, 120 bp, Artificial Sequence
  ENSG00000113327_153 (sequence is synthesized)
tacattattagacagaataatagataagtacatagtcttacgaatcagacatccgactttggttcttagctctctctcttactatctgtaggaactagggcaacgctccagcatttctat

SEQ ID NO: 196018 - DNA, 120 bp, Artificial Sequence
  ENSG00000113327_154 (sequence is synthesized)
ataaagggacttaggggcagctatctggtagcaggacttttagtgttagaagctttgtttgcatagtaagcatgatgtttttacatggttatgtttttatttagaaaaattaagtgagaa

SEQ ID NO: 196019 - DNA, 120 bp, Artificial Sequence
  ENSG00000113327_155 (sequence is synthesized)
tgacatcacaactgagcaaactcttttacctttcatttctttaatttctataaaacagatatagttcttctgaccttacggagttgctataaggacaaaatagggtgataagtaaagtga

SEQ ID NO: 196020 - DNA, 120 bp, Artificial Sequence
  ENSG00000113327_156 (sequence is synthesized)
tattaaaattatttatacattttcaatcaaaataagaataatgcaattctaaatcttcatatcaaatgattcatgttaaatgtgcttgctcaacatacaaaatataatacttgaataggc

SEQ ID NO: 196021 - DNA, 120 bp, Artificial Sequence
  ENSG00000113327_157 (sequence is synthesized)
cttgctcaacatacaaaatataatacttgaataggctccaaaatctttattaattatatcagttattagaaaaagccacaattccaaaataaattcattccaggcattttatatttatca

SEQ ID NO: 196022 - DNA, 77 bp, Artificial Sequence
  ENSG00000113327_158 (sequence is synthesized)
attccaaaataaattcattccaggcattttatatttatcatggcttttgtaaacttagagatatagtaatgactgag

SEQ ID NO: 196023 - DNA, 77 bp, Artificial Sequence
  ENSG00000113327_159 (sequence is synthesized)
tacaccctgctaagaatttttttgtatttttttgtagagatagtcttactatgttgcccatgtggtcttgaactcct

SEQ ID NO: 196024 - DNA, 120 bp, Artificial Sequence
  ENSG00000113327_160 (sequence is synthesized)
agatagtcttactatgttgcccatgtggtcttgaactcctaggttcaagcggtcctcaactcagcctcccaaagtctggggattataggcgacagccatggcatctggccaatgcctgaa

SEQ ID NO: 196025 - DNA, 120 bp, Artificial Sequence
  ENSG00000113327_161 (sequence is synthesized)
tgtagaatctagtgggtacaaaattcgcctgatacatcagagctcagtccagcttttgaaatatgaagccaatcatactatctcaagtgtctttattgttcttataacattgtagtcatt

SEQ ID NO: 196026 - DNA, 120 bp, Artificial Sequence
  ENSG00000113327_162 (sequence is synthesized)
ttgggacttaatttatggaatcattacattagttagttatgaaagccacctcaaaagtgtcactaatggagattcaatcaaagcttgaatggttaccagtctacatagagagatgatttt

SEQ ID NO: 196027 - DNA, 120 bp, Artificial Sequence
  ENSG00000113327_163 (sequence is synthesized)
gttctggctatctaaaatgagctatgagtgtgtttgtgtgtttttgtgcatgcccaaagacatttagatctgtatctatgtttgtatctgcaattatattattttcaattttaataattc

SEQ ID NO: 196028 - DNA, 120 bp, Artificial Sequence
  ENSG00000113327_164 (sequence is synthesized)
attccagtttaatttggagtaataatactaataaaatatcaagtttaattgtagcttcctttatgaataaaactattcttccctttgaagagcatataaatatatagtaacaatgattaa

SEQ ID NO: 196029 - DNA, 120 bp, Artificial Sequence
  ENSG00000113327_165 (sequence is synthesized)
tccagctttgaaggtagataatcttgggtccaaatttcaactgtgcctcttgttatgtgactttggacaagttcaggtacaataaatgcataataatacttattaaatgaggaagcaatt

SEQ ID NO: 196030 - DNA, 120 bp, Artificial Sequence
  ENSG00000113327_166 (sequence is synthesized)
cactctacccagtgcttcatagttaattaaggtctcaataattattagatatattttaacatcagtaattgctccgttatatcatagaatgatagattcttaattctgttcaattaaaaa

SEQ ID NO: 196031 - DNA, 78 bp, Artificial Sequence
  ENSG00000113327_167 (sequence is synthesized)
agagagagagagagagaaagaaagaaggaaagaaagaaagagaagagaagagaaaaggaaaggttgtcattcactatt

SEQ ID NO: 196032 - DNA, 120 bp, Artificial Sequence
  ENSG00000113327_168 (sequence is synthesized)
actactactcgggaaactgaggcacaatcgcttgagccctggagttccaagccgtagtgggcaatgattgtgcctaagaatagccactgtgctccagcctggaaaacatagcaagacaaa

SEQ ID NO: 196033 - DNA, 120 bp, Artificial Sequence
  ENSG00000113327_169 (sequence is synthesized)
agacaaaattgcacctgtttaatgttttaatgtcctgtattatgggcaaaaagagggattttatttgcaagtaataatttgaacagggttgagtgatgttcttggcagatggcacatcct

SEQ ID NO: 196034 - DNA, 120 bp, Artificial Sequence
  ENSG00000113327_170 (sequence is synthesized)
taggtgagacacctttgtttatgttgcagtttctcaagataagtaccaaatacaagtaatttttatgtccatttctatgttgatctgctttaaatttagcctgcaattgcatagaaatac

SEQ ID NO: 196035 - DNA, 73 bp, Artificial Sequence
  ENSG00000113327_171 (sequence is synthesized)
tgatctgctttaaatttagcctgcaattgcatagaaataccatttgtttcatattcaagagaactggcatttt

SEQ ID NO: 196036 - DNA, 120 bp, Artificial Sequence
  ENSG00000113327_172 (sequence is synthesized)
gaggtttgttaaagtcttttgcgttgtgctatagataggagcacataaacatgtctactttaatagataaaacatcagtgtagttcaagagcaaggaagatttaaattatacttttttat

SEQ ID NO: 196037 - DNA, 120 bp, Artificial Sequence
  ENSG00000113327_173 (sequence is synthesized)
aaaatgaagaaatattattttcaagtgaagcttgagagctagagttagaaattcacatattgctagatatctcagatagaagctgtaggaaaaaaaaaacaatgacccctttatgaagca

SEQ ID NO: 196038 - DNA, 120 bp, Artificial Sequence
  ENSG00000113327_174 (sequence is synthesized)
acataaacaaatcaaacaagacaataacagtaaagagaggatatattgtttgcctgtttttgtgtaacaaacaaccagaaaatctcaatgacatatgacagtaaacatgtatataatact

SEQ ID NO: 196039 - DNA, 120 bp, Artificial Sequence
  ENSG00000113327_175 (sequence is synthesized)
cccctcagagatatactaatctatgctaaagcaagctggagctgcttatttagggcaactgtactttacgtgttcctcgttctactcttgggaccagcaggtagctaggacaacccttct

SEQ ID NO: 196040 - DNA, 120 bp, Artificial Sequence
  ENSG00000113327_176 (sequence is synthesized)
cacagtggtagaaaacagccagagagtaagtagaagctcatgaggctgaatgcttaggcctagcactggcacactcgcttttgtatatatattattagccgaagccaatcagatgatcca

SEQ ID NO: 196041 - DNA, 120 bp, Artificial Sequence
  ENSG00000113327_177 (sequence is synthesized)
gcccaaagtcgagaggcagaggaatagccttatccaggagaaggcaaggatgtgaatgccggttatagagaattcagtccaccacagtgagttaggacatgacactttcaaggaaaaaaa

SEQ ID NO: 196042 - DNA, 120 bp, Artificial Sequence
  ENSG00000113328_0 (sequence is synthesized)
cccttcggctccgagctgaccctgatcagggccgagttgtctcggcggcgctgccgaggcctccacccaggacagtccccctccccgggcctctctcctcttgcctacgagtcccctctc

SEQ ID NO: 196043 - DNA, 120 bp, Artificial Sequence
  ENSG00000113328_1 (sequence is synthesized)
ctcgtaggcctctcggatctgatatcgtggggtgaggtgagcaggcccggggagggtggttaccgctgaggagctgcagtctctgtcaagatgatagaggtactgacaacaactgactct

SEQ ID NO: 196044 - DNA, 120 bp, Artificial Sequence
  ENSG00000113328_2 (sequence is synthesized)
cagaaactgctacaccagctgaatgccctgttggaacaggagtctagatgtcagccaaaggtctgtggtttgagactaattgagtctgcacacgataatggcctcagaatgactgcaaga

SEQ ID NO: 196045 - DNA, 120 bp, Artificial Sequence
  ENSG00000113328_3 (sequence is synthesized)
ctaagggactttgaagtaaaagatcttcttagtctaactcagttctttggctttgacacagagacattttctctagctgtgaatttactggacagattcctgtctaaaatgaaggtacag

SEQ ID NO: 196046 - DNA, 120 bp, Artificial Sequence
  ENSG00000113328_4 (sequence is synthesized)
cccaagcaccttgggtgtgttggactgagctgcttttatttggctgtaaaatcaatagaagaggaaaggaatgtcccattggcaactgacttgatccgaataagtcaatataggtttacg

SEQ ID NO: 196047 - DNA, 120 bp, Artificial Sequence
  ENSG00000113328_5 (sequence is synthesized)
gtttcagacttgatgagaatggaaaagattgtattggagaaggtgtgttggaaagtcaaagctactactgcctttcaatttctgcaactgtattattcactccttcaagagaacttgcca

SEQ ID NO: 196048 - DNA, 120 bp, Artificial Sequence
  ENSG00000113328_6 (sequence is synthesized)
cttgaaaggagaaatagcattaattttgaaagactagaagctcaactgaaggcatgtcattgcaggatcatattttctaaagcaaagccttctgtgttggcattgtctatcattgcatta

SEQ ID NO: 196049 - DNA, 120 bp, Artificial Sequence
  ENSG00000113328_7 (sequence is synthesized)
gagatccaagcacagaagtgtgtagagttaacagaaggaatagaatgtcttcagaaacattccaagataaatggcagagatctgaccttctggcaagagcttgtatccaaatgtttaact

SEQ ID NO: 196050 - DNA, 120 bp, Artificial Sequence
  ENSG00000113328_8 (sequence is synthesized)
gaatattcatcaaataagtgttccaaaccaaatgttcagaagttgaaatggattgtttctgggcgtactgcacggcaattgaagcatagctactacagaataactcaccttccaacaatt

SEQ ID NO: 196051 - DNA, 120 bp, Artificial Sequence
  ENSG00000113328_9 (sequence is synthesized)
cctgaaatggtcccttaactggattattacagcaccaaaaaacttctctgaagcctttctccacaaccttgttctatggattccataatgttacaatggatttaagctatgaagcctcaa

SEQ ID NO: 196052 - DNA, 120 bp, Artificial Sequence
  ENSG00000113328_10 (sequence is synthesized)
cctaatattatgctgtagtggaattatgtttagatttgaattcatctgtgaagcattcaaatcaaagctaaaagcctaaatgtgaaatgctaatgacaagcctgagaaggtaaactgtga

SEQ ID NO: 196053 - DNA, 120 bp, Artificial Sequence
  ENSG00000113328_11 (sequence is synthesized)
atcttcatttctatcattgatctaactttagatattggatcaatatatttaggtggtattgaaaatgctattggaggagtcacactaatactatcaactatcagtcttcccacagcttca

SEQ ID NO: 196054 - DNA, 120 bp, Artificial Sequence
  ENSG00000113328_12 (sequence is synthesized)
atcactgtcattattctaatcctactcctacttaaattttaagttatgaggtttatgtcaaaagcaacatttcacaaatgtacttttaaggcataataagggttaacattctaggcagta

SEQ ID NO: 196055 - DNA, 120 bp, Artificial Sequence
  ENSG00000113328_13 (sequence is synthesized)
taaacacaccccataatgcaagtaataggtaatctagagatgtggactttattgctatatgggaattacatttaaatttgagggcattttatataaagaaaaatacagacctataaagtt

SEQ ID NO: 196056 - DNA, 120 bp, Artificial Sequence
  ENSG00000113328_14 (sequence is synthesized)
tggcatattcattaagttatcttttaatatttttttctagaaaacaggtgacatttgtatctacgataaaaatttttatacagaacctactgcctcaaactgaatcccatcaagaaaact

SEQ ID NO: 196057 - DNA, 120 bp, Artificial Sequence
  ENSG00000113328_15 (sequence is synthesized)
agtttctattgtattagtaactcaaaataaattatcacttcgaaaacttgctttcccacactaaggtaagttcagactagattgaacactccagaattttttactacagactgtttttaa

SEQ ID NO: 196058 - DNA, 120 bp, Artificial Sequence
  ENSG00000113328_16 (sequence is synthesized)
gttagaagtgatggcaattttataaatagagaatatacttccactgatgcccttactgtgccaaaacaaaaatcttaagaaaagcaagtagacaccttcataactatgaatgaagctgct

SEQ ID NO: 196059 - DNA, 120 bp, Artificial Sequence
  ENSG00000113328_17 (sequence is synthesized)
gaagtagtgtttaggatcctccatggcagttagtgaatgtaagaagtacagtgttaaagtgttgtaaacagttactcagtgcaatgtatagcctgagtctatccatgatggctatatcca

SEQ ID NO: 196060 - DNA, 120 bp, Artificial Sequence
  ENSG00000113328_18 (sequence is synthesized)
atttgacatcacgttatggatcagtacacaatgaaaaaccaaagaaccacagtatatcttattcttaacttttgtaaaccatgttttatgggtaactttttagttttcccaaaaggctga

SEQ ID NO: 196061 - DNA, 120 bp, Artificial Sequence
  ENSG00000113328_19 (sequence is synthesized)
taaatttcaatattttgaatacatcattgttaattttgagttggcagaggtaaactaaccaactaccattatgttttagtactaagggatatacctttcaataaagttaatgaaattcaa

SEQ ID NO: 196062 - DNA, 120 bp, Artificial Sequence
  ENSG00000113328_20 (sequence is synthesized)
attcctcgttagggcaggcgcggccccttcggctccgagctgaccctgatcagggccgagttgtctcggcggcgctgccgaggcctccacccagggagggtggttaccgctgaggagctg

SEQ ID NO: 196063 - DNA, 120 bp, Artificial Sequence
  ENSG00000113328_21 (sequence is synthesized)
ggcatagtactattcattttaattttttggcccaaatcatctaaaactcccatatggtgcctttagaagttagtatctctgatggaaggggaattcctttcaatagttcatttgctatgt

SEQ ID NO: 196064 - DNA, 120 bp, Artificial Sequence
  ENSG00000113328_22 (sequence is synthesized)
cacttgaagttttgtgccagccttcttacctaattaaacaacacttcagcagcgtggttgctaatgccaggtaaccaccatgtgttatgttagcctgcttggatcaattgtaattattac

SEQ ID NO: 196065 - DNA, 120 bp, Artificial Sequence
  ENSG00000113328_23 (sequence is synthesized)
tggaattgaattaattaatatgattttgaacagttcatgttcaaactaacatcctgtaaagtagacactgcaaggagttactgatgaaagaaaagttgttcataaaagaagcctcctttt

SEQ ID NO: 196066 - DNA, 120 bp, Artificial Sequence
  ENSG00000113356_0 (sequence is synthesized)
actccgcggtcctggtgccgcgtgcaggtcggtgcgcgcttctcccgaggtggaacgggcggcagtcaagcgccggcgttctctgccgtcaccctttccttgccggccggcacttcggct

SEQ ID NO: 196067 - DNA, 120 bp, Artificial Sequence
  ENSG00000113356_1 (sequence is synthesized)
gcagagttttgcccacgcttcgagacttagggagcagtgcctttcagaatttgcccactcatctggtataactggttctgatggctgggaataaaggaagaggacgtgctgcttatacct

SEQ ID NO: 196068 - DNA, 120 bp, Artificial Sequence
  ENSG00000113356_2 (sequence is synthesized)
ttaatattgaggctgttggatttagcaaaggtgaaaagttacctgatgtagtgttgaaaccacccccactatttcctgatacagattataaaccagtgccactgaaaacaggagaaggtg

SEQ ID NO: 196069 - DNA, 120 bp, Artificial Sequence
  ENSG00000113356_3 (sequence is synthesized)
aagaatatatgctggctttgaaacaggagttgagagaaacaatgaaaagaatgccttattttattgaaacacctgaagaaagacaagatattgaaaggtatagtaaaagatacatgaagg

SEQ ID NO: 196070 - DNA, 120 bp, Artificial Sequence
  ENSG00000113356_4 (sequence is synthesized)
tatacaaggaagaatggataccagattggagaagacttccaagagagatgatgccaagaaataaatgtaaaaaagcaggcccaaaacccaaaaaggcaaaagacgcaggcaaaggcacac

SEQ ID NO: 196071 - DNA, 120 bp, Artificial Sequence
  ENSG00000113356_5 (sequence is synthesized)
cactcactaatactgaagatgtgttgaaaaaaatggaggaattggaaaaaagaggtgatggtgaaaaatcagatgaggaaaatgaagagaaagaaggaagcaaagagaaaagtaaagaag

SEQ ID NO: 196072 - DNA, 120 bp, Artificial Sequence
  ENSG00000113356_6 (sequence is synthesized)
gtgatgatgacgatgacgatgatgccgcagaacaggaggaatatgatgaagaagagcaagaagaggaaaatgactacattaattcatactttgaagatggagatgattttggcgcagaca

SEQ ID NO: 196073 - DNA, 120 bp, Artificial Sequence
  ENSG00000113356_7 (sequence is synthesized)
gtgatgacaacatggatgaggcaacctattaggcatgaaatttttcaaaaaatatttttatgatgcagcttctgaacatttggacagacttgatttgtattttatttctgataaggaata

SEQ ID NO: 196074 - DNA, 120 bp, Artificial Sequence
  ENSG00000113356_8 (sequence is synthesized)
agtacttgtttctgttgttttggacaaatagttgttaccaaaatattcaaaaccactttgagtttacatactagttaccttaaaaattattccctgacactctgacattccttctaaaca

SEQ ID NO: 196075 - DNA, 120 bp, Artificial Sequence
  ENSG00000113356_9 (sequence is synthesized)
cctctgccatctctcttatgtactctcatgggtttttttgtatgatttgaatatgaatgtgcctaaagaatttttgctctcttaatctatgtatacatacttgaacaaatcattcttgct

SEQ ID NO: 196076 - DNA, 120 bp, Artificial Sequence
  ENSG00000113356_10 (sequence is synthesized)
taactgctgatcttttgtaaaactattgctagtcataatggatttctataacctgaaagttgatataatacagcacgtggagcactttaaaaacaaagaaacttgaaaataattttattt

SEQ ID NO: 196077 - DNA, 120 bp, Artificial Sequence
  ENSG00000113356_11 (sequence is synthesized)
tttacctttacatggtgtgttctagactactgcattatgactacataaacctacctgagctcttacaagtacagaattgtgagacagaggttttgtgatggaaaacatacacatagggaa

SEQ ID NO: 196078 - DNA, 120 bp, Artificial Sequence
  ENSG00000113356_12 (sequence is synthesized)
aaataccaaactgagcaatataaatttcacagctcacatcttagccagtacaaagaaactttcacatggggtgaatattataatacttgaatttgagacttaatactgtatatgaattaa

SEQ ID NO: 196079 - DNA, 120 bp, Artificial Sequence
  ENSG00000113356_13 (sequence is synthesized)
aaaaatttgactaagacattttattttatactttatgtaaatgtgaaataagttctggtcatataaatatgtagaatgcatgtgtgtgaactctatgaagtgaagtgtggtggcctttta

SEQ ID NO: 196080 - DNA, 120 bp, Artificial Sequence
  ENSG00000113356_14 (sequence is synthesized)
tgtttcagagtactcaagtgtacaattgatttatataaaaatgcaaaatgaactcaggtcattttgaaattaatattaatatttttgttgtttaactttaaagctagctcccctaacttt

SEQ ID NO: 196081 - DNA, 120 bp, Artificial Sequence
  ENSG00000113356_15 (sequence is synthesized)
atatattttttgggaaaaaatacctaaaaacctcagcctacaaagactctcagaaatgccaaagattttcaaggaaattcatattatatatttcaaaaatgatttatcaatgttatctac

SEQ ID NO: 196082 - DNA, 120 bp, Artificial Sequence
  ENSG00000113356_16 (sequence is synthesized)
caaaagaaataattttatttttcccctttggggagatattatcctctaatatgagaatcagatccctagattctatttctacctatactattaaactcaaccttgaacctgagcttggtt

SEQ ID NO: 196083 - DNA, 120 bp, Artificial Sequence
  ENSG00000113356_17 (sequence is synthesized)
gtttctgtgccttagtttctccactcgtaaacaatttcctataaaaattgtttaaacaccaaccaaaatttaccatatgtattcattctcttgccttaaagatcacttcttaacttacat

SEQ ID NO: 196084 - DNA, 120 bp, Artificial Sequence
  ENSG00000113356_18 (sequence is synthesized)
ttggctctcaccctctaaaaatttgtagtttggagagtaactgaaagcacaattttaagaaacatgttttcctcacaaaatatattgtaatctgattttcctatcttgtattcatgcaga

SEQ ID NO: 196085 - DNA, 120 bp, Artificial Sequence
  ENSG00000113356_19 (sequence is synthesized)
aaattggagaaaatgtgtattgtcttgtgccattctgcaatatgaatttctcaggaaaaagatgtttcaatggcaatactttcttaaataattcaagatgggtgtgaggacctatcttat

SEQ ID NO: 196086 - DNA, 120 bp, Artificial Sequence
  ENSG00000113356_20 (sequence is synthesized)
tagtttagtgctgtgttaaccatttgtgaattacttcttgtttaaaggaagttgtcaaaaaattttaagattctaaatggaatacacgaataaagtaagccttagaatagaaacctcaca

SEQ ID NO: 196087 - DNA, 120 bp, Artificial Sequence
  ENSG00000113356_21 (sequence is synthesized)
aaaagttgtcatttgcggttgataattaacataggtgttttattctctcaactccttagtaccagagccaaatacaatttagttttcagaaatcttatcaatattgttctatttacctac

SEQ ID NO: 196088 - DNA, 120 bp, Artificial Sequence
  ENSG00000113356_22 (sequence is synthesized)
ttataaatctgcagataaccacttgaaccaggcaaatacactgaagataaaggttatttctttttttagctttgaatttgtcatgaccattttagtcttgcagatagcagggcagcccct

SEQ ID NO: 196089 - DNA, 120 bp, Artificial Sequence
  ENSG00000113356_23 (sequence is synthesized)
tggggcaaggatttactctgggaggtaccgttaagagccttctttccccctttgaaagatccttttacaatgttaaagtatactagttgcaagaacaagcaggatttgcaggttgcttta

SEQ ID NO: 196090 - DNA, 120 bp, Artificial Sequence
  ENSG00000113356_24 (sequence is synthesized)
ccagcatgagtctcatttttctggcttaaaatctgggactgtgaaattattccataggaaagtgaatgttattttgcagaattagcctcttacataaaagtatttgttgaagtgtcttta

SEQ ID NO: 196091 - DNA, 120 bp, Artificial Sequence
  ENSG00000113356_25 (sequence is synthesized)
aaattgctatcatgagcaaaactggttgctgtaatgcttgtttttctgtatttatttacacattaaattcttacaaaacaaaatgtgttcgtttgttttatagtaagatgttttattttg

SEQ ID NO: 196092 - DNA, 120 bp, Artificial Sequence
  ENSG00000113356_26 (sequence is synthesized)
aacttatttaaatgtttatttgttagagaaaactaatttgttaatatagatcttaactagtaactattaagcagggatgtttgttccaaatattcttgaataaacaatcaccacaaacaa

SEQ ID NO: 196093 - DNA, 120 bp, Artificial Sequence
  ENSG00000113356_27 (sequence is synthesized)
aagcagtggccggcgcgccgcgtcctctttggcctctcggtcctgcaagaggccggaggagtacaggtactccgggaggctgcgcagccccaggcctgtatcgatcaccacgtcctgctc

SEQ ID NO: 196094 - DNA, 120 bp, Artificial Sequence
  ENSG00000113356_28 (sequence is synthesized)
ggagccgcgcaccagccagatgttggcacggttgcccgactcgtagaaacgttcttgaatccagaagataccatcgcctagagacttgtgggcgtaccactcgagcgccgacatgctggg

SEQ ID NO: 196095 - DNA, 120 bp, Artificial Sequence
  ENSG00000113356_29 (sequence is synthesized)
cacctggattatgttaacagcaagttagcaggccacatcattcagaagatacgggaaattaatattcttgagaagagaggaaattagacactacctgagagggtggggcatccagctcct

SEQ ID NO: 196096 - DNA, 88 bp, Artificial Sequence
  ENSG00000113356_30 (sequence is synthesized)
tgaagaaagacaagagacgggagtcttgcttttttgctcacactggtctcacattcctggcttcaagtgatcctcccatctcggcctt

SEQ ID NO: 196097 - DNA, 120 bp, Artificial Sequence
  ENSG00000113356_31 (sequence is synthesized)
tgtttcctgatatagtgtttaaaaaacacacgcatgttaaaaataaaggtttttctataaaatatatacatttatatgtgcctatataggtttatataatatgtgtatatatgtgcatac

SEQ ID NO: 196098 - DNA, 120 bp, Artificial Sequence
  ENSG00000113360_0 (sequence is synthesized)
gagcttatattctctgtggaagatgtgacatatccaggcggaacatcatgatgcagggaaacacatgtcacagaatgtcgttccacccgggacgagggtgtccccgaggacgaggaggac

SEQ ID NO: 196099 - DNA, 120 bp, Artificial Sequence
  ENSG00000113360_1 (sequence is synthesized)
atggagccagaccctcagcaccatcctttaggccccaaaatctgaggctgcttcaccctcagcagcctcctgtgcaatatcaatatgaacctccaagtgccccttccaccactttctcaa

SEQ ID NO: 196100 - DNA, 120 bp, Artificial Sequence
  ENSG00000113360_2 (sequence is synthesized)
actctccagcccccaattttctccctccacgaccagactttgtacccttccccccacccatgcctccgtcagcgcaaggccctcttcccccctgcccaatcaggccgcctttccccaacc

SEQ ID NO: 196101 - DNA, 120 bp, Artificial Sequence
  ENSG00000113360_3 (sequence is synthesized)
accagatgaggcaccccttcccagttcctccttgttttcctcccatgccaccaccaatgccttgtcctaataaccccccagtccctggggcacctcctggacaaggcactttccccttca

SEQ ID NO: 196102 - DNA, 120 bp, Artificial Sequence
  ENSG00000113360_4 (sequence is synthesized)
tgatgccccctccctccatgcctcatcccccgccccctccagtcatgccgcagcaggttaattatcagtaccctccgggctattctcaccacaacttcccacctcccagttttaatagtt

SEQ ID NO: 196103 - DNA, 120 bp, Artificial Sequence
  ENSG00000113360_5 (sequence is synthesized)
tccagaacaaccctagttctttcctgcccagtgctaataacagcagtagtcctcatttcagacatctccctccatacccactcccaaaggctcccagtgagagaaggtccccagaaaggc

SEQ ID NO: 196104 - DNA, 120 bp, Artificial Sequence
  ENSG00000113360_6 (sequence is synthesized)
tgaaacactatgatgaccacaggcaccgagatcacagtcatgggcgaggtgagaggcatcggtccctggatcggcgggagcgaggccgcagtcccgacaggagaagacaagacagccggt

SEQ ID NO: 196105 - DNA, 120 bp, Artificial Sequence
  ENSG00000113360_7 (sequence is synthesized)
acagatctgattatgaccgagggagaacaccatctcgccaccgcagctacgaacggagcagagagcgagaacgggagagacacaggcatcgagacaaccgaagatcaccatctctggaaa

SEQ ID NO: 196106 - DNA, 120 bp, Artificial Sequence
  ENSG00000113360_8 (sequence is synthesized)
ggtcctacaaaaaagagtataagagatctggaaggagttacggtttatcggttgttcctgaacctgctggatgcacaccagaattacctggggagattattaaaaatacagattcttggg

SEQ ID NO: 196107 - DNA, 120 bp, Artificial Sequence
  ENSG00000113360_9 (sequence is synthesized)
ccccacccctggagattgtgaatcatcgctccccaagtagggagaagaagagagctcgttgggaggaagaaaaagaccgttggagtgacaaccagagttctggcaaagacaagaactata

SEQ ID NO: 196108 - DNA, 120 bp, Artificial Sequence
  ENSG00000113360_10 (sequence is synthesized)
cctcaatcaaggaaaaagagcccgaggagaccatgcctgacaagaatgaggaggaagaagaagaacttcttaagcctgtgtggattcgatgcactcattcagaaaactactactccagtg

SEQ ID NO: 196109 - DNA, 120 bp, Artificial Sequence
  ENSG00000113360_11 (sequence is synthesized)
accccatggatcaggtgggagattctacagtggttggaacgagtaggcttcgtgacttatatgacaaatttgaggaggagttggggagcaggcaagaaaaggccaaagctgctcggcctc

SEQ ID NO: 196110 - DNA, 120 bp, Artificial Sequence
  ENSG00000113360_12 (sequence is synthesized)
cgtgggaacctccaaagacgaagctcgatgaagatttagagagttccagtgaatccgagtgtgagtctgatgaggacagcacctgttctagcagctcagactctgaagtttttgacgtta

SEQ ID NO: 196111 - DNA, 120 bp, Artificial Sequence
  ENSG00000113360_13 (sequence is synthesized)
ttgcagaaatcaaacgcaaaaaggcccaccctgaccgacttcatgatgaactttggtacaacgatccaggccagatgaatgatggaccactctgcaaatgcagcgcaaaggcaagacgca

SEQ ID NO: 196112 - DNA, 120 bp, Artificial Sequence
  ENSG00000113360_14 (sequence is synthesized)
caggaattaggcacagcatttatcctggagaagaggccatcaagccctgtcgtcctatgaccaacaatgctggcagacttttccactaccggatcacagtctccccgcctacgaactttt

SEQ ID NO: 196113 - DNA, 120 bp, Artificial Sequence
  ENSG00000113360_15 (sequence is synthesized)
taactgacaggccaactgttatagaatacgatgatcacgagtatatctttgaaggattttctatgtttgcacatgcccccctgaccaatattccactgtgtaaagtaattagattcaaca

SEQ ID NO: 196114 - DNA, 120 bp, Artificial Sequence
  ENSG00000113360_16 (sequence is synthesized)
tagactacacgattcatttcattgaagagatgatgccggagaatttttgtgtgaaagggcttgaactcttttcactgttcctattcagagatattttggaattatatgactggaatctta

SEQ ID NO: 196115 - DNA, 120 bp, Artificial Sequence
  ENSG00000113360_17 (sequence is synthesized)
aaggtcctttgtttgaagacagccctccctgctgcccaagatttcatttcatgccacgttttgtaagatttcttccagatggaggaaaggaagtgctgtccatgcaccagattctcctgt

SEQ ID NO: 196116 - DNA, 120 bp, Artificial Sequence
  ENSG00000113360_18 (sequence is synthesized)
acttgttaaggtgcagcaaagccctggtgcctgaggaggagattgccaatatgcttcagtgggaggagctggagtggcagaaatatgcagaagaatgcaaaggcatgattgttaccaacc

SEQ ID NO: 196117 - DNA, 120 bp, Artificial Sequence
  ENSG00000113360_19 (sequence is synthesized)
ctgggacgaaaccaagctctgtccgtatcgatcaactggatcgtgaacagttcaaccccgatgtgattacttttccgattatcgtccactttgggatacgccctgcacagttgagttatg

SEQ ID NO: 196118 - DNA, 120 bp, Artificial Sequence
  ENSG00000113360_20 (sequence is synthesized)
caggagacccacagtaccaaaaactgtggaagagttatgtgaaacttcgccacctcctagcaaatagtcccaaagtcaaacaaactgacaaacagaagctggcacagagggaggaagccc

SEQ ID NO: 196119 - DNA, 120 bp, Artificial Sequence
  ENSG00000113360_21 (sequence is synthesized)
ggattctggaaaactggcatccgttctgatgtctgtcagcatgcaatgatgctacctgttctgacccatcatatccgctaccaccaatgcctaatgcatttggacaagttgataggatat

SEQ ID NO: 196120 - DNA, 120 bp, Artificial Sequence
  ENSG00000113360_22 (sequence is synthesized)
actttccaagatcgttgtctgttgcagctggccatgactcatccaagtcatcatttaaattttggaatgaatcctgatcatgccaggaattcattatctaactgtggaattcggcagccc

SEQ ID NO: 196121 - DNA, 120 bp, Artificial Sequence
  ENSG00000113360_23 (sequence is synthesized)
aaatacggagacagaaaagttcatcacatgcacatgcggaagaaagggattaacaccttgataaatatcatgtcacgccttggccaagatgacccaactccctcgaggattaaccacaat

SEQ ID NO: 196122 - DNA, 120 bp, Artificial Sequence
  ENSG00000113360_24 (sequence is synthesized)
gaacggttggaattcctgggtgatgctgttgttgaatttctgaccagcgtccatttgtactatttgtttcctagtctggaagaaggaggattagcaacctatcggactgccattgttcag

SEQ ID NO: 196123 - DNA, 120 bp, Artificial Sequence
  ENSG00000113360_25 (sequence is synthesized)
aatcagcaccttgccatgctagcaaagaaacttgaactggatcgatttatgctgtatgctcacgggcctgacctttgtagagaatcggaccttcgacatgcaatggccaattgttttgaa

SEQ ID NO: 196124 - DNA, 120 bp, Artificial Sequence
  ENSG00000113360_26 (sequence is synthesized)
gcgttaataggagctgtttacttggagggaagcctggaggaagccaagcagttatttggacgcttgctctttaatgatccggacctgcgcgaagtctggctcaattatcctctccaccca

SEQ ID NO: 196125 - DNA, 120 bp, Artificial Sequence
  ENSG00000113360_27 (sequence is synthesized)
ctccaactacaagagccaaatactgatcgacaacttattgaaacttctccagttctacaaaaacttactgagtttgaagaagcaattggagtaatttttactcatgttcgacttctggca

SEQ ID NO: 196126 - DNA, 120 bp, Artificial Sequence
  ENSG00000113360_28 (sequence is synthesized)
agggcattcacattgagaactgtgggatttaaccatctgaccctaggccacaatcagagaatggaattcctaggtgactccataatgcaactggtagccacagagtacttattcattcat

SEQ ID NO: 196127 - DNA, 120 bp, Artificial Sequence
  ENSG00000113360_29 (sequence is synthesized)
ttcccagatcatcatgaaggacacttaactttgttgcgaagctctttggtgaataatagaactcaggccaaggtagcggaggagctgggcatgcaggagtacgccataaccaacgacaag

SEQ ID NO: 196128 - DNA, 120 bp, Artificial Sequence
  ENSG00000113360_30 (sequence is synthesized)
accaagaggcctgtggcgcttcgcaccaagaccttggcggaccttttggaatcatttattgcagcgctgtacattgataaggatttggaatatgttcatactttcatgaatgtctgcttc

SEQ ID NO: 196129 - DNA, 120 bp, Artificial Sequence
  ENSG00000113360_31 (sequence is synthesized)
tttccacgattgaaagagttcattttgaatcaggattggaatgaccccaaatcccagcttcagcagtgttgcttgacacttaggacagaaggaaaagagccagacattcctctgtacaag

SEQ ID NO: 196130 - DNA, 120 bp, Artificial Sequence
  ENSG00000113360_32 (sequence is synthesized)
actctgcagacagtgggcccatcccatgcccgaacctacactgtggctgtttatttcaagggagaaagaataggctgtgggaaaggaccaagtattcagcaagcggaaatgggagcagca

SEQ ID NO: 196131 - DNA, 120 bp, Artificial Sequence
  ENSG00000113360_33 (sequence is synthesized)
atggatgcgcttgaaaaatataattttccccagatggcccatcagaagcggttcatcgaacggaagtacagacaagagttaaaagaaatgaggtgggaaagagagcatcaagagagagag

SEQ ID NO: 196132 - DNA, 120 bp, Artificial Sequence
  ENSG00000113360_34 (sequence is synthesized)
ccagatgagactgaagacatcaagaaataaaggagggcatgcaagtgtggagtatttacttgctcagtaactgtgactgttgtctattgagacctagcctagttttcctgcagacaatga

SEQ ID NO: 196133 - DNA, 120 bp, Artificial Sequence
  ENSG00000113360_35 (sequence is synthesized)
atgaagtgtgctcattgaaataaaatacagagtcaaatcgctattgttgttttaatgatctgtttttagctggatggtctttattacaaagtattagatttttcttctatttaacggaaa

SEQ ID NO: 196134 - DNA, 120 bp, Artificial Sequence
  ENSG00000113360_36 (sequence is synthesized)
acttgactttggtgaatgtgcattacttccttttattttgctctttaaataataaaattcaagaagcatattctatgtggaatagatcctgtttttccatctgtgtcccagattgtgacc

SEQ ID NO: 196135 - DNA, 120 bp, Artificial Sequence
  ENSG00000113360_37 (sequence is synthesized)
ctagactttcaattgacaagtaaaaaattgactttactagacattttgactgtgctctagtaacatctatcctttttcaaatctctggatttttaagtagattgttcagctttcatccgg

SEQ ID NO: 196136 - DNA, 120 bp, Artificial Sequence
  ENSG00000113360_38 (sequence is synthesized)
tggctgttcatcaagttatcagctgcaaatattgaacttacctctctctaagcagtgagtgttttgtagaaggaatccgtttaacaattaattggctaatgggagaaggggaaagactga

SEQ ID NO: 196137 - DNA, 120 bp, Artificial Sequence
  ENSG00000113360_39 (sequence is synthesized)
tattcaagtcatacagattctttgaatcattagaataggagagaaatcatgattctaagccaggccacactttaaaccaagtgctctcaccctggggttagtggaacctttaagaagtta

SEQ ID NO: 196138 - DNA, 120 bp, Artificial Sequence
  ENSG00000113360_40 (sequence is synthesized)
atgaacagacttcaaggaagtcaaaaacctcccaatactatattcaattttctgtgtgtgtttgagatttgagagggcatggggagcaggaaggaggagggtttatagcttttatcagcc

SEQ ID NO: 196139 - DNA, 120 bp, Artificial Sequence
  ENSG00000113360_41 (sequence is synthesized)
tctctaagtgggccctgcagtaaaaggctaacatgacattcaaagacataacattttaaaaaaagttattccaaactaaacatcactggtttcttattaataaaggcaaaacttctttgt

SEQ ID NO: 196140 - DNA, 120 bp, Artificial Sequence
  ENSG00000113360_42 (sequence is synthesized)
ctgtcttggtacctgcggtagtagcctggctttgctctgacggcgatctcgcggcccgagagccttttataggttgcttttcccggggatgtgaaggatacagaaatgactgtgaatcaa

SEQ ID NO: 196141 - DNA, 120 bp, Artificial Sequence
  ENSG00000113360_43 (sequence is synthesized)
gctttttaattccctcggtttcctgttccggaggcgcgggcggtgccactgtcttggtacctgcggtagtagcctggctttgctctgacggcgatctcgcggcccgagagccttttatag

SEQ ID NO: 196142 - DNA, 120 bp, Artificial Sequence
  ENSG00000113360_44 (sequence is synthesized)
acagctccttcagtgtctctgtttccaaaccgcaaccgagaagagacagacggagaaaagagagttacttttccaggttgcttttcccggggatgtgaaggatacagaaatgactgtgaa

SEQ ID NO: 196143 - DNA, 120 bp, Artificial Sequence
  ENSG00000113360_45 (sequence is synthesized)
ggaaacacatgagtccccacttccatatagcatcacatcagcgttatgatttcatcagcaggaattttgggatggacacaaacattcgaatgtcgttccacccgggacgagggtgtcccc

SEQ ID NO: 196144 - DNA, 120 bp, Artificial Sequence
  ENSG00000113360_46 (sequence is synthesized)
gcccatacttttcttcctttaaaacaaatctggtactgagggtttcttaattgagaatgttctttagaaaatactaccttgagactaaatggaatatcaactataaattgttttctatta

SEQ ID NO: 196145 - DNA, 120 bp, Artificial Sequence
  ENSG00000113360_47 (sequence is synthesized)
gctgactgctgcgtttaacatgcatgctggagtttgagaaccattgttttactagatatatatattttctaccagctgttcttcagctcgaatctccttggagagttagtataatacttg

SEQ ID NO: 196146 - DNA, 120 bp, Artificial Sequence
  ENSG00000113360_48 (sequence is synthesized)
ggattttgaactatctgtgtacagtacttggccttgaaatttgatagaagattggaaaatattatttgaaccttctttaaatattagatttgtttgccattcaaagaaatgagaaacgag

SEQ ID NO: 196147 - DNA, 120 bp, Artificial Sequence
  ENSG00000113360_49 (sequence is synthesized)
cttccatgctttattggcatttcagaaatttctgctcatgggagaaggaattttacaaaacactgtcctagaattgatcattgcacttacaaccaaaaatgaaaaaatgatttttattta

SEQ ID NO: 196148 - DNA, 120 bp, Artificial Sequence
  ENSG00000113360_50 (sequence is synthesized)
agattgccttttgaaatgaacctcctcgatgtttcctcagatactttaccctcaacctgtgtgaaactagactcgtcatcttccctgcatattgaatttgagattccactgtgtaaagta

SEQ ID NO: 196149 - DNA, 120 bp, Artificial Sequence
  ENSG00000113360_51 (sequence is synthesized)
gctttcgttgacgcgccaatcaccgcgcacaaggccctgcggtgggctgaagagttttccctcccttggcccagctttctcaggttgcttttcccggggatgtgaaggatacagaaatga

SEQ ID NO: 196150 - DNA, 120 bp, Artificial Sequence
  ENSG00000113360_52 (sequence is synthesized)
tagcactgccgaatttatgcagagttctctttttgggggcatcttaagagttcaagatcacatgcaaagtcaaggttgtgttggaagtaggagccgtgacttctgactcttaggattgat

SEQ ID NO: 196151 - DNA, 120 bp, Artificial Sequence
  ENSG00000113360_53 (sequence is synthesized)
aatcaccaggttccagttgactcttgtccatcctgactctcagcctcaaagtcatagccttccttagaatgatggctttctgccattaagaataatcaaaagaatgtaatgtatgatttg

SEQ ID NO: 196152 - DNA, 120 bp, Artificial Sequence
  ENSG00000113360_54 (sequence is synthesized)
agagaaataccctttagtggatgtttcctttttaaaaattaagacctgaaatgagccatacttccaatttagattacccaaatgaaacaattgtggtagctcctgaagaattattttctg

SEQ ID NO: 196153 - DNA, 120 bp, Artificial Sequence
  ENSG00000113360_55 (sequence is synthesized)
tacatatttgagtgcaagaaactattattcaatagaatatttttggcaaacttggtcaacataagtccttgtatgtttttaaactttaaggaactttttctttattcatccttataataa

SEQ ID NO: 196154 - DNA, 120 bp, Artificial Sequence
  ENSG00000113360_56 (sequence is synthesized)
taattattattttttattttttcagtgccctctagaggaaagtagcacatattggttcctagcactgccgaatttatgcagagttctctttttgggggcatcttaagagttcaagatcac

SEQ ID NO: 196155 - DNA, 120 bp, Artificial Sequence
  ENSG00000113360_57 (sequence is synthesized)
tttggtgtttgtactctatgatttgcatcttacacatctcttgctgcttctgatattaatgataaaaagtgggggaagatgaaatggtagcactgaaaaataaagagggcctggaagttg

SEQ ID NO: 196156 - DNA, 120 bp, Artificial Sequence
  ENSG00000113360_58 (sequence is synthesized)
aaactattactaaaattttgcttaaaggtctaggtctcttactctttctgatagatggcagtgattgtggtttattttaaagtattcttttttccccagcatttattgcagcgctgtaca

SEQ ID NO: 196157 - DNA, 120 bp, Artificial Sequence
  ENSG00000113360_59 (sequence is synthesized)
cattgtggggtgatcatgacaggagcccaggattgagacttcttggctgttagtgtgactttgggccccacagggaaactcactggggctctcactcttagctgtaataagtgggtccca

SEQ ID NO: 196158 - DNA, 120 bp, Artificial Sequence
  ENSG00000113360_60 (sequence is synthesized)
ctccattatctcaatgttctctcccatttctaaaaatctctgtgaactactgcctgggagggagaccaactaagattatgagattaaaaagaaaatttggattcagtggtttttatatac

SEQ ID NO: 196159 - DNA, 120 bp, Artificial Sequence
  ENSG00000113361_0 (sequence is synthesized)
cccacttcattcacttgcaaatcagtgtgtgcccacaagagccagctctcccgagcccgtaaccttcgcatcccaagagctgcagtttcagccgcgacagcaagaacggcagagccggcg

SEQ ID NO: 196160 - DNA, 120 bp, Artificial Sequence
  ENSG00000113361_1 (sequence is synthesized)
accgcggcggcggcggcggcggaggcaggagcagcctgggcgggtcgcagggtctccgcgggcgcaggaaggcgagcagagatatcctctgagagccaagcaaagaacattaaggaagga

SEQ ID NO: 196161 - DNA, 120 bp, Artificial Sequence
  ENSG00000113361_2 (sequence is synthesized)
aggaggaatgaggctggatacggtgcagtgaaaaaggcacttccaagagtggggcactcactacgcacagactcgacggtgccatcagcatgagaacttaccgctacttcttgctgctct

SEQ ID NO: 196162 - DNA, 120 bp, Artificial Sequence
  ENSG00000113361_3 (sequence is synthesized)
tttgggtgggccagccctacccaactctctcaactccactatcaaagaggactagtggtttcccagcaaagaaaagggccctggagctctctggaaacagcaaaaatgagctgaaccgtt

SEQ ID NO: 196163 - DNA, 120 bp, Artificial Sequence
  ENSG00000113361_4 (sequence is synthesized)
caaaaaggagctggatgtggaatcagttctttctcctggaggaatacacaggatccgattatcagtatgtgggcaagttacattcagaccaggatagaggagatggatcacttaaatata

SEQ ID NO: 196164 - DNA, 120 bp, Artificial Sequence
  ENSG00000113361_5 (sequence is synthesized)
tcctttcaggagatggagcaggagatctcttcattattaatgaaaacacaggcgacatacaggccaccaagaggctggacagggaagaaaaacccgtttacatccttcgagctcaagcta

SEQ ID NO: 196165 - DNA, 120 bp, Artificial Sequence
  ENSG00000113361_6 (sequence is synthesized)
taaacagaaggacagggagacccgtggagcccgagtctgaattcatcatcaagatccatgacatcaatgacaatgaaccaatattcaccaaggaggtttacacagccactgtccctgaaa

SEQ ID NO: 196166 - DNA, 120 bp, Artificial Sequence
  ENSG00000113361_7 (sequence is synthesized)
tgtctgatgtcggtacatttgttgtccaagtcactgcgacggatgcagatgatccaacatatgggaacagtgctaaagttgtctacagtattctacagggacagccctatttttcagttg

SEQ ID NO: 196167 - DNA, 120 bp, Artificial Sequence
  ENSG00000113361_8 (sequence is synthesized)
aatcagaaacaggtattatcaagacagctttgctcaacatggatcgagaaaacagggagcagtaccaagtggtgattcaagccaaggatatgggcggccagatgggaggattatctggga

SEQ ID NO: 196168 - DNA, 120 bp, Artificial Sequence
  ENSG00000113361_9 (sequence is synthesized)
ccaccaccgtgaacatcacactgactgatgtcaacgacaaccctccccgattcccccagagtacataccagtttaaaactcctgaatcttctccaccggggacaccaattggcagaatca

SEQ ID NO: 196169 - DNA, 120 bp, Artificial Sequence
  ENSG00000113361_10 (sequence is synthesized)
aagccagcgacgctgatgtgggagaaaatgctgaaattgagtacagcatcacagacggtgaggggctggatatgtttgatgtcatcaccgaccaggaaacccaggaagggattataactg

SEQ ID NO: 196170 - DNA, 120 bp, Artificial Sequence
  ENSG00000113361_11 (sequence is synthesized)
tcaaaaagctcttggactttgaaaagaagaaagtgtatacccttaaagtggaagcctccaatccttatgttgagccacgatttctctacttggggcctttcaaagattcagccacggtta

SEQ ID NO: 196171 - DNA, 120 bp, Artificial Sequence
  ENSG00000113361_12 (sequence is synthesized)
gaattgtggtggaggatgtagatgagccacctgtcttcagcaaactggcctacatcttacaaataagagaagatgctcagataaacaccacaataggctccgtcacagcccaagatccag

SEQ ID NO: 196172 - DNA, 120 bp, Artificial Sequence
  ENSG00000113361_13 (sequence is synthesized)
atgctgccaggaatcctgtcaagtactctgtagatcgacacacagatatggacagaatattcaacattgattctggaaatggttcgatttttacatcgaaacttcttgaccgagaaacac

SEQ ID NO: 196173 - DNA, 120 bp, Artificial Sequence
  ENSG00000113361_14 (sequence is synthesized)
tgctatggcacaacattacagtgatagcaacagagatcaataatccaaagcaaagtagtcgagtacctctatatattaaagttctagatgtcaatgacaacgccccagaatttgctgagt

SEQ ID NO: 196174 - DNA, 120 bp, Artificial Sequence
  ENSG00000113361_15 (sequence is synthesized)
tctatgaaacttttgtctgtgaaaaagcaaaggcagatcagttgattcagaccctgcatgctgttgacaaggatgacccttatagtggacaccaattttcgttttccttggcccctgaag

SEQ ID NO: 196175 - DNA, 120 bp, Artificial Sequence
  ENSG00000113361_16 (sequence is synthesized)
cagccagtggctcaaactttaccattcaagacaacaaagacaacacggcgggaatcttaactcggaaaaatggctataatagacacgagatgagcacctatctcttgcctgtggtcattt

SEQ ID NO: 196176 - DNA, 120 bp, Artificial Sequence
  ENSG00000113361_17 (sequence is synthesized)
cagacaacgactacccagttcaaagcagcactgggacagtgactgtccgggtctgtgcatgtgaccaccacgggaacatgcaatcctgccatgcggaggcgctcatccaccccacgggac

SEQ ID NO: 196177 - DNA, 120 bp, Artificial Sequence
  ENSG00000113361_18 (sequence is synthesized)
tgagcacgggggctctggttgccatccttctgtgcatcgtgatcctactagtgacagtggtgctgtttgcagctctgaggcggcagcgaaaaaaagagcctttgatcatttccaaagagg

SEQ ID NO: 196178 - DNA, 120 bp, Artificial Sequence
  ENSG00000113361_19 (sequence is synthesized)
acatcagagataacattgtcagttacaacgacgaaggtggtggagaggaggacacccaggcttttgatatcggcaccctgaggaatcctgaagccatagaggacaacaaattacgaaggg

SEQ ID NO: 196179 - DNA, 120 bp, Artificial Sequence
  ENSG00000113361_20 (sequence is synthesized)
acattgtgcccgaagcccttttcctaccccgacggactccaacagctcgcgacaacaccgatgtcagagatttcattaaccaaaggttaaaggaaaatgacacggaccccactgccccgc

SEQ ID NO: 196180 - DNA, 120 bp, Artificial Sequence
  ENSG00000113361_21 (sequence is synthesized)
catacgactccttggccacttacgcctatgaaggcactggctccgtggcggattccctgagctcgctggagtcagtgaccacggatgcagatcaagactatgattaccttagtgactggg

SEQ ID NO: 196181 - DNA, 120 bp, Artificial Sequence
  ENSG00000113361_22 (sequence is synthesized)
gacctcgattcaaaaagcttgcagatatgtatggaggagtggacagtgacaaagactcctaatctgttgcctttttcattttccaatacgacactgaaatatgtgaagtggctatttctt

SEQ ID NO: 196182 - DNA, 120 bp, Artificial Sequence
  ENSG00000113361_23 (sequence is synthesized)
tatatttatccactactccgtgaaggcttctctgttctacccgttccaaaagccaatggctgcagtccgtgtggatccaatgttagagacttttttctagtacacttttatgagcttcca

SEQ ID NO: 196183 - DNA, 120 bp, Artificial Sequence
  ENSG00000113361_24 (sequence is synthesized)
aggggcaaatttttattttttagtgcatccagttaaccaagtcagcccaacaggcaggtgccggaggggaggacagggaacagtatttccacttgttctcagggcagcgtgcccgcttcc

SEQ ID NO: 196184 - DNA, 120 bp, Artificial Sequence
  ENSG00000113361_25 (sequence is synthesized)
gctgtcctggtgttttactacactccatgtcaggtcagccaactgccctaactgtacatttcacaggctaatgggataaaggactgtgctttaaagataaaaatatcatcatagtaaaag

SEQ ID NO: 196185 - DNA, 120 bp, Artificial Sequence
  ENSG00000113361_26 (sequence is synthesized)
aaatgagggcatatcggctcacaaagagataaactacataggggtgtttatttgtgtcacaaagaatttaaaataacacttgcccatgctatttgttcttcaagaactttctctgccatc

SEQ ID NO: 196186 - DNA, 120 bp, Artificial Sequence
  ENSG00000113361_27 (sequence is synthesized)
aactactattcaaaacctcaaatccacccatatgttaaaattctcattactcttaaggaatagaagcaaattaaacggtaacatccaaaagcaaccacaaacctagtacgacttcattcc

SEQ ID NO: 196187 - DNA, 120 bp, Artificial Sequence
  ENSG00000113361_28 (sequence is synthesized)
ttccactaactcatagtttgttatatcctagactagacatgcgaaagtttgcctttgtaccatataaagggggagggaaatagctaataatgttaaccaaggaaatatattttaccatac

SEQ ID NO: 196188 - DNA, 120 bp, Artificial Sequence
  ENSG00000113361_29 (sequence is synthesized)
atttaaagttttggccaccacatgtatcacgggtcacttgaaattctttcagctatcagtaggctaatgtcaaaattgtttaaaaattcttgaaagaattttcctgagacaaattttaac

SEQ ID NO: 196189 - DNA, 120 bp, Artificial Sequence
  ENSG00000113361_30 (sequence is synthesized)
ttcttgtctatagttgtcagtattattctactatactgtacatgaaagtagcagtgtgaagtacaataattcatattcttcatatccttcttacacgactaagttgaattagtaaagtta

SEQ ID NO: 196190 - DNA, 120 bp, Artificial Sequence
  ENSG00000113361_31 (sequence is synthesized)
gattaaataaaacttaaatctcactctaggagttcagtggagaggttagagccagccacacttgaacctaataccctgcccttgacatctggaaacctctacatatttatataacgtgat

SEQ ID NO: 196191 - DNA, 120 bp, Artificial Sequence
  ENSG00000113361_32 (sequence is synthesized)
acatttggataaacaacattgagattatgatgaaaacctacatattccatgtttggaagacccttggaagaggaaaattggattcccttaaacaaaagtgtttaagattgtaattaaaat

SEQ ID NO: 196192 - DNA, 120 bp, Artificial Sequence
  ENSG00000113361_33 (sequence is synthesized)
gatagttgattttcaaaagcattaattttttttcattgtttttaactttgctttcatgaccatcctgccatccttgactttgaactaatgataaagtaatgatctcaaactatgacagaa

SEQ ID NO: 196193 - DNA, 120 bp, Artificial Sequence
  ENSG00000113361_34 (sequence is synthesized)
aagtaatgtaaaatccatccaatctattatttctctaattatgcaattagcctcatagttattatccagaggacccaactgaactgaactaatccttctggcagattcaaatcgtttatt

SEQ ID NO: 196194 - DNA, 120 bp, Artificial Sequence
  ENSG00000113361_35 (sequence is synthesized)
acttatcattagaatcttaccttgtgcagtcatcagaaattccagcgtactataatgaaaacatccttgttttgaaaacctaaaagacaggctctgtatatatatatacttaagaatatg

SEQ ID NO: 196195 - DNA, 120 bp, Artificial Sequence
  ENSG00000113361_36 (sequence is synthesized)
ctgacttcacttattagtcttagggatttattttcaattaatattaattttctacaaataattttagtgtcatttccatttggggatattgtcatatcagcacatattttctgtttggaa

SEQ ID NO: 196196 - DNA, 120 bp, Artificial Sequence
  ENSG00000113361_37 (sequence is synthesized)
acacactgttgtttagttaagttttaaataggtgtattacccaagaagtaaagatggaaacgttaaaagaagagaaatgtagtattttgggttacctgattagagtgaaaattttttaca

SEQ ID NO: 196197 - DNA, 120 bp, Artificial Sequence
  ENSG00000113361_38 (sequence is synthesized)
atcatattattccttgtgtcttctgaatggtttccgattttataatggactgccctatatagtaacaagtatttcatgcttgagctatttcctgctttcagggtttcttttttctagttc

SEQ ID NO: 196198 - DNA, 120 bp, Artificial Sequence
  ENSG00000113361_39 (sequence is synthesized)
cacacacacacacacacacacgaatgcaaacaaaaggctatatgaggtcttcactctaatgaattgatatgtatcatagtcacaggtaagtgttgaaaaaagcttagtaaagttagaagc

SEQ ID NO: 196199 - DNA, 120 bp, Artificial Sequence
  ENSG00000113361_40 (sequence is synthesized)
ttgaaaaaagcttagtaaagttagaagctacttactcatagcaatagaacagcaccttaatcacacgatttactgtaaaattaaagaggtctctatctgtatgtttcatgtcacgtaaca

SEQ ID NO: 196200 - DNA, 120 bp, Artificial Sequence
  ENSG00000113361_41 (sequence is synthesized)
aattgaatcaaggaagatagtcctgtaaaaagaaaggtatcatctgaagttgaggattgacactagcagtttccaatgtttaaaggtaagatctgagttctcctaataagtaaaagtaag

SEQ ID NO: 196201 - DNA, 120 bp, Artificial Sequence
  ENSG00000113361_42 (sequence is synthesized)
tagttctatagcagaatatctgagatgtaattggcaaggtattttatccctccctgcagatgacacagcataccaagaacaggttaatatgattacttatggaaataactttaatctctt

SEQ ID NO: 196202 - DNA, 120 bp, Artificial Sequence
  ENSG00000113361_43 (sequence is synthesized)
atcataaaagctgatgatgaagtaaatttataggaaattggataatttgagactggggctaaatatttagtaccagggtactgtaagtatcaagttggagtgacgttttcctataattca

SEQ ID NO: 196203 - DNA, 120 bp, Artificial Sequence
  ENSG00000113361_44 (sequence is synthesized)
gactctttgacatcgtggaaccaataagagtcatagttccatcattctccagcttcgtctcacttccttcccaccccacctgagtatcaggtcaaacatcattgcatgcgcaggtttttt

SEQ ID NO: 196204 - DNA, 120 bp, Artificial Sequence
  ENSG00000113361_45 (sequence is synthesized)
ttttaattgctaggtcccaggcaacatgaaagattattggagaaaaaaataattttcagcccagttttttcattgtctgtttcctaattttagatgttggtgatgggaaagatggaagga

SEQ ID NO: 196205 - DNA, 120 bp, Artificial Sequence
  ENSG00000113361_46 (sequence is synthesized)
gagtgggaagaagtaaaattttaatatttgtttcaatcactttgaaactaaaattcattaagcataaccagattgcttttgtgggttgtttcaaggacattgagagctttctgatgatat

SEQ ID NO: 196206 - DNA, 120 bp, Artificial Sequence
  ENSG00000113361_47 (sequence is synthesized)
gtttttgccctctattcaaaagcaagagttcctttaaactactaagatattccctagaataagctgaatttaaaaaaacattaagccattgtttaaagccccttcacttcctggccactt

SEQ ID NO: 196207 - DNA, 120 bp, Artificial Sequence
  ENSG00000113361_48 (sequence is synthesized)
acttctgaaaggcctaaaaaacatttgtgcccaaataagtaaataaaccaaatgggaaagaagcaaagattattccatagaaccacaagagagggaatgtgggcacagtaaatagatgtt

SEQ ID NO: 196208 - DNA, 120 bp, Artificial Sequence
  ENSG00000113361_49 (sequence is synthesized)
tctttcagaactttcctgcctttacagtttgtgtccataaagggatgttcagcaatgaaattactcccttttcagatggaacaaaacctgcccatttaattttaacgcagtataaaaaac

SEQ ID NO: 196209 - DNA, 87 bp, Artificial Sequence
  ENSG00000113361_50 (sequence is synthesized)
acaaaacctgcccatttaattttaacgcagtataaaaaacgtgtggtttagtttttattttcagctcccaaagagttgtgcagaaaa

SEQ ID NO: 196210 - DNA, 120 bp, Artificial Sequence
  ENSG00000113361_51 (sequence is synthesized)
cccggccttaaaaattgaatctgtagcttaggccatccaaattttataaatccaaattaactttagaatgtttctattactttcacttttacatatataaattttaagtgtcctgattgg

SEQ ID NO: 196211 - DNA, 120 bp, Artificial Sequence
  ENSG00000113361_52 (sequence is synthesized)
ctgaacaatatctcacatcaaatgctttgcctggaaatagatatcccactggggatagtggtgtgtaaactatgacttggacaattctatatactcaagcaccataaaaagtatgcagtt

SEQ ID NO: 196212 - DNA, 120 bp, Artificial Sequence
  ENSG00000113361_53 (sequence is synthesized)
gaaaagaaaatcaaagttgattcctgggtgccaactaaatattcaaatcaggtactcatccttatcagctaaattcattttcaccaggaacagaccaccaaataaattattttatcctaa

SEQ ID NO: 196213 - DNA, 120 bp, Artificial Sequence
  ENSG00000113361_54 (sequence is synthesized)
taactagttttgaagcagtgtaattactctggaagaaggctctaaaaagtcatgattcccccactattttgaaatgtatcctctaacaaggatcattatagtgtaatcttaatttttatg

SEQ ID NO: 196214 - DNA, 120 bp, Artificial Sequence
  ENSG00000113361_55 (sequence is synthesized)
ttttatcaagatgaaatcttgtttgaattgtgatattataaaaggggactcaaaaatccaagcagtctactgtgtttaaattaacaccacaaccttccttatcagattataagagtagaa

SEQ ID NO: 196215 - DNA, 120 bp, Artificial Sequence
  ENSG00000113361_56 (sequence is synthesized)
aaattaacacttggtgtgtgaatcttcaggaaaatgagctatttcataagctcaaacaagcagcttccttttccagagaatatagaattatattatggtctccttaaatgtttagtagct

SEQ ID NO: 196216 - DNA, 120 bp, Artificial Sequence
  ENSG00000113361_57 (sequence is synthesized)
cttatggtcacagcatttttaatctccctatggcatctttatggaataattttctaaagggtaattctctactaaaaatatcagaccccgaccatatttaatgtggagagcaataccctc

SEQ ID NO: 196217 - DNA, 120 bp, Artificial Sequence
  ENSG00000113361_58 (sequence is synthesized)
ttagaaagaaaatacattgactcatacacttgttaaaagttaataaagaaatagctcatttttaaagccggaagtttatggtctctgcatcgtcaatttaatttaagcattgctgagaca

SEQ ID NO: 196218 - DNA, 120 bp, Artificial Sequence
  ENSG00000113361_59 (sequence is synthesized)
atctttaatctactcccctttttgtaataccttatttatggtgcattttcatttttatttgggggaaacgttagcccaacagagccggcagatgaaagtgttgaaaagaggtcaaatgga

SEQ ID NO: 196219 - DNA, 120 bp, Artificial Sequence
  ENSG00000113361_60 (sequence is synthesized)
aacaaaggctcttacccgctgtatttcagacaggactgaggcacttagccgaggagccactgggttattagattaatttcaaaagagcttttacaagttgcttaattccttttttttttt

SEQ ID NO: 196220 - DNA, 120 bp, Artificial Sequence
  ENSG00000113361_61 (sequence is synthesized)
ttttttttttcaaaaacccatgaaccacaaactcaaatttctcctcaaatggggttaatctgacaaacgaggcatggacccagccttgtggaaaaagcattccacgctaatgagatcttg

SEQ ID NO: 196221 - DNA, 120 bp, Artificial Sequence
  ENSG00000113361_62 (sequence is synthesized)
gtctttcttgtgaggctacgttatttatgtaaatatgtctggaggcaccttctctaagcttttagttttctatgatctattagtttagtgtttattaaagaatcaaatgtatagaattac

SEQ ID NO: 196222 - DNA, 120 bp, Artificial Sequence
  ENSG00000113361_63 (sequence is synthesized)
caggcattcgtggggaatgctgtgtagcaaatgtaaaactgacctgctcggaagaaacgtaggaacgcttcaaacccactgtaatgtttggtttgagattattttcattgctttgagagt

SEQ ID NO: 196223 - DNA, 120 bp, Artificial Sequence
  ENSG00000113361_64 (sequence is synthesized)
gaactgcctaagagtaggccttataataaatgctatgtgcgtcttcagtagttccaagctaaagcaatttggcattctcccactgtgatttgtgacttttaaacccacaaaataaaagct

SEQ ID NO: 196224 - DNA, 120 bp, Artificial Sequence
  ENSG00000113361_65 (sequence is synthesized)
ttttggtattgattgtttttaattaaaaatacttccaagtataaattgaaacggatgccacccttgaagatttactggcgggaatgctcactcttgtcgttttcctcagtatcgttcatg

SEQ ID NO: 196225 - DNA, 120 bp, Artificial Sequence
  ENSG00000113361_66 (sequence is synthesized)
tctttggcaacaagaacacctgatgaaagcaagcaatgctcagttcccatcaacatttctagttagggggattctcataaccccacagtttacctgagaaagttttctgtgttagaagaa

SEQ ID NO: 196226 - DNA, 120 bp, Artificial Sequence
  ENSG00000113361_67 (sequence is synthesized)
tggggtcgagagtattaccttttagctcagtgtggccgggccttttgttgcagtcaaatggcaaatacgcactccttgaaatggcttcttttatttggttttgttttcttagacttataa

SEQ ID NO: 196227 - DNA, 120 bp, Artificial Sequence
  ENSG00000113361_68 (sequence is synthesized)
atttgaaaagaatgcaatttaaaaagtgatttctcacaaagagtaaatatgccttttgcaaatcaatttttgtaacaagttatttatatgatattacttaataaactggtttttttctaa

SEQ ID NO: 196228 - DNA, 120 bp, Artificial Sequence
  ENSG00000113361_69 (sequence is synthesized)
ccatggtgaggggctcacactgttactgtgacactctagatttatctgcctcccccattaaggcatacagcctgatctaggtgagtcgagttacatactgagaatctgtgctgtacgatg

SEQ ID NO: 196229 - DNA, 120 bp, Artificial Sequence
  ENSG00000113361_70 (sequence is synthesized)
tgaactcatttttgcttgcaaatggctttggaaaatgaacagatgtgaaacttgctcgtgtctttgcttgcccaggaagcaaagaatctcttgtctatcagactgggaatgaatctcggg

SEQ ID NO: 196230 - DNA, 120 bp, Artificial Sequence
  ENSG00000113361_71 (sequence is synthesized)
gggcaacataaatgtgcccttttcatttcattcgttgtgtaatttttttacttggaaaacgttgttaagtgtctggcatggagtgtatgatgagggccctttctataaaggtaaagttta

SEQ ID NO: 196231 - DNA, 120 bp, Artificial Sequence
  ENSG00000113361_72 (sequence is synthesized)
aagatctatgggaaagtgggaagaggagtatgatgacttttctctcatcctagaaaaataaaaactatgaaatttttttaacccagcaaactaatgttgatttaccatttaaatgattac

SEQ ID NO: 196232 - DNA, 120 bp, Artificial Sequence
  ENSG00000113361_73 (sequence is synthesized)
cttcttagcattactctctgattgccacatgcataaggtctattcctcacactcaacaataaataacttctgtgattgaggaaatcagtatgggggcccaaaagaaatgaatgtaataaa

SEQ ID NO: 196233 - DNA, 120 bp, Artificial Sequence
  ENSG00000113361_74 (sequence is synthesized)
aatggaaatcagggtctaacaatgattcaaatgaaatttttacccctaaccaactaattaagcctacaagtcgagctcagatttctcaacaggtccttgactgtgaactaagaaatcaaa

SEQ ID NO: 196234 - DNA, 120 bp, Artificial Sequence
  ENSG00000113361_75 (sequence is synthesized)
tatttgttaatgcagcccttccaaaaatgaaagcaagatttgtaaagcttgcctatatagtgaaaagaaaaggtaagaagttaagagtcaacctgaattatacagggggaaatactcttt

SEQ ID NO: 196235 - DNA, 120 bp, Artificial Sequence
  ENSG00000113361_76 (sequence is synthesized)
tttaaaaaatgaagacagagtgactttgagaagagtgaaagagaacccgcatttcaccaagaacagaatgcccagggatccctgctctagcgctccttcacgctccacatcaaccctgct

SEQ ID NO: 196236 - DNA, 120 bp, Artificial Sequence
  ENSG00000113361_77 (sequence is synthesized)
aactataacagaagccttgaaactcaactacagaactgcgattctctttgtcaactaagacttggggaaagtattttaagatatgcacataaataaaaactgacagtgtgcaaagacaaa

SEQ ID NO: 196237 - DNA, 120 bp, Artificial Sequence
  ENSG00000113361_78 (sequence is synthesized)
agtttcagccgcgacagcaagaacggcagagccggcgaccgcggcggcggcggcggcggaggcaggagcagcctgggcgggtcgcagggtctccgcgggcgcaggaaggcgagcagagca

SEQ ID NO: 196238 - DNA, 120 bp, Artificial Sequence
  ENSG00000113361_79 (sequence is synthesized)
caaatgaggatgtcccattttctgccttttgggttttaccagctgctgtaggttttccacactgagtagttgcagtagactggctgccctctgtccaacatgcaatgccacttggtatca

SEQ ID NO: 196239 - DNA, 120 bp, Artificial Sequence
  ENSG00000113361_80 (sequence is synthesized)
ttcatggtttgatcccgagaacaatccacctattatataattttcccctcacatgtcattccactgacctcaatcaactgatgtggtgatgaaatgaaacacgttcatggagaagctgag

SEQ ID NO: 196240 - DNA, 120 bp, Artificial Sequence
  ENSG00000113361_81 (sequence is synthesized)
aaaagtgtgcaaagtacacctacaaggagagtttccccatgttttccataatgtggccatccagaatgaggaaggaacaagaatacttgaacatcacagagaccaaaccatttccatatg

SEQ ID NO: 196241 - DNA, 120 bp, Artificial Sequence
  ENSG00000113361_82 (sequence is synthesized)
tcaaaaccagagagcctgggatcaaagttatacttggaaaagggctgtaagaaatgaaaaaccacctagcagcatctgtacttcccttaaaatccaacctccactggcttcctctgaatc

SEQ ID NO: 196242 - DNA, 120 bp, Artificial Sequence
  ENSG00000113361_83 (sequence is synthesized)
catcagggtcttaaatatttaaagaaaggctaaattcagaaggtatttaagaaatgggcaggccctgctgggtcctgatgagtccagtgcctccgggagctgcccaatgggccagcagtc

SEQ ID NO: 196243 - DNA, 120 bp, Artificial Sequence
  ENSG00000113361_84 (sequence is synthesized)
tctgtggaatccaggtgacccttcccactagggattggaccaacacttcacgcagctttcttccgaggaccccaacgaaggagtgatttgaacccaagtcaaaagggtgccctacaaggc

SEQ ID NO: 196244 - DNA, 120 bp, Artificial Sequence
  ENSG00000113361_85 (sequence is synthesized)
tagtttgaacagaacccctaccctgatgtgactcccagagaacaactgaccagagaaattggcactccagaatttagaatacagatgtggtttcgaaaccagagaacacaacacctcaga

SEQ ID NO: 196245 - DNA, 120 bp, Artificial Sequence
  ENSG00000113361_86 (sequence is synthesized)
cagagtctactggggtctggattggggtcgatttcctggaattgctatcagggaagaactggctgcacaaacaggcctctcagagtccagaactcagatatggtttcataaccaaagagc

SEQ ID NO: 196246 - DNA, 120 bp, Artificial Sequence
  ENSG00000113361_87 (sequence is synthesized)
tcggcactgtggccagagttgtagacttgtgaattccctggcagaaggccccaagtcggagacctcacatgactgtgtgacaaggcaaggcaacttgtgcatggcccctagcagtggggt

SEQ ID NO: 196247 - DNA, 120 bp, Artificial Sequence
  ENSG00000113361_88 (sequence is synthesized)
cacttccctccctccagttctttcagcaacaaccagctcttcttccacctcacacatgctttggttcttgggttccccctgggctcggagtgagccaggcaccaagggtcatgatgctcc

SEQ ID NO: 196248 - DNA, 120 bp, Artificial Sequence
  ENSG00000113361_89 (sequence is synthesized)
cccacaccaaggaagatgccaggatgacaaggacagagacacatggcctggcagtactgccctgtaaggactctacacagccccaacctggcaatcctaagcaccagttgcagggaactg

SEQ ID NO: 196249 - DNA, 120 bp, Artificial Sequence
  ENSG00000113361_90 (sequence is synthesized)
gtcagcaagacacatctcaccttatgcagtggtggcacaaggggccccaaggagtgatgtcaaatggccagctggagcaggggcacttcagcagcccacagagcctgcacacacctggac

SEQ ID NO: 196250 - DNA, 120 bp, Artificial Sequence
  ENSG00000113361_91 (sequence is synthesized)
atccctgtggcagtagcgggcaccaccagctgcagagccatctcagccactcgagcaaccgcacagctctctgcaaaacccacccttttaggtcaatgcctgtcaattgtatagtttcag

SEQ ID NO: 196251 - DNA, 120 bp, Artificial Sequence
  ENSG00000113361_92 (sequence is synthesized)
aaaaagacacaagcctgcctgaatccaagtccacaggaaaaggtccctccaccacttgaaccacctctcagtgaggaagaatttgatgctctgcctgatgtgatgcagacctcaccaggg

SEQ ID NO: 196252 - DNA, 120 bp, Artificial Sequence
  ENSG00000113361_93 (sequence is synthesized)
tgtcagctttgggaggagcaaggcctccttctcacctccaccatctaggccactttcctggacacagaatcaatgtgataccaagaaggacaaacaatgcacacactgtgtttggcagca

SEQ ID NO: 196253 - DNA, 120 bp, Artificial Sequence
  ENSG00000113361_94 (sequence is synthesized)
agaccaatgcgagaaaaagcaccaaacacttagaaacccaaagggagcattttgactcagtcttgtgggaggcgcttgacttctcctctcacttaatggcctatatgattgttgcaaagc

SEQ ID NO: 196254 - DNA, 120 bp, Artificial Sequence
  ENSG00000113361_95 (sequence is synthesized)
tctctactgcccctgtaaggcatcatgggcaccaagccatgaatgccttcactgcatcctgaagaaccaaagcatttttatagcaaacatcacctactccctgcaatcctcaccgcttgg

SEQ ID NO: 196255 - DNA, 120 bp, Artificial Sequence
  ENSG00000113361_96 (sequence is synthesized)
gcagtctggactatacaggaactggaaccaaaccaaaccagggcgaggacactaggtctaagggggacagctccacacttctttccttctggcaagttcagaagtcacacctgaaagcag

SEQ ID NO: 196256 - DNA, 120 bp, Artificial Sequence
  ENSG00000113361_97 (sequence is synthesized)
gtagatgtctagaatatagagggatgctgtattttcttgttctgtgagttgataacaaggagtttttaatctcagctctgagagttgcaaatgggaattggaagtcacttcactacccac

SEQ ID NO: 196257 - DNA, 120 bp, Artificial Sequence
  ENSG00000113361_98 (sequence is synthesized)
ctcttgggaactgattccacaagtttatatccataatcccgagtaggcttcatgaccagttttccctctgaacattgaaatgtagagaaaatgacagaagttagaatagcaactccctta

SEQ ID NO: 196258 - DNA, 120 bp, Artificial Sequence
  ENSG00000113361_99 (sequence is synthesized)
gatcattgaacaaagcatatgaatgttactcttctcacattgttagcatttctgtatgttaacctgtacttctacccatcaagctgccctttttattataaataaatgtcaagtttaaat

SEQ ID NO: 196259 - DNA, 120 bp, Artificial Sequence
  ENSG00000113361_100 (sequence is synthesized)
acagagtgaacccatttacttttctccagttcctaagttaccaggggcaattatatctcacataaacattcctttagatttttattttacttattattttcagaaaaatgccagttctgg

SEQ ID NO: 196260 - DNA, 120 bp, Artificial Sequence
  ENSG00000113368_0 (sequence is synthesized)
gctccgtgcagcctgagaggaaacaaagtgctgcgagcaggagacggcggcggcgcgaaccctgctgggcctccagtcaccctcgtcttgcattttcccgcgtgcgtgtgtgagtgggtg

SEQ ID NO: 196261 - DNA, 120 bp, Artificial Sequence
  ENSG00000113368_1 (sequence is synthesized)
tgtgtgttttcttacaaagggtatttcgcgatcgatcgattgattcgtagttcccccccgcgcgcctttgccctttgtgctgtaatcgagctcccgccatcccaggtgcttctccgttcc

SEQ ID NO: 196262 - DNA, 120 bp, Artificial Sequence
  ENSG00000113368_2 (sequence is synthesized)
tctaaacgccagcgtctggacgtgagcgcaggtcgccggtttgtgccttcggtccccgcttcgccccctgccgtcccctccttatcacggtcccgctcgcggcctcgccgccccgctgtc

SEQ ID NO: 196263 - DNA, 120 bp, Artificial Sequence
  ENSG00000113368_3 (sequence is synthesized)
catggcgactgcgacccccgtgccgccgcggatgggcagccgcgctggcggccccaccacgccgctgagccccacgcgcctgtcgcggctccaggagaaggaggagctgcgcgagctcaa

SEQ ID NO: 196264 - DNA, 120 bp, Artificial Sequence
  ENSG00000113368_4 (sequence is synthesized)
gcgcgagctcaatgaccggctggcggtgtacatcgacaaggtgcgcagcctggagacggagaacagcgcgctgcagctgcaggtgacggagcgcgaggaggtgcgcggccgtgagctcac

SEQ ID NO: 196265 - DNA, 120 bp, Artificial Sequence
  ENSG00000113368_5 (sequence is synthesized)
cggcctcaaggcgctctacgagaccgagctggccgacgcgcgacgcgcgctcgacgacacggcccgcgagcgcgccaagctgcagatcgagctgggcaagtgcaaggcggaacacgacca

SEQ ID NO: 196266 - DNA, 120 bp, Artificial Sequence
  ENSG00000113368_6 (sequence is synthesized)
gctgctcctcaactatgctaagaaggaatctgatcttaatggcgcccagatcaagcttcgagaatatgaagcagcactgaattcgaaagatgcagctcttgctactgcacttggtgacaa

SEQ ID NO: 196267 - DNA, 120 bp, Artificial Sequence
  ENSG00000113368_7 (sequence is synthesized)
aaaaagtttagagggagatttggaggatctgaaggatcagattgcccagttggaagcctccttagctgcagccaaaaaacagttagcagatgaaactttacttaaagtagatttggagaa

SEQ ID NO: 196268 - DNA, 120 bp, Artificial Sequence
  ENSG00000113368_8 (sequence is synthesized)
tcgttgtcagagccttactgaggacttggagtttcgcaaaagcatgtatgaagaggagattaacgagaccagaaggaagcatgaaacgcgcttggtagaggtggattctgggcgtcaaat

SEQ ID NO: 196269 - DNA, 120 bp, Artificial Sequence
  ENSG00000113368_9 (sequence is synthesized)
tgagtatgagtacaagctggcgcaagcccttcatgagatgagagagcaacatgatgcccaagtgaggctgtataaggaggagctggagcagacttaccatgccaaacttgagaatgccag

SEQ ID NO: 196270 - DNA, 120 bp, Artificial Sequence
  ENSG00000113368_10 (sequence is synthesized)
actgtcatcagagatgaatacttctactgtcaacagtgccagggaagaactgatggaaagccgcatgagaattgagagcctttcatcccagctttctaatctacagaaagagtctagagc

SEQ ID NO: 196271 - DNA, 120 bp, Artificial Sequence
  ENSG00000113368_11 (sequence is synthesized)
atgtttggaaaggattcaagaattagaggacttgcttgctaaagaaaaagacaactctcgtcgcatgctgacagacaaagagagagagatggcggaaataagggatcaaatgcagcaaca

SEQ ID NO: 196272 - DNA, 120 bp, Artificial Sequence
  ENSG00000113368_12 (sequence is synthesized)
tatgaacagcttcttgatgtaaagttagccctggacatggaaatcagtgcttacaggaaactcttagaaggcgaagaagagaggttgaagctgtctccaagcccttcttcccgtgtgaca

SEQ ID NO: 196273 - DNA, 120 bp, Artificial Sequence
  ENSG00000113368_13 (sequence is synthesized)
gtatcccgagcatcctcaagtcgtagtgtacgtacaactagaggaaagcggaagagggttgatgtggaagaatcagaggcgagtagtagtgttagcatctctcattccgcctcagccact

SEQ ID NO: 196274 - DNA, 120 bp, Artificial Sequence
  ENSG00000113368_14 (sequence is synthesized)
ggaaatgtttgcatcgaagaaattgatgttgatgggaaatttatccgcttgaagaacacttctgaacaggatcaaccaatgggaggctgggagatgatcagaaaaattggagacacatca

SEQ ID NO: 196275 - DNA, 120 bp, Artificial Sequence
  ENSG00000113368_15 (sequence is synthesized)
gtcagttataaatatacctcaagatatgtgctgaaggcaggccagactgttacaatttgggctgcaaacgctggtgtcacagccagccccccaactgacctcatctggaagaaccagaac

SEQ ID NO: 196276 - DNA, 120 bp, Artificial Sequence
  ENSG00000113368_16 (sequence is synthesized)
tcgtggggcactggcgaagatgtgaaggttatattgaaaaattctcagggagaggaggttgctcaaagaagtacagtctttaaaacaaccatacctgaagaagaggaggaggaggaagaa

SEQ ID NO: 196277 - DNA, 120 bp, Artificial Sequence
  ENSG00000113368_17 (sequence is synthesized)
gcagctggagtggttgttgaggaagaacttttccaccagcagggaaccccaagagcatccaatagaagctgtgcaattatgtaaaattttcaactgtcttcctcaaaataaagaagtatg

SEQ ID NO: 196278 - DNA, 120 bp, Artificial Sequence
  ENSG00000113368_18 (sequence is synthesized)
gtaatctttacctgtatacagtgcagagccttctcagaagcacagaatatttttatatttcctttatgtgaatttttaagctgcaaatctgatggccttaatttcctttttgacactgaa

SEQ ID NO: 196279 - DNA, 120 bp, Artificial Sequence
  ENSG00000113368_19 (sequence is synthesized)
agttttgtaaaagaaatcatgtccatacactttgttgcaagatgtgaattattgacactgaacttaataactgtgtactgttcggaaggggttcctcaaattttttgactttttttgtat

SEQ ID NO: 196280 - DNA, 120 bp, Artificial Sequence
  ENSG00000113368_20 (sequence is synthesized)
gtgtgttttttctttttttttaagttcttatgaggaggggagggtaaataaaccactgtgcgtcttggtgtaatttgaagattgccccatctagactagcaatctcttcattattctctg

SEQ ID NO: 196281 - DNA, 120 bp, Artificial Sequence
  ENSG00000113368_21 (sequence is synthesized)
ctatatataaaacggtgctgtgagggaggggaaaagcatttttcaatatattgaacttttgtactgaatttttttgtaataagcaatcaaggttataattttttttaaaatagaaatttt

SEQ ID NO: 196282 - DNA, 120 bp, Artificial Sequence
  ENSG00000113368_22 (sequence is synthesized)
gtaagaaggcaatattaacctaatcaccatgtaagcactctggatgatggattccacaaaacttggttttatggttacttcttctcttagattcttaattcatgaggagggtgggggagg

SEQ ID NO: 196283 - DNA, 120 bp, Artificial Sequence
  ENSG00000113368_23 (sequence is synthesized)
gaggtggagggagggaagggtttctctattaaaatgcattcgttgtgttttttaagatagtgtaacttgcttaaatttcttatgtgacattaacaaataaaaaagctcttttaatattga

SEQ ID NO: 196284 - DNA, 120 bp, Artificial Sequence
  ENSG00000113368_24 (sequence is synthesized)
ggaaactcttagaaggcgaagaagagaggtaaggaacttaagggtcaccctaccttatggtccactttttgcctctcaccctttttattgaaataaaaataaatagcattttaaaaagaa

SEQ ID NO: 196285 - DNA, 120 bp, Artificial Sequence
  ENSG00000113368_25 (sequence is synthesized)
ggagcgggggataaggttaccacgcccgcggtggccggggacactctgagtttcgcgtgtggcttttagggacgtttatatttgaatttccctgaaccgccgagtgtgggcggtggcgca

SEQ ID NO: 196286 - DNA, 120 bp, Artificial Sequence
  ENSG00000113368_26 (sequence is synthesized)
gatccgtcccggaaacctccgggctccttcccgcctttctcaggcccggcccctccaaggggtccccgcggggcggcgggagggccctgggcccagagccgcgcgggtgggcagtcccag

SEQ ID NO: 196287 - DNA, 120 bp, Artificial Sequence
  ENSG00000113368_27 (sequence is synthesized)
gcgtccttccttacagccctgagcctggtccgggaaccgcccagccgggagggccgagctgacggttgcccaagggccagattttaaatttacaggcccggcccccgaaccgccgaagcg

SEQ ID NO: 196288 - DNA, 120 bp, Artificial Sequence
  ENSG00000113368_28 (sequence is synthesized)
tttacaggcccggcccccgaaccgccgaagcgcgctgcctgctccccattggcccatggtagtcacgtggaggcgccggggcgtgccggccatgttggggagtgcggcgccgcggcccgc

SEQ ID NO: 196289 - DNA, 120 bp, Artificial Sequence
  ENSG00000113369_0 (sequence is synthesized)
gtctttgtaaggagaccactgagacgagcgggagcgcggagcagcagcctctgctgccctgactttttaagaaatctcaatgaactatttgtagagaatcactgatccggcctgcaagca

SEQ ID NO: 196290 - DNA, 120 bp, Artificial Sequence
  ENSG00000113369_1 (sequence is synthesized)
ttttgcacggcaaaaatatcgatcagtgttaagtgaagatcacattttatatgcgatcttgacttttttgtcttacattatatttttatagattttgttataaacatggtgctgggaaag

SEQ ID NO: 196291 - DNA, 120 bp, Artificial Sequence
  ENSG00000113369_2 (sequence is synthesized)
gtgaagagtttgacaataagctttgactgtcttaatgacagcaatgtccctgtgtattctagtggggataccgtctcaggaagggtaaatttagaagttactggggaaatcagagtaaaa

SEQ ID NO: 196292 - DNA, 120 bp, Artificial Sequence
  ENSG00000113369_3 (sequence is synthesized)
tctcttaaaattcatgcaagaggacatgcgaaagtacgctggactgaatctagaaacgccggctccaatactgcctatacacagaattacactgaagaagtagagtatttcaaccataaa

SEQ ID NO: 196293 - DNA, 120 bp, Artificial Sequence
  ENSG00000113369_4 (sequence is synthesized)
gacatcttaattgggcacgaaagagatgatgataattccgaagaaggcttccacactattcattcaggaaggcatgaatatgcattcagcttcgagcttccacagacaccactcgctacc

SEQ ID NO: 196294 - DNA, 120 bp, Artificial Sequence
  ENSG00000113369_5 (sequence is synthesized)
tcattcgaaggccgacatggcagtgtgcgctattgggtgaaagccgaattgcacaggccttggctactaccagtaaaattaaagaaggaatttacagtctttgagcatatagatatcaac

SEQ ID NO: 196295 - DNA, 120 bp, Artificial Sequence
  ENSG00000113369_6 (sequence is synthesized)
actccttcattactgtcaccccaagcaggcacaaaagaaaagacactctgttgctggttctgtacctcaggcccaatatccttaagtgccaaaattgaaaggaagggctataccccaggt

SEQ ID NO: 196296 - DNA, 120 bp, Artificial Sequence
  ENSG00000113369_7 (sequence is synthesized)
gaatcaattcagatatttgctgagattgagaactgctcttcccgaatggtggtgccaaaggcagccatttaccaaacacaggccttctatgccaaagggaaaatgaaggaagtaaaacag

SEQ ID NO: 196297 - DNA, 120 bp, Artificial Sequence
  ENSG00000113369_8 (sequence is synthesized)
cttgtggctaacttgcgtggggaatccttatcatctggaaagacagagacgtggaatggcaagttgctgaaaattccaccagtttctccctctatcctcgactgtagtataatccgcgtg

SEQ ID NO: 196298 - DNA, 120 bp, Artificial Sequence
  ENSG00000113369_9 (sequence is synthesized)
gaatattcactaatggtatatgtggatattcctggagctatggatttatttcttaatttgccacttgtcatcggtaccattcctctacatccatttggtagcagaacctcaagtgtaagc

SEQ ID NO: 196299 - DNA, 120 bp, Artificial Sequence
  ENSG00000113369_10 (sequence is synthesized)
agtcagtgtagcatgaatatgaactggctcagtttatcacttcctgaaagacctgaagcaccacccagctatgcagaagtggtaacagaggaacaaaggcggaacaatcttgcaccagtg

SEQ ID NO: 196300 - DNA, 120 bp, Artificial Sequence
  ENSG00000113369_11 (sequence is synthesized)
agtgcttgtgatgactttgagagagcccttcaaggaccactgtttgcatatatccaggagtttcgattcttgcctccacctctttattcagagattgatccaaatcctgatcagtcagca

SEQ ID NO: 196301 - DNA, 120 bp, Artificial Sequence
  ENSG00000113369_12 (sequence is synthesized)
gatgatagaccatcctgcccctctcgttgaaggaacacttggttgaatcaagttgatgtgggttccgaactgtatctcttccggctgaggacagagaagtatcttggagacacgtttcag

SEQ ID NO: 196302 - DNA, 120 bp, Artificial Sequence
  ENSG00000113369_13 (sequence is synthesized)
aggaagtggaattacttttgcccagaaaaatggcgaatacatgaaacaaccagtgatcatgctttagaagcctacagcaacattctgagactgctccaacatgcttgaagatctaagctt

SEQ ID NO: 196303 - DNA, 120 bp, Artificial Sequence
  ENSG00000113369_14 (sequence is synthesized)
ttctcttttaaaactggcacatactcagagcagtcttcttagcctatggtcgtacgtgtcaagacatcacgttgtaaagagggatgatttccttcttttgatttgaaaatttgcacatgc

SEQ ID NO: 196304 - DNA, 88 bp, Artificial Sequence
  ENSG00000113369_15 (sequence is synthesized)
agactcttgatactcttaaaacttgtttgtggtcagcacaacaaggaacaaaacaaagctttgaaaaaactttaacatgaaaaaacgc

SEQ ID NO: 196305 - DNA, 120 bp, Artificial Sequence
  ENSG00000113369_16 (sequence is synthesized)
caaaacaaagctttgaaaaaactttaacatgaaaaaacgcactgacatttttttttatttaatatagcctggactttacctgcgtatgcacatgctcagaattgtctactaggctgacta

SEQ ID NO: 196306 - DNA, 120 bp, Artificial Sequence
  ENSG00000113369_17 (sequence is synthesized)
ttacaaacatcaaatgccttcaagccaatcctttttgctgtatgttttgcagcctactgtagtagatacgcaacagataatgtgggaaaaaaagagataagaggaggaagctaataagag

SEQ ID NO: 196307 - DNA, 120 bp, Artificial Sequence
  ENSG00000113369_18 (sequence is synthesized)
actgtcaagattgtataccttcttggtttcttttaagaatttgttgcctttctactattacagcaaagcagcattttgttactgactgcctaaaatcacttaatctcaggtgaacgcatc

SEQ ID NO: 196308 - DNA, 120 bp, Artificial Sequence
  ENSG00000113369_19 (sequence is synthesized)
acttgccaaactgttggaatgctatttgtgttttgttgcactgtttttttcgtttgtttgtttgtttatttggttggctttttggagagggaaatttggaaacgggacatacacaaaagt

SEQ ID NO: 196309 - DNA, 120 bp, Artificial Sequence
  ENSG00000113369_20 (sequence is synthesized)
tacacacccacattccctttttatcatgacatacaagaagaaactagcagagctaagaatggagtgaagaaaggcagtatggcaggcaccagcaaagagttgagggctgttgctcttaaa

SEQ ID NO: 196310 - DNA, 120 bp, Artificial Sequence
  ENSG00000113369_21 (sequence is synthesized)
aattattttttttattattattttgaaagtatggaagttttccattcactggggaaaggagggaaaagtgcatttatttttatacagagttacttaattacctccaaaacacatatgttg

SEQ ID NO: 196311 - DNA, 120 bp, Artificial Sequence
  ENSG00000113369_22 (sequence is synthesized)
gaaatcgcttttgctggtgcaaagtatattaatgagcaggaatacatacattgaggttatgaatagagagctcaatttgtacctttgctgtcttgctcaagcttggtatggcatgaaaac

SEQ ID NO: 196312 - DNA, 120 bp, Artificial Sequence
  ENSG00000113369_23 (sequence is synthesized)
tcgactttattccaaaagtaacttcaaaatttaaaatactagaacgtttgctgcgataaatcttttggatttttgtgtttttctaatgagaatactgtttttcattacctaaagaacaat

SEQ ID NO: 196313 - DNA, 120 bp, Artificial Sequence
  ENSG00000113369_24 (sequence is synthesized)
ttgctaaacatgagaaatcactcactttgattatgtatagattacataggaagaacaatcacatcagtaagttatagtttatattaaaggtaattttctgttggctcataacaaatatac

SEQ ID NO: 196314 - DNA, 120 bp, Artificial Sequence
  ENSG00000113369_25 (sequence is synthesized)
cagcattcatgatagcatttcagcattttccaaggtaccaagtgtacttattttgttgttgttgttgttgttgtattttagaaggaattcagctctgatgtttttaaagaaaaccagcat

SEQ ID NO: 196315 - DNA, 120 bp, Artificial Sequence
  ENSG00000113369_26 (sequence is synthesized)
ctctgatgttgcaacatacgtgtaaaatgggtgttacatctatcctgccatttaaccccacagttaataaagtggctgaaaataatagtagctctggcttggtgcttgacctggttaaat

SEQ ID NO: 196316 - DNA, 120 bp, Artificial Sequence
  ENSG00000113369_27 (sequence is synthesized)
actgtcttaaagctcatacaaaacaaataggcttttccataagtggcctttaagaaaacatggaagacaattcatgtttgacaaatgctgacagggtgaagaaagcccagtgtaaaaatg

SEQ ID NO: 196317 - DNA, 120 bp, Artificial Sequence
  ENSG00000113369_28 (sequence is synthesized)
aatcgcgttttaagtgattcggttaaagagtttgggctcccgtagcaaactaatactagataataaggaaatgggggtgaaatatttttttattgttgaatcattttgtgaatgtccccc

SEQ ID NO: 196318 - DNA, 120 bp, Artificial Sequence
  ENSG00000113369_29 (sequence is synthesized)
tcaaaaaaagctaatggaatatttggcataaagggcatttggtggttttatttttgtttgagggggattgtcagaaaatcccttttctctcttacgtctaactgactagggaacaattgt

SEQ ID NO: 196319 - DNA, 120 bp, Artificial Sequence
  ENSG00000113369_30 (sequence is synthesized)
tgatatgcatagcattggaatacttgtcattatatactcttacaaataacacatgaagcaagaatgaccaatattctgataattggcactggatcacaaaatgtgataaaactttaaatg

SEQ ID NO: 196320 - DNA, 120 bp, Artificial Sequence
  ENSG00000113369_31 (sequence is synthesized)
tataaaactttatcaaataaagttttattttcccctttaaaatgtatttctttagaggcattacttttttaaaaatattggtcaattcctgacataagatgtgaggttcacagttgtatt

SEQ ID NO: 196321 - DNA, 120 bp, Artificial Sequence
  ENSG00000113369_32 (sequence is synthesized)
ccagtattcaagatagattcctgatttttcaattaggaaaagtaaaatccaaaatgttagcaaaacaaagtgcaatattaaatgtttgctttatagattatattctatggctgtttgtaa

SEQ ID NO: 196322 - DNA, 120 bp, Artificial Sequence
  ENSG00000113369_33 (sequence is synthesized)
tttctctttttttccttttttatttggtgctgaatatgtccttgtaggctctgttttaagaaaacaatatgtgggaaatgatttaatttttcctattgctcttccttgtggaaaataaag

SEQ ID NO: 196323 - DNA, 120 bp, Artificial Sequence
  ENSG00000113369_34 (sequence is synthesized)
tgttttgtttttttctgttttgtataattgtttggagatttatttgaatcttgatcatattagtaactcaccatacatgcaaacacattaaattaaactattaaactctattttaagcca

SEQ ID NO: 196324 - DNA, 120 bp, Artificial Sequence
  ENSG00000113369_35 (sequence is synthesized)
agttcttgattgacagcccggcacttgtttaccacggcgcggccgccgccgctcgcttcaatgagactgctgagctggcacaaaaagggagcgaagagggaagaaagggaaaggaaggcg

SEQ ID NO: 196325 - DNA, 120 bp, Artificial Sequence
  ENSG00000113369_36 (sequence is synthesized)
aacttcgggcgccttcgaggggagcgaatttaaatggcccccagctcatcagctagtttttggttctgaaatccgttcaggggaatttgcacaggggacgaggaaaattgtatggagaca

SEQ ID NO: 196326 - DNA, 120 bp, Artificial Sequence
  ENSG00000113369_37 (sequence is synthesized)
tcaaatagctactgattagttcatttctatgactcaagttatttgcagttcctgggacatcttttcatgtatgttagttgcactttcttactttagctttaagaatcttgacttcttttg

SEQ ID NO: 196327 - DNA, 120 bp, Artificial Sequence
  ENSG00000113369_38 (sequence is synthesized)
gagagtgagctcgcgccgcggctggggcgaggctaggaaaccggcgtgcgccggtaaaggttcctccagagcgacccccacccagcccgtactcacgtttgttcccgggcttctgggggc

SEQ ID NO: 196328 - DNA, 120 bp, Artificial Sequence
  ENSG00000113369_39 (sequence is synthesized)
gcccagcccgtgtcaacatcatgttctgtcgcccctcttttgggcctcctaagggccatcgaaaggaaacgacttcaggctttaactgagtagagggcagacgctcctgccggccttaca

SEQ ID NO: 196329 - DNA, 120 bp, Artificial Sequence
  ENSG00000113384_0 (sequence is synthesized)
atattggaaaggcgccgccgccgcctccgccttggagctcggggtgtttcggggactgcggccacaggcaggaaggcgctcctctcctgccccgccgacgcccggccagcccgcttcgcc

SEQ ID NO: 196330 - DNA, 120 bp, Artificial Sequence
  ENSG00000113384_1 (sequence is synthesized)
ctgacctgtttcctcatgactgcccccggccctgctgccgacggacgtcgccccggcgtccggatttaacacggaaacccggatcggaggccgcgcggggaggaggagggcgacccggtc

SEQ ID NO: 196331 - DNA, 120 bp, Artificial Sequence
  ENSG00000113384_2 (sequence is synthesized)
ggtcctgcgaccctctcggcccggctcggcgcctcggcgggagccatgacctcgctgacccagcgcagctccggcctggtgcagcggcgcaccgaggcctcccgcaacgccgccgacaag

SEQ ID NO: 196332 - DNA, 120 bp, Artificial Sequence
  ENSG00000113384_3 (sequence is synthesized)
gagcgggcggcgggcggcggcgccggcagcagcgaggacgacgcgcagagccgccgcgacgagcaggacgacgacgacaagggcgactccaaggaaacgcggctgaccctgatggaggaa

SEQ ID NO: 196333 - DNA, 120 bp, Artificial Sequence
  ENSG00000113384_4 (sequence is synthesized)
gtgctcctgctgggcctcaaggaccgcgagggttacacatcattttggaatgactgtatatcatctggattacgtggctgtatgttaattgaattagcattgagaggaaggttacaacta

SEQ ID NO: 196334 - DNA, 120 bp, Artificial Sequence
  ENSG00000113384_5 (sequence is synthesized)
gaggcttgtggaatgagacgtaaaagtctattaacaagaaaggtaatctgtaagtcagatgctccaacaggggatgttcttcttgatgaagctctgaagcatgttaaggaaactcagcct

SEQ ID NO: 196335 - DNA, 120 bp, Artificial Sequence
  ENSG00000113384_6 (sequence is synthesized)
ccagaaacggtccagaactggattgaattacttagtggtgagacatggaatccattaaaattgcattatcagttaagaaatgtacgggaacgattagctaaaaacctggtggaaaagggt

SEQ ID NO: 196336 - DNA, 120 bp, Artificial Sequence
  ENSG00000113384_7 (sequence is synthesized)
gtattgacaacagagaaacagaacttcctactttttgacatgacaacacatcccctcaccaataacaacattaagcagcgcctcatcaagaaagtacaggaagccgttcttgacaaatgg

SEQ ID NO: 196337 - DNA, 120 bp, Artificial Sequence
  ENSG00000113384_8 (sequence is synthesized)
gtgaatgaccctcaccgcatggacaggcgcttgctggccctcatttacctggctcatgcctcggacgtcctggagaatgcttttgctcctcttctggacgagcagtatgatttggctacc

SEQ ID NO: 196338 - DNA, 120 bp, Artificial Sequence
  ENSG00000113384_9 (sequence is synthesized)
aagagagtgcggcagcttctcgacttagaccctgaagtggaatgtctgaaggccaacaccaatgaggttctgtgggcggtggtggcggcgttcaccaagtaactctgctcggggtgaacc

SEQ ID NO: 196339 - DNA, 120 bp, Artificial Sequence
  ENSG00000113384_10 (sequence is synthesized)
attctcctttctctcaagtaaaccagtagtttttcttctgttgacttctggttttctgtaatttgtactttcccacactataattggcttctgttttacaaaatggtgggtggctttttc

SEQ ID NO: 196340 - DNA, 120 bp, Artificial Sequence
  ENSG00000113384_11 (sequence is synthesized)
ccttcctctttctgtttttaaaaaaagttttactgccatattggcattccattccctgttgccatcctcactgttacctgttttgggtttctggtctactttgactttcaaagtacctcc

SEQ ID NO: 196341 - DNA, 120 bp, Artificial Sequence
  ENSG00000113384_12 (sequence is synthesized)
agcctcctcatacgcacagcttttggatgacctcagcttgagtttctccatatgtgcatgtacatctagcattctgcctacagttcagacagaagtcacaaaaaggccttcaactcacca

SEQ ID NO: 196342 - DNA, 120 bp, Artificial Sequence
  ENSG00000113384_13 (sequence is synthesized)
aaggtaaatatctgtatctattaggacattttttacatagacttcagttgagatgtatacttagcaaaattatttttaaattgaaacagcacagtaaatacttaatataaaatgtccctt

SEQ ID NO: 196343 - DNA, 120 bp, Artificial Sequence
  ENSG00000113384_14 (sequence is synthesized)
ggattttgcttcccatgtaaatctattgtattattacacttgttataattttaactataaaggtccaattgtttcacagagccagtttgggatgggctgcattccatttatgctgtatat

SEQ ID NO: 196344 - DNA, 120 bp, Artificial Sequence
  ENSG00000113384_15 (sequence is synthesized)
agtttgaattatatataaattaccccttcttctggccacccctgctcccatcttagtattttgcaagatctaatcagttgtacacctggtgcccctcgcttgcttcaatcatggttattt

SEQ ID NO: 196345 - DNA, 120 bp, Artificial Sequence
  ENSG00000113384_16 (sequence is synthesized)
gatggcaaaatcgacctcttgtcgctgaaggagagagaaaagatgtgtgtctgattggtcctgggattttttgagctgtgccatttatggtactctttgcctatgcatccccttgttaga

SEQ ID NO: 196346 - DNA, 120 bp, Artificial Sequence
  ENSG00000113384_17 (sequence is synthesized)
ttttttttaaattttatcttactgtttttataatttctattgggaagaggcttgtgaccagtaccaatcttgagtttctttttctgtccacaagtaaattaatatctgctctgaaatgtc

SEQ ID NO: 196347 - DNA, 120 bp, Artificial Sequence
  ENSG00000113384_18 (sequence is synthesized)
atttatctactcacacattcttggggaaaaaaatcaaatgtcagtcctagcagatgttgcatgtaaattggtagcaagtaatgattacaacccagaggattaagaattttgtaacagaaa

SEQ ID NO: 196348 - DNA, 120 bp, Artificial Sequence
  ENSG00000113384_19 (sequence is synthesized)
gctctatgttttaattttttatatacaattaggataattagcattgtcagactataaacctttgctttttaaagtttatttttactatttctttatcactttattgtatcatcaccattg

SEQ ID NO: 196349 - DNA, 120 bp, Artificial Sequence
  ENSG00000113384_20 (sequence is synthesized)
gtttcataatgtaaatactatatgttgaacaaattaaatgtcaaaattttttattaccatagtccatgttaatagtggggctttcaggtgtttagagattttttttgttgttgttaacat

SEQ ID NO: 196350 - DNA, 120 bp, Artificial Sequence
  ENSG00000113384_21 (sequence is synthesized)
tcattgcaaaagtactagatggtgtataactctagagttgaattttaagggattccctaatatgtatactatctttttatctgaagtaataaataaacaatgatcttgaaagtgcctgaa

SEQ ID NO: 196351 - DNA, 120 bp, Artificial Sequence
  ENSG00000113387_0 (sequence is synthesized)
acttccggttctctgtcagtcgcgagcgaacgaccaagagggtgttcgactgctagagccgagcgaagcgatgcctaaatcaaaggaacttgtttcttcaagctcttctggcagtgattc

SEQ ID NO: 196352 - DNA, 120 bp, Artificial Sequence
  ENSG00000113387_1 (sequence is synthesized)
tgacagtgaggttgacaaaaagttaaagaggaaaaagcaagttgctccagaaaaacctgtaaagaaacaaaagacaggtgagacttcgagagccctgtcatcttctaaacagagcagcag

SEQ ID NO: 196353 - DNA, 120 bp, Artificial Sequence
  ENSG00000113387_2 (sequence is synthesized)
cagcagagatgataacatgtttcagattgggaaaatgaggtacgttagtgttcgcgattttaaaggcaaagtgctaattgatattagagaatattggatggatcctgaaggtgaaatgaa

SEQ ID NO: 196354 - DNA, 120 bp, Artificial Sequence
  ENSG00000113387_3 (sequence is synthesized)
accaggaagaaaaggtatttctttaaatccagaacaatggagccagctgaaggaacagatttctgacattgatgatgcagtaagaaaactgtaaaattcgagccatataaataaaacctg

SEQ ID NO: 196355 - DNA, 120 bp, Artificial Sequence
  ENSG00000113387_4 (sequence is synthesized)
tactgttctagttgttttaatctgtctttttacattggcttttgttttctaaatgttctccaagctattgtatgtttggattgcagaagaatttgtaagatgaatacttttttttaatgt

SEQ ID NO: 196356 - DNA, 120 bp, Artificial Sequence
  ENSG00000113387_5 (sequence is synthesized)
gcattattaaaaatattgagtgaagctaattgtcaactttattaaggattactttgtctgcccaccacctagtgtaaaataaaatcaagtaatacaatcttaactgttgtggcctttttt

SEQ ID NO: 196357 - DNA, 120 bp, Artificial Sequence
  ENSG00000113387_6 (sequence is synthesized)
gatcataagagttggtactgtttaaggccaaaagtaacagtttttatagatcttttagtttcaactcagcttttacaataaaaaggatttgtattgcattgagtttataaacttttggtt

SEQ ID NO: 196358 - DNA, 120 bp, Artificial Sequence
  ENSG00000113387_7 (sequence is synthesized)
tgtgaacttcatatttgatcttttctcttccaatcaaatgtctaggcttgtttgacttccacccccaatggtttttcactctttttatttacttcattttcctttaataacttaatctct

SEQ ID NO: 196359 - DNA, 120 bp, Artificial Sequence
  ENSG00000113387_8 (sequence is synthesized)
tcatgttcagtttttacttcactctttattcttttctttgattatggtatgcttatttggaaagtcagtgaaactgtcaaaatgttatctcaataagatacttatatgagaactacaatc

SEQ ID NO: 196360 - DNA, 120 bp, Artificial Sequence
  ENSG00000113387_9 (sequence is synthesized)
accgaatctactgtattcaatattagcagatctaatttgataaacaacatggcttgtgtgaaaactgagcaggtgtttgtttacccatagtgttctgtgtagttattgcttagtctgcag

SEQ ID NO: 196361 - DNA, 120 bp, Artificial Sequence
  ENSG00000113387_10 (sequence is synthesized)
aaaataatgacttagatgagatgtctgacttgctttcacttattaaacatgttcaccatgggatgatgtctgtaacatcagatattgttcaactagactaggatttaataaaaattgtga

SEQ ID NO: 196362 - DNA, 120 bp, Artificial Sequence
  ENSG00000113387_11 (sequence is synthesized)
aagcttactggcctaacattttattttataatattgggtatgaattatatgtagccagagatgtcattaagctttactgttatagtaggtaatatggttagtttgtagggaaaagagcat

SEQ ID NO: 196363 - DNA, 120 bp, Artificial Sequence
  ENSG00000113387_12 (sequence is synthesized)
atgagcacatgcttgtgtattttggcctttgccccagtagaacagaccaatggcattctagacttgatgatactaagttttagcagacactagtaagtggtttgtatttaaccatactga

SEQ ID NO: 196364 - DNA, 120 bp, Artificial Sequence
  ENSG00000113387_13 (sequence is synthesized)
tgaagcagacagattgaggcacagattttagtggctttgtggcaataaatagggcatggtgtgccttaggaaaagaatgtttataaagggaattataactgaaattaaaggaggcggcag

SEQ ID NO: 196365 - DNA, 120 bp, Artificial Sequence
  ENSG00000113387_14 (sequence is synthesized)
agtagaaaaaggaaagttttaaagacatataaaagattcttgttgacaaattatttttggtagcaaatctcaaatggttacctgctattaaggtctgccatattagagttttgcactatt

SEQ ID NO: 196366 - DNA, 120 bp, Artificial Sequence
  ENSG00000113387_15 (sequence is synthesized)
ttgctaccaagtttgattcatacatctaaaacattttgtagttacttgtcaaggacttaatttgaaaatcatttgccaggccacatagttatcaatttttttttctatcagctattctgt

SEQ ID NO: 196367 - DNA, 120 bp, Artificial Sequence
  ENSG00000113387_16 (sequence is synthesized)
tgtatttctaaaacattttttagatgactttttaaagtatatttagcagtaaccttatgaggttcaaattggtaaatctcttgtaatttagccttcatcgaataataggtaccagtgtat

SEQ ID NO: 196368 - DNA, 120 bp, Artificial Sequence
  ENSG00000113387_17 (sequence is synthesized)
taaaaatgtgtattttttgcagccccttgaaccagagtaggttcagagaaactcccaaagtttgtactttagacacatcatgcttgattggtaacttccctccttttttggggaacatgt

SEQ ID NO: 196369 - DNA, 120 bp, Artificial Sequence
  ENSG00000113387_18 (sequence is synthesized)
ttgtgtcctattaacttaattggatagatttttaaatatttcttatttttggcacacggaaagggtagttcgagtacagaactttgatttttggtgtagatgcagagggaatgatgggta

SEQ ID NO: 196370 - DNA, 120 bp, Artificial Sequence
  ENSG00000113387_19 (sequence is synthesized)
aatttcctaggtttatgtgaatttagggggtgtatgcattttgaaacaatctactaacagatggtgctgaaatctattacctacatgttttctagttgttcagcattatgttaatgaagc

SEQ ID NO: 196371 - DNA, 120 bp, Artificial Sequence
  ENSG00000113387_20 (sequence is synthesized)
ctccatataaggagtgtttctctggcacagttggtaagttgactgctaacttcatttaaatgtgttactggatatgcagtatactgaaattattaatcagtttgtgtataggaaaagaga

SEQ ID NO: 196372 - DNA, 120 bp, Artificial Sequence
  ENSG00000113387_21 (sequence is synthesized)
actgggttaaaagcaaattaacttgttctgaaaagaaagtatagattaattttgttttctgtttaaattttatctccttggtaaagatttttttttcctgggcagaaaacttggcatttt

SEQ ID NO: 196373 - DNA, 120 bp, Artificial Sequence
  ENSG00000113387_22 (sequence is synthesized)
taggcgtagataccttaccttacaatgccaaaatgaatttaattccagtactcaggtttttccctttaacagactctatgtgtatcagggctttctaatgggtttttcctcttcgttttt

SEQ ID NO: 196374 - DNA, 120 bp, Artificial Sequence
  ENSG00000113387_23 (sequence is synthesized)
aaaatgtgagtagcatttgaccaatttccagtgctcttagcattttacttaaagaacaaccactacaaaagaaaatctttgtaatttgattgtcttttgctttgcttcattaatgcctaa

SEQ ID NO: 196375 - DNA, 120 bp, Artificial Sequence
  ENSG00000113387_24 (sequence is synthesized)
gaacttaagaatactcctacctcattagctactcaagatgctgtgacgatcaaatctattctacataatgcgtttagaaacaaagacttgggtgaaaaatgaaataagtatattctgact

SEQ ID NO: 196376 - DNA, 120 bp, Artificial Sequence
  ENSG00000113387_25 (sequence is synthesized)
tggctattgaggggaaaattcagtattaagtgttcctcacaggagatatgttagcagaatactataaaagtttgaaatttttaaaaagtaaaagtacttaaatttaggtatctctcctga

SEQ ID NO: 196377 - DNA, 120 bp, Artificial Sequence
  ENSG00000113387_26 (sequence is synthesized)
aattctttgcagttcattttttatggcagttaatccagtgaaacactcaaaagtttttttttttttaaaagtgtttttccagataaactgtagggtgaacattcacataatcacaaatat

SEQ ID NO: 196378 - DNA, 120 bp, Artificial Sequence
  ENSG00000113387_27 (sequence is synthesized)
gtaattctgtaattgtggaatgcttgtatgctttgttttcgtacatcttccatggagatgtctgaatataatactccatctgtgaatattttaaatgttgaaataaaagtaagaaatgtg

SEQ ID NO: 196379 - DNA, 120 bp, Artificial Sequence
  ENSG00000113387_28 (sequence is synthesized)
gaccaagagggtgttcgactgctagagccgagcgaagctggtttcagtatcagttacttgaattacaagctgcttctccccccacccccacattggaacaggctcattaaggatgcctaa

SEQ ID NO: 196380 - DNA, 120 bp, Artificial Sequence
  ENSG00000113387_29 (sequence is synthesized)
aaaacagtcctcttagtgcaccagaagggaccttttggcaagtggcatcttgccagaaaattaactcaaaacaaatccctaacagctcagagatggtggaggggaatttcagaaacagtc

SEQ ID NO: 196381 - DNA, 120 bp, Artificial Sequence
  ENSG00000113387_30 (sequence is synthesized)
agcagggcagggccatgcaactgcttacaggaattgcctcactcacactttgatgttgattctctgcagagcttccgctgcttcaaaacggcgtgcaggagtcagagacattacatcagg

SEQ ID NO: 196382 - DNA, 120 bp, Artificial Sequence
  ENSG00000113387_31 (sequence is synthesized)
gcagagcttccgctgcttcaaaacggcgtgcaggagtcagagacattacatcaggaagatactgcagagatattctactccatctcattcattgtacagattctaaactccctgaaggag

SEQ ID NO: 196383 - DNA, 120 bp, Artificial Sequence
  ENSG00000113387_32 (sequence is synthesized)
gtcagtcgcgagcgaacgaccaagagggtgttcgactgctagagccgagcgaagccaaaggctgaagatttcgtttctctttttaaagttgcgttttgtataaattctacaatagtggtt

SEQ ID NO: 196384 - DNA, 120 bp, Artificial Sequence
  ENSG00000113387_33 (sequence is synthesized)
tcgtataagaatcacagttctttatgatgtatatgctattttttgctgctaatctccagattttgtggatataaaatatattgtcatctgattttatttttttccaataaaatgtgattt

SEQ ID NO: 196385 - DNA, 120 bp, Artificial Sequence
  ENSG00000113387_34 (sequence is synthesized)
cagtgatctttattttttctatctttaagtaatatatccctatactactatctcatcacttgtttaatttttgctaataagaatttgtcagttttactctttttttccccccaagggaga

SEQ ID NO: 196386 - DNA, 120 bp, Artificial Sequence
  ENSG00000113387_35 (sequence is synthesized)
ggcagctgttgggcagattccttttttttttaaaaaaaaaaatgtttttgaggtatagtttatgtccaataaaacgcacacatttaaaagcataccttgataggctgtggtaaatgtaca

SEQ ID NO: 196387 - DNA, 120 bp, Artificial Sequence
  ENSG00000113387_36 (sequence is synthesized)
cgcctttgtggccagaccattttcatcaccccaggaagttcctcttggctttacagtcattgctcatgtcctaggtaatcactgatcttatttctaccactatagatttatgttgtctct

SEQ ID NO: 196388 - DNA, 120 bp, Artificial Sequence
  ENSG00000113387_37 (sequence is synthesized)
tctagaactttgtataaatggatacatgcagtctattttttgtgtctggcttttgctcagtataatgtgttgagattagttcttgttgcatatatcagtaattttattgctgagtagtat

SEQ ID NO: 196389 - DNA, 120 bp, Artificial Sequence
  ENSG00000113387_38 (sequence is synthesized)
tttgtatgataatactacaacttgtaaatccattcaccttgggtggacattgggattgtatcaagtcttgggctattaggaatacaactgctgtgaatattcttgtacaagtcattttgt

SEQ ID NO: 196390 - DNA, 120 bp, Artificial Sequence
  ENSG00000113387_39 (sequence is synthesized)
ggacattttttcccttttgggtaaataccagatacatttgctgagtcgtagggtaaatgtgtaactgtataagacactgtcaaaccattttccatagtagctgtagcattttacacagcc

SEQ ID NO: 196391 - DNA, 120 bp, Artificial Sequence
  ENSG00000113387_40 (sequence is synthesized)
atcggtactacttaggagattccagttgctccacatcctcgctagatattgtcagtcttttaagtttttttctttttagttacattgaatgtataatggtagctcatggtggttttactt

SEQ ID NO: 196392 - DNA, 120 bp, Artificial Sequence
  ENSG00000113387_41 (sequence is synthesized)
tccatttccctcatgtacatgtcttaattcattgtacatctttagtgtgtttattggttatttttatatcttttgtgaagagtatcttttggccacttaaaatgccaggtcatttgagtt

SEQ ID NO: 196393 - DNA, 120 bp, Artificial Sequence
  ENSG00000113387_42 (sequence is synthesized)
gtaacactttatatattttgtcagatgtaagtataattaatattttttttagacttcagggaaactttagttttcaaagcaatctagttcaaaaatgagtggaggttaacagagaggaaa

SEQ ID NO: 196394 - DNA, 120 bp, Artificial Sequence
  ENSG00000113387_43 (sequence is synthesized)
atatgaaaccagagagaatcaaacagacagaataaggggggactggcagttggtcaggggcgtctgtgacagatcttctctctcttggaaatgaggtcctcacggattctggtcagttca

SEQ ID NO: 196395 - DNA, 120 bp, Artificial Sequence
  ENSG00000113387_44 (sequence is synthesized)
tcattttcttcacgtccacggttctgcttcttcctcaggctctcctcgaaggccaagacccctgtggctccaacttgagtgaatattttctttaggtttctggtttacctttttattttc

SEQ ID NO: 196396 - DNA, 120 bp, Artificial Sequence
  ENSG00000113387_45 (sequence is synthesized)
tgaagcatctttttaaaaaaggctttagtgtgattgtctattctatcgatttttctccttttttgcttaatgcttattttctgtccaagacgtattttgcctaccatggccacaaaaatt

SEQ ID NO: 196397 - DNA, 120 bp, Artificial Sequence
  ENSG00000113387_46 (sequence is synthesized)
tttgccagtgttttttcctagaagttttatagttttagttttcacatttaggtctataattcatgtagaattaatttctctgtgtatgatgtaagatagagatttagagtcttccccacc

SEQ ID NO: 196398 - DNA, 120 bp, Artificial Sequence
  ENSG00000113387_47 (sequence is synthesized)
ccaaatgcagatagcctgttgtttcaacaccatttgttgaaaagagtattcttattcctttgaattaccttggattttaccccctccccccaaaaaaatcagtgaatatatccaatgcgt

SEQ ID NO: 196399 - DNA, 120 bp, Artificial Sequence
  ENSG00000113387_48 (sequence is synthesized)
gtgtattttttgactccgttgtgttccactgacctcttatgtctgtctttactccagtactgcattgtcttcccttactatattatagtgagtcttggaaagtgctaagagacactttgt

SEQ ID NO: 196400 - DNA, 120 bp, Artificial Sequence
  ENSG00000113387_49 (sequence is synthesized)
tgaggaaagcctgttcttttctctggaatttgtaatttgtggtaagcagatatataagatttttgaaaaataattttctgtgaatatttttaagttctcaatctgactgtgagtgaggtg

SEQ ID NO: 196401 - DNA, 120 bp, Artificial Sequence
  ENSG00000113387_50 (sequence is synthesized)
atattcagaatggttggtgaagcagtgtagctagttgcatctgtggattcctcttggttgtagtttgtactgcaaaatattgcttcctaatgatttttttttttgctggtaaaaaccata

SEQ ID NO: 196402 - DNA, 120 bp, Artificial Sequence
  ENSG00000113387_51 (sequence is synthesized)
aaagtatattcacattgttgtgaaacagattgccgaaactgtttcatcttgcaaaactgaacctctgtggccattaaacaacagttccccttctcccagccctggtaaccaccattctac

SEQ ID NO: 196403 - DNA, 120 bp, Artificial Sequence
  ENSG00000113387_52 (sequence is synthesized)
tttttgttcctgtgaacttgacatcatgtaagtggaatcataaagtattacctttttcctttttatgactggcttatttcattgacgtagtatgtaacaggatttccttttttaaaagct

SEQ ID NO: 196404 - DNA, 120 bp, Artificial Sequence
  ENSG00000113387_53 (sequence is synthesized)
aattgatattccattgtgtgtctattccaccccccctctcccattttgtttatcagttcatctctgggtggatatttgtgttgtttccacttcttggctcttgtgaataatgctgctatg

SEQ ID NO: 196405 - DNA, 120 bp, Artificial Sequence
  ENSG00000113387_54 (sequence is synthesized)
aacatgggtgtgcagatgtctcttggagtctgtgctttcaattttttgggatatatattcagaagtaggattgctggatcatatgatagtttaaacagcaatttcctttggttgcagttt

SEQ ID NO: 196406 - DNA, 120 bp, Artificial Sequence
  ENSG00000113387_55 (sequence is synthesized)
tgatactgagagtagtacagttgacccttgaacaatgcagggtcaaaatgcaaggcaccaacccctgtgcagttgaaaatctggttataacttttgactttgtcaaaactgctaagtata

SEQ ID NO: 196407 - DNA, 89 bp, Artificial Sequence
  ENSG00000113387_56 (sequence is synthesized)
ctggttataacttttgactttgtcaaaactgctaagtatagcctactgttgactggtagccttaacagtaacataaacagttaacatat

SEQ ID NO: 196408 - DNA, 120 bp, Artificial Sequence
  ENSG00000113387_57 (sequence is synthesized)
agaaaatcataagggagaaaaattacattttactgtactgtatggtgtttatcaataacattagtttacgttgtctgtttataagatatgtcatctgttaataaaatatgtcatctgtta

SEQ ID NO: 196409 - DNA, 120 bp, Artificial Sequence
  ENSG00000113387_58 (sequence is synthesized)
tgtcatctgttaataaaatatgtcatctgttagaaattgtaggcaaccacagctgcagatttcagtccgtggtacatatcaagcaattcaacttttttatttttatttttatttttattt

SEQ ID NO: 196410 - DNA, 84 bp, Artificial Sequence
  ENSG00000113387_59 (sequence is synthesized)
ttttatttttttgcattttaaaattaaagacaggatcttgctgtgttgcccagattggattcaagctcctgggctcaagtgatc

SEQ ID NO: 196411 - DNA, 120 bp, Artificial Sequence
  ENSG00000113387_60 (sequence is synthesized)
catgccttctctctgcttcttgggagcactttcagcatcactaggggcactttgtataggactcatggtgttatttaaagtttatggtattgcagtaatcatgatgaaaaataatgtgaa

SEQ ID NO: 196412 - DNA, 120 bp, Artificial Sequence
  ENSG00000113387_61 (sequence is synthesized)
aaccgtgagagatcactttttactgcaatacgcaatttgttggagacatgaactgctcagcagagatgattagcatcacatggtgttttacacaaggtgttttaagcagatacttgtaac

SEQ ID NO: 196413 - DNA, 120 bp, Artificial Sequence
  ENSG00000113387_62 (sequence is synthesized)
atttgagtacactgagataacaggaagtggctatgaagttaacactagtacactactgtagttaattttatgcagttatgaattaatactccatctttgtttacatttctctctaacttc

SEQ ID NO: 196414 - DNA, 120 bp, Artificial Sequence
  ENSG00000113387_63 (sequence is synthesized)
atataatagatttgtatgttttatgatagtaagtgataaaataacctcatatctaggtatgttttatgcattcatgacatacctaactttttcttaatgttttcgttatttctaggctat

SEQ ID NO: 196415 - DNA, 120 bp, Artificial Sequence
  ENSG00000113387_64 (sequence is synthesized)
gcagttgttctgtgagttttttcaaattgtcaagtctgcaaaaatttttccagtatatttattgaaaaaaatatgcatataagtgggacctgcacagttcagagccatgttgttcaaggg

SEQ ID NO: 196416 - DNA, 120 bp, Artificial Sequence
  ENSG00000113387_65 (sequence is synthesized)
tcagcagtagtcattttcatgattagatgtagagtgagcatgcagcaagttgtgaatatgaatacaattgaaacagataccactcttgaaaggagcacctctttttatgtttgtttcttt

SEQ ID NO: 196417 - DNA, 120 bp, Artificial Sequence
  ENSG00000113387_66 (sequence is synthesized)
aaaatggcgcttggtgcaaatcccgccccttcccacgccgtcttctccgcacttcgccgcctcccacgccccctccgaccaacctgtctcccctcgcccgagcggctgctagccacgggg

SEQ ID NO: 196418 - DNA, 120 bp, Artificial Sequence
  ENSG00000113387_67 (sequence is synthesized)
ttctagcggcttgctggggccgcgcgaccccttccctggtcttgtgcttgtcaccttcctgttataccgaagtcgtgtgcccttcagtcctggttcattttcacctcgtttttttctgat

SEQ ID NO: 196419 - DNA, 120 bp, Artificial Sequence
  ENSG00000113387_68 (sequence is synthesized)
ccctccatttttttttctaccaaagaaatcgtatgtgggatcccaaaccacaaaataaccgttcctgtggttaatactactataatgcctgaagtgtcttttgggatcctgagaacagag

SEQ ID NO: 196420 - DNA, 120 bp, Artificial Sequence
  ENSG00000113387_69 (sequence is synthesized)
tttgaaaacattactagacagaaggattggttagattcatagttttgttgttgagtgaaacttgcttatgtatatatttatgatattttggatgtagtcttttgattgtttaaatcttaa

SEQ ID NO: 196421 - DNA, 120 bp, Artificial Sequence
  ENSG00000113387_70 (sequence is synthesized)
gttcgactgctagagccgagcgaagcgtgagtgcgcgggaccccctacccctactcctcggggcccccaccctcccagccgggccgtgagctgccttcggccctccactcctctcgccgg

SEQ ID NO: 196422 - DNA, 120 bp, Artificial Sequence
  ENSG00000113387_71 (sequence is synthesized)
caatggccgcgggaaatggcggctctgccttacctcccccttcccctcggcgtccccggcccccttctccgtttctgactccacgcctgacgcgctgtgggcccttccgcggtagactcc

SEQ ID NO: 196423 - DNA, 120 bp, Artificial Sequence
  ENSG00000113387_72 (sequence is synthesized)
gcagagatgataacatgtttcaggaattattcataacctttatcacaggggtccctcctgcacaggaggtgagcggtgtgtgagtgaacattgcagcccgagctctgcctcctgtcagat

SEQ ID NO: 196424 - DNA, 88 bp, Artificial Sequence
  ENSG00000113387_73 (sequence is synthesized)
gcgttccttattccttatgagaatctaatgcctgatggtgggataatttttatcctgaaacgatcacctttccccttccctacctgct

SEQ ID NO: 196425 - DNA, 73 bp, Artificial Sequence
  ENSG00000113387_74 (sequence is synthesized)
aggagtcagagacattacatcaggaagatactgcagagatattctactccatctcattcattgtggattctac

SEQ ID NO: 196426 - DNA, 120 bp, Artificial Sequence
  ENSG00000113389_0 (sequence is synthesized)
ggggggcagagggcgagtcggcggcggcgagggcaagctctttcttgcggcacgatgccgtctctgctggtgctcactttctccccgtgcgtactactcggctgggcgttgctggccggc

SEQ ID NO: 196427 - DNA, 120 bp, Artificial Sequence
  ENSG00000113389_1 (sequence is synthesized)
ggcaccggtggcggtggcgttggcggcggcggcggtggcgcgggcataggcggcggacgccaggagagagaggcgctgccgccacagaagatcgaggtgctggtgttactgccccaggat

SEQ ID NO: 196428 - DNA, 120 bp, Artificial Sequence
  ENSG00000113389_2 (sequence is synthesized)
gactcgtacttgttttcactcacccgggtgcggccggccatcgagtatgctctgcgcagcgtggagggcaacgggactgggaggcggcttctgccgccgggcactcgcttccaggtggct

SEQ ID NO: 196429 - DNA, 120 bp, Artificial Sequence
  ENSG00000113389_3 (sequence is synthesized)
tacgaggattcagactgtgggaaccgtgcgctcttcagcttggtggaccgcgtggcggcggcgcggggcgccaagccagaccttatcctggggccagtgtgcgagtatgcagcagcgcca

SEQ ID NO: 196430 - DNA, 120 bp, Artificial Sequence
  ENSG00000113389_4 (sequence is synthesized)
gtggcccggcttgcatcgcactgggacctgcccatgctgtcggctggggcgctggccgctggcttccagcacaaggactctgagtactcgcacctcacgcgcgtggcgcccgcctacgcc

SEQ ID NO: 196431 - DNA, 120 bp, Artificial Sequence
  ENSG00000113389_5 (sequence is synthesized)
aagatgggcgagatgatgctcgccctgttccgccaccaccactggagccgcgctgcactggtctacagcgacgacaagctggagcggaactgctacttcaccctcgagggggtccacgag

SEQ ID NO: 196432 - DNA, 120 bp, Artificial Sequence
  ENSG00000113389_6 (sequence is synthesized)
gtcttccaggaggagggtttgcacacgtccatctacagtttcgacgagaccaaagacttggatctggaagacatcgtgcgcaatatccaggccagtgagagagtggtgatcatgtgtgcg

SEQ ID NO: 196433 - DNA, 120 bp, Artificial Sequence
  ENSG00000113389_7 (sequence is synthesized)
tcaacattgagctcttcaacagctcttcctatggagatggctcatggaagagaggagacaaacacgactttgaagctaagcaagcatactcgtccctccagacagtcactctactgagga

SEQ ID NO: 196434 - DNA, 120 bp, Artificial Sequence
  ENSG00000113389_8 (sequence is synthesized)
cagtgaaacctgagtttgagaagttttccatggaggtgaaaagttcagttgagaaacaagggctcaatatggaggattacgttaacatgtttgttgaaggattccacgatgccatcctcc

SEQ ID NO: 196435 - DNA, 120 bp, Artificial Sequence
  ENSG00000113389_9 (sequence is synthesized)
tctacgtcttggctctacatgaagtactcagagctggttacagcaaaaaggatggagggaaaattatacagcagacttggaacagaacatttgaaggtatcgccgggcaggtgtccatag

SEQ ID NO: 196436 - DNA, 120 bp, Artificial Sequence
  ENSG00000113389_10 (sequence is synthesized)
atgccaacggagaccgatatggggatttctctgtgattgccatgactgatgtggaggcgggcacccaggaggttattggtgattattttggaaaagaaggtcgttttgaaatgcggccga

SEQ ID NO: 196437 - DNA, 120 bp, Artificial Sequence
  ENSG00000113389_11 (sequence is synthesized)
atgtcaaatatccttggggccctttaaaactgagaatagatgaaaaccgaattgtagagcatacaaacagctctccctgcaaatcatgtggcctagaagaatcggcagtgacaggaattg

SEQ ID NO: 196438 - DNA, 120 bp, Artificial Sequence
  ENSG00000113389_12 (sequence is synthesized)
tcgtgggggctttactaggagctggcttgctaatggccttctactttttcaggaagaaatacagaataaccattgagaggcgaacccagcaagaagaaagtaaccttggaaaacatcggg

SEQ ID NO: 196439 - DNA, 120 bp, Artificial Sequence
  ENSG00000113389_13 (sequence is synthesized)
aattacgggaagattccatcagatcccatttttcagtagcttaaaggaagccccccactttttttttttctgcctgagattctttaaggagatagacgggttgaaagacatcaatgaaac

SEQ ID NO: 196440 - DNA, 120 bp, Artificial Sequence
  ENSG00000113389_14 (sequence is synthesized)
ggcgcgaatcaatgagatcaaatgcgagggagatgcaccgtcaattacaaacacttggacaagtctaactttttttttcttctacaaaaacgctttcaaaagcaaccttagcaacgccca

SEQ ID NO: 196441 - DNA, 120 bp, Artificial Sequence
  ENSG00000113389_15 (sequence is synthesized)
aataagaagccacctctaagcaaaatagtatatgtataaacggagggcgaatatatacaagtatatatatatgtatattacagacgcacaggtttacacccggtgaactttttctttttc

SEQ ID NO: 196442 - DNA, 120 bp, Artificial Sequence
  ENSG00000113389_16 (sequence is synthesized)
tttttcttttttttttaagaaaaactagtgacattgcagagaaggacgcttcctctctatcttttggcgcattagtgaagggggtattctattttgttaaagcgcccaagggggcgcagg

SEQ ID NO: 196443 - DNA, 120 bp, Artificial Sequence
  ENSG00000113389_17 (sequence is synthesized)
aaggggcgttcttgaagaattcataattttaagcagttagtaatttcattttaaaatttctgtagaagctcaggaattatgattaatcaccatctgcctccaggcctttcatctcatgac

SEQ ID NO: 196444 - DNA, 120 bp, Artificial Sequence
  ENSG00000113389_18 (sequence is synthesized)
aaacaaatataataatgatatcgtgtcactctgttaaatgttcatactgtttcaagcccatatgattagatttatgtttttaaaatctgttgtctccatatcttgatggcttttgggagc

SEQ ID NO: 196445 - DNA, 120 bp, Artificial Sequence
  ENSG00000113389_19 (sequence is synthesized)
atttcacacaaggatataaaatgcggttttcttaaatgaaatgttttgtagctagaataaaatcatttttacaagtacagcattcttggaaagaatttaacacccaaaaaggggaaaatg

SEQ ID NO: 196446 - DNA, 120 bp, Artificial Sequence
  ENSG00000113389_20 (sequence is synthesized)
taatgaaaaatctcaaggttggaaatacagccttactctctctagagctggaggacaggtttgtggttgaggacttctctgtccgatgtctacattcaggttctgacttcatatcttgaa

SEQ ID NO: 196447 - DNA, 120 bp, Artificial Sequence
  ENSG00000113389_21 (sequence is synthesized)
aaaggatttcctccctgtctttttcagtgtctcataaacgctactctggattgttgtaaatattagtgagatgggaggatttacagaagaaaagcaagtcaaaaatatttcctttttgat

SEQ ID NO: 196448 - DNA, 120 bp, Artificial Sequence
  ENSG00000113389_22 (sequence is synthesized)
gtaaaaaaaaaaagccctatttcgcactaacattttattttacaagtattttaatcttatattttggtattagaaaaatttgtctattttttcattttgaagattaaatgttgcttacat

SEQ ID NO: 196449 - DNA, 120 bp, Artificial Sequence
  ENSG00000113389_23 (sequence is synthesized)
tttaaaagcatgggtgaagtgtacaacaaaccaataatgataaaaaatacttctctttttctccctgtttccctttttcccttggccacagccaaatgctaattgctgctttaattacag

SEQ ID NO: 196450 - DNA, 120 bp, Artificial Sequence
  ENSG00000113389_24 (sequence is synthesized)
agatgtgtaaatgtattcagattacaaactctacaggaatacatcaacattttaactcttttgcgtttttactgtttaactgttttaaatgcaagttattttagggtgacactccttcca

SEQ ID NO: 196451 - DNA, 120 bp, Artificial Sequence
  ENSG00000113389_25 (sequence is synthesized)
gttctggccagatcatgagtttcaagatcaagagtaaaaagttattagaattaaacagttttataaagggaggcagcccttttccctcaagaacaactttgttgagagttactacttgac

SEQ ID NO: 196452 - DNA, 120 bp, Artificial Sequence
  ENSG00000113389_26 (sequence is synthesized)
agcaagcacagaaatgacaaatttaaaacttttacacatggcatttaccaaaattcccagtgattattttgtttaaaagagggaacctaaatatctactctattccctttcagttaactc

SEQ ID NO: 196453 - DNA, 120 bp, Artificial Sequence
  ENSG00000113389_27 (sequence is synthesized)
cacagaactttgtaggcatccatgaatacctgtaatagtgggttaggtgtggagataaggaatttggacaaagttgagtaagtttttactgggtatctgctttgcacccagtagtctgca

SEQ ID NO: 196454 - DNA, 120 bp, Artificial Sequence
  ENSG00000113389_28 (sequence is synthesized)
acatgagtttaaactcaggttactactttcacttatactttatggagaagatagacagtgagggaggaatgggaagctgtcatgagagtgcaccgtcttggaattacataactggggtct

SEQ ID NO: 196455 - DNA, 120 bp, Artificial Sequence
  ENSG00000113389_29 (sequence is synthesized)
ttcctcaataacattttgagcatctgaaaaatagtttaaaaaattgtcttaatatctattaaaaggcatgtctagtgaggaaacaggagagtctgagcaatcccttggtggcgatgaagg

SEQ ID NO: 196456 - DNA, 120 bp, Artificial Sequence
  ENSG00000113389_30 (sequence is synthesized)
aacagtggaggcaaaggtaagcgcaagctgcctgtcccagatgctggcccatgtgtgagtgcttccctggagaagtccgcttctgttgctcccacctgagtcacagttaacagattattt

SEQ ID NO: 196457 - DNA, 120 bp, Artificial Sequence
  ENSG00000113389_31 (sequence is synthesized)
ctgtgtgaggcacatttcccttctgttgtttaagaaatgggagctgggaggcagctgagagggcgtgataaaagaattaagtgtgatcaactgaaacaactatgttgtagttctccatgc

SEQ ID NO: 196458 - DNA, 120 bp, Artificial Sequence
  ENSG00000113389_32 (sequence is synthesized)
tggatgcaaaggaaaaagtgtcgaattccaaaaaggatggaagaagaaggcaagaagggcaaactccagaagttctagtgcaggaagagagtttgagaagtaaaatccaggcaagcaaag

SEQ ID NO: 196459 - DNA, 120 bp, Artificial Sequence
  ENSG00000113389_33 (sequence is synthesized)
cgttgtaccacttgggactccccaaagtgaaacagcaaggaaggattgtgtccatcttacttacttgaattggagagcttgtttctctctcatttttatttttcaatgatgttttcttta

SEQ ID NO: 196460 - DNA, 120 bp, Artificial Sequence
  ENSG00000113389_34 (sequence is synthesized)
tattttagagatattcattttctcttatcttgtgcttgtaaaaagcatttacatttcaagtctatgtgcttattacaggggaaaaataatctacctggttgcagtctttgagtataaaca

SEQ ID NO: 196461 - DNA, 120 bp, Artificial Sequence
  ENSG00000113389_35 (sequence is synthesized)
tttctaacctttttaaaacttctatagcagcccattaacactaacatttttagagcaaatatattctattttaacttcaggtagaggaatagtcctaaacttaatatgatagctctagat

SEQ ID NO: 196462 - DNA, 120 bp, Artificial Sequence
  ENSG00000113389_36 (sequence is synthesized)
aagatcttagagataagtgagcatttagtattctaaaagtggcagaacaaatcatgaggtttctggatgctataccaatttaaaatcaattcttatgttaatattgattgcttatttaca

SEQ ID NO: 196463 - DNA, 120 bp, Artificial Sequence
  ENSG00000113389_37 (sequence is synthesized)
tgtcagtcatctactttttttctttgaaatctgcatatgggttacaaaaactctgttaggttttgaaaattccattaagttggaaaccttggttaaaaatgtaggtgcctggcccatggt

SEQ ID NO: 196464 - DNA, 120 bp, Artificial Sequence
  ENSG00000113389_38 (sequence is synthesized)
taccctggattcaggtctctcatgattatatttggggatttacgttcctaactgctaagcaacatctttgacaactagtaattcatactctactagtagtcacatgtcatatagtaaaat

SEQ ID NO: 196465 - DNA, 120 bp, Artificial Sequence
  ENSG00000113389_39 (sequence is synthesized)
aaatagggctttagttcttaagtaattctataggattttaccctgaaatccagggtgttcagatttcaaaaaggataatttatcagtattttctcatccagtcaaacttcagctgacatt

SEQ ID NO: 196466 - DNA, 120 bp, Artificial Sequence
  ENSG00000113389_40 (sequence is synthesized)
gatacaggtcaaaatgcgtagatgctttttggtgttggaaataagtgtctgtcttatggtcatcattgtcttcttagatttttgggtaggggggccaggtagggggagactcagaaataa

SEQ ID NO: 196467 - DNA, 120 bp, Artificial Sequence
  ENSG00000113389_41 (sequence is synthesized)
aagcgttccccagataacttcaatctggaaagaattttttgtatagagtccatctctccctcaagactgaccacaggtttcatgagaaggtccctgaaaacatcacatttctctgaagaa

SEQ ID NO: 196468 - DNA, 120 bp, Artificial Sequence
  ENSG00000113389_42 (sequence is synthesized)
ccatcaacttgtcttttcttgaaccacaggaatggttctacagaccctactataattcttcacatttcagaacccatgtttaatggagggaagagagaaatgcatgggaaaagaacacct

SEQ ID NO: 196469 - DNA, 120 bp, Artificial Sequence
  ENSG00000113389_43 (sequence is synthesized)
ccttttctcctttctcttaaattcaaagacgtttgctttggaatgccctcacttctccctattcacaggcttctaaaatcattaatttactcaaggcacatgtgccttctttgccccaaa

SEQ ID NO: 196470 - DNA, 120 bp, Artificial Sequence
  ENSG00000113389_44 (sequence is synthesized)
tgcatcactttccttttagttatggctgattttgggtgtgtgtgtgtaagacatgcagtcaacaatgagatgaaggccattgcatagatctcatgcagatagtgatggattcagaaagta

SEQ ID NO: 196471 - DNA, 120 bp, Artificial Sequence
  ENSG00000113389_45 (sequence is synthesized)
ggttccagtggcgtcactaccttcttgtaagccagtatacactggctatttgtggaaatctctttgggagatcaaatagagtattatgccactgtgagtgtttataaactggaaggaaca

SEQ ID NO: 196472 - DNA, 120 bp, Artificial Sequence
  ENSG00000113389_46 (sequence is synthesized)
agtacctgtgtttcttgggacacaaagcactcagatcctgagtggatgcagacatgagagtaaatgtcagcccaaattaggcccctcgacctacagacatttcatgggttttatttaatc

SEQ ID NO: 196473 - DNA, 120 bp, Artificial Sequence
  ENSG00000113389_47 (sequence is synthesized)
acaccccatggtttggggctacatgaggaagttggtaatgagctgaatttcttattcagtggaaaaaactgaaactgtctaaaaacacgggatatattttagaggcaattgtggaagcgg

SEQ ID NO: 196474 - DNA, 120 bp, Artificial Sequence
  ENSG00000113389_48 (sequence is synthesized)
agagaatgagatgatggtgttcagagggaccagcttctttttcagttgtctttagaactcaagaataatcaataatttagtgccccttcaacagccatactcagcaagaagaatcagaag

SEQ ID NO: 196475 - DNA, 120 bp, Artificial Sequence
  ENSG00000113389_49 (sequence is synthesized)
cttgatcctctaacagaaatagaagagggtagctttgcccattgccactgtctttactgccccttctgcccctccacccacatccacattcagcatcactccaaggatgtgtcagcatct

SEQ ID NO: 196476 - DNA, 120 bp, Artificial Sequence
  ENSG00000113389_50 (sequence is synthesized)
tgcccatgcaggtagaaatttgtgagtaggcctccatacttcctcgggggaagaaagagaaactagtgctggttttaagaatgtagctggcttttcatcagaacccttatgctaacctga

SEQ ID NO: 196477 - DNA, 120 bp, Artificial Sequence
  ENSG00000113389_51 (sequence is synthesized)
ccacacttgctctcggggaagttcaagcctgtgatgtgcataaactccaacaagcctggctttggtgttcagcatgcacattccataaatatctcttgcaggcataccccacagctagac

SEQ ID NO: 196478 - DNA, 120 bp, Artificial Sequence
  ENSG00000113389_52 (sequence is synthesized)
tgcaggattaaaataacttccaaaaggtgctggattggagtttgttcaaatttctcattaaccactaatgttaattcataccaaatgcaaagtattctaaaccagctgatgctgtcagtg

SEQ ID NO: 196479 - DNA, 120 bp, Artificial Sequence
  ENSG00000113389_53 (sequence is synthesized)
ttcaagttttaagtgacttcaaacacaatggaagtgtttcaatgggagccagatctcatgagtaaaaatccattttataatagctctgtgatatatcagtgggagatgattcatagggga

SEQ ID NO: 196480 - DNA, 120 bp, Artificial Sequence
  ENSG00000113389_54 (sequence is synthesized)
gagatttgaacaagcagaattaagtgttagcaaaaatgctgcattgctttgattcatgtttaaagacctaaatttctatgcacaaggaataaagggcctacttaccaagtgtaaatcaca

SEQ ID NO: 196481 - DNA, 120 bp, Artificial Sequence
  ENSG00000113389_55 (sequence is synthesized)
acataggctaccaaaatatttcttatttgctaggagaacaaagctgtcacggtgcatgatagttggacagagatggctaaaaaagaggcaaattcagatttggaaacagggtggcctctt

SEQ ID NO: 196482 - DNA, 120 bp, Artificial Sequence
  ENSG00000113389_56 (sequence is synthesized)
cattatttattgccaagatctgaaaatcttcaacatcttataagacaacaatgaagtagcccctgaacagcatggagttgctgtgagtttgttcgttgcagacctttgtgttgggtcctg

SEQ ID NO: 196483 - DNA, 120 bp, Artificial Sequence
  ENSG00000113389_57 (sequence is synthesized)
ggaatctgagctttgttccctgtgcatggtggataattgaaaccaagaggacatgggatagaccttgtgacagaccaattctgtgacccctgtcttctgggtcacattattcattgttga

SEQ ID NO: 196484 - DNA, 120 bp, Artificial Sequence
  ENSG00000113389_58 (sequence is synthesized)
tttaaatacaggactaccaaacagtacaaatctatcatgagtctggtagaaaagtaaaagtaaaagctgcacacgttacatactgtttattgttctaatgtacaactaactatttgcata

SEQ ID NO: 196485 - DNA, 120 bp, Artificial Sequence
  ENSG00000113389_59 (sequence is synthesized)
taatgtgatttaatttattgctgttttgtgtagaaaaggagaactaatgactgtggatataacccatgttttgtataatatattttatttcttgtgcgaactggtcatttaaaatatcta

SEQ ID NO: 196486 - DNA, 120 bp, Artificial Sequence
  ENSG00000113389_60 (sequence is synthesized)
cttcatttgatgtttggatataaatgtgtatgtgtccttgtaaatgtttctatcaagcaagaatgccacgtactcagagtataacaatgtgttctcattaaaaaatacatcccacggaaa

SEQ ID NO: 196487 - DNA, 120 bp, Artificial Sequence
  ENSG00000113389_61 (sequence is synthesized)
aggtccgcgatggagccatctgcactgggaccttggtccttgttccctgaccttgcgccgagggaccaggaaggtcaggtgctcgccccgcgtcggtgcttcaggagggaatgtggccag

SEQ ID NO: 196488 - DNA, 120 bp, Artificial Sequence
  ENSG00000113389_62 (sequence is synthesized)
acagctctccctgcaaatcatgtaagtctggagacttaatttgctatgtatgtcatcacctctaacctcagtgtaatgtaagtttaaaacccaagtgtttctagggccttacattttgga

SEQ ID NO: 196489 - DNA, 120 bp, Artificial Sequence
  ENSG00000113389_63 (sequence is synthesized)
attttacatttctttctctgatgtggtaaaacgcatgggaacagttcacaaactggcatctttcaggtcttccttcccttccagtcttctcttccacaatggtagaatgtttcttcctat

SEQ ID NO: 196490 - DNA, 120 bp, Artificial Sequence
  ENSG00000113389_64 (sequence is synthesized)
ttttacatctcttactataatctcttggctaggtcatgtttccacttttagagaaaatcaaaatatcaattagtaaatatcactcccttattcatctgtcacagcaagtctcgttctgat

SEQ ID NO: 196491 - DNA, 120 bp, Artificial Sequence
  ENSG00000113389_65 (sequence is synthesized)
ttttcaagtttgtggttactttccagctcctcagaaccaaagagataacatcctttaaacatctgaacatttacacattggcaaataagtgtaagatgtattacttatgagcagctttgt

SEQ ID NO: 196492 - DNA, 120 bp, Artificial Sequence
  ENSG00000113389_66 (sequence is synthesized)
atataagtagagaagcaattggatgttctcataagtagcttacaaataggaaagctgttagaaataattgttttagagaataaggtagtgagggagaacaaagtgaatataggtccttca

SEQ ID NO: 196493 - DNA, 120 bp, Artificial Sequence
  ENSG00000113389_67 (sequence is synthesized)
ttctttttttttttttttaatctgtgctgccataaacgcctgcccttctgcaaattcaggaaagatttaattgctgtggagcactaaatctcaatttccagtgtgtgtggattaccctgt

SEQ ID NO: 196494 - DNA, 120 bp, Artificial Sequence
  ENSG00000113389_68 (sequence is synthesized)
ttgtggaattaaattttatacagatgtctcttttgctcctggttagtggctctaattaaataaatggaaattctcgcaggaattagaagctcctacttaacagtgaagatttcgggatca

SEQ ID NO: 196495 - DNA, 120 bp, Artificial Sequence
  ENSG00000113389_69 (sequence is synthesized)
cagtgcataatctgaatataaatgacccagaagctgaaacattacccataatcacattgacggttccagaaagagcgataaggagagtgctgttaagggaggcgagcgctgacgccagaa

SEQ ID NO: 196496 - DNA, 120 bp, Artificial Sequence
  ENSG00000113389_70 (sequence is synthesized)
gttgccatatccccagaaaccccagtttgccttttcaccgtcgcaagtgagaaccagagcgcgttaaaggcctcggagtaaaaaacgcagcgtctgggactgcggcacccgggttgagtc

SEQ ID NO: 196497 - DNA, 120 bp, Artificial Sequence
  ENSG00000113389_71 (sequence is synthesized)
gggtgcaagtttctgccgaaagagggcgtcggtctgagactaaaagaaatttgtggacacggacgcctagtcaaatgaaagaccattttaacacattttcaatgtatttaaatgtgcggg

SEQ ID NO: 196498 - DNA, 120 bp, Artificial Sequence
  ENSG00000113389_72 (sequence is synthesized)
acttaattgtcagaattctcccgcccagtgtagcccgttcacattgcaaatgacttggctgcagtaggcacagaaggtccagttccattttgacccgccccgccgcgcggcggactcccg

SEQ ID NO: 196499 - DNA, 120 bp, Artificial Sequence
  ENSG00000113389_73 (sequence is synthesized)
cgatgctcctctggtcacggacttctccagagccgcttccctccggtctccaccgctgctgtggctatggccagtgggaggactgggtctccgaggcaggacctttcttggagtcgcgga

SEQ ID NO: 196500 - DNA, 120 bp, Artificial Sequence
  ENSG00000113389_74 (sequence is synthesized)
accccagcacagtgcctcgagcgctccagagaaggagcggttggatctttgagcactcaggttggaggggagcgtgtgtcgtacccgggggacctaccgggaacgttttgggaaagacag

SEQ ID NO: 196501 - DNA, 120 bp, Artificial Sequence
  ENSG00000113389_75 (sequence is synthesized)
tccctttatttaggtacctggtttagcaaacaaagccccgaggacgctttggggatgctttccaagctttgtgacacctccagaagttgaaccattccctcgcctttgggagcaacaagt

SEQ ID NO: 196502 - DNA, 120 bp, Artificial Sequence
  ENSG00000113389_76 (sequence is synthesized)
ttcactttcctgctctcagtgcgctgacagagggtccgtgagctgggacactgtgacctcggcaccgctgcgattccagcgcaaacctgcgtggcccagggggagggggctggcgcgggg

SEQ ID NO: 196503 - DNA, 90 bp, Artificial Sequence
  ENSG00000113389_77 (sequence is synthesized)
cttgatcattctactgcctgttaaccacacatgcaagctttctttccagtcatctttccaatatggttgtgccaaaatttttctcagtag

SEQ ID NO: 196504 - DNA, 120 bp, Artificial Sequence
  ENSG00000113389_78 (sequence is synthesized)
attccagcctgggcaacatagctagaccccatctcttacacaatattttttagttagttcagtattcagtataaatattatcattactttctaaatgatatttaaggttaagtcacatag

SEQ ID NO: 196505 - DNA, 120 bp, Artificial Sequence
  ENSG00000113389_79 (sequence is synthesized)
gcttctatgttgacatttccttttttccccctacctattttccttggagttaaaacagtctgtttttgtttatttgcttaatttcctatggatttataattaaataatcttctaattctt

SEQ ID NO: 196506 - DNA, 120 bp, Artificial Sequence
  ENSG00000113389_80 (sequence is synthesized)
cttctttgcgtggcagcatggcagagggatgtgctgtgtacggaacctggccctggggagggatgttccagctgttccggccttctgcccttgctggcctctgctccataggactggtgg

SEQ ID NO: 196507 - DNA, 120 bp, Artificial Sequence
  ENSG00000113391_0 (sequence is synthesized)
gaagaccccggaagtgcaactcgaacttggtcggggcgcggatcccgagagggaaagtcataacaaccgcacgagggagttcgactggcgaactggaaggccacgcctcctcccgcctgc

SEQ ID NO: 196508 - DNA, 120 bp, Artificial Sequence
  ENSG00000113391_1 (sequence is synthesized)
cccctcagccctgtggctgggggcagagctcagactgtcttctgaagattgatgtctatttccttgagctctttaattttgttgccaatttggataaacatggcacaaatccagcaggga

SEQ ID NO: 196509 - DNA, 120 bp, Artificial Sequence
  ENSG00000113391_2 (sequence is synthesized)
ggtccagatgaaaaagaaaagactaccgcactgaaagatttattatctaggatagatttggatgaactaatgaaaaaagatgaaccgcctcttgattttcctgataccctggaaggattt

SEQ ID NO: 196510 - DNA, 120 bp, Artificial Sequence
  ENSG00000113391_3 (sequence is synthesized)
gaatatgcttttaatgaaaagggacagttaagacacataaaaactggggaaccatttgtttttaactaccgggaagatttacacagatggaaccagaaaagatacgaggctctaggagag

SEQ ID NO: 196511 - DNA, 120 bp, Artificial Sequence
  ENSG00000113391_4 (sequence is synthesized)
atcatcacgaagtatgtatatgagctcctggaaaaggattgtaatttgaaaaaagtatctattccagtagatgccactgagagtgaaccaaagagttttatctttatgagtgaggatgct

SEQ ID NO: 196512 - DNA, 120 bp, Artificial Sequence
  ENSG00000113391_5 (sequence is synthesized)
ttgacaaatccacagaaactgatggttttaattcatggtagtggtgttgtcagggcagggcagtgggctagaagacttattataaatgaagatctggacagtggcacacagataccgttt

SEQ ID NO: 196513 - DNA, 120 bp, Artificial Sequence
  ENSG00000113391_6 (sequence is synthesized)
attaaaagagctgtggctgaaggatatggagtaatagtactaaatcccaatgaaaactatattgaagtagaaaagccgaagatacacgtacagtcatcatctgatagttcagatgaacca

SEQ ID NO: 196514 - DNA, 120 bp, Artificial Sequence
  ENSG00000113391_7 (sequence is synthesized)
gcagaaaaacgggaaagaaaagataaagtttctaaagaaacaaagaagcgacgtgatttctatgagaagtatcgtaacccccaaagagaaaaagaaatgatgcaattgtatatcagagaa

SEQ ID NO: 196515 - DNA, 120 bp, Artificial Sequence
  ENSG00000113391_8 (sequence is synthesized)
aatggttctcctgaagaacatgcaatctatgtttgggatcatttcatagctcaggctgctgctgagaatgtgtttttcgttgctcacagctatggaggacttgcttttgttgaactgatg

SEQ ID NO: 196516 - DNA, 120 bp, Artificial Sequence
  ENSG00000113391_9 (sequence is synthesized)
attcaacgagaagccgatgtaaaaaataaggtaactgctgtggcattgacagactctgttcacaatgtgtggcatcaagaagctggcaaaacgattcgagaatggatgagagagaactgt

SEQ ID NO: 196517 - DNA, 120 bp, Artificial Sequence
  ENSG00000113391_10 (sequence is synthesized)
tgtaattgggtctctagctcagaaccattagacacatcagtggagtccatgctacctgattgcccccgggtctcagcaggcaccgaccgtcacgagctaacttcctggaagagctttccg

SEQ ID NO: 196518 - DNA, 120 bp, Artificial Sequence
  ENSG00000113391_11 (sequence is synthesized)
tctattttcaaattctttaccgaagcctcagaggccaagaccagctccctgaagccggctgtgacgcgccgctcccaccgcatcaagcacgaagagctgtaagaggagcgagcgcgacgg

SEQ ID NO: 196519 - DNA, 120 bp, Artificial Sequence
  ENSG00000113391_12 (sequence is synthesized)
gggaggccgccctggcgcacccacccgcacgcctcctcactgcttgtgtcgagcggactcccagcccctcattagattgttttcttcccagagcccagggtcgtgatatatacatctaaa

SEQ ID NO: 196520 - DNA, 120 bp, Artificial Sequence
  ENSG00000113391_13 (sequence is synthesized)
tagcgttttgcattatttctagatgagtgcaactgtcaaagcaatatgggttcactggtcgtgcttcctgcgggctgagcgcgggctgagcgctgccagtcagcgctcacattaaggctg

SEQ ID NO: 196521 - DNA, 120 bp, Artificial Sequence
  ENSG00000113391_14 (sequence is synthesized)
acagcgccctgcctggctcggccggcgaagctctaattgccctgaaggagaccgcgcgggcgctgcgggtccggcggcgtcggcgcggtcctagcgcccgccgtagcggagccgctgctg

SEQ ID NO: 196522 - DNA, 120 bp, Artificial Sequence
  ENSG00000113391_15 (sequence is synthesized)
cttccccctccttaatcatgtccatctttccccgctctcaactggagcaaacttctattccagacttcagatttccattttcactaggtttttccctgagggcatcttattacccacctc

SEQ ID NO: 196523 - DNA, 120 bp, Artificial Sequence
  ENSG00000113391_16 (sequence is synthesized)
tttttttttttttttaaggaagttccacacacactccaaagccgatttcaaattcagaacctgaatgccatgatgtaccatgtagtttggggaatgcaaattgttctctccctgttttca

SEQ ID NO: 196524 - DNA, 120 bp, Artificial Sequence
  ENSG00000113391_17 (sequence is synthesized)
tttcgggaccagaaaaaaaaacaactctgcataaaaatctataaagtactgaatccgcattactgctgaaaatccttttgccagctaattgtgagagtttacacaagtctctgatttcag

SEQ ID NO: 196525 - DNA, 120 bp, Artificial Sequence
  ENSG00000113391_18 (sequence is synthesized)
aagagactgttaaaaccaaaacaatgatgggcagctcttttaagtgtaggtgtgaaggtcccattttcaatggaatttccaactgttatcactgggattgactttactttttaaacacat

SEQ ID NO: 196526 - DNA, 120 bp, Artificial Sequence
  ENSG00000113391_19 (sequence is synthesized)
tgtactgtgtggcattgtaatttagatataacacacttaagttttgctttttaaatctctctgtggagaaaggttgttgttaatcctttccagaatgatctattctgagctttcctggag

SEQ ID NO: 196527 - DNA, 120 bp, Artificial Sequence
  ENSG00000113391_20 (sequence is synthesized)
ttaggcccttctagggagagaatttttttattgtcatcaggaaacgaaacctttgtgctctgcagcctttttcttctgaaaggctaagtggggctaaaattatccttttagttttctgct

SEQ ID NO: 196528 - DNA, 120 bp, Artificial Sequence
  ENSG00000113391_21 (sequence is synthesized)
ttaacaagaagagaaggacttggtgtgaaagaatttcttctctcagtccaatggtataatttttagcactccgcttcctctgtagggtttagccctacagtttgaacaattattttaatc

SEQ ID NO: 196529 - DNA, 120 bp, Artificial Sequence
  ENSG00000113391_22 (sequence is synthesized)
cagctaagatgtggccaacactgtgaaatacaggagatgttaaggttttgctgacttttagattaaaatcttaaaatttcacattatattttaattacttgaaaagtttaattacctagt

SEQ ID NO: 196530 - DNA, 120 bp, Artificial Sequence
  ENSG00000113391_23 (sequence is synthesized)
aaagattgtttctaatagatgagaacataaatttaatagttttcatccttttttaaagtgtgtgcaacaattaatatgcctgccttatttgaggacatgataaaatgtacccaaaatgac

SEQ ID NO: 196531 - DNA, 120 bp, Artificial Sequence
  ENSG00000113391_24 (sequence is synthesized)
ttcgaactgtctaatgcctcagaaaagtaacttaaaatcaaccacttcgtgcttaaatgtttttatattatgaaccgatttcaacaagttttaaagctgttaatatctcattgctgtgtt

SEQ ID NO: 196532 - DNA, 120 bp, Artificial Sequence
  ENSG00000113391_25 (sequence is synthesized)
tgacatacaagtacattcattggttctatagtcttaatgatgacaaattaaagatgttttttcagtgctcaggtatgcatatattttcgtgttacttaagcaaaatcaactatataggag

SEQ ID NO: 196533 - DNA, 120 bp, Artificial Sequence
  ENSG00000113391_26 (sequence is synthesized)
gaaaaatcaaaatggcattttattcagctaccagatggcttaaaatgagtaaaccccaacaacatcaagcacatttgtctgtgatattgaccctttttatccaatcattactattttaga

SEQ ID NO: 196534 - DNA, 120 bp, Artificial Sequence
  ENSG00000113391_27 (sequence is synthesized)
agtagtggtgaactgtgtaaaataatggtatcttcagcagtgttccggaatcttagttgagggacaaacattccttccagtgagagattcaagaattgatgtgaattgaatatatttttc

SEQ ID NO: 196535 - DNA, 120 bp, Artificial Sequence
  ENSG00000113391_28 (sequence is synthesized)
aaggtattataaattgtgttgtgttttcagtataagaaaatgttgacaggaaacaattttatagcatttataaaaaaccaacacttgtgcaatgctaaattggcgaagcttctgcacctg

SEQ ID NO: 196536 - DNA, 120 bp, Artificial Sequence
  ENSG00000113391_29 (sequence is synthesized)
aattagagcacaataaatatgctgtttataaaccaaatcactgctattccttctctgaaatcatctctcctctttttaaacctttacttatagctagaataaatcactatttaattgcct

SEQ ID NO: 196537 - DNA, 120 bp, Artificial Sequence
  ENSG00000113391_30 (sequence is synthesized)
ctaatactttaaaactactggatggttaggcctggtttaactatttatggagagctatttgcaaacttaagttgtgtaaatgtaatttctacttgtgaatctgagctgtagcagcccaga

SEQ ID NO: 196538 - DNA, 120 bp, Artificial Sequence
  ENSG00000113391_31 (sequence is synthesized)
gggagctaggcaaactattccagaccaccaactgataagtgatcagattctttgtaatgtaggattttttaacctgttgattatgggtttgttgatataaatgtaataatgttcacctcg

SEQ ID NO: 196539 - DNA, 120 bp, Artificial Sequence
  ENSG00000113391_32 (sequence is synthesized)
attttcctggagtaacaaccagcgttggtagtagcccacctgcatgaggacggccagtgttaacaatatttttgttctgatcttcttccccatttttgtttcctcaaacaggtttttagg

SEQ ID NO: 196540 - DNA, 120 bp, Artificial Sequence
  ENSG00000113391_33 (sequence is synthesized)
agagtggagatttaaagtcaggatgtggcctttttattttaattatatacttaattcttagaacaagtagaatgggaaaggagtgactgataaatctaagattcaaaatagtcccgtcga

SEQ ID NO: 196541 - DNA, 120 bp, Artificial Sequence
  ENSG00000113391_34 (sequence is synthesized)
aacttaaaggccagattattgctttggagctttctataggtactagccatcccgtcgttaaatgttttcatggatatttgaaaagaagaccatgtacctttaataactgttcttttctcg

SEQ ID NO: 196542 - DNA, 120 bp, Artificial Sequence
  ENSG00000113391_35 (sequence is synthesized)
agtttctgcctcgtgctttgacctggattgcattattattgtttatgcgaagtaaaaaaaaaaaaggaaagcacaagcttttcctgtatattatatttccatttccattttaaaataaaa

SEQ ID NO: 196543 - DNA, 120 bp, Artificial Sequence
  ENSG00000113391_36 (sequence is synthesized)
acaattttcccaacaacagcggtgttattattcttgctcagaagaattcttgcttattcaccaattgcatagagattttttaaagcaaaaacataaaaggaaggatgagacagcatccgt

SEQ ID NO: 196544 - DNA, 120 bp, Artificial Sequence
  ENSG00000113391_37 (sequence is synthesized)
caatattttaaaccttctggctactttttatttctgttagtattgctgtaaggtaatatcctaactttagttgagtcactatttggcttgcaccttttacaaagctaacatttctaagac

SEQ ID NO: 196545 - DNA, 120 bp, Artificial Sequence
  ENSG00000113391_38 (sequence is synthesized)
agttgtttttaatatctaaaatatctccttagcaaggaaatctgaacaacctatcaattaaattgttgttttataaaatacacttgaatatgccataaataaatgtgttttccaagagga

SEQ ID NO: 196546 - DNA, 120 bp, Artificial Sequence
  ENSG00000113391_39 (sequence is synthesized)
cttgagtgcatagcatatgaaataatgtgttttttccctgtagtttaaaatgttaactgtattttaggtctcattctttgtatatgccttgacaattatgattgcttgattaaagaaaga

SEQ ID NO: 196547 - DNA, 120 bp, Artificial Sequence
  ENSG00000113391_40 (sequence is synthesized)
cctgtaacacctcccatcctcaaactccctttctagaggcagaacattgagaggaaatagaaaaagctagacatgtttaaaataataatagaaaacccatgtgaagacctaatatttttg

SEQ ID NO: 196548 - DNA, 120 bp, Artificial Sequence
  ENSG00000113391_41 (sequence is synthesized)
aattttacagttttatttattaaatttaggactttgatccatttcaagttaatttttgtatacggtatgaggcaccgaccgtcacgagctaacttcctggaagagctttccgtctatttt

SEQ ID NO: 196549 - DNA, 120 bp, Artificial Sequence
  ENSG00000113391_42 (sequence is synthesized)
cttgtatatattttattatatgtagattgttttgtttttcttcaagaatattaatttttttatttgtcatcatttatttcccatagtcgtctacttggattaaatgggtttttaaattca

SEQ ID NO: 196550 - DNA, 120 bp, Artificial Sequence
  ENSG00000113396_0 (sequence is synthesized)
aacccgctggccctgaggccacggaccgagacgtggtgctgagcccctgcgcggtttctggtgcgtagagactgtaaatcgctgcgcttctcagtcatcatcatcccagcttttcccggc

SEQ ID NO: 196551 - DNA, 120 bp, Artificial Sequence
  ENSG00000113396_1 (sequence is synthesized)
tcgaattcagcctccaactcaagctcgcgggaaagactacctgagaggagaaaagcttctgtccctggaccttcttctgagggtggtgaggtttgtttagggtcgcagaagcagggagga

SEQ ID NO: 196552 - DNA, 120 bp, Artificial Sequence
  ENSG00000113396_2 (sequence is synthesized)
ctgactcagccctcacagagaagaggtctggaaagtcctggggaactcgcagggcacgggccgctgtcgcggttgggaggcgagggcgcagcgctggggttgtagattccaagacccctg

SEQ ID NO: 196553 - DNA, 120 bp, Artificial Sequence
  ENSG00000113396_3 (sequence is synthesized)
agggtggctgtgttggtttctcgcaggagtcggaggctccctgctttccagccgcccagtgacccaagcttaatcttcagcaccacttggggcgaccttttcggtgcaaacctacgattc

SEQ ID NO: 196554 - DNA, 120 bp, Artificial Sequence
  ENSG00000113396_4 (sequence is synthesized)
tgtttctcaggattcctccccatcccgcttcgccccggaaaagctgacaagaacttcaggtgtaagccctgagtagtgaggatctgcggtctccgtggagagctgtgcctggaagagaag

SEQ ID NO: 196555 - DNA, 120 bp, Artificial Sequence
  ENSG00000113396_5 (sequence is synthesized)
gacgctggtgggggctgagatcagagctgtcttctggcccagttgcccccatgcttctgtcatggctaacagttctaggggctggaatggtcgtcctgcacttcttgcagaaactcctgt

SEQ ID NO: 196556 - DNA, 120 bp, Artificial Sequence
  ENSG00000113396_6 (sequence is synthesized)
tcccttacttttgggatgacttctggttcgtgttgaaggtggtgctcattataattcggctgaagaagtatgaaaagagaggggagctggtgactgtgctggataaattcttgagtcatg

SEQ ID NO: 196557 - DNA, 120 bp, Artificial Sequence
  ENSG00000113396_7 (sequence is synthesized)
ccaaaagacaacctcggaaacctttcatcatctatgagggagacatctacacctatcaggatgtagacaaaaggagcagcagagtggcccatgtcttcctgaaccattcctctctgaaaa

SEQ ID NO: 196558 - DNA, 120 bp, Artificial Sequence
  ENSG00000113396_8 (sequence is synthesized)
agggggacacggtggctctgctgatgagcaatgagccggacttcgttcacgtgtggttcggcctcgccaagctgggctgcgtggtggcctttctcaacaccaacattcgctccaactccc

SEQ ID NO: 196559 - DNA, 120 bp, Artificial Sequence
  ENSG00000113396_9 (sequence is synthesized)
tcctgaattgcatccgcgcctgtgggcccagagccctagtggtgggcgcagatttgcttggaacggtagaagaaatccttccaagcctctcagaaaatatcagtgtttgggggatgaaag

SEQ ID NO: 196560 - DNA, 120 bp, Artificial Sequence
  ENSG00000113396_10 (sequence is synthesized)
attctgttccacaaggtgtaatttcactcaaagaaaaactgagcacctcacctgatgagcccgtgccacgcagccaccatgttgtctcactcctcaagtctacttgtctttacattttta

SEQ ID NO: 196561 - DNA, 120 bp, Artificial Sequence
  ENSG00000113396_11 (sequence is synthesized)
tgtttatataacccttcctctgtatcatagttcagcagctatcctgggaatttctggatgtgttgagttgggtgccacttgtgtgttaaagaagaaattttcagcaagccagttttggag

SEQ ID NO: 196562 - DNA, 120 bp, Artificial Sequence
  ENSG00000113396_12 (sequence is synthesized)
tgactgcaagaagtatgatgtgactgtgtttcagtatattggagaactttgtcgctacctttgcaaacaatctaagagagaaggagaaaaggatcataaggtgcgtttggcaattggaaa

SEQ ID NO: 196563 - DNA, 120 bp, Artificial Sequence
  ENSG00000113396_13 (sequence is synthesized)
tggcatacggagtgatgtatggagagaatttttagacagatttggaaatataaaggtgtgtgaactttatgcagctaccgaatcaagcatatctttcatgaactacactgggagaattgg

SEQ ID NO: 196564 - DNA, 120 bp, Artificial Sequence
  ENSG00000113396_14 (sequence is synthesized)
agcaattgggagaacaaatttgttttacaaacttctttccacttttgacttaataaagtatgactttcagaaagatgaacccatgagaaatgagcagggttggtgtattcatgtgaaaaa

SEQ ID NO: 196565 - DNA, 120 bp, Artificial Sequence
  ENSG00000113396_15 (sequence is synthesized)
aggagaacctggacttctcatttctcgagtgaatgcaaaaaatcccttctttggctatgctgggccttataagcacacaaaagacaaattgctttgtgatgtttttaagaagggagatgt

SEQ ID NO: 196566 - DNA, 120 bp, Artificial Sequence
  ENSG00000113396_16 (sequence is synthesized)
ttaccttaatactggagacttaatagtccaggatcaggacaatttcctttatttttgggaccgtactggagacactttcagatggaaaggagaaaatgtcgcaaccactgaggttgctga

SEQ ID NO: 196567 - DNA, 120 bp, Artificial Sequence
  ENSG00000113396_17 (sequence is synthesized)
tgttattggaatgttggatttcatacaggaagcaaacgtctatggtgtggctatatcaggttatgaaggaagagcaggaatggcttctattattttaaaaccaaatacatctttagattt

SEQ ID NO: 196568 - DNA, 120 bp, Artificial Sequence
  ENSG00000113396_18 (sequence is synthesized)
ggaaaaagtttatgaacaagttgtaacatttctaccagcttatgcttgtccacgatttttaagaattcaggaaaaaatggaagcaacaggaacattcaaactattgaagcatcagttggt

SEQ ID NO: 196569 - DNA, 120 bp, Artificial Sequence
  ENSG00000113396_19 (sequence is synthesized)
ggaagatggatttaatccactgaaaatttctgaaccactttacttcatggataacttgaaaaagtcttatgttctactgaccagggaactttatgatcaaataatgttaggggaaataaa

SEQ ID NO: 196570 - DNA, 120 bp, Artificial Sequence
  ENSG00000113396_20 (sequence is synthesized)
actttaagatttttatatctagaactttcatatgctttcttaggaagagtgagaggggggtatatgattctttatgaaatggggaaagggagctaacattaattatgcatgtactatatt

SEQ ID NO: 196571 - DNA, 120 bp, Artificial Sequence
  ENSG00000113396_21 (sequence is synthesized)
ggggaaagggagctaacattaattatgcatgtactatatttccttaatatgagagataattttttaattgcataagaattttaatttcttttaattgatataaacagtagttgattattc

SEQ ID NO: 196572 - DNA, 120 bp, Artificial Sequence
  ENSG00000113396_22 (sequence is synthesized)
tccttaatactaaagattttaaataataaatagtggctagcggtttggacaatcactaaaaatgtactttctaataagtaaaatttctaattttgaataaaagattaaattttactgaaa

SEQ ID NO: 196573 - DNA, 120 bp, Artificial Sequence
  ENSG00000113396_23 (sequence is synthesized)
ccgtgcgctccgaagacggatattggaaagctgcaaaagtcaccagaaagaaacagggctgccttagtaaagtacagaggtgaagtggagcaagatggcagaatagcaagctcctttgat

SEQ ID NO: 196574 - DNA, 120 bp, Artificial Sequence
  ENSG00000113396_24 (sequence is synthesized)
ggccatccgcacaaatgtctacacagaaaaagcaccttcacaagaaccaaaaatcagcctgttttgtgcaacttccaagtcaagattatgaacattttcagactttttgcaagacagaat

SEQ ID NO: 196575 - DNA, 120 bp, Artificial Sequence
  ENSG00000113407_0 (sequence is synthesized)
ggtcagcggagagtaggcatgtagcttctgcagttgctcctcctcaccctccgcgacctgatttcctagaagggctctgtcacccgaaaagattttccactggcttagaggagggagggc

SEQ ID NO: 196576 - DNA, 120 bp, Artificial Sequence
  ENSG00000113407_1 (sequence is synthesized)
ccgccttcccccgttatccattggctgctcgttccgccgcaagttgggggcggggttagggcgcctttcgattgcatcagctggtccagccgaggccaagtcccgggcgctagcccacct

SEQ ID NO: 196577 - DNA, 120 bp, Artificial Sequence
  ENSG00000113407_2 (sequence is synthesized)
cccacccgcctcttggctcctctcctctaggccgtcgctttcgggttctctcatcgcttcgtcgttcgccaatgtttgaggagaaggccagcagtccttcagggaagatgggaggcgagg

SEQ ID NO: 196578 - DNA, 120 bp, Artificial Sequence
  ENSG00000113407_3 (sequence is synthesized)
agaagccgattggtgctggtgaagagaagcaaaaggaaggaggcaaaaagaagaacaaagaaggatctggagatggaggtcgagctgagttgaatccttggcctgaatatatttacacac

SEQ ID NO: 196579 - DNA, 120 bp, Artificial Sequence
  ENSG00000113407_4 (sequence is synthesized)
gtcttgagatgtataatatactaaaagcagaacatgattccattctggcagaaaaggcagaaaaagatagcaagccaattaaagtcactttgcctgatggtaaacaggttgatgcggaat

SEQ ID NO: 196580 - DNA, 120 bp, Artificial Sequence
  ENSG00000113407_5 (sequence is synthesized)
cttggaaaactacaccatatcaaattgcctgtggaattagtcaaggcctggccgacaacaccgttattgctaaagtaaataatgttgtgtgggacctggaccgccctctggaagaagatt

SEQ ID NO: 196581 - DNA, 120 bp, Artificial Sequence
  ENSG00000113407_6 (sequence is synthesized)
gtaccttggagcttctcaagtttgaggatgaggaagctcaggcagtgtattggcactctagtgctcacataatgggtgaagccatggaaagagtctatggtggatgtttatgctacggtc

SEQ ID NO: 196582 - DNA, 120 bp, Artificial Sequence
  ENSG00000113407_7 (sequence is synthesized)
cgccaatagaaaatggattctattatgacatgtacctcgaagaagggggtgtgtctagcaatgatttctcttctctggaggctttgtgtaagaaaatcattaaagaaaaacaagcttttg

SEQ ID NO: 196583 - DNA, 120 bp, Artificial Sequence
  ENSG00000113407_8 (sequence is synthesized)
aaagactggaagttaagaaagaaactttactggcaatgtttaagtacaacaagttcaaatgccggatattgaatgaaaaggtgaatactccaactaccacagtctatagatgtggccctt

SEQ ID NO: 196584 - DNA, 120 bp, Artificial Sequence
  ENSG00000113407_9 (sequence is synthesized)
tgatagatctctgccggggtcctcatgttagacacacgggcaaaattaaggctttaaaaatacacaaaaattcctccacgtactgggaaggcaaagcagatatggagactctccagagaa

SEQ ID NO: 196585 - DNA, 120 bp, Artificial Sequence
  ENSG00000113407_10 (sequence is synthesized)
tttatggcatttcattcccagatcctaaaatgttgaaagagtgggagaagttccaagaggaagctaaaaaccgagatcataggaaaattggcagggaccaagaactatatttctttcatg

SEQ ID NO: 196586 - DNA, 120 bp, Artificial Sequence
  ENSG00000113407_11 (sequence is synthesized)
aactcagccctggaagttgcttttttctgccaaaaggagcctacatttataatgcacttattgaattcattaggagcgaatataggaaaagaggattccaggaggtagtcaccccaaaca

SEQ ID NO: 196587 - DNA, 120 bp, Artificial Sequence
  ENSG00000113407_12 (sequence is synthesized)
tcttcaacagccgactctggatgacctcgggccactggcagcactacagcgagaacatgttctcctttgaggtggagaaggagctgtttgccctgaaacccatgaactgcccaggacact

SEQ ID NO: 196588 - DNA, 120 bp, Artificial Sequence
  ENSG00000113407_13 (sequence is synthesized)
gccttatgtttgatcatcggccaaggtcctggcgagaactgcctctgcggctagctgattttggggtacttcataggaacgagctgtctggagcactcacaggactcacccgggtacgaa

SEQ ID NO: 196589 - DNA, 120 bp, Artificial Sequence
  ENSG00000113407_14 (sequence is synthesized)
gattccaacaggatgatgctcacatattctgtgccatggagcagattgaagatgaaataaaaggttgtttggattttctacgtacggtatatagcgtatttggattttcttttaaactaa

SEQ ID NO: 196590 - DNA, 120 bp, Artificial Sequence
  ENSG00000113407_15 (sequence is synthesized)
acctttctactcgcccggaaaaattccttggagatatcgaagtatgggatcaagctgagaaacaacttgaaaacagtctgaatgaatttggtgaaaagtgggagttaaactctggagatg

SEQ ID NO: 196591 - DNA, 120 bp, Artificial Sequence
  ENSG00000113407_16 (sequence is synthesized)
gagctttctatggcccaaagattgacatacagattaaagatgcgattgggcggtaccaccagtgtgcaaccatccagctggatttccagttgcccatcagatttaatcttacttatgtaa

SEQ ID NO: 196592 - DNA, 120 bp, Artificial Sequence
  ENSG00000113407_17 (sequence is synthesized)
ggctgtcccctcgccaggtaatggtagttccagtgggaccaacctgtgatgaatatgcccaaaaggtacgacaacaattccacgatgccaaattcatggcagacattgatctggatccag

SEQ ID NO: 196593 - DNA, 120 bp, Artificial Sequence
  ENSG00000113407_18 (sequence is synthesized)
gctgtacattgaataaaaagattcgaaatgcacagttagcacagtataacttcattttagttgttggtgaaaaagagaaaatcagtggcactgttaatatccgcacaagagacaataagg

SEQ ID NO: 196594 - DNA, 120 bp, Artificial Sequence
  ENSG00000113407_19 (sequence is synthesized)
tccacggggaacgcaccatttctgaaactatcgagcggctacagcagctcaaagagttccgcagcaaacaggcagaagaagaattttaatgaaaaaattacccagattggctccatggaa

SEQ ID NO: 196595 - DNA, 120 bp, Artificial Sequence
  ENSG00000113407_20 (sequence is synthesized)
aaggaggaacagcgtttccgtaaaattgactttgtactctgaaaacgtcaatttatattgaacttggaggagtttggcaaagtctgaataggtcaacctgcaggcgtaactatttttgac

SEQ ID NO: 196596 - DNA, 120 bp, Artificial Sequence
  ENSG00000113407_21 (sequence is synthesized)
ctagtcagtttttaaacaatgtgcatttgaaggagttaattaaaagagagccaataaaatgattttactcattcagtatctgagtactggaagtgaaacatgaggaatgctttagtgtaa

SEQ ID NO: 196597 - DNA, 120 bp, Artificial Sequence
  ENSG00000113407_22 (sequence is synthesized)
tgtgggagaacttttttgtaaatttaatgcaattgaaaaagttttcaaattcaattaagataactagaattggattatggtgtaaaaataaaaaaaaaatttattcacataagtttcaag

SEQ ID NO: 196598 - DNA, 120 bp, Artificial Sequence
  ENSG00000113407_23 (sequence is synthesized)
actgctctgtccctcacatgtacacatacatgcctgagacagataatgtggttcagtatttatctttacagttttacagcaaatataatgcagggtggatggagacggggtaggtctgca

SEQ ID NO: 196599 - DNA, 120 bp, Artificial Sequence
  ENSG00000113407_24 (sequence is synthesized)
gcatcataatgctattcataaactgggtgtgagctgggtgctggcttctcagaggataaacacttttgggagtgtcatttttacttaatgttggatggacaccttttcaaacaaaaacta

SEQ ID NO: 196600 - DNA, 120 bp, Artificial Sequence
  ENSG00000113407_25 (sequence is synthesized)
ccatggatctattacagagtagatttgcacaaatgtttaagataaaacgtgaatcttcagagaaatatctgtttatggcagactgttctggaccatagaatcacttggtttacaaattcc

SEQ ID NO: 196601 - DNA, 120 bp, Artificial Sequence
  ENSG00000113407_26 (sequence is synthesized)
ctattttctcataagggatcattttcaaaatcttctaccaataaatggtgattgaaaggacagcacaaagtaaataatttcttatgtggataaatactaattcctccttgttagaatgat

SEQ ID NO: 196602 - DNA, 120 bp, Artificial Sequence
  ENSG00000113407_27 (sequence is synthesized)
ttcctccttgttagaatgatattttaaaagtaacatcttttttttaattttttttgagacaagatcctttgtcccccaggctggagtgtggtgccatgatctcggctcactgcaacctca

SEQ ID NO: 196603 - DNA, 120 bp, Artificial Sequence
  ENSG00000113407_28 (sequence is synthesized)
taaagacatgtgccaccatgcctggctgatgtttgtattttctatagagatggtttcatcatgttgcccaggctggtatcaaactcctggataaaagagacccacctgcctcagtctccc

SEQ ID NO: 196604 - DNA, 83 bp, Artificial Sequence
  ENSG00000113407_29 (sequence is synthesized)
aggtgtgagccaccacgcccagcctaaaaagcaacatcttgtcagtgctataatctcaaatagcttgtttgcaaggaaaggat

SEQ ID NO: 196605 - DNA, 120 bp, Artificial Sequence
  ENSG00000113407_30 (sequence is synthesized)
ggtgtgtctgtgagggtgttgccagagagattgacatttgagtcagtggcctgggagaggcagacacaccctctgtgtgcgtgggcaccatccagtcggctgccagtgcagctagaacaa

SEQ ID NO: 196606 - DNA, 120 bp, Artificial Sequence
  ENSG00000113407_31 (sequence is synthesized)
gaggcagacacaccctctgtgtgcgtgggcaccatccagtcggctgccagtgcagctagaacaaagcgggtggaagaaagtgggattaagttggcttgctgagtcttctggctttcatct

SEQ ID NO: 196607 - DNA, 120 bp, Artificial Sequence
  ENSG00000113407_32 (sequence is synthesized)
catcagactccaggttcttcagcttttggactcttggacttatacccgtggtttgccaggggccttctggcctttggccattgactggagatggcactgtcggcttccctgcttttgagg

SEQ ID NO: 196608 - DNA, 120 bp, Artificial Sequence
  ENSG00000113407_33 (sequence is synthesized)
cttggactcggactgaaccactactggcttccttgctccttagcttgcagacagcctatcgtgggacttcaccgtgtgcttgtgtgagtcaattcttactaaatttcctttcatatatac

SEQ ID NO: 196609 - DNA, 120 bp, Artificial Sequence
  ENSG00000113407_34 (sequence is synthesized)
atatatcctattctgtctctctggagaaccctgactaatacacaagggtcacttcaaagagaagctaatttgcatagattaattttcactttaataaaggagctaagatctttaatcata

SEQ ID NO: 196610 - DNA, 120 bp, Artificial Sequence
  ENSG00000113407_35 (sequence is synthesized)
atgattgttccacataaagtcagaagggaggaaaggcgcacgcgcattggggacttgactctggaaagcgtccagaccaaggtcagcggagagtaggccgtcgctttcgggttctctcat

SEQ ID NO: 196611 - DNA, 120 bp, Artificial Sequence
  ENSG00000113407_36 (sequence is synthesized)
atgttgaagagattttgacacgaaattctaattgggacattgcaagtggctatgatgataaactgcagttaagatacagagggtggtgcagttgaatccttggcctgaatatatttacac

SEQ ID NO: 196612 - DNA, 120 bp, Artificial Sequence
  ENSG00000113407_37 (sequence is synthesized)
ttttattggagactctttagaaagctaccagaaggaagaagcacaaaggaacagcctttttagaagtagcacagtaagctggcttttaagagccacttttacaaatgctgcaattgctaa

SEQ ID NO: 196613 - DNA, 120 bp, Artificial Sequence
  ENSG00000113407_38 (sequence is synthesized)
acagaccttgagtgagcgacttgttcagagcctcacatctacagtagttagacgcggagacagaatcagaatcttaggcttgaggcttccaaacttgcgtttatggcttactgtaagcgg

SEQ ID NO: 196614 - DNA, 120 bp, Artificial Sequence
  ENSG00000113407_39 (sequence is synthesized)
gaaacacattgcagagccttatttaatcaatctcctaagatcctgcgggggtaaagagctccattttaaggaaaggaaaaccgagtgcccgagatctgacccagcttgtccaagtttggg

SEQ ID NO: 196615 - DNA, 120 bp, Artificial Sequence
  ENSG00000113407_40 (sequence is synthesized)
tggttaagtatacattttgcccggcactgatctgggcggtgcatgtgggaagatgaatagggcccagttccccgactttgagggcctcacaggctgatgtgtaagagacaggaaaacagc

SEQ ID NO: 196616 - DNA, 120 bp, Artificial Sequence
  ENSG00000113407_41 (sequence is synthesized)
tgcccaaaaggatttccagaaactctgacccttctaagaggtctgggtggaattgtgatggtgattctgctagtagacagtgtaacttctgcgtctacaaaaagaggataggccgtcact

SEQ ID NO: 196617 - DNA, 120 bp, Artificial Sequence
  ENSG00000113407_42 (sequence is synthesized)
gctcacatggctttgcgtgaaagcccaatggtactgtctctatggcagagatgaggaaggaacaccagcgtcctccaactttcctgttcttcctttgggttaatggccactgtaaggaaa

SEQ ID NO: 196618 - DNA, 120 bp, Artificial Sequence
  ENSG00000113407_43 (sequence is synthesized)
attcctggaagttcatccaagaagtcctgatccctgtgttcagtaaaatcatgtgagatcaaaatataattctgattttagatctgacaaattctgtatctctgttacaataggtacgac

SEQ ID NO: 196619 - DNA, 120 bp, Artificial Sequence
  ENSG00000113430_0 (sequence is synthesized)
gtaaaatatgtatttctgtcgccgctgcgaggccgctcggtcccagagccccctcgagcctccggaatgcgaagttaaaggaatcgcggcggccaccgctgctcactttgttacccggtt

SEQ ID NO: 196620 - DNA, 120 bp, Artificial Sequence
  ENSG00000113430_1 (sequence is synthesized)
agaaaagtttgcggagcgcggggatggactaaccggctctcctgcttcgccctcccagcgcctagaagcctgcagctccggagcagtggccgcgccacgccggccccagcgcgcagaacc

SEQ ID NO: 196621 - DNA, 120 bp, Artificial Sequence
  ENSG00000113430_2 (sequence is synthesized)
ctgcaggccccgcccgtccgccccgggccgcgcccgccatgtcctacccgcagtttggatacccctactcctcggctccccagttcttgatggccaccaactccctgagcacgtgctgcg

SEQ ID NO: 196622 - DNA, 120 bp, Artificial Sequence
  ENSG00000113430_3 (sequence is synthesized)
agtccggaggccgcacgctggcggactccgggcccgccgcctcggcccaggcgccggtctactgcccggtctacgagagccggctgctggccaccgcgcgccacgagctcaactcggccg

SEQ ID NO: 196623 - DNA, 120 bp, Artificial Sequence
  ENSG00000113430_4 (sequence is synthesized)
cggcgctgggcgtctatgggggtccctatggcggatcgcagggctatggcaactacgtgacctacggctcggaggcgtccgccttctactcgctgaacagctttgattccaaggatggtt

SEQ ID NO: 196624 - DNA, 120 bp, Artificial Sequence
  ENSG00000113430_5 (sequence is synthesized)
cgggatctgcgcatgggggcctggcaccagccgctgccgcctactacccttacgagccagctctgggccagtacccctatgacaggtatggaaccatggacagcggcacgcggcgcaaga

SEQ ID NO: 196625 - DNA, 120 bp, Artificial Sequence
  ENSG00000113430_6 (sequence is synthesized)
acgccacgcgcgagaccaccagcacgctcaaggcctggctgcaggagcaccgcaagaacccctaccccaccaagggcgagaagatcatgctggccatcatcaccaagatgaccctcacac

SEQ ID NO: 196626 - DNA, 120 bp, Artificial Sequence
  ENSG00000113430_7 (sequence is synthesized)
aggtctccacctggttcgccaacgcgcgccggcgcctcaagaaggagaacaagatgacgtggccgccgcggaacaagtgcgcagacgagaagcggccctacgcggagggcgaggaggagg

SEQ ID NO: 196627 - DNA, 120 bp, Artificial Sequence
  ENSG00000113430_8 (sequence is synthesized)
aggggggcgaggaggaggcgcgggaggagcccctcaagagctccaagaacgcagagcccgtgggcaaagaggagaaggagctggagcttagtgacttggacgacttcgacccgctggaag

SEQ ID NO: 196628 - DNA, 120 bp, Artificial Sequence
  ENSG00000113430_9 (sequence is synthesized)
tgtctctggccgcgggtggcggagctgctctggacgaggacctggagagggcccggagctgtctccgcagcgcggcggccgggccggagccactgccgggcgcagagggcggccctcagg

SEQ ID NO: 196629 - DNA, 120 bp, Artificial Sequence
  ENSG00000113430_10 (sequence is synthesized)
tctgcgaggccaagctggggtttgtgccggcgggggcgtcggcaggcctggaggctaagccgcgcatctggtccctggcccacacagccaccgccgccgccgccgccgccacctccctga

SEQ ID NO: 196630 - DNA, 120 bp, Artificial Sequence
  ENSG00000113430_11 (sequence is synthesized)
gccagactgagtttccgtcgtgcatgctcaagcgccaaggtcccgcggcccctgcggctgtgtcctccgcgcccgccacgtccccgtctgtggcccttccccactctggcgccctggaca

SEQ ID NO: 196631 - DNA, 120 bp, Artificial Sequence
  ENSG00000113430_12 (sequence is synthesized)
ggcaccaggactccccggtaaccagtctcagaaactgggtggacggggtcttccacgaccccatcctcaggcacagcactttgaaccaggcctgggccaccgccaagggcgccctcctgg

SEQ ID NO: 196632 - DNA, 120 bp, Artificial Sequence
  ENSG00000113430_13 (sequence is synthesized)
cctctgggacgctcgctgggggcgggcgcgaacgtgctgactgcacccctggcccgcgcctttccgcctgccgtgccccaggacgccccagctgcaggcgccgccagggagctgctcgcc

SEQ ID NO: 196633 - DNA, 120 bp, Artificial Sequence
  ENSG00000113430_14 (sequence is synthesized)
tgctcgccctgcccaaggccggcggcaaacccttctgcgcctgaggcgggcgggtcccgagcccaggagggaacccgcgctcaggcggacggcgccgactcttttcactgagtttccaga

SEQ ID NO: 196634 - DNA, 120 bp, Artificial Sequence
  ENSG00000113430_15 (sequence is synthesized)
ggaagactagcgcggccaccgcgaagccgccaacccaccggagagggggcttctgaacttggactcctgggaacatggacaagcccggcgctgccacgccggggcctccaccgcctgggc

SEQ ID NO: 196635 - DNA, 120 bp, Artificial Sequence
  ENSG00000113430_16 (sequence is synthesized)
ctgagcctgaccgggccattcccaaatttgggacgcggaaggagaggctctcggagcagaagaggccagataccctgaagcataaagtttacgtcaaaagtttacatggagaaggcggtt

SEQ ID NO: 196636 - DNA, 120 bp, Artificial Sequence
  ENSG00000113430_17 (sequence is synthesized)
ccgttctgaagcgtggtctgctgtcccctgggcgtgaggcctcctgggcctgtcgggcctccgatttcatcctcagcacgtaatgctcaccaacagcacttgcactgagttgactcttgc

SEQ ID NO: 196637 - DNA, 120 bp, Artificial Sequence
  ENSG00000113430_18 (sequence is synthesized)
acactcttgactccataatatgatgctttttaagatgtatgttcacaccaataattgcctgcttcagaggctaatataacaaaaccaataaaaccgagtgatggtgtttgtattgcaaaa

SEQ ID NO: 196638 - DNA, 120 bp, Artificial Sequence
  ENSG00000113430_19 (sequence is synthesized)
gaccgcggcgcctggggacgccggcgcgctccgctcgccaggtgctccgcctggaaatgtctccattagttgtcgccggctccccgctggagcgcgcgcgccgagcttccgcgcggagcc

SEQ ID NO: 196639 - DNA, 80 bp, Artificial Sequence
  ENSG00000113430_20 (sequence is synthesized)
ggtgaggtcccccgctcccgcccccgccccggggttccgagacccctccccccttccgaggaggcggaggctccgcgcgg

SEQ ID NO: 196640 - DNA, 120 bp, Artificial Sequence
  ENSG00000113430_21 (sequence is synthesized)
gcggcgactccccggtgcgtcccgggctgcgagctgctccccgcggccccggcagccacacggcgcgggcgggagcttccccagctcagcgcctagaagcctgcagctccggagcagtgg

SEQ ID NO: 196641 - DNA, 120 bp, Artificial Sequence
  ENSG00000113430_22 (sequence is synthesized)
gccagctctgggccagtacccctatgacaggatcaaacggctaggcggtcatccccataaaggaattggcctggacctctctggcttgggaaggagcccaggctccctgtatggaaccat

SEQ ID NO: 196642 - DNA, 120 bp, Artificial Sequence
  ENSG00000113441_0 (sequence is synthesized)
agtcagctgggccgcctcagctctcggagtaggaagctcgggcgctccggctgtaaggagccgcggcggggggaaaatggagcccttcaccaatgatcggcttcagctccccaggaatat

SEQ ID NO: 196643 - DNA, 120 bp, Artificial Sequence
  ENSG00000113441_1 (sequence is synthesized)
gattgaaaacagcatgtttgaggaagaaccagatgtggtggatttagccaaagagccttgtttacatcctctagagcctgatgaggtggaatatgagccccggggttcccgactgctggt

SEQ ID NO: 196644 - DNA, 120 bp, Artificial Sequence
  ENSG00000113441_2 (sequence is synthesized)
gcggggtcttggtgagcatgagatggaggaggatgaagaggattatgagtcatcagcaaagctgctgggcatgtccttcatgaatagaagctcaggccttcggaacagtgcaactggtta

SEQ ID NO: 196645 - DNA, 120 bp, Artificial Sequence
  ENSG00000113441_3 (sequence is synthesized)
caggcagagcccagatggggcttgttcagtaccctctgcaaggaccatggtggtctgtgcttttgtcatcgtggttgctgtttctgtaatcatggtgatttacttactgcccagatgtac

SEQ ID NO: 196646 - DNA, 120 bp, Artificial Sequence
  ENSG00000113441_4 (sequence is synthesized)
ctttaccaaagaaggctgccataaaaaaaaccagtcaattggactaattcagccatttgcaacaaatgggaaattgtttccatgggcacagatcaggcttcccactgccgttgtgccact

SEQ ID NO: 196647 - DNA, 120 bp, Artificial Sequence
  ENSG00000113441_5 (sequence is synthesized)
acgctatgaactcagcctacacccgaacctaacctcgatgacattcaggggttctgtgacaatttcagttcaggctcttcaggtcacatggaatatcattcttcatagcacaggtcataa

SEQ ID NO: 196648 - DNA, 120 bp, Artificial Sequence
  ENSG00000113441_6 (sequence is synthesized)
tatttcaagagtgacctttatgtcagcagtttcaagccaagaaaaacaagctgagatcctggaatatgcatatcatggacagatcgccattgttgcccccgaagcccttctagcagggca

SEQ ID NO: 196649 - DNA, 120 bp, Artificial Sequence
  ENSG00000113441_7 (sequence is synthesized)
caattatacgttgaagatagagtactcggcaaatatatctagttcttattatgggttttatggcttctcctacacagatgaaagtaatgagaaaaagtactttgcagcaactcagtttga

SEQ ID NO: 196650 - DNA, 120 bp, Artificial Sequence
  ENSG00000113441_8 (sequence is synthesized)
acccctggcagcaagatctgcttttccttgttttgatgaaccagcatttaaagccacttttatcatcaagatcataagggatgagcaatacaccgctttatcaaatatgcctaagaagtc

SEQ ID NO: 196651 - DNA, 120 bp, Artificial Sequence
  ENSG00000113441_9 (sequence is synthesized)
atcagtcgttctagatgatggacttgttcaggatgagttttctgagagtgtgaagatgagcacttacttggttgctttcattgtgggagagatgaagaacctgagtcaggacgtaaatgg

SEQ ID NO: 196652 - DNA, 120 bp, Artificial Sequence
  ENSG00000113441_10 (sequence is synthesized)
aaccctggtttctatatatgctgtaccagaaaagattggtcaagttcattatgccttggaaacaactgtgaagcttcttgagttttttcaaaactactttgaaattcagtacccacttaa

SEQ ID NO: 196653 - DNA, 120 bp, Artificial Sequence
  ENSG00000113441_11 (sequence is synthesized)
gaaattggatttggtggctattcctgactttgaagcaggagcaatggaaaattggggtttgctcaccttccgagaggagacacttctgtatgacagtaacacttcttcaatggcggatag

SEQ ID NO: 196654 - DNA, 120 bp, Artificial Sequence
  ENSG00000113441_12 (sequence is synthesized)
aaagctggtgactaaaatcattgctcatgagctggcccaccagtggtttggcaatctggtaacaatgaagtggtggaatgacctatggctaaatgaaggttttgccactttcatggagta

SEQ ID NO: 196655 - DNA, 120 bp, Artificial Sequence
  ENSG00000113441_13 (sequence is synthesized)
tttctctttggaaaaaatattcaaagagctttctagttatgaagatttcttagatgctcgatttaaaaccatgaagaaagattccttaaattcatctcatccaatatcatcatctgttca

SEQ ID NO: 196656 - DNA, 120 bp, Artificial Sequence
  ENSG00000113441_14 (sequence is synthesized)
gtcttcagaacaaattgaagaaatgtttgattctctttcctattttaagggatcttctctcttgttgatgttgaaaacttaccttagtgaagatgtgtttcaacatgctgttgtccttta

SEQ ID NO: 196657 - DNA, 120 bp, Artificial Sequence
  ENSG00000113441_15 (sequence is synthesized)
cctgcataatcacagctatgcatctattcaaagtgatgatctgtgggatagttttaatgaggtcacaaaccaaacactagatgtaaagagaatgatgaaaacctggaccctgcagaaagg

SEQ ID NO: 196658 - DNA, 120 bp, Artificial Sequence
  ENSG00000113441_16 (sequence is synthesized)
atttcctttagtgactgttcaaaagaaaggaaaggaactttttatacaacaagagagattctttttaaatatgaagcctgaaattcagccttcagatacaagctacctgtggcatattcc

SEQ ID NO: 196659 - DNA, 120 bp, Artificial Sequence
  ENSG00000113441_17 (sequence is synthesized)
actatcctatgtcactgaaggaagaaattattcaaaatatcaatcggtatcattactggataagaaatcaggtgtcatcaatcttacagaagaagtgctgtgggtcaaagtgaatataaa

SEQ ID NO: 196660 - DNA, 120 bp, Artificial Sequence
  ENSG00000113441_18 (sequence is synthesized)
catgaatggttattatattgtacactatgcagatgatgattgggaagcactaatccatcagttgaaaataaatccttatgttctgagtgacaaagaccgagccaaccttatcaacaacat

SEQ ID NO: 196661 - DNA, 120 bp, Artificial Sequence
  ENSG00000113441_19 (sequence is synthesized)
ctttgaacttgcaggcctaggcaaggtacctctcaagagggcctttgatttgattaattatcttggaaatgagaaccatactgcacccatcaccgaagccctgtttcagacagacctcat

SEQ ID NO: 196662 - DNA, 120 bp, Artificial Sequence
  ENSG00000113441_20 (sequence is synthesized)
ctataacctccttgaaaaactgggatacatggatctggcctcaagactggtgactagggtatttaaattacttcaaaaccaaattcaacaacaaacttggactgatgagggcactccatc

SEQ ID NO: 196663 - DNA, 120 bp, Artificial Sequence
  ENSG00000113441_21 (sequence is synthesized)
tatgcgagagcttcggtcagccctgctagagtttgcttgcacccacaacctggggaactgctctactactgccatgaaactgtttgatgactggatggcatccaatggaactcaaagcct

SEQ ID NO: 196664 - DNA, 120 bp, Artificial Sequence
  ENSG00000113441_22 (sequence is synthesized)
acctactgatgtcatgacaactgtgttcaaagttggagcaaaaactgacaaaggctggtcattccttttgggcaaatacatttctataggctctgaagcagagaagaacaaaatactaga

SEQ ID NO: 196665 - DNA, 120 bp, Artificial Sequence
  ENSG00000113441_23 (sequence is synthesized)
agcacttgccagctcagaggatgtgcggaagctttactggttaatgaaaagtagcctgaatggagataacttccgaacacagaagctgtcttttatcattagaacagtgggtcgacattt

SEQ ID NO: 196666 - DNA, 120 bp, Artificial Sequence
  ENSG00000113441_24 (sequence is synthesized)
tcctggacacttactggcatgggattttgtcaaagagaactggaataagcttgtacagaagttccctctggggtcctataccatacaaaatattgttgctggatcaacttacctgttttc

SEQ ID NO: 196667 - DNA, 120 bp, Artificial Sequence
  ENSG00000113441_25 (sequence is synthesized)
aacaaagacacatttatctgaggttcaggcattctttgaaaatcagtcagaggcaaccttccggcttcgttgtgtccaggaggctttggaagtcattcagttgaatatccagtggatgga

SEQ ID NO: 196668 - DNA, 120 bp, Artificial Sequence
  ENSG00000113441_26 (sequence is synthesized)
gaagaacctcaaaagtctcacatggtggctgtagcatgcacaaccgcacctcattttgttgcccattcagagagcttgtaagcttgggctctgccgcttttgcaaaagccaaggtaaagc

SEQ ID NO: 196669 - DNA, 120 bp, Artificial Sequence
  ENSG00000113441_27 (sequence is synthesized)
caggatcgctgccaagttgtttgcactctttggagttctagttagctcagggcctgactgtatttttcatccatcttttctgaagtgtctttgggcagtatgtagttatttattacaaaa

SEQ ID NO: 196670 - DNA, 120 bp, Artificial Sequence
  ENSG00000113441_28 (sequence is synthesized)
ttatattcacctaaatgccaaccatctacaaaaacaatgagtaatttttctactttgaagatacacagatggggacaaaaaccctgttttggaattctgttctattcctcagtatccaga

SEQ ID NO: 196671 - DNA, 120 bp, Artificial Sequence
  ENSG00000113441_29 (sequence is synthesized)
aagttactgacacagtaaaacaaggaaagttctaccctaagagccgccatcacttcaggccgctggtttgtcagccatctgttgcttcttattgatagatggcattggaatgtggtacaa

SEQ ID NO: 196672 - DNA, 120 bp, Artificial Sequence
  ENSG00000113441_30 (sequence is synthesized)
agttagctctgaagaatatggtaacgaagacaataaagcatgcactgtaagaactgacctcaggtgtgcagatctactttgatttggggttttgattaattctttatttttctgaaaaaa

SEQ ID NO: 196673 - DNA, 120 bp, Artificial Sequence
  ENSG00000113441_31 (sequence is synthesized)
agtttaaataatgtctgtaactattgtgtttttttcctgccgaatagccaggtgctacagatttttaaaatttttgttgtattgaaaagctaaacaaggccaaaaggttaaattttttga

SEQ ID NO: 196674 - DNA, 120 bp, Artificial Sequence
  ENSG00000113441_32 (sequence is synthesized)
atatttaagactttctttttcatcttttatagcgttaccataggaaactgttccaaactgagttagctttaattataattattttattcataaatggtgatagtccccagatctgtacac

SEQ ID NO: 196675 - DNA, 120 bp, Artificial Sequence
  ENSG00000113441_33 (sequence is synthesized)
ctttatcactccctgccgtagatatactttaggttagtatttctacattcgtggcaagcattttggtaacaccagtggttttcattgtgacttttatcactatcactaagaatgcaattt

SEQ ID NO: 196676 - DNA, 120 bp, Artificial Sequence
  ENSG00000113441_34 (sequence is synthesized)
aagttgccttttggcatcatagatcatagaaactttctctctgaatcatacccatgtgtgaattttcattttatatgatagtgtagcatattagaagcatattttaaaacagagcctttg

SEQ ID NO: 196677 - DNA, 120 bp, Artificial Sequence
  ENSG00000113441_35 (sequence is synthesized)
agaaattgaaaaacaattatttgaagttcaccatagtaccttaaaggaacaaagagaatgtgggataggagtaacttgaattcgtgtttagtatggtgggctttgaatttttttcactat

SEQ ID NO: 196678 - DNA, 120 bp, Artificial Sequence
  ENSG00000113441_36 (sequence is synthesized)
caaaaatagtgcttttgtttagttaaaaattgtagtttttctttttttgtgtgtccaaactaacataaaaggagtggtcaaagaaggaaagaagaaaaatgagggaggatgtccgaaact

SEQ ID NO: 196679 - DNA, 120 bp, Artificial Sequence
  ENSG00000113441_37 (sequence is synthesized)
gtatggcattttactccttctgaaagagaaatactgtacttgaatttttgagctatgcagacttatacctagattgttgtgtttctttgattcttaggagaaaagctttcttcctaataa

SEQ ID NO: 196680 - DNA, 120 bp, Artificial Sequence
  ENSG00000113441_38 (sequence is synthesized)
ttcttgagaactttatattttgtttgaaaacagtttctatgtacataaaaagggtatttacccatttgtgagcacttaaaacactccacagagtcagacagtgggaaaggtcaccctttt

SEQ ID NO: 196681 - DNA, 120 bp, Artificial Sequence
  ENSG00000113441_39 (sequence is synthesized)
accctttttttattcggcaggtatcaagttagaatgtatggaattgtgaataaaattatattttattttatgaaaatatttttatataataaaatttaaaaggctggtaagctaaaaaaa

SEQ ID NO: 196682 - DNA, 120 bp, Artificial Sequence
  ENSG00000113441_40 (sequence is synthesized)
tttaatcctagtgtgttttccccaatttagtcttttctaaaatttatctgttttagagtagaaaatattatatcctgagaatcacagaatcatctaaatatgtcttattcaactgaagtg

SEQ ID NO: 196683 - DNA, 120 bp, Artificial Sequence
  ENSG00000113441_41 (sequence is synthesized)
attgtaagtctttattcttgtgctttggttaaatgaatgataatttagttgatagtgaaagttaatgtgtttttatatttttagagtgagggaaaaatactaaacttttgagagttttgt

SEQ ID NO: 196684 - DNA, 120 bp, Artificial Sequence
  ENSG00000113441_42 (sequence is synthesized)
tgtcgttgctggttttttaccatgtggtactaaattccactttgatacaaaatttaaattttgtaacttctcaaaatcacttaagattcttcagttttacctgtgcttcttgacatcgct

SEQ ID NO: 196685 - DNA, 120 bp, Artificial Sequence
  ENSG00000113441_43 (sequence is synthesized)
agttttacctgtgcttcttgacatcgctcctataatgtatgttagttaactctgcatatggcaaatcttgtcttgaattatatcatttctctccctctctctctctctctgtgtgtgtgt

SEQ ID NO: 196686 - DNA, 120 bp, Artificial Sequence
  ENSG00000113441_44 (sequence is synthesized)
gtgtgtgtgtagtgtggggggtattgttatgagtaaaactttatcaaaacttggcctgaaaaagagataactcatgatccattgctatctttattactcaaaggctgttcattcccataa

SEQ ID NO: 196687 - DNA, 120 bp, Artificial Sequence
  ENSG00000113441_45 (sequence is synthesized)
taccagatccataatagttgtagtttttttgatgttgttgcccttaccttaattatttgtagttttagtaggccttgcctcagtttttcccacagaattccataattttaatgttgaact

SEQ ID NO: 196688 - DNA, 120 bp, Artificial Sequence
  ENSG00000113441_46 (sequence is synthesized)
aacccatctatataggacttctaaaaactacgtcaggaatgtaaggttaaatgagaggtagaacttgtagtgtaataggtataatggtagctttcaaagttttatcttctcaaaacattg

SEQ ID NO: 196689 - DNA, 120 bp, Artificial Sequence
  ENSG00000113441_47 (sequence is synthesized)
tcttagccagtgtatttctgagaactcagactgaagcacagaagtcacagtatgcttcttttatttaagcacacagattcatgacacaagtacttgttgaacaagtgttctcattgcaga

SEQ ID NO: 196690 - DNA, 120 bp, Artificial Sequence
  ENSG00000113441_48 (sequence is synthesized)
gagatctacttgaatataaaagggtcatcatactagattattaaaaaagaattggaaatcttgagttgtggaagaaatgtttatgctttggagatctaaaaaagttatgaatgtaggaat

SEQ ID NO: 196691 - DNA, 120 bp, Artificial Sequence
  ENSG00000113441_49 (sequence is synthesized)
tagataagtccagtttgttctgttaatataaaatggttagatatattaaactgcaagtagtatcagcttcaccataagcttgggccttcctccatcttgttttatttaagtctctttaaa

SEQ ID NO: 196692 - DNA, 120 bp, Artificial Sequence
  ENSG00000113441_50 (sequence is synthesized)
cattgtttcagcattcatgaactttcttactatcacaggttctactttaattttccttgccatatgtgtttccattttgtgggacattagccaccacaggaacacaagagttgtcagaag

SEQ ID NO: 196693 - DNA, 120 bp, Artificial Sequence
  ENSG00000113441_51 (sequence is synthesized)
actcctgggtgtacagagcaaatcaagctgcatcagtattataggataccaaacagaatcctttctattaggaaataagaaatcagttaagtgttggctgggcgcggtggcttatgcctg

SEQ ID NO: 196694 - DNA, 76 bp, Artificial Sequence
  ENSG00000113441_52 (sequence is synthesized)
gtttgccaaggtgggcagaccatttgaggccaggagttctaaaccagtttggccgacatggcaaaaccccatctct

SEQ ID NO: 196695 - DNA, 120 bp, Artificial Sequence
  ENSG00000113441_53 (sequence is synthesized)
gactgtctcaaaaaacaaaaaacaaaaaaaaaagagttaagtgttgattttgttggattactgacagtttgttgagatggattttaaaaagagtctatttaaaccaaagtacctggaacc

SEQ ID NO: 196696 - DNA, 120 bp, Artificial Sequence
  ENSG00000113441_54 (sequence is synthesized)
ataatctgccatcagattgctaaacattcacataatccccatgtttcatggggcttcagggaaggcaaatacatctgagatgagccacctccaaggacagcatttcctgggctgcaaaac

SEQ ID NO: 196697 - DNA, 120 bp, Artificial Sequence
  ENSG00000113441_55 (sequence is synthesized)
tagatgtggattttgttacttaggcctctctaaaaactgaggccatggatatgacatagcttttcttctcacctatgcctttgttacttttgtatttattggaattaaatctctttttaa

SEQ ID NO: 196698 - DNA, 120 bp, Artificial Sequence
  ENSG00000113441_56 (sequence is synthesized)
agagcttccttcccccttcatcccatttgtatttttaaaaactaagttatatatatatttgcttgtttttgcattcttttattttgtgctccattccctgctttgccagttaagtactac

SEQ ID NO: 196699 - DNA, 120 bp, Artificial Sequence
  ENSG00000113441_57 (sequence is synthesized)
ctgaaaagtagcggttcaaaagtatggtaaatctcctcccttaaccttattgcctgtgtgggtgacagctaatggaaaagttgatcgatttttttcagtggtttttttgggagtatatac

SEQ ID NO: 196700 - DNA, 120 bp, Artificial Sequence
  ENSG00000113441_58 (sequence is synthesized)
tttaaaaatgtacatacatgtttttgatagtttttatattatttcattttgtatatttttttcctgatgaagagtgatatatcatcctatgaaaatttcatctacccttcccattttacc

SEQ ID NO: 196701 - DNA, 120 bp, Artificial Sequence
  ENSG00000113441_59 (sequence is synthesized)
tgtatgggcagtagctacagactagttatttggtttccttctttggaagaaggtggtgatgttgagaggagagcaagctatattcttttaaaagtgtgtacagatgtttttgctattttg

SEQ ID NO: 196702 - DNA, 120 bp, Artificial Sequence
  ENSG00000113441_60 (sequence is synthesized)
tgttatttcattttgtatttcattcatccattttgtggacgtgtagataaaacgcggtggtccaaaagcatgacagatgtcccctttgcgtttctccttattgttcgcatggacaataac

SEQ ID NO: 196703 - DNA, 120 bp, Artificial Sequence
  ENSG00000113441_61 (sequence is synthesized)
tgacagagtagtcctagttgctgttgttttgatctagtcttggggctggggttgtatattattctttcaagtgtgtataaatattgtgccacctttttatacttcattttatacttgttt

SEQ ID NO: 196704 - DNA, 120 bp, Artificial Sequence
  ENSG00000113441_62 (sequence is synthesized)
ccttgtatggatgcatatatacttaatgaaaattgaggttcagagtatgacaaatctcttttcccttttccttactgcctatttaggcaatagctaatagagtagtttgttttgttttgg

SEQ ID NO: 196705 - DNA, 120 bp, Artificial Sequence
  ENSG00000113441_63 (sequence is synthesized)
ggtgtgggggagagtggagtatgtacttaatgtatataaataaacttgctactacattgtattactaatttggttcacactgtgtccttctcatggatgtgaaagtaccaatgaaatgtg

SEQ ID NO: 196706 - DNA, 120 bp, Artificial Sequence
  ENSG00000113441_64 (sequence is synthesized)
gagatctcgatgtataacagtctcccattctcctcatcccttattgactgctgggcagtagctaacagagtagttgtcaagtggcgtatttgaggtgagggggagggacggggaaggtag

SEQ ID NO: 196707 - DNA, 120 bp, Artificial Sequence
  ENSG00000113441_65 (sequence is synthesized)
gaaaatgcacttaatgtatatacatgtttttactactacattgtattaattcatcgggtgcccagactgaaaggtacctaatgaaccatggagttccggatgtataacagtctcctcttt

SEQ ID NO: 196708 - DNA, 120 bp, Artificial Sequence
  ENSG00000113441_66 (sequence is synthesized)
tccctttcccttattgcccatgtgggcaatacttaagagtagtttgggtttattgaagattttttgctaggagagagaaaattttttgctaggagaggtttcaaggtaagagtatatact

SEQ ID NO: 196709 - DNA, 120 bp, Artificial Sequence
  ENSG00000113441_67 (sequence is synthesized)
ttaaacatgtatataaatgtttttgctacttttctgtcactacctttcttaccttgtcctttacatggatatatgaagaaaattgaggttcagcctgtagcagctctcctcttctgccct

SEQ ID NO: 196710 - DNA, 120 bp, Artificial Sequence
  ENSG00000113441_68 (sequence is synthesized)
tcccttagattgtctgtgtgggcaggtgtctaagagagtagttgattagcttcagggattctttggtgggtgttggggtatatacttttgtatatgtatgtacatatttttatttcttta

SEQ ID NO: 196711 - DNA, 120 bp, Artificial Sequence
  ENSG00000113441_69 (sequence is synthesized)
ttatagtgtttcattgggtacccggtccttcacttggatgtgtaggttcctaatgagccatggagttatggatgtataacaatctgttctccctttacccttttaatgtatatgggcaat

SEQ ID NO: 196712 - DNA, 120 bp, Artificial Sequence
  ENSG00000113441_70 (sequence is synthesized)
aattttaaagtagtttggatttttttaagttttgaggggtgggaggggtctaaggcagaatatatcctttttaaaaatgtatatatacttttcattaactatattgtattatttcatgct

SEQ ID NO: 196713 - DNA, 120 bp, Artificial Sequence
  ENSG00000113441_71 (sequence is synthesized)
gtacccagtccattgcttggacttacgggtacctaatgaaacgtggaggtccggatgtatgaaaatctcctcttttcccctttccttattgcctctgtaggcaataattatagagtagta

SEQ ID NO: 196714 - DNA, 120 bp, Artificial Sequence
  ENSG00000113441_72 (sequence is synthesized)
tagatggtttttcttttttatccatctgcctatctccaggaggatggggtgtgcacttttagaaatgtatataaatgttcttgctcctttttcctgttacttcattgtgtgccaaggcct

SEQ ID NO: 196715 - DNA, 120 bp, Artificial Sequence
  ENSG00000113441_73 (sequence is synthesized)
ttccatggatacttaggtacgtaatgaaaattgaggttcattctatgaaaaaatctccccttctccccttcccttattgcctgtcttggcaatggccagtagagtagttatttaagggat

SEQ ID NO: 196716 - DNA, 120 bp, Artificial Sequence
  ENSG00000113441_74 (sequence is synthesized)
tttgtttttttgttttttttttggtaggggaggtggggaatttctgggtttgtcttttttttaatgtatataaaagtttgctagttgttgttattgttgttctttcactctcaacacagt

SEQ ID NO: 196717 - DNA, 120 bp, Artificial Sequence
  ENSG00000113441_75 (sequence is synthesized)
aacacagttttttgtttggagttgtaggaatcaaatgtaatgagggacccagacccgagagtgtggtaaatattctttgccttcctcagagcctgtatacacaagcaagtagtatgtgag

SEQ ID NO: 196718 - DNA, 120 bp, Artificial Sequence
  ENSG00000113441_76 (sequence is synthesized)
cactacagggcttgggttttggttttttgcttttgagggttttaatgaggagtgggattgttgagaggaaaaggcaagatatataatttttttaatgtatataaatgttttgctcctttt

SEQ ID NO: 196719 - DNA, 120 bp, Artificial Sequence
  ENSG00000113441_77 (sequence is synthesized)
tgatgttaacttcattttgaatctggtcctttgtatgaccacttaggtacttaatagtaataaagttgagattgactctatgaaaaatatcccatactccccatccctcattgcctaggg

SEQ ID NO: 196720 - DNA, 120 bp, Artificial Sequence
  ENSG00000113441_78 (sequence is synthesized)
ggcaatggtagaatagatgtttggtttcttttgggggtgtctgagtgtatatgtgtgtgtatatacacacaagaacacacatatttatatactatacacacacattttaatgtatataaa

SEQ ID NO: 196721 - DNA, 120 bp, Artificial Sequence
  ENSG00000113441_79 (sequence is synthesized)
tatttgctacattctgtgtgttatataatgtggtacccagtcctctgctgggacatggatgtacataatgaaacatggaggtccagacgtatgataactctcctgtttcccttccctcat

SEQ ID NO: 196722 - DNA, 120 bp, Artificial Sequence
  ENSG00000113441_80 (sequence is synthesized)
tgcctacaggggcaatagtttcatatcttgggttttttattgtttaatttttttttatggggaggggttctttgggtgggtaatagtcagggggaaaggacagtgtctatactttttaaa

SEQ ID NO: 196723 - DNA, 120 bp, Artificial Sequence
  ENSG00000113441_81 (sequence is synthesized)
gatgtatataaatgtttcatgttattggttttgtacctagtcctttgcatggatatataggtacctaatgaaaatcgaggatcagtgtatgacaaatctcccatcctcccctttccttat

SEQ ID NO: 196724 - DNA, 120 bp, Artificial Sequence
  ENSG00000113441_82 (sequence is synthesized)
tgcctgtgtcggcaataggaagtagaatagttgtgtgttgtttacttacttgtctgttttagagagatttctatttttggtaggggaatattcttaatatgttttcatatctttatttca

SEQ ID NO: 196725 - DNA, 120 bp, Artificial Sequence
  ENSG00000113441_83 (sequence is synthesized)
ttttgtagtcttttgcatggctatgtagggacctaatgaaagtcgagtttcataatatgacagctcacttcttttcctacatatttcctcacttagcagtagctagtgtagttattttgt

SEQ ID NO: 196726 - DNA, 120 bp, Artificial Sequence
  ENSG00000113441_84 (sequence is synthesized)
ggttattttatttcattctctaggatctattccattaaggatgcaagtgtgtagatgcatatatatcatttgcttctttcttccgccattattttcctttaacacttagtcccttgcaag

SEQ ID NO: 196727 - DNA, 120 bp, Artificial Sequence
  ENSG00000113441_85 (sequence is synthesized)
gggtctgactatacctaacaaaaataaagacctactaaatccctgccatctggctggaaggtgtagcagtgtattaatgtaactaatagcaacaggtgtgcagcagataagacaggagaa

SEQ ID NO: 196728 - DNA, 120 bp, Artificial Sequence
  ENSG00000113441_86 (sequence is synthesized)
gacactcagctatggttgagttgtgaaagctaattagatccagcatttcttatgttgattcagattgaatgaggtagtgaaaagggacctgtgcttttgtaaattctagaaaggcaagag

SEQ ID NO: 196729 - DNA, 120 bp, Artificial Sequence
  ENSG00000113441_87 (sequence is synthesized)
gacaatattgaataaagctgtgtttaaacttcattgctcatatatcttttagtaactggtaaaccggcgaagctgataagccaataagagtgctgtctagaacgcatttgcaaaccgtta

SEQ ID NO: 196730 - DNA, 120 bp, Artificial Sequence
  ENSG00000113441_88 (sequence is synthesized)
agagtagcttctttttgaggcctggacttctgattcatctatagaagtctattatgattccatcaattgcatagcttgtgtacctggtagaaattgtgtcttggaatgaccctttcgagt

SEQ ID NO: 196731 - DNA, 120 bp, Artificial Sequence
  ENSG00000113441_89 (sequence is synthesized)
tattgacatggctctgatgaatagaacatgagccccaaaactaaatccaaaaggaattttctatctttcatcccccacatgtggcaagacaagttggccctttcttacccagaggtcttt

SEQ ID NO: 196732 - DNA, 120 bp, Artificial Sequence
  ENSG00000113441_90 (sequence is synthesized)
tgtgtgactgcatctttctcctccgttctccattgtgtgctttccattttgtctttagtgcctatactgttaggtgttttcttcactggcattcacaaatttaagccattgctgcctcat

SEQ ID NO: 196733 - DNA, 120 bp, Artificial Sequence
  ENSG00000113441_91 (sequence is synthesized)
tagccttgtattttgtgtgcatatcatgtatccagacctgtatgttcgctttaagcattcttatatcacactgtctcctcatctaccatatggtaaatgttaaaactccacatttgtctg

SEQ ID NO: 196734 - DNA, 120 bp, Artificial Sequence
  ENSG00000113441_92 (sequence is synthesized)
catcagggaaaatgcatgggcacacatcctccctccctccctctctgctctcctcccttccttcaggcctcttagcattgtttgttttcccatttctgatactactactccatgctgaag

SEQ ID NO: 196735 - DNA, 120 bp, Artificial Sequence
  ENSG00000113441_93 (sequence is synthesized)
atttgccatattactattttggaaacattgagtgatagaactcctagaaaatttgcaaagaaatgttacatactgtatatcaaactctcagattctagtgttgaaaaagtagcctatact

SEQ ID NO: 196736 - DNA, 120 bp, Artificial Sequence
  ENSG00000113441_94 (sequence is synthesized)
ttgctattacttatacctgctgccatagaaaaaaataagtttattcatgacacatttacatttgatcataaataaaagaaaaaagggcacctttttggagttagtcatggtagtcattag

SEQ ID NO: 196737 - DNA, 120 bp, Artificial Sequence
  ENSG00000113441_95 (sequence is synthesized)
tgatatttctgaacagttcttaatttaaaatacttcaaaggaagtaaaggtcatggcttagctgaaggaaatgctccagaaattggactgtgtaaaccatcagtacaataatacgctgtg

SEQ ID NO: 196738 - DNA, 120 bp, Artificial Sequence
  ENSG00000113441_96 (sequence is synthesized)
tatgtatgtgtatataaaatgagaattatggcataattggagcatttgcattaatcaacaaactcacattgagacaaaacttagttttacagctgtcttgattaaagccaagtgttccat

SEQ ID NO: 196739 - DNA, 120 bp, Artificial Sequence
  ENSG00000113441_97 (sequence is synthesized)
gttgctgtgaagaatagcctctttcaaatactttggaaagtagttacttggaaacttgtaaaggtattacatttttatatttaaacacctatagagatcttcaattccttgagtctgagc

SEQ ID NO: 196740 - DNA, 120 bp, Artificial Sequence
  ENSG00000113441_98 (sequence is synthesized)
ttgtgggtggaattctaaatttgtatcataatctgtcttttgtgaaacattttgaaaatatgtatatataatattgtatatgcaaattgtgttgtttcacttgtaaagggaaaaggctta

SEQ ID NO: 196741 - DNA, 120 bp, Artificial Sequence
  ENSG00000113441_99 (sequence is synthesized)
tttttctttatatttctgataacttgttttgcatatgaccagcactgactgaaaggcatgtgtagctgcaaacactgttgctttttttgtgaaatgaaaataaaagtatttaaatacaaa

SEQ ID NO: 196742 - DNA, 120 bp, Artificial Sequence
  ENSG00000113441_100 (sequence is synthesized)
gctcctaactccactaagtacagaagtggagccgtacagccatgaatgtcaggcatgttgtggggactagttgtattagttttctattgccaccataacaaattaccacaaacttaagca

SEQ ID NO: 196743 - DNA, 120 bp, Artificial Sequence
  ENSG00000113441_101 (sequence is synthesized)
atatagtacaaatttatcttaaagttattggcaggtcagaagcctgatacggatctcattgggctaaaacgaaggagttggcagggctgtgtgttcctttctgtaggctctgggcaggat

SEQ ID NO: 196744 - DNA, 120 bp, Artificial Sequence
  ENSG00000113441_102 (sequence is synthesized)
gatattagaaggtagaaaaatgtcattatcttggaaatctcactttatgaggtggccgaaaaaagtttttatttccctatattcatgctatattgcatgtttgttacattgataaatatg

SEQ ID NO: 196745 - DNA, 120 bp, Artificial Sequence
  ENSG00000113441_103 (sequence is synthesized)
ttgttacattgataaatatgctaataacctttcttgcttgtttcccattcagttaaggtaaaagattaaaaattatattttatttttaaagtaaatttatacaacttttgtaagttctaa

SEQ ID NO: 196746 - DNA, 120 bp, Artificial Sequence
  ENSG00000113441_104 (sequence is synthesized)
tcttttgcactctcaggtggaaatatttttaagtgttttataatcataagttcttgtgaaacctaacaagattatcccttcctaggaatagcttaaccttcctaccaaattaaaaaaaaa

SEQ ID NO: 196747 - DNA, 120 bp, Artificial Sequence
  ENSG00000113441_105 (sequence is synthesized)
gatgcgggcgggcatctctgccgaaaacacctacagcgcccgctccctcggtccttcgagcagtgatccctccgcggccaacctccccagggaaaccagcgattcgcggttcagatagcg

SEQ ID NO: 196748 - DNA, 120 bp, Artificial Sequence
  ENSG00000113441_106 (sequence is synthesized)
accttcgcccgcaggttcctgctctgccttcagacttcggcttcagtggcacctgctcagcgaggcctcgtctaaccaagccatccgaattaactacccactcactcgccatcacatcac

SEQ ID NO: 196749 - DNA, 120 bp, Artificial Sequence
  ENSG00000113441_107 (sequence is synthesized)
cccgatttaattcgcagcggggcactgactttacactcgtgtgtcttctgtgtttatttatgctgccacgaaaacccggaacggcggagcggcgccgcccctcgcggcacctccctggca

SEQ ID NO: 196750 - DNA, 120 bp, Artificial Sequence
  ENSG00000113441_108 (sequence is synthesized)
gcccttggaggccgcgctgggcatgctcagtcagctgggccgcctcagctctcggagtaggaagctcgggcgctccggctgtaaggagccgcggcggggggaaaatggagcccttcacca

SEQ ID NO: 196751 - DNA, 120 bp, Artificial Sequence
  ENSG00000113441_109 (sequence is synthesized)
atggtgagtgggctgccgaggcgccgggacccgggctctccggagccctgagggtcgtgggcagtcgtgacacgcggggtcgggctgcagccgtctcccccaacaccgcgggcttcccac

SEQ ID NO: 196752 - DNA, 120 bp, Artificial Sequence
  ENSG00000113441_110 (sequence is synthesized)
ccacgagggctgagggaggcagggagaggggatctgggggaggcagggaggttcggggggcgggcggcggccagtgcgggacccggggctggcttgaaggtcagcgccgccgccgctcgc

SEQ ID NO: 196753 - DNA, 120 bp, Artificial Sequence
  ENSG00000113441_111 (sequence is synthesized)
ggtgcggccggtgggcaaacagcaaagtttgggctgctgtgcgcagaggagtgggcagtgggaaagttggcagctcaggtttgcccccggaggaggcggtgtcggcccgactctcctgta

SEQ ID NO: 196754 - DNA, 120 bp, Artificial Sequence
  ENSG00000113441_112 (sequence is synthesized)
ggagcgttaagttgtggcagctgccgagcccaacttttgtggggcgccaggagctgtccccctgcccttcagtgagctgccggcgtgacttttcctaatagggcggggtgggggtgggag

SEQ ID NO: 196755 - DNA, 120 bp, Artificial Sequence
  ENSG00000113441_113 (sequence is synthesized)
ttcaggaaaggcttgctcacctcgctcggtgccgcggaggtgcctggccacagtgccaccctcctgaccctgccgaggtactcggcagggccaccacgcatcccctcactggctgcagat

SEQ ID NO: 196756 - DNA, 120 bp, Artificial Sequence
  ENSG00000113441_114 (sequence is synthesized)
cacatcagtttttcagtcaaagacttgttaatgtcaagggtccgtcacggtggtgataccactgtgtgacaggaagcgagagtcaacgcagggagcctgcaccctgcaaacagccacagc

SEQ ID NO: 196757 - DNA, 120 bp, Artificial Sequence
  ENSG00000113441_115 (sequence is synthesized)
ccttcactgaacggggagcataaatcccaccctagttagaaccatggcttttgtgcggaccagaagtgccagagccacaatataggggtgagatgtcttaccgttttgcggtgttgagtg

SEQ ID NO: 196758 - DNA, 120 bp, Artificial Sequence
  ENSG00000113441_116 (sequence is synthesized)
tgtggattcccttttaagatagaaagtaggaaaactgccagtaagggagacgactcactaaaagaggattcagtctctggttgacatgttttgctgagtgtggttggttacttcaggtac

SEQ ID NO: 196759 - DNA, 120 bp, Artificial Sequence
  ENSG00000113441_117 (sequence is synthesized)
agtatcacattaataggggccacagtctatatccctgtttagtttgttagttaccactcaagagcagacagatattgtccactttatcccaaatcccagccagactttgttgtatgctgt

SEQ ID NO: 196760 - DNA, 120 bp, Artificial Sequence
  ENSG00000113441_118 (sequence is synthesized)
gcttcattcatggggctgtgaactactgattatattctccctattcctaatgtagaatgctttattctactgccatctttctgtctgcactgtttaattaggcttactgataacaacttt

SEQ ID NO: 196761 - DNA, 120 bp, Artificial Sequence
  ENSG00000113441_119 (sequence is synthesized)
aattctgaattttctttctcattcaggttctatttgtaattactaagacttaaagaatagtctggtgaagttactcgaagaattaaggaaggtttgagctaaaatgaactagagaccatc

SEQ ID NO: 196762 - DNA, 120 bp, Artificial Sequence
  ENSG00000113441_120 (sequence is synthesized)
tagtactttagtgtaaaatatgtttaatacaagtcgttaagtccttgtaagtgactattccaatgttcattctttgtttttggaagaatgcttggagttaccatgtttttaaatgtgaaa

SEQ ID NO: 196763 - DNA, 120 bp, Artificial Sequence
  ENSG00000113441_121 (sequence is synthesized)
tttcatctaaattaaaaaaaaaatctctgtgatgaggctgactcacccatttggtcaagattagtgctagctgatttgctgaacctttgcctacagaattaaagtactttctcaagtttt

SEQ ID NO: 196764 - DNA, 120 bp, Artificial Sequence
  ENSG00000113448_0 (sequence is synthesized)
aagcacgagtcctatagttggcgtaccctgaggcctgccagttcctgccttaatgcatatgtagtcgtaattgagttctgacacggccttggatgtttctgtcctaaatagctgacattg

SEQ ID NO: 196765 - DNA, 120 bp, Artificial Sequence
  ENSG00000113448_1 (sequence is synthesized)
catcttcaagactgtcattccagttggcttttgagtggatacgtgcagtgagatcattgacactggaaacactagttcccattttaattacttaaaacaccacgatgaaaagaaatacct

SEQ ID NO: 196766 - DNA, 120 bp, Artificial Sequence
  ENSG00000113448_2 (sequence is synthesized)
gtgatttgctttctcggagcaaaagtgcctctgaggaaacactacattccagtaatgaagaggaagaccctttccgcggaatggaaccctatcttgtccggagactttcatgtcgcaata

SEQ ID NO: 196767 - DNA, 120 bp, Artificial Sequence
  ENSG00000113448_3 (sequence is synthesized)
ttcagcttccccctctcgccttcagacagttggaacaagctgacttgaaaagtgaatcagagaacattcaacgaccaaccagcctccccctgaagattctgccgctgattgctatcactt

SEQ ID NO: 196768 - DNA, 120 bp, Artificial Sequence
  ENSG00000113448_4 (sequence is synthesized)
gtggttttgatgtggacaatggcacatctgcgggacggagtcccttggatcccatgaccagcccaggatccgggctaattctccaagcaaattttgtccacagtcaacgacgggagtcct

SEQ ID NO: 196769 - DNA, 120 bp, Artificial Sequence
  ENSG00000113448_5 (sequence is synthesized)
gacgggagtccttcctgtatcgatccgacagcgattatgacctctctccaaagtctatgtcccggaactcctccattgccagtgatatacacggagatgacttgattgtgactccatttg

SEQ ID NO: 196770 - DNA, 120 bp, Artificial Sequence
  ENSG00000113448_6 (sequence is synthesized)
ctcaggtcttggccagtctgcgaactgtacgaaacaactttgctgcattaactaatttgcaagatcgagcacctagcaaaagatcacccatgtgcaaccaaccatccatcaacaaagcca

SEQ ID NO: 196771 - DNA, 120 bp, Artificial Sequence
  ENSG00000113448_7 (sequence is synthesized)
ccataacagaggaggcctaccagaaactggccagcgagaccctggaggagctggactggtgtctggaccagctagagaccctacagaccaggcactccgtcagtgagatggcctccaaca

SEQ ID NO: 196772 - DNA, 120 bp, Artificial Sequence
  ENSG00000113448_8 (sequence is synthesized)
agtttaaaaggatgcttaatcgggagctcacccatctctctgaaatgagtcggtctggaaatcaagtgtcagagtttatatcaaacacattcttagataagcaacatgaagtggaaattc

SEQ ID NO: 196773 - DNA, 120 bp, Artificial Sequence
  ENSG00000113448_9 (sequence is synthesized)
cttctccaactcagaaggaaaaggagaaaaagaaaagaccaatgtctcagatcagtggagtcaagaaattgatgcacagctctagtctgactaattcaagtatcccaaggtttggagtta

SEQ ID NO: 196774 - DNA, 120 bp, Artificial Sequence
  ENSG00000113448_10 (sequence is synthesized)
agttgtctggtaaccggcccttgactgttatcatgcacaccatttttcaggaacgggatttattaaaaacatttaaaattccagtagatactttaattacatatcttatgactctcgaag

SEQ ID NO: 196775 - DNA, 120 bp, Artificial Sequence
  ENSG00000113448_11 (sequence is synthesized)
accattaccatgctgatgtggcctatcacaacaatatccatgctgcagatgttgtccagtctactcatgtgctattatctacacctgctttggaggctgtgtttacagatttggagattc

SEQ ID NO: 196776 - DNA, 120 bp, Artificial Sequence
  ENSG00000113448_12 (sequence is synthesized)
ttgcagcaatttttgccagtgcaatacatgatgtagatcatcctggtgtgtccaatcaatttctgatcaatacaaactctgaacttgccttgatgtacaatgattcctcagtcttagaga

SEQ ID NO: 196777 - DNA, 120 bp, Artificial Sequence
  ENSG00000113448_13 (sequence is synthesized)
accatcatttggctgtgggctttaaattgcttcaggaagaaaactgtgacattttccagaatttgaccaaaaaacaaagacaatctttaaggaaaatggtcattgacatcgtacttgcaa

SEQ ID NO: 196778 - DNA, 120 bp, Artificial Sequence
  ENSG00000113448_14 (sequence is synthesized)
cagatatgtcaaaacacatgaatctactggctgatttgaagactatggttgaaactaagaaagtgacaagctctggagttcttcttcttgataattattccgataggattcaggttcttc

SEQ ID NO: 196779 - DNA, 120 bp, Artificial Sequence
  ENSG00000113448_15 (sequence is synthesized)
agaatatggtgcactgtgcagatctgagcaacccaacaaagcctctccagctgtaccgccagtggacggaccggataatggaggagttcttccgccaaggagaccgagagagggaacgtg

SEQ ID NO: 196780 - DNA, 120 bp, Artificial Sequence
  ENSG00000113448_16 (sequence is synthesized)
gcatggagataagccccatgtgtgacaagcacaatgcttccgtggaaaaatcacaggtgggcttcatagactatattgttcatcccctctgggagacatgggcagacctcgtccaccctg

SEQ ID NO: 196781 - DNA, 120 bp, Artificial Sequence
  ENSG00000113448_17 (sequence is synthesized)
acgcccaggatattttggacactttggaggacaatcgtgaatggtaccagagcacaatccctcagagcccctctcctgcacctgatgacccagaggagggccggcagggtcaaactgaga

SEQ ID NO: 196782 - DNA, 120 bp, Artificial Sequence
  ENSG00000113448_18 (sequence is synthesized)
aattccagtttgaactaactttagaggaagatggtgagtcagacacggaaaaggacagtggcagtcaagtggaagaagacactagctgcagtgactccaagactctttgtactcaagact

SEQ ID NO: 196783 - DNA, 120 bp, Artificial Sequence
  ENSG00000113448_19 (sequence is synthesized)
cagagtctactgaaattccccttgatgaacaggttgaagaggaggcagtaggggaagaagaggaaagccagcctgaagcctgtgtcatagatgatcgttctcctgacacgtaacagtgca

SEQ ID NO: 196784 - DNA, 120 bp, Artificial Sequence
  ENSG00000113448_20 (sequence is synthesized)
caatacttgttgcaataattgcccacgatagctgctcaaacaagagagttggaattcatctgtaaaaatcactacatgtaacgtaggagacaagaaaaatattaatgacagaagatctgc

SEQ ID NO: 196785 - DNA, 120 bp, Artificial Sequence
  ENSG00000113448_21 (sequence is synthesized)
atgccttttttttttttaagtagaaaaattgtttccaaagtgcatgtcacatgccacaaccacggtcacacctcactgtcatctgccaggacgtttgttgaacaaaactgaccttgacta

SEQ ID NO: 196786 - DNA, 120 bp, Artificial Sequence
  ENSG00000113448_22 (sequence is synthesized)
ctcagtccagcgctcaggaatatcgtaaccagttttttcacctccatgtcatccgagcaaggtggacatcttcacgaacagcgtttttaacaagatttcagcttggtagagctgacaaag

SEQ ID NO: 196787 - DNA, 120 bp, Artificial Sequence
  ENSG00000113448_23 (sequence is synthesized)
cagataaaatctactccaaattattttcaagagagtgtgactcatcaggcagcccaaaagtttattggacttggggtttctattcctttttatttgtttgcaatattttcagaagaaagg

SEQ ID NO: 196788 - DNA, 120 bp, Artificial Sequence
  ENSG00000113448_24 (sequence is synthesized)
cattgcacagagtgaacttaatggacgaagcaacaaatatgtcaagaacaggacatagcacgaatctgttaccagtaggaggaggatgagccacagaaattgcataattttctaatttca

SEQ ID NO: 196789 - DNA, 120 bp, Artificial Sequence
  ENSG00000113448_25 (sequence is synthesized)
agtcttcctgatacatgactgaatagtgtggttcagtgagctgcactgacctctacattttgtatgatatgtaaaacagattttttgtagagcttacttttattattaaatgtattgagg

SEQ ID NO: 196790 - DNA, 120 bp, Artificial Sequence
  ENSG00000113448_26 (sequence is synthesized)
tattatatttaaaaaaaactatgttcagaacttcatctgccactggttatttttttctaaggagtaacttgcaagttttcagtacaaatctgtgctacactggataaaaatctaatttat

SEQ ID NO: 196791 - DNA, 120 bp, Artificial Sequence
  ENSG00000113448_27 (sequence is synthesized)
gaattttacttgcaccttatagttcatagcaattaactgatttgtagtgattcattgtttgttttatataccaatgacttccatattttaaaagagaaaaacaactttatgttgcaggaa

SEQ ID NO: 196792 - DNA, 120 bp, Artificial Sequence
  ENSG00000113448_28 (sequence is synthesized)
accctttttgtaagtctttattatttactttgcattttgtttcactctttccagataagcagagttgctcttcaccagtgtttttcttcatgtgcaaagtgactatttgttctataatac

SEQ ID NO: 196793 - DNA, 120 bp, Artificial Sequence
  ENSG00000113448_29 (sequence is synthesized)
actgcacaaaggaaatgccctcactcagctacaagtgcctcctgctccgtgcggggcctcagggccccagagccccgcaccagctctgacttctcgtggttcctggggatcttggcatcg

SEQ ID NO: 196794 - DNA, 120 bp, Artificial Sequence
  ENSG00000113448_30 (sequence is synthesized)
ttctcactgccctgcggtgttttgaactgccttcttacagacgtcatacagcccttgaggaatagtttctgcctggtgagattgaatgatagttctcattcacaaaaccctggattctaa

SEQ ID NO: 196795 - DNA, 120 bp, Artificial Sequence
  ENSG00000113448_31 (sequence is synthesized)
gcagggacacacagaaattactttcgcaggtaaatcagcccacccagccaaagtgtggagagatttgttccttggctgacttctttgctccacggagaggagtgttttcctgtgcttgcc

SEQ ID NO: 196796 - DNA, 120 bp, Artificial Sequence
  ENSG00000113448_32 (sequence is synthesized)
ctgaaatggaacttccttgacagctctcccgtgttacagtacctcccggtcattttctttttctctctctctacctgcgctcttcgagtgtcagaaacctttaaagctgttactatggaa

SEQ ID NO: 196797 - DNA, 120 bp, Artificial Sequence
  ENSG00000113448_33 (sequence is synthesized)
ttgcaaaaaagagatcaagtgactctttcactatgctggtttcccttgtgacccagatgaagaatcaattcagaattcagttcctcccttggcattgcaagacacagaagaaactgtcac

SEQ ID NO: 196798 - DNA, 120 bp, Artificial Sequence
  ENSG00000113448_34 (sequence is synthesized)
ttcctaacagcctagtactggagtaaattcagtatgaaggaagaaagcgctcctgcgtgttagaaccttgcccatgagctggaccgaggacaggagatggactccaggaaaattggattt

SEQ ID NO: 196799 - DNA, 120 bp, Artificial Sequence
  ENSG00000113448_35 (sequence is synthesized)
cttcaagcagcctcccttggaaatggaatatctttaaaatcttctttgcagaaagacagttagaatgtattaatcagaatagttgaagacttattttcctttttattttttttcaaaatg

SEQ ID NO: 196800 - DNA, 120 bp, Artificial Sequence
  ENSG00000113448_36 (sequence is synthesized)
agagagactgaggcaggcgactgaatgcactaacagcagcaggctcagacctgcttccctggacatttccgggaccgtgagcgagggaaccacgttgccctggattcttgccagctgtac

SEQ ID NO: 196801 - DNA, 120 bp, Artificial Sequence
  ENSG00000113448_37 (sequence is synthesized)
aaagttgaccaggaaaatggctcagcagacaagcccggacactttaacagtacctgaagtggataatccgcattgtccaaacccgtggctgaacgaagaccttgtgaaatccttgcgaga

SEQ ID NO: 196802 - DNA, 120 bp, Artificial Sequence
  ENSG00000113448_38 (sequence is synthesized)
aaacctgttgcagcatgagaagtccaagacagcgaggaaatcggtttctcccaagctctctccagtgatctctccgagaaattcccccaggcttctgcgcagaatgcttctcagcagcaa

SEQ ID NO: 196803 - DNA, 120 bp, Artificial Sequence
  ENSG00000113448_39 (sequence is synthesized)
ccctcagatgtcatttccccattttatattttagatggtgattgttgtctgtggtcttttgagtttttgtggctcattgcttgatttgagtgggagaacaatggggtttctagagtcaaa

SEQ ID NO: 196804 - DNA, 120 bp, Artificial Sequence
  ENSG00000113448_40 (sequence is synthesized)
agtgggagatatataaatacccagtagctaaaatggtcagtcttttttagatgttttcctacttagtatctcctaataacgttttgctgtgtcactagatgttcatttcacaagtgcatg

SEQ ID NO: 196805 - DNA, 120 bp, Artificial Sequence
  ENSG00000113448_41 (sequence is synthesized)
tctttctaataatccacacatttcatgctctaataatccacacatttcatgctcatttttattgtttttacagccagttatagtaagaaaaaggtttttccccttgtgctgctttataat

SEQ ID NO: 196806 - DNA, 120 bp, Artificial Sequence
  ENSG00000113448_42 (sequence is synthesized)
ttagcgtgtgtctgaaccttatccatgtttgctagatgaggtcttgtcaaatatatcactaccattgtcaccggtgaaaagaaacaggtagttaagttagggttaacattcatttcaacc

SEQ ID NO: 196807 - DNA, 120 bp, Artificial Sequence
  ENSG00000113448_43 (sequence is synthesized)
acgaggttgtatatcatgactagcttttactcttggtttacagagaaaagttaaacagccaactaggcagtttttaagaatattaacaatatattaacaaacaccaatacaactaatcct

SEQ ID NO: 196808 - DNA, 120 bp, Artificial Sequence
  ENSG00000113448_44 (sequence is synthesized)
atttggttttaatgatttcaccatgggattaagaactatatcaggaacatccctgagaaacggttttaagtgtagcaactactcttccttaatggacagccacataacgtgtaggaagtc

SEQ ID NO: 196809 - DNA, 120 bp, Artificial Sequence
  ENSG00000113448_45 (sequence is synthesized)
ctttatcacttatcctcgatccataagcatatcttgcagaggggaactacttctttaaacacatggagggaaagaagatgatgccactggcaccagagggttagtactgtgatgcatcct

SEQ ID NO: 196810 - DNA, 120 bp, Artificial Sequence
  ENSG00000113448_46 (sequence is synthesized)
ttatattggtaaaaattctggttaaataaaaaattagagatcactcttggctgatttcagcaccaggaactgtattacagttttagagattaattcctagtgtttacctgattatagcag

SEQ ID NO: 196811 - DNA, 120 bp, Artificial Sequence
  ENSG00000113448_47 (sequence is synthesized)
ttggcatcatggggcatttaattctgactttatccccacgtcagccttaataaagtcttctttaccttctctatgaagactttaaagcccaaataatcatttttcacattgatattcaag

SEQ ID NO: 196812 - DNA, 120 bp, Artificial Sequence
  ENSG00000113448_48 (sequence is synthesized)
aattgagatagatagaagccaaagtgggtatctgacaagtggaaaatcaaacgtttaagaagaattacaactctgaaaagcatttatatgtggaacttctcaaggagcctcctggggact

SEQ ID NO: 196813 - DNA, 120 bp, Artificial Sequence
  ENSG00000113448_49 (sequence is synthesized)
ggaaagtaagtcatcagccaggcaaatgactcatgctgaagagagtccccatttcagtcccctgagatctagctgatgcttagatcctttgaaataaaaattatgtctttataactctga

SEQ ID NO: 196814 - DNA, 120 bp, Artificial Sequence
  ENSG00000113448_50 (sequence is synthesized)
tcttttacataaagcagaagaggaatcaactagttaattgcaaggtttctactctgtttcctctgtaaagatcagatggtaatctttcaaataagaaaaaaataaagacgtatgtttgac

SEQ ID NO: 196815 - DNA, 120 bp, Artificial Sequence
  ENSG00000113448_51 (sequence is synthesized)
caagtagtttcacaagaatatttgggaacttgtttcttttaattttatttgtccctgagtgaagtctagaaagaaaggtaaagagtctagagtttattcctctttccaaaacattctcat

SEQ ID NO: 196816 - DNA, 120 bp, Artificial Sequence
  ENSG00000113448_52 (sequence is synthesized)
tcctctcctccctacacttagtatttcccccacagagtgcctagaatcttaataatgaataaaataaaaagcagcaatatgtcattaacaaatccagacctgaaagggtaaagggtttat

SEQ ID NO: 196817 - DNA, 120 bp, Artificial Sequence
  ENSG00000113448_53 (sequence is synthesized)
aactgcactaataaagagaggctctttttttttcttccagtttgttggtttttaatggtaccgtgttgtaaagatacccactaatggacaatcaaattgcagaaaaggctcaatatccaa

SEQ ID NO: 196818 - DNA, 120 bp, Artificial Sequence
  ENSG00000113448_54 (sequence is synthesized)
gagacagggactaatgcactgtacaatctgcttatccttgcccttctctcttgccaaagtgtgcttcagaaatatatactgctttaaaaaagaataaaagaatatccttttacaagtggc

SEQ ID NO: 196819 - DNA, 120 bp, Artificial Sequence
  ENSG00000113448_55 (sequence is synthesized)
tttacatttcctaaaatgccataagaaaatgcaatatctgggtactgtatggggaaaaaaatgtccaagtttgtgtaaaaccagtgcatttcagcttgcaagttactgaacacaataatg

SEQ ID NO: 196820 - DNA, 120 bp, Artificial Sequence
  ENSG00000113448_56 (sequence is synthesized)
ctgttttaattttgttttatatcagttaaaattcacaataatgtagatagaacaaattacagacaaggaaagaaaaaacttgaatgaaatggattttacagaaagctttatgataatttt

SEQ ID NO: 196821 - DNA, 120 bp, Artificial Sequence
  ENSG00000113448_57 (sequence is synthesized)
tgaatgcattatttattttttgtgccatgcattttttttctcaccaaatgaccttacctgtaatacagtcttgtttgtctgtttacaaccatgtatttattgcaatgtacatactgtaat

SEQ ID NO: 196822 - DNA, 120 bp, Artificial Sequence
  ENSG00000113448_58 (sequence is synthesized)
gttaattgtaaattatctgttcttattaaaacatcatcccatgatgggatggtgttgatatatttggaaactcttggtgagagaatgaatggtgtgtatacatactctgtacatttttct

SEQ ID NO: 196823 - DNA, 120 bp, Artificial Sequence
  ENSG00000113448_59 (sequence is synthesized)
tttctcctgtaatatagtcttgtcaccttagagcttgtttatggaagattcaagaaaactataaaatacttaaagatatataaatttaaaaaaacatagctgcaggtctttggtcccagg

SEQ ID NO: 196824 - DNA, 120 bp, Artificial Sequence
  ENSG00000113448_60 (sequence is synthesized)
gctgtgccttaactttaaccaatattttcttctgttttgctgcatttgaaaggtaacagtggagctagggctgggcattttacatccaggcttttaattgattagaattctgccaatagg

SEQ ID NO: 196825 - DNA, 120 bp, Artificial Sequence
  ENSG00000113448_61 (sequence is synthesized)
tggattttacaaaaccacagacaacctctgaaagattctgagacccttttgagacagaagctcttaagtacttcttgccagggagcagcactgcatgtgtgatggttgtttgccatctgt

SEQ ID NO: 196826 - DNA, 120 bp, Artificial Sequence
  ENSG00000113448_62 (sequence is synthesized)
tgatcaggaactacttcagctacttgcatttgattatttcctttttttttttttttaactcggaaacacaactggggaaatatattctttcccagtgattataaacaatctttttctttt

SEQ ID NO: 196827 - DNA, 120 bp, Artificial Sequence
  ENSG00000113448_63 (sequence is synthesized)
ttttaagtccttttggcttctagagctcataggaaaatggacttgatttgaaattggagccagagtttactcgtgttggttatctattcatcagcttcctgacatgttaagagaatacat

SEQ ID NO: 196828 - DNA, 120 bp, Artificial Sequence
  ENSG00000113448_64 (sequence is synthesized)
taaagagaaaatactgttttttaatcctaaaatttttcttccactaagataaaccaaatgtccttacatatatgtaaacccatctatttaaacgcaaaggtgggttgatgtcagtttaca

SEQ ID NO: 196829 - DNA, 120 bp, Artificial Sequence
  ENSG00000113448_65 (sequence is synthesized)
tagcagaaagcattcactatcctctaagatttgtttctgcaaaactttcattgctttagaattttaaaatttcaccttgtacaatggccagcccctaaagcaggaaacatttataatgga

SEQ ID NO: 196830 - DNA, 120 bp, Artificial Sequence
  ENSG00000113448_66 (sequence is synthesized)
ttatatggaaacatcctcccagtacttgcccagcccttgaatcatgtggcttttcagtgaaaggaaagattctttttctaggaaaaatgagcctattttattttattttattttattttt

SEQ ID NO: 196831 - DNA, 120 bp, Artificial Sequence
  ENSG00000113448_67 (sequence is synthesized)
tgacacaaactgtagattttagcagccctggcccaaaggaatttgattacttttgttttaaacagtacaaaggggacactataattacaaaaacatccttaactgatttgagttgttttt

SEQ ID NO: 196832 - DNA, 120 bp, Artificial Sequence
  ENSG00000113448_68 (sequence is synthesized)
atttctttggatatattttcagagtggtaaattgtgtgtgagaattacaaatgattattcttttagtggtttcttagcctctcttacagcccacggggatagtactgtacatcaatacct

SEQ ID NO: 196833 - DNA, 120 bp, Artificial Sequence
  ENSG00000113448_69 (sequence is synthesized)
tcatatgaaatttttatatgcaatgaaaataaaagcatgggttgattctgcctatttatgactcaatcttttacaaataaaagattattcattttaaattatagttcaatcagcatgtct

SEQ ID NO: 196834 - DNA, 120 bp, Artificial Sequence
  ENSG00000113448_70 (sequence is synthesized)
cttaggatactgaacgtggttgaaatgaaaggatagtgacatcataagttagtactgatattcataaccaaataaagccaacttgagtaattttgctacattaaaaattaccaaaattac

SEQ ID NO: 196835 - DNA, 120 bp, Artificial Sequence
  ENSG00000113448_71 (sequence is synthesized)
ttagatggcctataagattaagcatggtgttttctaagcaagctttgaaaggggccttccatacttacttaattgaatattctgggatattgaaaattattcagatacttgacaattatt

SEQ ID NO: 196836 - DNA, 120 bp, Artificial Sequence
  ENSG00000113448_72 (sequence is synthesized)
tttggttacctactccgcaaactacaaagttttaaggactcaacaataagttaatgagacacagtgtttgctttcatggagcttacagtctggaggggacaaaggcttaaacaatactca

SEQ ID NO: 196837 - DNA, 120 bp, Artificial Sequence
  ENSG00000113448_73 (sequence is synthesized)
tataattatatatgtgatcagtacaatgaaggagctcagtggggtaaataagcaggaacctgaacttgatctgttccggagggccacagaaggcttccttgaggccttgagaaagtgatt

SEQ ID NO: 196838 - DNA, 120 bp, Artificial Sequence
  ENSG00000113448_74 (sequence is synthesized)
tgcatctgagttctgaaggattgtaagaggtaactagggaaaaagttgacaggaagaggaaggggatccagacaagaaacatttgcaaagatcttgaggcataaatgagcttgagacatc

SEQ ID NO: 196839 - DNA, 120 bp, Artificial Sequence
  ENSG00000113448_75 (sequence is synthesized)
tggagaaactgaggaaaagtgagagagtaggcagggcctggagccgcagagccattgctaaccatcctgtgtgagatatcccccattctgtagctttattctcataaccctgctcaattt

SEQ ID NO: 196840 - DNA, 120 bp, Artificial Sequence
  ENSG00000113448_76 (sequence is synthesized)
tctttataacacttctcacagatttatatacgtgtttgtttttgttatctgtctctcccaccagaccacagctccatgagagcaaggtctttgcttaccaatatatcactagcacttaaa

SEQ ID NO: 196841 - DNA, 120 bp, Artificial Sequence
  ENSG00000113448_77 (sequence is synthesized)
actatgcctggtacacagtaggttcttaatatgtgttgaatatagccatcaaattgatattggatataattcaatctgataagatattttgagatattaaagagtttttaacttgatacc

SEQ ID NO: 196842 - DNA, 120 bp, Artificial Sequence
  ENSG00000113448_78 (sequence is synthesized)
acagtattttccatgcaccttatatatggcatgcatacgctctggaggtaaaatgtgactactggttcaagaaatttacaaaaccctcccttgctgtttctctttactggaaactgttga

SEQ ID NO: 196843 - DNA, 120 bp, Artificial Sequence
  ENSG00000113448_79 (sequence is synthesized)
gggtactggaaataaaggagaaggccaatgtatctaagaccagtggatcagagaggagcccaagaaccttcatcatttccacagaaagggcagcagaggaaattaacctggccttttgtc

SEQ ID NO: 196844 - DNA, 120 bp, Artificial Sequence
  ENSG00000113448_80 (sequence is synthesized)
atgctattatttctcaagatccagatggtacctgtcattaatgtatccctgagaactcagttcctctgaaggcacaaaaataatttgaccatctcatcatttgatccacacacatttatt

SEQ ID NO: 196845 - DNA, 120 bp, Artificial Sequence
  ENSG00000113448_81 (sequence is synthesized)
gaaaacaaggtagtacatttagcctccgagaaacacgcgtttacttttgaagcaaagaagcaccgggcaaccagtgagcagcatatgtctgaaatctattatctgacatgttctttccag

SEQ ID NO: 196846 - DNA, 120 bp, Artificial Sequence
  ENSG00000113448_82 (sequence is synthesized)
ccttcccaggaatgctggtctgactactcagatttgcttttacttcttgccttttggatataatgagtttgccaagcagctgtgagtacctgactctggggaaggtggctagattccgaa

SEQ ID NO: 196847 - DNA, 120 bp, Artificial Sequence
  ENSG00000113448_83 (sequence is synthesized)
cggtgaaactagtacagctgcctgctctttacctgtagggggagacacatgatgcagtgacaagcatagaacagcacagaagtggttttagtccagaaaataaataaataagtaaattgg

SEQ ID NO: 196848 - DNA, 120 bp, Artificial Sequence
  ENSG00000113448_84 (sequence is synthesized)
tcactactgttaccctagcatgactgcttcagcgaagagataagagcttctttgactttttccactggaatttttcatgccagaagaaattgaacatgtgagcctggtgtctggaagagt

SEQ ID NO: 196849 - DNA, 120 bp, Artificial Sequence
  ENSG00000113448_85 (sequence is synthesized)
agcctggatttatggtatcagatgcacatttttaacaccttcagttttctctttaaaatatctcttcaatcccttacttttctctatttgtttcaacattaaaatatgttatttttcttc

SEQ ID NO: 196850 - DNA, 120 bp, Artificial Sequence
  ENSG00000113448_86 (sequence is synthesized)
tgaaaatgtattggtgaatgctaataaacatttgccaaagggcagttgtacttggaaaattaatattggccatatgtgacttgatagaagacattttaacaaatgagaactaatggacaa

SEQ ID NO: 196851 - DNA, 120 bp, Artificial Sequence
  ENSG00000113448_87 (sequence is synthesized)
gtggtggccgcgcacccggccgcggctgattcattcacttcaagtgccgtgcagaaggctcggcaggcggggcgggcgtggggccgcggctccgggttggggaccgaggagatccggctg

SEQ ID NO: 196852 - DNA, 120 bp, Artificial Sequence
  ENSG00000113448_88 (sequence is synthesized)
tggaccagacgctcctctgcggggcgggcacccaagcgcgctcgccaccccctcgccatccgctagagccgggctcctggactgggactcgggcccgccgcacagttgaaaagtcgcata

SEQ ID NO: 196853 - DNA, 120 bp, Artificial Sequence
  ENSG00000113448_89 (sequence is synthesized)
gtggtttttccgctcgcgtcgctgtgtgaaagttggctcgccgctctttgcacgccctccctggaggccgacccgagacgccaagctggagagaccgtgcctccccgaggccggccgccc

SEQ ID NO: 196854 - DNA, 120 bp, Artificial Sequence
  ENSG00000113448_90 (sequence is synthesized)
gcagaagcggcggcggcggcagcagcagcagcagcatcaggaaggcgctcgggccagcgcggtgaacccgggctgggcagcaggtcgcggagccgcgagccaggatggaggcagagggca

SEQ ID NO: 196855 - DNA, 120 bp, Artificial Sequence
  ENSG00000113448_91 (sequence is synthesized)
gcagcgcgccggcccgggcgggcagcggagagggcagcgacagcgccggcggggccacgctcaaagcccccaagcatctctggaggcacgagcagcaccaccagtacccgctccggcagc

SEQ ID NO: 196856 - DNA, 120 bp, Artificial Sequence
  ENSG00000113448_92 (sequence is synthesized)
accaccagtacccgctccggcagccccagttccgcctcctgcatccccatcaccacctgcccccgccgccgccaccctcgccccagccccagccccagtgtccgctacagccgccgccgc

SEQ ID NO: 196857 - DNA, 120 bp, Artificial Sequence
  ENSG00000113448_93 (sequence is synthesized)
cgccgcccggggctgcccgcggccgctacgcctcgagcggggccaccggccgcgtccggcatcgcggctactcggacaccgagcgctacctgtactgtcgcgccatggaccgcacctcct

SEQ ID NO: 196858 - DNA, 120 bp, Artificial Sequence
  ENSG00000113448_94 (sequence is synthesized)
ggtcacacagagagtacgtgtcaaaggaaactcaaaagaacacattttctcagtgattacaggttttagagaagaggaacaatgcttcctctgagcctgaagaaaagaatgaaataaggg

SEQ ID NO: 196859 - DNA, 120 bp, Artificial Sequence
  ENSG00000113448_95 (sequence is synthesized)
agttccttatttggtagcttttgacaggactagcctttcttgcaactaagcatcttgacatacattattcattaagccctggagctcgggagagaaagatgcagacccttagatctttag

SEQ ID NO: 196860 - DNA, 120 bp, Artificial Sequence
  ENSG00000113448_96 (sequence is synthesized)
atattcctttatcacgtggattttctttattcagaatagttgctgaattttgtgccattctggagtcttacaaatggcatgtattcgatgggaagacggctggatgggatttaatgcgag

SEQ ID NO: 196861 - DNA, 120 bp, Artificial Sequence
  ENSG00000113448_97 (sequence is synthesized)
gctttcttatgtatacttaattaccaaaaatctttaaaaactcatactctgcgtggcttgtggaggttgttaaagtgtcgagattttgaagctaaatacattttagagcttactatatat

SEQ ID NO: 196862 - DNA, 120 bp, Artificial Sequence
  ENSG00000113448_98 (sequence is synthesized)
gtggtctagctgtgtcccagagagcaacttcccttttcaaggcagcccactctgtgtgatgctttttcctaggtatgggcaacccatccctcctagggtgaaaacttcgctgttgctagt

SEQ ID NO: 196863 - DNA, 120 bp, Artificial Sequence
  ENSG00000113448_99 (sequence is synthesized)
gtgatttgctttctcggagcaaaagtcctgcttactgcgacctgatttttctcttgtggcccttaaaactatgaatatcaacagtcatccaattcttcaccttcatcttcctccctcagt

SEQ ID NO: 196864 - DNA, 120 bp, Artificial Sequence
  ENSG00000113448_100 (sequence is synthesized)
tgctgcctctgaggaaacactacattccagtaatgaagaggaagaccctttccgcggaatggaaccctatcttgtccggagactttcatgtcgcaatattcagcttccccctctcgcctt

SEQ ID NO: 196865 - DNA, 120 bp, Artificial Sequence
  ENSG00000113448_101 (sequence is synthesized)
ctggcagatgatttggctgaccttgaaaactacagctgtttagtcactttgaaaacaatgcaatacaagtgatttactaggcttcagttttaaccattttatgctgactggtggaaattc

SEQ ID NO: 196866 - DNA, 120 bp, Artificial Sequence
  ENSG00000113448_102 (sequence is synthesized)
taacccttcagaaagaaaaaaaaattgtgaagcaatggaaatgtaccatcctgggtattaatgtcattaattttcaatacattttctcacaaaaagtataaagaagtctttgcttgacct

SEQ ID NO: 196867 - DNA, 120 bp, Artificial Sequence
  ENSG00000113448_103 (sequence is synthesized)
gttcaactgtatcactctcctccaatgtagaaagaatatgaataaaattatacaagctagaaatgaatggtagatttaacctgagtgcactgtcactcttgattaacacacacacacaca

SEQ ID NO: 196868 - DNA, 120 bp, Artificial Sequence
  ENSG00000113448_104 (sequence is synthesized)
cacacacacacacacacacacgcatgtatttattttcccagaaaatactttataggaaaactgagaattaaatttttaatggaaactaacacttaaatcattagcttatatttatgtaga

SEQ ID NO: 196869 - DNA, 120 bp, Artificial Sequence
  ENSG00000113448_105 (sequence is synthesized)
aaagagaggctttctgtgtcctgggaatgttctgctaagaagacagtgatgataatagttaccactgaataagtactgacatgtgaggaactaccaggatccctgctttacaggaagaag

SEQ ID NO: 196870 - DNA, 120 bp, Artificial Sequence
  ENSG00000113448_106 (sequence is synthesized)
ctcactctggaggcagctagctgtcaactcacaaagacactcaagcagcctatggaagaaggccacatggtaaaatatggaggcctccagccaacagtcagcaaggaactgagacaagtc

SEQ ID NO: 196871 - DNA, 120 bp, Artificial Sequence
  ENSG00000113448_107 (sequence is synthesized)
taggaaatgttcactgatgcaaaatgaatttggaatcaagaataaattgtattgtaattagaatcaaaagaaatatgcaatggtattcatgagtctaaaaattttgcctttgacattttg

SEQ ID NO: 196872 - DNA, 120 bp, Artificial Sequence
  ENSG00000113448_108 (sequence is synthesized)
aggtattgcttaccagaatactatttcagctcccagtataaggtgattttatttagcattagtacttatagaggagtcagccacagccacgtctccatcatgtaacatttttatttccta

SEQ ID NO: 196873 - DNA, 120 bp, Artificial Sequence
  ENSG00000113448_109 (sequence is synthesized)
atggagttttacactttaaagcaatgtcaccagtttaaaaattgtgaaagaaagtaaggatattgggcacatcaattatttgttcttgtgaccagctgcatttttaagaagcctggatag

SEQ ID NO: 196874 - DNA, 120 bp, Artificial Sequence
  ENSG00000113448_110 (sequence is synthesized)
aaaggaaagaggatgaagccagtgggccatacatagatagactcttgaacatttgctaaaactacaagaacaaaacaattactatgctacaaatgtgatggtcccacattctctgccaag

SEQ ID NO: 196875 - DNA, 120 bp, Artificial Sequence
  ENSG00000113448_111 (sequence is synthesized)
ttaaaggcatctctggggaaaatgtcttttggatcttgttaaagttaggaaggttgtgctcagaggaaatttggctagtaactcaactcaaagatactgaatttagctgttttacttgtt

SEQ ID NO: 196876 - DNA, 120 bp, Artificial Sequence
  ENSG00000113448_112 (sequence is synthesized)
attgaccagtctaagggacctgtgttagaaaaaggtatgaggaaaatactactagataaataataagaaaacaaatattcaccttgaagcaatgaaaagaggaaatatattttgtttctg

SEQ ID NO: 196877 - DNA, 120 bp, Artificial Sequence
  ENSG00000113448_113 (sequence is synthesized)
ttgttgtaattgaactatgtgtttaaagaagaatgcacacacattgatcagactcatactaaagcagatgggaattttatatgacagcttgacctgaacattttttgaaaaatgctgttc

SEQ ID NO: 196878 - DNA, 120 bp, Artificial Sequence
  ENSG00000113448_114 (sequence is synthesized)
ccctgaaactatttctcctttctttggaaataacattgctgccgttcattctgtgtagaagagattcacagatatcaggtgtatccagggatcccaagatcaccctcgggttcaatgatt

SEQ ID NO: 196879 - DNA, 120 bp, Artificial Sequence
  ENSG00000113448_115 (sequence is synthesized)
tgctagcagagctctcataattcagcaaatagtcatattcatggctctgatgtgttatagcaaaaggattcaatgcaaaataagcaaagggaaaggtagatggaacaaaatctggaggaa

SEQ ID NO: 196880 - DNA, 120 bp, Artificial Sequence
  ENSG00000113448_116 (sequence is synthesized)
accaaacataagcttccaagagtccccaagtgaagtaagacaagatacacttaattcctccagtaatgagttgagacaacacttgtgaaatgtgttcaccagggatgcctttaccaggga

SEQ ID NO: 196881 - DNA, 120 bp, Artificial Sequence
  ENSG00000113448_117 (sequence is synthesized)
agcctattaaagactcagtacctagagtttttactggaggccagtcacttaggtaccctctgcctaggatatacaaacttccagatttccagaaggaaagtggatatgcagcataaacca

SEQ ID NO: 196882 - DNA, 120 bp, Artificial Sequence
  ENSG00000113448_118 (sequence is synthesized)
cattatttgcacagacagtttaggcaaattgagccagtcttaccatttagagaatggtggatcactcctgaaagtcaggtctgctaaaggccaatgtttcaaacaggtcttcctatattt

SEQ ID NO: 196883 - DNA, 120 bp, Artificial Sequence
  ENSG00000113448_119 (sequence is synthesized)
aattgacacagtcctgattaactgtttactacacaccaggttatcttagaatagttatcttactttcttcacacttgtggaagaagagattataattaaaattaaaatgcactaatttaa

SEQ ID NO: 196884 - DNA, 120 bp, Artificial Sequence
  ENSG00000113448_120 (sequence is synthesized)
agccctgatatattcaattagctttggtatctcaaaaattttggttgctaaccatgatttctcattttgagttggtgttatatcatgtgcccttaaaataaaatgatgcaatatacctaa

SEQ ID NO: 196885 - DNA, 120 bp, Artificial Sequence
  ENSG00000113456_0 (sequence is synthesized)
catgagctaccatgcccggccatactgttcttgcctgtaaaataacccactgcttaaaaataaataaataacctggcatttagaaataggctctgactccaacttaaaaagtgctttgaa

SEQ ID NO: 196886 - DNA, 120 bp, Artificial Sequence
  ENSG00000113456_1 (sequence is synthesized)
taaaaacagttaaaaaaaaaaaaaaaaaggcccaaaaagcaacatgtggcagtccttagcacttaggacaaaccatcccacctatctcaggaccttcagaagcattacagtgaaggcatt

SEQ ID NO: 196887 - DNA, 120 bp, Artificial Sequence
  ENSG00000113456_2 (sequence is synthesized)
cagaagcattacagtgaaggcattcctggaccttcaagaaatgtttcaataatattaggacacctgttttaaaaagtaaagaatctacctaatgaaatctaaagaatttcttacgaaatg

SEQ ID NO: 196888 - DNA, 120 bp, Artificial Sequence
  ENSG00000113456_3 (sequence is synthesized)
ttaactggaaaaattgtggcacttgaaaggataaaaggcattgtgtttttttcgtgagaacactgaacaaatgaagaatatataaaataagtgaaaacataaaaatagggtctcacactg

SEQ ID NO: 196889 - DNA, 120 bp, Artificial Sequence
  ENSG00000113456_4 (sequence is synthesized)
aagtgaaaacataaaaatagggtctcacactgttgcccaggctgaagtgctcacggctcactgcagtttcaagttcctgggctcaaagatgggagtctccctatgttgcccaggctggtc

SEQ ID NO: 196890 - DNA, 120 bp, Artificial Sequence
  ENSG00000113456_5 (sequence is synthesized)
caaagcgctgggattataggtctgtgccgcctccttccggtctcggtggcgcggcacgcgcggctctctaggcctccttcagctctgtggtgacggtggccgaggtggagggccggtctg

SEQ ID NO: 196891 - DNA, 120 bp, Artificial Sequence
  ENSG00000113456_6 (sequence is synthesized)
aagagtggcgggactggcttcacttcctccgcggttcctcggagccgcctcgctcctcttcagggactttgctgagaagggctctcgggcgtccagaccccaccgcaaaggtgtttggcg

SEQ ID NO: 196892 - DNA, 120 bp, Artificial Sequence
  ENSG00000113456_7 (sequence is synthesized)
atccgccgagaagttgttggccccaggagcatccctcggggccgaatgcgcagtggacgatgccccttctgacccaacagatccaagacgaggatgatcagtacagccttgtggccagcc

SEQ ID NO: 196893 - DNA, 120 bp, Artificial Sequence
  ENSG00000113456_8 (sequence is synthesized)
ttgacaacgttaggaatctctccactatcttgaaagctattcatttccgagaacatgccacgtgtttcgcaactaaaaatggtatcaaagtaacagtggaaaatgcaaagtgtgtgcaag

SEQ ID NO: 196894 - DNA, 120 bp, Artificial Sequence
  ENSG00000113456_9 (sequence is synthesized)
ttttcgaattaatttaactgtccttttagactgtttatctatttttggatcaagtcctatgccagggactttaactgcacttcgaatgtgttaccaaggttatggttaccctttgatgct

SEQ ID NO: 196895 - DNA, 120 bp, Artificial Sequence
  ENSG00000113456_10 (sequence is synthesized)
gttcctggaagaaggaggagtggtgacagtctgcaaaatcaatacacaggaacctgaggagaccctggactttgatttctgcagcaccaatgttattaataaaattattctgcagtcaga

SEQ ID NO: 196896 - DNA, 120 bp, Artificial Sequence
  ENSG00000113456_11 (sequence is synthesized)
ggggctccgtgaagcattttctgaattggatatgacgagtgaagtcctacaaattaccatgtctcctgacaagccttatttcaggttatctacttttggaaatgcaggaagttcccacct

SEQ ID NO: 196897 - DNA, 120 bp, Artificial Sequence
  ENSG00000113456_12 (sequence is synthesized)
tgactatcccaaagattctgatttgatggaagcatttcattgtaatcagacccaagtcaacagatacaagatttccttactgaaaccctctacaaaggcattagtcctatcttgtaaggt

SEQ ID NO: 196898 - DNA, 120 bp, Artificial Sequence
  ENSG00000113456_13 (sequence is synthesized)
atctattcggacagataacagaggcttcctttcattacagtatatgattagaaatgaagatggacaaatatgttttgtggaatattactgctgccctgatgaagaagttcctgaatctga

SEQ ID NO: 196899 - DNA, 120 bp, Artificial Sequence
  ENSG00000113456_14 (sequence is synthesized)
gtcttgagtatgacaattcactgatatttatgtgtacatttatgatagatgaagttcttattctgagtacagtactctttgtcatttcatattggattttctatagagaagaagcacaat

SEQ ID NO: 196900 - DNA, 120 bp, Artificial Sequence
  ENSG00000113456_15 (sequence is synthesized)
ggggaagataggagcaaggtcatgtaccctaatagttactatgttttgtaaatccattttgtagagggcatgtaaataaatgttttcctgtagtcatagattattcaggactgtccttta

SEQ ID NO: 196901 - DNA, 120 bp, Artificial Sequence
  ENSG00000113456_16 (sequence is synthesized)
gactgtcctttagttctgtcttttgaactcatgggaataattgtgagtcagcgtaacatttcaagagtctaaaggtggccgggtgtggtggctttaatcccagcactttgggaagccgag

SEQ ID NO: 196902 - DNA, 120 bp, Artificial Sequence
  ENSG00000113456_17 (sequence is synthesized)
ctctgcctcaaaaaaaaaaaaaaaaaaagtctaaaggcttaaagtttgatgcagctacctgaaatgatcttttatttatttattattagaaaaagcaaaggcatatgggcattgcttatt

SEQ ID NO: 196903 - DNA, 120 bp, Artificial Sequence
  ENSG00000113456_18 (sequence is synthesized)
gcattgcttattagtttgaattctagagactagatcttaaagtagtggttctcaaagtgttgtgcccgcaccaacatcagaatggcctgcaaacttgtagcaaactctggggaggaggcc

SEQ ID NO: 196904 - DNA, 120 bp, Artificial Sequence
  ENSG00000113456_19 (sequence is synthesized)
agcattctgtattttaacaagcttccctcaggagattctgatgcctgctaaattttgggaaccactgttttaaaggaaactttttttttctttaatagcatttaattgtatgagatgatt

SEQ ID NO: 196905 - DNA, 120 bp, Artificial Sequence
  ENSG00000113456_20 (sequence is synthesized)
gcttttacatgtgatttccttgcaaatgttctgaagttgaggcatcaccaaacaagtctgaacaattctttatgtgatttatttttaaagtagaccttttgaagagatctatgaatggga

SEQ ID NO: 196906 - DNA, 120 bp, Artificial Sequence
  ENSG00000113456_21 (sequence is synthesized)
tataaagcaattttcagtgttacaggttttcttcttcttctcaaaactgtttgctgtaagtaactgcaatcagtacttactactttccatttgcttatgagtttcttgacaaatcaaggt

SEQ ID NO: 196907 - DNA, 120 bp, Artificial Sequence
  ENSG00000113456_22 (sequence is synthesized)
aatatatttaataaaatgcaaaaattatcttcctgtctagtagaaaaaattacatgagtaaagtgaagcttctgtctttgttactgtaccaggtgacaacagctgagtgtccctccatgg

SEQ ID NO: 196908 - DNA, 120 bp, Artificial Sequence
  ENSG00000113456_23 (sequence is synthesized)
acagtcactattggccttttgagtgagacagttctttaggataaaaacctgtcatcccattgcaggattcatttagcctttctggcccttacccactgatgctagtcattgtgaccaccc

SEQ ID NO: 196909 - DNA, 120 bp, Artificial Sequence
  ENSG00000113456_24 (sequence is synthesized)
cacctcccccaaataaaagtgtgccaaactattcattgttgagaaccattcaattgtattcaccaaaattggaggatatattggaatgccctaccttaatataggtcacatagcattaga

SEQ ID NO: 196910 - DNA, 120 bp, Artificial Sequence
  ENSG00000113456_25 (sequence is synthesized)
gaaaattggtttggagagtattacagcaaagtgtgctgcaaggaggctactccagcacaatggcaggcactgcttcccaggcatatggacaattctgggaggtggccagggtcagcacct

SEQ ID NO: 196911 - DNA, 120 bp, Artificial Sequence
  ENSG00000113456_26 (sequence is synthesized)
gataactagtaagtgtctcaatctcagcatacaaaatttagcagtgactacaaaagaagttggaattttctaaaatgtttgtattcaagaaggaaacaaatgaatttactaaatgttgtc

SEQ ID NO: 196912 - DNA, 120 bp, Artificial Sequence
  ENSG00000113456_27 (sequence is synthesized)
agagtattttttgtttagataaccaccaagaacagaacaaacctaaaagatacttgggaaaatatctaatcagtcaacattctaaggactgttaaatgtgaaatagcatagttatttttt

SEQ ID NO: 196913 - DNA, 120 bp, Artificial Sequence
  ENSG00000113456_28 (sequence is synthesized)
gtcttttgttactagtgtgaacaaagaacggcgcctaacatataatgggcatttagtaactctgttagatgaaagactctccaatttcagattttcttttagcatcttattagtcactac

SEQ ID NO: 196914 - DNA, 120 bp, Artificial Sequence
  ENSG00000113456_29 (sequence is synthesized)
ttttagcatcttattagtcactacttaattctgatgatttagctctaaatttattttgatctcagtttttttatttttatttttggagacaagatcttgctctgttgcccaggctggagt

SEQ ID NO: 196915 - DNA, 120 bp, Artificial Sequence
  ENSG00000113456_30 (sequence is synthesized)
aggattacagttcactccagcctcaatctcctaggctcaagcaatcctcccatctcagcttcccaaatagctacgactacaggtgcatgcctccatgccctgctaatttttgtatttttt

SEQ ID NO: 196916 - DNA, 65 bp, Artificial Sequence
  ENSG00000113456_31 (sequence is synthesized)
cctgagtatcatgcctggcctaatgtattttttaaaagttgaatctaaaaagaatttaaaacaaa

SEQ ID NO: 196917 - DNA, 120 bp, Artificial Sequence
  ENSG00000113456_32 (sequence is synthesized)
ttttaaaagttgaatctaaaaagaatttaaaacaaatataaatcagctcagtaaggatggatatttttgtacatttaaaactattattttaggccgggagtggtggctcacacctgtaat

SEQ ID NO: 196918 - DNA, 120 bp, Artificial Sequence
  ENSG00000113456_33 (sequence is synthesized)
ccgtctcaaaaacaaaaaaaattaaaataaaaattattgttttagctgcatgtcttcagctatttagaattcaaagactaatgaattgtttctaagtcaccctaacatcaaggtacttat

SEQ ID NO: 196919 - DNA, 120 bp, Artificial Sequence
  ENSG00000113456_34 (sequence is synthesized)
tttataaagaatttcctccttatttgtgttctaattgacccaggaatttttactttaataaaagtttaactttatttcctatggaaaatcactagggggagtgctccctcaggcagagca

SEQ ID NO: 196920 - DNA, 120 bp, Artificial Sequence
  ENSG00000113456_35 (sequence is synthesized)
ggcgacactttggtgccactacaaattgatgtgtagtatatagaagaatacagtcttatatttaaagacttttagttctgtctttttgaagtttatctctctttctagtaaaatggtgct

SEQ ID NO: 196921 - DNA, 120 bp, Artificial Sequence
  ENSG00000113456_36 (sequence is synthesized)
tactgtgaatggataatcttttttttcatttttcatttgttgatttcccattcgatgatgtagtgcttccaccgagaattgatgaaatgcttcaaaataataaaagtatttgttaaattc

SEQ ID NO: 196922 - DNA, 120 bp, Artificial Sequence
  ENSG00000113456_37 (sequence is synthesized)
cactttaataaaaataaggcatgtaacacagtcattttaacaggaagccacagggtttctgtggtgttaccaaagtcctagtaaaaattaattaaaattgctaaaagggcagaatgtggc

SEQ ID NO: 196923 - DNA, 120 bp, Artificial Sequence
  ENSG00000113456_38 (sequence is synthesized)
actctcaacagtggggtaggcagtccttcagaacatagagacttccttctttccttccctgtcttcacattgcttgtcccttatccccacctgaaataaaatctattgggtcctgagaaa

SEQ ID NO: 196924 - DNA, 120 bp, Artificial Sequence
  ENSG00000113456_39 (sequence is synthesized)
tggctcacacctgtatttccagctgctcaggagaccgaggctgaagcacgaagatcgcttgagctcaggcattaaagaccagcctgggctggaatatttcaggagtttaaagttcaggaa

SEQ ID NO: 196925 - DNA, 120 bp, Artificial Sequence
  ENSG00000113456_40 (sequence is synthesized)
agagcttgccatcacaccacacggggtcatttacttatcacctactccgcgctagagtactatgctaagtgcggaggacgcaaaaattaatgtcaaagataatccttgttcacagtattc

SEQ ID NO: 196926 - DNA, 120 bp, Artificial Sequence
  ENSG00000113456_41 (sequence is synthesized)
tgtctagcttaagaagagttcttagttgaatgaaagctaattctaacaacttgtgtgcacttcttttgaataaaaaccatcaacttatttgaattcttaagtttcctcctaaactccaac

SEQ ID NO: 196927 - DNA, 120 bp, Artificial Sequence
  ENSG00000113456_42 (sequence is synthesized)
atttcaggaggaagaggtcacattctagtcatctttgcaatctcaaacccaaaggaagcctaacttggtacagtgcatggcacattcaatgtctgttgaatacaagtaaagctcatacta

SEQ ID NO: 196928 - DNA, 120 bp, Artificial Sequence
  ENSG00000113456_43 (sequence is synthesized)
cctagtctatttttcagtatctcttgagttaatgacctggttaacaagtcagagtcacagtcccaagggcaacaactttttaaaggctcccctaacgtacttcaggatccctgactgaga

SEQ ID NO: 196929 - DNA, 120 bp, Artificial Sequence
  ENSG00000113456_44 (sequence is synthesized)
gtggctgactatggcagtatatgggcatactaatcactggagaaataatagcgagaaataaccaaggaaaagcactactctccaaaaacattaaaaaaaaaaaacaactgaacaactagt

SEQ ID NO: 196930 - DNA, 120 bp, Artificial Sequence
  ENSG00000113456_45 (sequence is synthesized)
aagaaagaacgctggatctgagcaccctgtaagtcgcttccccgtgggccgggtaaaggttttaaaacccgccgcctccaggaagacggccacgtgcacaaggattagctgcaaactccg

SEQ ID NO: 196931 - DNA, 120 bp, Artificial Sequence
  ENSG00000113456_46 (sequence is synthesized)
gccgcaggtgtagcccggggacatcccctcctaccttgcaaacggggcctgggatccggtccctctcttcttcctccacctcctctgctgtggcgtgccgcttagctggcggctccgcat

SEQ ID NO: 196932 - DNA, 120 bp, Artificial Sequence
  ENSG00000113456_47 (sequence is synthesized)
ctatttcgtttctttttggcttcttcgcctgaactgcaaagcctccacgccgtttcctcttggttgccgccatcttgcctcgccgcccgcgctcttggcctcctttccggcgctgccgct

SEQ ID NO: 196933 - DNA, 120 bp, Artificial Sequence
  ENSG00000113456_48 (sequence is synthesized)
aataacttgtcaatagtcataataaataacttaataaataaataatagtcttaagttagagaacaaaacgtcattacttgaattttttttctctcccggtaacaaattcttttcccatct

SEQ ID NO: 196934 - DNA, 120 bp, Artificial Sequence
  ENSG00000113460_0 (sequence is synthesized)
aggccaagagcgcgggcggcgaggcaagatggcggcaaccaagaggaaacggcgtggaggctttgcagttcaggcgaagaagccaaaaagaaacgaaatagatgcggagccgccagctaa

SEQ ID NO: 196935 - DNA, 120 bp, Artificial Sequence
  ENSG00000113460_1 (sequence is synthesized)
gcggcacgccacagcagaggaggtggaggaagaagagagggaccggatcccaggccccgtttgcaagggaaagtggaaaaataaggaacggattctcatcttttcttccagaggaataaa

SEQ ID NO: 196936 - DNA, 120 bp, Artificial Sequence
  ENSG00000113460_2 (sequence is synthesized)
ttttagaacaagacatttaatgcaggacttgagaatgttgatgcctcattctaaagcagatactaaaatggatcgtaaggataagctatttgtgattaacgaggtttgtgaaatgaagaa

SEQ ID NO: 196937 - DNA, 120 bp, Artificial Sequence
  ENSG00000113460_3 (sequence is synthesized)
ctgtaataaatgcatctattttgaagctaagaaaaaacaggatctctatatgtggctttcaaattcacctcacggaccatctgctaaattccttgttcaaaatattcataccctcgctga

SEQ ID NO: 196938 - DNA, 120 bp, Artificial Sequence
  ENSG00000113460_4 (sequence is synthesized)
actgaagatgactggaaactgtttgaaaggttctcggccccttttgtcttttgaccctgcttttgatgaattaccacattatgctttgttaaaagaactcttaattcagatctttagtac

SEQ ID NO: 196939 - DNA, 120 bp, Artificial Sequence
  ENSG00000113460_5 (sequence is synthesized)
accacggtatcatcccaaaagccaaccatttgtggaccacgtgtttactttcaccattttggataataggatatggtttcggaactttcagatcatagaagaagatgctgctcttgtaga

SEQ ID NO: 196940 - DNA, 120 bp, Artificial Sequence
  ENSG00000113460_6 (sequence is synthesized)
aagattttccagggaagttttggaggaccaactttatatgaaaatcctcactaccagtcaccaaacatgcatcggcgtgtcataagatccatcacagctgcaaaatacagagagaaacag

SEQ ID NO: 196941 - DNA, 120 bp, Artificial Sequence
  ENSG00000113460_7 (sequence is synthesized)
caagtgaaagatgtgcaaaaactgagaaagaaagagccgaagactcttcttccacatgatcccactgcagatgtttttgtaacaccagctgaggagaaaccaatagaaatacagtgggta

SEQ ID NO: 196942 - DNA, 120 bp, Artificial Sequence
  ENSG00000113460_8 (sequence is synthesized)
aaaccagagccaaaagttgatttgaaagcaagaaagaaacggatttacaaaaggcaaagaaaaatgaaacagaggatggacagtgggaaaacaaaataagtcaatggaaacctgatttgt

SEQ ID NO: 196943 - DNA, 120 bp, Artificial Sequence
  ENSG00000113460_9 (sequence is synthesized)
tggaaacctgatttgtttttcagttactttatatttattttgtattcaatgtgtaaatacttttattatctaatactatcttacgtctaattagtgtagcatttacaagaaagaaaaatt

SEQ ID NO: 196944 - DNA, 120 bp, Artificial Sequence
  ENSG00000113460_10 (sequence is synthesized)
tgattatctttttctaaataaaatatcaccagaattcatcagttaatttctgatttctttttgaagtttgtgttgctaaaaatgtagcacacttaatgtagcctgttctcttgggttgga

SEQ ID NO: 196945 - DNA, 120 bp, Artificial Sequence
  ENSG00000113460_11 (sequence is synthesized)
atttttggtttagcaaagctgaaattcagacatttattaggtcatattatttgtaaaagcattcaacacttcaagagcatcggttgtggatggtaaagtaggagtagactggtagaaagg

SEQ ID NO: 196946 - DNA, 120 bp, Artificial Sequence
  ENSG00000113460_12 (sequence is synthesized)
aaggcatctcactgaagtttactcagtcatcagttaatgaagccatggaagaaccaacccctgatctgtcacttcaaaaaagagtatattaaaatgttgaggttttgagaatcaaatgca

SEQ ID NO: 196947 - DNA, 120 bp, Artificial Sequence
  ENSG00000113460_13 (sequence is synthesized)
cttttgaccctgtaagtttctcattcagtgtatgaggtctaattttcttatctggcatggttgtttttagtagatatagttgtgttattcaatttagtttcacccccaccttggttttat

SEQ ID NO: 196948 - DNA, 120 bp, Artificial Sequence
  ENSG00000113460_14 (sequence is synthesized)
ggattatcaattctttcaggtacatttataatgaggttatagccaagttatagaaacaaatgagcaaacagttttaaacaaggcagtctactgttaaataatatgcttaccttattttta

SEQ ID NO: 196949 - DNA, 120 bp, Artificial Sequence
  ENSG00000113460_15 (sequence is synthesized)
taggcttttgatgaattaccacattatgctttgttaaaagaactcttaattcaggtaaatatctttaaaattagctatccaaaatatacatgatatatcttggaataaggaactaacata

SEQ ID NO: 196950 - DNA, 120 bp, Artificial Sequence
  ENSG00000113460_16 (sequence is synthesized)
ttggataataggatatggtttcggaactttcaggtaagctttacttgatttttaattataccttttttttaattgagtttatttatttatgttttgagacagagtctcgctcttgttgcc

SEQ ID NO: 196951 - DNA, 120 bp, Artificial Sequence
  ENSG00000113460_17 (sequence is synthesized)
acaaaatatttttaaaatgttaacagtggcttatttcaaaactaagtcattcagtgactttaaaaattattttgtaaaaactattcagacacattttattaactcttcaataactggtct

SEQ ID NO: 196952 - DNA, 120 bp, Artificial Sequence
  ENSG00000113460_18 (sequence is synthesized)
tccaaatttttatctctcacagtttagtgcttcattcatttctgtttgttttgtctgaacaagcatattgaaatttcctcaggagaaggattatgtcccattttttaaccctgtagtgtc

SEQ ID NO: 196953 - DNA, 120 bp, Artificial Sequence
  ENSG00000113460_19 (sequence is synthesized)
tagtattatgctaaatccatagtaggtactcaaaaaattatcagtcaacatatataaagtaaaataagtccattaaacatatatatatataaaacccacatggtaaaaagtgttttgcca

SEQ ID NO: 196954 - DNA, 120 bp, Artificial Sequence
  ENSG00000113460_20 (sequence is synthesized)
gtattaaaagtgatttgtgtggaactggctattaaggtattacaaactgaataggttacattttcaaagtattgtttaagatactacacttaggtattttttttaacctctggaagcaca

SEQ ID NO: 196955 - DNA, 120 bp, Artificial Sequence
  ENSG00000113460_21 (sequence is synthesized)
gaacataaatttacattttaaagcaaaattttcaaaacttagaagaattaggatcattttttcactattagccttctttagagcacaaatttttgaacctctgctgtaataccacattat

SEQ ID NO: 196956 - DNA, 120 bp, Artificial Sequence
  ENSG00000113460_22 (sequence is synthesized)
tctatgtgctgtagaaactgttcaacagagcaatgtccctgtcattatggaacttacattctaatggagacaggccataaacaaggtttataatttcaagtaaagacaggagaaataaag

SEQ ID NO: 196957 - DNA, 120 bp, Artificial Sequence
  ENSG00000113460_23 (sequence is synthesized)
taaaagaccatctagctagagaaaatggcaactacaaaagcccagaagtggcacaaacttcctatttttgtgtttattctaagaccagtaagaaacaaaagttttgttttttttttttaa

SEQ ID NO: 196958 - DNA, 120 bp, Artificial Sequence
  ENSG00000113460_24 (sequence is synthesized)
gttgttagggtttgtttatttgtttaactggttttggagacaaaagtctctctctgttacccaggctggagtgaagtggtatgatctcagctcactgcagcctctgcttcctgggtttaa

SEQ ID NO: 196959 - DNA, 80 bp, Artificial Sequence
  ENSG00000113460_25 (sequence is synthesized)
agctgggacgacaggcacacgccagctttgccaggttgctcagacaattcacctacctcggcctcccaaagtgctggggt

SEQ ID NO: 196960 - DNA, 120 bp, Artificial Sequence
  ENSG00000113460_26 (sequence is synthesized)
aagtgctggggttataggcatgagccacctcatccagccataagttgttaggtttaaagtcttaaataatgtggagtttaagagtactatattaattagagtttatgaatactacagtaa

SEQ ID NO: 196961 - DNA, 120 bp, Artificial Sequence
  ENSG00000113460_27 (sequence is synthesized)
atgaatactacagtaatacaagccttcactcctgtaatgtttttgtgtcttctcaagtgtgacttttgtaagccttcaagacattgaagtttaatttgaaataggtttgatatacttagg

SEQ ID NO: 196962 - DNA, 120 bp, Artificial Sequence
  ENSG00000113460_28 (sequence is synthesized)
cttttcacccaatcccttagtgattttatagaaccaaatcaccagaaatgatagtataaatgaagaacaacttaagttttgtgatcttagaatcaaaaagctaaaaagttaaaaatcaaa

SEQ ID NO: 196963 - DNA, 120 bp, Artificial Sequence
  ENSG00000113460_29 (sequence is synthesized)
ataatcattaaaaaggatgtttttagttctataagtactgcattttcataagattggctaagaagattgattatgaaggattaacataagaagattagttgtggtatgctttatccgtag

SEQ ID NO: 196964 - DNA, 120 bp, Artificial Sequence
  ENSG00000113460_30 (sequence is synthesized)
agttgtggtatgctttatccgtagggcatctatttttagtctttgtagtttgtcaatgggactatgggcagaagaggttcctggccaggtgaggtggctcacacctgtaatcccaccact

SEQ ID NO: 196965 - DNA, 120 bp, Artificial Sequence
  ENSG00000113460_31 (sequence is synthesized)
gttatagactcctagtgtttcatgttaagggttgagaatgaagcaaacttttgatttcacgaaacttgatacctttaaagaaaattaaatgtataaatattataagcatattatttatgg

SEQ ID NO: 196966 - DNA, 120 bp, Artificial Sequence
  ENSG00000113460_32 (sequence is synthesized)
tgaataggtggtaagcattgactacatttgctaattagttgaaaaagcttactccatatctttcaggctttcaaattcacctcacggaccatctgctaaattccttgttcaaaatagtaa

SEQ ID NO: 196967 - DNA, 120 bp, Artificial Sequence
  ENSG00000113460_33 (sequence is synthesized)
gttgactcaataaatttttttagatgaggaaattaaaagtaatcttttgaaatagttgtgcaaaagttacaactatttttgtttttgttgtaatttttctagttcataccctcgctgaac

SEQ ID NO: 196968 - DNA, 120 bp, Artificial Sequence
  ENSG00000113460_34 (sequence is synthesized)
cagtcaccaaacatggtaagcggttgtgtcattcagtagtcttcaatgtaccagaaccctttggccaaaatgattctgtgaagtaattgctgttttattacctgtgaaactgaatttggt

SEQ ID NO: 196969 - DNA, 120 bp, Artificial Sequence
  ENSG00000113460_35 (sequence is synthesized)
ttttgctgcatagaaacttggaaattactcccttttttcatgacactggctgaaaggatatatggttcataactgaaagtctttgccttatataaaatgtttatttttatttcaaaagca

SEQ ID NO: 196970 - DNA, 120 bp, Artificial Sequence
  ENSG00000113492_0 (sequence is synthesized)
agttagagcccggcctccaatctgcttccatgggggttggctttctgagtgggagaaatgactctaatctggagacatttgctgagacccttgtgcctggtcacttccgctcccaggatc

SEQ ID NO: 196971 - DNA, 120 bp, Artificial Sequence
  ENSG00000113492_1 (sequence is synthesized)
cttgagatgcatcctttcctgagcctaggtacttcccggacatcagtaaccaagctcagtcttcatacaaagcccagaatgcctccatgtgacttcatgcctgaaagataccagtccctt

SEQ ID NO: 196972 - DNA, 120 bp, Artificial Sequence
  ENSG00000113492_2 (sequence is synthesized)
ggctacaaccgtgtcctggaaatccacaaggaacatctttctcctgtggtgacggcatatttccagaaacccctgctgctccaccaggggcacatggagtggctctttgatgctgaagga

SEQ ID NO: 196973 - DNA, 120 bp, Artificial Sequence
  ENSG00000113492_3 (sequence is synthesized)
agcagatacctggatttcttttccgggattgttactgtcagtgttggccattgccacccaaaggtgaatgcagtggcacaaaagcagctcggccgcctgtggcatacaagcaccgtcttc

SEQ ID NO: 196974 - DNA, 120 bp, Artificial Sequence
  ENSG00000113492_4 (sequence is synthesized)
ttccaccctccaatgcatgaatatgcagagaagcttgccgcacttcttcctgagcctcttaaggtcattttcttggtgaacagtggctcagaagccaatgagctggccatgctgatggcc

SEQ ID NO: 196975 - DNA, 120 bp, Artificial Sequence
  ENSG00000113492_5 (sequence is synthesized)
agggcgcactcaaacaacatagacatcatttctttcagaggagcctaccatggatgcagtccttacacacttggcttgacaaacgtagggacctacaagatggaactccctggtgggaca

SEQ ID NO: 196976 - DNA, 120 bp, Artificial Sequence
  ENSG00000113492_6 (sequence is synthesized)
ggttgccaaccaacaatgtgtccagatgtttttcgtggcccttggggaggaagccactgtcgagattctccagtgcaaacaatcaggaagtgcagctgtgcaccagactgctgccaagct

SEQ ID NO: 196977 - DNA, 120 bp, Artificial Sequence
  ENSG00000113492_7 (sequence is synthesized)
aaagatcagtatattgagcaattcaaagatacgctgagcacatctgtggccaagtcaattgctggatttttcgcagaacctattcaaggtgtgaatggagttgtccagtacccaaagggg

SEQ ID NO: 196978 - DNA, 120 bp, Artificial Sequence
  ENSG00000113492_8 (sequence is synthesized)
tttctaaaggaagcctttgagctggtgcgagcaaggggaggcgtgtgcattgcagatgaagtgcagacaggatttggaaggttgggctctcacttctggggcttccaaacccacgatgtc

SEQ ID NO: 196979 - DNA, 120 bp, Artificial Sequence
  ENSG00000113492_9 (sequence is synthesized)
cataaccactccagagattgccaaatctttggcgaaatgcctgcagcacttcaacacctttggagggaaccccatggcctgtgccattggatctgctgtgcttgaggtgattaaagaaga

SEQ ID NO: 196980 - DNA, 120 bp, Artificial Sequence
  ENSG00000113492_10 (sequence is synthesized)
aaatctacaggaaaacagtcaagaagttgggacctacatgttactaaagtttgctaagctgcgggatgaatttgaaattgttggagacgtccgaggcaaaggtctcatgataggcataga

SEQ ID NO: 196981 - DNA, 120 bp, Artificial Sequence
  ENSG00000113492_11 (sequence is synthesized)
aatggtgcaggataagataagctgtcggcctcttccccgtgaagaagtaaatcagatccatgaggactgcaagcacatgggactcctcgttggcagaggcagcattttttctcagacatt

SEQ ID NO: 196982 - DNA, 120 bp, Artificial Sequence
  ENSG00000113492_12 (sequence is synthesized)
tcgcattgcgccctcaatgtgcatcactaaaccagaagttgattttgcagtagaagtatttcgttctgccttaacccaacacatggaaagaagagctaagtaacattgtcagaaataaat

SEQ ID NO: 196983 - DNA, 120 bp, Artificial Sequence
  ENSG00000113492_13 (sequence is synthesized)
aaaaccacaagtctcaagaatttgccacgtatgttcaagggtgaatttgaagaatttcagaaccactggtatccagagaaagcctgcagctctccacaggagctgtaaaagtcatggttg

SEQ ID NO: 196984 - DNA, 120 bp, Artificial Sequence
  ENSG00000113492_14 (sequence is synthesized)
actgcctaccaaccatatttgttagcagagcccctcttatcttgagaactccattcttcagggaaaggatctccctagctcagagaataaatcctaattagtttatgttaggtatggtaa

SEQ ID NO: 196985 - DNA, 120 bp, Artificial Sequence
  ENSG00000113492_15 (sequence is synthesized)
tttgattcccctttgcagtgattggtttatgcatgaatatgtgatgtatttttgtccagtgaatcttgaagaaaaatcttttggtggaggtgccttcagggaaagttttcttcaccctca

SEQ ID NO: 196986 - DNA, 120 bp, Artificial Sequence
  ENSG00000113492_16 (sequence is synthesized)
ctcttcagttcaagaagagatgtcttcttgttgcgctgagaacaccatatgttcatgacgagattcctggcaccatgtcagccggcttgtagtcatgaggacaaccctttttggtgaggt

SEQ ID NO: 196987 - DNA, 120 bp, Artificial Sequence
  ENSG00000113492_17 (sequence is synthesized)
tggaagatggatggaagccaagtgcttagtgatgtcaaagaagcactcacttaagcattcctggagccaccctacctcagggcctcttgatatttgaggtaataaattcattgttctgta

SEQ ID NO: 196988 - DNA, 120 bp, Artificial Sequence
  ENSG00000113492_18 (sequence is synthesized)
ctatcatgctgagttgttaaaggggagagttaattcatagtttatccattaaagttagatttccatttattattctgccttctccctttttaaagacctactttgggtgctgaaagtatt

SEQ ID NO: 196989 - DNA, 120 bp, Artificial Sequence
  ENSG00000113492_19 (sequence is synthesized)
ggataagaaataatatataataaacctcacatacatgggaaatataagaattttcctagccagctgaaatttctttgttatcttggtagtgatttatagatgttaactgctatccttgta

SEQ ID NO: 196990 - DNA, 120 bp, Artificial Sequence
  ENSG00000113492_20 (sequence is synthesized)
tttagtttcatgttggccttctcttgtgtattttttcttccttccttttgttgtactattataaattgaatgactaaggagacactgagttctacgtgcttacagcaaggtaattcagct

SEQ ID NO: 196991 - DNA, 120 bp, Artificial Sequence
  ENSG00000113492_21 (sequence is synthesized)
gttcacccctacaccattgatttagcctgggatcgcatctgtttaaaaaaagattttttttaatgttcttgttaacacgcctaatatcatttgcttaaagaactgtaacaaatttctgga

SEQ ID NO: 196992 - DNA, 120 bp, Artificial Sequence
  ENSG00000113492_22 (sequence is synthesized)
ctaatataaagcctgtcattaatcaggggctcaatttgacctaattgaattggagaccacttgaggacaccattagaaaggccttccgagtctgagtaataattaatgacagagttttaa

SEQ ID NO: 196993 - DNA, 120 bp, Artificial Sequence
  ENSG00000113492_23 (sequence is synthesized)
aatgtattttgcttttaaataaaatcaagtaaactgcaaggctctgagaatcttgaatgcacaaaacttctatgcagtcatcactgtactcaccttctgttcccacttactgtacccaca

SEQ ID NO: 196994 - DNA, 120 bp, Artificial Sequence
  ENSG00000113492_24 (sequence is synthesized)
ttttcagcatctgaatcagatacctaattattcttattctttcagatgcccttacccactgcacccttgagcaagctgtttccaggctaacattgaaatcagtttcctttgtagagggcc

SEQ ID NO: 196995 - DNA, 120 bp, Artificial Sequence
  ENSG00000113492_25 (sequence is synthesized)
cttagacattaatggagctgaatcttcaattatcagaaagttttaactcatatattctagagaattccaaatgaattaagtgctcactgtgtccctctctaaattcattctcttggtctc

SEQ ID NO: 196996 - DNA, 120 bp, Artificial Sequence
  ENSG00000113492_26 (sequence is synthesized)
cttgaaaaaagaagacgctgactttcaaatgaccttttaaaaaccctctcctccattctcaccagacagatgaaactaccgaactcctaaaattcttaagaagaggaaaccctggccatt

SEQ ID NO: 196997 - DNA, 120 bp, Artificial Sequence
  ENSG00000113492_27 (sequence is synthesized)
tttagctgcttaataacatccgcattgtccaaagaactctttctttagtctcaccaatttcttttattctactgttttctaatctcagaaaataatcaatgtttgcatcttttttccaga

SEQ ID NO: 196998 - DNA, 120 bp, Artificial Sequence
  ENSG00000113492_28 (sequence is synthesized)
agtcatggtatagagtaataagtcctcttttcacccacagtggaaactgttctacagactgttgttaaaattgctagtgttactgtcatgataatgatgataatgatgatctaacttttt

SEQ ID NO: 196999 - DNA, 120 bp, Artificial Sequence
  ENSG00000113492_29 (sequence is synthesized)
ctctctctccttcctattttcattctatctcttttcctcactctctttttctcccccttgaaggcactgttactagaaatagagagctctggggcttgcctgaagccatgggcagtcacc

SEQ ID NO: 197000 - DNA, 120 bp, Artificial Sequence
  ENSG00000113494_0 (sequence is synthesized)
gcttcttctcacagagccaccgggctggggaccggggagcggaggctgaaatccccagacgccggttttctgggctgggctttctgccttactcactccttctccctctttctggatttt

SEQ ID NO: 197001 - DNA, 120 bp, Artificial Sequence
  ENSG00000113494_1 (sequence is synthesized)
accgaccgttcgcgaaacagctttccacacaatggagcttcatgtcctcgtgcaggaagtactcatcgactgatgtggcagactttgctccctggcaaaactaaagaactctcctattca

SEQ ID NO: 197002 - DNA, 120 bp, Artificial Sequence
  ENSG00000113494_2 (sequence is synthesized)
tggaggcgaacactgaggatgctttccacatgaaccctgaagtgaacttctgatacatttcctgcagcaagagaaggcagccaacatgaaggaaaatgtggcatctgcaaccgttttcac

SEQ ID NO: 197003 - DNA, 120 bp, Artificial Sequence
  ENSG00000113494_3 (sequence is synthesized)
tctgctactttttctcaacacctgccttctgaatggacagttacctcctggaaaacctgagatctttaaatgtcgttctcccaataaggaaacattcacctgctggtggaggcctgggac

SEQ ID NO: 197004 - DNA, 120 bp, Artificial Sequence
  ENSG00000113494_4 (sequence is synthesized)
agatggaggacttcctaccaattattcactgacttaccacagggaaggagagacactcatgcatgaatgtccagactacataaccggtggccccaactcctgccactttggcaagcagta

SEQ ID NO: 197005 - DNA, 120 bp, Artificial Sequence
  ENSG00000113494_5 (sequence is synthesized)
cacctccatgtggaggacatacatcatgatggtcaatgccactaaccagatgggaagcagtttctcggatgaactttatgtggacgtgacttacatagttcagccagaccctcctttgga

SEQ ID NO: 197006 - DNA, 120 bp, Artificial Sequence
  ENSG00000113494_6 (sequence is synthesized)
gctggctgtggaagtaaaacagccagaagacagaaaaccctacctgtggattaaatggtctccacctaccctgattgacttaaaaactggttggttcacgctcctgtatgaaattcgatt

SEQ ID NO: 197007 - DNA, 120 bp, Artificial Sequence
  ENSG00000113494_7 (sequence is synthesized)
aaaacccgagaaagcagctgagtgggagatccattttgctgggcagcaaacagagtttaagattctcagcctacatccaggacagaaataccttgtccaggttcgctgcaaaccagacca

SEQ ID NO: 197008 - DNA, 120 bp, Artificial Sequence
  ENSG00000113494_8 (sequence is synthesized)
tggatactggagtgcatggagtccagcgaccttcattcagatacctagtgacttcaccatgaatgatacaaccgtgtggatctctgtggctgtcctttctgctgtcatctgtttgattat

SEQ ID NO: 197009 - DNA, 120 bp, Artificial Sequence
  ENSG00000113494_9 (sequence is synthesized)
tgtctgggcagtggctttgaagggctatagcatggtgacctgcatctttccgccagttcctgggccaaaaataaaaggatttgatgctcatctgttggagaagggcaagtctgaagaact

SEQ ID NO: 197010 - DNA, 120 bp, Artificial Sequence
  ENSG00000113494_10 (sequence is synthesized)
actgagtgccttgggatgccaagactttcctcccacttctgactatgaggacttgctggtggagtatttagaagtagatgatagtgaggaccagcatctaatgtcagtccattcaaaaga

SEQ ID NO: 197011 - DNA, 120 bp, Artificial Sequence
  ENSG00000113494_11 (sequence is synthesized)
acacccaagtcaaggtatgaaacccacatacctggatcctgacactgactcaggccgggggagctgtgacagcccttcccttttgtctgaaaagtgtgaggaaccccaggccaatccctc

SEQ ID NO: 197012 - DNA, 120 bp, Artificial Sequence
  ENSG00000113494_12 (sequence is synthesized)
cacattctatgatcctgaggtcattgagaagccagagaatcctgaaacaacccacacctgggacccccagtgcataagcatggaaggcaaaatcccctattttcatgctggtggatccaa

SEQ ID NO: 197013 - DNA, 120 bp, Artificial Sequence
  ENSG00000113494_13 (sequence is synthesized)
atgttcaacatggcccttaccacagcccagccagcacaaccccagatcctcttaccacaatattactgatgtgtgtgagctggctgtgggccctgcaggtgcaccggccactctgttgaa

SEQ ID NO: 197014 - DNA, 120 bp, Artificial Sequence
  ENSG00000113494_14 (sequence is synthesized)
tgaagcaggtaaagatgctttaaaatcctctcaaaccattaagtctagagaagagggaaaggcaacccagcagagggaggtagaaagcttccattctgagactgaccaggatacgccctg

SEQ ID NO: 197015 - DNA, 120 bp, Artificial Sequence
  ENSG00000113494_15 (sequence is synthesized)
gctgctgccccaggagaaaaccccctttggctccgctaaacccttggattatgtggagattcacaaggtcaacaaagatggtgcattatcattgctaccaaaacagagagagaacagcgg

SEQ ID NO: 197016 - DNA, 120 bp, Artificial Sequence
  ENSG00000113494_16 (sequence is synthesized)
caagcccaagaagcccgggactcctgagaacaataaggagtatgccaaggtgtccggggtcatggataacaacatcctggtgttggtgccagatccacatgctaaaaacgtggcttgctt

SEQ ID NO: 197017 - DNA, 120 bp, Artificial Sequence
  ENSG00000113494_17 (sequence is synthesized)
tgaagaatcagccaaagaggccccaccatcacttgaacagaatcaagctgagaaagccctggccaacttcactgcaacatcaagcaagtgcaggctccagctgggtggtttggattacct

SEQ ID NO: 197018 - DNA, 120 bp, Artificial Sequence
  ENSG00000113494_18 (sequence is synthesized)
ggatcccgcatgttttacacactcctttcactgatagcttgactaatggaatgattggttaaaatgtgatttttcttcaggtaacactacagagtacgtgaaatgctcaagaatgtagtc

SEQ ID NO: 197019 - DNA, 120 bp, Artificial Sequence
  ENSG00000113494_19 (sequence is synthesized)
agactgacactactaaagctcccagctcctttcatgctccatttttaaccacttgcctctttctccagcagctgattccagaacaaatcattatgtttcctaactgtgatttgtagattt

SEQ ID NO: 197020 - DNA, 120 bp, Artificial Sequence
  ENSG00000113494_20 (sequence is synthesized)
actttttgctgttagttataaaactatgtgttcaatgaaataaaagcacactgcttagtattcttgagggacaatgccaataggtatatcctctggaaaaggctttcatgatttggcatg

SEQ ID NO: 197021 - DNA, 120 bp, Artificial Sequence
  ENSG00000113494_21 (sequence is synthesized)
ggacagacggaaatgaaattgtcaaaattgtttaccatagaaagatgacaaaagaaaattttccacataggaaaatgccatgaaaattgcttttgaaaaacaactgcataacctttacac

SEQ ID NO: 197022 - DNA, 120 bp, Artificial Sequence
  ENSG00000113494_22 (sequence is synthesized)
tcctcgtccattttattaggattacccaaatataaccatttaaagaaagaatgcattccagaacaaattgtttacataagttcctataccttactgacacattgctgatatgcaagtaag

SEQ ID NO: 197023 - DNA, 120 bp, Artificial Sequence
  ENSG00000113494_23 (sequence is synthesized)
aaataatgcctccaattttttcttaaaatagtttagatatgttaagcatggattttccccctaaattctactctaaagcttctataaaatatagtttggaaataaaaatgttcttacaca

SEQ ID NO: 197024 - DNA, 120 bp, Artificial Sequence
  ENSG00000113494_24 (sequence is synthesized)
aggggcaaatgaatttcatgtgaatccctttaggatgttttcctccttcatttcagcatgatagataatttattatacaccttagtctttccttagttaaaaaaaaattccctaaagact

SEQ ID NO: 197025 - DNA, 120 bp, Artificial Sequence
  ENSG00000113494_25 (sequence is synthesized)
aacttgaaaagaaaaccacagcaggatgctaatggaattactgccttactgtacatacaaattctactttaatataaacccataagtttaactgtatttttgaagactatttttctatga

SEQ ID NO: 197026 - DNA, 120 bp, Artificial Sequence
  ENSG00000113494_26 (sequence is synthesized)
cttaggtaaaataaaagactattttctattttcccagtacagctgtttatgtattcagtgggtacagtattttctgctgcaaggttataatgtgtatttacagtacatagtagtatataa

SEQ ID NO: 197027 - DNA, 120 bp, Artificial Sequence
  ENSG00000113494_27 (sequence is synthesized)
agttcccgtttgtggagtaaaatgccataccaacccaaagcccactgtgaaatatgaagtgaatgacaaaattcagttttcaacgcaatatagtatagtttatctgattcttttgatctc

SEQ ID NO: 197028 - DNA, 120 bp, Artificial Sequence
  ENSG00000113494_28 (sequence is synthesized)
caggacactttaaacaactgctaccaccaccaccaacctagggatttaggattctccacagaccagaaattatttctcctttgagtttcaggctcctctgggactcctgttcatcaatgg

SEQ ID NO: 197029 - DNA, 120 bp, Artificial Sequence
  ENSG00000113494_29 (sequence is synthesized)
gtgaatcttcctaaagctaccataaaaagggagggcgacgatttctaacagctgtttaaaagagagaggttttgcttttgtgagaaatcttgggccacaaaaaaattttaagcaaagcca

SEQ ID NO: 197030 - DNA, 120 bp, Artificial Sequence
  ENSG00000113494_30 (sequence is synthesized)
ggagttagtgtctctctgaagtaaattcaattgcaaaatcttggcagaggcagaaatggctcatatcagaagtgtccaaataaaagttctgggaaactaggtatttgcttcccagagcaa

SEQ ID NO: 197031 - DNA, 120 bp, Artificial Sequence
  ENSG00000113494_31 (sequence is synthesized)
tgggaatagctccaaaggtcagagtaaggtaatgagaatctcccggtcaattccagtgccaggcttcctgaaagaagtcaaagcttggatcctcattttaaagggcgcatccatgactca

SEQ ID NO: 197032 - DNA, 120 bp, Artificial Sequence
  ENSG00000113494_32 (sequence is synthesized)
tctagcagcccctctctatttttcccttcacttgatggtaaatccattctatatgtccatttactagctggacatagagaacttgagctcacctctgggagttaaatattccaccccaac

SEQ ID NO: 197033 - DNA, 120 bp, Artificial Sequence
  ENSG00000113494_33 (sequence is synthesized)
tatcccatattgatagcaactggactcagaggtccccctcctgtttgaaagtgaacacattgccaatgttttgagaatggcaaaagcaatagatacgaagctccatttttctaatatata

SEQ ID NO: 197034 - DNA, 120 bp, Artificial Sequence
  ENSG00000113494_34 (sequence is synthesized)
aacaatatcatgtgagtaagggaagcgtgtgggaaagttgtccaagctcattcagtcccctaaatcctcgatactttaactgtctgagaaccaactgcataggcatcacctgggcagtgt

SEQ ID NO: 197035 - DNA, 120 bp, Artificial Sequence
  ENSG00000113494_35 (sequence is synthesized)
ttgaaaattccatttgcagaatcttaagcatcagaatctgcattttactaagatccccaaatgattcaattgcacactgaagtttgagaagcattgttctagacaaccatttccactaaa

SEQ ID NO: 197036 - DNA, 120 bp, Artificial Sequence
  ENSG00000113494_36 (sequence is synthesized)
ggttattttagttcatagtaacaatcctcttttggaaaggacagatcaagtctgtttgacttgcaatgaacaacactgcatgtaagcaggcaaaaaaagaaacatatcagtagtttaaga

SEQ ID NO: 197037 - DNA, 120 bp, Artificial Sequence
  ENSG00000113494_37 (sequence is synthesized)
ttcacattatgctgaatcttatatgaattcacataaaagaatgacctgcaaaactacgcacaacttctgaaaggccaaggaatataatctaccttgagagacattaaccaaagacagtca

SEQ ID NO: 197038 - DNA, 120 bp, Artificial Sequence
  ENSG00000113494_38 (sequence is synthesized)
ccctcaaagccaatgcagactaaatctttcctaacatagtctattctctaagaatagagaagatatgtatcagtcactcttatagtctgaaaacctaaacataaaagtaatctgcttttg

SEQ ID NO: 197039 - DNA, 120 bp, Artificial Sequence
  ENSG00000113494_39 (sequence is synthesized)
acatataattttgtataatacgtatgaaaaaatgtgacagctaaggacttgaattaaatccctaaaaaacaattagccactcattaggccaagactttaattctatgatcaattagcact

SEQ ID NO: 197040 - DNA, 120 bp, Artificial Sequence
  ENSG00000113494_40 (sequence is synthesized)
gtttatctgaattaagcttttttgtggtctaacaaaaagtttttttgtggtctatcaaggagacagctgttcaaatggaaggatacatgtggggcaggggggcggtgaagagacctagat

SEQ ID NO: 197041 - DNA, 120 bp, Artificial Sequence
  ENSG00000113494_41 (sequence is synthesized)
tctggtcctaactgctttgccttggagagattaattcccccctctaagcctcagtttcctctgaagatgttggaccagataacctctaaggtcctttgaaactgactccttgattccatg

SEQ ID NO: 197042 - DNA, 120 bp, Artificial Sequence
  ENSG00000113494_42 (sequence is synthesized)
actcactgaatatttttctgcaaagataatcccaaccaatgccttctatcctaatctaacaaaaaattgctcttcatcatagaaatacaaagtaatcttcagtgatgtgctctttatact

SEQ ID NO: 197043 - DNA, 120 bp, Artificial Sequence
  ENSG00000113494_43 (sequence is synthesized)
ttgctttttaaaccgtccattccagttggtcttaatatattgcacaagtattttataagtgaaatgtgtacagaatcatattctaagattatgtgcaaatatatgtgtagaaagaggcat

SEQ ID NO: 197044 - DNA, 120 bp, Artificial Sequence
  ENSG00000113494_44 (sequence is synthesized)
ttaaaaaaagaggcaggagattgagaagagacatattgaatgaggcactaatctttagaaaaatgatcttttactgaatcaagccatgctcattccttgctgaatccaacagccccaaat

SEQ ID NO: 197045 - DNA, 120 bp, Artificial Sequence
  ENSG00000113494_45 (sequence is synthesized)
ctcttttcttatatttggctgttaatttttttccttgcaccatcctagattgttaacaaccattgcacagttggctcatgtatccttacactctgagttataataagttgtatttttata

SEQ ID NO: 197046 - DNA, 120 bp, Artificial Sequence
  ENSG00000113494_46 (sequence is synthesized)
aacaaatacctaaatattcaagttttaaggcgcatggaaactgaatctaggcaacgggtgatttgtgtagcttacaacctgaacagcaagatgttccaattcattctaacagatgtgtat

SEQ ID NO: 197047 - DNA, 120 bp, Artificial Sequence
  ENSG00000113494_47 (sequence is synthesized)
aagcacaagttatatcagctgtgtcagatatttaacagatcctacatttattagctatataacagactctacattttcctaagtgcctaagaccaatcctggtagtcacttaagtacaaa

SEQ ID NO: 197048 - DNA, 120 bp, Artificial Sequence
  ENSG00000113494_48 (sequence is synthesized)
ggcagttttgctctgtgtcttgtgatgacccagctgaatgtgaaaagcctatgagttattgagcaaccagaggtccctgcattccaagttgcagtttagctctggggaaactctggcttt

SEQ ID NO: 197049 - DNA, 120 bp, Artificial Sequence
  ENSG00000113494_49 (sequence is synthesized)
ctctttcctcaagtgtccaccactgcccatcatttgcagaaagacttggccctgcctttagcaacttccctatctccttagagtagacaagaaagaaacagatttgtgcacattttacaa

SEQ ID NO: 197050 - DNA, 120 bp, Artificial Sequence
  ENSG00000113494_50 (sequence is synthesized)
agtgccttcctctatttttttttaaagttttcattttgcaaggaaaaatgtattgattagaaagtaacatttgccttatagggattatatatatatatagatatagatatagatatgtat

SEQ ID NO: 197051 - DNA, 120 bp, Artificial Sequence
  ENSG00000113494_51 (sequence is synthesized)
gaatggagagatgagaagaagccagaaagggcacaacaaaatggtctaagggccaaccagcaatgttcagtgaatgtttacgtattgtttaattgaatcaacacagagctgttgtgaata

SEQ ID NO: 197052 - DNA, 120 bp, Artificial Sequence
  ENSG00000113494_52 (sequence is synthesized)
gtgtgacttactttgcctgataagaaattgaggctggctgtgatttggggataaacctgccaccctgtgatttgagactctccataccaaaacttattgatacatttttgaatgtcattg

SEQ ID NO: 197053 - DNA, 120 bp, Artificial Sequence
  ENSG00000113494_53 (sequence is synthesized)
gcttacatgcctaaacctgaagagaacaatgcatgcacattggaactttgtacacaaacagaaaaatataaatgactttgaattaccatcccaagcattgctaacgtagatgtgccattg

SEQ ID NO: 197054 - DNA, 120 bp, Artificial Sequence
  ENSG00000113494_54 (sequence is synthesized)
acgaaagtctcatgtgttcttgagtgaacaaatttccttttcttcctttttggctcaagcacaataatgctgtcactgagacagtgactgagcactcaatgtccaagactaaatcacatc

SEQ ID NO: 197055 - DNA, 120 bp, Artificial Sequence
  ENSG00000113494_55 (sequence is synthesized)
accacgactaagtaggcactatgtcctgggatgagtcttttaaactctggccatcaggttccttacttgttaaataagtaggttggcctaaaaggtttctaagacctctcatgatctagg

SEQ ID NO: 197056 - DNA, 120 bp, Artificial Sequence
  ENSG00000113494_56 (sequence is synthesized)
taaaatccagggtttcaggtcagtgtccctggtgcagtgcaagaaagccttgctgacacacccttggcctgaagcagtgagcacatgagattgtgtgacaacgcttcagagaaaaacaga

SEQ ID NO: 197057 - DNA, 120 bp, Artificial Sequence
  ENSG00000113494_57 (sequence is synthesized)
gatctgttcctccaactcagattgatttaacatccttgcttctccttttccttcctggctttacatatttgtagggtttttactccttctccagagcctactattttcctaagagttagt

SEQ ID NO: 197058 - DNA, 120 bp, Artificial Sequence
  ENSG00000113494_58 (sequence is synthesized)
agcaaccataggatccacaagaaatgaaattattcatcaacaatgactttggcactgcaaaagactgagtcaaaggttaaatcagtcacacagatatccaaggccaagttgaagatcaca

SEQ ID NO: 197059 - DNA, 120 bp, Artificial Sequence
  ENSG00000113494_59 (sequence is synthesized)
agtatatcccatttagagatttgcatacttagagattaagcccatgttcattaattatttagttaattcaaaagccattaataaatccatgcccagcctacgcaacatagtaagacccag

SEQ ID NO: 197060 - DNA, 120 bp, Artificial Sequence
  ENSG00000113494_60 (sequence is synthesized)
acatagtaagacccagtctctacaaaaattttaaaaattagccagccatggtgacacgtacctgtagtcctagacacttgggaaggtgaagccagaggattgcttgagcccaggaggtcg

SEQ ID NO: 197061 - DNA, 120 bp, Artificial Sequence
  ENSG00000113494_61 (sequence is synthesized)
ctccagcctgggtgagagagcaagaccttgtctcaataaataaacccaagttacttcgatgactagatactggaggtctgaaggagaagctttaaaaatacagattgattgcttcagaga

SEQ ID NO: 197062 - DNA, 120 bp, Artificial Sequence
  ENSG00000113494_62 (sequence is synthesized)
ttgattgcttcagagaaatcctatttataattatgatctgaacttattctatgattagcaaatatatcatctgaaaataaaacaggagttctctccccagacttttgtttttcaggatgg

SEQ ID NO: 197063 - DNA, 120 bp, Artificial Sequence
  ENSG00000113494_63 (sequence is synthesized)
tgagttttggtctgggaccctcatggcacccattttgataaaaggaaaaagatagtaaaacaggaaataggaagtttccagagatttgggcatctcaggattccatgaaatgctgagact

SEQ ID NO: 197064 - DNA, 120 bp, Artificial Sequence
  ENSG00000113494_64 (sequence is synthesized)
aacccactaaatccaaattttattggctatggtaaatctaaatctgttcagtgttctgaacagattttatgagtttatgtctaagagtttatgtctaagagaggtacataattcacaaac

SEQ ID NO: 197065 - DNA, 120 bp, Artificial Sequence
  ENSG00000113494_65 (sequence is synthesized)
actatcatgctggcagctgttttgtccacatcaattcccttgatttaatgctctgatttcaatttagaaagtactgagacatgtaaagtctcaaaataggaaaaacctatcctgtttata

SEQ ID NO: 197066 - DNA, 120 bp, Artificial Sequence
  ENSG00000113494_66 (sequence is synthesized)
aggtgtggtcaataaatagaccacagataatcttagtctattaattaactctcagatcatcttagactattaattaacattctgcttgctgctgattaaaaagaaaaaaaccctaaaacc

SEQ ID NO: 197067 - DNA, 120 bp, Artificial Sequence
  ENSG00000113494_67 (sequence is synthesized)
ttcagcaactgaagtagtaatataaaaaataacctttaatagttatggtcaaattacgcttcacttggataaacctcaaaatgtagtctgagtttttttgtgcacacttcacaaatcctg

SEQ ID NO: 197068 - DNA, 120 bp, Artificial Sequence
  ENSG00000113494_68 (sequence is synthesized)
ggggaaaaatcttttttccacgttatctgaaaaactatatggcgaagataccgctgaaaaataatttgttttatgaaattcctgaaaagctaattttgaattttttaaagtaactacctc

SEQ ID NO: 197069 - DNA, 120 bp, Artificial Sequence
  ENSG00000113494_69 (sequence is synthesized)
ccttttgtgtcctaatgtccttccttcaaagctgcttatagtttagaaatgaaagatgtcatgtctcatgctttgactggttttcggtggcatatttgatgtatttgccaagtggcatta

SEQ ID NO: 197070 - DNA, 120 bp, Artificial Sequence
  ENSG00000113494_70 (sequence is synthesized)
ctgactttacagtaactgttacattattttgtactatattgctttatgtggttcaaaaatagtatatgccatattgaaatatgtaatcctcatgttgtgaaactcatcatgtaatacaaa

SEQ ID NO: 197071 - DNA, 120 bp, Artificial Sequence
  ENSG00000113494_71 (sequence is synthesized)
tgaaaatcattacttaataacttacaatttatccatatgtagtttcaatatgattgtgtctatgactgtaaaacaaaactgaaaaaatatgtaatgtatttctgttgaaagcgtgaatgt

SEQ ID NO: 197072 - DNA, 120 bp, Artificial Sequence
  ENSG00000113494_72 (sequence is synthesized)
actaattttttcctaatctttgtctagaagaaagattctatgtcattcattgtacagctgctctggggtgttacacatttaaagtacaatccaacagttgtttgaaagtcagcctctcgg

SEQ ID NO: 197073 - DNA, 120 bp, Artificial Sequence
  ENSG00000113494_73 (sequence is synthesized)
ctttgtttcatgtgactgctgacacttctcaagtgttctttgcataatgaggctggattttgtgcttcatcgttcattttaaacaattgaaaagtctcatgtggaaaccaaagcaatcta

SEQ ID NO: 197074 - DNA, 120 bp, Artificial Sequence
  ENSG00000113494_74 (sequence is synthesized)
gaaccagcctgttgggtgactgtgtcttctgtaaagccatattgaagtgaagttatacataatagcataaggttccacattttcaaagctaccactacctctgcttttcctctttcccta

SEQ ID NO: 197075 - DNA, 120 bp, Artificial Sequence
  ENSG00000113494_75 (sequence is synthesized)
gaaaatgccaagcaaaattccccaacactaagtgagaaattagaagtaattgttttataattaagttgctgggttttttttttaacaccttctaattcatcactttgtagggttatgcaa

SEQ ID NO: 197076 - DNA, 120 bp, Artificial Sequence
  ENSG00000113494_76 (sequence is synthesized)
gagtttctgaataaccattcttacatgtttatattttataaaaaccggctgcaagaaagattcagaaagaatacttagtaagtcatcatatgaaaaaccaacaaaaccatagagtgcaga

SEQ ID NO: 197077 - DNA, 120 bp, Artificial Sequence
  ENSG00000113494_77 (sequence is synthesized)
ttttttcctaactataagtcacctcatagttgtccaaagccatgataatgatatctcttacaaattgacttctgtaacccccctagaaataacccttttccttatttgattttagtcatc

SEQ ID NO: 197078 - DNA, 120 bp, Artificial Sequence
  ENSG00000113494_78 (sequence is synthesized)
aaacatagtatgatatgggaaaagtcagccatttaccagaaattatcttattttgattttaaaaactcatttctatatgtagttattgtaatgtctatttttttagacttaaagatttat

SEQ ID NO: 197079 - DNA, 120 bp, Artificial Sequence
  ENSG00000113494_79 (sequence is synthesized)
agaagactatagttatctgatttgttattttgcatttttcattctgtaaatctttgcttatggcacattgtgctctctgttttccatggttttattcatttatctcctcctattttgagg

SEQ ID NO: 197080 - DNA, 120 bp, Artificial Sequence
  ENSG00000113494_80 (sequence is synthesized)
ggacaacatgggtagttaaatctttgtcaatagtattggagataacactaactgctattatcataacatcttcatttttactgcatgccaaaaccaatgcctgccaaacaaaatcttaga

SEQ ID NO: 197081 - DNA, 120 bp, Artificial Sequence
  ENSG00000113494_81 (sequence is synthesized)
catcccaatataatatgttagttatatttctattcacatcattattgaaaatacccagctcagtgcctggcttaataaatgtttaattcccttacctactcttgctctatttttttattt

SEQ ID NO: 197082 - DNA, 120 bp, Artificial Sequence
  ENSG00000113494_82 (sequence is synthesized)
gaaatggagatgagcaaaataacacattcatggctgaagcaattttttggacatttcttgttaccaaaagatctataatcaggacattgtttatgtaagttggacaaaaaaaattcttcc

SEQ ID NO: 197083 - DNA, 120 bp, Artificial Sequence
  ENSG00000113494_83 (sequence is synthesized)
cctttatgtccacccttcctatgattgcaagacaaaatttccctcctttacctcatccctataacatgggaggctgagaaaaatgaggggagatggaaccagatacaaggagatccaata

SEQ ID NO: 197084 - DNA, 120 bp, Artificial Sequence
  ENSG00000113494_84 (sequence is synthesized)
agagaagcttatttaaatattgtgaaataaaggaagaaccaaagcatttttttaagtggggaatccttttgaacagttattatttatccatattattaacaacatcttttctgacaaaat

SEQ ID NO: 197085 - DNA, 120 bp, Artificial Sequence
  ENSG00000113494_85 (sequence is synthesized)
ccatcagatgaagtgtaaatggataatcttttaatggatctaaacctagaaagtttcacttactgttcatgtccgtgttccagaattgtgaaatggtgtgtggttttgctttccaagttc

SEQ ID NO: 197086 - DNA, 120 bp, Artificial Sequence
  ENSG00000113494_86 (sequence is synthesized)
ttctctgcctcctcttaattctctaattccatgtcttacagaagaatgagaaatttctttcttacttgagtatcatgctctaaaaaacttggcttcagtcacagaaacgctggctctcct

SEQ ID NO: 197087 - DNA, 120 bp, Artificial Sequence
  ENSG00000113494_87 (sequence is synthesized)
gtgcttatattgaagccaactgcctttaattcttgggccctcttatatttttaaggtgcaaaatttgaagtctcagtcaccagacacaggttctatacaattaatgatgagctggagaag

SEQ ID NO: 197088 - DNA, 120 bp, Artificial Sequence
  ENSG00000113494_88 (sequence is synthesized)
taatatgtagctaatttttcaaaagcattgaatatactttccggaaagaaaacagaaattaaatattgccacatcttgccagaatcccatctgacaccttaactttgtcaggtttcctac

SEQ ID NO: 197089 - DNA, 120 bp, Artificial Sequence
  ENSG00000113494_89 (sequence is synthesized)
aacttgctaatcaagttttatacattctaaatctccccagtttctttggggctggaagatgcaacttccatttaatagaaactttgaaatcttggggtaagggagcagtggggggactag

SEQ ID NO: 197090 - DNA, 120 bp, Artificial Sequence
  ENSG00000113494_90 (sequence is synthesized)
ggagaaggataagaaatagaattattgaaaagcccccaccagggaccttcctggccagaatatgcagagtaattcctgctggcttcacctttgaaagtccctcgaaactatgcagatgaa

SEQ ID NO: 197091 - DNA, 120 bp, Artificial Sequence
  ENSG00000113494_91 (sequence is synthesized)
actgagtctgtttttgatattgtcagatgtattctaccttggaagtcccaacacctaaactggaattcttgtatttacatctcctccactgtcccccacaccacccctcaattcctgctg

SEQ ID NO: 197092 - DNA, 120 bp, Artificial Sequence
  ENSG00000113494_92 (sequence is synthesized)
cccctgctaatgttaagcatttttctcttgttatcatcaggttcacattaaaaacagatacttacaaactgacttgaagcacagatacttttacgaatgtgataaaatattttcttaaga

SEQ ID NO: 197093 - DNA, 120 bp, Artificial Sequence
  ENSG00000113494_93 (sequence is synthesized)
aaaggaaagaggatgtgggtcaaataaaacaccgcatggatgttgattggtgaatactggtgtaagaaaagggagctcaggaatttttattactgtatttgtaaatgagtttgaaggaat

SEQ ID NO: 197094 - DNA, 120 bp, Artificial Sequence
  ENSG00000113494_94 (sequence is synthesized)
ttgtaaatgccactggtacatttttaaggtgacacatttgctccttataaagttattaaaaattacagggtaagcttaaatgacgtttgccagtagttttactttatataatcaatattg

SEQ ID NO: 197095 - DNA, 120 bp, Artificial Sequence
  ENSG00000113494_95 (sequence is synthesized)
atattgttgctgaactatgtaactttatgatgcatttttcagtcccttttcagagcaaatgcttttgcaatggtagtaatgtttagtttaaattgacttaataaattattacctgagcaa

SEQ ID NO: 197096 - DNA, 120 bp, Artificial Sequence
  ENSG00000113494_96 (sequence is synthesized)
ccaagaaaaatctcaagtcaaggaagacttgcggtgttcacaaaggcaacattgaccacagtccagtagagctgaagagcatataccagaattcaggaactcaacattttctcccctctg

SEQ ID NO: 197097 - DNA, 120 bp, Artificial Sequence
  ENSG00000113494_97 (sequence is synthesized)
tccaaccacaggacagactgtgcaccccagggagatgctgtgtgtccactggcctcactgacttggattactcctgcagcacgtgaccagccagctcatatgatcactccctactgcccc

SEQ ID NO: 197098 - DNA, 120 bp, Artificial Sequence
  ENSG00000113494_98 (sequence is synthesized)
caaagcagaattgactgggagctggaaacccacacaaaaagggacaattatattgaatgtaacatactccctctgcttacctagtgccttcacctcctatgggcatttggagtaaaaggt

SEQ ID NO: 197099 - DNA, 120 bp, Artificial Sequence
  ENSG00000113494_99 (sequence is synthesized)
tgttatgcaggtgtttgtgaaggatgtggccaagtcagttgtctcccttacagggtgacccaagattaatgatatctacccatccccagtccctcgaccccctagttgcaatcagctttg

SEQ ID NO: 197100 - DNA, 120 bp, Artificial Sequence
  ENSG00000113494_100 (sequence is synthesized)
tcactgtcccccttaggcactgccatgtaaagcacgtggtcccccattctgaagcagtgggaaacctagaagagatgtactcttcgcaacctggttggatcttaaaaacatggttctaac

SEQ ID NO: 197101 - DNA, 120 bp, Artificial Sequence
  ENSG00000113494_101 (sequence is synthesized)
agtccttggagtgaactgggagacaaggaggctgctttggcatggagctgagaacatctctagatcgcactggaaggcagagagaggccagacagggaactctgaagagctgccacagcc

SEQ ID NO: 197102 - DNA, 120 bp, Artificial Sequence
  ENSG00000113494_102 (sequence is synthesized)
aagagaaggcagccaacatgaaggaaaatgtggcatctgcaaccgttttcactctgctactttttctcaacacctgccttctgaatgagagacactcatgcatgaatgtccagactacat

SEQ ID NO: 197103 - DNA, 120 bp, Artificial Sequence
  ENSG00000113494_103 (sequence is synthesized)
attttaccgaccgttcgcgaaacagctttccacacaatggagcttcatgtcctcgtgcaggaagtactcatcgactgatgtggcagactttgctccctggcaaaagtcttacggatacca

SEQ ID NO: 197104 - DNA, 120 bp, Artificial Sequence
  ENSG00000113494_104 (sequence is synthesized)
agtcccatgcctgccagcttgcacctgttaagtcatgtgatacttaggaaatgtacacatcaccccagtgcagaggcctttatccacttcccttcattttgcctggattgttgctgtgag

SEQ ID NO: 197105 - DNA, 120 bp, Artificial Sequence
  ENSG00000113494_105 (sequence is synthesized)
agcaaaggtgaggcagctgtgtctccctctggctgccttttctcccctcctctctcaccagaagccaacgcgtacacgctgagtggagaggccgcgaggacaagacagtgggacatgcgt

SEQ ID NO: 197106 - DNA, 120 bp, Artificial Sequence
  ENSG00000113494_106 (sequence is synthesized)
cttattcctcctgctttgctgaaaccacagctgccttgaatcgagccattttgattctgccgcaaatgagctgtaaaccaaatcaagccacatcaaacaaatccaaccaccatcaaaagc

SEQ ID NO: 197107 - DNA, 120 bp, Artificial Sequence
  ENSG00000113504_0 (sequence is synthesized)
cgggagcggcgcagcgcgggccgggccgggacggggactgtcggctgcaggcggccatgcccaccaacttcaccgtggtgcccgtggaggctcacgccgacggcggcggggacgagactg

SEQ ID NO: 197108 - DNA, 120 bp, Artificial Sequence
  ENSG00000113504_1 (sequence is synthesized)
ggcggggacgagactgccgagcggacggaggctccgggcacccccgagggccccgagcccgagcgccccagcccgggagatggaaatccaagagaaaacagcccattcctcaacaatgtc

SEQ ID NO: 197109 - DNA, 120 bp, Artificial Sequence
  ENSG00000113504_2 (sequence is synthesized)
gaggtggaacaagagagcttctttgaagggaagaacatggcacttttcgaggaggagatggacagtaaccccatggtgtcctcgctgctcaacaagctggccaactacaccaacctgagc

SEQ ID NO: 197110 - DNA, 120 bp, Artificial Sequence
  ENSG00000113504_3 (sequence is synthesized)
cagggcgtggtggagcacgaggaggacgaggagagccggcggcgggaggccaaggctccgcgcatgggcaccttcatcggcgtctacctgccgtgcctgcagaacatcctgggcgtcatc

SEQ ID NO: 197111 - DNA, 120 bp, Artificial Sequence
  ENSG00000113504_4 (sequence is synthesized)
ctcttcctgcgcctgacgtggatcgtgggggtggctggtgtcctggagtccttcctcatcgtggccatgtgctgcacatgtacaatgctgaccgccatttccatgagtgcgatcgctacc

SEQ ID NO: 197112 - DNA, 120 bp, Artificial Sequence
  ENSG00000113504_5 (sequence is synthesized)
aacggtgtggtcccagctggcgggtcctactacatgatatcgcgctcgctgggacccgagtttggaggcgctgtcggcctctgcttctacctgggcacgacgtttgcaggggccatgtat

SEQ ID NO: 197113 - DNA, 120 bp, Artificial Sequence
  ENSG00000113504_6 (sequence is synthesized)
attttggggaccatcgagatttttctgacgtacatctccccgggtgcggccatcttccaggcggaggctgcaggtggcgaggcggccgccatgctgcacaacatgcgtgtgtacggcacg

SEQ ID NO: 197114 - DNA, 120 bp, Artificial Sequence
  ENSG00000113504_7 (sequence is synthesized)
tgcacgctcgtgctcatggccctggtggtcttcgtgggcgtcaagtatgtcaacaagctggcgctggtcttcctggcctgcgtcgtgctgtccatcctggccatctatgccggcgtcatc

SEQ ID NO: 197115 - DNA, 120 bp, Artificial Sequence
  ENSG00000113504_8 (sequence is synthesized)
aagtctgccttcgaccccccggacatcccggtctgcctcctggggaaccgcacgctgtcacggcgcagcttcgatgcctgcgtcaaggcctacggcatccacaacaactcagccacctcc

SEQ ID NO: 197116 - DNA, 120 bp, Artificial Sequence
  ENSG00000113504_9 (sequence is synthesized)
gcgctctggggcctcttctgcaacggctcccagcccagcgccgcctgtgacgagtacttcatccagaacaacgtcaccgaaatccagggcatcccgggcgcggccagtggtgtcttcctg

SEQ ID NO: 197117 - DNA, 120 bp, Artificial Sequence
  ENSG00000113504_10 (sequence is synthesized)
gagaacctgtggagtacgtacgcgcacgcgggggcgtttgtggagaagaaaggtgtgccctcggtgcccgtggcagaggagagccgtgccagcgcactgccctacgtgctcaccgacatc

SEQ ID NO: 197118 - DNA, 120 bp, Artificial Sequence
  ENSG00000113504_11 (sequence is synthesized)
gcggcctccttcaccctgctggttggcatctacttcccttccgtgaccggtatcatggcgggttcaaaccggtccggggacctcaaggatgcacagaagtccatccccacggggaccatc

SEQ ID NO: 197119 - DNA, 120 bp, Artificial Sequence
  ENSG00000113504_12 (sequence is synthesized)
ctggccatagtgacgacgtctttcatctatctctcctgcattgtgctgtttggggcctgcattgaaggcgtggtcttacgagataagttcggggaggccctgcaggggaacctggtcatc

SEQ ID NO: 197120 - DNA, 120 bp, Artificial Sequence
  ENSG00000113504_13 (sequence is synthesized)
ggcatgctggcctggccctccccctgggtcatcgtcatcggctccttcttctccacctgcggtgccggcctgcagagcctcacgggggcaccgcgcctactgcaggccattgcccgtgac

SEQ ID NO: 197121 - DNA, 120 bp, Artificial Sequence
  ENSG00000113504_14 (sequence is synthesized)
ggcatcgtccccttcctgcaggtgtttggccacgggaaggccaacggggagcccacgtgggcgctgctgctgacagtcctcatctgcgagactggcatcctcatcgcctctctggacagc

SEQ ID NO: 197122 - DNA, 120 bp, Artificial Sequence
  ENSG00000113504_15 (sequence is synthesized)
gtggccccgatcctctccatgttcttcctcatgtgctacctgttcgtgaacctggcctgcgccgtgcagaccctgctacgtacccccaactggcgtccacgcttcaagttctaccactgg

SEQ ID NO: 197123 - DNA, 120 bp, Artificial Sequence
  ENSG00000113504_16 (sequence is synthesized)
accctgtcctttctgggtatgagcctgtgcctggcgctgatgttcatctgctcctggtactacgcgctgtccgccatgctcatcgctggctgcatctacaagtacatcgagtaccgcggg

SEQ ID NO: 197124 - DNA, 120 bp, Artificial Sequence
  ENSG00000113504_17 (sequence is synthesized)
gccgagaaggagtggggcgatggcatccgtggcctatccctgaacgccgcccgctacgccctgctgcgcgtggagcacggtcccccccacaccaagaactggaggccccaggtgctggtg

SEQ ID NO: 197125 - DNA, 120 bp, Artificial Sequence
  ENSG00000113504_18 (sequence is synthesized)
atgctgaacctggacgcggagcaggccgtgaagcacccccgcctgctgtccttcacgtcgcagctgaaggccggcaagggcctgaccatcgtgggctcggtgctggaggggacgtacctg

SEQ ID NO: 197126 - DNA, 120 bp, Artificial Sequence
  ENSG00000113504_19 (sequence is synthesized)
gacaagcacatggaggctcagcgggccgaggagaacatacggtccctaatgagcacagagaagaccaagggcttctgccagctggtggtctcgtccagcctgcgggatggcatgtcccac

SEQ ID NO: 197127 - DNA, 120 bp, Artificial Sequence
  ENSG00000113504_20 (sequence is synthesized)
ctgatccagtcggccggcctgggcggcctgaagcacaacacggtgctcatggcctggcccgcatcctggaagcaggaggacaaccccttctcctggaagaactttgtggacaccgtccgc

SEQ ID NO: 197128 - DNA, 120 bp, Artificial Sequence
  ENSG00000113504_21 (sequence is synthesized)
gacaccaccgccgcgcaccaggctctgctggtggccaagaacgtcgactcgtttccgcaaaaccaggagcgcttcggcgggggccacatcgacgtgtggtggatcgtgcacgacggcggc

SEQ ID NO: 197129 - DNA, 120 bp, Artificial Sequence
  ENSG00000113504_22 (sequence is synthesized)
cctgctgcgccagcacaaggtgtggaggaagtgccggatgcgtatcttcaccgtggcccaggtggacgacaacagcatccagatgaagaaggacctgcagatgttcttgtaccacttgcg

SEQ ID NO: 197130 - DNA, 120 bp, Artificial Sequence
  ENSG00000113504_23 (sequence is synthesized)
catcagcgccgaggtggaggtggtggagatggttgaaaacgacatatctgctttcacctacgagaggacactaatgatggagcagaggtcgcagatgctgaagcagatgcagctgtccaa

SEQ ID NO: 197131 - DNA, 120 bp, Artificial Sequence
  ENSG00000113504_24 (sequence is synthesized)
gaacgagcaggagcgagaggcccagctgatccacgacaggaacaccgcgtcccacaccgcggcggcagccaggacccaagcgccgcctacgccagacaaggtgcagatgacctggaccag

SEQ ID NO: 197132 - DNA, 120 bp, Artificial Sequence
  ENSG00000113504_25 (sequence is synthesized)
ggagaagctgatcgctgagaagtacaggagcagagacaccagcctatctggtttcaaagacctcttcagcatgaagccggaccagtccaacgtcaggcggatgcacacggctgtgaagct

SEQ ID NO: 197133 - DNA, 120 bp, Artificial Sequence
  ENSG00000113504_26 (sequence is synthesized)
caatggcgtcgtcctcaacaagtcccaggatgcgcagctggtcctgctcaacatgccaggtcctcccaaaaaccggcagggagacgagaactacatggagtttcttgaagtcctgaccga

SEQ ID NO: 197134 - DNA, 120 bp, Artificial Sequence
  ENSG00000113504_27 (sequence is synthesized)
ggggctgaacagagtcctcctggtcaggggtggcggccgggaggtgatcaccatctactcctaatgcccaacagcatcacggcactctgggacaggcacggaggacggcgtgggcagcct

SEQ ID NO: 197135 - DNA, 120 bp, Artificial Sequence
  ENSG00000113504_28 (sequence is synthesized)
gggcctgggcttggcccagggaaacagacggcagacacacctgtcccccagtgatgccgcccaagctgcccatggggcttcctacggaagtttctaggcccgtcacctagggctctcctg

SEQ ID NO: 197136 - DNA, 120 bp, Artificial Sequence
  ENSG00000113504_29 (sequence is synthesized)
ttcagccttaacaggctcagcaaatcagggcgtggctggacgatttccttgcatctgagggcagacgctgctaccggagtgacctggacgtggccagatcttctcgcaggtcacaagaag

SEQ ID NO: 197137 - DNA, 120 bp, Artificial Sequence
  ENSG00000113504_30 (sequence is synthesized)
ccagtgagcccttgccttggtttctggaagttcttttccttggctggatttacccagtggttaggttgcatttctaccccatccagaacattcttggaagagcacccggagctgaagctg

SEQ ID NO: 197138 - DNA, 120 bp, Artificial Sequence
  ENSG00000113504_31 (sequence is synthesized)
tccctgatgatgaaggtgaaacgtcagccctggccatggctccgctcagggccccggtcacctccgagtcactctgttccttgactgtctttgtgtttctgtacctcaaggcactgaagc

SEQ ID NO: 197139 - DNA, 120 bp, Artificial Sequence
  ENSG00000113504_32 (sequence is synthesized)
tggaggactctgtccatgcccgtgtcaccctcgtgtgggagcctctgggctcggcaggtccacatttcatgagctgaggcgtgggccagggccatctggaaagggaactcggcttttcca

SEQ ID NO: 197140 - DNA, 120 bp, Artificial Sequence
  ENSG00000113504_33 (sequence is synthesized)
gaacgtggtggatcatctgtcgggtgtgtggtgaacacgttcagttcatcagggcctacgctccgggaaggggcccccagctgtggctctgccatgccgggctgtgtttgcagctgtccg

SEQ ID NO: 197141 - DNA, 120 bp, Artificial Sequence
  ENSG00000113504_34 (sequence is synthesized)
agtctccatccacctttagaaaaccagccacttcttttcataagcactgacagggcccagcccacagccacaggtgcgatcagtgcctcacgcaggcaaatgcactgaaacccaggggca

SEQ ID NO: 197142 - DNA, 120 bp, Artificial Sequence
  ENSG00000113504_35 (sequence is synthesized)
cacgcgcgcagagtgaacagtgagttcccccgacagcccacgacagccaggactgccctccccaccccaccccaccccaggagcacggcacacagttcagcctctgagctggctcacacg

SEQ ID NO: 197143 - DNA, 120 bp, Artificial Sequence
  ENSG00000113504_36 (sequence is synthesized)
tgccatccccaccccggtgctccagggaaggaggacacggacccgacgtgggaggtcctcaggcagcagtggcgcctggtgtcaggtctgtctggctgagtcccgggcgtcccctgccat

SEQ ID NO: 197144 - DNA, 120 bp, Artificial Sequence
  ENSG00000113504_37 (sequence is synthesized)
ggcctgtgccttgcatggaggcggcggtggcactgaagagatagctttcaagggcccaacactttgcacttcggctggctgtgagtttctgctttgtaggttgtggtcacatttgcaggc

SEQ ID NO: 197145 - DNA, 120 bp, Artificial Sequence
  ENSG00000113504_38 (sequence is synthesized)
tgcgggcagtggcaccgacttgggcctccctttctatgtggcatatttatttatttaaacaccccagggagttacgtggtaacaaggttgtccataaagaggttgcttctatatactaga

SEQ ID NO: 197146 - DNA, 120 bp, Artificial Sequence
  ENSG00000113504_39 (sequence is synthesized)
ggccccagatggccaggccttgggctacgtctggcttgcatggtctcccaagggaatcagccccatcaacaaagttcaaatcggggcagaggctgcacttgtgcccccagatgtttctga

SEQ ID NO: 197147 - DNA, 120 bp, Artificial Sequence
  ENSG00000113504_40 (sequence is synthesized)
ggagccagactagggctggcattgctgtagagtgacggctgctgcccagagcgtgtcccagacatcacagcggggctcagcagttcccacagcctctgcctgccttggctaagcatgagt

SEQ ID NO: 197148 - DNA, 120 bp, Artificial Sequence
  ENSG00000113504_41 (sequence is synthesized)
taagcagcaaaacgctcctccatgtctggatggggccggcaggtcctgtgtcccctgcacctggaggagagcaggctagaggcacagcggccacatggtgctggctctgaacgttggttg

SEQ ID NO: 197149 - DNA, 120 bp, Artificial Sequence
  ENSG00000113504_42 (sequence is synthesized)
gtggctggaaaacagccctgcttctgagggccgctcagttctgcacacgaaaccacctcctgagggctcagctctgcccccgccctgggctgcagcctctgcacgcaagcaccaggcatc

SEQ ID NO: 197150 - DNA, 120 bp, Artificial Sequence
  ENSG00000113504_43 (sequence is synthesized)
ctttgtgttgtcaactccgtgtaaccagtaactacagccatttacaattgactccgtttccttttgtaggtttccctgtctgtctgtgttagtagaaaaataaaatcctatgaaatctga

SEQ ID NO: 197151 - DNA, 120 bp, Artificial Sequence
  ENSG00000113504_44 (sequence is synthesized)
aattcggctttgaaattacatcgccctaggacttcatgtccgcgtgcagagctgaaggcgtcctggtcccagggttgggatcccttggtctgatgtgtcgtctcttccgctggagcctag

SEQ ID NO: 197152 - DNA, 120 bp, Artificial Sequence
  ENSG00000113504_45 (sequence is synthesized)
cctggggggaacagatcctggcagtgctggcccggcagtgaggacagagtcccttccctgaccactgaagagcttcggggcaaccctgcaggccagtgggcccgttagagaacagggagc

SEQ ID NO: 197153 - DNA, 120 bp, Artificial Sequence
  ENSG00000113504_46 (sequence is synthesized)
cgcctgagtgggcactgaggggtccttttggtgccaaggccgggccctgagttcagccctgtggccgggcgctgagggatccttctagtgccaaggccgggagtccttgtaagacctggg

SEQ ID NO: 197154 - DNA, 120 bp, Artificial Sequence
  ENSG00000113520_0 (sequence is synthesized)
atcgttagcttctcctgataaactaattgcctcacattgtcactgcaaatcgacacctattaatgggtctcacctcccaactgcttccccctctgttcttcctgctagcatgtgccggca

SEQ ID NO: 197155 - DNA, 120 bp, Artificial Sequence
  ENSG00000113520_1 (sequence is synthesized)
actttgtccacggacacaagtgcgatatcaccttacaggagatcatcaaaactttgaacagcctcacagagcagaagactctgtgcaccgagttgaccgtaacagacatctttgctgcct

SEQ ID NO: 197156 - DNA, 120 bp, Artificial Sequence
  ENSG00000113520_2 (sequence is synthesized)
agaaggaaaccttctgcagggctgcgactgtgctccggcagttctacagccaccatgagaaggacactcgctgcctgggtgcgactgcacagcagttccacaggcacaagcagctgatcc

SEQ ID NO: 197157 - DNA, 120 bp, Artificial Sequence
  ENSG00000113520_3 (sequence is synthesized)
gattcctgaaacggctcgacaggaacctctggggcctggcgggcttgaattcctgtcctgtgaaggaagccaaccagagtacgttggaaaacttcttggaaaggctaaagacgatcatga

SEQ ID NO: 197158 - DNA, 120 bp, Artificial Sequence
  ENSG00000113520_4 (sequence is synthesized)
aaggctaaagacgatcatgagagagaaatattcaaagtgttcgagctgaatattttaatttatgagtttttgatagctttattttttaagtatttatatatttataactcatcataaaat

SEQ ID NO: 197159 - DNA, 120 bp, Artificial Sequence
  ENSG00000113520_5 (sequence is synthesized)
gtttcctcagttggagggagtgagagctgctcatcaaggacttctctgtccggttggaggttaactctgtctcttgctctctcatttctgcctggaccaagactctgtgcaccgagttga

SEQ ID NO: 197160 - DNA, 120 bp, Artificial Sequence
  ENSG00000113522_0 (sequence is synthesized)
acgtgatccgcagggcggccgaggcaggaagctgtgagtgcgcggttgcggggtcgcattgtggctacggctttgcgtccccggcgggcagccccaggctggtccccgcctccgctctcc

SEQ ID NO: 197161 - DNA, 120 bp, Artificial Sequence
  ENSG00000113522_1 (sequence is synthesized)
ccaccggcggggaaagcagctggtgtgggaggaaaggctccatcccccgccccctctctcccgctgttggctggcaggatcttttggcagtcctgtggcctcgctccccgcccggatcct

SEQ ID NO: 197162 - DNA, 120 bp, Artificial Sequence
  ENSG00000113522_2 (sequence is synthesized)
cctgaccctgagattcgcgggtctcacgtcccgtgcacgccttgcttcggcctcagttaagcctttgtgggctccaggtccctggtgagattagaaacgtttgcaaacatgtcccggatc

SEQ ID NO: 197163 - DNA, 120 bp, Artificial Sequence
  ENSG00000113522_3 (sequence is synthesized)
gaaaagatgagcattctgggcgtgcggagttttggaatagaggacaaagataagcaaattatcactttcttcagcccccttacaattttggttggacccaatggggcgggaaagacgacc

SEQ ID NO: 197164 - DNA, 120 bp, Artificial Sequence
  ENSG00000113522_4 (sequence is synthesized)
atcattgaatgtctaaaatatatttgtactggagatttccctcctggaaccaaaggaaatacatttgtacacgatcccaaggttgctcaagaaacagatgtgagagcccagattcgtctg

SEQ ID NO: 197165 - DNA, 120 bp, Artificial Sequence
  ENSG00000113522_5 (sequence is synthesized)
caatttcgtgatgtcaatggagaacttatagctgtgcaaagatctatggtgtgtactcagaaaagcaaaaagacagaatttaaaactctggaaggagtcattactagaacaaagcatggt

SEQ ID NO: 197166 - DNA, 120 bp, Artificial Sequence
  ENSG00000113522_6 (sequence is synthesized)
gaaaaggtcagtctgagctctaagtgtgcagaaattgaccgagaaatgatcagttctcttggggtttccaaggctgtgctaaataatgtcattttctgtcatcaagaagattctaattgg

SEQ ID NO: 197167 - DNA, 120 bp, Artificial Sequence
  ENSG00000113522_7 (sequence is synthesized)
cctttaagtgaaggaaaggctttgaagcaaaagtttgatgagattttttcagcaacaagatacattaaagccttagaaacacttcggcaggtacgtcagacacaaggtcagaaagtaaaa

SEQ ID NO: 197168 - DNA, 120 bp, Artificial Sequence
  ENSG00000113522_8 (sequence is synthesized)
gaatatcaaatggaactaaaatatctgaagcaatataaggaaaaagcttgtgagattcgtgatcagattacaagtaaggaagcccagttaacatcttcaaaggaaattgtcaaatcctat

SEQ ID NO: 197169 - DNA, 120 bp, Artificial Sequence
  ENSG00000113522_9 (sequence is synthesized)
gagaatgaacttgatccattgaagaatcgtctaaaagaaattgaacataatctctctaaaataatgaaacttgacaatgaaattaaagccttggatagccgaaagaagcaaatggagaaa

SEQ ID NO: 197170 - DNA, 120 bp, Artificial Sequence
  ENSG00000113522_10 (sequence is synthesized)
gataatagtgaactggaagagaaaatggaaaaggtttttcaagggactgatgagcaactaaatgacttatatcacaatcaccagagaacagtaagggagaaagaaaggaaattggtagac

SEQ ID NO: 197171 - DNA, 120 bp, Artificial Sequence
  ENSG00000113522_11 (sequence is synthesized)
tgtcatcgtgaactggaaaaactaaataaagaatctaggcttctcaatcaggaaaaatcagaactgcttgttgaacagggtcgtctacagctgcaagcagatcgccatcaagaacatatc

SEQ ID NO: 197172 - DNA, 120 bp, Artificial Sequence
  ENSG00000113522_12 (sequence is synthesized)
cgagctagagattcattaattcagtctttggcaacacagctagaattggatggctttgagcgtggaccattcagtgaaagacagattaaaaattttcacaaacttgtgagagagagacaa

SEQ ID NO: 197173 - DNA, 120 bp, Artificial Sequence
  ENSG00000113522_13 (sequence is synthesized)
gaaggggaagcaaaaactgccaaccaactgatgaatgactttgcagaaaaagagactctgaaacaaaaacagatagatgagataagagataagaaaactggactgggaagaataattgag

SEQ ID NO: 197174 - DNA, 120 bp, Artificial Sequence
  ENSG00000113522_14 (sequence is synthesized)
ttaaaatcagaaatcctaagtaagaagcagaatgagctgaaaaatgtgaagtatgaattacagcagttggaaggatcttcagacaggattcttgaactggaccaggagctcataaaagct

SEQ ID NO: 197175 - DNA, 120 bp, Artificial Sequence
  ENSG00000113522_15 (sequence is synthesized)
gaacgtgagttaagcaaggctgagaaaaacagcaatgtagaaaccttaaaaatggaagtaataagtctccaaaatgaaaaagcagacttagacaggaccctgcgtaaacttgaccaggag

SEQ ID NO: 197176 - DNA, 120 bp, Artificial Sequence
  ENSG00000113522_16 (sequence is synthesized)
atggagcagttaaaccatcatacaacaacacgtacccaaatggagatgctgaccaaagacaaagctgacaaagatgaacaaatcagaaaaataaaatctaggcacagtgatgaattaacc

SEQ ID NO: 197177 - DNA, 120 bp, Artificial Sequence
  ENSG00000113522_17 (sequence is synthesized)
tcactgttgggatattttcccaacaaaaaacagcttgaagactggctacatagtaaatcaaaagaaattaatcagaccagggacagacttgccaaattgaacaaggaactagcttcatct

SEQ ID NO: 197178 - DNA, 120 bp, Artificial Sequence
  ENSG00000113522_18 (sequence is synthesized)
gagcagaataaaaatcatataaataatgaactaaaaagaaaggaagagcagttgtccagttacgaagacaagctgtttgatgtttgtggtagccaggattttgaaagtgatttagacagg

SEQ ID NO: 197179 - DNA, 120 bp, Artificial Sequence
  ENSG00000113522_19 (sequence is synthesized)
cttaaagaggaaattgaaaaatcatcaaaacagcgagccatgctggctggagccacagcagtttactcccagttcattactcagctaacagacgaaaaccagtcatgttgccccgtttgt

SEQ ID NO: 197180 - DNA, 120 bp, Artificial Sequence
  ENSG00000113522_20 (sequence is synthesized)
cagagagtttttcagacagaggctgagttacaagaagtcatcagtgatttgcagtctaaactgcgacttgctccagataaactcaagtcaacagaatcagagctaaaaaaaaaggaaaag

SEQ ID NO: 197181 - DNA, 120 bp, Artificial Sequence
  ENSG00000113522_21 (sequence is synthesized)
cggcgtgatgaaatgctgggacttgtgcccatgaggcaaagcataattgatttgaaggagaaggaaataccagaattaagaaacaaactgcagaatgtcaatagagacatacagcgccta

SEQ ID NO: 197182 - DNA, 120 bp, Artificial Sequence
  ENSG00000113522_22 (sequence is synthesized)
aagaacgacatagaagaacaagaaacactcttgggtacaataatgcctgaagaagaaagtgccaaagtatgcctgacagatgttacaattatggagaggttccagatggaacttaaagat

SEQ ID NO: 197183 - DNA, 120 bp, Artificial Sequence
  ENSG00000113522_23 (sequence is synthesized)
gttgaaagaaaaattgcacaacaagcagctaagctacaaggaatagacttagatcgaactgtccaacaagtcaaccaggagaaacaagagaaacagcacaagttagacacagtttctagt

SEQ ID NO: 197184 - DNA, 120 bp, Artificial Sequence
  ENSG00000113522_24 (sequence is synthesized)
aagattgaattgaatcgtaagcttatacaggaccagcaggaacagattcaacatctaaaaagtacaacaaatgagctaaaatctgagaaacttcagatatccactaatttgcaacgtcgt

SEQ ID NO: 197185 - DNA, 120 bp, Artificial Sequence
  ENSG00000113522_25 (sequence is synthesized)
cagcaactggaggagcagactgtggaattatccactgaagttcagtctttgtacagagagataaaggatgctaaagagcaggtaagccctttggaaacaacattggaaaagttccagcaa

SEQ ID NO: 197186 - DNA, 120 bp, Artificial Sequence
  ENSG00000113522_26 (sequence is synthesized)
gaaaaagaagaattaatcaacaaaaaaaatacaagcaacaaaatagcacaggataaactgaatgatattaaagagaaggttaaaaatattcatggctatatgaaagacattgagaattat

SEQ ID NO: 197187 - DNA, 120 bp, Artificial Sequence
  ENSG00000113522_27 (sequence is synthesized)
attcaagatgggaaagacgactataagaagcaaaaagaaactgaacttaataaagtaatagctcaactaagtgaatgcgagaaacacaaagaaaagataaatgaagatatgagactcatg

SEQ ID NO: 197188 - DNA, 120 bp, Artificial Sequence
  ENSG00000113522_28 (sequence is synthesized)
agacaagatattgatacacagaagatacaagaaaggtggctacaagataaccttactttaagaaaaagaaatgaggaactaaaagaagttgaagaagaaagaaaacaacatttgaaggaa

SEQ ID NO: 197189 - DNA, 120 bp, Artificial Sequence
  ENSG00000113522_29 (sequence is synthesized)
atgggtcaaatgcaggttttgcaaatgaaaagtgaacatcagaagttggaagagaacatagacaatataaaaagaaatcataatttggcattagggcgacagaaaggttatgaagaagaa

SEQ ID NO: 197190 - DNA, 120 bp, Artificial Sequence
  ENSG00000113522_30 (sequence is synthesized)
attattcattttaagaaagaacttcgagaaccacaatttcgggatgctgaggaaaagtatagagaaatgatgattgttatgaggacaacagaacttgtgaacaaggatctggatatttat

SEQ ID NO: 197191 - DNA, 120 bp, Artificial Sequence
  ENSG00000113522_31 (sequence is synthesized)
tataagactcttgaccaagcaataatgaaatttcacagtatgaaaatggaagaaatcaataaaattatacgtgacctgtggcgaagtacctatcgtggacaagatattgaatacatagaa

SEQ ID NO: 197192 - DNA, 120 bp, Artificial Sequence
  ENSG00000113522_32 (sequence is synthesized)
atacggtctgatgccgatgaaaatgtatcagcttctgataaaaggcggaattataactaccgagtggtgatgctgaagggagacacagccttggatatgcgaggacgatgcagtgctgga

SEQ ID NO: 197193 - DNA, 120 bp, Artificial Sequence
  ENSG00000113522_33 (sequence is synthesized)
caaaaggtattagcctcactcatcattcgcctggccctggctgaaacgttctgcctcaactgtggcatcattgccttggatgagccaacaacaaatcttgaccgagaaaacattgaatct

SEQ ID NO: 197194 - DNA, 120 bp, Artificial Sequence
  ENSG00000113522_34 (sequence is synthesized)
atgtggagaaattctacaggattaaaaagaacatcgatcagtgctcagagattgtgaaatgcagtgttagctccctgggattcaatgttcattaaaaatatccaagatttaaatgccata

SEQ ID NO: 197195 - DNA, 120 bp, Artificial Sequence
  ENSG00000113522_35 (sequence is synthesized)
gaaatgtaggtcctcagaaagtgtataataagaaacttatttctcatatcaacttagtcaataagaaaatatattctttcaaaggaacattgtgtctaggattttggatgttgagaggtt

SEQ ID NO: 197196 - DNA, 120 bp, Artificial Sequence
  ENSG00000113522_36 (sequence is synthesized)
ctaaaatcatgaaacttgtttcactgaaaattggacagattgcctgtttctgatttgctgctcttcatcccattccaggcagcctctgtcaggccttcagggttcagcagtacagccgag

SEQ ID NO: 197197 - DNA, 120 bp, Artificial Sequence
  ENSG00000113522_37 (sequence is synthesized)
actcgactctgtgcctccctccccagtgcaaatgcatgcttcttctcaaagcactgttgagaaggagataattactgccttgaaaatttatggttttggtatttttttaaatcatagtta

SEQ ID NO: 197198 - DNA, 120 bp, Artificial Sequence
  ENSG00000113522_38 (sequence is synthesized)
aatgttacctctgaatttacttccttgcatgtggtttgaaaaactgagtattaatatctgaggatgaccagaaatggtgagatgtatgtttggctctgcttttaactttataaatccagt

SEQ ID NO: 197199 - DNA, 120 bp, Artificial Sequence
  ENSG00000113522_39 (sequence is synthesized)
gacctctctctctgggacttggtttccccaactaaaatttgaagtagttgaatggggtctcaaagtttgacaggaaccttaagtaatcatctaagtcagtacccaccaccttcttctcct

SEQ ID NO: 197200 - DNA, 120 bp, Artificial Sequence
  ENSG00000113522_40 (sequence is synthesized)
acatatcccttccagatggtcatccagactcagagctctctctacagagaggaaattctccactgtgcacacccacctttggaaagctctgaccacttgaggcctgatctgcccatcgtg

SEQ ID NO: 197201 - DNA, 120 bp, Artificial Sequence
  ENSG00000113522_41 (sequence is synthesized)
aagaagcctgtaacactcctctgcgtctatcctgtgtagcatactggcttcaccatcaatcctgattcctctctaagtgggcattgccatgtggaaggcaagccaggctcactcacagag

SEQ ID NO: 197202 - DNA, 120 bp, Artificial Sequence
  ENSG00000113522_42 (sequence is synthesized)
tcaaggcctgctccctgtagggtccaaccagacctggaagaacaggcctctccatttgctcttcagatgccacttctaagaaaagcctaatcacagtttttcctggaattgccagctgac

SEQ ID NO: 197203 - DNA, 120 bp, Artificial Sequence
  ENSG00000113522_43 (sequence is synthesized)
atcttgaatccttccattccacacagaatgcaaccaagtcacacgcttttgaattatgctttgtagagttttgtcattcagagtcagccaggaccataccgggtcttgattcagtcacat

SEQ ID NO: 197204 - DNA, 120 bp, Artificial Sequence
  ENSG00000113522_44 (sequence is synthesized)
ggcatggttttgtgccatctgtagctataatgagcatgtttgcctagacagcttttctcaactgggtccagaagagaattaagccctaaggtcctaaggcatctatctgtgctaggttaa

SEQ ID NO: 197205 - DNA, 120 bp, Artificial Sequence
  ENSG00000113522_45 (sequence is synthesized)
atggttggcccccaaagatagacaggtcctgatttctagaacccgtgactgttactttatacagcaaaggaaactttgcagatgtgattaaagctaaggaccttaagacagagtatcctg

SEQ ID NO: 197206 - DNA, 120 bp, Artificial Sequence
  ENSG00000113522_46 (sequence is synthesized)
ggggtggtggtggggtgggggggggtcctaaatgtaatcacgagtaagattaagagcaaatcaattctagtcatatattaaacatccacaataaccaagatatttttatcccaagaatgc

SEQ ID NO: 197207 - DNA, 120 bp, Artificial Sequence
  ENSG00000113522_47 (sequence is synthesized)
aagatttcagaaaatgaaaaatctgttgataaatccatcactataataaaaccgaaggtgaaaaaaattctgaaaaaattctagcagctatatttgataaaattcaacatctcctagctt

SEQ ID NO: 197208 - DNA, 120 bp, Artificial Sequence
  ENSG00000113522_48 (sequence is synthesized)
tagcaaactcacagttttgcaaataatattttcttaatgttatctgttgctaaatcaaaattaaacagtcatcttaactgcaaaataaaacatttctcagtaaatattaaagccagttac

SEQ ID NO: 197209 - DNA, 120 bp, Artificial Sequence
  ENSG00000113522_49 (sequence is synthesized)
cttctatcaacatgttaatgaaagtgctagttgttgcagcaaagaataacaaaggcaatacacgatcaatataggcagtgaaacaaaagtatcatttgcaagttaaaacagacttcccaa

SEQ ID NO: 197210 - DNA, 120 bp, Artificial Sequence
  ENSG00000113522_50 (sequence is synthesized)
ttttaaatctggtttccccctgaatatgtggcatccttggcagcacttctgagagtggctgctttcattccaagaagcccatgggtttggaggtgggataggtgcctttctggcttctca

SEQ ID NO: 197211 - DNA, 120 bp, Artificial Sequence
  ENSG00000113522_51 (sequence is synthesized)
ttgctgcttctagatcagtctccaaatatcccccttccccacattggaatgaatagccatcacagcatggatggaggttagaatgagccagactgcctgggctcaaatcctagcacacca

SEQ ID NO: 197212 - DNA, 120 bp, Artificial Sequence
  ENSG00000113522_52 (sequence is synthesized)
ctcactagctggggaccttgagcaagttatttgtcctgttttctgtttccttatatgtaaaagtgggtaaaatggtacatattttgtagggttgttatgaagattgaatgacattattta

SEQ ID NO: 197213 - DNA, 120 bp, Artificial Sequence
  ENSG00000113522_53 (sequence is synthesized)
caaactgcttagaactgcttgccacctactaaatactgtgtaagtgttcaagaaaaagctgtcttcatttcactcttgttgcagttatctttcattcccagcttggtcactccctcttat

SEQ ID NO: 197214 - DNA, 120 bp, Artificial Sequence
  ENSG00000113522_54 (sequence is synthesized)
ttgttgaagagtttagctcccggttcagtgtcaccccattactaataatcattgctgatttcaatatccaagtgatggtctaatacaactccttggcctctcagtcttttttattttttg

SEQ ID NO: 197215 - DNA, 120 bp, Artificial Sequence
  ENSG00000113522_55 (sequence is synthesized)
tcagcccctttttgtttcctccagtgagaagatactcagttctatggtcttattctagagccccgtccttttaataacaataactgcacccctccaaaatctcagttttaagcatctcac

SEQ ID NO: 197216 - DNA, 120 bp, Artificial Sequence
  ENSG00000113522_56 (sequence is synthesized)
tctccaataaccccatggtgtctacaattttcctgtggtcctcaaccccagcaattctttgaccccactgagatttcaatccattgattctatggctttttcacaggttgtttccctgat

SEQ ID NO: 197217 - DNA, 120 bp, Artificial Sequence
  ENSG00000113522_57 (sequence is synthesized)
gcctgtacttctctccttattcaacttaaattccatggctcatcattatgtcaccctccactgcattgtactcaaactgtcccgacaatccccagccctactggaatccagctctgcctc

SEQ ID NO: 197218 - DNA, 120 bp, Artificial Sequence
  ENSG00000113522_58 (sequence is synthesized)
ctccctgcaacacctgcacatcccgtttcctttgctgtttcctcctcatttccctggcccctcaatgtcacaggttttagtactcagagtctgcacctcttttcttctctgtgctcactt

SEQ ID NO: 197219 - DNA, 120 bp, Artificial Sequence
  ENSG00000113522_59 (sequence is synthesized)
atttggtgatctcatccagtctcatagctttaaattatcttagtttgggttctcccagaagcagagcgtaaaacaatgcttcacgtgaaagtaatcagtaggaaattggggaaattgtgt

SEQ ID NO: 197220 - DNA, 120 bp, Artificial Sequence
  ENSG00000113522_60 (sequence is synthesized)
atgaaagagaaagcagccaatgaaaagtttactattaagccagctacggtaagtgggcaattagagtttggtgccccagggagactctggggagtttggcaaaatatatacctcagaatt

SEQ ID NO: 197221 - DNA, 120 bp, Artificial Sequence
  ENSG00000113522_61 (sequence is synthesized)
atcccacctaaggggcaagagacctggagtatttatataacaacttgccagggttactgagtgaaggctattctagcacatgttagttactggcttgccatgtgtaccgacacagctgct

SEQ ID NO: 197222 - DNA, 120 bp, Artificial Sequence
  ENSG00000113522_62 (sequence is synthesized)
gacacagctgctttccacagtttaaaaagaaagtctgagcaacatagtgacatcccatctttacataaaatttttaaaaaattagcaaggcatggtggtgcacacctgtagtctcagcta

SEQ ID NO: 197223 - DNA, 120 bp, Artificial Sequence
  ENSG00000113522_63 (sequence is synthesized)
aggatccctggagtctgagggttcaaggctgcagtgagctgtgatttgtgccactgcaccccagcctgggtgggtggcagagtgagaccctgtctaaaaagacaaaaaaaaaaaaaaaaa

SEQ ID NO: 197224 - DNA, 120 bp, Artificial Sequence
  ENSG00000113522_64 (sequence is synthesized)
aaaagcagcagcagctgaaagttggcaggagcacactggcagttcctaggatcataggatataggcagggcactgaccactcctacaaccaccatctatacactgataactcataaatgt

SEQ ID NO: 197225 - DNA, 120 bp, Artificial Sequence
  ENSG00000113522_65 (sequence is synthesized)
ttgtgtccaatccagatctctcctaaatgcttgactgatatattcagctgcctgtggataactgggcatctatctgcacttgaatatctaataaacgtctaaaacttaaaatgaccaaaa

SEQ ID NO: 197226 - DNA, 120 bp, Artificial Sequence
  ENSG00000113522_66 (sequence is synthesized)
gagaataaaatgggaagttgagaactctccttaggagcagaagcgtccctagggctccacaggtgtaggcccttaaagtgccttagggtgtggcctgcaggctacagcgaccttaggagt

SEQ ID NO: 197227 - DNA, 120 bp, Artificial Sequence
  ENSG00000113522_67 (sequence is synthesized)
ttgcctgaagcagtctcggaaggatgtccggacctggcctggggacaaggtttacttaagaatcccacgataccgggagctgtcgccgctcactcagagttcagttcccactggatgccc

SEQ ID NO: 197228 - DNA, 120 bp, Artificial Sequence
  ENSG00000113522_68 (sequence is synthesized)
cccacttattgaggaagttctgctgttgtctgcagctgatctggaagcagtgattttgggcatccatcaagtagaacgtttactcaactttaatttttcagtcagaattgtgtaacctga

SEQ ID NO: 197229 - DNA, 120 bp, Artificial Sequence
  ENSG00000113522_69 (sequence is synthesized)
tcacaaattgatgtgaacagtctgtcactgtgggcttcatctttaatatcgtctcatcccttcttaaactgagttatccatttgtaaactgctgatttgtttggggcattgatctcataa

SEQ ID NO: 197230 - DNA, 120 bp, Artificial Sequence
  ENSG00000113522_70 (sequence is synthesized)
acttgttgtaaagtatcaatgatttcaccattcttccacccacacttcaccataaatttgatacttgttcttgcttcagtttaattggggctcttttcaaactgatgtcttaaccttgtt

SEQ ID NO: 197231 - DNA, 120 bp, Artificial Sequence
  ENSG00000113522_71 (sequence is synthesized)
agtgccttaaactagatcctattcagacatgttataacaagttagtatgagtttgtttcagtgcaaaacattttgaacttcatgcatagttttttttataatacacattttccatgaaca

SEQ ID NO: 197232 - DNA, 120 bp, Artificial Sequence
  ENSG00000113522_72 (sequence is synthesized)
ttttgaagacccctcatattttgcaaattaagtaaaatggtaacggatagtaatttaggcctcttgtcccttgaaaatttgtagacctatgaagattaaaatttaaaaattctattttca

SEQ ID NO: 197233 - DNA, 120 bp, Artificial Sequence
  ENSG00000113522_73 (sequence is synthesized)
ctactggagtgcaggcaaagcataattgatttgaaggagaaggaaataccagaattaagaaacaaactgcagaatgtcaatagagacatacagcgcctaaagaacgacatagaagaacaa

SEQ ID NO: 197234 - DNA, 120 bp, Artificial Sequence
  ENSG00000113522_74 (sequence is synthesized)
tcactggtcttccccacttgcatcctttggcacatacatttatgtattaggttctgtaaattatttgcttgggattgtatgactggagaaacatttcctacatttttccaaggcaggcag

SEQ ID NO: 197235 - DNA, 120 bp, Artificial Sequence
  ENSG00000113522_75 (sequence is synthesized)
aggcaaattataccactacagtaattccaaatttgtgtttcatttaaatgtcctccactattgtttcagtaatttttatgtatgtttctctaggcccttaaatgtgatatccctccatta

SEQ ID NO: 197236 - DNA, 120 bp, Artificial Sequence
  ENSG00000113522_76 (sequence is synthesized)
agtttgtttccaagaaagcaatattctcagttacttctgagacaggtaacttctctttcccttatttttaaagatatctattgctgggagcactgatcggaatggattacctctacattc

SEQ ID NO: 197237 - DNA, 120 bp, Artificial Sequence
  ENSG00000113522_77 (sequence is synthesized)
agattttttcagcaacaaggtttgtaacccttaaatagactttgtagtccattaagttattgaactgtgtttgcaatttggatgcttctttttaacagaaaaaatttaaaaagcagaaag

SEQ ID NO: 197238 - DNA, 120 bp, Artificial Sequence
  ENSG00000113522_78 (sequence is synthesized)
gtcatcagttactacctctcatccagcagcaaccattgggcatattttctttcacttgtctttctgtgcgtatatttatttacctgattgacagtataaatgtaatttttttcacttacc

SEQ ID NO: 197239 - DNA, 120 bp, Artificial Sequence
  ENSG00000113522_79 (sequence is synthesized)
attatgtcataggcattttacaagttattaaaaactcattgtaactgtaatcttagtgacagcataatatcccactgtatgaatatataccataatttactttgccagaaatttgatttt

SEQ ID NO: 197240 - DNA, 120 bp, Artificial Sequence
  ENSG00000113522_80 (sequence is synthesized)
ttgaatcctagcaagcatcttgctgaggcttaacctgggatcaaagaccatgaacccccagaaaccaggcagaattctgtgtacatttttctgggagcaggcccatgagtaggactggca

SEQ ID NO: 197241 - DNA, 120 bp, Artificial Sequence
  ENSG00000113525_0 (sequence is synthesized)
atgcactttctttgccaaaggcaaacgcagaacgtttcagagccatgaggatgcttctgcatttgagtttgctagctcttggagctgcctacgtgtatgccatccccacagaaattccca

SEQ ID NO: 197242 - DNA, 120 bp, Artificial Sequence
  ENSG00000113525_1 (sequence is synthesized)
caagtgcattggtgaaagagaccttggcactgctttctactcatcgaactctgctgatagccaatgagactctgaggattcctgttcctgtacataaaaatcaccaactgtgcactgaag

SEQ ID NO: 197243 - DNA, 120 bp, Artificial Sequence
  ENSG00000113525_2 (sequence is synthesized)
aaatctttcagggaataggcacactggagagtcaaactgtgcaagggggtactgtggaaagactattcaaaaacttgtccttaataaagaaatacattgacggccaaaaaaaaaagtgtg

SEQ ID NO: 197244 - DNA, 120 bp, Artificial Sequence
  ENSG00000113525_3 (sequence is synthesized)
actggtttgttgcagccaaagattttggaggagaaggacattttactgcagtgagaatgagggccaagaaagagtcaggccttaattttcagtataatttaacttcagagggaaagtaaa

SEQ ID NO: 197245 - DNA, 120 bp, Artificial Sequence
  ENSG00000113525_4 (sequence is synthesized)
tatttcaggcatactgacactttgccagaaagcataaaattcttaaaatatatttcagatatcagaatcattgaagtattttcctccaggcaaaattgatatacttttttcttatttaac

SEQ ID NO: 197246 - DNA, 120 bp, Artificial Sequence
  ENSG00000113525_5 (sequence is synthesized)
ttcctccaggcaaaattgatatacttttttcttatttaacttaacattctgtaaaatgtctgttaacttaatagtatttatgaaatggttaagaatttggtaaattagtatttatttaat

SEQ ID NO: 197247 - DNA, 120 bp, Artificial Sequence
  ENSG00000113525_6 (sequence is synthesized)
ttaatctagccacagtcatagtagaacatagccgatctgaaaaaaacattcccaatatttatgtattttagcataaaattctgtttagtggtctaccttatactttgttttgcacacatc

SEQ ID NO: 197248 - DNA, 120 bp, Artificial Sequence
  ENSG00000113525_7 (sequence is synthesized)
ttttaagaggaagttaattttctgattttaagaaatgcaaatgtggggcaatgatgtattaacccaaagattcttcgtaatagaaaatgtttttaaaggggggaaacagggatttttatt

SEQ ID NO: 197249 - DNA, 120 bp, Artificial Sequence
  ENSG00000113525_8 (sequence is synthesized)
attaaaagataaaagtaaatttattttttaagatataaggcattggaaacatttagtttcacgatatgccattattaggcattctctatctgattgttagaaattattcatttcctcaaa

SEQ ID NO: 197250 - DNA, 120 bp, Artificial Sequence
  ENSG00000113525_9 (sequence is synthesized)
cactgctttctactcatcgaactctgctgatagccaatgaggtaattttctttatgattcctacagtctgtaaagtgcataggtaatcatttgtgatggttcctttactatatatagaga

SEQ ID NO: 197251 - DNA, 120 bp, Artificial Sequence
  ENSG00000113525_10 (sequence is synthesized)
tctgttataaataataagattctgagcacattagtacatgggtgataactacatcaccagcaaacattctgttaaaagttatgaatgctggtgtgctgtaaaaatgattgtatttccttt

SEQ ID NO: 197252 - DNA, 120 bp, Artificial Sequence
  ENSG00000113525_11 (sequence is synthesized)
cctctccagactctgaggattcctgttcctgtacataaaaatcaccaactgtgcactgaagaaatctttcagggaataggcacactggagagtcaaactgtgcaagggggtactgtggaa

SEQ ID NO: 197253 - DNA, 120 bp, Artificial Sequence
  ENSG00000113525_12 (sequence is synthesized)
gggcagcggacttccggatctttgctggggatgggcagcctggagaggcactgacttttggaaggggagaccaagacctgtgacggatggcgcttcccaaagcttgatcctgggactcct

SEQ ID NO: 197254 - DNA, 120 bp, Artificial Sequence
  ENSG00000113525_13 (sequence is synthesized)
ggaagcgggactctgaggattcctgttcctgtacataaaaatcaccaactgtgcactgaagaaatctttcagggaataggcacactggagagtcaaactgtgcaagggggtactgtggaa

SEQ ID NO: 197255 - DNA, 120 bp, Artificial Sequence
  ENSG00000113532_0 (sequence is synthesized)
gacgcccccgaacccagctgcagaagctgccgccacctccaatgcacaaggtgtctcatctgaaaagaaacctgagccccagggaggcggcgcggagcgaccctggcagagctggcgcaa

SEQ ID NO: 197256 - DNA, 120 bp, Artificial Sequence
  ENSG00000113532_1 (sequence is synthesized)
acagggcgagaggtcgctgggcagcgttcgaggaccagagggagctcggccacagaagaccccagtgatctgatcccgggatcccggctccaagctctcctcgcattttacagatttcac

SEQ ID NO: 197257 - DNA, 120 bp, Artificial Sequence
  ENSG00000113532_2 (sequence is synthesized)
ccccgcgactatctccccaaaacggagcctttatatcaagagaaggtgcgggagctggggcaaccaggactttctcgggcacccaagatgcgctccattaggaagaggtggacgatctgc

SEQ ID NO: 197258 - DNA, 120 bp, Artificial Sequence
  ENSG00000113532_3 (sequence is synthesized)
acaataagtctgctcctgatcttttataagacaaaagaaatagcaagaactgaggagcaccaggagacgcaactcatcggagatggtgaattgtctttgagtcggtcacttgtcaatagc

SEQ ID NO: 197259 - DNA, 120 bp, Artificial Sequence
  ENSG00000113532_4 (sequence is synthesized)
tctgataaaatcattcgaaaggctggctcttcaatcttccagcacaatgtagaaggttggaaaatcaattcctctttggtcctagagataaggaagaacatacttcgtttcttagatgca

SEQ ID NO: 197260 - DNA, 120 bp, Artificial Sequence
  ENSG00000113532_5 (sequence is synthesized)
gaacgagatgtgtcagtggtcaagagcagttttaagcctggtgatgtcatacactatgtgcttgacaggcgccggacactaaacatttctcatgatctacatagcctcctacctgaagtt

SEQ ID NO: 197261 - DNA, 120 bp, Artificial Sequence
  ENSG00000113532_6 (sequence is synthesized)
tcaccaatgaagaatcgcaggtttaagacctgtgcagttgttggaaattctggcattctgttagacagtgaatgtggaaaggagattgacagtcacaattttgtaataaggtgtaatcta

SEQ ID NO: 197262 - DNA, 120 bp, Artificial Sequence
  ENSG00000113532_7 (sequence is synthesized)
gctcctgtggtggagtttgctgcagatgtgggaactaaatcagattttattaccatgaatccatcagttgtacaaagagcatttggaggctttcgaaatgagagtgacagagaaaaattt

SEQ ID NO: 197263 - DNA, 120 bp, Artificial Sequence
  ENSG00000113532_8 (sequence is synthesized)
gtgcatagactttccatgctgaatgacagtgtcctttggattcctgctttcatggtcaaaggaggagagaagcacgtggagtgggttaatgcattaatccttaagaataaactgaaagtg

SEQ ID NO: 197264 - DNA, 120 bp, Artificial Sequence
  ENSG00000113532_9 (sequence is synthesized)
cgaactgcctatccgtcattgagacttattcatgctgtcagaggttactggctgaccaacaaagttcctatcaaaagacccagcacaggtcttctcatgtatacacttgccacaagattc

SEQ ID NO: 197265 - DNA, 120 bp, Artificial Sequence
  ENSG00000113532_10 (sequence is synthesized)
tgtgatgaaattcacctgtatggattctggcccttccctaaggatttaaatggaaaagcggtcaaatatcattattatgatgacttaaaatataggtacttttccaatgcaagccctcac

SEQ ID NO: 197266 - DNA, 120 bp, Artificial Sequence
  ENSG00000113532_11 (sequence is synthesized)
agaatgccattagaattcaaaacattaaatgtgctacataatagaggagctctaaaactgacaacaggaaagtgtgtaaagcaataaagcacattttgaaacaaacaatatgcacttctt

SEQ ID NO: 197267 - DNA, 120 bp, Artificial Sequence
  ENSG00000113532_12 (sequence is synthesized)
ttctgaagatgcttccgaagatttgaaaataggatccaaaacacggctgggtttcagcatccaccaatgaactgaaaggtgaataaaggacgttcatgagaaatcgactaccagctgatg

SEQ ID NO: 197268 - DNA, 120 bp, Artificial Sequence
  ENSG00000113532_13 (sequence is synthesized)
aaatacctgcaaagtgctctaaaaattaaatattttgactttaagggtcctagtaagtgccacttccactaagaatacagtttgaatgtataatcagtagtgtttacaagatccaacagt

SEQ ID NO: 197269 - DNA, 120 bp, Artificial Sequence
  ENSG00000113532_14 (sequence is synthesized)
gcactcatcattagttaacaaagcaaatatgttcatcactgtcaggctgcccacagcaacaccaagcatattagaagaggaaccccaggaacgcaactcagaccttgggaaattaaacca

SEQ ID NO: 197270 - DNA, 120 bp, Artificial Sequence
  ENSG00000113532_15 (sequence is synthesized)
tccttgtcagcagaagccaagatggaagcagtttgagcaatgaaatccgtaagattaaacaactcaagtaaatgcttcagtcaggactctgagtctgatcatgaattttatgttttaatt

SEQ ID NO: 197271 - DNA, 120 bp, Artificial Sequence
  ENSG00000113532_16 (sequence is synthesized)
tatgttttttttttgtcttctggaatctcttttggtttggatattgggatgcttagaaatcctttctgagatgcatatgagtgaggaaataaactttaagtaattatttttaaagttctt

SEQ ID NO: 197272 - DNA, 79 bp, Artificial Sequence
  ENSG00000113532_17 (sequence is synthesized)
atttttaaaaaagttttattttgcacggctctaaacctccatgttattttccagtggtgtagaaggtaccagctaaagt

SEQ ID NO: 197273 - DNA, 120 bp, Artificial Sequence
  ENSG00000113532_18 (sequence is synthesized)
catgttattttccagtggtgtagaaggtaccagctaaagtgaaccactatgtaatattaggccattctaaaggaaagatgttccatgtcatcagagatggtaaaataggccgggaaaaaa

SEQ ID NO: 197274 - DNA, 120 bp, Artificial Sequence
  ENSG00000113532_19 (sequence is synthesized)
aaatctttggtaccaaagattacacttgtgtttctacacagcaaaccatttttctttcatgaaaataatatattattaacatgaatatattattttgctattaatgtgaaagttgtctct

SEQ ID NO: 197275 - DNA, 120 bp, Artificial Sequence
  ENSG00000113532_20 (sequence is synthesized)
aaatattttttaattttcaaactcatactttattttcatttgaaatgtttttcacaccttttgcattacataataattttgtggaagcattttgccctttagaataaatattagattgat

SEQ ID NO: 197276 - DNA, 120 bp, Artificial Sequence
  ENSG00000113532_21 (sequence is synthesized)
atagctgaaatgtgacttccagttctttgatattccccttgttattcaaatagaaatatggaaatgctttatatattactgttaaatttcttagtgcagaaataacattattaatagagt

SEQ ID NO: 197277 - DNA, 120 bp, Artificial Sequence
  ENSG00000113532_22 (sequence is synthesized)
attgttttcaaaacagagatgattaatttcaagaggtttaacagtgaaattgtgtcaatattttgcatttaaaatgaatttaattgaccgatattttctgtagttaaatttagtcacaat

SEQ ID NO: 197278 - DNA, 120 bp, Artificial Sequence
  ENSG00000113532_23 (sequence is synthesized)
atcacatatgttcttcaagaaacacatgaaattattaataaagtaattaaaaaatttttaatgtataacagaattgaccaataggccagttttctggtaacttatgatagtagattgttt

SEQ ID NO: 197279 - DNA, 120 bp, Artificial Sequence
  ENSG00000113532_24 (sequence is synthesized)
gaaatggcatggggaatatatatgttttgtttcttagggaaaacagtctgagaaatgaataaaaagcatgaagtacgtgtgtgtgtgtgtgtgttaccatggaaaaggatattcacagta

SEQ ID NO: 197280 - DNA, 120 bp, Artificial Sequence
  ENSG00000113532_25 (sequence is synthesized)
gtacagttctcaatatttttaattagatgtcatatttttttaatatagtaaaaccttgggatatagaatattacatcttttgagaatgtatgtgtctctaagtaagtaaaatctaatgcg

SEQ ID NO: 197281 - DNA, 120 bp, Artificial Sequence
  ENSG00000113532_26 (sequence is synthesized)
tataggagactgatagctaaaaatgaatggaacattaatgtacttttataattaaacctcttatctatcagaaattgtaagagaatagatacatgttttgaatgtaaagttgaaaagtct

SEQ ID NO: 197282 - DNA, 120 bp, Artificial Sequence
  ENSG00000113532_27 (sequence is synthesized)
ggtttacttaataaattgaaagtgatttataaaatctaaatttggactacttgcaaatgataagctattctagtagcctttagtttaaatccaacagaaatctagaagtcacaagcaaat

SEQ ID NO: 197283 - DNA, 120 bp, Artificial Sequence
  ENSG00000113532_28 (sequence is synthesized)
aagcaaatatcttaaaggtaaaatccatctgggcactcatttaaagtatatcttaaaaaagcagcagcaaggtaccttgccatttttagcatattttcttcctttttcttttttcttttt

SEQ ID NO: 197284 - DNA, 120 bp, Artificial Sequence
  ENSG00000113532_29 (sequence is synthesized)
tgggattacaggtgtgagccaccgcagccggaccatttttagtatattttcagtaaatacatttaaacaatgttaaggccacagcacacatatctcagccattcattgttctgtgcattg

SEQ ID NO: 197285 - DNA, 120 bp, Artificial Sequence
  ENSG00000113532_30 (sequence is synthesized)
ttctgtgcattgatgtttatctcatagatgcattgagtagtgcctttttagctttttcacattactttgtcaccatatcctttgtgttctctaaatacattgcccacttccaaaaatgtt

SEQ ID NO: 197286 - DNA, 120 bp, Artificial Sequence
  ENSG00000113532_31 (sequence is synthesized)
cagcatgaaaaaaagggcttcagtgtcgattgagattgcttttgttcatctcagggatttcaatagtcaagaatgaattcagttaaaggtatttagggttcaaagaagacaaactgtaca

SEQ ID NO: 197287 - DNA, 120 bp, Artificial Sequence
  ENSG00000113532_32 (sequence is synthesized)
agcccatttcattccttgttgtatacctttccatctgccctcccattttaactatctactgtggcctttttatggaaacagagcaagatcaatgaaggctaatggcaagaataagaaaaa

SEQ ID NO: 197288 - DNA, 120 bp, Artificial Sequence
  ENSG00000113532_33 (sequence is synthesized)
gagttgagatttaaccaatagcggagcataaaggatcatgacaaaatcaaattataaaagcatacttgaaataggtggagctttttcttttgaaaatatatattcacaattttaatattt

SEQ ID NO: 197289 - DNA, 120 bp, Artificial Sequence
  ENSG00000113532_34 (sequence is synthesized)
taatttattttttactatttaaccctgtacttggcaatgctcaggcagctgattgtgaaatattcttgtcctttacagaacatggttgttattgtgctgttgacatgaatagaccatgga

SEQ ID NO: 197290 - DNA, 120 bp, Artificial Sequence
  ENSG00000113532_35 (sequence is synthesized)
aacattttcatcattattattcagcctgtgctgtagttaatgttaagttgctgaaataaaaagtgagcaagtaatagattttcttggcaaatctaatgattcagcccacaggactgttga

SEQ ID NO: 197291 - DNA, 120 bp, Artificial Sequence
  ENSG00000113532_36 (sequence is synthesized)
aactactgcggaagtttttctatctgaaagaaggtgctgggcattcaaatgtgttcatgtattgtatatcatatgaattgtatatcaattactaatgggaatttctacatatatgcttac

SEQ ID NO: 197292 - DNA, 120 bp, Artificial Sequence
  ENSG00000113532_37 (sequence is synthesized)
aaaagcaatttatttaagtaatgctaggggtagtgtacataccaattagttattcagctactatacagaaaaaggatgaacaaattaatttatttctaattgagccagttagacataatg

SEQ ID NO: 197293 - DNA, 120 bp, Artificial Sequence
  ENSG00000113532_38 (sequence is synthesized)
catataacgtgatatttggttcatgaaagagttgttttcatgtggttattgtagggagtatatataattgtggaaggggtatgggaagagttgtgtatagttagttgttatctctacaag

SEQ ID NO: 197294 - DNA, 120 bp, Artificial Sequence
  ENSG00000113532_39 (sequence is synthesized)
tttgaaagttttcccatcaaacattatcaatataccaatgttttaaaaattgagtgagggttattatttgtatttgatgaaagaaaatccaaataaagcccacctagaaatagatatttt

SEQ ID NO: 197295 - DNA, 120 bp, Artificial Sequence
  ENSG00000113532_40 (sequence is synthesized)
attatatatgtgctatagatatacctatatagtacaaatagacatgtgtgatgcatatatacaatgttatatatgtgtatatgtctgtatacacactgagtctgtaatatgtatacacta

SEQ ID NO: 197296 - DNA, 120 bp, Artificial Sequence
  ENSG00000113532_41 (sequence is synthesized)
aatttgtgttatgctaacatcttcagggtctgcactgtgaactcccctggagataagtaagtccactttagaataaagaagttcttttgagacttcagttactaacgtgctttaagaggt

SEQ ID NO: 197297 - DNA, 120 bp, Artificial Sequence
  ENSG00000113532_42 (sequence is synthesized)
atctactttataactgaattctatgtcgttcatacgtagagttacagtaagggtctagtatgtccaaatcttaataataaagaagaaaagtaaaggcttcaagctagcaatgtattcgaa

SEQ ID NO: 197298 - DNA, 120 bp, Artificial Sequence
  ENSG00000113532_43 (sequence is synthesized)
ttacagttttcagattgtggctccaggccttgtgtttctcatttaagtagcaccttttaataaaaaccgtttctttgtgtaggcaaaagcacaagtgtttcaaatgtaaatagcaggaaa

SEQ ID NO: 197299 - DNA, 120 bp, Artificial Sequence
  ENSG00000113532_44 (sequence is synthesized)
aaaaaagagtttacagagatagcattgctgcacagaataattgctactgagtatttcttatagaatttgtggaactgaaagatgaggtttattctgtcaagttcaagttcattctgttca

SEQ ID NO: 197300 - DNA, 120 bp, Artificial Sequence
  ENSG00000113532_45 (sequence is synthesized)
acactgttttcttattgtttgtgtatagcaaccgggtattattgttttatcatttgtaaaattgtaaaataaattaatccctttttttcactgtttctcttatctcatatatccaagccc

SEQ ID NO: 197301 - DNA, 120 bp, Artificial Sequence
  ENSG00000113532_46 (sequence is synthesized)
ttggttatactttgtatgtcaatgttaggtgatcatttttaacaagctttggcttgtgctttgcttttccactccccttagccctagtggttggcaattaggcaaaccatttatttttaa

SEQ ID NO: 197302 - DNA, 120 bp, Artificial Sequence
  ENSG00000113532_47 (sequence is synthesized)
gtgtatacatgggaatatgaacaatgtcaaaaaccccatgaatattaggaaatccttaacgatattttgtgtagcacattctgtttgcggttgagggaataaagtatttcacaagtgaca

SEQ ID NO: 197303 - DNA, 120 bp, Artificial Sequence
  ENSG00000113532_48 (sequence is synthesized)
aacctttcagtttaaggctgatattgcctaacaaaaaaaatagtttttatgactaagatatttagtttcactgaaaatgaaacagattttcagattccttcagttatctttaatgttaaa

SEQ ID NO: 197304 - DNA, 120 bp, Artificial Sequence
  ENSG00000113532_49 (sequence is synthesized)
atagttgctcaatttaggtgtttgcttatctaatgaggattcaaaagttgaattaggatcacaaaatgacagttaaagacctgtgaagggtctttttttgtttgttcttttgagtcatgc

SEQ ID NO: 197305 - DNA, 120 bp, Artificial Sequence
  ENSG00000113532_50 (sequence is synthesized)
aaaaagtgatcctgtcatagcaacaagattcacacagctttttttggtgaggtgaggggggaggcaaatggcaattttattaaatttaatattccacacaaacttttttcttagtatctc

SEQ ID NO: 197306 - DNA, 120 bp, Artificial Sequence
  ENSG00000113532_51 (sequence is synthesized)
cacaaacttttttcttagtatctcttcttcatactcattagttttgtgtgattttatttgttgtataaagattatgaatattactatggaatgatgtaatagatttatgttaatgttact

SEQ ID NO: 197307 - DNA, 120 bp, Artificial Sequence
  ENSG00000113532_52 (sequence is synthesized)
tagtaagaacatagtttagcaagtttatatttgatatcctgagccatatttctttaatttctctttatatgtggtatttgtgtatgttagtatatttgaattttatgtttttttaacata

SEQ ID NO: 197308 - DNA, 120 bp, Artificial Sequence
  ENSG00000113532_53 (sequence is synthesized)
attaagcgtgcatgtttgtttttcattaacggttaaaagatatttgatgaattgtgtgtttgattaacctattaactgaaaaaaactcaacagtagaaatggaattataatcacatcata

SEQ ID NO: 197309 - DNA, 120 bp, Artificial Sequence
  ENSG00000113532_54 (sequence is synthesized)
aatataagcagtttttaatgatcaatttttatatctgtacagtttttttggattgttttagttccttagaaaaattagctaaatgacagaaacatggatattgaaatatgaaatagtaca

SEQ ID NO: 197310 - DNA, 120 bp, Artificial Sequence
  ENSG00000113532_55 (sequence is synthesized)
atataaagatagatagaaaagtatgctgagttgacatgttgaaaaacacagtctcttgaagatatactggaatacattatttttgaatattttgaatattttttgaatatttttaaataa

SEQ ID NO: 197311 - DNA, 120 bp, Artificial Sequence
  ENSG00000113532_56 (sequence is synthesized)
agtcttaaaagcataaataggtaactacttttaaaaaaaaagtcatgagaaatcacactcaagcattatcaagtgaagaaaattcataatagcaaataaaactgcaaacattttacctta

SEQ ID NO: 197312 - DNA, 120 bp, Artificial Sequence
  ENSG00000113532_57 (sequence is synthesized)
tcaaatcatctcattgactgtctttctacccaagccacgtggagaggccagttttgagttttgagtaaactggaatggaggttcggctccagatcccggtccagtattcaagtgagagat

SEQ ID NO: 197313 - DNA, 120 bp, Artificial Sequence
  ENSG00000113552_0 (sequence is synthesized)
gcagtcgctgcagccgccgcgggaggcgtccgtgacaagatgaagctcatcatcctggagcactattctcaggcgagcgagtgggcggctaaatacatcaggaaccgcatcatccagttt

SEQ ID NO: 197314 - DNA, 120 bp, Artificial Sequence
  ENSG00000113552_1 (sequence is synthesized)
aacccagggccagagaagtacttcaccctggggctccccactgggagtaccccacttggctgctacaagaagctgattgaatactataagaatggggacctgtcctttaaatatgtgaag

SEQ ID NO: 197315 - DNA, 120 bp, Artificial Sequence
  ENSG00000113552_2 (sequence is synthesized)
accttcaacatggatgagtacgtgggccttcctcgagaccacccggagagttaccactccttcatgtggaacaacttcttcaagcacattgacatccacccagaaaacacccacattctg

SEQ ID NO: 197316 - DNA, 120 bp, Artificial Sequence
  ENSG00000113552_3 (sequence is synthesized)
gatgggaatgcagtcgacctacaggcagaatgtgatgcctttgaagagaagatcaaggctgcaggtgggatcgagctatttgttggaggcatcggccctgatggacacattgccttcaac

SEQ ID NO: 197317 - DNA, 120 bp, Artificial Sequence
  ENSG00000113552_4 (sequence is synthesized)
gagccaggctccagtctggtgtccaggacccgtgtgaagacgctggccatggataccatcctggccaatgctaggttcttcgatggagaactcaccaaggtgcccaccatggccttgacg

SEQ ID NO: 197318 - DNA, 120 bp, Artificial Sequence
  ENSG00000113552_5 (sequence is synthesized)
gtgggggtgggcactgtcatggatgctagagaggtgatgatccttatcacaggtgctcacaaggcatttgctctgtacaaggccatcgaggagggagtgaaccacatgtggaccgtgtct

SEQ ID NO: 197319 - DNA, 120 bp, Artificial Sequence
  ENSG00000113552_6 (sequence is synthesized)
gccttccagcagcatccccgcaccgtgtttgtgtgtgacgaggatgccaccttggagctgaaagtgaagactgtcaagtatttcaaaggtttaatgcttgttcataacaagttggtggac

SEQ ID NO: 197320 - DNA, 120 bp, Artificial Sequence
  ENSG00000113552_7 (sequence is synthesized)
cccttgtacagtatcaaagagaaagaaactgagaaaagccaatcttcgaagaaaccatacagcgattagcctgtgctgggacctagtgtcaagtacccatagggaaaggcaggtctttct

SEQ ID NO: 197321 - DNA, 120 bp, Artificial Sequence
  ENSG00000113552_8 (sequence is synthesized)
ggaaattgtctttagaagaaagaattgtatttctttaatctagtatggttactccagataagtgggtgaacttattgttcttggccatgaggctgggagcctagtcacggagtttagcta

SEQ ID NO: 197322 - DNA, 120 bp, Artificial Sequence
  ENSG00000113552_9 (sequence is synthesized)
cttcagccatggttcacacatatgacacactcccgtcaggaatttctctccttacacgcactgattttcaagtgggagggaattaggggcttatgtatattggataccacctctttgaag

SEQ ID NO: 197323 - DNA, 120 bp, Artificial Sequence
  ENSG00000113552_10 (sequence is synthesized)
agtcttgagagtccttcttgcacaggcctgccccttggttgagaaccattgttccaagtgaaggcacaaactctcaatatctaaaataagtgcaaggaagcagtctctttggtcagtaac

SEQ ID NO: 197324 - DNA, 120 bp, Artificial Sequence
  ENSG00000113552_11 (sequence is synthesized)
aagtgcaatggaaagaaaacgatcccttccttcttccactttcacagcttttctctgaactaggagaacctgggggtggatttgggtgggtggggccaaagaggaggcttctattgataa

SEQ ID NO: 197325 - DNA, 120 bp, Artificial Sequence
  ENSG00000113552_12 (sequence is synthesized)
atccagagcctcaaggggcccagccacgtcaaacttctctccctcagggactctccagcaccaaaaggcagaaggtggaagccgtttttcccccagagccctgtgtttttgtgaaagcct

SEQ ID NO: 197326 - DNA, 120 bp, Artificial Sequence
  ENSG00000113552_13 (sequence is synthesized)
cactgtggctcctctgttttacatactcattagtaagtgggaggtccactggggcaacagacactgccacaatttcagtgttgtgttcagccaaggggacggtctgggcaggcagcttaa

SEQ ID NO: 197327 - DNA, 120 bp, Artificial Sequence
  ENSG00000113552_14 (sequence is synthesized)
gtgtgagtttagtcacaactcctgagtgtcccgctctcctgcttacctaggaggtgagtgccaggaaaatacaccaaatgcttctagtattgtttccccacttaaaatagtcctgcttaa

SEQ ID NO: 197328 - DNA, 120 bp, Artificial Sequence
  ENSG00000113552_15 (sequence is synthesized)
attcacatggtgtggtctgatgttctgagagcatcaggaaatacaacccttttgcccatttacccttctccccggatcccaaggtggtctgttgctctggcttcctttcattgtcttagg

SEQ ID NO: 197329 - DNA, 120 bp, Artificial Sequence
  ENSG00000113552_16 (sequence is synthesized)
ccttcatggagtggatgctgcctcctcctggctgtttttgtgcctgtttgaagctactgctgcctccatttctgggaaagacctttgagagcctagcccaggcctaagggctatgtttgg

SEQ ID NO: 197330 - DNA, 120 bp, Artificial Sequence
  ENSG00000113552_17 (sequence is synthesized)
taccagtgttttgtctttagcttttctatgtgattgtgccgtcattctgttttaagctcatggatcaatggatttgtttacaatgtgatattttctattaaatccagtattttcaaataa

SEQ ID NO: 197331 - DNA, 120 bp, Artificial Sequence
  ENSG00000113552_18 (sequence is synthesized)
ggcgcagtcgctgcagccgccgcgggaggcgtccgtgaggaaacggctcagagagaacttaggtcctttgaccgaggtcctgcaggtggacaagatgaagctcatcatcctggagcacta

SEQ ID NO: 197332 - DNA, 120 bp, Artificial Sequence
  ENSG00000113552_19 (sequence is synthesized)
cggggaccttcctcgcgggccggagcgcggagcgctgccccagccctacggcactcggggtcgggaccccggggagccgccctcacacattttccaggagggatcggaggggcgatgggg

SEQ ID NO: 197333 - DNA, 120 bp, Artificial Sequence
  ENSG00000113552_20 (sequence is synthesized)
tggtaatgggggtgggggacacgctgtaccccaccgacgaccgcgcgggccaccttcgcctctttccttcacactcccactaaccgcagtgctgggggaacaaaatgtcctccttctgga

SEQ ID NO: 197334 - DNA, 120 bp, Artificial Sequence
  ENSG00000113552_21 (sequence is synthesized)
gcgattaccttttcccttttgtgctttgggggaaactgaagacccagaggggttcgcaaagcaagtctgtgaagtaggtactattgtcccaatttttacataggaggaaacggctcagag

SEQ ID NO: 197335 - DNA, 120 bp, Artificial Sequence
  ENSG00000113552_22 (sequence is synthesized)
agcaaggtgggccagtaggaagacccctccgctagtccagagagagcacacagctccccaggcagagctcattgccccacctgctctagtggcccagcatgatcccatgacctctctact

SEQ ID NO: 197336 - DNA, 120 bp, Artificial Sequence
  ENSG00000113552_23 (sequence is synthesized)
tctggaggaagagtcttggggtagacggcggggagggggtagggtatcccgttccggtaggggcagggatgagggaggcggggctgagccgagcatctatctggatggtaacagccaacg

SEQ ID NO: 197337 - DNA, 120 bp, Artificial Sequence
  ENSG00000113552_24 (sequence is synthesized)
tagaaaatactaagttgtttacatgcattctctcatttcatattacccgtcgtgaagtctgtgaagtaggtactattgtcccaatttttacataggaggaaacggctcagagagaactta

SEQ ID NO: 197338 - DNA, 120 bp, Artificial Sequence
  ENSG00000113552_25 (sequence is synthesized)
ggtcctttgaccgaggtcctgcaggtggtaagtgaaggagctgagattagaacccagatctgcccccagtggcgcctcctcgtggtctgtgggtggtggagacgactggcctagcctctt

SEQ ID NO: 197339 - DNA, 120 bp, Artificial Sequence
  ENSG00000113552_26 (sequence is synthesized)
agctcctctgtgaatagaaaggcctttttcctggctcagacagcttgggaaggggattgttgctgggtaagagaagcttctcccaccacctccatctctttctctgccccttaccattga

SEQ ID NO: 197340 - DNA, 120 bp, Artificial Sequence
  ENSG00000113552_27 (sequence is synthesized)
ctgacaatctggggaggcagaagctgtttggagtgtttcctcctcagctttttgagggtgatagcaagttaacaatgtctgtgtgtgcctcagatagacatgatggggagggtctcctct

SEQ ID NO: 197341 - DNA, 120 bp, Artificial Sequence
  ENSG00000113552_28 (sequence is synthesized)
gagacagtatggcaaagagaaagaaatggtagggagggggacagatcacatgtttaaggtgtacctgcccagggctgcaaatgagaaaggtgacacagctttcaatgatttttcttcaga

SEQ ID NO: 197342 - DNA, 120 bp, Artificial Sequence
  ENSG00000113552_29 (sequence is synthesized)
ttagccaagatggcaggctaattctcacaccagggcacagtctaatgggtccagctgacttcctgacttgatcaacttgcccagtgtttaatgatgtttttcaagaagccgagcaggaaa

SEQ ID NO: 197343 - DNA, 120 bp, Artificial Sequence
  ENSG00000113552_30 (sequence is synthesized)
tatttgttggaggtgagcttgacactctgcagcacacatgtccagggccagacccgtgggaaggaggacaagacacaatgcctgtctgcagacagcttcttctgggtgtgctagtgaccg

SEQ ID NO: 197344 - DNA, 120 bp, Artificial Sequence
  ENSG00000113555_0 (sequence is synthesized)
gggaagcgggaggagagccacacggtcaagttgcacaggttcttgcagcttctggaatcaagaccatgggcaccctcataagtcagtgtgggcagggactgccccagggccaatccaaga

SEQ ID NO: 197345 - DNA, 120 bp, Artificial Sequence
  ENSG00000113555_1 (sequence is synthesized)
tccagaggtagccatagggtgtgacaagttgtgcagattacaacactcaccccttgcaataacgtcactgcctgtgactcggggccaggcccaggccaaagcccttcctacatcatttcg

SEQ ID NO: 197346 - DNA, 120 bp, Artificial Sequence
  ENSG00000113555_2 (sequence is synthesized)
tttaatcctcacagtttcctgctgaaagggctactattcttactcccatccccactctacagatgaggtaatggaggcccaggaaagttaagtgacttgtcccagatgacaccgctggta

SEQ ID NO: 197347 - DNA, 120 bp, Artificial Sequence
  ENSG00000113555_3 (sequence is synthesized)
agttgcaaagtcagaatttgaactcaggcagtttacctctgatggctgctctgttaatcacagctgctttccagtgagacaaaaacgggtgatcagggcagagtcaagacagagaggtaa

SEQ ID NO: 197348 - DNA, 120 bp, Artificial Sequence
  ENSG00000113555_4 (sequence is synthesized)
acaagattgggaaaaagacaggaatgagaggggaacaatgggggaaaagataggaacaaagagagttggggaaggggagagaaacaggaaacatgacttgcccgggaggggcatcagtcc

SEQ ID NO: 197349 - DNA, 120 bp, Artificial Sequence
  ENSG00000113555_5 (sequence is synthesized)
acgtgcaagcaggtggaggctcaagttttctgctcacttggtgatgcagaggctccctttccctcagcagccgccttgctgcgtggacagcagcttcccatctggcctgtccccggagcc

SEQ ID NO: 197350 - DNA, 120 bp, Artificial Sequence
  ENSG00000113555_6 (sequence is synthesized)
ccggcctcatcctcctcagcggcaggccacttagcttcacaggaaatgctctttctctaattggcattgaaactcacagccctcccttttcctgtaggtggggtttccataggaaaaagc

SEQ ID NO: 197351 - DNA, 120 bp, Artificial Sequence
  ENSG00000113555_7 (sequence is synthesized)
tgcttctctgtttccccagcctagcaactgtttggcagtcagagtcccacatcctgctcaactgggtcaggtccctcttagaccagctcttgtccatcatttgctgaagtggaccaacta

SEQ ID NO: 197352 - DNA, 120 bp, Artificial Sequence
  ENSG00000113555_8 (sequence is synthesized)
gttccccagtagggggtctcccctggcaattcttgatcggcgtttggacatctcagatcgcttccaatgaagatggccttgccttggggtcctgcttgtttcataatcatctaactatgg

SEQ ID NO: 197353 - DNA, 120 bp, Artificial Sequence
  ENSG00000113555_9 (sequence is synthesized)
gacaaggttgtgccggcagctctgggggaaggagcacggggctgatcaagccatccaggaaacactggaggacttgtccagccttgaaagaactctagtggtttctgaatctagcccact

SEQ ID NO: 197354 - DNA, 120 bp, Artificial Sequence
  ENSG00000113555_10 (sequence is synthesized)
tggcggtaagcatgatgcaacttctgcaacttctgctggggcttttggggccaggtggctacttatttcttttaggggattgtcaggaggtgaccactctcacggtgaaataccaagtgt

SEQ ID NO: 197355 - DNA, 120 bp, Artificial Sequence
  ENSG00000113555_11 (sequence is synthesized)
cagaggaagtgccatctggtacagtgatcgggaagctgtcccaggaactgggccgggaggagaggcggaggcaagctggggctgccttccaggtgttgcagctgcctcaggcgctcccca

SEQ ID NO: 197356 - DNA, 120 bp, Artificial Sequence
  ENSG00000113555_12 (sequence is synthesized)
ttcaggtggactctgaggaaggcttgctcagcacaggcaggcggctggatcgagagcagctgtgccgacagtgggatccctgcctggtttcctttgatgtgcttgccacaggggatttgg

SEQ ID NO: 197357 - DNA, 120 bp, Artificial Sequence
  ENSG00000113555_13 (sequence is synthesized)
ctctgatccatgtggagatccaagtgctggacatcaatgaccaccagccacggtttcccaaaggcgagcaggagctggaaatctctgagagcgcctctctgcgaacccggatccccctgg

SEQ ID NO: 197358 - DNA, 120 bp, Artificial Sequence
  ENSG00000113555_14 (sequence is synthesized)
acagagctcttgacccagacacaggccctaacaccctgcacacctacactctgtctcccagtgagcactttgccttggatgtcattgtgggccctgatgagaccaaacatgcagaactca

SEQ ID NO: 197359 - DNA, 120 bp, Artificial Sequence
  ENSG00000113555_15 (sequence is synthesized)
tagtggtgaaggagctggacagggaaatccattcattttttgatctggtgttaactgcctatgacaatgggaacccccccaagtcaggtaccagcttggtcaaggtcaacgtcttggact

SEQ ID NO: 197360 - DNA, 120 bp, Artificial Sequence
  ENSG00000113555_16 (sequence is synthesized)
ccaatgacaatagccctgcgtttgctgagagttcactggcactggaaatccaagaagatgctgcacctggtacgcttctcataaaactgaccgccacagaccctgaccaaggccccaatg

SEQ ID NO: 197361 - DNA, 120 bp, Artificial Sequence
  ENSG00000113555_17 (sequence is synthesized)
gggaggtggagttcttcctcagtaagcacatgcctccagaggtgctggacaccttcagtattgatgccaagacaggccaggtcattctgcgtcgacctctagactatgaaaagaaccctg

SEQ ID NO: 197362 - DNA, 120 bp, Artificial Sequence
  ENSG00000113555_18 (sequence is synthesized)
cctacgaggtggatgttcaggcaagggacctgggtcccaatcctatcccagcccattgcaaagttctcatcaaggttctggatgtcaatgacaacatcccaagcatccacgtcacatggg

SEQ ID NO: 197363 - DNA, 120 bp, Artificial Sequence
  ENSG00000113555_19 (sequence is synthesized)
cctcccagccatcactggtgtcagaagctcttcccaaggacagttttattgctcttgtcatggcagatgacttggattcaggacacaatggtttggtccactgctggctgagccaagagc

SEQ ID NO: 197364 - DNA, 120 bp, Artificial Sequence
  ENSG00000113555_20 (sequence is synthesized)
tgggccacttcaggctgaaaagaactaatggcaacacatacatgttgctaaccaatgccacactggacagagagcagtggcccaaatataccctcactctgttagcccaagaccaaggac

SEQ ID NO: 197365 - DNA, 120 bp, Artificial Sequence
  ENSG00000113555_21 (sequence is synthesized)
tccagcccttatcagccaagaaacagctcagcattcagatcagtgacatcaacgacaatgcacctgtgtttgagaaaagcaggtatgaagtctccacgcgggaaaacaacttaccctctc

SEQ ID NO: 197366 - DNA, 120 bp, Artificial Sequence
  ENSG00000113555_22 (sequence is synthesized)
ttcacctcattaccatcaaggctcatgatgcagacttgggcattaatggaaaagtctcataccgcatccaggactccccagttgctcacttagtagctattgactccaacacaggagagg

SEQ ID NO: 197367 - DNA, 120 bp, Artificial Sequence
  ENSG00000113555_23 (sequence is synthesized)
tcactgctcagaggtcactgaactatgaagagatggccggctttgagttccaggtgatcgcagaggacagcgggcaacccatgcttgcatccagtgtctctgtgtgggtcagcctcttgg

SEQ ID NO: 197368 - DNA, 120 bp, Artificial Sequence
  ENSG00000113555_24 (sequence is synthesized)
atgccaatgataatgccccagaggtggtccagcctgtgctcagcgatggaaaagccagcctctccgtgcttgtgaatgcctccacaggccacctgctggtgcccatcgagactcccaatg

SEQ ID NO: 197369 - DNA, 120 bp, Artificial Sequence
  ENSG00000113555_25 (sequence is synthesized)
gcttgggcccagcgggcactgacacacctccactggccactcacagctcccggccattccttttgacaaccattgtggcaagagatgcagactcgggggcaaatggagagcccctctaca

SEQ ID NO: 197370 - DNA, 120 bp, Artificial Sequence
  ENSG00000113555_26 (sequence is synthesized)
gcatccgcagtggaaatgaagcccacctcttcatcctcaaccctcatacggggcagctgttcgtcaatgtcaccaatgccagcagcctcattgggagtgagtgggagctggagatagtag

SEQ ID NO: 197371 - DNA, 120 bp, Artificial Sequence
  ENSG00000113555_27 (sequence is synthesized)
ctcagcccgcaagcctggggccttgagcatgtcgatgctgacggtgatctgcctggctgtactgttgggcatcttcgggttgatcctggctttgttcatgtccatctgccggacagaaaa

SEQ ID NO: 197372 - DNA, 120 bp, Artificial Sequence
  ENSG00000113555_28 (sequence is synthesized)
gaaggacaacagggcctacaactgtcgggaggccgagtccacctaccgccagcagcccaagaggccccagaaacacattcagaaggcagacatccacctcgtgcctgtgctcaggggtca

SEQ ID NO: 197373 - DNA, 120 bp, Artificial Sequence
  ENSG00000113555_29 (sequence is synthesized)
ggcaggtgagccttgtgaagtcgggcagtcccacaaagatgtggacaaggaggcgatgatggaagcaggctgggacccctgcctgcaggcccccttccacctcaccccgaccctgtacag

SEQ ID NO: 197374 - DNA, 120 bp, Artificial Sequence
  ENSG00000113555_30 (sequence is synthesized)
gacgctgcgtaatcaaggcaaccagggagcaccggcggagagccgagaggtgctgcaagacacggtcaacctccttttcaaccatcccaggcagaggaatgcctcccgggagaacctgaa

SEQ ID NO: 197375 - DNA, 120 bp, Artificial Sequence
  ENSG00000113555_31 (sequence is synthesized)
ccttcccgagccccagcctgccacaggccagccacgttccaggcctctgaaggttgcaggcagccccacagggaggctggctggagaccagggcagtgaggaagccccacagaggccacc

SEQ ID NO: 197376 - DNA, 120 bp, Artificial Sequence
  ENSG00000113555_32 (sequence is synthesized)
agcctcctctgcaaccctgagacggcagcgacatctcaatggcaaagtgtcccctgagaaagaatcagggccccgtcagatcctgcggagcctggtccggctgtctgtggctgccttcgc

SEQ ID NO: 197377 - DNA, 120 bp, Artificial Sequence
  ENSG00000113555_33 (sequence is synthesized)
cgagcggaaccccgtggaggagctcactgtggattctcctcctgttcagcaaatctcccagctgctgtccttgctgcatcagggccaattccagcccaaaccaaaccaccgaggaaataa

SEQ ID NO: 197378 - DNA, 120 bp, Artificial Sequence
  ENSG00000113555_34 (sequence is synthesized)
gtacttggccaagccaggaggcagcaggagtgcaatcccagacacagatggcccaagtgcaagggctggaggccagacagacccagaacaggaggaagggcctttggatcctgaagagga

SEQ ID NO: 197379 - DNA, 120 bp, Artificial Sequence
  ENSG00000113555_35 (sequence is synthesized)
cctctctgtgaagcaactgctagaagaagagctgtcaagtctgctggaccccagcacaggtctggccctggaccggctgagcgcccctgacccggcctggatggcgagactctctttgcc

SEQ ID NO: 197380 - DNA, 120 bp, Artificial Sequence
  ENSG00000113555_36 (sequence is synthesized)
cctcaccaccaactaccgtgacaatgtgatctccccggatgctgcagccacggaggagccaaggaccttccagacgttcggcaaggcagaggcaccagagctgagcccaacaggcacgag

SEQ ID NO: 197381 - DNA, 120 bp, Artificial Sequence
  ENSG00000113555_37 (sequence is synthesized)
gctggccagcacctttgtctcggagatgagctcactgctggagatgctgctggaacagcgctccagcatgcccgtggaggccgcctccgaggcgctgcggcggctctcggtctgcgggag

SEQ ID NO: 197382 - DNA, 120 bp, Artificial Sequence
  ENSG00000113555_38 (sequence is synthesized)
gaccctcagtttagacttggccaccagtgcagcctcaggcatgaaagtgcaaggggacccaggtggaaagacggggactgagggcaagagcagaggcagcagcagcagcagcaggtgcct

SEQ ID NO: 197383 - DNA, 120 bp, Artificial Sequence
  ENSG00000113555_39 (sequence is synthesized)
gtgaacatacctcagacgcctctggatccaagaaccaggggcctgaggatctgtggacaagagctggtttctaaaatcttgtaactcactagctagcggcggcctgagaactttagggtg

SEQ ID NO: 197384 - DNA, 120 bp, Artificial Sequence
  ENSG00000113555_40 (sequence is synthesized)
actgatgctacccccacagaggaggcaagagccccaggactaacagctgactgaccaaagcagccccttgtaagcagctctgagtcttttggaggacagggacggtttgtggctgagata

SEQ ID NO: 197385 - DNA, 120 bp, Artificial Sequence
  ENSG00000113555_41 (sequence is synthesized)
agtgtttcctggcaaaacatatgtggagcacaaagggtcagtcctctggcagaacagatgccacggagtatcacaggcaggaaagggtggccttcttgggtagcaggagtcagggggctg

SEQ ID NO: 197386 - DNA, 120 bp, Artificial Sequence
  ENSG00000113555_42 (sequence is synthesized)
taccctgggggtgccaggaaatgctctctgacctatcaataaaggaaaagcagtgattcattctcctgtttgcacctgtcaagagggagaagggaagagtaatagagtggggtttatttg

SEQ ID NO: 197387 - DNA, 120 bp, Artificial Sequence
  ENSG00000113555_43 (sequence is synthesized)
tcatccaatccctggcaagaccgtcacactgggcctggacaggagtggggcaccttggtacacagtaacaggtacacaaatagcagacatgtgtgctcttacccctgttcccctatcact

SEQ ID NO: 197388 - DNA, 120 bp, Artificial Sequence
  ENSG00000113555_44 (sequence is synthesized)
atgttaccaactaatctgcttctcagctgcaaaattagagctaagaaagcacaactatttataaagcatttacatgagccaggcaccaggctttacaataggatttaatttgattttcca

SEQ ID NO: 197389 - DNA, 120 bp, Artificial Sequence
  ENSG00000113555_45 (sequence is synthesized)
acaatcctgggagggaggtattattaaccccatttcacagacacggatatggggcttggagaggtcaagtggctttcccaagatcaagcagggagtagagccagagccaggatttggacc

SEQ ID NO: 197390 - DNA, 120 bp, Artificial Sequence
  ENSG00000113555_46 (sequence is synthesized)
caggctgggccaacaccaaaacccatgccttcaaccttgacaccagcctgccaaccaaagacaggagaagggaaggccctggaggtgagctgttggcagcagtgaacttgctcgagctcc

SEQ ID NO: 197391 - DNA, 120 bp, Artificial Sequence
  ENSG00000113555_47 (sequence is synthesized)
ctcgggaaacactgttgaaaggaacatttccaaagccatccaggcccgcacctctctacattcccaagcacaaggcaaaaggaacttggatctgaactgatgcagacccgttctttccca

SEQ ID NO: 197392 - DNA, 120 bp, Artificial Sequence
  ENSG00000113555_48 (sequence is synthesized)
acaagtagctcttcaagtgcggatgtcatctttcccaaccccatttgcgggtaaaccttcctctgtcattgcaggttcaggcttgtgaatcccagaggacgctgtgtgaactgggtctat

SEQ ID NO: 197393 - DNA, 120 bp, Artificial Sequence
  ENSG00000113555_49 (sequence is synthesized)
gaaatcggcactgacagcagccagccttccaggggatgggggagggaagaaacagcagatattttcccaaggttcagctttataattttcttggaaatttccgagcagccaatcagctag

SEQ ID NO: 197394 - DNA, 120 bp, Artificial Sequence
  ENSG00000113555_50 (sequence is synthesized)
cttctaaatagtgtgggtctctcctggacactgcaggcaaaagttcctctatctgctcctctttttgtcctttcttggagctcagtgctcatgttcactgttcaagaaatgggccaatca

SEQ ID NO: 197395 - DNA, 120 bp, Artificial Sequence
  ENSG00000113555_51 (sequence is synthesized)
tactcccaactagggataatgtgcatcatacatacttggaatacagtgtggtatcattattccattttacagatgaagaaaatgaggctccccaaagttatgagtttcaggggcagagtt

SEQ ID NO: 197396 - DNA, 120 bp, Artificial Sequence
  ENSG00000113555_52 (sequence is synthesized)
tctcctcacctcactctaggccagagtgatctccttacagaatctgtgattttcaggctggatcacagaactgttgggttctgtgggccagtgagagaaactgggggatatcaagcaggc

SEQ ID NO: 197397 - DNA, 120 bp, Artificial Sequence
  ENSG00000113555_53 (sequence is synthesized)
aggcagggtctccagcctgaccagccaggtgcctgctacaaagcaacacttgatgaatagctgttgaatggatgtatgaatgaataaatgtgtcaataaatgcttcagaggcccctttta

SEQ ID NO: 197398 - DNA, 120 bp, Artificial Sequence
  ENSG00000113555_54 (sequence is synthesized)
acagtttcctgctgaaagggctactattcttactcccatccccactctacagatgaggtaatggaggcccaggaaagttaagtgacttgtcccagatgacaccgctggtggggtttccat

SEQ ID NO: 197399 - DNA, 120 bp, Artificial Sequence
  ENSG00000113555_55 (sequence is synthesized)
gttctccaggtgattccaatatgcagccagggctaagaacttctactccaagcagtttcaacagttcctcatgacctaccctacaagatttcagcttgtgaagctgtcacttggaatcca

SEQ ID NO: 197400 - DNA, 120 bp, Artificial Sequence
  ENSG00000113558_0 (sequence is synthesized)
agcccagccgcgatgtgacgccgcgcgccccggggtcctcggcgcctgcgccctctcctataaagcagacgccgcgccgcgctgcgacgctgtagtggcttcgtcttcggtttttctctt

SEQ ID NO: 197401 - DNA, 120 bp, Artificial Sequence
  ENSG00000113558_1 (sequence is synthesized)
ccttcgctaacgcctcccggctctcgtcagcctcccgccggccgtctccttaacaccgaacaccatgccttcaattaagttgcagagttctgatggagagatatttgaagttgatgtgga

SEQ ID NO: 197402 - DNA, 120 bp, Artificial Sequence
  ENSG00000113558_2 (sequence is synthesized)
aattgccaaacaatctgtgactattaagaccatgttggaagatttgggaatggatgatgaaggagatgatgacccagttcctctaccaaatgtgaatgcagcaatattaaaaaaggtcat

SEQ ID NO: 197403 - DNA, 120 bp, Artificial Sequence
  ENSG00000113558_3 (sequence is synthesized)
tcagtggtgcacccaccacaaggatgaccctcctcctcctgaagatgatgagaacaaagaaaagcgaacagatgatatccctgtttgggaccaagaattcctgaaagttgaccaaggaac

SEQ ID NO: 197404 - DNA, 120 bp, Artificial Sequence
  ENSG00000113558_4 (sequence is synthesized)
actttttgaactcattctggctgcaaactacttagacatcaaaggtttgcttgatgttacatgcaagactgttgccaatatgatcaaggggaaaactcctgaggagattcgcaagacctt

SEQ ID NO: 197405 - DNA, 120 bp, Artificial Sequence
  ENSG00000113558_5 (sequence is synthesized)
caatatcaaaaatgactttactgaagaggaggaagcccaggtacgcaaagagaaccagtggtgtgaagagaagtgaaatgttgtgcctgacactgtaacactgtaaggattgttccaaat

SEQ ID NO: 197406 - DNA, 120 bp, Artificial Sequence
  ENSG00000113558_6 (sequence is synthesized)
actagttgcactgctctgtttataattgttaatattagacaaacagtagacaaatgcagcagcaagtcaattgtattagcagaatattgtcctcattgcatgtgtagtttgagcacagat

SEQ ID NO: 197407 - DNA, 120 bp, Artificial Sequence
  ENSG00000113558_7 (sequence is synthesized)
cccaaaccttacggccaagtttcttctagtatgatggaaagtttcttttttctttgctctgaataaaactgaactgtgggttctctataagtggcattttgggctttccctcttttttgt

SEQ ID NO: 197408 - DNA, 120 bp, Artificial Sequence
  ENSG00000113558_8 (sequence is synthesized)
aaagcaatgtctgcctagtttattgtccagttaactttagtgaccttttaaaagttggcattgtaaataaaacaacttgcaaaaaagttttctggaatagaattaacaaaatattatctt

SEQ ID NO: 197409 - DNA, 120 bp, Artificial Sequence
  ENSG00000113558_9 (sequence is synthesized)
tattcatgagttggaaactggaaaaaggcttcttgaagtaaatgttctgagtggagctactaggatgtcttccagcctcctgcagtcaaggagtaccactgtattgattagcctgtatgt

SEQ ID NO: 197410 - DNA, 120 bp, Artificial Sequence
  ENSG00000113558_10 (sequence is synthesized)
agcagggctcccttcattgcatctgaggacttgttttctttttctttatttttaatcctcttagttttaaatatattgcctagagactcagttactacccagtttgtggttttttgggag

SEQ ID NO: 197411 - DNA, 120 bp, Artificial Sequence
  ENSG00000113558_11 (sequence is synthesized)
aaatgtaactggacagttagcttttcaattaaaaagacacttaacccatgtgggatgtcatctttttataattagtgttcccatgtggagaaaattattcacactacttgcatgtaaaga

SEQ ID NO: 197412 - DNA, 120 bp, Artificial Sequence
  ENSG00000113558_12 (sequence is synthesized)
ataatttaacttttaacattaaaatatgtggtaaaacccagaaagcatccatcatgaatgcaagatactttcaataaaaagtaagttatatagtaggtagttaagtttgcttttgtggac

SEQ ID NO: 197413 - DNA, 120 bp, Artificial Sequence
  ENSG00000113558_13 (sequence is synthesized)
ttaaatgtgtctcttcacttaaatgggttgaatgtgtatatatttgttcagcttgaaaagacttagtttatatcctagctcactggaggctgctgacataaccataacttctgtcccttc

SEQ ID NO: 197414 - DNA, 120 bp, Artificial Sequence
  ENSG00000113558_14 (sequence is synthesized)
taattgtcatttatatgcctaactggagctagtactttaattcttaacacaaaattactctgccattgtttccagcttccctcctacaatagaatgaagtttttttgatggcttgagatg

SEQ ID NO: 197415 - DNA, 120 bp, Artificial Sequence
  ENSG00000113558_15 (sequence is synthesized)
gctcacaaattttgatttttttttcttccttgtgctccctttttttctccttgcttttccagttaacatctatattcacatgtaatcttgttttctcttcacattcactgagttgttcag

SEQ ID NO: 197416 - DNA, 120 bp, Artificial Sequence
  ENSG00000113558_16 (sequence is synthesized)
gctcagatcatcccttgacagtagtttgccttcatctcacctttcatttgtcccaaattcaccttatttaataaagtcccatatgttgtctcacttaattccaatttgttgtctgtacca

SEQ ID NO: 197417 - DNA, 120 bp, Artificial Sequence
  ENSG00000113558_17 (sequence is synthesized)
gagataggaaactataatgtgtgggtcaaatcaggcccatagcctgtttttgtagtctttgagctaaaaatggtttttacgttgtaaagagttatttaaaattctctctctctctctctc

SEQ ID NO: 197418 - DNA, 120 bp, Artificial Sequence
  ENSG00000113558_18 (sequence is synthesized)
tctctctcaggagataagcttgttttctgtttgtcctggttttagtggggaaggtagcggtgtatagtcctagctgaattgtctcatctaccaattcctgctattataagatcaacttct

SEQ ID NO: 197419 - DNA, 120 bp, Artificial Sequence
  ENSG00000113558_19 (sequence is synthesized)
caacttctgcaaaaaccttatccacctcaagtatccttagcagctgggcatggtggcttatgcctgtaatctcaacattttgggaggacaagacaggaggatcgtttgagcccaggagtt

SEQ ID NO: 197420 - DNA, 120 bp, Artificial Sequence
  ENSG00000113558_20 (sequence is synthesized)
gcctgggcaacacagaaagtccctgtctctccaaaaaaaaaaaaaaaaattagcagtcatatggtgcatgcctataatcccaactacttgagaggctgaggtgggaagatggcttgagcc

SEQ ID NO: 197421 - DNA, 120 bp, Artificial Sequence
  ENSG00000113558_21 (sequence is synthesized)
tgagaggtcgaggctgcagtgagctggcattgcaccactgcactccagtctaggcaatagagcgagaccttgtctcaaaaacaaaccagaagtatccttagcagtattatgacaaacaaa

SEQ ID NO: 197422 - DNA, 120 bp, Artificial Sequence
  ENSG00000113558_22 (sequence is synthesized)
tcttcactgaaggtccaggattactgccatatgccatgtttaacttgtaaaggaagtatcaccttctaagaaactggagcttgttattaccacttgatctgtataatactcagcagtagt

SEQ ID NO: 197423 - DNA, 120 bp, Artificial Sequence
  ENSG00000113558_23 (sequence is synthesized)
tagaattatatgagtaaataacgtcactatccgtatttaaaggataatgagatctttcagaaagattggatggacagacaatatagtagtaatttaaatttttgtttcctgactttctgt

SEQ ID NO: 197424 - DNA, 120 bp, Artificial Sequence
  ENSG00000113558_24 (sequence is synthesized)
agtccctaaacaaacaacaaaaaatcctagtaatcttaaacttttacattaatagagatccaagagaaaataagccatttttcaccattgtggacccaaataaatcatagacatggtatt

SEQ ID NO: 197425 - DNA, 120 bp, Artificial Sequence
  ENSG00000113558_25 (sequence is synthesized)
aagaagcccttttcagtctggttgcagtattattttcctacctttctttttcctgttccctgctgtatgcccactattcctttaatatatctactagaacttttctaggctttcacctgg

SEQ ID NO: 197426 - DNA, 120 bp, Artificial Sequence
  ENSG00000113558_26 (sequence is synthesized)
agtgagtggtcctttctcattatcacagtagccaaacctcagtcttcaaaactccactcatttctggctactctcttacttcccaactattcttctaaactaatattgtggcattaagtc

SEQ ID NO: 197427 - DNA, 120 bp, Artificial Sequence
  ENSG00000113558_27 (sequence is synthesized)
ataccttgaggctggagttttagtgtcttcatggccttgggcaagttggaaataggtactacggttttatagatctagtgcagtctgctttatattagttccagaacttcattggaagtc

SEQ ID NO: 197428 - DNA, 120 bp, Artificial Sequence
  ENSG00000113558_28 (sequence is synthesized)
acttgacagcaggatttaacttgtatttagcagcactactccatgaatttcagtataagtaacagaagtgaaaagtccttgtgaaatgcaggtacagggcataatgaaaacaagaagagt

SEQ ID NO: 197429 - DNA, 120 bp, Artificial Sequence
  ENSG00000113558_29 (sequence is synthesized)
agttttaatgcatgagaggggagagcttgataatagctgataatagccttggtttggagagtggttactgatgaattatgaagactttctctaattactgttatagtagtaaaggaaaga

SEQ ID NO: 197430 - DNA, 120 bp, Artificial Sequence
  ENSG00000113558_30 (sequence is synthesized)
aaacccttgttgataaagtaaacttagggattaattaggaaatgccttttatttcaccaggaaagagaatgagaggaagaaggtatttggcagatttgggtgattgaaggatgtttgtcg

SEQ ID NO: 197431 - DNA, 120 bp, Artificial Sequence
  ENSG00000113558_31 (sequence is synthesized)
gtttcctctgtaaacaacatgctgctttctgcagtgtgctgcttttaatgatgaagtcctttcaaggactccatggcagtcctttggcttctcaccttttcattgattatgtcacttgtg

SEQ ID NO: 197432 - DNA, 120 bp, Artificial Sequence
  ENSG00000113558_32 (sequence is synthesized)
tgtgatctaaaagtaaaccaaaaccttcctgaatgttagcttattattttctccttaacattgtcataggctaaagatgtgccccctcaaattctaataatttttttttttttttttttt

SEQ ID NO: 197433 - DNA, 61 bp, Artificial Sequence
  ENSG00000113558_33 (sequence is synthesized)
tttttattagagatggagcctccgaaagtgctgaggttacacgtgtgacccaccgcacacg

SEQ ID NO: 197434 - DNA, 120 bp, Artificial Sequence
  ENSG00000113558_34 (sequence is synthesized)
ccgaaagtgctgaggttacacgtgtgacccaccgcacacggccctaataattcttaagttgtagaagcaagttactcttttgaagtgccatgtgttagcttgccttaatctattcttggt

SEQ ID NO: 197435 - DNA, 120 bp, Artificial Sequence
  ENSG00000113558_35 (sequence is synthesized)
atacaaaatagatactgctttacagttcttatattttctcagagattcacaaaatcatcctgtagctccctgtgtgggattatagctgtgactttttactctacaactgtcagaatacac

SEQ ID NO: 197436 - DNA, 120 bp, Artificial Sequence
  ENSG00000113558_36 (sequence is synthesized)
cagctcctggaattaagcaagaactatattgtgacttggttggacaggtaactgcagccttgtaacatgacatcatagtaatgctgagcttatcttaaaactagctggggagggaggata

SEQ ID NO: 197437 - DNA, 120 bp, Artificial Sequence
  ENSG00000113558_37 (sequence is synthesized)
gtaacagtgagtcactgtgggcatctcacttagggcaggcagatattccaaatcacattgatttttcagtttacgtaaaaattgaccaatcctatgggctgtgttctgatcccaacataa

SEQ ID NO: 197438 - DNA, 120 bp, Artificial Sequence
  ENSG00000113558_38 (sequence is synthesized)
cctttacaagcttaacttttgcttgccaccattagcttttgaagattttttttaactgctccttgcagagcaggactaccccataggcagtgtgcccagagtagcccgaagagctttttg

SEQ ID NO: 197439 - DNA, 90 bp, Artificial Sequence
  ENSG00000113558_39 (sequence is synthesized)
ccataggcagtgtgcccagagtagcccgaagagctttttgattcttcttttaagagacaaggtctcacctctgccccccagttgcagcct

SEQ ID NO: 197440 - DNA, 120 bp, Artificial Sequence
  ENSG00000113558_40 (sequence is synthesized)
tgaatagctaggactacatgtgtgtgctaccatgccttgctagtttttgtttttttaaattgatttttatagagatgaggtctcctcatgttgcccaggctgttttcgaattcctgggct

SEQ ID NO: 197441 - DNA, 120 bp, Artificial Sequence
  ENSG00000113558_41 (sequence is synthesized)
gtgctggtattacagatgtgagccacagcacccaccaatttttccttttctaaagctcagtgtacattctggtaggaaggaatcaaccaagtaaatgttctccctacaaagttgtttgag

SEQ ID NO: 197442 - DNA, 120 bp, Artificial Sequence
  ENSG00000113558_42 (sequence is synthesized)
aaatgttctccctacaaagttgtttgaggatttgaaaagttaatcttcaattatctggatttgaaaccagtctataactttttaagctaggaagaagtcaagaataagaagattgcaagc

SEQ ID NO: 197443 - DNA, 120 bp, Artificial Sequence
  ENSG00000113558_43 (sequence is synthesized)
aaagggaaagcttacaaaatggctgaatccttaaagtgtagctcctggcttctccttggtaggaagcattagacatggtttccctctagggagctgggagcttttggtgtagttcaggag

SEQ ID NO: 197444 - DNA, 120 bp, Artificial Sequence
  ENSG00000113558_44 (sequence is synthesized)
tccctctagggagctgggagcttttggtgtagttcaggagagaaggcataaatactgctgggagggagtggataactctaataaaaatgttcctgggctgggcacggtggctcacgcctg

SEQ ID NO: 197445 - DNA, 88 bp, Artificial Sequence
  ENSG00000113558_45 (sequence is synthesized)
gggaggcggaagttgcagtgagccgacatcacgccactgactgcagtccagcctggcgtttctggacagaacagattaatgagccaat

SEQ ID NO: 197446 - DNA, 120 bp, Artificial Sequence
  ENSG00000113558_46 (sequence is synthesized)
gaacagattaatgagccaatggggggctacagagctgaaaggtgctacgaaaggttttgtaaagtgaaactaatttggtttcaagaatcaagttggatttgtttgggggtggacagatgc

SEQ ID NO: 197447 - DNA, 120 bp, Artificial Sequence
  ENSG00000113558_47 (sequence is synthesized)
caaagtgaggaaaaagcagtgcacagtcaggaactaacagcagaaggttgggtgttggtacatttccctgagaatatagactaaagagaaattagggcaggattagtcacagtactttgc

SEQ ID NO: 197448 - DNA, 120 bp, Artificial Sequence
  ENSG00000113558_48 (sequence is synthesized)
tgacactcagtagtattttatcagcatttattcatcagacccacattaggcagggcaatttttgagtgagctaaattctaatttttttaattttaatttttatttatttattttttggct

SEQ ID NO: 197449 - DNA, 120 bp, Artificial Sequence
  ENSG00000113558_49 (sequence is synthesized)
gttcaactaaaccagtcttttgaatgttgggggttttacagttagagtcctgatgactttttcttgtttactgttgttaaaaatcactacctccagtggtcacagagaatgagtaagaga

SEQ ID NO: 197450 - DNA, 120 bp, Artificial Sequence
  ENSG00000113558_50 (sequence is synthesized)
actggctgtgcatatcaagatgaagtatggtgtaagaaatatttcagagcatgtcctttggcccaagattgagccatttggacacctaagcaggattggctgaatgttatcctttctgct

SEQ ID NO: 197451 - DNA, 120 bp, Artificial Sequence
  ENSG00000113558_51 (sequence is synthesized)
gaggcatcagtggagatgatcattagtggtggccgaaaagtgttgtcgaaggtgctcttgcttgacacacttccaatgcgggacatagtttgagtgatagatggctaattcattgataat

SEQ ID NO: 197452 - DNA, 120 bp, Artificial Sequence
  ENSG00000113558_52 (sequence is synthesized)
gtacttgttgccttgcagtcttgtgtactgctggctacctctggtctgtgtgccagtattgagcagcattctatgggaggaatgtagttgctcataacagtgtctgcttccacatctgta

SEQ ID NO: 197453 - DNA, 120 bp, Artificial Sequence
  ENSG00000113558_53 (sequence is synthesized)
gttcttgcgaccttctgatatctgtcaactttaaattttctggaagtatttaagtatattcagaccttctgatatctcttaacttcaaattttcaacctgctatatagcagcctcttatt

SEQ ID NO: 197454 - DNA, 120 bp, Artificial Sequence
  ENSG00000113558_54 (sequence is synthesized)
gcacactgaggatcagcttatttccttaaagtgctctcactttgaatacctcccacctatctggtgaaaattcttatttgtcctttctttcctgaatgtaccatttcacaacctctaact

SEQ ID NO: 197455 - DNA, 120 bp, Artificial Sequence
  ENSG00000113558_55 (sequence is synthesized)
gccttcttcagttgctttgcagatttttctgttccaggaagcttacggaaaggggtgggaaaatagagaagctgtactctatcctcaagtactcaagcagggtttccagagtggctttgt

SEQ ID NO: 197456 - DNA, 120 bp, Artificial Sequence
  ENSG00000113558_56 (sequence is synthesized)
aaaaatttttatttatttatttatttatttttggtgagtggaacctggcttttcctcttccctccccaagccccaccccgcttcctgacattgcacatgcctgaaagaactaggcttcag

SEQ ID NO: 197457 - DNA, 120 bp, Artificial Sequence
  ENSG00000113558_57 (sequence is synthesized)
ataaaagaatgagaacacttgaatgaaaaaggaagacttggtccagagcccctggtgaatatgaaagaagtattggcctggactatctcccgcataattcacagctgctatcttgtcttc

SEQ ID NO: 197458 - DNA, 120 bp, Artificial Sequence
  ENSG00000113558_58 (sequence is synthesized)
agaagtgaaacatcccttaccaatagtgacctaacttgtgaggactgcttgtgatagtatagttcccacccccaggacataagttttccctttccagttaacatgcctaatcccatgcta

SEQ ID NO: 197459 - DNA, 120 bp, Artificial Sequence
  ENSG00000113558_59 (sequence is synthesized)
tctttaagagcttgaaaatccttcctgacctgagctaggcttttattctaagggactgtgtatgtgaacatccccaccatctatgtttcctgttttcaaactcggtgccgttttgagtat

SEQ ID NO: 197460 - DNA, 120 bp, Artificial Sequence
  ENSG00000113558_60 (sequence is synthesized)
tttcagatgctcactgccagtaatggtttgttagtagctccaaactattagagaagagctcaggagtcagaatttgaaagatgcccatagggtgatttgagatttggaacaaggttatca

SEQ ID NO: 197461 - DNA, 120 bp, Artificial Sequence
  ENSG00000113558_61 (sequence is synthesized)
caataagttgggattgggggagttgacacaaccagggtctgcttgggtgggcagctgtttcagaaacccttggtgaactcttaaagccctgaagagcttaaaaaatgctctgaagagatc

SEQ ID NO: 197462 - DNA, 120 bp, Artificial Sequence
  ENSG00000113558_62 (sequence is synthesized)
tgagagtcgcagttaaggactctcaaagaacctcaaagaaaagccaacttagcctttttatacaattaactagatttgggtcttaaattctactttgacatataggcctaagaggtagtt

SEQ ID NO: 197463 - DNA, 120 bp, Artificial Sequence
  ENSG00000113558_63 (sequence is synthesized)
taacatggccttgttacccttaccccttctgttctgtgctgttttctgagaaacggatgcaggaactgattccctttcttcctctctggaacaggatataaagaacccttccgcttccct

SEQ ID NO: 197464 - DNA, 120 bp, Artificial Sequence
  ENSG00000113558_64 (sequence is synthesized)
ttacttgtggccttcctggccaggcttatgtatactgaacaaagctagggtgcagtgcttctgagctagctgttaggggtccacagccagaaggaatgggagaccacaggagccattcaa

SEQ ID NO: 197465 - DNA, 120 bp, Artificial Sequence
  ENSG00000113558_65 (sequence is synthesized)
aagataattacatgtcagaagagagtccatccatggggttctgttaaagtagacaccttcacgttgggagacataggctttgtctgcttgctgggctgaaccctcaccatatccacagag

SEQ ID NO: 197466 - DNA, 120 bp, Artificial Sequence
  ENSG00000113558_66 (sequence is synthesized)
aacaaaatggggagcagctgtaccaggggagggatgaacgtctttcacccaagttgccagtctgctagttgtctggaaatgttcaagggaggctaaggtatcttgtcttatgatgtctca

SEQ ID NO: 197467 - DNA, 120 bp, Artificial Sequence
  ENSG00000113558_67 (sequence is synthesized)
ggaaacagggttggttctcagctggcagtgaagggggactggtgtggtattagcagttgaacttgaggttgcaatctcaagtcaccctctggcctcgcaggaatgcaccagggtgatttg

SEQ ID NO: 197468 - DNA, 120 bp, Artificial Sequence
  ENSG00000113558_68 (sequence is synthesized)
ggaggatctgagtttcctttatgaagtcagattaaaaaaaaaaaaagctgatctgatttaaacagagttgccaaagacttccccgccaatacacaaagactgcattgttcaggtaccctg

SEQ ID NO: 197469 - DNA, 120 bp, Artificial Sequence
  ENSG00000113558_69 (sequence is synthesized)
tgtactctaagtgagacaccaaatcagatgcagcaacctggtcttgcataagccctggttagaatgtaggttttttaaacaactaggccagtagccagaacagaattctttaaaatggga

SEQ ID NO: 197470 - DNA, 120 bp, Artificial Sequence
  ENSG00000113558_70 (sequence is synthesized)
cagatgtccagagaatggctagtgtcctctagcactctctcagaagcaaaagcaagtctggggttacaacttccagtggcctactttaaatagacgctgttctggaaaatgactttatac

SEQ ID NO: 197471 - DNA, 120 bp, Artificial Sequence
  ENSG00000113558_71 (sequence is synthesized)
tttaaacacaaaatccaaaaaatagaactcagtggagtgacaatgacaatgcatgatggtggcccagtggctgtcccatgtgaaatacttcttgcctgacatgtatcatctacttgttga

SEQ ID NO: 197472 - DNA, 120 bp, Artificial Sequence
  ENSG00000113558_72 (sequence is synthesized)
ctgacctattgaggtgccttcatgacaccttttacattcatgataggtctcaggaagacagcagtgtacttggtggaaactcatgtaaaaagtgggttgtagggagctaaacagtgagta

SEQ ID NO: 197473 - DNA, 120 bp, Artificial Sequence
  ENSG00000113558_73 (sequence is synthesized)
cacatggtatatggatacggaatggaataatagacattggagacttcaaaaggtgggagatgaaagggggatgaggtatgaaatcctacctgttgagtacaatgtacactacttacgtgc

SEQ ID NO: 197474 - DNA, 120 bp, Artificial Sequence
  ENSG00000113558_74 (sequence is synthesized)
acagtacactgtttgggtgagaggcacactaaaagcccggacctcaccgctacccagtatgttcatgtaacacagctgcacttgtaccccctaaatgtatacaaataatctaaaaatagc

SEQ ID NO: 197475 - DNA, 120 bp, Artificial Sequence
  ENSG00000113558_75 (sequence is synthesized)
ccggacctcaccgctacacaatatattcatgtaacacagctgcatttgtaccccctaaatgtatacaaataatctaaaaataaagtggatatggtggctgtcgtgtccaccaacagcgta

SEQ ID NO: 197476 - DNA, 120 bp, Artificial Sequence
  ENSG00000113558_76 (sequence is synthesized)
gttgtcgaccctgttcttcgggagaccctaccaggttccgttcacctgccccgcccccgactcagcgaggcctcctctggccgggcgtcctcacggcgctccataaacataaatgagcat

SEQ ID NO: 197477 - DNA, 120 bp, Artificial Sequence
  ENSG00000113558_77 (sequence is synthesized)
gctgtagtggcttcgtcttcggtttttctcttccttcgctaacgcctcccggctctcgtcagcctcccgccggccgtctccttaacaccgaacaccacataaatgagcatattctgatgt

SEQ ID NO: 197478 - DNA, 120 bp, Artificial Sequence
  ENSG00000113558_78 (sequence is synthesized)
ctcttaaaaagggagtaacacctataacatgccagcaaaagaggtgactgtatcaagtagtcttgatactttagggataatatgtacttaatgtgtcttaaacatactcttactgttctg

SEQ ID NO: 197479 - DNA, 120 bp, Artificial Sequence
  ENSG00000113558_79 (sequence is synthesized)
tctttatgaatctgaacacttagatgatactgcattttaagcataagaacaattagttttcaatgagaagagctcttgttaatgtattaacagttactagttttggcacctgcaactttc

SEQ ID NO: 197480 - DNA, 120 bp, Artificial Sequence
  ENSG00000113558_80 (sequence is synthesized)
atagaccatacatatctgacatcagaaaagcaggccctagagagaagtatatactagggtactttagagcaacttaatgaggggaggaaatgaaagaatagatcagaatgattttgttga

SEQ ID NO: 197481 - DNA, 120 bp, Artificial Sequence
  ENSG00000113558_81 (sequence is synthesized)
catgactacagactgaaataatgtgaatgaattaactgaatttgctctgtcaactttagtaaattgcccattgcctttgctttgttcataatttcagcagggcagaataaaaaccatggg

SEQ ID NO: 197482 - DNA, 120 bp, Artificial Sequence
  ENSG00000113558_82 (sequence is synthesized)
aggcaaagaaaggaaatccggaaatatagtcttaacctggtgttgttctaattttccatctgttcttctgactcaactcactggctatcgatgaatcagtaggtagtatttataagtctt

SEQ ID NO: 197483 - DNA, 120 bp, Artificial Sequence
  ENSG00000113558_83 (sequence is synthesized)
gctgtagtggcttcgtcttcggtttttctcttccttcgctaacgcctcccggctctcgtcagcctcccgccggccgtctccttaacaccgaacaccgtgagtagccgcccactgaactgg

SEQ ID NO: 197484 - DNA, 120 bp, Artificial Sequence
  ENSG00000113558_84 (sequence is synthesized)
aaagggtcgtggctaccggattgcgtgccggctggcctcaccgctgcggtttgggcctgcccgcggcgggcggtgactgggcctggccttctttcgggcccggtggatcgcgttgtcgac

SEQ ID NO: 197485 - DNA, 120 bp, Artificial Sequence
  ENSG00000113558_85 (sequence is synthesized)
tgtaagattatatctttttcctaacgactcataattaatctgaattaataaatgcgttttcagagcaagtaataggttattattatggagatcttgccaagagatctcaaagttggtcac

SEQ ID NO: 197486 - DNA, 120 bp, Artificial Sequence
  ENSG00000113558_86 (sequence is synthesized)
ctggacagtcagtactgaaagataaaaagggctctgaaatgaagcttttaagtagatttagggaattgtactcacatctgcttatctttaaatcattttattctcttgtatatggtcttg

SEQ ID NO: 197487 - DNA, 120 bp, Artificial Sequence
  ENSG00000113558_87 (sequence is synthesized)
cagtattgattttggtctttatgctggtatgtatagtctaagtaatcagcttcctgaaactttatggagtaattattctcctattaaggaaattttggggcttttcctgctttgttccta

SEQ ID NO: 197488 - DNA, 120 bp, Artificial Sequence
  ENSG00000113558_88 (sequence is synthesized)
caccaaatagtctcacacatgtgtctagggtatttggaatttgctggttacaatatatgtacatattcagcttttctgaggagtgctggattagctttcaaaggggttataccaatttat

SEQ ID NO: 197489 - DNA, 120 bp, Artificial Sequence
  ENSG00000113558_89 (sequence is synthesized)
actctctagaagagtttgtgtttcctttccactattgcccaacaattagtatcagtttcttgattttttttcaatctagagaagtatctgtagtgttagttttgcttctagtaaagttga

SEQ ID NO: 197490 - DNA, 120 bp, Artificial Sequence
  ENSG00000113558_90 (sequence is synthesized)
gcgttccttatgtttggctattcagatttcatttattggctgtacatattaacccatttctctttaatgatttttgaaagattttatattctctcagctaatcattgttgtacatattgc

SEQ ID NO: 197491 - DNA, 120 bp, Artificial Sequence
  ENSG00000113558_91 (sequence is synthesized)
aggtatcttccagtcattgtcctaacttttctttttgcatagaagctttttaatgtagtcaagtacagtactctgtctgcatggcttgcttttatctaataagatcttctcccttctagg

SEQ ID NO: 197492 - DNA, 120 bp, Artificial Sequence
  ENSG00000113558_92 (sequence is synthesized)
gttataatgattcttcaagcttcatttttgtttttcaagcttggctgttaatggctcaagtcaacctctagctagttattattccaatatagggataagttgtcccagcagtggaatgag

SEQ ID NO: 197493 - DNA, 120 bp, Artificial Sequence
  ENSG00000113558_93 (sequence is synthesized)
ctgcattgttagatttgtgattctgcactgttcatttcagtactatctaatataaaaattacatgtttaaatgttttataattaaaaattgggctcaggttaaaatattttcttttggag

SEQ ID NO: 197494 - DNA, 120 bp, Artificial Sequence
  ENSG00000113558_94 (sequence is synthesized)
ataccttttgttgtggtcttgtcacaggaagggtcctctactctgcatccttctccattaagcagggacaactgcattattggcaagcgctaagcaacatggagaagcagacatgtttgt

SEQ ID NO: 197495 - DNA, 120 bp, Artificial Sequence
  ENSG00000113558_95 (sequence is synthesized)
gaatcgcaaagtgaaatctgattctctccaactatggatgagtgagagtaggatatttcagtggctggttttaaaacatgctttacttttttgcttcctttgcctaacaacctgtttgct

SEQ ID NO: 197496 - DNA, 120 bp, Artificial Sequence
  ENSG00000113558_96 (sequence is synthesized)
agctgaatgaatattttaaccgatgtaatgggtcataagtctttgaacataaaatgggtgtgatgcatgttttaaatgccaaatgatacacttttgggaaaatatatgcgatttgtaata

SEQ ID NO: 197497 - DNA, 120 bp, Artificial Sequence
  ENSG00000113558_97 (sequence is synthesized)
caacacacctagaaaacttcagaggtgccataagttaatagtgacatcaccggattatgaatacttgagaagcatgggccttttaaaagttgtatgtgagttttaagaggccttgaatta

SEQ ID NO: 197498 - DNA, 120 bp, Artificial Sequence
  ENSG00000113558_98 (sequence is synthesized)
atctgtaccagacataaatgagcatattctgatgtactctttggatctgaactcatcttcacagatgccttcaattaagttgcagagttctgatggagagatatttgaagttgatgtgga

SEQ ID NO: 197499 - DNA, 120 bp, Artificial Sequence
  ENSG00000113558_99 (sequence is synthesized)
tagtttgtgaatatcaaatttatatgagcagcagcctgtcataaggtgcttgagagtatgaagaggtaaagtttacatttttttctttataacttacatttttctgatacaggtcatcct

SEQ ID NO: 197500 - DNA, 120 bp, Artificial Sequence
  ENSG00000113558_100 (sequence is synthesized)
tgaattagtgagggtcgttctctcattaaatggataaaatcataaggtaaaataaacattgaagtgattgccaagccttaggcaatggttaatttctgttcaagtaaatttgaattcata

SEQ ID NO: 197501 - DNA, 120 bp, Artificial Sequence
  ENSG00000113558_101 (sequence is synthesized)
agttccagtgatagaaattaaggtctttggaaaagagataccgtcctataatggtggctgaatagaacaccttatttcagtggagggagtgagctctgtggattgctgtgtagattttat

SEQ ID NO: 197502 - DNA, 120 bp, Artificial Sequence
  ENSG00000113558_102 (sequence is synthesized)
tgtggattgctgtgtagattttatttattgattgatttatttgagacagagtctcactcttgtccaggctggagtgcagtgatgcagtcacggctcactgcagcctcaaccttctgggct

SEQ ID NO: 197503 - DNA, 120 bp, Artificial Sequence
  ENSG00000113569_0 (sequence is synthesized)
gtcgaggcgccaaggcgctcgtttggcgcgcgcgccctaggcggcggatctaagctaacttcttggatcttttcttgtttctccttggtttttgactttttctggaccctggtgtctacg

SEQ ID NO: 197504 - DNA, 120 bp, Artificial Sequence
  ENSG00000113569_1 (sequence is synthesized)
atttccgagatgccgtcttctttgttgggcgcggcgatgccggcctctacatctgccgcagccctgcaggaagctctggaaaatgctggacggctcatcgaccgtcagttgcaagaggac

SEQ ID NO: 197505 - DNA, 120 bp, Artificial Sequence
  ENSG00000113569_2 (sequence is synthesized)
cgcatgtacccggacctttccgagctgcttatggtgtctgccccaaataatcccaccgtttctggcatgtcagatatggattatcctttgcaaggacctggtttgctgtccgtacccaac

SEQ ID NO: 197506 - DNA, 120 bp, Artificial Sequence
  ENSG00000113569_3 (sequence is synthesized)
cttccagagatcagttccatccgaagagttcctctcccacctgaacttgttgagcagtttggacatatgcagtgtaattgcatgatgggtgtgttccctcctatcagcagagcttggctc

SEQ ID NO: 197507 - DNA, 120 bp, Artificial Sequence
  ENSG00000113569_4 (sequence is synthesized)
acaattgacagtgatatattcatgtggaactatgaggatggaggagaccttgcctattttgatggacttagtgagactattcttgctgtggggcttgtgaagccaaaagcaggcatcttt

SEQ ID NO: 197508 - DNA, 120 bp, Artificial Sequence
  ENSG00000113569_5 (sequence is synthesized)
caacctcatgtgcgacacctcctggttttggcgacccctgtagacatagtaattcttggactcagctatgctaatttgcaaacaggttctggagttcttaatgatagtttgtctggtgga

SEQ ID NO: 197509 - DNA, 120 bp, Artificial Sequence
  ENSG00000113569_6 (sequence is synthesized)
atgcagttgcttccagatcctttatattctcttcctactgataatacttaccttttaacaataacttccactgataatggcagaattttcttggctggaaaggatggctgtttatatgaa

SEQ ID NO: 197510 - DNA, 120 bp, Artificial Sequence
  ENSG00000113569_7 (sequence is synthesized)
gtagcctaccaggctgaagcagggtggtttagccaaagatgtaggaaaataaaccactcaaagagctcactttctttccttgttccttccttgctacaattcacgttctcagaagatgat

SEQ ID NO: 197511 - DNA, 120 bp, Artificial Sequence
  ENSG00000113569_8 (sequence is synthesized)
cctattcttcaaattgcaattgataattctagaaatattttatatacacgatctgagaaaggagtaatacaggtgtatgatttgggacaagatggacaaggaatgagcagagttgcctct

SEQ ID NO: 197512 - DNA, 120 bp, Artificial Sequence
  ENSG00000113569_9 (sequence is synthesized)
gtgtcacagaatgccattgtctctgctgctggtaacattgctaggaccatcgatcgttctgtttttaaaccaattgtccaaatagcagtgattgaaaattctgaatcactggactgtcag

SEQ ID NO: 197513 - DNA, 120 bp, Artificial Sequence
  ENSG00000113569_10 (sequence is synthesized)
ttattggctgtcacacatgcaggtgttaggttatattttagcacttgtccattcagacagccattagcacggcctaatacactgacgctggttcatgtccgcttacctcctggattctca

SEQ ID NO: 197514 - DNA, 120 bp, Artificial Sequence
  ENSG00000113569_11 (sequence is synthesized)
gcatcttcaaccgtggaaaagccttcaaaagtacatagagctctttatagtaaaggtattctattgatggcagcctcagaaaatgaggataatgatattttatggtgtgtcaaccatgat

SEQ ID NO: 197515 - DNA, 120 bp, Artificial Sequence
  ENSG00000113569_12 (sequence is synthesized)
acttttcctttccaaaagccaatgatggaaacccagatgacagctggtgttgatggtcattcctgggctctttctgcgatagatgaattgaaagtagataaaataattacacctttaaac

SEQ ID NO: 197516 - DNA, 120 bp, Artificial Sequence
  ENSG00000113569_13 (sequence is synthesized)
aaggatcatattccaataactgattcaccagttgttgtacagcagcacatgttacctccgaagaaatttgttctcctctcagcacaggggagccttatgtttcataaacttagacctgta

SEQ ID NO: 197517 - DNA, 120 bp, Artificial Sequence
  ENSG00000113569_14 (sequence is synthesized)
gatcaactgaggcatctacttgtgagtaatgtgggaggagatggagaagagattgaaagattctttaaattacatcaggaagaccaggcttgtgcaacttgccttattcttgcttgctcc

SEQ ID NO: 197518 - DNA, 120 bp, Artificial Sequence
  ENSG00000113569_15 (sequence is synthesized)
actgctgcctgtgatagagaagtatctgcctgggctactcgggctttctttaggtatggtggtgaagcacagatgagatttccaaccactcttccgcctccaagtaatgttggtcccatc

SEQ ID NO: 197519 - DNA, 120 bp, Artificial Sequence
  ENSG00000113569_16 (sequence is synthesized)
ttggggtctcctgtctattctagttctcctgttcctagtggtagtccctatccaaatccatcctttttgggaacaccgtctcatggtatacagcctcctgccatgtcaactccagtgtgt

SEQ ID NO: 197520 - DNA, 120 bp, Artificial Sequence
  ENSG00000113569_17 (sequence is synthesized)
gctctgggaaacccagcaactcaggccacaaatatgagttgtgtgactggaccagagattgtgtactctggaaaacacaatggtatttgcatttacttttctcggatcatgggaaacatt

SEQ ID NO: 197521 - DNA, 120 bp, Artificial Sequence
  ENSG00000113569_18 (sequence is synthesized)
tgggatgcaagcttagttgtggagagaatattcaagagtggcaacagagagatcactgcaattgaaagtagtgttccctgccaactgctagagtcagtgctacaagaactaaagggtttg

SEQ ID NO: 197522 - DNA, 120 bp, Artificial Sequence
  ENSG00000113569_19 (sequence is synthesized)
caggaatttctagacagaaactcccagtttgcaggaggaccattaggaaatccaaatactactgctaaagtgcagcagaggctgataggattcatgcgtcctgaaaacggaaatccccag

SEQ ID NO: 197523 - DNA, 120 bp, Artificial Sequence
  ENSG00000113569_20 (sequence is synthesized)
caaatgcaacaggaactgcagaggaagtttcatgaggctcaactaagtgaaaagatttcacttcaggcaattcagcagttggttcgaaaatcatatcaggctctggctttatggaaactt

SEQ ID NO: 197524 - DNA, 120 bp, Artificial Sequence
  ENSG00000113569_21 (sequence is synthesized)
ctttgtgaacatcaattcactatcattgtggcagaacttcagaaggaacttcaagagcagctgaagatcaccacctttaaagatcttgtaatcagggacaaagaactcacaggggcatta

SEQ ID NO: 197525 - DNA, 120 bp, Artificial Sequence
  ENSG00000113569_22 (sequence is synthesized)
attgcttctcttatcaactgctacatcagagataatgccgctgttgatggcattagtttacatttacaggatatctgcccacttctatatagcactgatgatgcaatttgttctaaggca

SEQ ID NO: 197526 - DNA, 120 bp, Artificial Sequence
  ENSG00000113569_23 (sequence is synthesized)
aatgagcttctccagcgttcccgacaagttcaaaataagactgaaaaagaaagaatgttaagggaatcattaaaggaatatcaaaaaattagcaatcaagtggacctttccaatgtttgt

SEQ ID NO: 197527 - DNA, 120 bp, Artificial Sequence
  ENSG00000113569_24 (sequence is synthesized)
gctcagtatagacaagtgagattttatgagggtgtggtggaactttctcttacggctgcagagaaaaaagatcctcaaggtcttgggcttcatttctataaacatggagaaccagaagaa

SEQ ID NO: 197528 - DNA, 120 bp, Artificial Sequence
  ENSG00000113569_25 (sequence is synthesized)
gacatagttggacttcaggccttccaagaaagattaaacagttacaaatgcattacagacacacttcaagaactggtaaatcaaagtaaggccgctcctcagtctcccagtgtacccaaa

SEQ ID NO: 197529 - DNA, 120 bp, Artificial Sequence
  ENSG00000113569_26 (sequence is synthesized)
aaacctggtcctccagtgttgtcatctgatccaaatatgctgagtaatgaagaagcaggacatcattttgaacaaatgcttaaattgtcacagcgatccaaggatgagctctttagtatt

SEQ ID NO: 197530 - DNA, 120 bp, Artificial Sequence
  ENSG00000113569_27 (sequence is synthesized)
gccctttataattggctaatacaagtcgaccttgcagataagctgctacaggttgcttctccatttctggagccacatctagtccgaatggccaaagttgatcaaaacagagttcgttat

SEQ ID NO: 197531 - DNA, 120 bp, Artificial Sequence
  ENSG00000113569_28 (sequence is synthesized)
atggatttactctggcggtattacgagaagaacagaagtttcagtaatgctgctcgtgtactgtccagactggctgacatgcatagcacagaaatttcacttcagcagcgactagagtac

SEQ ID NO: 197532 - DNA, 120 bp, Artificial Sequence
  ENSG00000113569_29 (sequence is synthesized)
attgctcgagccattcttagtgccaaaagttccactgccatttcatcaatagctgccgatggtgaatttcttcatgaattagaagaaaaaatggaggttgctaggatccaacttcagata

SEQ ID NO: 197533 - DNA, 120 bp, Artificial Sequence
  ENSG00000113569_30 (sequence is synthesized)
caggagacactacaaaggcagtattcccatcattcttctgtacaggatgcagtttctcagctggattctgagctgatggacataactaagctttatggggaatttgctgacccatttaaa

SEQ ID NO: 197534 - DNA, 120 bp, Artificial Sequence
  ENSG00000113569_31 (sequence is synthesized)
cttgcagagtgcaaacttgcaataattcattgtgccggttattcagaccctatattggtgcagacactttggcaagatatcatagagaaagaattgagtgacagtgtgacattgagctcc

SEQ ID NO: 197535 - DNA, 120 bp, Artificial Sequence
  ENSG00000113569_32 (sequence is synthesized)
tcggatagaatgcatgctcttagtctcaagattgttctccttggcaaaatttatgctggcacaccacgcttctttcctttagattttattgtacagtttttagaacagcaggtttgtact

SEQ ID NO: 197536 - DNA, 120 bp, Artificial Sequence
  ENSG00000113569_33 (sequence is synthesized)
agacaatgaatgaaattggagtaccattacctagactactagaagtttatgatcagttgttcaaatcacgggatccattctggaacagaatgaagaagccactgcaccttttggattgta

SEQ ID NO: 197537 - DNA, 120 bp, Artificial Sequence
  ENSG00000113569_34 (sequence is synthesized)
tacatgtattattgataagatatgttgagaatcccagccaagttttaaattgtgaaaggagaagatttacaaatctctgcctggatgctgtttgtggttaccttgttgagctccagtcta

SEQ ID NO: 197538 - DNA, 120 bp, Artificial Sequence
  ENSG00000113569_35 (sequence is synthesized)
tgagctcgtcagtagcagtacaagccatcactgggaattttaaatctcttcaagctaaattagaacggcttcattaattactgtgatatactttcatccgttttatgatctgtaaaataa

SEQ ID NO: 197539 - DNA, 120 bp, Artificial Sequence
  ENSG00000113569_36 (sequence is synthesized)
aaactcagctgggtccagatatcaggtgttctaaatctaagaatgtaagaacaatcttaatagaaatatgtttttaataagtggctaatatctacaaatagtacctttgctaaatgaatt

SEQ ID NO: 197540 - DNA, 120 bp, Artificial Sequence
  ENSG00000113569_37 (sequence is synthesized)
tttatgactattttgttttttagtaattgggtgaaaaaacaactgaaatgagattatttattattttaacataaggattaaaaaaatttagaaactcttattttgaattgtactgcaggc

SEQ ID NO: 197541 - DNA, 120 bp, Artificial Sequence
  ENSG00000113569_38 (sequence is synthesized)
gaattgtactgcaggcagaaatttcgaatttatattattcattttcaagttagtccaaggatattggcattaaaactccactaggcggccaggcacagtgacttacacctgtaatcccag

SEQ ID NO: 197542 - DNA, 120 bp, Artificial Sequence
  ENSG00000113569_39 (sequence is synthesized)
gaacccgggaggcagaggtttcagtgagtcaaaatcgcaccattgcactccagcccaggcaacagggcgagactctgtctcaaaaaacaaaaaaacctcaaataggctaagcagatccat

SEQ ID NO: 197543 - DNA, 120 bp, Artificial Sequence
  ENSG00000113569_40 (sequence is synthesized)
aaacaaaaaaacctcaaataggctaagcagatccattcccataatagtggattctaaaaccgtccttaaataggcaaataactgactttttcaaaactttttttaggtgttgggttcacc

SEQ ID NO: 197544 - DNA, 120 bp, Artificial Sequence
  ENSG00000113569_41 (sequence is synthesized)
cttgaaagaactgtcctctaacaactggttttgtcagttaaagcccttgagaattgacatagctatatacctggttgagcaggtgataaaacttgtaactaatgttgtgtcctgaaaacc

SEQ ID NO: 197545 - DNA, 120 bp, Artificial Sequence
  ENSG00000113569_42 (sequence is synthesized)
tacacagggaggtactgttttcccttagtgtctacctggctgcttggccttgtgactactgattccattagagcagtggttctcaaagtatgtgctccaaaccagaagcatcagcatcag

SEQ ID NO: 197546 - DNA, 120 bp, Artificial Sequence
  ENSG00000113569_43 (sequence is synthesized)
catcagcatcacctaggaatttgttagaaatgcaaattctcgagccccaacccagacctactgaatcaaaaacgtgggggatgaggccctgctttctatgttttaacaagctctccagga

SEQ ID NO: 197547 - DNA, 120 bp, Artificial Sequence
  ENSG00000113569_44 (sequence is synthesized)
gattttggtgcatgtcaaatttgaaagccactgcagtaaaggatactgctaccttccatagtttatggactgagctacctatctggctcctcctctgtgaataaccacacacacaaattt

SEQ ID NO: 197548 - DNA, 120 bp, Artificial Sequence
  ENSG00000113569_45 (sequence is synthesized)
tgcccaaggcacacaatatataaagcaaaactgttagtaatgtactttttaattattccttaacaaaatagaataaccaaaccaaatgcttcaaagtaatagcaacaagagagaagaaga

SEQ ID NO: 197549 - DNA, 90 bp, Artificial Sequence
  ENSG00000113569_46 (sequence is synthesized)
accaaatgcttcaaagtaatagcaacaagagagaagaagagtgggaatgaccagagctaacaaaacactctattcctttctctccctgta

SEQ ID NO: 197550 - DNA, 120 bp, Artificial Sequence
  ENSG00000113569_47 (sequence is synthesized)
atctgcccgcctccacctcccaaagtgttgagattacagacgtgagccaatgtgcctggcctattcccttctctctttatgctaccacaaataattaccttctgtttattgtaagtgatg

SEQ ID NO: 197551 - DNA, 120 bp, Artificial Sequence
  ENSG00000113569_48 (sequence is synthesized)
gctaccacaaataattaccttctgtttattgtaagtgatgcatgtctaacaatttgtacaatacattttgaatatatttttccttccattattgtcttttcccaagaccatagggttgcc

SEQ ID NO: 197552 - DNA, 120 bp, Artificial Sequence
  ENSG00000113569_49 (sequence is synthesized)
ttctctacatttgttctcttagaattcagctcccttttccctataatcttctaatgtagaatatttaatagaatgccagaacgtcactcagtgggtactactacctcttatttttcaact

SEQ ID NO: 197553 - DNA, 120 bp, Artificial Sequence
  ENSG00000113569_50 (sequence is synthesized)
tttcagtttcttaagtttagcgttttttgaatatgtaaagtgaatgtatgcgatacattaattcgttttataaatttaaaattctgtcatgtctacttaaaaggaaggccttgtctgaat

SEQ ID NO: 197554 - DNA, 120 bp, Artificial Sequence
  ENSG00000113569_51 (sequence is synthesized)
gttgtaatttaggtgtgactccagttctgctagagataagaacttcatttttgttttaagcacatttacatactagcaatatgttgttatatatactcagctcacaacattgaaagtaca

SEQ ID NO: 197555 - DNA, 120 bp, Artificial Sequence
  ENSG00000113569_52 (sequence is synthesized)
tgttttaaaagggctgtaggcttccatggttagatggtctgttagagtcagaaatctgaacactgtccttttattcacacagcatgctttgagaggttttaggaattccagccccacaac

SEQ ID NO: 197556 - DNA, 120 bp, Artificial Sequence
  ENSG00000113569_53 (sequence is synthesized)
agatgcttgcaataccttttggggggtaagattcctaagagagaagaaattaggtcccctcatttttacccttggaacagtgtttctaaaactttcacattcagaacaatcagccggata

SEQ ID NO: 197557 - DNA, 120 bp, Artificial Sequence
  ENSG00000113569_54 (sequence is synthesized)
gcctgttatgacagattcttgagttccatctgtagtgtcatgctgatcctggcagtcagtggatcagagttggagtagcatttatccactgtattagtatactttgtacttggtgtttgt

SEQ ID NO: 197558 - DNA, 120 bp, Artificial Sequence
  ENSG00000113569_55 (sequence is synthesized)
tttatccactgtattagtatactttgtacttggtgtttgttcaacgcattacttttttgaatttttttgttttttgaagacaagggcttgccctggagtgcagtggcatgatcttggctc

SEQ ID NO: 197559 - DNA, 120 bp, Artificial Sequence
  ENSG00000113569_56 (sequence is synthesized)
cctgggctcaactcagtcttcccacctcatcctcttaaatagctgggactacaggcacgtgctgctacaccctgctattgtctgtttgtttgtttgagactgagttttgctcttgttgcc

SEQ ID NO: 197560 - DNA, 86 bp, Artificial Sequence
  ENSG00000113569_57 (sequence is synthesized)
tttttttttttttaattttttgtgtagccaaaagatctcactctgttgcccagactgctctcaaaactcctggccttaagtgattc

SEQ ID NO: 197561 - DNA, 120 bp, Artificial Sequence
  ENSG00000113569_58 (sequence is synthesized)
ttatttctttatagtgactattatatgtaggcaatgtataattggtagaacatagtctatgaaacagtgcgttaattgtgggcagtgaagaatcattgaagttgtgaaatttgtatttta

SEQ ID NO: 197562 - DNA, 120 bp, Artificial Sequence
  ENSG00000113569_59 (sequence is synthesized)
actagatcattgtagtatggcaaaacggttaggaaagagaaagctatcttgactaactgtttatgctatgagatactgactgatgtacatgtacatttagtgtttctttaggtatacctg

SEQ ID NO: 197563 - DNA, 120 bp, Artificial Sequence
  ENSG00000113569_60 (sequence is synthesized)
acttattcattgaacacctatccactgatctcaaaagtattcctcagggtagtctccattcctgtcatttttcctcctattcatgagacggaaaaattatgaccatggtacagagttgta

SEQ ID NO: 197564 - DNA, 120 bp, Artificial Sequence
  ENSG00000113569_61 (sequence is synthesized)
tcaaggaaatgaagaactagaacattgaattgaaaggttttgaaagggttcacaatttcttttcattttctattaatgtcttcttttaaattctcttaagaataaaacttttttctaata

SEQ ID NO: 197565 - DNA, 120 bp, Artificial Sequence
  ENSG00000113569_62 (sequence is synthesized)
attttgctttttgtttcatggggaaaattaccttatctccacaaataagataaggcatctttggcagcttgtcactgggctgacagatcaccactgcttcatctgactcctagaaaaagg

SEQ ID NO: 197566 - DNA, 120 bp, Artificial Sequence
  ENSG00000113569_63 (sequence is synthesized)
ctaagctactctttccaggccagtagctacaaagaacctatcatcctcgcatgagagctgtgttaaaaccagcttatttccagcctgggcaacatggcaaaacctcatctttacaaaaaa

SEQ ID NO: 197567 - DNA, 120 bp, Artificial Sequence
  ENSG00000113569_64 (sequence is synthesized)
tgttacaacttctgaaaattcttagatttggaaatttattattagaaatatatttttccttctatatctgccgtaaagccatataaatagtttgtaaaataaaggattttgaaaactggg

SEQ ID NO: 197568 - DNA, 120 bp, Artificial Sequence
  ENSG00000113569_65 (sequence is synthesized)
attgcttctcttatcaactgctacatcagagataatgccgctgttgatggcattagtttacatttacaggatatctgcccacttctatatagcactgatgatgcaatttgttctaaggtg

SEQ ID NO: 197569 - DNA, 120 bp, Artificial Sequence
  ENSG00000113569_66 (sequence is synthesized)
gaaaaaataaataaatcagtgtcacatggactgcctgctgcccaataatgtattgactaggcaagagaattaccagacaaaagttctcttgcttaacatatttgggagaggaattaagaa

SEQ ID NO: 197570 - DNA, 120 bp, Artificial Sequence
  ENSG00000113569_67 (sequence is synthesized)
gactctcgcctgacttcctaatttgctacttatccccagcgttggtcccggcgaggatatgctgagatttatggcactgttggctgcatttttggagaacagcaagcagcttcttttcag

SEQ ID NO: 197571 - DNA, 120 bp, Artificial Sequence
  ENSG00000113569_68 (sequence is synthesized)
taataagtttttaatgttgtttgaaatattaactataatcagatatataatttagtagccatgtgatattaaatgctttttaatagcgataagttttgcatggatcctgatgtctacttt

SEQ ID NO: 197572 - DNA, 120 bp, Artificial Sequence
  ENSG00000113575_0 (sequence is synthesized)
acagagagccgagctctggagcctcagcgagcggaggaggaggcgcagcggccgacggccgagtactgcggtgagagccagcgggccagcgccagcctcaacagccgccagaagtacacg

SEQ ID NO: 197573 - DNA, 120 bp, Artificial Sequence
  ENSG00000113575_1 (sequence is synthesized)
aggaaccggcggcggcgtgtgcgtgtaggcccgtgtgcgggcggcggcgcgggagcagcgcggagcggcagccggctggggcgggtggcatcatggacgagaaggtgttcaccaaggagc

SEQ ID NO: 197574 - DNA, 120 bp, Artificial Sequence
  ENSG00000113575_2 (sequence is synthesized)
tggaccagtggatcgagcagctgaacgagtgcaagcagctgtccgagtcccaggtcaagagcctctgcgagaaggctaaagaaatcctgacaaaagaatccaacgtgcaagaggttcgat

SEQ ID NO: 197575 - DNA, 120 bp, Artificial Sequence
  ENSG00000113575_3 (sequence is synthesized)
gtccagttactgtctgtggagatgtgcatgggcaatttcatgatctcatggaactgtttagaattggtggcaaatcaccagatacaaattacttgtttatgggagattatgttgacagag

SEQ ID NO: 197576 - DNA, 120 bp, Artificial Sequence
  ENSG00000113575_4 (sequence is synthesized)
gatattattcagttgaaacagttacactgcttgtagctcttaaggttcgttaccgtgaacgcatcaccattcttcgagggaatcatgagagcagacagatcacacaagtttatggtttct

SEQ ID NO: 197577 - DNA, 120 bp, Artificial Sequence
  ENSG00000113575_5 (sequence is synthesized)
atgatgaatgtttaagaaaatatggaaatgcaaatgtttggaaatattttacagatctttttgactatcttcctctcactgccttggtggatgggcagatcttctgtctacatggtggtc

SEQ ID NO: 197578 - DNA, 120 bp, Artificial Sequence
  ENSG00000113575_6 (sequence is synthesized)
tctcgccatctatagatacactggatcatatcagagcacttgatcgcctacaagaagttccccatgagggtccaatgtgtgacttgctgtggtcagatccagatgaccgtggtggttggg

SEQ ID NO: 197579 - DNA, 120 bp, Artificial Sequence
  ENSG00000113575_7 (sequence is synthesized)
gtatatctcctcgaggagctggttacacctttgggcaagatatttctgagacatttaatcatgccaatggcctcacgttggtgtctagagctcaccagctagtgatggagggatataact

SEQ ID NO: 197580 - DNA, 120 bp, Artificial Sequence
  ENSG00000113575_8 (sequence is synthesized)
ggtgccatgaccggaatgtagtaacgattttcagtgctccaaactattgttatcgttgtggtaaccaagctgcaatcatggaacttgacgatactctaaaatactctttcttgcagtttg

SEQ ID NO: 197581 - DNA, 120 bp, Artificial Sequence
  ENSG00000113575_9 (sequence is synthesized)
acccagcacctcgtagaggcgagccacatgttactcgtcgtaccccagactacttcctgtaatgaaattttaaacttgtacagtattgccatgaaccatatatcgacctaatggaaatgg

SEQ ID NO: 197582 - DNA, 120 bp, Artificial Sequence
  ENSG00000113575_10 (sequence is synthesized)
gaagagcaacagtaactccaaagtgtcagaaaatagttaacattcaaaaaacttgttttcacatggaccaaaagatgtgccatataaaaatacaaagcctcttgtcatcaacagccgtga

SEQ ID NO: 197583 - DNA, 120 bp, Artificial Sequence
  ENSG00000113575_11 (sequence is synthesized)
ccactttagaatgaaccagttcattgcatgctgaagcgacattgttggtcaagaaaccagtttctggcatagcgctatttgtagttacttttgctttctctgagagactgcagataataa

SEQ ID NO: 197584 - DNA, 120 bp, Artificial Sequence
  ENSG00000113575_12 (sequence is synthesized)
gatgtaaacattaacacctcgtgaatacaatttaacttccatttagctatagctttactcagcatgactgtagataaggatagcagcaaacaatcattggagcttaatgaacatttttaa

SEQ ID NO: 197585 - DNA, 120 bp, Artificial Sequence
  ENSG00000113575_13 (sequence is synthesized)
aaataattaccaaggcctcccttctacttgtgagttttgaaattgttctttttattttcagggataccgtttaatttaattatatgatttgtctgcactcagtttattccctactcaaat

SEQ ID NO: 197586 - DNA, 120 bp, Artificial Sequence
  ENSG00000113575_14 (sequence is synthesized)
ctcagccccatgttgttctttgttattgtcagaacctggtgagttgttttgaacagaactgttttttccccttcctgtaagacgatgtgactgcacaagagcactgcagtgtttttcata

SEQ ID NO: 197587 - DNA, 120 bp, Artificial Sequence
  ENSG00000113575_15 (sequence is synthesized)
ataaacttgtgaactaagaactgagaaggtcaaattttaattgtatcaatgggcaagactggtgctgtttattaaaaaagttaaatcaattgagtaaattttagaatttgtagacttgta

SEQ ID NO: 197588 - DNA, 120 bp, Artificial Sequence
  ENSG00000113575_16 (sequence is synthesized)
ggtaaaataaaaatcaagggcactacataacctctctggtaactccttgacattcttcagattaacttcaggatttatttgtatttcacatattacaatttgtcacattgttggtgtgca

SEQ ID NO: 197589 - DNA, 120 bp, Artificial Sequence
  ENSG00000113575_17 (sequence is synthesized)
ctttgtgggttcttcctgcatattaacttgtttgtaagaaaggaaatctgtgctgcttcagtaagacttaattgtaaaaccatataacttgagatttaagtctttgggttttgttttaat

SEQ ID NO: 197590 - DNA, 120 bp, Artificial Sequence
  ENSG00000113575_18 (sequence is synthesized)
aaaacagcatgttttcaggtagagcttaaactaaatgatgtgtttacttagtgcagtttctggttatgaatattatattgctatgtgtatattatatggactctttaaaatgattgacag

SEQ ID NO: 197591 - DNA, 120 bp, Artificial Sequence
  ENSG00000113575_19 (sequence is synthesized)
gtacattgttgagtcatatgttcttagagttaaatttgtctcagataagaaagtgttaaagcattagcctgtgtcaagttctttgagtgatactagtgaaaccaaatagaaaactattgt

SEQ ID NO: 197592 - DNA, 120 bp, Artificial Sequence
  ENSG00000113575_20 (sequence is synthesized)
tggatcatgatttagtcttatgtacattcacccgaagacaaaaatggtacttaaagtggcagtgttcaacatttaatgagtttttccccttttatccttcgaataggattagatgtttaa

SEQ ID NO: 197593 - DNA, 120 bp, Artificial Sequence
  ENSG00000113575_21 (sequence is synthesized)
aaaaaagttcttctgtgggaactaatatttgatattttaacctaccagagtaaacaggaacacttaatcatacttgtgagtgtagtaaataaaagttttcttgctttgtgctgtgttgaa

SEQ ID NO: 197594 - DNA, 120 bp, Artificial Sequence
  ENSG00000113575_22 (sequence is synthesized)
tctggaaccaacagggaagttatagcatatcccctttctaaaatgcttgaggaacacatacataccgaatgtcttttctgatctaattgatagtatttttagtggcttgtggagttaatt

SEQ ID NO: 197595 - DNA, 120 bp, Artificial Sequence
  ENSG00000113575_23 (sequence is synthesized)
ttccaaagcaaaaggccattagggtttctacatttcatttcatttcattcttttctttcacaagaaatacattctctgtgtgtctttttgttgctctgtcactctatgccctttctctcc

SEQ ID NO: 197596 - DNA, 120 bp, Artificial Sequence
  ENSG00000113575_24 (sequence is synthesized)
gactgaacaaatagcttatccatgtgcagtggttttaatacccaaacaatctagacaccaagcagctattttttccggtcctgtgatatcagaattgaccaaggaatacgtatattgtaa

SEQ ID NO: 197597 - DNA, 120 bp, Artificial Sequence
  ENSG00000113575_25 (sequence is synthesized)
ttgacacgtggtggtatcttccaggtacaaattctctaaattttgtggttagcagaatgggacttgtgataagaatagcttggttttagcataactagggtttaaaataattgtttaatt

SEQ ID NO: 197598 - DNA, 120 bp, Artificial Sequence
  ENSG00000113575_26 (sequence is synthesized)
atagagactgaccgggctttggccatctaaactggaaagtgttagtaccctaccttcttttgaaaatggctatggtaaggaaaatgtgttagtaaattatgtattttcttgaaaaataca

SEQ ID NO: 197599 - DNA, 120 bp, Artificial Sequence
  ENSG00000113575_27 (sequence is synthesized)
taattatggttggatgggaatcactaagttgggtgttaactgatgtctcaattagtaacattaggattttcattaataaacctaaaaagctttccctaagaacaggcctggcacagtggc

SEQ ID NO: 197600 - DNA, 72 bp, Artificial Sequence
  ENSG00000113575_28 (sequence is synthesized)
gtaatcccagcactttgggagaccagggtgggtggatcccttgaggtcaggagttggaaaatcagccgggct

SEQ ID NO: 197601 - DNA, 80 bp, Artificial Sequence
  ENSG00000113575_29 (sequence is synthesized)
ggcaaaaccccatctctacaaaaaatatgaaaatcagccgggcttggtggcataccctgagcccaggagatggaggttgc

SEQ ID NO: 197602 - DNA, 120 bp, Artificial Sequence
  ENSG00000113575_30 (sequence is synthesized)
gtgacagagccagaccctgtctcaaaaataaagaggattctgagtttgtatagtgagggcttgcagaaattttgaaacttattttgtaagtttacaatgaatttgtacatgatgtgctca

SEQ ID NO: 197603 - DNA, 120 bp, Artificial Sequence
  ENSG00000113575_31 (sequence is synthesized)
tgtcttgggttgagtatcctagacatgattttttcatttgctgcatattaaacatttgttggttgtagtcggtatttcttaaatagaagtttgtcaatattagattagtttcaagaagga

SEQ ID NO: 197604 - DNA, 120 bp, Artificial Sequence
  ENSG00000113575_32 (sequence is synthesized)
cttagctcaggaaaaggatagttatttctgtggttctcagctttgatgcctacagagattctgatttaaattgctggaggagggcccaggcatacattttttaagtttcccaagtgattc

SEQ ID NO: 197605 - DNA, 75 bp, Artificial Sequence
  ENSG00000113575_33 (sequence is synthesized)
gggtgggtggatcacctgatgtcaggagatcgagaccagcctggccagcgtggtgaaaccccatctctattaaaa

SEQ ID NO: 197606 - DNA, 83 bp, Artificial Sequence
  ENSG00000113575_34 (sequence is synthesized)
cacctcactgctgtttcctaagtacatacttaagaaaattgggatacatggtggtggttcatggatgttgataaggaattaaa

SEQ ID NO: 197607 - DNA, 120 bp, Artificial Sequence
  ENSG00000113575_35 (sequence is synthesized)
atacatggtggtggttcatggatgttgataaggaattaaaatgtaccgtgcgactctctgtttcagtggtgacttttacctgtttagtataaatattcctttgcttccaaccataaatgt

SEQ ID NO: 197608 - DNA, 120 bp, Artificial Sequence
  ENSG00000113575_36 (sequence is synthesized)
gttcttagaaatgggcctatagtttagtaacctatagtttggtaataggcttgtttgttttcagatggattttggttctgtgagctaaagctattttgcattaaagccttcgtcctcaca

SEQ ID NO: 197609 - DNA, 120 bp, Artificial Sequence
  ENSG00000113575_37 (sequence is synthesized)
aaaatggcgccgttcactcgactcctgggcttttgagtcagccggccttggcgccagacgaggtggcagggggagcggagaccctgtgggtcatcgtcagggacggttttgagggctaaa

SEQ ID NO: 197610 - DNA, 120 bp, Artificial Sequence
  ENSG00000113575_38 (sequence is synthesized)
ttttgtattccatttatatgacatttctagaaaagacaaactcaagacagtaaatcagtggttgccaggagctggagtgggagtggagagtgactgcaggagggatctttttgggataat

SEQ ID NO: 197611 - DNA, 120 bp, Artificial Sequence
  ENSG00000113575_39 (sequence is synthesized)
ggaaaggttctaaaactggattgtggtgattgttgcataactataaatttgtgaaaaattactgaaccgtaaagtaatttatggggttttaatagcccattgatttatgtttggtataaa

SEQ ID NO: 197612 - DNA, 120 bp, Artificial Sequence
  ENSG00000113575_40 (sequence is synthesized)
gttggtggtagagggagtttgattttagttgagatgaggtgggcaaacaccccatgggcatttaaaaattctgtagagctgtggttttggttcactatgatatgaggatgtgtgctgttt

SEQ ID NO: 197613 - DNA, 120 bp, Artificial Sequence
  ENSG00000113575_41 (sequence is synthesized)
gcatttttttctatagaaagtttcttgaattttcattggtttttgaaagagctagttgtttatgttttgcattttattgttttaggttcgttaccgtgaacgcatcaccattcttcgagg

SEQ ID NO: 197614 - DNA, 120 bp, Artificial Sequence
  ENSG00000113575_42 (sequence is synthesized)
agatttagatttgtttctcccaagcctgaacaaaactactactagtggatgaggtggcacatcatctgttggagatgccttttaatggtagcgatgtattgaatctcctgtttctttacc

SEQ ID NO: 197615 - DNA, 120 bp, Artificial Sequence
  ENSG00000113575_43 (sequence is synthesized)
tttttttttttaaagtactaaaaaaaaaacaagttttgtaattagggggaaaataaatacatgtgtaccttacaggttgtataaagtacaggagattattaagtcatccagaaaaaaagc

SEQ ID NO: 197616 - DNA, 120 bp, Artificial Sequence
  ENSG00000113575_44 (sequence is synthesized)
attaacatttcttaagcccctttggcaggggtgggaatgagtagagatttttttctctcttgagtgaagtaacatttagttgaattgagggagtaaagtaagatttttgtctccttttcc

SEQ ID NO: 197617 - DNA, 120 bp, Artificial Sequence
  ENSG00000113578_0 (sequence is synthesized)
agagctgcagtagcctggaggttcagagagccgggctactctgagaagaagacaccaagtggattctgcttcccctgggacagcactgagcgagtgtggagagaggtacagccctcggcc

SEQ ID NO: 197618 - DNA, 120 bp, Artificial Sequence
  ENSG00000113578_1 (sequence is synthesized)
tacaagctctttagtcttgaaagcgccacaagcagcagctgctgagccatggctgaaggggaaatcaccaccttcacagccctgaccgagaagtttaatctgcctccagggaattacaag

SEQ ID NO: 197619 - DNA, 120 bp, Artificial Sequence
  ENSG00000113578_2 (sequence is synthesized)
aagcccaaactcctctactgtagcaacgggggccacttcctgaggatccttccggatggcacagtggatgggacaagggacaggagcgaccagcacattcagctgcagctcagtgcggaa

SEQ ID NO: 197620 - DNA, 120 bp, Artificial Sequence
  ENSG00000113578_3 (sequence is synthesized)
agcgtgggggaggtgtatataaagagtaccgagactggccagtacttggccatggacaccgacgggcttttatacggctcacagacaccaaatgaggaatgtttgttcctggaaaggctg

SEQ ID NO: 197621 - DNA, 120 bp, Artificial Sequence
  ENSG00000113578_4 (sequence is synthesized)
gaggagaaccattacaacacctatatatccaagaagcatgcagagaagaattggtttgttggcctcaagaagaatgggagctgcaaacgcggtcctcggactcactatggccagaaagca

SEQ ID NO: 197622 - DNA, 120 bp, Artificial Sequence
  ENSG00000113578_5 (sequence is synthesized)
atcttgtttctccccctgccagtctcttctgattaaagagatctgttctgggtgttgaccactccagagaagtttcgaggggtcctcacctggttgacccaaaaatgttcccttgaccat

SEQ ID NO: 197623 - DNA, 120 bp, Artificial Sequence
  ENSG00000113578_6 (sequence is synthesized)
tggctgcgctaacccccagcccacagagcctgaatttgtaagcaacttgcttctaaatgcccagttcacttctttgcagagccttttacccctgcacagtttagaacagagggaccaaat

SEQ ID NO: 197624 - DNA, 120 bp, Artificial Sequence
  ENSG00000113578_7 (sequence is synthesized)
tgcttctaggagtcaactggctggccagtctgggtctgggtttggatctccaattgcctcttgcaggctgagtccctccatgcaaaagtggggctaaatgaagtgtgttaaggggtcggc

SEQ ID NO: 197625 - DNA, 120 bp, Artificial Sequence
  ENSG00000113578_8 (sequence is synthesized)
taagtgggacattagtaactgcacactatttccctctactgagtaaaccctatctgtgattcccccaaacatctggcatggctcccttttgtccttcctgtgccctgcaaatattagcaa

SEQ ID NO: 197626 - DNA, 120 bp, Artificial Sequence
  ENSG00000113578_9 (sequence is synthesized)
agaagcttcatgccaggttaggaaggcagcattccatgaccagaaacagggacaaagaaatccccccttcagaacagaggcatttaaaatggaaaagagagattggattttggtgggtaa

SEQ ID NO: 197627 - DNA, 120 bp, Artificial Sequence
  ENSG00000113578_10 (sequence is synthesized)
cttagaaggatggcatctccatgtagaataaatgaagaaagggaggcccagccgcaggaaggcagaataaatccttgggagtcattaccacgccttgaccttcccaaggttactcagcag

SEQ ID NO: 197628 - DNA, 120 bp, Artificial Sequence
  ENSG00000113578_11 (sequence is synthesized)
cagagagccctgggtgacttcaggtggagagcactagaagtggtttcctgataacaagcaaggatatcagagctgggaaattcatgtggatctggggactgagtgtgggagtgcagagaa

SEQ ID NO: 197629 - DNA, 120 bp, Artificial Sequence
  ENSG00000113578_12 (sequence is synthesized)
agaaagggaaactggctgaggggataccataaaaagaggatgatttcagaaggagaaggaaaaagaaagtaatgccacacattgtgcttggcccctggtaagcagaggctttggggtcct

SEQ ID NO: 197630 - DNA, 120 bp, Artificial Sequence
  ENSG00000113578_13 (sequence is synthesized)
agcccagtgcttctccaacactgaagtgcttgcagatcatctggggacctggtttgaatggagattctgattcagtgggttgggggcagagtttctgcagttccatcaggtcccccccag

SEQ ID NO: 197631 - DNA, 120 bp, Artificial Sequence
  ENSG00000113578_14 (sequence is synthesized)
gtgcaggtgctgacaatactgctgccttacccgccatacattaaggagcagggtcctggtcctaaagagttattcaaatgaaggtggttcgacgccccgaacctcacctgacctcaacta

SEQ ID NO: 197632 - DNA, 120 bp, Artificial Sequence
  ENSG00000113578_15 (sequence is synthesized)
tacctgagcattcaggcagcactgacaatagttatgcctgtactaaggagcatgattttaagaggctttggcccaatgcctataaaatgcccatttcgaagatatacaaaaacatacttc

SEQ ID NO: 197633 - DNA, 120 bp, Artificial Sequence
  ENSG00000113578_16 (sequence is synthesized)
aaaaatgttaaacccttaccaacagcttttcccaggagaccatttgtattaccattacttgtataaatacacttcctgcttaaacttgacccaggtggctagcaaattagaaacaccatt

SEQ ID NO: 197634 - DNA, 120 bp, Artificial Sequence
  ENSG00000113578_17 (sequence is synthesized)
catctctaacatatgatactgatgccatgtaaaggcctttaataagtcattgaaatttactgtgagactgtatgttttaattgcatttaaaaatatatagcttgaaagcagttaaactga

SEQ ID NO: 197635 - DNA, 120 bp, Artificial Sequence
  ENSG00000113578_18 (sequence is synthesized)
ttagtattcaggcactgagaatgatagtaataggatacaatgtataagctactcacttatctgatacttatttacctataaaatgagatttttgttttccactgtgctattacaaatttt

SEQ ID NO: 197636 - DNA, 120 bp, Artificial Sequence
  ENSG00000113578_19 (sequence is synthesized)
cttttgaaagtaggaactcttaagcaatggtaattgtgaataaaaattgatgagagtgttagctcctgtttcatatgaaattgaagtaattgttaactaaaaacaattccttagtaactg

SEQ ID NO: 197637 - DNA, 120 bp, Artificial Sequence
  ENSG00000113578_20 (sequence is synthesized)
aactgtcatatttagaatggaaggaaaatgacagtttgtgaaagttcaaagcaatagtgcaattgaagaattgacctaagtaagctgacattatggttaataatagtattttagatttgt

SEQ ID NO: 197638 - DNA, 120 bp, Artificial Sequence
  ENSG00000113578_21 (sequence is synthesized)
gcagcaaaataatttcataacttttttgtttttgttacttggataagatcaatctgttttattttagtaaatctttgcaggcaagttagagaaaatgcagtgtggcttaacgtctcttta

SEQ ID NO: 197639 - DNA, 120 bp, Artificial Sequence
  ENSG00000113578_22 (sequence is synthesized)
gtatgaagatttggccagaaaaagatacccagagaggaaatctaagataattataatggtccatactttttattgtatgaatcaaactcaagcataacattggccaaggaaaattaaata

SEQ ID NO: 197640 - DNA, 120 bp, Artificial Sequence
  ENSG00000113578_23 (sequence is synthesized)
ccattgctaacttgtgaaatggaagtctgtgatttcggagatgcaaagcattgtagtaaaaacaccaatgtgacctcgaccatctcagcccagatatcattcatatatctgttcaatgac

SEQ ID NO: 197641 - DNA, 120 bp, Artificial Sequence
  ENSG00000113578_24 (sequence is synthesized)
tattaaggtgcctactgtgtgctaggcactgtactggatactggggaccttgtctgtctggtttgctgctgtatcttctcccagggcattatatttatgatgaaagatgctgtggattca

SEQ ID NO: 197642 - DNA, 120 bp, Artificial Sequence
  ENSG00000113578_25 (sequence is synthesized)
attctttcagtcaagaataaacacagactttgtaggttcctgctgaataaagcaaatcccagaaacccagattttggaagaatcagcaaccccagcataaaataaacccctatcaaaatg

SEQ ID NO: 197643 - DNA, 120 bp, Artificial Sequence
  ENSG00000113578_26 (sequence is synthesized)
tcagaggacatggcaaggtaaacttagcattttcaactttagaaccgggtcagcttcagggggactgctttcaaatcagccaaagagcctgtcagatcttcttagaaggaagaggttggt

SEQ ID NO: 197644 - DNA, 120 bp, Artificial Sequence
  ENSG00000113578_27 (sequence is synthesized)
agttccctgctctgttttgaacatgctctagtttattaacctggggacattcccattgctgtcttaagtaagtctcatagccagctcctgtcacgtgactctcatatggattcattttcg

SEQ ID NO: 197645 - DNA, 120 bp, Artificial Sequence
  ENSG00000113578_28 (sequence is synthesized)
ggccagctctgaacaaagcatcatgaacatatgtgcttttggtcgtttgcaatgtgatggtggtggaggtaggtattggtttccttggaaggcatgataagaaagattcacaatggccaa

SEQ ID NO: 197646 - DNA, 120 bp, Artificial Sequence
  ENSG00000113578_29 (sequence is synthesized)
cagtgtgtatgaacaaaaaactgattggagcatcagctagtactgaaggtccttgctttgtgtcagaggcaaaggaacccaaggcgccaagtcctcagccttgagtgtactgctgacaac

SEQ ID NO: 197647 - DNA, 120 bp, Artificial Sequence
  ENSG00000113578_30 (sequence is synthesized)
taaactcacaggctgcaaagcagacctctgatgaagatgcctgttatttcacatcactgtctttttgtgtatcatagtctgcaccttacaaatattaataaatgttccaataataggtga

SEQ ID NO: 197648 - DNA, 120 bp, Artificial Sequence
  ENSG00000113578_31 (sequence is synthesized)
gactgcaaaaatatgaatgcaccatgccgccacattatctccattcctccagtgcccgcctgacactggccctgaatcagggctggagggggcaggcatttctcatttactaaagtgctg

SEQ ID NO: 197649 - DNA, 120 bp, Artificial Sequence
  ENSG00000113578_32 (sequence is synthesized)
tacagtgcttgtccttagcctttctgtgggcataccagtgtcagctgcacttgtaggggcccaagtgcctcatgacccactcggcagccttcctctccaggatccccaaggctaggaggc

SEQ ID NO: 197650 - DNA, 120 bp, Artificial Sequence
  ENSG00000113578_33 (sequence is synthesized)
tcaaaatgacctaagatattctgagtcagagaaaacaaaaggaacagcttaaagagagcaccaactcagtgaggcaaccaggcagtggggccggctggccagactcttgggggattcctt

SEQ ID NO: 197651 - DNA, 120 bp, Artificial Sequence
  ENSG00000113578_34 (sequence is synthesized)
agagagaggacaagtggatccaacagccttcgctccaggggaatcagggcatcgcctccttttctgggaggacactcccttctgatggtgaatgggaactcccttcctcctgcagcagcc

SEQ ID NO: 197652 - DNA, 120 bp, Artificial Sequence
  ENSG00000113578_35 (sequence is synthesized)
agagagccgggctactctgagaagaagacaccaagtggattctgcttcccctgggacagcactgagcgagtgtggagagaggtacagccctcggcctacaagctctttagagcacaatta

SEQ ID NO: 197653 - DNA, 120 bp, Artificial Sequence
  ENSG00000113578_36 (sequence is synthesized)
aagaagatcaggtctggctgttgctcggcttcctttctcgttgtgactatgagagggaacacagagttgtgtggactcagtcatggcaattaccctcttctttgtcatcacttcttcctg

SEQ ID NO: 197654 - DNA, 120 bp, Artificial Sequence
  ENSG00000113580_0 (sequence is synthesized)
aggttatgtaagggtttgctttcaccccattcaaaaggtacctcttcctcttctcttgctccctctcgccctcattcttgtgcctatgcagacatttgagtagaggcgaatcactttcac

SEQ ID NO: 197655 - DNA, 120 bp, Artificial Sequence
  ENSG00000113580_1 (sequence is synthesized)
ttctgctggggaaattgcaacacgcttctttaaatggcagagagaaggagaaaacttagatcttctgataccaaatcactggaccttagaaggtcagaaatctttcaagccctgcaggac

SEQ ID NO: 197656 - DNA, 120 bp, Artificial Sequence
  ENSG00000113580_2 (sequence is synthesized)
cgtaaaatgcgcatgtgtccaacggaagcactggggcatgagtggggaaggaatagaaacagaaagagggtaagagaagaaaaaagggaaagtggtgaaggcagggaggaaaattgctta

SEQ ID NO: 197657 - DNA, 120 bp, Artificial Sequence
  ENSG00000113580_3 (sequence is synthesized)
gtgtgaatatgcacgcattcatttagttttcaaatccttgttgagcatgataaaattcccagcatcagacctcacatgttggtttccattaggatctgcctgggggaatatctgctgaat

SEQ ID NO: 197658 - DNA, 120 bp, Artificial Sequence
  ENSG00000113580_4 (sequence is synthesized)
cagtggctctgagctgaactaggaaattcaccataattaggagagtcactgtatttctctccaaaaaaaaaaaagttatacccgagagacaggatcttctgatctgaaattttcttcact

SEQ ID NO: 197659 - DNA, 120 bp, Artificial Sequence
  ENSG00000113580_5 (sequence is synthesized)
tctgaaattctctggtttgtgctcatcgttggtagctatttgttcatcaagagttgtgtagctggcttcttctgaaaaaaggaatctgcgtcatatctaagtcagatttcattctggtgc

SEQ ID NO: 197660 - DNA, 120 bp, Artificial Sequence
  ENSG00000113580_6 (sequence is synthesized)
tctcagagcagttagcccaggaaaggggccagcttctgtgacgactgctgcagaggcaggtgcagtttgtgtgccacagatattaactttgataagcacttaatgagtgccttctctgtg

SEQ ID NO: 197661 - DNA, 120 bp, Artificial Sequence
  ENSG00000113580_7 (sequence is synthesized)
cgagaatggggaggaacaaaatgcagctcctaccctcctcgggctttagttgtaccttaataacaggaattttcatctgcctggctcctttcctcaaagaacaaagaagactttgcttca

SEQ ID NO: 197662 - DNA, 120 bp, Artificial Sequence
  ENSG00000113580_8 (sequence is synthesized)
ttaaagtgtctgagaaggaagttgatattcactgatggactccaaagaatcattaactcctggtagagaagaaaaccccagcagtgtgcttgctcaggagaggggagatgtgatggactt

SEQ ID NO: 197663 - DNA, 120 bp, Artificial Sequence
  ENSG00000113580_9 (sequence is synthesized)
ctataaaaccctaagaggaggagctactgtgaaggtttctgcgtcttcaccctcactggctgtcgcttctcaatcagactccaagcagcgaagacttttggttgattttccaaaaggctc

SEQ ID NO: 197664 - DNA, 120 bp, Artificial Sequence
  ENSG00000113580_10 (sequence is synthesized)
agtaagcaatgcgcagcagccagatctgtccaaagcagtttcactctcaatgggactgtatatgggagagacagaaacaaaagtgatgggaaatgacctgggattcccacagcagggcca

SEQ ID NO: 197665 - DNA, 120 bp, Artificial Sequence
  ENSG00000113580_11 (sequence is synthesized)
aatcagcctttcctcgggggaaacagacttaaagcttttggaagaaagcattgcaaacctcaataggtcgaccagtgttccagagaaccccaagagttcagcatccactgctgtgtctgc

SEQ ID NO: 197666 - DNA, 120 bp, Artificial Sequence
  ENSG00000113580_12 (sequence is synthesized)
tgcccccacagagaaggagtttccaaaaactcactctgatgtatcttcagaacagcaacatttgaagggccagactggcaccaacggtggcaatgtgaaattgtataccacagaccaaag

SEQ ID NO: 197667 - DNA, 120 bp, Artificial Sequence
  ENSG00000113580_13 (sequence is synthesized)
cacctttgacattttgcaggatttggagttttcttctgggtccccaggtaaagagacgaatgagagtccttggagatcagacctgttgatagatgaaaactgtttgctttctcctctggc

SEQ ID NO: 197668 - DNA, 120 bp, Artificial Sequence
  ENSG00000113580_14 (sequence is synthesized)
gggagaagacgattcattccttttggaaggaaactcgaatgaggactgcaagcctctcattttaccggacactaaacccaaaattaaggataatggagatctggttttgtcaagccccag

SEQ ID NO: 197669 - DNA, 120 bp, Artificial Sequence
  ENSG00000113580_15 (sequence is synthesized)
taatgtaacactgccccaagtgaaaacagaaaaagaagatttcatcgaactctgcacccctggggtaattaagcaagagaaactgggcacagtttactgtcaggcaagctttcctggagc

SEQ ID NO: 197670 - DNA, 120 bp, Artificial Sequence
  ENSG00000113580_16 (sequence is synthesized)
aaatataattggtaataaaatgtctgccatttctgttcatggtgtgagtacctctggaggacagatgtaccactatgacatgaatacagcatccctttctcaacagcaggatcagaagcc

SEQ ID NO: 197671 - DNA, 120 bp, Artificial Sequence
  ENSG00000113580_17 (sequence is synthesized)
tatttttaatgtcattccaccaattcccgttggttccgaaaattggaataggtgccaaggatctggagatgacaacttgacttctctggggactctgaacttccctggtcgaacagtttt

SEQ ID NO: 197672 - DNA, 120 bp, Artificial Sequence
  ENSG00000113580_18 (sequence is synthesized)
ttctaatggctattcaagccccagcatgagaccagatgtaagctctcctccatccagctcctcaacagcaacaacaggaccacctcccaaactctgcctggtgtgctctgatgaagcttc

SEQ ID NO: 197673 - DNA, 120 bp, Artificial Sequence
  ENSG00000113580_19 (sequence is synthesized)
aggatgtcattatggagtcttaacttgtggaagctgtaaagttttcttcaaaagagcagtggaaggacagcacaattacctatgtgctggaaggaatgattgcatcatcgataaaattcg

SEQ ID NO: 197674 - DNA, 120 bp, Artificial Sequence
  ENSG00000113580_20 (sequence is synthesized)
aagaaaaaactgcccagcatgccgctatcgaaaatgtcttcaggctggaatgaacctggaagctcgaaaaacaaagaaaaaaataaaaggaattcagcaggccactacaggagtctcaca

SEQ ID NO: 197675 - DNA, 120 bp, Artificial Sequence
  ENSG00000113580_21 (sequence is synthesized)
agaaacctctgaaaatcctggtaacaaaacaatagttcctgcaacgttaccacaactcacccctaccctggtgtcactgttggaggttattgaacctgaagtgttatatgcaggatatga

SEQ ID NO: 197676 - DNA, 120 bp, Artificial Sequence
  ENSG00000113580_22 (sequence is synthesized)
tagctctgttccagactcaacttggaggatcatgactacgctcaacatgttaggagggcggcaagtgattgcagcagtgaaatgggcaaaggcaataccaggtttcaggaacttacacct

SEQ ID NO: 197677 - DNA, 120 bp, Artificial Sequence
  ENSG00000113580_23 (sequence is synthesized)
ggatgaccaaatgaccctactgcagtactcctggatgtttcttatggcatttgctctggggtggagatcatatagacaatcaagtgcaaacctgctgtgttttgctcctgatctgattat

SEQ ID NO: 197678 - DNA, 120 bp, Artificial Sequence
  ENSG00000113580_24 (sequence is synthesized)
taatgagcagagaatgactctaccctgcatgtacgaccaatgtaaacacatgctgtatgtttcctctgagttacacaggcttcaggtatcttatgaagagtatctctgtatgaaaacctt

SEQ ID NO: 197679 - DNA, 120 bp, Artificial Sequence
  ENSG00000113580_25 (sequence is synthesized)
actgcttctctcttcagttcctaaggacggtctgaagagccaagagctatttgatgaaattagaatgacctacatcaaagagctaggaaaagccattgtcaagagggaaggaaactccag

SEQ ID NO: 197680 - DNA, 120 bp, Artificial Sequence
  ENSG00000113580_26 (sequence is synthesized)
ccagaactggcagcggttttatcaactgacaaaactcttggattctatgcatgaagtggttgaaaatctccttaactattgcttccaaacatttttggataagaccatgagtattgaatt

SEQ ID NO: 197681 - DNA, 120 bp, Artificial Sequence
  ENSG00000113580_27 (sequence is synthesized)
ccccgagatgttagctgaaatcatcaccaatcagataccaaaatattcaaatggaaatatcaaaaaacttctgtttcatcaaaagtgactgccttaataagaatggttgccttaaagaaa

SEQ ID NO: 197682 - DNA, 120 bp, Artificial Sequence
  ENSG00000113580_28 (sequence is synthesized)
gtcgaattaatagcttttattgtataaactatcagtttgtcctgtagaggttttgttgttttattttttattgttttcatctgttgttttgttttaaatacgcactacatgtggtttata

SEQ ID NO: 197683 - DNA, 120 bp, Artificial Sequence
  ENSG00000113580_29 (sequence is synthesized)
gagggccaagacttggcaacagaagcagttgagtcgtcatcacttttcagtgatgggagagtagatggtgaaatttattagttaatatatcccagaaattagaaaccttaatatgtggac

SEQ ID NO: 197684 - DNA, 120 bp, Artificial Sequence
  ENSG00000113580_30 (sequence is synthesized)
acagttggctggatgaaattttctagactttctgttggtgtatcccccccctgtatagttaggatagcatttttgatttatgcatggaaacctgaaaaaaagtttacaagtgtatatcag

SEQ ID NO: 197685 - DNA, 120 bp, Artificial Sequence
  ENSG00000113580_31 (sequence is synthesized)
aaaagggaagttgtgccttttatagctattactgtctggttttaacaatttcctttatatttagtgaactacgcttgctcattttttcttacataattttttattcaagttattgtacag

SEQ ID NO: 197686 - DNA, 120 bp, Artificial Sequence
  ENSG00000113580_32 (sequence is synthesized)
ctgtttaagatgggcagctagttcgtagctttcccaaataaactctaaacattaatcaatcatctgtgtgaaaatgggttggtgcttctaacctgatggcacttagctatcagaagacca

SEQ ID NO: 197687 - DNA, 120 bp, Artificial Sequence
  ENSG00000113580_33 (sequence is synthesized)
caaaaattgactcaaatctccagtattcttgtcaaaaaaaaaaaaaaaaaagctcatattttgtatatatctgcttcagtggagaattatataggttgtgcaaattaacagtcctaactg

SEQ ID NO: 197688 - DNA, 120 bp, Artificial Sequence
  ENSG00000113580_34 (sequence is synthesized)
gtatagagcacctagtccagtgacctgctgggtaaactgtggatgatggttgcaaaagactaatttaaaaaataactaccaagaggccctgtctgtacctaacgccctatttttgcaatg

SEQ ID NO: 197689 - DNA, 120 bp, Artificial Sequence
  ENSG00000113580_35 (sequence is synthesized)
gctatatggcaagaaagctggtaaactatttgtctttcaggaccttttgaagtagtttgtataacttcttaaaagttgtgattccagataaccagctgtaacacagctgagagactttta

SEQ ID NO: 197690 - DNA, 120 bp, Artificial Sequence
  ENSG00000113580_36 (sequence is synthesized)
atcagacaaagtaattcctctcactaaactttacccaaaaactaaatctctaatatggcaaaaatggctagacacccattttcacattcccatctgtcaccaattggttaatctttcctg

SEQ ID NO: 197691 - DNA, 120 bp, Artificial Sequence
  ENSG00000113580_37 (sequence is synthesized)
atggtacaggaaagctcagctactgatttttgtgatttagaactgtatgtcagacatccatgtttgtaaaactacacatccctaatgtgtgccatagagtttaacacaagtcctgtgaat

SEQ ID NO: 197692 - DNA, 120 bp, Artificial Sequence
  ENSG00000113580_38 (sequence is synthesized)
ttcttcactgttgaaaattattttaaacaaaatagaagctgtagtagccctttctgtgtgcaccttaccaactttctgtaaactcaaaacttaacatatttactaagccacaagaaattt

SEQ ID NO: 197693 - DNA, 120 bp, Artificial Sequence
  ENSG00000113580_39 (sequence is synthesized)
aagccacaagaaatttgatttctattcaaggtggccaaattatttgtgtaatagaaaactgaaaatctaatattaaaaatatggaacttctaatatatttttatatttagttatagtttc

SEQ ID NO: 197694 - DNA, 120 bp, Artificial Sequence
  ENSG00000113580_40 (sequence is synthesized)
ggtattcactaatctgggaagggaagggctactgcagctttacatgcaatttattaaaatgattgtaaaatagcttgtatagtgtaaaataagaatgatttttagatgagattgttttat

SEQ ID NO: 197695 - DNA, 120 bp, Artificial Sequence
  ENSG00000113580_41 (sequence is synthesized)
catgacatgttatatattttttgtaggggtcaaagaaatgctgatggataacctatatgatttatagtttgtacatgcattcatacaggcagcgatggtctcagaaaccaaacagtttgc

SEQ ID NO: 197696 - DNA, 120 bp, Artificial Sequence
  ENSG00000113580_42 (sequence is synthesized)
tctaggggaagagggagatggagactggtcctgtgtgcagtgaaggttgctgaggctctgacccagtgagattacagaggaagttatcctctgcctcccattctgaccacccttctcatt

SEQ ID NO: 197697 - DNA, 120 bp, Artificial Sequence
  ENSG00000113580_43 (sequence is synthesized)
ccaacagtgagtctgtcagcgcaggtttagtttactcaatctccccttgcactaaagtatgtaaagtatgtaaacaggagacaggaaggtggtgcttacatccttaaaggcaccatctaa

SEQ ID NO: 197698 - DNA, 120 bp, Artificial Sequence
  ENSG00000113580_44 (sequence is synthesized)
tagcgggttactttcacatacagccctcccccagcagttgaatgacaacagaagcttcagaagtttggcaatagtttgcatagaggtaccagcaatatgtaaatagtgcagaatctcata

SEQ ID NO: 197699 - DNA, 120 bp, Artificial Sequence
  ENSG00000113580_45 (sequence is synthesized)
ggttgccaataatacactaattcctttctatcctacaacaagagtttatttccaaataaaatgaggacatgtttttgttttctttgaatgctttttgaatgttatttgttattttcagta

SEQ ID NO: 197700 - DNA, 120 bp, Artificial Sequence
  ENSG00000113580_46 (sequence is synthesized)
ttttggagaaattatttaataaaaaaacaatcatttgctttttgaatgctctctaaaagggaatgtaatattttaagatggtgtgtaacccggctggataaatttttggtgcctaagaaa

SEQ ID NO: 197701 - DNA, 120 bp, Artificial Sequence
  ENSG00000113580_47 (sequence is synthesized)
actgcttgaatattcttatcaatgacagtgttaagtttcaaaaagagcttctaaaacgtagattatcattcctttatagaatgttatgtggttaaaaccagaaagcacatctcacacatt

SEQ ID NO: 197702 - DNA, 120 bp, Artificial Sequence
  ENSG00000113580_48 (sequence is synthesized)
aatctgattttcatcccaacaatcttggcgctcaaaaaatagaactcaatgagaaaaagaagattatgtgcacttcgttgtcaataataagtcaactgatgctcatcgacaactatagga

SEQ ID NO: 197703 - DNA, 120 bp, Artificial Sequence
  ENSG00000113580_49 (sequence is synthesized)
ggcttttcattaaatgggaaaagaagctgtgcccttttaggatacgtgggggaaaagaaagtcatcttaattatgtttaattgtggatttaagtgctatatggtggtgctgtttgaaagc

SEQ ID NO: 197704 - DNA, 120 bp, Artificial Sequence
  ENSG00000113580_50 (sequence is synthesized)
agatttatttcctatgtatgtgttatctggccatcccaacccaaactgttgaagtttgtagtaacttcagtgagagttggttactcacaacaaatcctgaaaagtatttttagtgtttgt

SEQ ID NO: 197705 - DNA, 120 bp, Artificial Sequence
  ENSG00000113580_51 (sequence is synthesized)
aggtattctgtgggatactatacaagcagaactgaggcacttaggacataacacttttggggtatatatatccaaatgcctaaaactatgggaggaaaccttggccaccccaaaaggaaa

SEQ ID NO: 197706 - DNA, 120 bp, Artificial Sequence
  ENSG00000113580_52 (sequence is synthesized)
actaacatgatttgtgtctatgaagtgctggataattagcatgggatgagctctgggcatgccatgaaggaaagccacgctcccttcagaattcagaggcagggagcaattccagtttca

SEQ ID NO: 197707 - DNA, 120 bp, Artificial Sequence
  ENSG00000113580_53 (sequence is synthesized)
cctaagtctcataattttagttcccttttaaaaaccctgaaaactacatcaccatggaatgaaaaatattgttatacaatacattgatctgtcaaacttccagaaccatggtagccttca

SEQ ID NO: 197708 - DNA, 120 bp, Artificial Sequence
  ENSG00000113580_54 (sequence is synthesized)
gtgagatttccatcttggctggtcactccctgactgtagctgtaggtgaatgtgtttttgtgtgtgtgtgtctggttttagtgtcagaagggaaataaaagtgtaaggaggacactttaa

SEQ ID NO: 197709 - DNA, 120 bp, Artificial Sequence
  ENSG00000113580_55 (sequence is synthesized)
accctttgggtggagtttcgtaatttcccagactattttcaagcaacctggtccacccaggattagtgaccaggttttcaggaaaggatttgcttctctctagaaaatgtctgaaaggat

SEQ ID NO: 197710 - DNA, 120 bp, Artificial Sequence
  ENSG00000113580_56 (sequence is synthesized)
tttattttctgatgaaaggctgtatgaaaataccctcctcaaataacttgcttaactacatatagattcaagtgtgtcaatattctattttgtatattaaatgctatataatggggacaa

SEQ ID NO: 197711 - DNA, 120 bp, Artificial Sequence
  ENSG00000113580_57 (sequence is synthesized)
atctatattatactgtgtatggcattattaagaagctttttcattattttttatcacagtaattttaaaatgtgtaaaaattaaaaccagtgactcctgtttaaaaataaaagttgtagt

SEQ ID NO: 197712 - DNA, 120 bp, Artificial Sequence
  ENSG00000113580_58 (sequence is synthesized)
tttttattcatgctgaataataatctgtagttaaaaaaaaagtgtctttttacctacgcagtgaaatgtcagactgtaaaaccttgtgtggaaatgtttaacttttattttttcatttaa

SEQ ID NO: 197713 - DNA, 120 bp, Artificial Sequence
  ENSG00000113580_59 (sequence is synthesized)
atttgctgttctggtattaccaaaccacacatttgtaccgaattggcagtaaatgttagccatttacagcaatgccaaatatggagaaacatcataataaaaaaatctgctttttcatta

SEQ ID NO: 197714 - DNA, 120 bp, Artificial Sequence
  ENSG00000113580_60 (sequence is synthesized)
gccgcctccacccgctccccgctcggtcccgctcgctcgcccaggccgggctgccctttcgcgtgtccgcgctctcttccctccgccgccgcctcctccattttgcgagctcgtgtctgt

SEQ ID NO: 197715 - DNA, 120 bp, Artificial Sequence
  ENSG00000113580_61 (sequence is synthesized)
gacgggagcccgagtcaccgcctgcccgtcggggacggattctgtgggtggaaggagacgccgcagccggagcggccgaagcagctgggaccgggacggggcacgcgcgcccggaacctc

SEQ ID NO: 197716 - DNA, 120 bp, Artificial Sequence
  ENSG00000113580_62 (sequence is synthesized)
gacccgcggagcccggcgcggggcggagggctggcttgtcagctgggcaatgggagactttcttaaataggggctctccccccacccatggagaaaggggcggctgtttacttccttttt

SEQ ID NO: 197717 - DNA, 120 bp, Artificial Sequence
  ENSG00000113580_63 (sequence is synthesized)
ttagaaaaaaaaaatatatttccctcctgctccttctgcgttcacaagctaagttgtttatctcggctgcggcgggaactgcggacggtggcgggcgagcggctcctctgccagagttga

SEQ ID NO: 197718 - DNA, 120 bp, Artificial Sequence
  ENSG00000113580_64 (sequence is synthesized)
gcagactcggggaagagggtgggggacggtcggggcgcgggggagggtgggttctgctttgcaacttctctcccagtgcgagagcgcggcggcggcagctgaagacccggccgcccagat

SEQ ID NO: 197719 - DNA, 120 bp, Artificial Sequence
  ENSG00000113580_65 (sequence is synthesized)
actggcggcgcttgccgccaaggggcagagcgagctcccgagtgggtctggagccgcggagctgggcgggggcgggaaggaggtagcgagaaaagaaactggagaaactcggtggccctc

SEQ ID NO: 197720 - DNA, 120 bp, Artificial Sequence
  ENSG00000113580_66 (sequence is synthesized)
ggcgcctggcttgaggagggcgtgcggggcgcgtgagggtgcacacgcggggggctgacagcccgcaacttggagactgcggccggggccggcgttatctgttagaagtgggcgtgtcgg

SEQ ID NO: 197721 - DNA, 120 bp, Artificial Sequence
  ENSG00000113580_67 (sequence is synthesized)
cagacactactcaatatcgatctcaactgatccagttctccagtctccctggaaaacaatggattgatgcccagggtgcgctgaacactggaaccatggtcacttctgcacttcacacga

SEQ ID NO: 197722 - DNA, 120 bp, Artificial Sequence
  ENSG00000113580_68 (sequence is synthesized)
ttctgctcccaccagttgagctaccaacagttcctggtgcttttgcttcccaaacatgtttatgccatttgttgcttattactgtacttacttaatttgattaaatattaagtaaaatga

SEQ ID NO: 197723 - DNA, 120 bp, Artificial Sequence
  ENSG00000113580_69 (sequence is synthesized)
ggctgtggccgagcgcccgagcaggattaggtggagctgcggcagcccccgcccgtgtcaggagctggcaagcgatgtcacctgtgggggcgcaaaagttacctccccaaaccctaaacc

SEQ ID NO: 197724 - DNA, 120 bp, Artificial Sequence
  ENSG00000113580_70 (sequence is synthesized)
agattttttagaattgtactaaaagcaaactgttttcttggatatttgttctttctccccaaaagatgatttataagttttcagagctaagaaatgggaaggaagagccatcctagcatg

SEQ ID NO: 197725 - DNA, 120 bp, Artificial Sequence
  ENSG00000113580_71 (sequence is synthesized)
gtactcaaaggtttggatgtgtgactagctggtaggagggaaatttggaagtaattagggattgagaattctagcatagtatttatcaaatgttatatgtattggttctcagaaaagcaa

SEQ ID NO: 197726 - DNA, 120 bp, Artificial Sequence
  ENSG00000113580_72 (sequence is synthesized)
ggtttgaacaggatccctctggctggtgtgtgaagaattaactgtagatgggcaagtgtggaaggaaggagagcagtcaggaagctgccataaccatctacatgagagagaatcgtgtaa

SEQ ID NO: 197727 - DNA, 120 bp, Artificial Sequence
  ENSG00000113583_0 (sequence is synthesized)
gtagagcctagcaacagcgcaggctcccagccgagtccgttatggccgctgccgtcccgaagaggatgagggggccagcacaagcgaaactgctgcccgggtcggccatccaagcccttg

SEQ ID NO: 197728 - DNA, 120 bp, Artificial Sequence
  ENSG00000113583_1 (sequence is synthesized)
tggggttggcgcggccgctggtcttggcgctcctgcttgtgtccgccgctctatccagtgttgtatcacggactgattcaccgagcccaaccgtactcaactcacatatttctaccccaa

SEQ ID NO: 197729 - DNA, 120 bp, Artificial Sequence
  ENSG00000113583_2 (sequence is synthesized)
atgtgaatgctttaacacatgaaaaccaaaccaaaccttctatttcccaaatcagcaccaccctccctcccacgacgagtaccaagaaaagtggaggagcatctgtggtccctcatccct

SEQ ID NO: 197730 - DNA, 120 bp, Artificial Sequence
  ENSG00000113583_3 (sequence is synthesized)
cgcctactcctctgtctcaagaggaagctgataacaatgaagatcctagtatagaggaggaggatcttctcatgctgaacagttctccatccacagccaaagacactctagacaatggcg

SEQ ID NO: 197731 - DNA, 120 bp, Artificial Sequence
  ENSG00000113583_4 (sequence is synthesized)
attatggagaaccagactatgactggaccacgggccccagggacgacgacgagtctgatgacaccttggaagaaaacaggggttacatggaaattgaacagtcagtgaaatcttttaaga

SEQ ID NO: 197732 - DNA, 120 bp, Artificial Sequence
  ENSG00000113583_5 (sequence is synthesized)
tgccatcctcaaatatagaagaggaagacagccatttcttttttcatcttattatttttgctttttgcattgctgttgtttacattacatatcacaacaaaaggaagatttttcttctgg

SEQ ID NO: 197733 - DNA, 120 bp, Artificial Sequence
  ENSG00000113583_6 (sequence is synthesized)
ttcaaagcaggaaatggcgtgatggcctttgttccaaaacagtggaataccatcgcctagatcagaatgttaatgaggcaatgccttctttgaagattaccaatgattatattttttaaa

SEQ ID NO: 197734 - DNA, 120 bp, Artificial Sequence
  ENSG00000113583_7 (sequence is synthesized)
gcactgtgatttgaatttgcttatgtaattttatttgcttgactttttatatgatattgtgcaaatgtttgccataggcaattggtacttaaatgagaggtgagtctctcttttgccttg

SEQ ID NO: 197735 - DNA, 120 bp, Artificial Sequence
  ENSG00000113583_8 (sequence is synthesized)
gtgctttggaaattaaatgtcacaaacgagtatataattttttatctgtacttttagagctgagtttaatcaggtgtccaaaatgtgagttaaacattaccttatatttacactgttagt

SEQ ID NO: 197736 - DNA, 120 bp, Artificial Sequence
  ENSG00000113583_9 (sequence is synthesized)
ttctggaagtattagtgatgctacttttaaaagatcccaaacttgtaactaaattctgacatatctgttactgctgactcacattcattctccgccattcaaatactattttttatccac

SEQ ID NO: 197737 - DNA, 120 bp, Artificial Sequence
  ENSG00000113583_10 (sequence is synthesized)
atttttttttgttcccaaactgtaatgtacaaggatatgtgtgataatgctttggatttgagtaatatttttttttcttccaagaaaactgctttggatatttttagataatttaaacat

SEQ ID NO: 197738 - DNA, 120 bp, Artificial Sequence
  ENSG00000113583_11 (sequence is synthesized)
aatttaggataatgatattgctcaatctgaccacaattttaggtaaaacattaaatgtgtcaagaaatcttggcaacagagactctgcagcttgcagtggacatagataaaatgttacag

SEQ ID NO: 197739 - DNA, 120 bp, Artificial Sequence
  ENSG00000113583_12 (sequence is synthesized)
agatactatttttttggttggaattactatattaaatttagaagcagaaactggtaaaatgttaaatacatgtacaattgcttttagttagcaattgattgtagcatgggttcctccaag

SEQ ID NO: 197740 - DNA, 120 bp, Artificial Sequence
  ENSG00000113583_13 (sequence is synthesized)
gtttcaagcaatgggcagagtttaaaattatatcagattcgtttacttcgtttattattttacagtaaatttgaataaatcttaggggtcattatcacttaaataatactgtacctaggt

SEQ ID NO: 197741 - DNA, 120 bp, Artificial Sequence
  ENSG00000113583_14 (sequence is synthesized)
ctttcaaattaaaattatacctgaatgaagttgtttgtatacataaaggatatttgtgtacaattaccttttttcccccacacttgttttctttgtttttgttttttatggcaactggaa

SEQ ID NO: 197742 - DNA, 120 bp, Artificial Sequence
  ENSG00000113583_15 (sequence is synthesized)
agtatttactatgggattcatttatgtctgtctttctatcataaagaattgatcaatatgtaaatatgtgatttgaaccatggttgacttacaagtgtcactacagctttttagaaaaca

SEQ ID NO: 197743 - DNA, 120 bp, Artificial Sequence
  ENSG00000113583_16 (sequence is synthesized)
tagccctaatatatgttaagcaggacccgggtgagccagtgggcttgcgctttatgtagagctggaagaaggccgtccatcctgtctcttgggcggacagtgtactttcctaatagggaa

SEQ ID NO: 197744 - DNA, 120 bp, Artificial Sequence
  ENSG00000113583_17 (sequence is synthesized)
gggaagcacaatggaaatacccctgaaccgttttattgcagtaatttttttcatatctgaaactattatttaatattttgaataagattttaaaaaataaatggcaaagatataaatcta

SEQ ID NO: 197745 - DNA, 120 bp, Artificial Sequence
  ENSG00000113583_18 (sequence is synthesized)
tggggttggcgcggccgctggtcttggcgctcctgcttgtgtccgccgctctatccagtggccaagacacagtcctgcgtttctccctaaatttgaattttcagctgcaaaacagtgtga

SEQ ID NO: 197746 - DNA, 120 bp, Artificial Sequence
  ENSG00000113583_19 (sequence is synthesized)
accacgctgggacgtatgtgccgagggccgcggcgtctgacctcatggcgtagagcctagcaacagcgcaggctcccagccgagtccgttatggccgctgccgtcccgaagaggatgagg

SEQ ID NO: 197747 - DNA, 120 bp, Artificial Sequence
  ENSG00000113593_0 (sequence is synthesized)
gacgatgcgaacaacatggcggcggaaagtggtagcgattttcagcagagacgtagaaggcgccgggacccggaggaaccggaaaaaacagaactcagcgaaagagagctggcagtagca

SEQ ID NO: 197748 - DNA, 120 bp, Artificial Sequence
  ENSG00000113593_1 (sequence is synthesized)
gtggcggtgtcccaggagaacgatgaggagaacgaagagcgctgggttggacctttacctgtggaggcaacactggccaagaagaggaaagtcttagagtttgaaagagtctatcttgat

SEQ ID NO: 197749 - DNA, 120 bp, Artificial Sequence
  ENSG00000113593_2 (sequence is synthesized)
aatctccccagtgcatccatgtatgagcgcagttacatgcatagagatgttatcacccatgtggtatgcaccaaaacagattttattattactgccagtcatgatggacatgtcaagttc

SEQ ID NO: 197750 - DNA, 120 bp, Artificial Sequence
  ENSG00000113593_3 (sequence is synthesized)
tggaaaaaaatagaagagggaattgaatttgttaaacattttcgtagtcacctgggagttattgagagtattgcagttagctctgagggagcattgttctgttctgtgggtgatgataaa

SEQ ID NO: 197751 - DNA, 120 bp, Artificial Sequence
  ENSG00000113593_4 (sequence is synthesized)
gcaatgaaggtgtttgatgtagtgaactttgacatgatcaacatgctgaaacttggctattttcctggacagtgtgagtggatctattgcccaggggatgcaatttcttcagttgctgct

SEQ ID NO: 197752 - DNA, 120 bp, Artificial Sequence
  ENSG00000113593_5 (sequence is synthesized)
tccgaaaagagtacaggaaaaattttcatttatgatggccgaggagataaccagccacttcatatttttgacaaactccatacatcacctcttactcagatacggctaaacccagtttac

SEQ ID NO: 197753 - DNA, 120 bp, Artificial Sequence
  ENSG00000113593_6 (sequence is synthesized)
aaagcagtagtgtcttctgacaaatctgggatgattgaatactggactgggcctcctcatgaatataaattccccaaaaatgtgaactgggaatataaaactgacactgatttatatgaa

SEQ ID NO: 197754 - DNA, 120 bp, Artificial Sequence
  ENSG00000113593_7 (sequence is synthesized)
tttgccaagtgtaaggcttatccaaccagcgtatgtttttcaccagatgggaagaaaatagctactattggttctgatagaaaagttagaattttcagatttgtaactggaaaactcatg

SEQ ID NO: 197755 - DNA, 120 bp, Artificial Sequence
  ENSG00000113593_8 (sequence is synthesized)
gaatttggccgacgaatggctgtagaacgtgagttggagaaggttgatgctgtaagattaattaatatagtttttgatgaaactggacacttcgtgctgtatggaacaatgctgggcatt

SEQ ID NO: 197756 - DNA, 120 bp, Artificial Sequence
  ENSG00000113593_9 (sequence is synthesized)
aaagttataaatgtagagacaaaccggtgtgtgcggattttaggcaaacaagaaaatattagagtgatgcaattggctttgttccaggggatagccaaaaagcatcgtgctgcaactact

SEQ ID NO: 197757 - DNA, 120 bp, Artificial Sequence
  ENSG00000113593_10 (sequence is synthesized)
atagaaatgaaagcttctgaaaatcctgttcttcagaatattcaagctgacccaacaatagtctgtacatcattcaaaaagaatagattttatatgtttaccaaacgagaaccagaagat

SEQ ID NO: 197758 - DNA, 120 bp, Artificial Sequence
  ENSG00000113593_11 (sequence is synthesized)
acgaaaagtgcagattctgatcgagatgtttttaatgagaaaccttctaaagaagaagtcatggcagctactcaagctgaaggacctaaacgagtttcggacagtgccattatccacacc

SEQ ID NO: 197759 - DNA, 120 bp, Artificial Sequence
  ENSG00000113593_12 (sequence is synthesized)
agcatgggagacattcacaccaaactttttcctgttgagtgccctaagacagtggaaaacttctgtgttcacagcagaaatggttattataatgggcatacatttcaccgtataattaag

SEQ ID NO: 197760 - DNA, 120 bp, Artificial Sequence
  ENSG00000113593_13 (sequence is synthesized)
ggctttatgattcagactggagatccaacaggtactggtatgggaggagaaagcatatggggaggagaatttgaagatgaatttcattcaacattacgacatgacaggccatacacactc

SEQ ID NO: 197761 - DNA, 120 bp, Artificial Sequence
  ENSG00000113593_14 (sequence is synthesized)
agcatggctaacgcgggatcaaatactaatggatcccagtttttcataacggtagtaccaacgccttggcttgataataagcatacagtatttggacgagtgactaaaggaatggaagtt

SEQ ID NO: 197762 - DNA, 120 bp, Artificial Sequence
  ENSG00000113593_15 (sequence is synthesized)
gtacagaggatctccaacgtcaaagtcaatcccaaaacagataagccctatgaggatgtcagcatcataaatattactgtcaagtaaaataagatttgttttaatgtacttgcaaataaa

SEQ ID NO: 197763 - DNA, 120 bp, Artificial Sequence
  ENSG00000113593_16 (sequence is synthesized)
aatacaatattaaacagattattttacattaggaagcttaggacttgctgaatatacagatcatgtttcaaagatacagtatttttgtattttttattaaaggctattttttaaaaatta

SEQ ID NO: 197764 - DNA, 120 bp, Artificial Sequence
  ENSG00000113593_17 (sequence is synthesized)
cacaactaccttcattgcaaggtatgtactgttatcatcatatatgagtgagggaagagaagaaatgaattcacatccccaaagtcgcagaactggaattcaaatccaaacaatctaaat

SEQ ID NO: 197765 - DNA, 120 bp, Artificial Sequence
  ENSG00000113593_18 (sequence is synthesized)
aatgaactgagcaacaaacaggtggcatgttaggccttactagaaggcataagtcgagagctaccacaaatgaaacaattattcttgttaaatgtttgcccaagaaaatttctaaccaaa

SEQ ID NO: 197766 - DNA, 120 bp, Artificial Sequence
  ENSG00000113593_19 (sequence is synthesized)
gaaattaaattccatttgaaatcaatgtgttcagtatgttatgtggatccttttcatattagacaatgtaaaaataatttaattgcctgacacatcctgtatgggaagtgattcctgaaa

SEQ ID NO: 197767 - DNA, 120 bp, Artificial Sequence
  ENSG00000113593_20 (sequence is synthesized)
ttaaaaatctttcactagttattttgtacatagataagatagttgattcccagcttttatctgtaaagttgtcataattggaattaacttcggtgattctgttgtataaaacattgttat

SEQ ID NO: 197768 - DNA, 120 bp, Artificial Sequence
  ENSG00000113593_21 (sequence is synthesized)
gagatttttattttaatgtcaaattctagttcaattctgatcctagctcttgaggttaaaattagtacagctgtaactgttttgacatccagaaaggagtttcaaaatttgcagtgttct

SEQ ID NO: 197769 - DNA, 120 bp, Artificial Sequence
  ENSG00000113593_22 (sequence is synthesized)
gtaatatagtggtctgcttaaagaagggttttttttaaaaaaaaacctattatgcacaagtcagattcttagtgaatgattgctttgggaatactaagtgattcatagatctgtcttaga

SEQ ID NO: 197770 - DNA, 120 bp, Artificial Sequence
  ENSG00000113593_23 (sequence is synthesized)
tttttaatttcttaagttctgaaataaaggcctacatgttctttcctatatcgtacaaataatgcattctctaagatagaacccctgagtttatatgtatgtctttggagataaatgcca

SEQ ID NO: 197771 - DNA, 120 bp, Artificial Sequence
  ENSG00000113593_24 (sequence is synthesized)
agaggggagtgaaccaggtagtgtctgagcttccctgaagaagagggtacattagttaagatatgagtaactggtacctggcctctttggcactagtggagaaaatgtgggctaacatac

SEQ ID NO: 197772 - DNA, 120 bp, Artificial Sequence
  ENSG00000113593_25 (sequence is synthesized)
cctaggaatagcaaaggaccttcaaaacagatgagtaggttcgtgtagaaggataataatagtacaagttgagcaccccaaatataaaatgctccaaaatccaatagtttttgagtgctg

SEQ ID NO: 197773 - DNA, 120 bp, Artificial Sequence
  ENSG00000113594_0 (sequence is synthesized)
aatcctaaccctctctcccagaacgtgtctctgctgcaaggcaccgggccctttcgctctgcagaactgcacttgcaagaccattatcaactcctaatcccagctcagaaagggagcctc

SEQ ID NO: 197774 - DNA, 120 bp, Artificial Sequence
  ENSG00000113594_1 (sequence is synthesized)
tgcgactcattcatcgccctccaggactgactgcattgcacagatgatggatatttacgtatgtttgaaacgaccatcctggatggtggacaataaaagaatgaggactgcttcaaattt

SEQ ID NO: 197775 - DNA, 120 bp, Artificial Sequence
  ENSG00000113594_2 (sequence is synthesized)
ccagtggctgttatcaacatttattcttctatatctaatgaatcaagtaaatagccagaaaaagggggctcctcatgatttgaagtgtgtaactaacaatttgcaagtgtggaactgttc

SEQ ID NO: 197776 - DNA, 120 bp, Artificial Sequence
  ENSG00000113594_3 (sequence is synthesized)
ttggaaagcaccctctggaacaggccgtggtactgattatgaagtttgcattgaaaacaggtcccgttcttgttatcagttggagaaaaccagtattaaaattccagctctttcacatgg

SEQ ID NO: 197777 - DNA, 120 bp, Artificial Sequence
  ENSG00000113594_4 (sequence is synthesized)
tgattatgaaataacaataaattctctacatgattttggaagttctacaagtaaattcacactaaatgaacaaaacgtttccttaattccagatactccagagatcttgaatttgtctgc

SEQ ID NO: 197778 - DNA, 120 bp, Artificial Sequence
  ENSG00000113594_5 (sequence is synthesized)
tgatttctcaacctctacattatacctaaagtggaacgacaggggttcagtttttccacaccgctcaaatgttatctgggaaattaaagttctacgtaaagagagtatggagctcgtaaa

SEQ ID NO: 197779 - DNA, 120 bp, Artificial Sequence
  ENSG00000113594_6 (sequence is synthesized)
attagtgacccacaacacaactctgaatggcaaagatacacttcatcactggagttgggcctcagatatgcccttggaatgtgccattcattttgtggaaattagatgctacattgacaa

SEQ ID NO: 197780 - DNA, 120 bp, Artificial Sequence
  ENSG00000113594_7 (sequence is synthesized)
tcttcatttttctggtctcgaagagtggagtgactggagccctgtgaagaacatttcttggatacctgattctcagactaaggtttttcctcaagataaagtgatacttgtaggctcaga

SEQ ID NO: 197781 - DNA, 120 bp, Artificial Sequence
  ENSG00000113594_8 (sequence is synthesized)
cataacattttgttgtgtgagtcaagaaaaagtgttatcagcactgattggccatacaaactgccccttgatccatcttgatggggaaaatgttgcaatcaagattcgtaatatttctgt

SEQ ID NO: 197782 - DNA, 120 bp, Artificial Sequence
  ENSG00000113594_9 (sequence is synthesized)
ttctgcaagtagtggaacaaatgtagtttttacaaccgaagataacatatttggaaccgttatttttgctggatatccaccagatactcctcaacaactgaattgtgagacacatgattt

SEQ ID NO: 197783 - DNA, 120 bp, Artificial Sequence
  ENSG00000113594_10 (sequence is synthesized)
aaaagaaattatatgtagttggaatccaggaagggtgacagcgttggtgggcccacgtgctacaagctacactttagttgaaagtttttcaggaaaatatgttagacttaaaagagctga

SEQ ID NO: 197784 - DNA, 120 bp, Artificial Sequence
  ENSG00000113594_11 (sequence is synthesized)
agcacctacaaacgaaagctatcaattattatttcaaatgcttccaaatcaagaaatatataattttactttgaatgctcacaatccgctgggtcgatcacaatcaacaattttagttaa

SEQ ID NO: 197785 - DNA, 120 bp, Artificial Sequence
  ENSG00000113594_12 (sequence is synthesized)
tataactgaaaaagtttatccccatactcctacttcattcaaagtgaaggatattaattcaacagctgttaaactttcttggcatttaccaggcaactttgcaaagattaattttttatg

SEQ ID NO: 197786 - DNA, 120 bp, Artificial Sequence
  ENSG00000113594_13 (sequence is synthesized)
tgaaattgaaattaagaaatctaattcagtacaagagcagcggaatgtcacaatcaaaggagtagaaaattcaagttatcttgttgctctggacaagttaaatccatacactctatatac

SEQ ID NO: 197787 - DNA, 120 bp, Artificial Sequence
  ENSG00000113594_14 (sequence is synthesized)
ttttcggattcgttgttctactgaaactttctggaaatggagcaaatggagcaataaaaaacaacatttaacaacagaagccagtccttcaaaggggcctgatacttggagagagtggag

SEQ ID NO: 197788 - DNA, 120 bp, Artificial Sequence
  ENSG00000113594_15 (sequence is synthesized)
ttctgatggaaaaaatttaataatctattggaagcctttacccattaatgaagctaatggaaaaatactttcctacaatgtatcgtgttcatcagatgaggaaacacagtccctttctga

SEQ ID NO: 197789 - DNA, 120 bp, Artificial Sequence
  ENSG00000113594_16 (sequence is synthesized)
aatccctgatcctcagcacaaagcagagatacgacttgataagaatgactacatcatcagcgtagtggctaaaaattctgtgggctcatcaccaccttccaaaatagcgagtatggaaat

SEQ ID NO: 197790 - DNA, 120 bp, Artificial Sequence
  ENSG00000113594_17 (sequence is synthesized)
tccaaatgatgatctcaaaatagaacaagttgttgggatgggaaaggggattctcctcacctggcattacgaccccaacatgacttgcgactacgtcattaagtggtgtaactcgtctcg

SEQ ID NO: 197791 - DNA, 120 bp, Artificial Sequence
  ENSG00000113594_18 (sequence is synthesized)
gtcggaaccatgccttatggactggagaaaagttccctcaaacagcactgaaactgtaatagaatctgatgagtttcgaccaggtataagatataattttttcctgtatggatgcagaaa

SEQ ID NO: 197792 - DNA, 120 bp, Artificial Sequence
  ENSG00000113594_19 (sequence is synthesized)
tcaaggatatcaattattacgctccatgattggatatatagaagaattggctcccattgttgcaccaaattttactgttgaggatacttctgcagattcgatattagtaaaatgggaaga

SEQ ID NO: 197793 - DNA, 120 bp, Artificial Sequence
  ENSG00000113594_20 (sequence is synthesized)
cattcctgtggaagaacttagaggctttttaagaggatatttgttttactttggaaaaggagaaagagacacatctaagatgagggttttagaatcaggtcgttctgacataaaagttaa

SEQ ID NO: 197794 - DNA, 120 bp, Artificial Sequence
  ENSG00000113594_21 (sequence is synthesized)
gaatattactgacatatcccagaagacactgagaattgctgatcttcaaggtaaaacaagttaccacctggtcttgcgagcctatacagatggtggagtgggcccggagaagagtatgta

SEQ ID NO: 197795 - DNA, 120 bp, Artificial Sequence
  ENSG00000113594_22 (sequence is synthesized)
tgtggtgacaaaggaaaattctgtgggattaattattgccattctcatcccagtggcagtggctgtcattgttggagtggtgacaagtatcctttgctatcggaaacgagaatggattaa

SEQ ID NO: 197796 - DNA, 120 bp, Artificial Sequence
  ENSG00000113594_23 (sequence is synthesized)
agaaaccttctaccctgatattccaaatccagaaaactgtaaagcattacagtttcaaaagagtgtctgtgagggaagcagtgctcttaaaacattggaaatgaatccttgtaccccaaa

SEQ ID NO: 197797 - DNA, 120 bp, Artificial Sequence
  ENSG00000113594_24 (sequence is synthesized)
taatgttgaggttctggaaactcgatcagcatttcctaaaatagaagatacagaaataatttccccagtagctgagcgtcctgaagatcgctctgatgcagagcctgaaaaccatgtggt

SEQ ID NO: 197798 - DNA, 120 bp, Artificial Sequence
  ENSG00000113594_25 (sequence is synthesized)
tgtgtcctattgtccacccatcattgaggaagaaataccaaacccagccgcagatgaagctggagggactgcacaggttatttacattgatgttcagtcgatgtatcagcctcaagcaaa

SEQ ID NO: 197799 - DNA, 120 bp, Artificial Sequence
  ENSG00000113594_26 (sequence is synthesized)
accagaagaagaacaagaaaatgaccctgtaggaggggcaggctataagccacagatgcacctccccattaattctactgtggaagatatagctgcagaagaggacttagataaaactgc

SEQ ID NO: 197800 - DNA, 120 bp, Artificial Sequence
  ENSG00000113594_27 (sequence is synthesized)
gggttacagacctcaggccaatgtaaatacatggaatttagtgtctccagactctcctagatccatagacagcaacagtgagattgtctcatttggaagtccatgctccattaattcccg

SEQ ID NO: 197801 - DNA, 120 bp, Artificial Sequence
  ENSG00000113594_28 (sequence is synthesized)
acaatttttgattcctcctaaagatgaagactctcctaaatctaatggaggagggtggtcctttacaaacttttttcagaacaaaccaaacgattaacagtgtcaccgtgtcacttcagt

SEQ ID NO: 197802 - DNA, 120 bp, Artificial Sequence
  ENSG00000113594_29 (sequence is synthesized)
cagccatctcaataagctcttactgctagtgttgctacatcagcactgggcattcttggagggatcctgtgaagtattgttaggaggtgaacttcactacatgttaagttacactgaaag

SEQ ID NO: 197803 - DNA, 120 bp, Artificial Sequence
  ENSG00000113594_30 (sequence is synthesized)
tgttcatgtgcttttaatgtagtctaaaagccaaagtatagtgactcagaatcctcaatccacaaaactcaagattgggagctctttgtgatcaagccaaagaattctcatgtactctac

SEQ ID NO: 197804 - DNA, 120 bp, Artificial Sequence
  ENSG00000113594_31 (sequence is synthesized)
cttcaagaagcatttcaaggctaatacctacttgtacgtacatgtaaaacaaatcccgccgcaactgttttctgttctgttgtttgtggttttctcatgtgtatacttggtggaattgta

SEQ ID NO: 197805 - DNA, 120 bp, Artificial Sequence
  ENSG00000113594_32 (sequence is synthesized)
agtggatttgcaggccagggagaaaatgtccaagtaacaggtgaagtttatttgcctgacgtttactcctttctagatgaaaaccaagcacagattttaaaacttctaagattattctcc

SEQ ID NO: 197806 - DNA, 120 bp, Artificial Sequence
  ENSG00000113594_33 (sequence is synthesized)
tctatccacagcattcacaaaaattaatataatttttaatgtagtgacagcgatttagtgttttgtttgataaagtatgcttatttctgtgcctactgtataatggttatcaaacagttg

SEQ ID NO: 197807 - DNA, 120 bp, Artificial Sequence
  ENSG00000113594_34 (sequence is synthesized)
tctcaggggtacaaactttgaaaacaagtgtgacactgaccagcccaaatcataatcatgttttcttgctgtgataggttttgcaagccttttcattattttttagcttttatgcttgct

SEQ ID NO: 197808 - DNA, 120 bp, Artificial Sequence
  ENSG00000113594_35 (sequence is synthesized)
tccattatttcagttggttgccctaatatttaaaatttacacttctaagactagagacccacattttttaaaaatcattttattttgtgatacagtgacagctttatatgagcaaattca

SEQ ID NO: 197809 - DNA, 120 bp, Artificial Sequence
  ENSG00000113594_36 (sequence is synthesized)
atattattcataagcatgtaattccagtgacttactatgtgagatgactactaagcaatatctagcagcgttagctgtccatatagttctgattggatttcgttcctcctgaggagacca

SEQ ID NO: 197810 - DNA, 120 bp, Artificial Sequence
  ENSG00000113594_37 (sequence is synthesized)
tgccgttgagcttggctacccaggcagtggtgatctttgacaccttctggtggatgttcctcccactcatgagtcttttcatcatgccacattatctgatccagtcctcacatttttaaa

SEQ ID NO: 197811 - DNA, 120 bp, Artificial Sequence
  ENSG00000113594_38 (sequence is synthesized)
tataaaactaaagagagaatgcttcttacaggaacagttacccaagggctgtttcttagtaactgtcataaactgatctgaatccatgggcatacctgtgttgcaggtgcagcaattgct

SEQ ID NO: 197812 - DNA, 120 bp, Artificial Sequence
  ENSG00000113594_39 (sequence is synthesized)
tggtgagctgtgcagaattgattgccttcagcacagcatcctctgcccacccttgtttctcataagcgatgtctggagtgattgtggttcttggaaaagcagaaggaaaaactaaaaagt

SEQ ID NO: 197813 - DNA, 120 bp, Artificial Sequence
  ENSG00000113594_40 (sequence is synthesized)
gtatcttgtattttccctgccctcaggttgcctatgtattttaccttttcatatttaaggcaaaagtacttgaaaattttaagtgtccgaataagatatgtcttttttgtttgttttttt

SEQ ID NO: 197814 - DNA, 120 bp, Artificial Sequence
  ENSG00000113594_41 (sequence is synthesized)
tggttgtttgtttgttttttatcatctgagattctgtaatgtatttgcaaataatggatcaattaattttttttgaagctcatattgtatctttttaaaaaccatgttgtggaaaaaagc

SEQ ID NO: 197815 - DNA, 120 bp, Artificial Sequence
  ENSG00000113594_42 (sequence is synthesized)
aagtgacaaaatctatttaggttctctgtgtatgaatcctgattttaactgctaggattcagctaaatttctgagctttatgatctgtggaaatttggaatgaaatgcaattcattttgt

SEQ ID NO: 197816 - DNA, 120 bp, Artificial Sequence
  ENSG00000113594_43 (sequence is synthesized)
acatacatagtatattaaaactatataatagttcatagaaatgttcagtaatgaaaaatatatccaatcagagccatccctaaagagtgttctcttgtcttcctttgtatcctctttggc

SEQ ID NO: 197817 - DNA, 120 bp, Artificial Sequence
  ENSG00000113594_44 (sequence is synthesized)
tccttcccttagcttccaccccagacatcagacctggggctgccttctctccctgccaaagcttgctgttagcattgtctgcttgccctcaactcctgccttgttccctgttgaaatgta

SEQ ID NO: 197818 - DNA, 120 bp, Artificial Sequence
  ENSG00000113594_45 (sequence is synthesized)
tcaatcccgtactttatctctccaggacaaggataagtgtggctacagtaaaagtttattgctctaaacggcgctaacctgagataatgagaaaaggccagaagagattgtttgatctct

SEQ ID NO: 197819 - DNA, 120 bp, Artificial Sequence
  ENSG00000113594_46 (sequence is synthesized)
gtctgtcaatatatatgcatttcaactgtgaccatctggatccagggccctttctaacctatataacgactcatttgtttggttaatgatgaatatcactggggctcttaagtcctttcg

SEQ ID NO: 197820 - DNA, 120 bp, Artificial Sequence
  ENSG00000113594_47 (sequence is synthesized)
ttctatccaagacttcattgtttttttctgtatgaaaaaagtgcagaatatcactcacctttcccctacttttggatcccctacacgaggatcactagcttaatgagaagcagagtaacg

SEQ ID NO: 197821 - DNA, 120 bp, Artificial Sequence
  ENSG00000113594_48 (sequence is synthesized)
ctattaagtctgggcaagctccttataagttgctgtgtgcttaaaagaatgtgatttatgtctggggccaaagcagttttccttcttttccctcattgaattcaagacagctagaccctt

SEQ ID NO: 197822 - DNA, 120 bp, Artificial Sequence
  ENSG00000113594_49 (sequence is synthesized)
gtgtagatcccaggatattacctctactccccccaacctgtgtgtgtagggagagtaacaacacgggaagaggggagggaagttggaaggagattggtcacatgttcagttgtctgagat

SEQ ID NO: 197823 - DNA, 120 bp, Artificial Sequence
  ENSG00000113594_50 (sequence is synthesized)
actggtaaatgtgcgctgtttgtcaatgaaggttgcatgcctgcatttacaaggtggtctcatactgattgtgctctgtccagttagattcgtggcttctcccttggaagctacaattaa

SEQ ID NO: 197824 - DNA, 120 bp, Artificial Sequence
  ENSG00000113594_51 (sequence is synthesized)
ggactagttagaagcagaggctagatgtgttctctccagcccttactaactgggaaaataattgagaaatccctcttttcctcagtgaaagcccagtcattggttagaaaaatctaattg

SEQ ID NO: 197825 - DNA, 120 bp, Artificial Sequence
  ENSG00000113594_52 (sequence is synthesized)
tcaaactagcattatgttccatcatatctgtgggatagtaattcatgtaagacacatttttacctctcttacaagtcaattcacttacaagccagtttcaaatcaagcttcccttgcgag

SEQ ID NO: 197826 - DNA, 120 bp, Artificial Sequence
  ENSG00000113594_53 (sequence is synthesized)
cgaggaatggagatcattatggggcttattatgactacatttcttttatgagtgaccattttaaataattaatattttatttaatattaaattattaaagacttagctagacttttaaca

SEQ ID NO: 197827 - DNA, 120 bp, Artificial Sequence
  ENSG00000113594_54 (sequence is synthesized)
atgaaccttgtgaatcatatattgcatagattagcacatgtatgcaatctaggtcatcaatttgttgaatttatacagccctagatttgagattgtggccctgagtatctggatagttga

SEQ ID NO: 197828 - DNA, 120 bp, Artificial Sequence
  ENSG00000113594_55 (sequence is synthesized)
gttgtgtgtttatgtgcttatatgatagaggtgctttgttcctgcagcttagaaacagaagcagccattcactgagaagcttaagagaggaagtatcaacctcattttccaaaccagcat

SEQ ID NO: 197829 - DNA, 120 bp, Artificial Sequence
  ENSG00000113594_56 (sequence is synthesized)
tactttcaccgctcgtggatctgaaagattacatttagaacatttagtactattacactctcagaaactgtggtaaaaagtcacattttcaaaacttcatgcatattgtattcttgttgg

SEQ ID NO: 197830 - DNA, 120 bp, Artificial Sequence
  ENSG00000113594_57 (sequence is synthesized)
aaataagtcctatagtttcttaattgtcttcatgccgtccatatttaacaaacattgcaagtcctttttatatttgggtaattatttgtaatttagtgaaggagactaggggatgttttc

SEQ ID NO: 197831 - DNA, 120 bp, Artificial Sequence
  ENSG00000113594_58 (sequence is synthesized)
ttccaaagggaatttaaaatcaattttatggtattttgaaagtaaaatactccttaacgtgtcaatatttttaaaatgttatctcgaagttttctattgctcaggtatataatctaataa

SEQ ID NO: 197832 - DNA, 120 bp, Artificial Sequence
  ENSG00000113594_59 (sequence is synthesized)
aattttttgtttgctctaaggttatttttgctattctctattttgaattatgttaaaatttgtgtgcattttatgaaatgccttttttcttattttgaaagtgtaaaattgggcatctca

SEQ ID NO: 197833 - DNA, 120 bp, Artificial Sequence
  ENSG00000113594_60 (sequence is synthesized)
gagtaaaatgtgggattattagctacaaagactaggcacatcgtgaaagctcagtaactaattttcttgactgagtcctatcccagagtgtcacagattcaacagaattttcctgaaggg

SEQ ID NO: 197834 - DNA, 120 bp, Artificial Sequence
  ENSG00000113594_61 (sequence is synthesized)
tgatacacaccaaaatctagcttgtgtggatctgagactattgactcaaagattcaaatctacttcggaagtgactccacggtttgagtgaaaactgaggaaggactcatgcctgtatat

SEQ ID NO: 197835 - DNA, 120 bp, Artificial Sequence
  ENSG00000113594_62 (sequence is synthesized)
cactagatatcttatttctccataattttaagtgttcataatttcttcttctttgatgggtgtgcaactggggcatgtttgtaccagccagcatgtgttctgcccaacagtgtgtccgtg

SEQ ID NO: 197836 - DNA, 120 bp, Artificial Sequence
  ENSG00000113594_63 (sequence is synthesized)
tgtgaggttaactgattcagaactcattctcttgataaactatttcttgaaagcatttattttaagtctttatttcctgctgaaatgaagtttcatgctgtcatgcccatcttatttatt

SEQ ID NO: 197837 - DNA, 120 bp, Artificial Sequence
  ENSG00000113594_64 (sequence is synthesized)
ctagaagaaaattttcatagaagaaaatgatttatggccaaagttacagaacattcatcttttagacttagccttagaatatcattggaaattacttggcttgaatttggttcgttttta

SEQ ID NO: 197838 - DNA, 120 bp, Artificial Sequence
  ENSG00000113594_65 (sequence is synthesized)
tctttatggattatgtaccagggctattaataatacttaaaccccttattttgctatggtggttagatttttttattccttttcaattagtgctattaattattacatggtcgtattcat

SEQ ID NO: 197839 - DNA, 120 bp, Artificial Sequence
  ENSG00000113594_66 (sequence is synthesized)
gcttattacagatgaactatttttagtgccagtgtaaaggattaagaataacattcaattagttggctatttcaggctttattgtacatggtaatgtttcagggagtgtgatttggtcta

SEQ ID NO: 197840 - DNA, 120 bp, Artificial Sequence
  ENSG00000113594_67 (sequence is synthesized)
gaatatatccagatccttgtaattatgatattgggttatgacaggattctattatttttagctatgaatggtgcttatttttccctatattaggaatgttaatatttggattatcagagt

SEQ ID NO: 197841 - DNA, 120 bp, Artificial Sequence
  ENSG00000113594_68 (sequence is synthesized)
ccatgttataaacagaatttacctatgcaagacaaattctaactgtgcaacattttcatgagaattaaaagttgtgtgttaaggggaaaaccctctgaatgtttttatgtgtaagtgcct

SEQ ID NO: 197842 - DNA, 120 bp, Artificial Sequence
  ENSG00000113594_69 (sequence is synthesized)
aaagaaccgtagaaacagtacatcaaaagctcttataaaagaaaaactgattgaacattagccagaaacaaaatatgatttacatttttttttttggttgctgggactgaataccctaaa

SEQ ID NO: 197843 - DNA, 120 bp, Artificial Sequence
  ENSG00000113594_70 (sequence is synthesized)
aactaagagatgtgagtggggaaaatgtctaattgataagaaagttgatttatattatatttacatgcatcttctaagattgcctttacagtagccaatcagaactttaaaaaaaaaaaa

SEQ ID NO: 197844 - DNA, 120 bp, Artificial Sequence
  ENSG00000113594_71 (sequence is synthesized)
gctaacaacatagatcctatgtgttgcccttaagactaaaatactttgcacacgtgattgaatggctcacttaagttgttgaatttccttatacatttaaagtgtacttccgttaagaat

SEQ ID NO: 197845 - DNA, 120 bp, Artificial Sequence
  ENSG00000113594_72 (sequence is synthesized)
tattccattttaaatgggtaactttcagcttccgaactattttcctaaacattccagttgtgtattataaaagatcaaaatatctctaggtggtagtacaattttcatttataacgtgga

SEQ ID NO: 197846 - DNA, 120 bp, Artificial Sequence
  ENSG00000113594_73 (sequence is synthesized)
aaagttaactgttaggtttaacattagtattagtgtttttgcaattgctcatagaaaagaacactgaataatggttttcatacaatttttgtaaaacattcttctcccagtttgattcca

SEQ ID NO: 197847 - DNA, 120 bp, Artificial Sequence
  ENSG00000113594_74 (sequence is synthesized)
aatgcttttccccaaattgtctaatatatcataagctagtgtttccttgtatttaatttttccttccaacacaatatttaggaaaaatatgaataacattgtgagtagcgggagacaaca

SEQ ID NO: 197848 - DNA, 120 bp, Artificial Sequence
  ENSG00000113594_75 (sequence is synthesized)
cgaaaaagaaacctttcattgttgtggaggggtaggtgttatgtgattgatgcccttcctggcgtttgttttatcctgttattttctcaaaaaagagcacggctttttcttaaatacatt

SEQ ID NO: 197849 - DNA, 120 bp, Artificial Sequence
  ENSG00000113594_76 (sequence is synthesized)
taaattcagaattgcttgcaaaagattggcctggatagatagacatcctagatttaagatagtaccatcttaaaagtatgttgaaaggtaaaataaatcatttcaaaatacttaactttc

SEQ ID NO: 197850 - DNA, 120 bp, Artificial Sequence
  ENSG00000113594_77 (sequence is synthesized)
ctaataaggatgttaggttttcttctctttcattagctggccataagtcaaggtccttataacactaggaaattacctttttttactttcaaaattgcattatagtgaattactgtttac

SEQ ID NO: 197851 - DNA, 120 bp, Artificial Sequence
  ENSG00000113594_78 (sequence is synthesized)
gtgaattactgtttacaaaatacacatactgtgaacagatataagtttctgtcttttataaggtttgtagaatgaatgtttttttaaagtgagtattatatgttaaatattttaagtttt

SEQ ID NO: 197852 - DNA, 120 bp, Artificial Sequence
  ENSG00000113594_79 (sequence is synthesized)
ctgtttactaatttttgtttggtcaaatgcttgtaaatgtagctgaaagaagatagggagaaactgcggatcccaaactgttccctttttcatttcttgaaatgttaccactacagacat

SEQ ID NO: 197853 - DNA, 120 bp, Artificial Sequence
  ENSG00000113594_80 (sequence is synthesized)
ttttttaaggtgaataaacagttgtgatgtgctgtacctaaaatcatgtttaatcgtataaggaaacatttcaatacacttatacaggaagaaaactatagatgaagtacatgtgtgtga

SEQ ID NO: 197854 - DNA, 120 bp, Artificial Sequence
  ENSG00000113594_81 (sequence is synthesized)
ttcagtctgattcacagaattctgagagtaatatggaataaaacaactccacttagatgataactgaagcatttcctgccttgtgaaaatttggattttaaattgctgttagaatgggaa

SEQ ID NO: 197855 - DNA, 120 bp, Artificial Sequence
  ENSG00000113594_82 (sequence is synthesized)
atttggacactttatatcattgtataatttcagaatttagtttctgtatcttttggaaaacatgattatagcaaaaacatagaaaataatctattactaaaacaccataaatgtaaaact

SEQ ID NO: 197856 - DNA, 120 bp, Artificial Sequence
  ENSG00000113594_83 (sequence is synthesized)
agtatgcttggctgttaactctaaagatgttacttatgtctgtttttaaaacatgcatgtatttaacaattttatcatagtattgtcatggaaaaaataaatatattttcttacatctta

SEQ ID NO: 197857 - DNA, 80 bp, Artificial Sequence
  ENSG00000113594_84 (sequence is synthesized)
agtcccggctggagcgactcggccgtggcggtggccgttaccgttgcctctgggaggctctggcggcggcggcggcccgc

SEQ ID NO: 197858 - DNA, 120 bp, Artificial Sequence
  ENSG00000113594_85 (sequence is synthesized)
cgcctcaagcagcctcgcgccgacacaggggaggcgagacggcggctgcggaggcggcggcgcattgtgcccggccccctccttggcggctcctgcccccgggcggctgtgggatctggg

SEQ ID NO: 197859 - DNA, 120 bp, Artificial Sequence
  ENSG00000113594_86 (sequence is synthesized)
gtggctctgctttgttgttgtatttttttgttctatcccgtaagaaatacagtggttgtaaagcaatcacatagcgctatggatgtatttttaacatttgagtacattgctgtgccattg

SEQ ID NO: 197860 - DNA, 120 bp, Artificial Sequence
  ENSG00000113594_87 (sequence is synthesized)
gtgtaacatccatctgtccattaagtcattattgtttacctgagaagttagcatcaaaataatcaaatagtgggaatccaacattagcaaataaataataaatactggtctttaaagtaa

SEQ ID NO: 197861 - DNA, 120 bp, Artificial Sequence
  ENSG00000113594_88 (sequence is synthesized)
aatggagcaataaaaaacaacatttaacaacagaagccagtccttcaaaggggcctgatacttggagagagtggagttctgatggaaaaaatttaataatctattggaagatgaggaaac

SEQ ID NO: 197862 - DNA, 120 bp, Artificial Sequence
  ENSG00000113594_89 (sequence is synthesized)
tggtgacaaaggaaaattgtaagtttcaggttgctgttgaggtgctttccatcctgcatgcgtagtgttctagtgattcttggtttatgtaggaacccctccccgccctttctaaaaaac

SEQ ID NO: 197863 - DNA, 120 bp, Artificial Sequence
  ENSG00000113594_90 (sequence is synthesized)
attcacattttgttgcagtttttggctggtagagggaagggttaaaaagctgtaagattacttcatgtttattcttgtcagttatttgaagttatttccaaatgagtacctaagaaatta

SEQ ID NO: 197864 - DNA, 120 bp, Artificial Sequence
  ENSG00000113594_91 (sequence is synthesized)
gcggcggccgaggctacagagccggcggcaggggatggcaagatagcggcgcgggagcgtaccgtgatcggagcagctatttcctcttcaagaattgaattgagacttctttgctttgta

SEQ ID NO: 197865 - DNA, 120 bp, Artificial Sequence
  ENSG00000113594_92 (sequence is synthesized)
cagtttgtgtacttttttttttaaggtcatggaagctgaagattggaaaagcaaatagaagaaaataaattcttcagcttggagataagcaggaaacccaaagaacatgttcttaagtat

SEQ ID NO: 197866 - DNA, 120 bp, Artificial Sequence
  ENSG00000113594_93 (sequence is synthesized)
aagacctcagtaataatattgaatagaaattcaactaaatggagctgacagaagcccagacaggcaaccaggagattcttgtggcctgcccctgtttcatcttctgccatgagtaaaagc

SEQ ID NO: 197867 - DNA, 120 bp, Artificial Sequence
  ENSG00000113594_94 (sequence is synthesized)
ttatagttatgatctttaacttgaagcccatcatttgaaaattggcctcgtagtagatacctaaagcaacagctgtgtccaattattgatgtctccacaagccagggaagcttgagtttg

SEQ ID NO: 197868 - DNA, 120 bp, Artificial Sequence
  ENSG00000113594_95 (sequence is synthesized)
agtatctccaaagtctctaaatgtacagtgtttcagaatctgtcagaatctatttgagtgtttgtgtgcacagtataaggtgagccttcagaacaatctgaacaccatctggaattcctc

SEQ ID NO: 197869 - DNA, 120 bp, Artificial Sequence
  ENSG00000113594_96 (sequence is synthesized)
caaacgcgtccggcatacagcgtaaacatcttcagaccgtgattctgcgccatcaaacgctctccagctaatttcatttggtgattactctgctagaaaaccgaggccaagtgaaactgc

SEQ ID NO: 197870 - DNA, 120 bp, Artificial Sequence
  ENSG00000113594_97 (sequence is synthesized)
ggaaatgggaacaatgtacggaggaaaaatctcaccccattaagagatccgtttcttctccgcacaaataagcccaccccgcctccgaggcaagactagatggctccaggatactctcgg

SEQ ID NO: 197871 - DNA, 120 bp, Artificial Sequence
  ENSG00000113595_0 (sequence is synthesized)
aaccccgcctctcagttgaggactctgaaggctgtttctgtggcgcttcccctgcgaggatggctaccctggttgtaaacaagctcggagcgggagtagacagtggccggcagggcagcc

SEQ ID NO: 197872 - DNA, 120 bp, Artificial Sequence
  ENSG00000113595_1 (sequence is synthesized)
gggggacagctgtagtgaaggtgctagagtgtggagtttgtgaagatgtcttttctttgcaaggagacaaagttccccgtcttttgctttgtggccataccgtctgtcatgactgtctca

SEQ ID NO: 197873 - DNA, 120 bp, Artificial Sequence
  ENSG00000113595_2 (sequence is synthesized)
ctcgcctacctcttcatggaagagcaatccgttgcccatttgatcgacaagtaacagacctaggtgattcaggtgtctggggattgaaaaaaaattttgctttattggagcttttggaac

SEQ ID NO: 197874 - DNA, 120 bp, Artificial Sequence
  ENSG00000113595_3 (sequence is synthesized)
gactgcagaatgggcctattggtcagtatggagctgcagaagaatccattgggatatctggagagagcatcattcgttgtgatgaagatgaagctcaccttgcctctgtatattgcactg

SEQ ID NO: 197875 - DNA, 120 bp, Artificial Sequence
  ENSG00000113595_4 (sequence is synthesized)
tgtgtgcaactcatttgtgctctgagtgttctcaagttactcattctacaaagacattagcaaagcacaggcgagttcctctagctgataaacctcatgagaaaactatgtgctctcagc

SEQ ID NO: 197876 - DNA, 120 bp, Artificial Sequence
  ENSG00000113595_5 (sequence is synthesized)
accaggtgcatgccattgagtttgtttgcttggaagaaggttgtcaaactagcccactcatgtgctgtgtctgcaaagaatatggaaaacaccagggtcacaagcattcagtattggaac

SEQ ID NO: 197877 - DNA, 120 bp, Artificial Sequence
  ENSG00000113595_6 (sequence is synthesized)
cagaagctaatcagatccgagcatcaattttagatatggctcactgcatacggaccttcacagaggaaatctcagattattccagaaaattagttggaattgtgcagcacattgaaggag

SEQ ID NO: 197878 - DNA, 120 bp, Artificial Sequence
  ENSG00000113595_7 (sequence is synthesized)
gagaacaaatcgtggaagatggaattggaatggctcacacagaacatgtaccagggactgcagagaatgcccggtcatgtattcgagcttatttttatgatctacatgaaactctgtgtc

SEQ ID NO: 197879 - DNA, 120 bp, Artificial Sequence
  ENSG00000113595_8 (sequence is synthesized)
gtcaagaagaaatggctctaagtgttgttgatgctcatgttcgtgaaaaattgatttggctcaggcagcaacaagaagatatgactattttgttgtcagaggtttctgcagcctgcctcc

SEQ ID NO: 197880 - DNA, 120 bp, Artificial Sequence
  ENSG00000113595_9 (sequence is synthesized)
actgtgaaaagactttgcagcaggatgattgtagagttgtcttggcaaaacaggaaattacaaggttactggaaacattgcagaaacagcagcagcagtttacagaagttgcagatcaca

SEQ ID NO: 197881 - DNA, 120 bp, Artificial Sequence
  ENSG00000113595_10 (sequence is synthesized)
ttcagttggatgccagcatccctgtcacttttacaaaggataatcgagttcacattggaccaaaaatggaaattcgggtcgttacgttaggattggatggtgctggaaaaactactatct

SEQ ID NO: 197882 - DNA, 120 bp, Artificial Sequence
  ENSG00000113595_11 (sequence is synthesized)
tgtttaagttaaaacaggatgaattcatgcagcccattccaacaattggttttaacgtggaaactgtagaatataaaaatctaaaattcactatttgggatgtaggtggaaaacacaaat

SEQ ID NO: 197883 - DNA, 120 bp, Artificial Sequence
  ENSG00000113595_12 (sequence is synthesized)
taagaccattgtggaaacattattacctcaatactcaagctgttgtgtttgttgtagatagcagtcatagagacagaattagtgaagcacacagcgaacttgcaaagttgttaacggaaa

SEQ ID NO: 197884 - DNA, 120 bp, Artificial Sequence
  ENSG00000113595_13 (sequence is synthesized)
aagaactccgagatgctctgctcctgatttttgctaacaaacaggatgttgctggagcactgtcagtagaagaaatcactgaactactcagtctccataaattatgctgtggccgtagct

SEQ ID NO: 197885 - DNA, 120 bp, Artificial Sequence
  ENSG00000113595_14 (sequence is synthesized)
ggtatattcagggctgtgatgctcgaagtggtatgggactgtatgaagggttggactggctctcacggcaacttgtagctgctggagtattggatgttgcttgattttaaaggcagcagt

SEQ ID NO: 197886 - DNA, 120 bp, Artificial Sequence
  ENSG00000113595_15 (sequence is synthesized)
tgtttgaagttttgtggttaaaagtaactttgcacatagtatgttttaagaaattatacatctcaaaagatggtaatttaggatgcatatatatatatatatatataaaggaatcttgga

SEQ ID NO: 197887 - DNA, 120 bp, Artificial Sequence
  ENSG00000113595_16 (sequence is synthesized)
tttgtggcagaattaaatttctaattgagcagattagattgaattaaatagaaacttattgaatatacattcttttaaaaagtatatttgttatttaagtttttcagataatatgtgacc

SEQ ID NO: 197888 - DNA, 120 bp, Artificial Sequence
  ENSG00000113595_17 (sequence is synthesized)
atgtgaccaatatactgggaaagaggtagtcacagagaaagggtaagtgaaggtttattctttcagtgaaaaaagaatagccaattgagtgcctaatgagacctctgtgtgaagcaagtg

SEQ ID NO: 197889 - DNA, 120 bp, Artificial Sequence
  ENSG00000113595_18 (sequence is synthesized)
aagtatagctgcttcttttaacctgccttttcactgaatgttggcagcatttagtagtagaaatgacagttgcttaatgaaatagaatccaaactacatatttggataataggattactt

SEQ ID NO: 197890 - DNA, 120 bp, Artificial Sequence
  ENSG00000113595_19 (sequence is synthesized)
tatgtttatgttcagagttaacagaacacctttaatgctaagaactataaggtacagaaaattaatactttatatagtgttttattaactttctcctacagcattttgtataaaacacaa

SEQ ID NO: 197891 - DNA, 120 bp, Artificial Sequence
  ENSG00000113595_20 (sequence is synthesized)
tgagggagtgaaatgttacccaattaggcttgtcaggttagtaataaactgaacagtaataaaactgtggaagtaattggatctgaatttatgaaagacccatttccaggactgaaccta

SEQ ID NO: 197892 - DNA, 120 bp, Artificial Sequence
  ENSG00000113595_21 (sequence is synthesized)
ggtcagagctctaaattggtccttctatttttcaacaaatttaaagtaatatttctttctaatataatattgcatcctttgtgggaatgactataggtaaaatgtagtaagtaacgcaga

SEQ ID NO: 197893 - DNA, 120 bp, Artificial Sequence
  ENSG00000113595_22 (sequence is synthesized)
accagggttggctttatttaaaagctagtgacctaaatagaaagcgaacttcaagagaagttgtaagtacagtggcaaatgcttattacttacttcaaactgtttcccaaaataagtgca

SEQ ID NO: 197894 - DNA, 120 bp, Artificial Sequence
  ENSG00000113595_23 (sequence is synthesized)
tttattttgacaataaaacttaaggctgttcatgagaaggccttgaaaagttactctagaggaaaaatgtctaaagaaaaaaaaaattcaaaaagtttacattaattattcagtgttgtg

SEQ ID NO: 197895 - DNA, 120 bp, Artificial Sequence
  ENSG00000113595_24 (sequence is synthesized)
agtaaataaaaatgtgtgctctttactgtttttcatttttaaagaatattattatggaagcacgatttatttaaataggtacattgagacttttttttttttaatgttctgatacattag

SEQ ID NO: 197896 - DNA, 120 bp, Artificial Sequence
  ENSG00000113595_25 (sequence is synthesized)
gatgaagttaaatcttaaatcttattagttgaattgttgtaaggacagtgatgtctggtaacaagatgtgactttttggtagcactgttgtggttcattcttttcaaatctatttttgtt

SEQ ID NO: 197897 - DNA, 120 bp, Artificial Sequence
  ENSG00000113595_26 (sequence is synthesized)
taaaaacaatacaagttttagaaaacaaagcattaaaaaaaaagcctatcagtattatgggcaatatgtaaataaataaatgtaatatttcatcctttatttttcaggtaaaaggtcatg

SEQ ID NO: 197898 - DNA, 120 bp, Artificial Sequence
  ENSG00000113595_27 (sequence is synthesized)
ctgttacaggtgtagtttgtgtgcataaataatacttccgaattaaattatttaatatttgactgatttcaataactgtgaaaaataaaaaaggtgttgtattgcttgtgagaacttgaa

SEQ ID NO: 197899 - DNA, 120 bp, Artificial Sequence
  ENSG00000113595_28 (sequence is synthesized)
ctgtttactagttaattgaagaaaaagtgtaacactaaggtgaacttgcttcccttttcactaattttgctaaactttgtaatgcacattcttagcatataactgaacacagttgaaaaa

SEQ ID NO: 197900 - DNA, 120 bp, Artificial Sequence
  ENSG00000113595_29 (sequence is synthesized)
ttgtgcctgattataatgtatgtataatggtaggtgtttgtgtgtgattcatttttaaagaaatatttttctcaagctcctattactatttgtggttgtattatttcactaatcattagt

SEQ ID NO: 197901 - DNA, 120 bp, Artificial Sequence
  ENSG00000113595_30 (sequence is synthesized)
taagactgtgctagtcttccctgggaaactaagaagagagcttttttatatacagtatattagaattttcctagtagctgaatttctgtattaggtctaaatattactgtatgttatata

SEQ ID NO: 197902 - DNA, 120 bp, Artificial Sequence
  ENSG00000113595_31 (sequence is synthesized)
aagcaggtatgtcaagtgtatagccgtagtctataattcaggaatgctttataaccatcagaagccattatttgcactacatatatgataagtatagacagcaataaaatgttaagatca

SEQ ID NO: 197903 - DNA, 120 bp, Artificial Sequence
  ENSG00000113595_32 (sequence is synthesized)
gatgactacatcataatgggaaggataaggcgttcctcaaaatggatgccataagtaaagggaagctgaagcctgattaacttcgtcagtgccacaggaagaaacaagagacagaaggaa

SEQ ID NO: 197904 - DNA, 120 bp, Artificial Sequence
  ENSG00000113595_33 (sequence is synthesized)
aaagcactttggatgcccgctgtaattcacagagatctccacggtaggagcgggacgtcagcttctgcggctaaaatctcgtgactgaagcagcacagatcagaaagaacgatttaccag

SEQ ID NO: 197905 - DNA, 120 bp, Artificial Sequence
  ENSG00000113595_34 (sequence is synthesized)
cattgggatatctggagagttctaccaagaataaagtgaaaagaggaagaagattatggaatagtaagaaagatatgtaagcaacagtagagaagaggatgcaaaagtagtcaacagtaa

SEQ ID NO: 197906 - DNA, 120 bp, Artificial Sequence
  ENSG00000113595_35 (sequence is synthesized)
agaaaattgaacagaggaatggatggaacatcacaaattgatcttcacttctgagaacataatttaatcatccatccactctaaacaaattatgcatcatctaaagttcttggcatgata

SEQ ID NO: 197907 - DNA, 120 bp, Artificial Sequence
  ENSG00000113595_36 (sequence is synthesized)
ctggatgctgaatatttattcatttagcaaatatgtattgagtagctaacatatgccatgtatttaaaatatatcagtgaacacaataagcaaaaagccataatcttgtgaaattagcat

SEQ ID NO: 197908 - DNA, 120 bp, Artificial Sequence
  ENSG00000113597_0 (sequence is synthesized)
ggctgtgggtcaaaagtgccggtcaaaatggaagtgaatccccctaaacaggagcacctgctggcgctaaaagtgatgcggctgactaagcctactttattcaccaatatcccagtaaca

SEQ ID NO: 197909 - DNA, 120 bp, Artificial Sequence
  ENSG00000113597_1 (sequence is synthesized)
tgtgaagagaaagacttacctggagatctctttaaccagctgatgagagatgatccttcaaccgttaatggtgcagaagttttaatgttgggagaaatgctgactttaccacagaatttt

SEQ ID NO: 197910 - DNA, 120 bp, Artificial Sequence
  ENSG00000113597_2 (sequence is synthesized)
gggaatatatttttgggagagaccttttccagttatatcagcgttcataatgatagcaatcaagttgtaaaagacatattagtaaaagctgatcttcagacaagttctcagcgtttaaat

SEQ ID NO: 197911 - DNA, 120 bp, Artificial Sequence
  ENSG00000113597_3 (sequence is synthesized)
ctttcagcctccaatgctgcagtggctgaacttaaaccggattgttgtattgatgatgtcatacatcatgaagtcaaagaaattggaacacacatcttggtatgtgctgtgagttataca

SEQ ID NO: 197912 - DNA, 120 bp, Artificial Sequence
  ENSG00000113597_4 (sequence is synthesized)
actcaggctggagaaaaaatgtatttcagaaaattcttcaaatttcaggttctcaaaccattggatgtgaaaaccaaattttacaatgcagagagtgacctcagttctgtgactgatgaa

SEQ ID NO: 197913 - DNA, 120 bp, Artificial Sequence
  ENSG00000113597_5 (sequence is synthesized)
ggagaatgtgtgtctacgtttgggtcaagagcatatttgcaaccaatggatacacgccagtacttatactgcctaaagccaaagaatgaatttgcagaaaaagcaggcatcattaaggga

SEQ ID NO: 197914 - DNA, 120 bp, Artificial Sequence
  ENSG00000113597_6 (sequence is synthesized)
gtaacagtaattggaaaattggatatagtatggaaaacaaatctaggtgaaaggggaaggttacagaccagccaacttcaaagaatggctccaggttatggagatgttaggttgtctttg

SEQ ID NO: 197915 - DNA, 120 bp, Artificial Sequence
  ENSG00000113597_7 (sequence is synthesized)
gaggcaataccagataccgtaaaccttgaagaaccttttcatattacctgtaaaataacaaactgcagcagtgaaaggactatggatctggttttggaaatgtgcaataccaattccatc

SEQ ID NO: 197916 - DNA, 120 bp, Artificial Sequence
  ENSG00000113597_8 (sequence is synthesized)
cactggtgtggaatttcaggaagacagctgggaaagctgcatccaagttcttcgctctgtcttgcccttactctgctttcttcagtacagggactgcaaagcatctctggcttaagacta

SEQ ID NO: 197917 - DNA, 120 bp, Artificial Sequence
  ENSG00000113597_9 (sequence is synthesized)
acagacacattcttaaagagaacatatgaatatgatgacatcgcacaagtctgtgtggtatcttctgccattaaagtggaaagctgaaggaaacttccaatgttaggcttttcatttagt

SEQ ID NO: 197918 - DNA, 120 bp, Artificial Sequence
  ENSG00000113597_10 (sequence is synthesized)
ttcacagaactgctctttttgttacctttgtaaaatgatgacgtcaacaacgaagtaaatatgttacttaaattttctttcctgtaaaatggttaaaatattaaatatttgttttgaaga

SEQ ID NO: 197919 - DNA, 120 bp, Artificial Sequence
  ENSG00000113597_11 (sequence is synthesized)
ccaaaagctgtgtatctgagaccatttgtccctagcaagttatctagaacacgagtcagcacactttttatgtaaggtacaagatactaaatattttaggctttgcaggccgtaaggttt

SEQ ID NO: 197920 - DNA, 120 bp, Artificial Sequence
  ENSG00000113597_12 (sequence is synthesized)
gtttctgtcacaaatactgaactctgccatcgtacttcaagagcagccagtaggcaaaaaaagtacagtggtgtacacaaaaagaagcagttggactcgggaagctgaggcaggagaatc

SEQ ID NO: 197921 - DNA, 70 bp, Artificial Sequence
  ENSG00000113597_13 (sequence is synthesized)
ctaggcagctgggcagatttggcctgcagggtatagttggctgacctcaatctagaagatagagttgttt

SEQ ID NO: 197922 - DNA, 120 bp, Artificial Sequence
  ENSG00000113597_14 (sequence is synthesized)
gtatagttggctgacctcaatctagaagatagagttgtttcttagaactttgtaatattttggttagaaatatttcagttaactccagttttttcctagctattcggtcagcagaaaaag

SEQ ID NO: 197923 - DNA, 120 bp, Artificial Sequence
  ENSG00000113597_15 (sequence is synthesized)
tttgcttaaaacaaagggggtagtcctcttataacctgatatttgtcaacacagtataagctttctagttgttttcaaaattactgtaatggtttgtgtctgtatttgtatattatacct

SEQ ID NO: 197924 - DNA, 120 bp, Artificial Sequence
  ENSG00000113597_16 (sequence is synthesized)
acaaacatacatatctttcagctactgaacacatcagaattggttttactttttaggttgttgattttttttaattaactattaactaagaataatacttattttctaattataagccaa

SEQ ID NO: 197925 - DNA, 120 bp, Artificial Sequence
  ENSG00000113597_17 (sequence is synthesized)
aaacccctgggtttttttctcattgattaagccacttatttttataaggtatatttaaataattcccatcttctgatatgattttaaactctaaatcatgtgttactgttacaaaacttt

SEQ ID NO: 197926 - DNA, 120 bp, Artificial Sequence
  ENSG00000113597_18 (sequence is synthesized)
ctctctccatgtaatcacacttagttatgagcaaagcagtgagaaagttgaggtgataaacaactttgcagcattaatgtaacaaaaagtttcagtatttgtcaggaaaacaaaagctta

SEQ ID NO: 197927 - DNA, 120 bp, Artificial Sequence
  ENSG00000113597_19 (sequence is synthesized)
ggctgttaaataaaagctattctattttggtaagttgaaattcaagaatgtatatataatttcttaaatgtaagagtgcattaaatcaaatacaaaaattggtttttcaatgcatcatta

SEQ ID NO: 197928 - DNA, 120 bp, Artificial Sequence
  ENSG00000113597_20 (sequence is synthesized)
tttattgccataacaaattgtttggtccaaaatgaaagctatattcagaaggtttgcacctcaaaattgagtaataattaatgaaatgtctgtacaaaataaagtgcaagcagtgtaaaa

SEQ ID NO: 197929 - DNA, 120 bp, Artificial Sequence
  ENSG00000113597_21 (sequence is synthesized)
aataatattttatagccactgcattggatacttggattgtttttcaagcatcttcttatgactaaatcttctgtttcattctgttttaaatctaaaaagtaaaatgatggtcacttggaa

SEQ ID NO: 197930 - DNA, 120 bp, Artificial Sequence
  ENSG00000113597_22 (sequence is synthesized)
acatttctaatactgaagcaaatcgccaacgtgactgtaaattatttgaaaaaatcacaaatttcagttaaaattgaataattttattataggtctcataatctttttcagcttacatgg

SEQ ID NO: 197931 - DNA, 120 bp, Artificial Sequence
  ENSG00000113597_23 (sequence is synthesized)
tctacatccagcagtaaaaaattggagcactataaaaggcattactactactggagcagaaaagattaatagtgtcactgataggtaggtcgaagactggtgttgccatgaatgaaaaat

SEQ ID NO: 197932 - DNA, 120 bp, Artificial Sequence
  ENSG00000113597_24 (sequence is synthesized)
tctcctttggtaacacatgctcactcttcttctgatttccaaacacattaaggttttctattttgcaatgtcctgaaactcttggacttacttcattcacctactcagttcctaccattt

SEQ ID NO: 197933 - DNA, 120 bp, Artificial Sequence
  ENSG00000113597_25 (sequence is synthesized)
ttaagatgttaaaaatctgaggcatctcctcagaaggtgagttctactaaagttatcttataagcattggttgcatattttacctaatttcttctctgagagtagggatagctaccaggc

SEQ ID NO: 197934 - DNA, 120 bp, Artificial Sequence
  ENSG00000113597_26 (sequence is synthesized)
ttctttttcttatgcttgtaagaatatacgacaggattctcctccctttatgctgaatattacctgttttgacatattccaaattttacttttctttccactgtttgaggcaataatttt

SEQ ID NO: 197935 - DNA, 120 bp, Artificial Sequence
  ENSG00000113597_27 (sequence is synthesized)
taaaaaatgatgatgatgattcctgggcccacttaaatatagccgttagttatttttctgccatggcctgttccaagccttcgtgttgttataatccatcctcatctgtgcgtcttgtaa

SEQ ID NO: 197936 - DNA, 120 bp, Artificial Sequence
  ENSG00000113597_28 (sequence is synthesized)
aaagtcatgattttcttcctggctcctttcaacatcatccccctctttctttagaaaataactttacctatttagagttacacacatagaagctacagcatctggaaagtgtcccttcaa

SEQ ID NO: 197937 - DNA, 120 bp, Artificial Sequence
  ENSG00000113597_29 (sequence is synthesized)
ctccctgaaatttctttactgactacttacctgtgagattcatcttaactctactgaacatggaataattatataacaaaaacagtccaggtctgccaggctattccacaggcagtagct

SEQ ID NO: 197938 - DNA, 120 bp, Artificial Sequence
  ENSG00000113597_30 (sequence is synthesized)
gcaaaagaatttaaaatgagagacaagtaaagtgaatcagaagtattttcttagaacatcagcttggaaacccaacagctgttgagtaaatgtgctgctgtggtgccttcattaaaatgg

SEQ ID NO: 197939 - DNA, 120 bp, Artificial Sequence
  ENSG00000113597_31 (sequence is synthesized)
catattacctgtaaaataacaaactgcaggtaatgccactgtttgtagatggatgtcctttctacctcacctgcctagaagataattttaaaatctttttgttactatctccttttaagt

SEQ ID NO: 197940 - DNA, 120 bp, Artificial Sequence
  ENSG00000113597_32 (sequence is synthesized)
tttcctcttgacatacagccttctctgatgttgatattgagtactgtaaaattcttcatctggtagcagtataattacatatttttaagggcctattgtattatgcatcttctgtatttt

SEQ ID NO: 197941 - DNA, 120 bp, Artificial Sequence
  ENSG00000113597_33 (sequence is synthesized)
atttcattcatttgtcacaccctatgaggtaggtattcattgtttatacttccttcaccaaaacatgaactaataggttcttatgtattaatatattatgaattgaagtagcaagatttt

SEQ ID NO: 197942 - DNA, 120 bp, Artificial Sequence
  ENSG00000113597_34 (sequence is synthesized)
ttgaggcatgcttgtacttgagctgtatcttgagtattaagaaaccaaacattgcttatggatttaatgtaaggggagatcattgattcgaaaactgggttttgacagtaaagagagagc

SEQ ID NO: 197943 - DNA, 120 bp, Artificial Sequence
  ENSG00000113597_35 (sequence is synthesized)
ataatctgaactgtcaggaagcaaagagcacagggctttgaaaccagaaaaaaatagaattaagttccagtcctatgccctctgctcctacttgtattaccacttggtttgtattattat

SEQ ID NO: 197944 - DNA, 120 bp, Artificial Sequence
  ENSG00000113597_36 (sequence is synthesized)
ttggggtatttttataatattgcagtgatgaatcctagtcctcttagtgtgaatgtataatccttttaattccatatttattctttttggtattagaaagataggaaatatttatccttc

SEQ ID NO: 197945 - DNA, 120 bp, Artificial Sequence
  ENSG00000113597_37 (sequence is synthesized)
atattgtgtatttagtgacactcatatattactgtaagtattagtctctttctcactggactggaattattcaggagaagggacatggccttactcagtgtctgccacatcgtgagctca

SEQ ID NO: 197946 - DNA, 120 bp, Artificial Sequence
  ENSG00000113597_38 (sequence is synthesized)
gtaaacaacaatacagggcaaagaccctgtgcttatagggtgttacagggtgttggggaatttttggttttttttttaagttttttcagcaaatcagtttattgaccagctcacaagtgt

SEQ ID NO: 197947 - DNA, 120 bp, Artificial Sequence
  ENSG00000113597_39 (sequence is synthesized)
tatttttttcaaaagttaacttctcttggtgttcactttaacttttggtgattcatacaagttttctaaaaagcacatgtctcttagatctttagtttcctctctatataaatgtcattc

SEQ ID NO: 197948 - DNA, 120 bp, Artificial Sequence
  ENSG00000113597_40 (sequence is synthesized)
cctgcccctacacaccagggacatgcacagacacatgcacacaacatatataagtcttactggatttttgtgaaattaacaatattcatgtagtgcatccaccttggtctctggcacata

SEQ ID NO: 197949 - DNA, 120 bp, Artificial Sequence
  ENSG00000113597_41 (sequence is synthesized)
gtagccatctcaaatgcttgttagggagattcaggcatatacaagttaatattataaagtcaatatgtctaaaaaaaataaaatttaaataagcaatttaaaatttggagccaagtataa

SEQ ID NO: 197950 - DNA, 120 bp, Artificial Sequence
  ENSG00000113597_42 (sequence is synthesized)
gaataaacagctaaaagccataagtagccgtgaatggtggtaggagactatttttcattatgagccttttggttatttaaagaagaacaatgtgcatactttcattaaaagtttttttaa

SEQ ID NO: 197951 - DNA, 120 bp, Artificial Sequence
  ENSG00000113597_43 (sequence is synthesized)
cttatttaagctgaactggtgatatctattataagcagaagtagtcttttcttggtaaataatccagttagcaaacctgaatagtatttatgtcttatgaatcctgccagttgtttccca

SEQ ID NO: 197952 - DNA, 120 bp, Artificial Sequence
  ENSG00000113597_44 (sequence is synthesized)
agttatggtaaagtaacatagattaggtatcaaaaggactagaccagaatcagttgttttcttcttttcctgtagagtacctaacagaaatagtgagaatatatggcaacaagattagac

SEQ ID NO: 197953 - DNA, 120 bp, Artificial Sequence
  ENSG00000113597_45 (sequence is synthesized)
acaaatgtgtggaagtctcccagaaaaatggtagcaccagatcagcaccaggaggccagtgttgagtaatagaaccagaaggccaacatccagacaggcagattagtctgaggctatttt

SEQ ID NO: 197954 - DNA, 120 bp, Artificial Sequence
  ENSG00000113597_46 (sequence is synthesized)
aagtgctagaaggtgtgacttcctttcatcttcctggttctatcttaagtgacataaaaaatgttataatagcttttctctttctggtttttattctcctggatatggagaaaacaagtt

SEQ ID NO: 197955 - DNA, 120 bp, Artificial Sequence
  ENSG00000113597_47 (sequence is synthesized)
tactgtcactagtagaaatattgcagtacctctttgtgaaatgaacaagatttattcctattattctgattcctccagcagtgaaaggactatggatctggttttggaaatgtgcaatac

SEQ ID NO: 197956 - DNA, 120 bp, Artificial Sequence
  ENSG00000113597_48 (sequence is synthesized)
tgaagacttaattatcttaacgtaatactgaaattataggagcataggtatattcatcatactaaagcacattttaatattttaatacctaatgaaaagaaagagtatttgtaaatgaaa

SEQ ID NO: 197957 - DNA, 120 bp, Artificial Sequence
  ENSG00000113597_49 (sequence is synthesized)
ttccagttaagtattttgggatgttaagacaaaatatagttatcctccatccattgtttgacaaggtatcagttgactaacacttgactttgcccctgttaattatgatagggtgaagat

SEQ ID NO: 197958 - DNA, 120 bp, Artificial Sequence
  ENSG00000113597_50 (sequence is synthesized)
ttcttttcttgcattaattgtggtaactttgatttgcaggcatgaactaatcacatttgtggttaatattttttcttcatatagataagatatttttgttgagataaatattttaaatgc

SEQ ID NO: 197959 - DNA, 120 bp, Artificial Sequence
  ENSG00000113597_51 (sequence is synthesized)
caccacaccttggtggatatttttttcatatcctcagactgatgaagtatttctggaagcccagattcagaatatgacaacctcacctatgtttatggagaaggtttcactggagccatc

SEQ ID NO: 197960 - DNA, 120 bp, Artificial Sequence
  ENSG00000113600_0 (sequence is synthesized)
accccactcgcagccacccagcaagagcagcatgtcagcctgccggagctttgcagttgcaatctgcattttagaaataagcatcctcacagcacagtacacgaccagttatgacccaga

SEQ ID NO: 197961 - DNA, 120 bp, Artificial Sequence
  ENSG00000113600_1 (sequence is synthesized)
gctaacagaaagcagtggctctgcatcacacatagactgcagaatgagcccctggagtgaatggtcacaatgcgatccttgtctcagacaaatgtttcgttcaagaagcattgaggtctt

SEQ ID NO: 197962 - DNA, 120 bp, Artificial Sequence
  ENSG00000113600_2 (sequence is synthesized)
tggacaatttaatgggaaaagatgcaccgacgctgtgggagacagacgacagtgtgtgcccacagagccctgtgaggatgctgaggatgactgcggaaatgactttcaatgcagtacagg

SEQ ID NO: 197963 - DNA, 120 bp, Artificial Sequence
  ENSG00000113600_3 (sequence is synthesized)
cagatgcataaagatgcgacttcggtgtaatggtgacaatgactgcggagacttttcagatgaggatgattgtgaaagtgagccccgtcccccctgcagagacagagtggtagaagagtc

SEQ ID NO: 197964 - DNA, 120 bp, Artificial Sequence
  ENSG00000113600_4 (sequence is synthesized)
tgagctggcacgaacagcaggctatgggatcaacattttagggatggatcccctaagcacaccttttgacaatgagttctacaatggactctgtaaccgggatcgggatggaaacactct

SEQ ID NO: 197965 - DNA, 120 bp, Artificial Sequence
  ENSG00000113600_5 (sequence is synthesized)
gacatactaccgaagaccttggaacgtggcttctttgatctatgaaaccaaaggcgagaaaaatttcagaaccgaacattacgaagaacaaattgaagcatttaaaagtatcatccaaga

SEQ ID NO: 197966 - DNA, 120 bp, Artificial Sequence
  ENSG00000113600_6 (sequence is synthesized)
gaagacatcaaattttaatgcagctatatctctaaaatttacacccactgaaacaaataaagctgaacaatgttgtgaggaaacagcctcctcaatttctttacatggcaagggtagttt

SEQ ID NO: 197967 - DNA, 120 bp, Artificial Sequence
  ENSG00000113600_7 (sequence is synthesized)
tcggttttcatattccaaaaatgaaacttaccaactatttttgtcatattcttcaaagaaggaaaaaatgtttctgcatgtgaaaggagaaattcatctgggaagatttgtaatgagaaa

SEQ ID NO: 197968 - DNA, 120 bp, Artificial Sequence
  ENSG00000113600_8 (sequence is synthesized)
tcgcgatgttgtgctcacaacaacttttgtggatgatataaaagctttgccaactacctatgaaaagggagaatattttgcctttttggaaacctatggaactcactacagtagctctgg

SEQ ID NO: 197969 - DNA, 120 bp, Artificial Sequence
  ENSG00000113600_9 (sequence is synthesized)
gtctctaggaggactctatgaactaatatatgttttggataaagcttccatgaagcggaaaggtgttgaactaaaagacataaagagatgccttgggtatcatctggatgtatctctggc

SEQ ID NO: 197970 - DNA, 120 bp, Artificial Sequence
  ENSG00000113600_10 (sequence is synthesized)
tttctctgaaatctctgttggagctgaatttaataaagatgattgtgtaaagaggggagagggtagagctgtaaacatcaccagtgaaaacctcatagatgatgttgtttcactcataag

SEQ ID NO: 197971 - DNA, 120 bp, Artificial Sequence
  ENSG00000113600_11 (sequence is synthesized)
agaaaatatgcatttgaactgaaagaaaagcttctccgaggaaccgtgattgatgtgactgactttgtcaactgggcctcttccataaatgatgctcctgttctcattagtcaaaaactg

SEQ ID NO: 197972 - DNA, 120 bp, Artificial Sequence
  ENSG00000113600_12 (sequence is synthesized)
tctcctatatataatctggttccagtgaaaatgaaaaatgcacacctaaagaaacaaaacttggaaagagccattgaagactatatcaatgaatttagtgtaagaaaatgccacacatgc

SEQ ID NO: 197973 - DNA, 120 bp, Artificial Sequence
  ENSG00000113600_13 (sequence is synthesized)
caaaatggaggtacagtgattctaatggatggaaagtgtttgtgtgcctgcccattcaaatttgagggaattgcctgtgaaatcagtaaacaaaaaatttctgaaggattgccagcccta

SEQ ID NO: 197974 - DNA, 120 bp, Artificial Sequence
  ENSG00000113600_14 (sequence is synthesized)
gagttccccaatgaaaaatagagctgttggcttctctgagctccagtggaagaagaaaacactagtaccttcagatcctacccctgaagataatcttagctgccaagtaaatagcaacat

SEQ ID NO: 197975 - DNA, 120 bp, Artificial Sequence
  ENSG00000113600_15 (sequence is synthesized)
gcttcatgaaaatcctaccaacctctgaagtctcttctctcttaggtctataatttttttttaaatttttcttccttaaactcctgtgatgtttccattttttgttccctaatgagaagt

SEQ ID NO: 197976 - DNA, 120 bp, Artificial Sequence
  ENSG00000113600_16 (sequence is synthesized)
caacagtgaaatacgccagaactgctttatcccacggaaaatgccaatctcttctaaaaaaaaacaaaattaaattaaaaacagaatgttggtttaaaaaacttcaaagtaattttcaaa

SEQ ID NO: 197977 - DNA, 120 bp, Artificial Sequence
  ENSG00000113600_17 (sequence is synthesized)
cggctttgtatggttaacatattctgccaggtccatgaccacacgtctgtaccatgcaatttaactcttatttacattgttatgtttagtttggttatttgcttaggtgtgcatacattc

SEQ ID NO: 197978 - DNA, 120 bp, Artificial Sequence
  ENSG00000113600_18 (sequence is synthesized)
attcagcaaatgctgagcaccagccacgtgcacagcagttgcttttactagtcttagctctacgatttaaatccatgtgtccaagggggaaaacatattatatttgtaaccaaaaactac

SEQ ID NO: 197979 - DNA, 120 bp, Artificial Sequence
  ENSG00000113600_19 (sequence is synthesized)
tagtttaccagaggactgaagggagataaagaggagttggttaatgggtacaaaaatccagttagatgaaaggaataatatagatagtgttcagtagcagaatagaatgaacataaacta

SEQ ID NO: 197980 - DNA, 120 bp, Artificial Sequence
  ENSG00000113600_20 (sequence is synthesized)
ttagtttaaattatgtgaaattccttctatttgatcatattttacaagaaaaaacatcaattttatatagtccaacttaatacctagccttatgagttgtataaggtaaggttacctacc

SEQ ID NO: 197981 - DNA, 120 bp, Artificial Sequence
  ENSG00000113600_21 (sequence is synthesized)
tgagaagctgattaacattggttgtacaatcttattcattagagaacatggtgcttagggtctgagaccttttgaaaggtctgagaactctttaaaaaaaggaaagaaagaaagaaaaga

SEQ ID NO: 197982 - DNA, 120 bp, Artificial Sequence
  ENSG00000113600_22 (sequence is synthesized)
agaaagaaaagaggaaaaatatatcaaaataaaaaaatgcaaaatgagaattaataaatgcttaaacatcagtatgtatcatgttaactttattgttactattaataaacatttcacaca

SEQ ID NO: 197983 - DNA, 120 bp, Artificial Sequence
  ENSG00000113600_23 (sequence is synthesized)
gctgtagcctggaggctccgggcgcggggaagtcatgctcgcttcacggaggcaatagctagccgaatgggagtgaggccctaatgattctagatgaccaaactaacaaactgaaatcgt

SEQ ID NO: 197984 - DNA, 120 bp, Artificial Sequence
  ENSG00000113615_0 (sequence is synthesized)
acttccggccagggcctccctccttctctctaggtttggctgccgccttctagccgggcgttcgcggccccgccggcccgactctcaagcctcagctcccaggctaggctgtggccgccg

SEQ ID NO: 197985 - DNA, 120 bp, Artificial Sequence
  ENSG00000113615_1 (sequence is synthesized)
gtggcctggggagagtgcggcgccatgcctcgggcttaatgcgcccccccctcttctcccagtcttcagtcttaagtcgttagcctcctccctccgctttcagcagtggtctttcagctc

SEQ ID NO: 197986 - DNA, 120 bp, Artificial Sequence
  ENSG00000113615_2 (sequence is synthesized)
tcttcttgtgcgctgttgtcgaccccgaccagccccttccaacccagtcatcatgtcccagccgggaataccggcctccggcggcgccccagccagcctccaggcccagaacggagccgc

SEQ ID NO: 197987 - DNA, 120 bp, Artificial Sequence
  ENSG00000113615_3 (sequence is synthesized)
cttggcctcggggtctccctacaccaacggtcctgtccaaaatgcattgctgtcttcacaagagtcagtgagccaaggatacaatttccagcttccaggatcctaccctcatccaatacc

SEQ ID NO: 197988 - DNA, 120 bp, Artificial Sequence
  ENSG00000113615_4 (sequence is synthesized)
agcaaagactttgaatccagtctctggacagtctaactatggtggttctcagggatctgggcagactcttaatagaccacctgtggcctctaatccagtgacaccttcgcttcatagtgg

SEQ ID NO: 197989 - DNA, 120 bp, Artificial Sequence
  ENSG00000113615_5 (sequence is synthesized)
tcctgctccccgaatgccattacctgcttctcagaacccagctactacaccaatgccttctagtagctttcttcctgaagccaacctgccaccacctttgaattggcaatataactatcc

SEQ ID NO: 197990 - DNA, 120 bp, Artificial Sequence
  ENSG00000113615_6 (sequence is synthesized)
atccacagcctcacaaacaaaccattgtcctcgtgcatcatcccaaccaactgtatctggaaatacaagtttaaccacaaatcatcaatatgtttcttctggatatccttcacttcaaaa

SEQ ID NO: 197991 - DNA, 120 bp, Artificial Sequence
  ENSG00000113615_7 (sequence is synthesized)
tagcttcataaagtcaggtccttctgtacctcccttagtgaatccacctctgcctacaacttttcaaccaggagctcctcatgggccccctccagctggaggcccacccccagtgagggc

SEQ ID NO: 197992 - DNA, 120 bp, Artificial Sequence
  ENSG00000113615_8 (sequence is synthesized)
cctcacgcccctgacatcatcatatagagatgtaccccagcccttatttaattcagctgtcaaccaagaaggtattacatcaaataccaataacggatctatggtggtccacagtagtta

SEQ ID NO: 197993 - DNA, 120 bp, Artificial Sequence
  ENSG00000113615_9 (sequence is synthesized)
cgacgagattgaaggaggtggcttattggcaacaccacagcttactaacaagaatcccaaaatgagccgaagtgttggatattcatatccctccttaccacctggttatcagaacacaac

SEQ ID NO: 197994 - DNA, 120 bp, Artificial Sequence
  ENSG00000113615_10 (sequence is synthesized)
accacctggtgcaactggagtaccaccctcttccttgaattacccaagtgggccacaagcctttactcagactcccttaggtgctaatcatttaaccacaagcatgagtggattaagtct

SEQ ID NO: 197995 - DNA, 120 bp, Artificial Sequence
  ENSG00000113615_11 (sequence is synthesized)
acaaccagagggtctaagagttgtcaatcttcttcaagaaagaaacatgcttccgtcaacacctttgaagcctccagttccaaatttgcatgaagacatccagaaactcaactgtaaccc

SEQ ID NO: 197996 - DNA, 120 bp, Artificial Sequence
  ENSG00000113615_12 (sequence is synthesized)
agagttatttcgatgcacgctgactagcattcctcagacgcaggccttattgaataaagccaaacttcctttggggctgctgcttcatcctttcaaagacttagtgcaattgcctgtggt

SEQ ID NO: 197997 - DNA, 120 bp, Artificial Sequence
  ENSG00000113615_13 (sequence is synthesized)
tacctccagtacaattgtgagatgccgttcatgcaggacgtacatcaatcctttcgtcagctttcttgatcaaaggagatggaagtgtaacttatgttatcgagtcaatgatgttcctga

SEQ ID NO: 197998 - DNA, 120 bp, Artificial Sequence
  ENSG00000113615_14 (sequence is synthesized)
agaattcttgtacaaccctttgaccagagtttatggagaacctcacagaagaccagaagttcaaaatgctactattgagtttatggctccttcagaatacatgttacgaccacctcagcc

SEQ ID NO: 197999 - DNA, 120 bp, Artificial Sequence
  ENSG00000113615_15 (sequence is synthesized)
tccagtgtatctctttgtatttgatgtgtctcacaatgcagtcgaaactggatacttgaattcagtttgccagagtttgttagacaatctggatttgcttcctggcaacactagaacaaa

SEQ ID NO: 198000 - DNA, 120 bp, Artificial Sequence
  ENSG00000113615_16 (sequence is synthesized)
aattggcttcataacatttgacagtacaatccatttctacggtcttcaggaaagtctctctcaacctcagatgctaatagtttcagatattgaagatgtttttatacctatgccagagaa

SEQ ID NO: 198001 - DNA, 120 bp, Artificial Sequence
  ENSG00000113615_17 (sequence is synthesized)
cttattagtaaacttaaatgaaagtaaagagctcgtgcaagatttactgaaaactttgccacaaatgtttaccaagactctggagacccagagtgccttgggtcctgcactgcaggctgc

SEQ ID NO: 198002 - DNA, 120 bp, Artificial Sequence
  ENSG00000113615_18 (sequence is synthesized)
ctttaagctgatgtctccaactggtggtcgaatgtctgtctttcaaacacaactcccaactcttggagtgggagccctgaaaccacgagaggaaccaaaccacaggtcatctgctaagga

SEQ ID NO: 198003 - DNA, 120 bp, Artificial Sequence
  ENSG00000113615_19 (sequence is synthesized)
tatacacatgacaccatccactgacttctataagaaattagccttggactgttctggtcagcaagttgctgttgacttattccttctcagtggacagtattctgatttggcttctctggg

SEQ ID NO: 198004 - DNA, 120 bp, Artificial Sequence
  ENSG00000113615_20 (sequence is synthesized)
ttgtatttctcggtattcagcaggtagtgtctattactatccctcttaccatcatcagcacaacccagtccaagtacagaaattacagaaggaactacagagataccttactcggaagat

SEQ ID NO: 198005 - DNA, 120 bp, Artificial Sequence
  ENSG00000113615_21 (sequence is synthesized)
tggctttgaggcagtcatgaggattcggtgcaccaaaggtctttccattcatactttccatggaaacttctttgttaggtcaaccgacttactgtctttgcctaacgtcaacccagacgc

SEQ ID NO: 198006 - DNA, 120 bp, Artificial Sequence
  ENSG00000113615_22 (sequence is synthesized)
tgggtatgcagtacagatgtcagtggaagagagtcttactgacactcagttggtttcttttcagtcagcactcttgtatacatccagcaaaggcgaaagaagaattcgtgttcatacttt

SEQ ID NO: 198007 - DNA, 120 bp, Artificial Sequence
  ENSG00000113615_23 (sequence is synthesized)
gtgtttgccagtagtttcgactctgaatgatgtctttcttggagctgatgttcaagcaatttcagggttattggccaatatggctgttgacagatctatgactgccagtctgagtgacgc

SEQ ID NO: 198008 - DNA, 120 bp, Artificial Sequence
  ENSG00000113615_24 (sequence is synthesized)
tcgggatgctctagtgaatgcagtcattgactccctttcagcttaccgttcttcagtcttaagtaaccagcagcctggactcatggttcctttttctttgcggcttttcccactttttgt

SEQ ID NO: 198009 - DNA, 120 bp, Artificial Sequence
  ENSG00000113615_25 (sequence is synthesized)
gttggctctccttaaacagaaatcattccagactgggacaaatgcacgtctagatgaacgcatttttgctatgtgtcaagtgaaaaaccagcccttggtttaccttatgctcacaactca

SEQ ID NO: 198010 - DNA, 120 bp, Artificial Sequence
  ENSG00000113615_26 (sequence is synthesized)
cagatgagggagcactcaacatcagtgatagaaccatacctcagccccccattcttcagctttcagtggagaagctgagcagagatggagctttcctcatggatgcaggctctgtactga

SEQ ID NO: 198011 - DNA, 120 bp, Artificial Sequence
  ENSG00000113615_27 (sequence is synthesized)
tgctttgggttggaaaaaattgtacacagaattttctcagccaagttctaggagttcaaaactatgcatcaattccacagcctatgacagaccttccagaacttgatacaccagaatctg

SEQ ID NO: 198012 - DNA, 120 bp, Artificial Sequence
  ENSG00000113615_28 (sequence is synthesized)
ccagaataatagctttcatctcttggcttagagagcagagaccatttttcccaatactttatgtaataagggatgagagtccaatgaaagcaaacttccttcaaaacatgatagaagaca

SEQ ID NO: 198013 - DNA, 120 bp, Artificial Sequence
  ENSG00000113615_29 (sequence is synthesized)
gaacagaatctgcattatcatattatgaattcctgttgcatatacagcaacaagtgaataaatgaatgaatgaagaaatttgacttatttttaaggaatgtcacgatagtgcagaatacc

SEQ ID NO: 198014 - DNA, 120 bp, Artificial Sequence
  ENSG00000113615_30 (sequence is synthesized)
tggaaatgtgtaataccttctttttctattatgtttgtggactaatgtgatgattgagatgttctcactgtgatttcaacaacctatagcaaataaaagaccacagcagagaatcaaaca

SEQ ID NO: 198015 - DNA, 120 bp, Artificial Sequence
  ENSG00000113615_31 (sequence is synthesized)
tgcaactctgaaatactgtatttttcaaatcagaatatagctacgtatgattggatacttttttcttgccaattatgtttgagttgttatggattaaaataagaatattgcagaggcaaa

SEQ ID NO: 198016 - DNA, 120 bp, Artificial Sequence
  ENSG00000113615_32 (sequence is synthesized)
gtacattttgtaaaataaagatttctgtgttctacatgtatatttctcatttttaatttttctgaatctttggctgctacatttaaaacctcacaaacctaagtgttgcagggaagttac

SEQ ID NO: 198017 - DNA, 120 bp, Artificial Sequence
  ENSG00000113615_33 (sequence is synthesized)
aaattgattggtagtgatgtttttaaaataaaaacaatggaaagtaaatataatgtaggaaaactagaattcattccccacacgtgtcttttttttttctttgttaagggaaaggatcat

SEQ ID NO: 198018 - DNA, 120 bp, Artificial Sequence
  ENSG00000113615_34 (sequence is synthesized)
gttgactaaaactaaactaattctagtatagcttgagaaaaatatgaagaaacacattcaagctttaaaatctgtcagtattctttatgcttgaagaacaaagtcactttgatttgaagt

SEQ ID NO: 198019 - DNA, 120 bp, Artificial Sequence
  ENSG00000113615_35 (sequence is synthesized)
gagaactatcattaggtggttttctgatttcctgatgaagagttggacatactgtcttaatctatagtgaaaagaatttgagctgtcttcataaacactgggactagcaatgataatagg

SEQ ID NO: 198020 - DNA, 120 bp, Artificial Sequence
  ENSG00000113615_36 (sequence is synthesized)
gagataagaaactttaattatcttgatcctttaagtggattttatttggtgcatttctgctctgggtatataataaaagtgggggtttttggtgaaatgagtgaagaaatgaaaggtttc

SEQ ID NO: 198021 - DNA, 120 bp, Artificial Sequence
  ENSG00000113615_37 (sequence is synthesized)
taaagtgctatccaaatacatcagtaacatttttctaaggagtttaattgttaaattggaagtcattcataagaaatatttatgcttgaatatgaaaatctatgaaagcataaatgctgc

SEQ ID NO: 198022 - DNA, 120 bp, Artificial Sequence
  ENSG00000113615_38 (sequence is synthesized)
tgtttgatttggtggatattaagattatacacatccaacatattaaagttatgaaagaaacttgacttctgaaaatccttaagagactgctttcttgattcagctagagaaatattatag

SEQ ID NO: 198023 - DNA, 120 bp, Artificial Sequence
  ENSG00000113615_39 (sequence is synthesized)
tcaaaactattgagtgaattttgtttacaaataggtaaattatacatttgtatatttaaagtgctgtgacatagtatctttaagagtttggctcagttttcacagattcattttgtctta

SEQ ID NO: 198024 - DNA, 120 bp, Artificial Sequence
  ENSG00000113615_40 (sequence is synthesized)
agaatttcttaaatatgttcatgtataatacttgatcaaaatatttttgggttttttgttttgttttaatgggttagaaaatgtttacaatcttggtcttatatgatcaccaatggaata

SEQ ID NO: 198025 - DNA, 120 bp, Artificial Sequence
  ENSG00000113615_41 (sequence is synthesized)
gtaacttccaggtttatatcaatatgagctgactttaactgagttgtttgggatagggaagaagcagtccctctacagtatacaactactgcttgccagctggatcaaaataatcatgtt

SEQ ID NO: 198026 - DNA, 120 bp, Artificial Sequence
  ENSG00000113615_42 (sequence is synthesized)
ttatgaaaatatctcccttaagcagtgttaaggttggtttgcagtgtgtaagtggcacattgaactggaagttttcttgaaagctgcttcatctattaagaagcaattttcaaattgtag

SEQ ID NO: 198027 - DNA, 120 bp, Artificial Sequence
  ENSG00000113615_43 (sequence is synthesized)
cgaattatattatcccctcttttaaagaaacagtcgttatatgctgatgtttcttaaaataactaaaatgttcctcttaatgtgattttaaatggagttatttgtaggtcctttcttagt

SEQ ID NO: 198028 - DNA, 120 bp, Artificial Sequence
  ENSG00000113615_44 (sequence is synthesized)
agtaaagaatcttctagagggaaacatttgtgcttttagggataatcttccttgtgcctcactacatccctaagtgggtatgactcttgttattaccacatgcttttttagtatatttca

SEQ ID NO: 198029 - DNA, 120 bp, Artificial Sequence
  ENSG00000113615_45 (sequence is synthesized)
caaatttacttttaaatattattttagatacggtgtaacatgtgcaattcagaataattttataacaggtcatgaaaaacataactttagttaggattcacaatatttgttctccacata

SEQ ID NO: 198030 - DNA, 120 bp, Artificial Sequence
  ENSG00000113615_46 (sequence is synthesized)
atgagagaatgaatgagcctttggagatactgatataaggcaattattttttgcaatgttgaatgtgttttttagtttgattctttttttttcccccaatagggcactacctgccatatc

SEQ ID NO: 198031 - DNA, 120 bp, Artificial Sequence
  ENSG00000113615_47 (sequence is synthesized)
atcttgtattactttttgatgtaaagcgactaatatttacactatgccatattttttttaattatagttgtaaattatgaaagatccttgaattttctacagatctacaactactaatgt

SEQ ID NO: 198032 - DNA, 120 bp, Artificial Sequence
  ENSG00000113615_48 (sequence is synthesized)
aacagacaagggcaatcttggtatttaaatctgagcatggcagttctaccataaaaagtactctatttttctaatttctaggatttttaaaataacatttctgtaagtctgacatactaa

SEQ ID NO: 198033 - DNA, 120 bp, Artificial Sequence
  ENSG00000113615_49 (sequence is synthesized)
tagtcactcaagcagtaccatttattttagtttgcatatattttcactgtttttaatttaatgtattgagtctaatagactgttttgcaataattagaataaagatttatttcttctaat

SEQ ID NO: 198034 - DNA, 120 bp, Artificial Sequence
  ENSG00000113615_50 (sequence is synthesized)
caaagatgcataacagctattatctaggggaccaccaaatgtgatttcaaaattttgttaactattacaaatgtaatccttatatagaaattttaattttgtaaagtagtgtataatatt

SEQ ID NO: 198035 - DNA, 120 bp, Artificial Sequence
  ENSG00000113615_51 (sequence is synthesized)
gtaatattaaattcttgttcttaaattcaaatatgtattgatcttcaatgtgctgtgttaaatcttgcttctctgaaaagttggagacaagatttgtcttcctttttacagtttgtaatt

SEQ ID NO: 198036 - DNA, 120 bp, Artificial Sequence
  ENSG00000113615_52 (sequence is synthesized)
ttcactgttttattcctgttaaaaaaaaaaaaaagtcatttgtaacccatgcagaccattgtttgatctatgctaacttatcaacttggctattcaataaagttaattgaaaagagctta

SEQ ID NO: 198037 - DNA, 120 bp, Artificial Sequence
  ENSG00000113615_53 (sequence is synthesized)
aaagaggtaaggcacattttcctacctgacatgtttaattgaaatattgaaggaatatgtttttgaaatgaactttaagtaaaattttgattatttctgtgacatttctaagatgtgtag

SEQ ID NO: 198038 - DNA, 120 bp, Artificial Sequence
  ENSG00000113615_54 (sequence is synthesized)
cattttatatttgctcttataattagatgaacagctcttgagttcaaccttgagctgatcatttttaagtctaatgaagcaagttatttgtagtagggtagaaaataagcatattccata

SEQ ID NO: 198039 - DNA, 120 bp, Artificial Sequence
  ENSG00000113615_55 (sequence is synthesized)
tgagaggtgaacagaatgtgtctgaaggggggatgttgtctaccctgtacatgcatatatgccgtaggggtaacattttaactagcaagtctatggtctctgctgttggcaatggtgact

SEQ ID NO: 198040 - DNA, 120 bp, Artificial Sequence
  ENSG00000113615_56 (sequence is synthesized)
gtgccatagtgcgaagtatttttttccccattaactctatttgtacaacctaacctgtaaaggtagttgtttttcttttgtagtgatattactagttggcaaagttactggatatcttag

SEQ ID NO: 198041 - DNA, 120 bp, Artificial Sequence
  ENSG00000113615_57 (sequence is synthesized)
atttgcaacagggaagagctaaactcgctttggaacttacaagaataaagtatgtagaggtgatggagaaggccatatttcatggcattaaaatacatcaaatctctaaactgtgatggt

SEQ ID NO: 198042 - DNA, 120 bp, Artificial Sequence
  ENSG00000113615_58 (sequence is synthesized)
tcttttggatacattttggacttatagtcttgctggactactgcatgtgcaagaactgtaaggcccaactttgatttgtcttgcttgccaatttataatgttgacttaaaatggctttct

SEQ ID NO: 198043 - DNA, 120 bp, Artificial Sequence
  ENSG00000113615_59 (sequence is synthesized)
tgtcatttgaccaacttcattgtttagtgtctgtagattctctgaccatcatcatgactcaatgtcttgtctattgtatgagatactgacttaatgtgaaataaaattttaattatgaca

SEQ ID NO: 198044 - DNA, 120 bp, Artificial Sequence
  ENSG00000113621_0 (sequence is synthesized)
aggtagggttagggttgccagatgtcacgaagttacaggatgctcagttttaaggtatatcccttatactataagggttatagtaaaaaatattcattatgtgaaattcaaatataactg

SEQ ID NO: 198045 - DNA, 120 bp, Artificial Sequence
  ENSG00000113621_1 (sequence is synthesized)
ggtatcaggtattctatgtggcaaccctaggtaggggagcacaggttaggcaagcgattagaagatttgcagcctccaaagtttctgcacctcgatgggacactagaacaggaaggctcc

SEQ ID NO: 198046 - DNA, 120 bp, Artificial Sequence
  ENSG00000113621_2 (sequence is synthesized)
tgggcctttctggctctgggaatgaagcgtggaaaaccctccttaggcgggcgcagtgcttcaagtagccaagctctgacttccgagggaagaaaggaggccatgggcctctgccagagc

SEQ ID NO: 198047 - DNA, 120 bp, Artificial Sequence
  ENSG00000113621_3 (sequence is synthesized)
catgctctgcactctggggtcagcagagttcaaaacgacctgcaacgtctggcgcttagctcctaaagaggtctccagtccagcgccgacggccagcggctagaggccgtccgcccgact

SEQ ID NO: 198048 - DNA, 120 bp, Artificial Sequence
  ENSG00000113621_4 (sequence is synthesized)
ccaagatggcgcccgccacagctgccaggtgttaagatggcggcgcggggccgcgcccgcgctcccaggctctcctcccccagccttcctccggctggcagcacgactcgcgtagccgtg

SEQ ID NO: 198049 - DNA, 120 bp, Artificial Sequence
  ENSG00000113621_5 (sequence is synthesized)
cgccgattgcctctcggcctgggcaatggtcccggctgccggtcgacgaccgccccgcgtcatgcggctcctcggctggtggcaagtattgctgtgggtgctgggacttcccgtccgcgg

SEQ ID NO: 198050 - DNA, 120 bp, Artificial Sequence
  ENSG00000113621_6 (sequence is synthesized)
cgtggaggttgcagaggaaagtggtcgcttatggtcagaggagcagcctgctcaccctctccaggtgggggctgtgtacctgggtgaggaggagctcctgcatgacccgatgggccagga

SEQ ID NO: 198051 - DNA, 120 bp, Artificial Sequence
  ENSG00000113621_7 (sequence is synthesized)
cagggcagcagaagaggccaatgcggtgctggggctggacacccaaggcgatcacatggtgatgctgtctgtgattcctggggaagctgaggacaaagtgagttcagagcctagcggcgt

SEQ ID NO: 198052 - DNA, 120 bp, Artificial Sequence
  ENSG00000113621_8 (sequence is synthesized)
cacctgtggtgctggaggagcggaggactcaaggtgcaacgtccgagagagccttttctctctggatggcgctggagcacacttccctgacagagaagaggagtattacacagagccaga

SEQ ID NO: 198053 - DNA, 120 bp, Artificial Sequence
  ENSG00000113621_9 (sequence is synthesized)
agtggcggaatctgacgcagccccgacagaggactccaataacactgaaagtctgaaatccccaaaggtgaactgtgaggagagaaacattacaggattagaaaatttcactctgaaaat

SEQ ID NO: 198054 - DNA, 120 bp, Artificial Sequence
  ENSG00000113621_10 (sequence is synthesized)
tttaaatatgtcacaggaccttatggattttctgaacccaaacggtagtgactgtactctagtcctgttttacaccccgtggtgccgcttttctgccagtttggcccctcactttaactc

SEQ ID NO: 198055 - DNA, 120 bp, Artificial Sequence
  ENSG00000113621_11 (sequence is synthesized)
tctgccccgggcatttccagctcttcactttttggcactggatgcatctcagcacagcagcctttctaccaggtttggcaccgtagctgttcctaatattttattatttcaaggagctaa

SEQ ID NO: 198056 - DNA, 120 bp, Artificial Sequence
  ENSG00000113621_12 (sequence is synthesized)
accaatggccagatttaatcatacagatcgaacactggaaacactgaaaatcttcatttttaatcagacaggtatagaagccaagaagaatgtggtggtaactcaagccgaccaaatagg

SEQ ID NO: 198057 - DNA, 120 bp, Artificial Sequence
  ENSG00000113621_13 (sequence is synthesized)
ccctcttcccagcactttgataaaaagtgtggactggttgcttgtattttccttattctttttaattagttttattatgtatgctaccattcgaactgagagtattcggtggctaattcc

SEQ ID NO: 198058 - DNA, 120 bp, Artificial Sequence
  ENSG00000113621_14 (sequence is synthesized)
tcgtttcagaaattagtgctacagtttcatacattttctccagtgacgtgttgacttgaaacttcaggcagattaaaagaatcatttgttgaacaactgaatgtataaaaaaattataaa

SEQ ID NO: 198059 - DNA, 120 bp, Artificial Sequence
  ENSG00000113621_15 (sequence is synthesized)
ctggtgttttaactagtattgcaataagcaaatgcaaaaatattcaatagatgcactattcttgtttttactgcatgaacgtaatccagtatttggaaagtaatccagtttgaaatgtga

SEQ ID NO: 198060 - DNA, 120 bp, Artificial Sequence
  ENSG00000113621_16 (sequence is synthesized)
agatgtattccggcagaatagtgagtagaatgacatgcttactatacagaaggcaaaaataggactctcaggtaatagtttaaggaaacccttgattccttatatatgtttaagaaggtt

SEQ ID NO: 198061 - DNA, 120 bp, Artificial Sequence
  ENSG00000113621_17 (sequence is synthesized)
agttttctgtttctttgcagtttttcttctagagtccatagcaggaaagtatgtaaccagaattggttagtgtgaccccctcaagtagcaagtgatggaaaataagagtcaaataccttg

SEQ ID NO: 198062 - DNA, 120 bp, Artificial Sequence
  ENSG00000113621_18 (sequence is synthesized)
atgtttgtgatctctaactcaaaaaatttgaagtgttttaagttgtttctgggtaagggagatgttaggagaaaggaaatgctgtaactaaagctcaattattatcagttctatgctaac

SEQ ID NO: 198063 - DNA, 120 bp, Artificial Sequence
  ENSG00000113621_19 (sequence is synthesized)
taaagctcaattattatcagttctatgctaacgtatacattttaatcatagttacctaagcagcatgcattaattgaaccttaaaatgttcccagcaggctgggcgcagtggctcatgcc

SEQ ID NO: 198064 - DNA, 70 bp, Artificial Sequence
  ENSG00000113621_20 (sequence is synthesized)
accagagcgaaactccatctcaaaaacaaacaaaaagaagtattgaagtgtaaaacactgttcttgccca

SEQ ID NO: 198065 - DNA, 120 bp, Artificial Sequence
  ENSG00000113621_21 (sequence is synthesized)
caaaaagaagtattgaagtgtaaaacactgttcttgcccacaagttgattctagtctagttcaagacacatgtttagtaaagagacaacatgtaatttaaacaaactttttttttttttt

SEQ ID NO: 198066 - DNA, 120 bp, Artificial Sequence
  ENSG00000113621_22 (sequence is synthesized)
acaggtgtgagccactgcgcctggcctaaacaaactttttgaaaagctgtttctaaaagattccttaaattcagatatgacagctaattacctcatcataaattacttttatactaattg

SEQ ID NO: 198067 - DNA, 120 bp, Artificial Sequence
  ENSG00000113621_23 (sequence is synthesized)
acttttatactaattgtttccagggttttagagtagttgaatgtttatttcacaaggcaccctaaattctatagaaataaaacctcagatgagtctccttcttagagtgttacaatgaat

SEQ ID NO: 198068 - DNA, 120 bp, Artificial Sequence
  ENSG00000113621_24 (sequence is synthesized)
gggagtttacaacttttatgtgtcatgtttccaacagctgtgtttggggtggtcactggcaggaggggaccgtatctcagaatggcacattatttctattttacacatgagcaaattgag

SEQ ID NO: 198069 - DNA, 120 bp, Artificial Sequence
  ENSG00000113621_25 (sequence is synthesized)
gcatagagagttagataacttgcccaggttacacagattgtaagttgatgaagctgggatttgaatcttcacatgtgtgtacttataaatacaaatgtaaggaaaactctagtgagtcca

SEQ ID NO: 198070 - DNA, 120 bp, Artificial Sequence
  ENSG00000113621_26 (sequence is synthesized)
ccattgatctttgatgttactatgttgtagcttctctatcagcacttgctgcctcaccttgcacttttatgttctggagacagcttctttcttaaacctcatgagccaaccccagctaat

SEQ ID NO: 198071 - DNA, 86 bp, Artificial Sequence
  ENSG00000113621_27 (sequence is synthesized)
cagcttctttcttaaacctcatgagccaaccccagctaatttcagacttttcctctgcagtttcctcacctctctcagccttcgtt

SEQ ID NO: 198072 - DNA, 120 bp, Artificial Sequence
  ENSG00000113621_28 (sequence is synthesized)
ctatagcattaagattttctccatatgagcaataatgctgttttgctttcttatcatttgcatattcattgagtagcacttatttttatttttaagcatcagaggtcaccacactggatg

SEQ ID NO: 198073 - DNA, 120 bp, Artificial Sequence
  ENSG00000113621_29 (sequence is synthesized)
gagtagcacattaacttcctttaaaaacttttcctttgcatttataatgtggctgtttggtgtaagaggcctagctttcagcctgtctcctatgttggcattcggcatggcttcctcact

SEQ ID NO: 198074 - DNA, 120 bp, Artificial Sequence
  ENSG00000113621_30 (sequence is synthesized)
aagtttaatcaatcatttttggctttgatttaaaatgagagatgtacaactcttcctttcacgagagatgtacaactcttcctttcacttaaacagaggccactgtagggttattaattc

SEQ ID NO: 198075 - DNA, 120 bp, Artificial Sequence
  ENSG00000113621_31 (sequence is synthesized)
acctaatttcaatattgttgtgtctcagggagaggcctgaggagagggagagagatggggaatagctggtcggtggaacagtcagaacatagacatttactgataaagttcactgtcttc

SEQ ID NO: 198076 - DNA, 87 bp, Artificial Sequence
  ENSG00000113621_32 (sequence is synthesized)
ggtacagttggtggcgacttatcatagatcaccataacagatataataataatggaagagtttgaaatattgcaagaattaccaaaa

SEQ ID NO: 198077 - DNA, 120 bp, Artificial Sequence
  ENSG00000113621_33 (sequence is synthesized)
aaaatgtgacacagacacaaattgagcacatgctgttggaaaaatggtgctgaaaaacttgctggatgccgagttgccacaaactttcaatctgcaaaaaatgcaatgtcagcaaagtgc

SEQ ID NO: 198078 - DNA, 120 bp, Artificial Sequence
  ENSG00000113621_34 (sequence is synthesized)
agtttaaaactttctgcttaattcagcaagacttaaaaaaagtgaaagtttataacttgtcatttgatcatacttttttgctggttcctggattcatatggttcaaaatccaaaaggttc

SEQ ID NO: 198079 - DNA, 120 bp, Artificial Sequence
  ENSG00000113621_35 (sequence is synthesized)
cgagggttccttctctcgctgctcctacccacccgttcctctccctggagcagcagtgtgtcctgtttcttgggtatcctttcagaaaaatgtacttttactgctaactttaatgcttgt

SEQ ID NO: 198080 - DNA, 120 bp, Artificial Sequence
  ENSG00000113621_36 (sequence is synthesized)
tggaataattgtgccattggtagatccatattataattgaaagcaactcagattgcagaaaaggagtgccccccagccatgacccataagcaaagaggtcagaaacaaatgaaaaagcca

SEQ ID NO: 198081 - DNA, 120 bp, Artificial Sequence
  ENSG00000113621_37 (sequence is synthesized)
aaagtttcaagtatcagaaatctccgtaggtcacacgcaacttcctcatttatttctgtctattctgagatggtaattgtatgagaaagccctctattaataataaattcaggttttttg

SEQ ID NO: 198082 - DNA, 120 bp, Artificial Sequence
  ENSG00000113638_0 (sequence is synthesized)
gatttgtggtcccggagaagagattggcggaggggaaagactgagtcgtctttcctttgcccgcttctgtggactgttcgaacgcccaggggtgggccaaacccgtttcttaggaaacca

SEQ ID NO: 198083 - DNA, 120 bp, Artificial Sequence
  ENSG00000113638_1 (sequence is synthesized)
ggaatccagggaaggcagaatggcttcctttgggtggaagaggaaaattggtgagaaggtctcaaaggtcacttcccagcagtttgaagctgaagctgctgatgagaaggatgtagttga

SEQ ID NO: 198084 - DNA, 120 bp, Artificial Sequence
  ENSG00000113638_2 (sequence is synthesized)
caacgatgaagggaactggcttcatgccattaaacgtaggaaagaaattcttcttgaaggctgtgctgagaaaagtaaacagctgaaggatgaaggagccagtttggctgaaaataaaag

SEQ ID NO: 198085 - DNA, 120 bp, Artificial Sequence
  ENSG00000113638_3 (sequence is synthesized)
atatcgggaggcaattcagaagtgggatgaagcactacagttaactccaaatgatgctaccctatacgagatgaaatcacaggtgctaatgtctcttcatgaaatgttcccagcagtaca

SEQ ID NO: 198086 - DNA, 120 bp, Artificial Sequence
  ENSG00000113638_4 (sequence is synthesized)
tgcagcagaaatggccgtccagcaaaatccacattcatgggagtcttggcagactttgggacgtgctcaacttggtttaggagagataatcctggcaattcgaagttttcaagtagccct

SEQ ID NO: 198087 - DNA, 120 bp, Artificial Sequence
  ENSG00000113638_5 (sequence is synthesized)
tcacatctatccaatgaaccctgaaatatggaaagaagacctctcttgggcaagaacgctccaggagcagcagaaggtagcacagaggattaaaaaaagtgaagcaccagctgaagtaac

SEQ ID NO: 198088 - DNA, 120 bp, Artificial Sequence
  ENSG00000113638_6 (sequence is synthesized)
acacttttcaccaaagtcaattccagactatgactttgaaagtgatgagattgttgctgtttgtgcagctattgctgagaaagagaagacagtttcagcaaataaaacaatggttattgt

SEQ ID NO: 198089 - DNA, 120 bp, Artificial Sequence
  ENSG00000113638_7 (sequence is synthesized)
gtctgcttctggggccatagagactgtaactgaaaaggaggatggtgctacaccaccagatggctctgtttttatcaaagcccgatgaagcagtatgcataggattatttgaatctgtct

SEQ ID NO: 198090 - DNA, 120 bp, Artificial Sequence
  ENSG00000113638_8 (sequence is synthesized)
ttttgattgcctcttgaagttttgacatagagacatttactctggagatagataggagaacgcctggttgtaaaatatgtttttcagatgaggcatataaaaactaaaatggcaggatta

SEQ ID NO: 198091 - DNA, 120 bp, Artificial Sequence
  ENSG00000113638_9 (sequence is synthesized)
ttgtatagtgtttggaatatgctttgataagttatgatttatatttctcaaggttaaaattctgagtaaaatggtctttgattaataaacttagtttaatctgaatatgtaaatgaatac

SEQ ID NO: 198092 - DNA, 120 bp, Artificial Sequence
  ENSG00000113638_10 (sequence is synthesized)
attttaaagacaaaacttgaaaaatgtattcttgaatagtgaataatttgatcaatgttactgaaatgctgtctcaacttttgttttatgataaaggaagtgtgtgatttccctccctct

SEQ ID NO: 198093 - DNA, 120 bp, Artificial Sequence
  ENSG00000113638_11 (sequence is synthesized)
gagaaatatactgcgcttaatatttgctgtctttttcttgcttcattagagtaagtctgtcagaaagcttgaatatttttgacattcattttgattcaaagttgtcatttggttatatgt

SEQ ID NO: 198094 - DNA, 120 bp, Artificial Sequence
  ENSG00000113638_12 (sequence is synthesized)
ggaatctttgaaagtttggctgaaaatgcacacaaatgtgtacattctgaacattttctgaagtttctcttaattctgatttgtgtttctgttttgactttgaagttgtaacaatgatag

SEQ ID NO: 198095 - DNA, 120 bp, Artificial Sequence
  ENSG00000113638_13 (sequence is synthesized)
ttgtctccttcagtatttggtaaaagtgtaaagtattgataaatatgagaatgatggttttattttttaattgttacagtaagtaatccttaccacaaatgagtcatttttaaaatatgc

SEQ ID NO: 198096 - DNA, 120 bp, Artificial Sequence
  ENSG00000113638_14 (sequence is synthesized)
atttttaaatgaatggcttttacagataggttaatgacaattgtactgctatattatcccagtcaaaaccaatactttcttttctttattttacaaagctttaaaaaccctggaaacaac

SEQ ID NO: 198097 - DNA, 120 bp, Artificial Sequence
  ENSG00000113638_15 (sequence is synthesized)
ttacttcttgcttgtgtctttccatttgatgactgggaattacttttctagataactttttttgaaactactcagtgaaatgaaaaataattacaattttaaatagctaattatatcttt

SEQ ID NO: 198098 - DNA, 120 bp, Artificial Sequence
  ENSG00000113638_16 (sequence is synthesized)
ctaaaaataaaaaagtagggctgttattagagtgccaatgaataaataacttaagcacaaaatacatagaaattggaatgtgatttatagtacaatctcatgagtatgaaaaggctatat

SEQ ID NO: 198099 - DNA, 120 bp, Artificial Sequence
  ENSG00000113638_17 (sequence is synthesized)
taaaaaaaattttattgaaagtccacagtcatattcacaaaccaatactgtcattgctaatctgaactattatttttatactatatattgtagtacaataatatagaactgttgggttct

SEQ ID NO: 198100 - DNA, 120 bp, Artificial Sequence
  ENSG00000113638_18 (sequence is synthesized)
gttacttctgacactcaggaagatactattggtgtattaattttatctttgttagagatgaaagtagcccactttatgttaaagatcttactactgttggagcttataagtaatgatcta

SEQ ID NO: 198101 - DNA, 120 bp, Artificial Sequence
  ENSG00000113638_19 (sequence is synthesized)
cattttttatgaagatggtttttaaaacttttgttttattggaatgcatatctcttttcagggttggagaaattagcacttgccttgaaaagaatattctttccttaagttatatcatca

SEQ ID NO: 198102 - DNA, 120 bp, Artificial Sequence
  ENSG00000113638_20 (sequence is synthesized)
gaaaattagctctggttagagaggttagtttcagagtgctccaaaaaatatgttaattattttattttgtttaataaagaacattctcaaaacgtaaataggtatctagagaagtgagta

SEQ ID NO: 198103 - DNA, 120 bp, Artificial Sequence
  ENSG00000113638_21 (sequence is synthesized)
ctcaacatttggtatattgttttgagtaatggatgtttgttttttgtgtaatttgtgaataaatagtttttttctgcattttgaagattttcctattattttatgttgttagcttttgaa

SEQ ID NO: 198104 - DNA, 120 bp, Artificial Sequence
  ENSG00000113638_22 (sequence is synthesized)
cagtaaatgctagctatttctatgaagaacttgagttagtttggagatatttaacctcaatttcctctgattttaaaaaaggagaactttttttgtaatcctttccttatctgaaagtaa

SEQ ID NO: 198105 - DNA, 120 bp, Artificial Sequence
  ENSG00000113638_23 (sequence is synthesized)
gaagtctctgattccagtattataggagagatagtgggatttttcttgacagggtctatagctcaagtcccaaagaggcaagactcaggatggaatgcatgtggccactaggccctgtta

SEQ ID NO: 198106 - DNA, 120 bp, Artificial Sequence
  ENSG00000113638_24 (sequence is synthesized)
taagaacctagtgtttcctctgtactggcatggtaggccaagttagtctctttcttacccagatataagacataaaatagtttagacataagacagaggagaaaaagaaacagtaagtta

SEQ ID NO: 198107 - DNA, 120 bp, Artificial Sequence
  ENSG00000113638_25 (sequence is synthesized)
tggagaaggaaggcagctcatttctgcaggcccctcaaaatgcttattttagctcatactcttctatgcgtgaagagaaaaatgcacccattattttacaaggatgtgaatactgatata

SEQ ID NO: 198108 - DNA, 120 bp, Artificial Sequence
  ENSG00000113638_26 (sequence is synthesized)
caaacatagactaagcttgttaattttaataacaaatctttatgaatctgaagagaattgatgttcatgataatgatatagatgtttaatatactttctgaaataacactgtttactgtt

SEQ ID NO: 198109 - DNA, 120 bp, Artificial Sequence
  ENSG00000113638_27 (sequence is synthesized)
caagttatattgactataatttacattattcttgtttgagaattgtatggcatagacactcattagtcagagtgtctagacatccagaccatgcctgataacacaagaatcatatatcat

SEQ ID NO: 198110 - DNA, 120 bp, Artificial Sequence
  ENSG00000113638_28 (sequence is synthesized)
tctctagaaaacaggctgtttggttatagagtatttatcttaaatatattaacagacactacataaacattgaaaagccatgcaagttatagctcacaggagccagatctactgcaactg

SEQ ID NO: 198111 - DNA, 120 bp, Artificial Sequence
  ENSG00000113638_29 (sequence is synthesized)
gggcctacatacaaaattttatggcagtggtttcagtatgacaatcttttgaattgatgccgtatggtaaaactataaagattttttaaaagctctgtctcagctagaatttttaagatt

SEQ ID NO: 198112 - DNA, 120 bp, Artificial Sequence
  ENSG00000113638_30 (sequence is synthesized)
ataactgaacagtatagcccttttagttgtttgaaaattacataatgattcaaaagcttgtttcactgcctttcccagcactaagaaaattaacaatcatttcttttaatttccttgaat

SEQ ID NO: 198113 - DNA, 120 bp, Artificial Sequence
  ENSG00000113638_31 (sequence is synthesized)
cagagccattctaaagtgactctggaccagcaattctgagctatgatttcatgatacatgtattaatatctaaatgagttgtgagttgacataagaaccatagttccataataattatct

SEQ ID NO: 198114 - DNA, 120 bp, Artificial Sequence
  ENSG00000113638_32 (sequence is synthesized)
tcaaatcaatggatatcttaaatgtgtttttttcttccttagagattattattaaactgatgtatttgataataaagaattttaggactgagaaagttaagtttttcttaccaataataa

SEQ ID NO: 198115 - DNA, 120 bp, Artificial Sequence
  ENSG00000113638_33 (sequence is synthesized)
gatattgaaatatataaattataaaacagaaataaaatgaaataaaggaggttatccctaaagtcatttaccttagtcacttgcaattaaatatggttacttcggaagaagaagtgtggc

SEQ ID NO: 198116 - DNA, 120 bp, Artificial Sequence
  ENSG00000113638_34 (sequence is synthesized)
cctaaagctactgtaacatgaatcatgccctaatgtgcactatatatgaactactttggtcagaaggcagcggcgggtaaggatggcttcctctcacagtgcttcttaggctatccattt

SEQ ID NO: 198117 - DNA, 120 bp, Artificial Sequence
  ENSG00000113638_35 (sequence is synthesized)
accaaggaattctaatctctttctctcacttcaccaggaaaggagggagtttaagatatagaactgggcatgctagcctcttttttcccttttgtggatttgtcataactgcagagaacc

SEQ ID NO: 198118 - DNA, 120 bp, Artificial Sequence
  ENSG00000113638_36 (sequence is synthesized)
gatgttgtggtctcttgccagctacattgtgaaccttgcagtgaaagttctttgcctctgcaaagggagatttgtgcttgtgcagaactgcccatgccttagtaagcaggtctgtctaat

SEQ ID NO: 198119 - DNA, 120 bp, Artificial Sequence
  ENSG00000113638_37 (sequence is synthesized)
tctaagttcaatatctggtggctattgttggcataaacttaaagtacatcctctaacctagcctttttcagcagtaaacttaaaatattgaatctccatctgtctgtgtctcaagtggtt

SEQ ID NO: 198120 - DNA, 120 bp, Artificial Sequence
  ENSG00000113638_38 (sequence is synthesized)
cagaggtcaggagaggagagggacattattttatgactccctcaaactttaacaaagactagtgcagattatatttcgaagtaagcatgagatatattaaaaaccacatgtgggaattct

SEQ ID NO: 198121 - DNA, 120 bp, Artificial Sequence
  ENSG00000113638_39 (sequence is synthesized)
ttcctaattttagaggttttttttaaataatggaaattctattgaaattgagtagtgttaattacaaggcaacaggtaaacatttgttcaggatatttaaaaggtctgctgagttggaat

SEQ ID NO: 198122 - DNA, 120 bp, Artificial Sequence
  ENSG00000113638_40 (sequence is synthesized)
tgtgacagaccacattgttgactctagattgaattggaagggaagaatgtgaaatgaattaggatatcctctgttcacctctattaactttcttaaatgagtataacttagaaataataa

SEQ ID NO: 198123 - DNA, 120 bp, Artificial Sequence
  ENSG00000113638_41 (sequence is synthesized)
aatgcaagtattttaacgttatagttgggagagttttgacaaatgtaaacacccacttcaccaccactaccatcctgatatagtgtgtgtccatcacccaaaaagttctctaaagccctt

SEQ ID NO: 198124 - DNA, 120 bp, Artificial Sequence
  ENSG00000113638_42 (sequence is synthesized)
ttgcagttggttcccctccacctgaacagccatccctagtcaactacttttctgctttctgtggctatacgttagatttgacttcagaattctagagtttgaaataaataggccatataa

SEQ ID NO: 198125 - DNA, 120 bp, Artificial Sequence
  ENSG00000113638_43 (sequence is synthesized)
tatgcactctttttgtgtctgactttttttttgcttaacatgatgcttttgaaacccatccatgttgagattcatccatgttatcatgtgtatcaataataagttcctttttattgctga

SEQ ID NO: 198126 - DNA, 120 bp, Artificial Sequence
  ENSG00000113638_44 (sequence is synthesized)
atagtattctagtatatagatataccacaatttgtttagctgttcacctattgatggacatttaggttgtttcaagttttgatctattatgaataaagctgctatatatataaatcacaa

SEQ ID NO: 198127 - DNA, 120 bp, Artificial Sequence
  ENSG00000113638_45 (sequence is synthesized)
gtgcctttcaccctcctgccatgattctgaggcctcccagccatgtggaactgagaccttaagatagaaaaactgccaggagggacctgtaggtctgctttctccactcatgtttggaga

SEQ ID NO: 198128 - DNA, 120 bp, Artificial Sequence
  ENSG00000113638_46 (sequence is synthesized)
tgtcagctacagaaatgccccaactgatgaatttcgtcatgaagcagagcctcagagcaaaagcacatcagctaagcatgccccagtatgagtggctgagtatgccatattagtctttca

SEQ ID NO: 198129 - DNA, 120 bp, Artificial Sequence
  ENSG00000113638_47 (sequence is synthesized)
tagtctaccatagaagactttcaattttttgcttcatactacttaaaataatgtagaaaaatctatgtagttctttcacattaagttaacagctaaaattttttactctaagtttaattt

SEQ ID NO: 198130 - DNA, 120 bp, Artificial Sequence
  ENSG00000113638_48 (sequence is synthesized)
gttgaaaatgatgcaatatcagtctaattgtaaatattaacattaaaacaaactattgaatcactttaatactttttcaatggaatcttaatacaataacaattcaatggccacaatatt

SEQ ID NO: 198131 - DNA, 120 bp, Artificial Sequence
  ENSG00000113638_49 (sequence is synthesized)
taattgaaaaatacgtggacaaggtcattttaatagtcagaaattttctaccatctatatttttcttcctgagtccatttccattcaacttctctgtaaagatttttaattgaatataat

SEQ ID NO: 198132 - DNA, 120 bp, Artificial Sequence
  ENSG00000113638_50 (sequence is synthesized)
aagttcccaggagccatcgagtttgggaatcactgggctagagtcaaaccaaaactcaacttcctggccttattttagatgttacttttttgtttcacttccattgggcatgccattcct

SEQ ID NO: 198133 - DNA, 120 bp, Artificial Sequence
  ENSG00000113638_51 (sequence is synthesized)
ctctcttttctgtcagcgtccctcattatcttcagaagacagttgcaaagatgcctttccagggaactttgtattatttacaccctagattatgctccctgttttgtgtggtgcctttct

SEQ ID NO: 198134 - DNA, 120 bp, Artificial Sequence
  ENSG00000113638_52 (sequence is synthesized)
tgtgtggtgcctttcttactcttactcattacttttccgtttggatttattggacaagtgaaattcacaaaagcttctttctttttttttcaagacagtgtctcgctctgtcacccaggc

SEQ ID NO: 198135 - DNA, 72 bp, Artificial Sequence
  ENSG00000113638_53 (sequence is synthesized)
ctgcgcacaccacgcccagctaatttgtgtattttttgtagagacgggggtttcaccatgttgcccaggcta

SEQ ID NO: 198136 - DNA, 120 bp, Artificial Sequence
  ENSG00000113638_54 (sequence is synthesized)
tttgtgcttctgaccatagtgggcacgcaactaatgttcgtggacaactgactcatttctggtaaactgatttcttcctccaacttactagtattagcagctgtaggatatcagaatgaa

SEQ ID NO: 198137 - DNA, 120 bp, Artificial Sequence
  ENSG00000113638_55 (sequence is synthesized)
ttatgactgtctttatcttaacttgacttcctaactccaaattttaacctttcgtcatcagttccttagaatttaactttccttcttttctactagtccaaatgaaatattttaaaattt

SEQ ID NO: 198138 - DNA, 120 bp, Artificial Sequence
  ENSG00000113638_56 (sequence is synthesized)
cttatctttaggcagttttttggaaattacctacattagttaaacccagatgtaataaaagctacagcactgaactatactcttctaaacttcttgaaggacaatgccatatttgtgttc

SEQ ID NO: 198139 - DNA, 120 bp, Artificial Sequence
  ENSG00000113638_57 (sequence is synthesized)
caggcacatagacaaatatctggtgtatagtaggtgctcaataaagattggttgaattaattgaattaattctttggttaaattaagattcattagcagagaaactctgaatgtatctat

SEQ ID NO: 198140 - DNA, 120 bp, Artificial Sequence
  ENSG00000113638_58 (sequence is synthesized)
caggcaaatcattctggaatcagatgcattttgaatagcagtatttctctgcatttacctttttattattcacaagctctgggaatctaactttgcttttttatatcactgagcctccct

SEQ ID NO: 198141 - DNA, 120 bp, Artificial Sequence
  ENSG00000113638_59 (sequence is synthesized)
tagctctttactttgttggcatcctttggaattttgtgttggctcattgaggtcattgatctgtctggctgtctgtggatttatgaataacaccatacttgaacagcaccattctaaatt

SEQ ID NO: 198142 - DNA, 120 bp, Artificial Sequence
  ENSG00000113638_60 (sequence is synthesized)
attgcatacaatgcacttaattttgtcctgaatctcattagagaaaacaaggaaaatattataaagtaaaataatacaaatattggtcagtgtattttactcaaaggcaatcactgggaa

SEQ ID NO: 198143 - DNA, 120 bp, Artificial Sequence
  ENSG00000113638_61 (sequence is synthesized)
tttgtttgtgtatttcctgccaatcttttttaatgcatttttaagaaagcatgataatgtctaaaattcaactgtttatttaattttgtattttggtgtaatcctttaatattgtaacct

SEQ ID NO: 198144 - DNA, 120 bp, Artificial Sequence
  ENSG00000113638_62 (sequence is synthesized)
aagtgttttccaatattctataaactctttgttaagttttacttaatgaatatattgtatactgcagtattgtaaaatgaatttgcaaaaatttcaataaacaattttctcattgttgaa

SEQ ID NO: 198145 - DNA, 120 bp, Artificial Sequence
  ENSG00000113638_63 (sequence is synthesized)
ctctgtcacccaggctggaactcttggactcctgctatagcctcccaagtagcttggaagctgggattaacaagcatgtgctaccacacctggctaatattatatatatatacatttttt

SEQ ID NO: 198146 - DNA, 120 bp, Artificial Sequence
  ENSG00000113638_64 (sequence is synthesized)
tttaatggagacagagtctctctatgtttcccaagcttgtcttgaactcctgggctcaagtcatcctcctgcctcagcacctcaaaacattggaattacaagcgtgagacaccatgctca

SEQ ID NO: 198147 - DNA, 120 bp, Artificial Sequence
  ENSG00000113638_65 (sequence is synthesized)
gtccttaacatctttcaagggatgtgattctttgtggcagtagaaaggtgcttttgaattcctggatcctcttttaaacactatcaaattagaatatactttcagaaaagtaaaaatatc

SEQ ID NO: 198148 - DNA, 120 bp, Artificial Sequence
  ENSG00000113638_66 (sequence is synthesized)
atcacttaaaatcaataaacttttagctactgaacacatctgtgtcaccagcacttagatcaagaagaagaacattaccggcaccacataagccccctcacaatctattctggctcctca

SEQ ID NO: 198149 - DNA, 120 bp, Artificial Sequence
  ENSG00000113638_67 (sequence is synthesized)
atgacattgacttctaacagcatagggtgctttggtactttggctcatgttttggtcatataacttacatcatacattatgtactcttttgtttctagcttctttcactcaacattatgt

SEQ ID NO: 198150 - DNA, 120 bp, Artificial Sequence
  ENSG00000113638_68 (sequence is synthesized)
taatgagagccatcatactgcatgtggttgctgttaacattcattctcatttgtgtataatgtgtaaatatacattatttatcaattttactcttgatggaatttgggtatttctggcta

SEQ ID NO: 198151 - DNA, 120 bp, Artificial Sequence
  ENSG00000113638_69 (sequence is synthesized)
ttagaaatggtgcttctatgagcatgctaggacatgtctaggtgaatagatgtatttatctgagtcaagtgtgcagataaaagtggaattgttgggtcataaaatatgtataagctcggt

SEQ ID NO: 198152 - DNA, 120 bp, Artificial Sequence
  ENSG00000113638_70 (sequence is synthesized)
atcagaagatactgccagcttcctcaagtggttgtactcattttactgtctcatccatgagttcttttgattggtacacaaaaagtgcaaaggagaaagaatgctgaataaagggctctg

SEQ ID NO: 198153 - DNA, 120 bp, Artificial Sequence
  ENSG00000113638_71 (sequence is synthesized)
acattgaagccagattgctacaaagggttgaatcctgatgaatgcatcttttatcctcaacactgatcttttccgagctctttttaaatgaaaccctaaattgctatgtctctcttgttc

SEQ ID NO: 198154 - DNA, 120 bp, Artificial Sequence
  ENSG00000113638_72 (sequence is synthesized)
aactaaaggtgacttagatttgccattctgaaattcccttataagatctgagatggtttaaagtaattttttaaactgtctatattaaaaaagaatttcaaaaatttctgtctaaatgag

SEQ ID NO: 198155 - DNA, 120 bp, Artificial Sequence
  ENSG00000113638_73 (sequence is synthesized)
aatattcttctctgactagtgtcaagaaaatgttaagtgagtgaaactcattttttcttaatggtctttatttaatttgttaccagctttaactaaagcaagaaagacaaagatgggaaa

SEQ ID NO: 198156 - DNA, 120 bp, Artificial Sequence
  ENSG00000113638_74 (sequence is synthesized)
atgttggaatagtccttatttttaaaaaagtatttttcaatgggtaacaattataaaaacatattgatgtacctgcctgagaatatcctgagaaaatataatgaatttgaatactttctc

SEQ ID NO: 198157 - DNA, 120 bp, Artificial Sequence
  ENSG00000113643_0 (sequence is synthesized)
acttggcgagtgagacgctgatgggaggatggacgtactggtgtctgagtgctccgcgcggctgctgcagcaggaagaagagattaaatctctgactgctgaaattgaccggttgaaaaa

SEQ ID NO: 198158 - DNA, 120 bp, Artificial Sequence
  ENSG00000113643_1 (sequence is synthesized)
ctgtggctgtttaggagcttctccaaatttggagcagttacaagaagaaaatttaaaattaaagtatcgactgaatattcttcgaaagagtcttcaggcagaaaggaacaaaccaactaa

SEQ ID NO: 198159 - DNA, 120 bp, Artificial Sequence
  ENSG00000113643_2 (sequence is synthesized)
aaatatgattaacattattagccgcctacaagaggtctttggtcatgcaattaaggctgcatatccagatttggaaaatcctcctctgctagtgacaccaagtcagcaggccaagtttgg

SEQ ID NO: 198160 - DNA, 120 bp, Artificial Sequence
  ENSG00000113643_3 (sequence is synthesized)
ggactatcagtgtaatagtgctatgggtatttctcagatgctcaaaaccaaggaacagaaagttaatccaagagaaattgctgaaaacattaccaaacacctcccagacaatgaatgtat

SEQ ID NO: 198161 - DNA, 120 bp, Artificial Sequence
  ENSG00000113643_4 (sequence is synthesized)
tgaaaaagttgaaattgctggtcctggttttattaatgtccacttaagaaaggattttgtatcagaacaattgaccagtcttctagtgaatggagttcaactacctgctctgggagagaa

SEQ ID NO: 198162 - DNA, 120 bp, Artificial Sequence
  ENSG00000113643_5 (sequence is synthesized)
taaaaaggttatagttgacttttcctcccctaatatagctaaagagatgcatgtaggccacctgaggtcaactatcataggagagagtataagccgcctctttgaatttgcagggtatga

SEQ ID NO: 198163 - DNA, 120 bp, Artificial Sequence
  ENSG00000113643_6 (sequence is synthesized)
cgtgctcaggttaaatcatgtaggagactgggggacccagtttggcatgctcatcgctcacctgcaagacaaatttccagattatctaacagtttcacctcctattggggatcttcaggt

SEQ ID NO: 198164 - DNA, 120 bp, Artificial Sequence
  ENSG00000113643_7 (sequence is synthesized)
cttttataaggaatctaagaagaggtttgatactgaggaggaatttaagaagcgagcatatcagtgtgtagttctgctccagggtaaaaacccagatattacaaaagcttggaagcttat

SEQ ID NO: 198165 - DNA, 120 bp, Artificial Sequence
  ENSG00000113643_8 (sequence is synthesized)
caagataggatgaatgatattgtaaaggaatttgaagatagaggatttgtgcaggtggatgatggcagaaagattgtatttgtcccagggtgttccataccattaaccatagtaaaatca

SEQ ID NO: 198166 - DNA, 120 bp, Artificial Sequence
  ENSG00000113643_9 (sequence is synthesized)
gatggaggttatacctatgatacatctgacctggctgctattaaacaaagactatttgaggaaaaagcagatatgattatctatgttgtggacaatggacaatctgtgcacttccagaca

SEQ ID NO: 198167 - DNA, 120 bp, Artificial Sequence
  ENSG00000113643_10 (sequence is synthesized)
atatttgctgctgctcaaatgattggttggtatgaccctaaagtaactcgagtcttccatgctggatttggtgtggtgctaggggaagacaagaaaaagtttaaaacacgttcgggtgaa

SEQ ID NO: 198168 - DNA, 120 bp, Artificial Sequence
  ENSG00000113643_11 (sequence is synthesized)
acagtgcgcctcatggatcttctgggagaaggactaaaacgatccatggacaagttgaaggaaaaagaaagagacaaggtcttaactgcagaggaattgaatgctgctcagacatccgtt

SEQ ID NO: 198169 - DNA, 120 bp, Artificial Sequence
  ENSG00000113643_12 (sequence is synthesized)
gcgtatggctgcatcaaatatgctgacctttcccataaccggttgaatgactacatcttctcctttgacaaaatgctagatgacagaggaaatacagctgcttacttgttgtatgccttc

SEQ ID NO: 198170 - DNA, 120 bp, Artificial Sequence
  ENSG00000113643_13 (sequence is synthesized)
actagaatcaggtctattgcacgtctggccaatattgatgaagaaatgctccaaaaagctgctcgagaaaccaagattcttttggatcatgagaaggaatggaaactaggccggtgcatt

SEQ ID NO: 198171 - DNA, 120 bp, Artificial Sequence
  ENSG00000113643_14 (sequence is synthesized)
ttacggttccctgagattctgcaaaagattttagatgacttatttctccacactctctgtgattatatatatgagctggcaactgctttcacagagttctatgatagctgctactgtgtg

SEQ ID NO: 198172 - DNA, 120 bp, Artificial Sequence
  ENSG00000113643_15 (sequence is synthesized)
gagaaagatagacagactggaaaaatattgaaggtgaacatgtggcgtatgctgctatgtgaagcagtagctgctgtcatggccaaggggtttgatatcctgggaataaaacctgtccaa

SEQ ID NO: 198173 - DNA, 120 bp, Artificial Sequence
  ENSG00000113643_16 (sequence is synthesized)
aggatgtaatccttcataggtttgaacactgtgtgtttttaccaaagtggccattggcactgtttgcttttttacaatcatgtggacacaagcataagtaaagaaaatttgtcaaccagg

SEQ ID NO: 198174 - DNA, 120 bp, Artificial Sequence
  ENSG00000113643_17 (sequence is synthesized)
cacttggcgagtgagacgctgatgggaggatggacgtactggtgtctgagtgctccgcgcggctgctgcagcagagtctcgctctgtcaagcagactggagtgcagtggcacgatctcga

SEQ ID NO: 198175 - DNA, 120 bp, Artificial Sequence
  ENSG00000113643_18 (sequence is synthesized)
tctgggagagaataaaaaggtatatgtacactcttctattaatatattagtatcttagaactgcgtggaaccaagcatggtggtatgtgcctatagtctcagctacttgggaggctgaag

SEQ ID NO: 198176 - DNA, 120 bp, Artificial Sequence
  ENSG00000113643_19 (sequence is synthesized)
tgctgtgatcgcacctgtgaatagctactgcacttcaacctgggcagtatcatgagacttcatctctaaaaaagaaaaagaaaaacgaactgcatggaaagtgctgaaaccgggaatgga

SEQ ID NO: 198177 - DNA, 120 bp, Artificial Sequence
  ENSG00000113643_20 (sequence is synthesized)
tttcacttttatactgaaatttaatcattcacatttgagattatgaacatttatgaagtagcctttcccctgggtctagcatgttgtgtgattttttttttttttcacttaattccacaa

SEQ ID NO: 198178 - DNA, 120 bp, Artificial Sequence
  ENSG00000113643_21 (sequence is synthesized)
ggcatttgaggtagccaattgatacacagatatcactgaaatagaatggataatttgtatacatgaatttgattctttttcagttaaaaatatacaagcagatccatcataaaatcaaac

SEQ ID NO: 198179 - DNA, 120 bp, Artificial Sequence
  ENSG00000113643_22 (sequence is synthesized)
gtgctatgggtatttctcaggtgatgtattgtcatgactcttggctgtttgatttttttaagtattattatcatcattgccatttacagaaataatactattacaagttgtatccttagt

SEQ ID NO: 198180 - DNA, 120 bp, Artificial Sequence
  ENSG00000113643_23 (sequence is synthesized)
gaaaaggacatttgccacagtttgaaaaacttgagaaaggagttgggggggtatatgttttaacttttttaggcacaatttttaaggtttggttaaattttatatgtattctcaatattt

SEQ ID NO: 198181 - DNA, 120 bp, Artificial Sequence
  ENSG00000113643_24 (sequence is synthesized)
aagggcaatcattggtactcttttgtttaggtatttccctcctgctgtgtccaggattgctgtgtggtggtgatgagtgctgggaggtgaaaaattaaaataagccatttaccagtcagc

SEQ ID NO: 198182 - DNA, 120 bp, Artificial Sequence
  ENSG00000113643_25 (sequence is synthesized)
acttgagtatgcagagctgaatgtaacagacatagttttcatctcttgtggagtttgcagaccagttgaagaaacaaccaagtaaacagatattactaaatggtgatgtactggcatgta

SEQ ID NO: 198183 - DNA, 120 bp, Artificial Sequence
  ENSG00000113643_26 (sequence is synthesized)
cgccaagttaaataaaatctatgatgcattggacgtctctttaatagagagaggggaatccttctatcaagataggatgaatgatattgtaaaggaatttgaagatagaggatttgtgca

SEQ ID NO: 198184 - DNA, 120 bp, Artificial Sequence
  ENSG00000113645_0 (sequence is synthesized)
ggggcagcgcggttacctgcaccgcccgagccgcacctggcggaggcagaagtcacaaacccggcgagctcagagcggtggagcggagaggagggacggcacccggctgcagggaggagg

SEQ ID NO: 198185 - DNA, 80 bp, Artificial Sequence
  ENSG00000113645_1 (sequence is synthesized)
ggagaggagggacggcacccggctgcagggaggagggaggcggcagcggcagcggcggcgtggagggcgcagcgcgccgc

SEQ ID NO: 198186 - DNA, 80 bp, Artificial Sequence
  ENSG00000113645_2 (sequence is synthesized)
gctgcggacgcacatggcagcgtgagaggccggcggcgggaggagcgggcggcgccgggtcggggctgcagggccgcatg

SEQ ID NO: 198187 - DNA, 120 bp, Artificial Sequence
  ENSG00000113645_3 (sequence is synthesized)
ccctactagggccccccatctgcgggcgccaccccccggatcatggtgcctcggcggccgcccgggctaagagcggccggctggagccgctgagcccccgctgcggccgggagctgcatg

SEQ ID NO: 198188 - DNA, 120 bp, Artificial Sequence
  ENSG00000113645_4 (sequence is synthesized)
agcgccggcagcgcttgggaagatgccccggccggagctgcccctgccggagggctgggaggaggcgcgcgacttcgacggcaaggtctactacatagaccacacgaaccgcaccaccag

SEQ ID NO: 198189 - DNA, 120 bp, Artificial Sequence
  ENSG00000113645_5 (sequence is synthesized)
ctggatcgacccgcgggacaggtacaccaaaccgctcacctttgctgactgcattagtgatgagttgccgctaggatgggaagaggcatatgacccacaggttggagattacttcataga

SEQ ID NO: 198190 - DNA, 120 bp, Artificial Sequence
  ENSG00000113645_6 (sequence is synthesized)
ccacaacaccaaaaccactcagattgaggatcctcgagtacaatggcggcgggagcaggaacatatgctgaaggattacctggtggtggcccaggaggctctgagtgcacaaaaggagat

SEQ ID NO: 198191 - DNA, 120 bp, Artificial Sequence
  ENSG00000113645_7 (sequence is synthesized)
ctaccaggtgaagcagcagcgcctggagcttgcacagcaggagtaccagcaactgcatgccgtctgggagcataagctgggctcccaggtcagcttggtctctggttcatcatccagctc

SEQ ID NO: 198192 - DNA, 120 bp, Artificial Sequence
  ENSG00000113645_8 (sequence is synthesized)
caagtatgaccctgagatcctgaaagctgaaattgccactgcaaaatcccgggtcaacaagctgaagagagagatggttcacctccagcacgagctgcagttcaaagagcgtggctttca

SEQ ID NO: 198193 - DNA, 120 bp, Artificial Sequence
  ENSG00000113645_9 (sequence is synthesized)
gaccctgaagaaaatcgataagaaaatgtctgatgctcagggcagctacaaactggatgaagctcaggctgtcttgagagaaacaaaagccatcaaaaaggctattacctgtggggaaaa

SEQ ID NO: 198194 - DNA, 120 bp, Artificial Sequence
  ENSG00000113645_10 (sequence is synthesized)
ggaaaagcaagatctcattaagagccttgccatgttgaaggacggcttccgcactgacagggggtctcactcagacctgtggtccagcagcagctctctggagagttcgagtttcccgct

SEQ ID NO: 198195 - DNA, 120 bp, Artificial Sequence
  ENSG00000113645_11 (sequence is synthesized)
accgaaacagtacctggatgtgagctcccagacagacatctcgggaagcttcggcatcaacagcaacaatcagttggcagagaaggtcagattgcgccttcgatatgaagaggctaagag

SEQ ID NO: 198196 - DNA, 120 bp, Artificial Sequence
  ENSG00000113645_12 (sequence is synthesized)
aaggatcgccaacctgaagatccagctggccaagcttgacagtgaggcctggcctggggtgctggactcagagagggaccggctgatccttatcaacgagaaggaggagctgctgaagga

SEQ ID NO: 198197 - DNA, 120 bp, Artificial Sequence
  ENSG00000113645_13 (sequence is synthesized)
gatgcgcttcatcagcccccgcaagtggacccagggggaggtggagcagctggagatggcccggaagcggctggaaaaggacctgcaggcagcccgggacacccagagcaaggcgctgac

SEQ ID NO: 198198 - DNA, 120 bp, Artificial Sequence
  ENSG00000113645_14 (sequence is synthesized)
ggagaggttaaagttaaacagtaagaggaaccagcttgtgagagaactggaggaagccacccggcaggtggcaactctgcactcccagctgaaaagtctctcaagcagcatgcagtccct

SEQ ID NO: 198199 - DNA, 120 bp, Artificial Sequence
  ENSG00000113645_15 (sequence is synthesized)
gtcctcaggcagcagccccggatccctcacgtccagccggggctccctggttgcatccagcctggactcctccacttcagccagcttcactgacctctactatgacccctttgagcagct

SEQ ID NO: 198200 - DNA, 120 bp, Artificial Sequence
  ENSG00000113645_16 (sequence is synthesized)
ggactcagagctgcagagcaaggtggagttcctgctcctggagggggccaccggcttccggccctcaggctgcatcaccaccatccacgaggatgaggtggccaagacccagaaggcaga

SEQ ID NO: 198201 - DNA, 120 bp, Artificial Sequence
  ENSG00000113645_17 (sequence is synthesized)
gggaggtggccgcctgcaggctctgcgttccctgtctggcaccccaaagtccatgacctccctatccccacgttcctctctctcctccccctccccaccctgttcccctctcatggctga

SEQ ID NO: 198202 - DNA, 120 bp, Artificial Sequence
  ENSG00000113645_18 (sequence is synthesized)
ccccctcctggctggtgatgccttcctcaactccttggagtttgaagacccggagctgagtgccactctttgtgaactgagccttggtaacagcgcccaggaaagataccggctggagga

SEQ ID NO: 198203 - DNA, 120 bp, Artificial Sequence
  ENSG00000113645_19 (sequence is synthesized)
accaggaacggagggcaagcagctgggccaagctgtgaatacggcccaggggtgtggcctgaaagtggcctgtgtctcagccgccgtatcggacgagtcagtggctggagacagtggtgt

SEQ ID NO: 198204 - DNA, 120 bp, Artificial Sequence
  ENSG00000113645_20 (sequence is synthesized)
gtacgaggcttccgtgcagagactgggtgcttcagaagctgctgcatttgacagtgacgaatcggaagcagtgggtgcgacccgaattcagattgccctgaagtatgatgagaagaataa

SEQ ID NO: 198205 - DNA, 120 bp, Artificial Sequence
  ENSG00000113645_21 (sequence is synthesized)
gcaatttgcaatattaatcatccagctgagtaacctttctgctctgttgcagcaacaagaccagaaagtgaatatccgcgtggctgtccttccttgctctgaaagcacaacctgcctgtt

SEQ ID NO: 198206 - DNA, 120 bp, Artificial Sequence
  ENSG00000113645_22 (sequence is synthesized)
ccggacccggcctctggacgcctcagacactctagtgttcaatgaggtgttctgggtatccatgtcctatccagcccttcaccagaagaccttaagagtcgatgtctgtaccaccgacag

SEQ ID NO: 198207 - DNA, 120 bp, Artificial Sequence
  ENSG00000113645_23 (sequence is synthesized)
gagccatctggaagagtgcctgggaggcgcccagatcagcctggcggaggtctgccggtctggggagaggtcgactcgctggtacaaccttctcagctacaaatacttgaagaaacagag

SEQ ID NO: 198208 - DNA, 120 bp, Artificial Sequence
  ENSG00000113645_24 (sequence is synthesized)
cagggagctcaagccagtgggagtcatggcccctgcctcagggcctgccagcacggacgctgtgtctgctctgttggaacagacagcagtggagctggagaagaggcaggagggcaggag

SEQ ID NO: 198209 - DNA, 120 bp, Artificial Sequence
  ENSG00000113645_25 (sequence is synthesized)
cagcacacagacactggaagacagctggaggtatgaggagaccagtgagaatgaggcagtagccgaggaagaggaggaggaggtggaggaggaggagggagaagaggatgttttcaccga

SEQ ID NO: 198210 - DNA, 120 bp, Artificial Sequence
  ENSG00000113645_26 (sequence is synthesized)
gaaagcctcacctgatatggatgggtacccagcattaaaggtggacaaagagaccaacacggagaccccggccccatcccccacagtggtgcgacctaaggaccggagagtgggcacccc

SEQ ID NO: 198211 - DNA, 120 bp, Artificial Sequence
  ENSG00000113645_27 (sequence is synthesized)
gtcccaggggccatttcttcgagggagcaccatcatccgctctaagaccttctccccaggaccccagagccagtacgtgtgccggctgaatcggagtgatagtgacagctccactctgtc

SEQ ID NO: 198212 - DNA, 120 bp, Artificial Sequence
  ENSG00000113645_28 (sequence is synthesized)
caaaaagccaccttttgttcgaaactccctggagcgacgcagcgtccggatgaagcggccttcctcggtcaagtcgctgcgctccgagcgtctgatccgtacctcgctggacctggagtt

SEQ ID NO: 198213 - DNA, 120 bp, Artificial Sequence
  ENSG00000113645_29 (sequence is synthesized)
cggtgctgaaggagctcaaggagcagctggaacaagccaagagccacggggagaaggagctgccacagtggttgcgtgaggacgagcgtttccgcctgctgctgaggatgctggagaagc

SEQ ID NO: 198214 - DNA, 120 bp, Artificial Sequence
  ENSG00000113645_30 (sequence is synthesized)
ggcagatggaccgagcggagcacaagggtgagcttcagacagacaagatgatgagggcagctgccaaggatgtgcacaggctccgaggccagagctgtaaggaacccccagaagttcagt

SEQ ID NO: 198215 - DNA, 120 bp, Artificial Sequence
  ENSG00000113645_31 (sequence is synthesized)
ctttcagggagaagatggcatttttcacccggcctcggatgaatatcccagctctctctgcagatgacgtctaatcgccagaaaagtatttcctttgttccactgaccaggctgtgaaca

SEQ ID NO: 198216 - DNA, 120 bp, Artificial Sequence
  ENSG00000113645_32 (sequence is synthesized)
ttgactgtggctaaagttatttatgtggtgttatatgaaggtactgagtcacaagtcctctagtgctcttgttggtttgaagatgaaccgactttttagtttgggtcctactgttgttat

SEQ ID NO: 198217 - DNA, 120 bp, Artificial Sequence
  ENSG00000113645_33 (sequence is synthesized)
taaaaacagaacaaaaacaaaacacacacacacacaaaaacagaaacaaaaaaaaccagcattaaaataataagattgtatagtttgtatatttaggagtgtatttttgggaaagaaaat

SEQ ID NO: 198218 - DNA, 120 bp, Artificial Sequence
  ENSG00000113645_34 (sequence is synthesized)
ttaaatgaactaaagcagtattgagttgctgctcttcttaaaatcgtttagattttttttggtttgtacagctccaccttttagaggtcttactgcaataagaagtaatgcctgggggac

SEQ ID NO: 198219 - DNA, 120 bp, Artificial Sequence
  ENSG00000113645_35 (sequence is synthesized)
ggtaatcctaataggacgtcccgcacttgtcacagtacagctaatttttcctagttaacatattttgtacaatattaaaaaaatgcacagaaaccattgggggggattcagaggtgcatc

SEQ ID NO: 198220 - DNA, 120 bp, Artificial Sequence
  ENSG00000113645_36 (sequence is synthesized)
cacggatcttcttgagctgtgacgtgtttttatgtggctgcccaacgtggagcgggcagtgtgataggctgggtgggctaagcagcctagtctatgtgggtgacaggccacgctggtctc

SEQ ID NO: 198221 - DNA, 120 bp, Artificial Sequence
  ENSG00000113645_37 (sequence is synthesized)
agatgcccagtgaagccactaacatgagtgaggggagggctgtggggaactccattcagttttatctccatcaataaagtggcctttcaaaaagaatcttcctcttgctctctttttctt

SEQ ID NO: 198222 - DNA, 120 bp, Artificial Sequence
  ENSG00000113645_38 (sequence is synthesized)
tcctacccctcacttcatctgtttccctgatttttgactctcccctttccagtcatttctttcccacccatccgcagtcctggaaacatttattttttcttttgcccactgttttcattt

SEQ ID NO: 198223 - DNA, 120 bp, Artificial Sequence
  ENSG00000113645_39 (sequence is synthesized)
gctcattaaattaaaatgactgctcggctcattgggaatccacatccccaagttagactggggatatgctctctgtactgtctccttctatggaattccaccccacccagagagagatga

SEQ ID NO: 198224 - DNA, 120 bp, Artificial Sequence
  ENSG00000113645_40 (sequence is synthesized)
cttcacagtttgttcatatgagcatcatcccatgtcgtccccaacccaggggctggtaggtgctacagcttgtgcttcatgctgctcctgtggcccctattcctacccagctcagagctt

SEQ ID NO: 198225 - DNA, 120 bp, Artificial Sequence
  ENSG00000113645_41 (sequence is synthesized)
tgcagggtctactgcagacaatcagaagtcagtttctaacaaatagcaacagccacaaatctcttcctccttcctctctgacattaccctgtgcaacttttctcaaagtctgttgcacca

SEQ ID NO: 198226 - DNA, 120 bp, Artificial Sequence
  ENSG00000113645_42 (sequence is synthesized)
gcaacttttctcaaagtctgttgcaccactcagcaaagcaagttgcaccagctatatcagaatcacctggggcagcctattaaaaatgcagactgttgagaccatcctggctaacacggt

SEQ ID NO: 198227 - DNA, 61 bp, Artificial Sequence
  ENSG00000113645_43 (sequence is synthesized)
aaaagaaaaatgcagactggctctgagatcgggggttcgagaccagcctgatcaacatgga

SEQ ID NO: 198228 - DNA, 67 bp, Artificial Sequence
  ENSG00000113645_44 (sequence is synthesized)
gcgggcagatcaactgagatcggggtaattagctgggcgtagtggcgcatacctgtaatcccagcta

SEQ ID NO: 198229 - DNA, 120 bp, Artificial Sequence
  ENSG00000113645_45 (sequence is synthesized)
ttgcggtgagccgagatggcgccattgactccagcctgggcaacaagagcgtaactccatctcaaaaaaataataataataaaaataaaatgcagactgtcaggtcctctctagacccac

SEQ ID NO: 198230 - DNA, 120 bp, Artificial Sequence
  ENSG00000113645_46 (sequence is synthesized)
tcctctctagacccactgaactatcccgcccaccctgggacggtccccagtgccagtgttttacccatgttccctctgtaagtcttatgcacaccgcaatttgagagccccactggtata

SEQ ID NO: 198231 - DNA, 120 bp, Artificial Sequence
  ENSG00000113645_47 (sequence is synthesized)
aagtgagtgaaacccaggcagagacaggcaaaatggtgaggcccgcatcctattggtgagtcacacagggaacgctgaaattcatggccttctccaggctactgggaacccatgggcggt

SEQ ID NO: 198232 - DNA, 120 bp, Artificial Sequence
  ENSG00000113645_48 (sequence is synthesized)
gatggagggagtggtgccaccttcacttgctgctgaggctcttccccctctccccagcatactccttacctggctgtctctcctcatgtataaggaacctatagtggtgtagaatctact

SEQ ID NO: 198233 - DNA, 120 bp, Artificial Sequence
  ENSG00000113645_49 (sequence is synthesized)
cttcttccccctgtggcttccaggcccccctgtatagctgctatccagcccgatttctcaccactggcccagggcttcctcctgccccgtggcttcacgtctctgaacacatcaatctct

SEQ ID NO: 198234 - DNA, 120 bp, Artificial Sequence
  ENSG00000113645_50 (sequence is synthesized)
gatgttctctctccttccattgaattccaccagacacattcagggtttacttcgtaatgtcttcatatgagtatcaatcaacaccttccccaactcaattgtactaggttgtagagcaca

SEQ ID NO: 198235 - DNA, 120 bp, Artificial Sequence
  ENSG00000113645_51 (sequence is synthesized)
aggatggtctcgtgctgctctgtggcacctgtgcctacactcctctgagctttgaggaggctgctctctttgctgaccccatgatcttttctgcccttctgttaagggcattggccacag

SEQ ID NO: 198236 - DNA, 120 bp, Artificial Sequence
  ENSG00000113645_52 (sequence is synthesized)
caacggggcaaatgccccaagctggctgtaagtgacccatccctttggctcccatgattagaccaaggagaggcatggggtccagctgagccattcagaaccattccttagcattttcca

SEQ ID NO: 198237 - DNA, 120 bp, Artificial Sequence
  ENSG00000113645_53 (sequence is synthesized)
ctcaaaggttagagatgagattttctcttcccaaggctacctctggccatggttccagcttcatgggggcaatgggattaggaaaatgaggtcaacctgcaaaggaaagcagatgcaaga

SEQ ID NO: 198238 - DNA, 120 bp, Artificial Sequence
  ENSG00000113645_54 (sequence is synthesized)
gatggagacagaatgggggtgtcctggggatcttggagcctgaattcattggcacaaaaggcagcagcatcctcactgtatctgcagtccatttggactcaataaaaactttgaaagtca

SEQ ID NO: 198239 - DNA, 120 bp, Artificial Sequence
  ENSG00000113645_55 (sequence is synthesized)
catgtgttatggaattccttctcagtgacacattcatctgtgctcagttgtcccagcaagggtcagcccctcatacccctgcagcatccgctgctatgaagcagagctgtaaacgccctc

SEQ ID NO: 198240 - DNA, 120 bp, Artificial Sequence
  ENSG00000113645_56 (sequence is synthesized)
cctgtgtataggaaaagctacatggagcaaatcctcctgcctgaagaagtgcatctcagcatcacttcagctgtcggggcatttgtggggagaaccagaccacctctgcggaaggcagca

SEQ ID NO: 198241 - DNA, 120 bp, Artificial Sequence
  ENSG00000113645_57 (sequence is synthesized)
gaccctcttccagccatggatggagttgaattctctataaacggttcaccagcaaaccaccaatacattccattgtttgcctagagagaaatttaaaaataaataaatgttcacttataa

SEQ ID NO: 198242 - DNA, 120 bp, Artificial Sequence
  ENSG00000113645_58 (sequence is synthesized)
aagccaccttttgttcgaaactccctggagcgacgcagcgtccggatgaagcggccgtccccacccccacagccttcctcggtcaagtcgctgcgctccgagcgtctgatccgtacctcg

SEQ ID NO: 198243 - DNA, 120 bp, Artificial Sequence
  ENSG00000113645_59 (sequence is synthesized)
gaagagaaagaaaggactggctgggttgtaggcagcagggccgagcagctgagggctaagtgcacagcaggccctagcaaatgcttctggaattgaattggtccaaggggagactccagc

SEQ ID NO: 198244 - DNA, 120 bp, Artificial Sequence
  ENSG00000113645_60 (sequence is synthesized)
ctgcaccccattcctgcagagcctacttcattgttggcacatggtaggcacccacatgtgtttgtttagaaaaaaaataggttccttgagatgacaagctgatcaaaggaagacagtaac

SEQ ID NO: 198245 - DNA, 120 bp, Artificial Sequence
  ENSG00000113645_61 (sequence is synthesized)
ttatcgttctgaatgaagtggatcccacatggagcaagagtgagggtgccgtccctacagtagccccctctgttgtgatagcgagttctccttgcccctttctggaggccccctccactg

SEQ ID NO: 198246 - DNA, 120 bp, Artificial Sequence
  ENSG00000113645_62 (sequence is synthesized)
ctctgtgcttagcttttcacacacttcgtcttctttaatcctcacaaagattatgaagatagttattatactttttatattttcatcctctctgaaattcagagaggaaatgactcaccc

SEQ ID NO: 198247 - DNA, 120 bp, Artificial Sequence
  ENSG00000113645_63 (sequence is synthesized)
ggggctccgggcccctgggctccaccctgagcacgctcagttcagagatctctcaggttgccgacataggaaatcaggaaagatggtttgccatccagtgcgccagctaccctggaattt

SEQ ID NO: 198248 - DNA, 120 bp, Artificial Sequence
  ENSG00000113645_64 (sequence is synthesized)
tgcatggtgaatcatgctaccaaaaagtctgcttaggtgcaggtgttcaaaaatgtatcttctgactcaattaagccacataactctatataacttaaagcagtcattttccaacttttt

SEQ ID NO: 198249 - DNA, 120 bp, Artificial Sequence
  ENSG00000113645_65 (sequence is synthesized)
gacagtgatgcacattttatactgtaacctgatccaaggttcacaaaatagtgcatgctctttctacctctgatggtcctctgatgttttctcccttctgttgcattttgtttcatgcag

SEQ ID NO: 198250 - DNA, 120 bp, Artificial Sequence
  ENSG00000113645_66 (sequence is synthesized)
tttgtgactcaccaaattgatttcaccccatgctaagtaaggggttgcagtttgcagtttgaaaaacactggtctggataggggttgcaaactggcatgcttataggagccaagcaggtc

SEQ ID NO: 198251 - DNA, 120 bp, Artificial Sequence
  ENSG00000113645_67 (sequence is synthesized)
acagaaatgctagagacccacctggcagtggtctgtgttagaccagagtgcacagaccccactggtctaaagcaggtgctgtctctctgctccagcaaatgggagtgcaggcctcgggct

SEQ ID NO: 198252 - DNA, 120 bp, Artificial Sequence
  ENSG00000113645_68 (sequence is synthesized)
taaatattgggaactaatccagaagtttttttaaaaaaatatgcaaatcagcctcatctatgggcctgatataacctaaaagccaccggtttacattctttaatttagaccttattatag

SEQ ID NO: 198253 - DNA, 120 bp, Artificial Sequence
  ENSG00000113645_69 (sequence is synthesized)
acattgtctttgtttatttccttcagtgttcccaccaacctcctcacccacattgcaccgaatgcaacactgcgttcaccataggctttacaaagctctccagcttcatgttcatttatt

SEQ ID NO: 198254 - DNA, 120 bp, Artificial Sequence
  ENSG00000113645_70 (sequence is synthesized)
cattctgttcatcagccaatgtttactcattcatttgagaaaccttttgctgcacagattgtgtgtgcaaggcaatttggggcactcagaaattaacaagacatggtccctgccccatga

SEQ ID NO: 198255 - DNA, 120 bp, Artificial Sequence
  ENSG00000113645_71 (sequence is synthesized)
cctttaaatctattctagttattttcaccattttttggcaggagcctttattcagcaaggtccctgcccgtaaggagcttagaagtgaagctagagattttcaagtgtgtgtgtgtgggg

SEQ ID NO: 198256 - DNA, 120 bp, Artificial Sequence
  ENSG00000113645_72 (sequence is synthesized)
tgtgtgtgtgtgtgtgtgtgtggcatatgtggtgtgtgtgtgtttggaatatgagcaagggaattcctttttctagtgaaatcagaggcagaggcccagtctatgaagcaagtaaacgtg

SEQ ID NO: 198257 - DNA, 120 bp, Artificial Sequence
  ENSG00000113645_73 (sequence is synthesized)
ggcccagtctatgaagcaagtaaacgtgcctactgcctcagtggaagcagtcgggagtcctagagatgctgtctgtgctcactctgtcaccccatcatggggcttccagagagcctttga

SEQ ID NO: 198258 - DNA, 120 bp, Artificial Sequence
  ENSG00000113645_74 (sequence is synthesized)
gctctaaggcacccagcttgcagtaccattctagcaactgagtaggccccacttgcacatggcatggtgccaggtggatcgggttccccaagttcttgcctggcctcccatggcttcaga

SEQ ID NO: 198259 - DNA, 120 bp, Artificial Sequence
  ENSG00000113645_75 (sequence is synthesized)
gacccccttgactcatcgatggtaggaatctctccgcactagttgcttagtcagaactgctaacagtgatgtccaaagcgtatccatttcctctcttccgttcttcattggcagcagcag

SEQ ID NO: 198260 - DNA, 120 bp, Artificial Sequence
  ENSG00000113645_76 (sequence is synthesized)
ctgattagccctgatccaccaccagttggtgggagaaggagaaggacagagcttgaataattggtgttctgcagcccttggaagcaccttgctagaagtcttctttagcaccacgactcc

SEQ ID NO: 198261 - DNA, 120 bp, Artificial Sequence
  ENSG00000113645_77 (sequence is synthesized)
attctgctttctctgggattttacgctttggggataaggcctgtgtctatatgcccgcatgcctttagtgttcgttgaaagaataaatggttagctggcctaggtagacccttactgggc

SEQ ID NO: 198262 - DNA, 120 bp, Artificial Sequence
  ENSG00000113648_0 (sequence is synthesized)
gtctacattagtaattcccaacttgggtccgaaagtgaacttttgctgaagcgaagtagctaaccgcttccatgtgcaaggcaggttccagacttcgggtgtgctcactgatccgcctcc

SEQ ID NO: 198263 - DNA, 120 bp, Artificial Sequence
  ENSG00000113648_1 (sequence is synthesized)
agggccaccgccatgtcgagccgcggtgggaagaagaagtccaccaagacgtccaggtctgccaaagcaggagtcatctttcccgtggggcggatgctgcggtacatcaagaaaggccac

SEQ ID NO: 198264 - DNA, 120 bp, Artificial Sequence
  ENSG00000113648_2 (sequence is synthesized)
cccaagtacaggattggagtgggggcacccgtgtacatggccgccgtcctggaatacctgacagcggagattctggagctggctggcaatgcagcgagagacaacaagaagggacgggtc

SEQ ID NO: 198265 - DNA, 120 bp, Artificial Sequence
  ENSG00000113648_3 (sequence is synthesized)
acaccccggcacatcctgctggctgtggccaatgatgaagagctgaatcagctgctaaaaggagtcaccatagccagtgggggtgtgttacccaacatccaccccgagttgctagcgaag

SEQ ID NO: 198266 - DNA, 120 bp, Artificial Sequence
  ENSG00000113648_4 (sequence is synthesized)
aagcggggatccaaaggaaagttggaagccatcatcacaccacccccagccaaaaaggccaagtctccatcccagaagaagcctgtatctaaaaaagcaggaggcaagaaaggggcccgg

SEQ ID NO: 198267 - DNA, 120 bp, Artificial Sequence
  ENSG00000113648_5 (sequence is synthesized)
cagaagctgaaccttattcacagtgaaatcagtaatttagccggctttgaggtggaggccataatcaatcctaccaatgctgacattgaccttaaagatgacctaggaaacacgctggag

SEQ ID NO: 198268 - DNA, 120 bp, Artificial Sequence
  ENSG00000113648_6 (sequence is synthesized)
aagaaaggtggcaaggagtttgtggaagctgtcctggaactccggaaaaagaacgggcccttggaagtagctggagctgctgtcagcgcaggccatggcctgcctgccaagtttgtgatc

SEQ ID NO: 198269 - DNA, 120 bp, Artificial Sequence
  ENSG00000113648_7 (sequence is synthesized)
cactgtaatagtccagtttggggtgcagacaagtgtgaagaacttctggaaaagacagtgaaaaactgcttggccctggctgatgataagaagctgaaatccattgcatttccatccatc

SEQ ID NO: 198270 - DNA, 120 bp, Artificial Sequence
  ENSG00000113648_8 (sequence is synthesized)
ggcagcggcaggaacggttttccaaagcagacagcagctcagctgattctgaaggccatctccagttacttcgtgtctacaatgtcctcttccatcaaaacggtgtacttcgtgcttttt

SEQ ID NO: 198271 - DNA, 120 bp, Artificial Sequence
  ENSG00000113648_9 (sequence is synthesized)
gacagcgagagtataggcatctatgtgcaggaaatggccaagctggacgccaactaggctgagcaatgacagaaccagctgcaccatgtaccccaccttcagtttaaaagaaaaaaaaaa

SEQ ID NO: 198272 - DNA, 120 bp, Artificial Sequence
  ENSG00000113648_10 (sequence is synthesized)
aacagccattgtgccttcccactgggttagtgggaaggttcctaaagatgccgtggcagcgacagtcccgtgctcagagccaggcacacagtaggcgttcactcgagacgcagagtctgg

SEQ ID NO: 198273 - DNA, 120 bp, Artificial Sequence
  ENSG00000113648_11 (sequence is synthesized)
gacgcgccctgaagaagctcctctccaggggcctggcccttcccaaggactgggctctgggcgtccccggggtcatgggtcagacctcgcgtccggggtgcgggctggtgcctgggcgca

SEQ ID NO: 198274 - DNA, 120 bp, Artificial Sequence
  ENSG00000113648_12 (sequence is synthesized)
ccggggtcaaggccggggcgccgggcggcacgggcgcggaggccggacgctcggggccgcgaagggatgtgacgagcggcgcgctgtgcattgtgggaagccggccgcgaggactggttc

SEQ ID NO: 198275 - DNA, 120 bp, Artificial Sequence
  ENSG00000113648_13 (sequence is synthesized)
cattgtgggaagccggccgcgaggactggttccagttcactcggcagcggcgccgggcggagggggagagcgcgggccgcgcgggcgggaagcgaagaggcgggcgggccagcgaggagc

SEQ ID NO: 198276 - DNA, 120 bp, Artificial Sequence
  ENSG00000113648_14 (sequence is synthesized)
tctagggaaaataaggctttggtttccagtttaattgtttttgaccttctaaaatgtttttatgttagcactgatagttggcattactgttgttaagcactgtgttccagaccgtgtctg

SEQ ID NO: 198277 - DNA, 120 bp, Artificial Sequence
  ENSG00000113648_15 (sequence is synthesized)
acttagtgtaacctaggagattttatagttttattttaatgaaaccctgattgacgcacagcagtggggagaacagcgtcttttacctgtcaccgaagccaggaagccccgtttgtaagc

SEQ ID NO: 198278 - DNA, 120 bp, Artificial Sequence
  ENSG00000113648_16 (sequence is synthesized)
gtgtgttgtggtgctttattgtacatcctccagtggcgttctttttactctaatgttcttttggtttcccccctcagaagaatcatgaatttgcaacagacctaatttttggttactttt

SEQ ID NO: 198279 - DNA, 120 bp, Artificial Sequence
  ENSG00000113648_17 (sequence is synthesized)
tgtcttattgatggatttgaaaatgaaagatttaataaggcaaagcagaatctgttgtccttaattatatttgcaatttggaatttgtgtgagttgatttagtaaaatgttaaaccgttg

SEQ ID NO: 198280 - DNA, 120 bp, Artificial Sequence
  ENSG00000113648_18 (sequence is synthesized)
ttgtgactggtgtgttccagttattgtgcccgtgagtcacaggtcttaagtcggcttctgcagtcccaggatgtgggggcagggcagtccatccccctcaacccccaccctgctcccaca

SEQ ID NO: 198281 - DNA, 120 bp, Artificial Sequence
  ENSG00000113648_19 (sequence is synthesized)
actccttggatgctccacagtgttcactgcaacctgggtgggtgtgggccatctgctggccccagtggtttgtagagagaatttttataaagtctcaccttttggttctgtgtgaccctt

SEQ ID NO: 198282 - DNA, 120 bp, Artificial Sequence
  ENSG00000113648_20 (sequence is synthesized)
gggccagggtgttatccccattccccgttccacagatgaaggagggagtgtatccaaagccgtgcaggtggcatgtggcaggctccagaccctgagcccagctctctcctaccattgtcc

SEQ ID NO: 198283 - DNA, 120 bp, Artificial Sequence
  ENSG00000113648_21 (sequence is synthesized)
ccttctgacagtctgtgacttagggctgggcctggccacttgctgatgaagctgctggagcctcattccctctgccgaggctgctgggtctgtcatccctgcaggacaggatccctggca

SEQ ID NO: 198284 - DNA, 120 bp, Artificial Sequence
  ENSG00000113648_22 (sequence is synthesized)
actgtctacattagtaattcccaacttgggtccgaaagtgaacttttgctgaagcgaagtagctaaccgcttccatgtgcaaggcaggttccagacttcggggtgaggaggattaactga

SEQ ID NO: 198285 - DNA, 120 bp, Artificial Sequence
  ENSG00000113648_23 (sequence is synthesized)
gccgacggcttcacagtcctctccaccaagagcctcttccttggccagaagttgcaagttgtacaggctgacattgcctcgatcgacagtgatgctgtcgttcacccgacaaacactgac

SEQ ID NO: 198286 - DNA, 120 bp, Artificial Sequence
  ENSG00000113648_24 (sequence is synthesized)
gcccttggaagtagctggaggtgaggtgggaaagccaccgtgcttatctggttgtgacacatgcagtattaggaaagccattttgtgagagggcttagaattcagaggtgtgtggcagca

SEQ ID NO: 198287 - DNA, 120 bp, Artificial Sequence
  ENSG00000113648_25 (sequence is synthesized)
cagccgcatcttcaagatggaggccaaggacagcctgtagctttacatcttagagtttcaccacatgcaggttgtctgggaaaatcacctttgcatttttttttattacttaaaatagct

SEQ ID NO: 198288 - DNA, 120 bp, Artificial Sequence
  ENSG00000113648_26 (sequence is synthesized)
cctatatgtttgatgtctagatcacaaattttaagaaattataggagctgagtttggtacatctaagagctgagagtgagtgatactgagccatctgcaaaactgctggtgagagataca

SEQ ID NO: 198289 - DNA, 120 bp, Artificial Sequence
  ENSG00000113648_27 (sequence is synthesized)
aattaaaaatcttcagccatctgtgtgtgtaagaggaaacatataaatacacatttctcatttgccaattacaccttccctggtataaggggaagaaaacgacttggcatctgatgtggg

SEQ ID NO: 198290 - DNA, 120 bp, Artificial Sequence
  ENSG00000113648_28 (sequence is synthesized)
gagaattattgctaagacctggaggcagggtacttcttactgcttcaggcctgaatttaggtggtcatttggggtgtgcaggacagagcacctcctaaggacctgagagtccagtcagtg

SEQ ID NO: 198291 - DNA, 120 bp, Artificial Sequence
  ENSG00000113648_29 (sequence is synthesized)
gggaggcccagctcccccaccaactgtgtgaggacagatcacccacttcctcacttggggctctggttttctcttcttactacccgattccaatgcctattgtgtcttttaaatcctctg

SEQ ID NO: 198292 - DNA, 120 bp, Artificial Sequence
  ENSG00000113648_30 (sequence is synthesized)
ttttaaaaatgaatcttaagctctctcggagggtccaccaggccgtgcacctctattcccagtgacaaatgacaccccttccaggctagtctcaggatccagtaggattccctttgctga

SEQ ID NO: 198293 - DNA, 120 bp, Artificial Sequence
  ENSG00000113648_31 (sequence is synthesized)
tctgtgcctttgacctctgctctgccacttctgttttacctgcaaggggcatgacatacagggtagtaattatgaagttctcccaggcagttccaccaaagtcccacattgtacaaggga

SEQ ID NO: 198294 - DNA, 120 bp, Artificial Sequence
  ENSG00000113648_32 (sequence is synthesized)
aggcatacacagttttaactacctagccaggggcagctggcctttccccaggccctttaaaacacctgtttgaccagcctgtgggtcctttcccatcggggttccagcttgagtcctgct

SEQ ID NO: 198295 - DNA, 120 bp, Artificial Sequence
  ENSG00000113648_33 (sequence is synthesized)
ggtagcccttggcacaaggcctggtaggcagcctggtgctgccatgtaccaaactctgctggggaaacctcagccacagcagatgcaaacccattaggtatagcatggttcaagatattt

SEQ ID NO: 198296 - DNA, 120 bp, Artificial Sequence
  ENSG00000113648_34 (sequence is synthesized)
ttgcttgtttcaataacacttttgttcttgattttaagggctattttagaaactgctttaaaatatttttgaaagtataaagaggtgaataaaacatactcctgttccactgtgcaaaga

SEQ ID NO: 198297 - DNA, 120 bp, Artificial Sequence
  ENSG00000113648_35 (sequence is synthesized)
ttaatgtttctttccagtcgttttctatgcatagtttagccatgacttctcatggggacaaacccactggtttaattcaacccccaatgtcaggtttttataggtcagcccagagttctc

SEQ ID NO: 198298 - DNA, 120 bp, Artificial Sequence
  ENSG00000113648_36 (sequence is synthesized)
aagcccagtcacaaagcagagccaggactcaaattcacaccctgtgactgagctgtttccactgtaccatgagacactacccacaaatcgctccttctccagtatctatgacacgaccat

SEQ ID NO: 198299 - DNA, 120 bp, Artificial Sequence
  ENSG00000113648_37 (sequence is synthesized)
aacaaaccataccccttggacagatattccttaaaaaaaaaaaaagtttcagaaatagccaaccaaatacaaaaagtttggatgttttactttagcagtggtgtggagactctggtgtgc

SEQ ID NO: 198300 - DNA, 120 bp, Artificial Sequence
  ENSG00000113648_38 (sequence is synthesized)
tcttgtatagaagcgtagcatgcagctaaacccagtgccctggaaaccttctttgcagagcatctgtggacaggggttctggaacatgctctgggagacatggtactttgcagtttgtgg

SEQ ID NO: 198301 - DNA, 120 bp, Artificial Sequence
  ENSG00000113648_39 (sequence is synthesized)
cagaccccaggcctgtgtccttagatctggcaagggaaaggcaagtctttggtggagatgtatagctagaaaggggcccctcttctaggaaaagaaaaacacagttccttaaaaactaat

SEQ ID NO: 198302 - DNA, 120 bp, Artificial Sequence
  ENSG00000113648_40 (sequence is synthesized)
ctaattctgccacaaataaacaggatccgttattcacacagtgaggccatcctcagcagggagaagacaatggcagagtggagatgctggtcaggttgcttagcagatcatttaaagcag

SEQ ID NO: 198303 - DNA, 120 bp, Artificial Sequence
  ENSG00000113648_41 (sequence is synthesized)
ttgctttcctagtagctttgtcctgaattgggtttgggagatttagagaatacatcatagtagagacaaatacatcatattggtgtgcaagtcgataattagcacaccagtcgacttgaa

SEQ ID NO: 198304 - DNA, 120 bp, Artificial Sequence
  ENSG00000113648_42 (sequence is synthesized)
gaagaagggttggaaacccaaaacaattattttgaggctgcaaatgttctgacacgttgagtttgcgttcagttgagttttgatggataaggctctgcctctgggagaaccgtgtatgct

SEQ ID NO: 198305 - DNA, 120 bp, Artificial Sequence
  ENSG00000113648_43 (sequence is synthesized)
ttctgagagtggagagaggcttactacgaacttggtcaaaattcctggtggtgacacatcataatgccaactttccaagggtgtggcttggctccagctcacgttggaatcacaacgcag

SEQ ID NO: 198306 - DNA, 120 bp, Artificial Sequence
  ENSG00000113648_44 (sequence is synthesized)
cagacagctgtggaactcctcggacacagggcattggagggcccaggaagatataccgtggcaggggagtgggtctgtgtttggcatcttgtgctttgcagtgaaccagagctcactgtt

SEQ ID NO: 198307 - DNA, 120 bp, Artificial Sequence
  ENSG00000113648_45 (sequence is synthesized)
attaaaccataaaaataagataggctagagtaagagatgggcctggaaaaatattgatagagatcggcccatatgttgaggggaaaaaataaaggcagtcctctacatatatcaatactg

SEQ ID NO: 198308 - DNA, 120 bp, Artificial Sequence
  ENSG00000113648_46 (sequence is synthesized)
ttctctgggttttcaagagaaatcccttgaaggtagacaaaatggtaaatgtcacaagaataaaaatcaaagcctgcaagttgactgctgcagacagaatggagaaacttgttgttttgg

SEQ ID NO: 198309 - DNA, 120 bp, Artificial Sequence
  ENSG00000113648_47 (sequence is synthesized)
ttggcctgatggtccactttttttttttttaaacagatgccatgttttagtagccttctcagtgggatgccagctttataggcttttgcgaagtgaaacggggcattcattttatttctt

SEQ ID NO: 198310 - DNA, 120 bp, Artificial Sequence
  ENSG00000113648_48 (sequence is synthesized)
ttaacctttggaaatgatctcatgtgtgtgtttctctttttttggacttctcattcaaatgtttaatttaaacatgtcacatttgatattcctcctcctcctgtcctcacccccatccac

SEQ ID NO: 198311 - DNA, 120 bp, Artificial Sequence
  ENSG00000113648_49 (sequence is synthesized)
atgtgcgcacactgcgtggactgattgccccttgggctcatatgttggaatcgaccaggtaggccagccctgccattggggcattagtaaatgtgcctgtgcgtgggtctcggtccaaca

SEQ ID NO: 198312 - DNA, 120 bp, Artificial Sequence
  ENSG00000113648_50 (sequence is synthesized)
acagtcctctccaccaagagcctcttccttggccagaaggtaggcagatgcgcggcctcagtctactcgagggccccaagggacaggtgggcacaggctacttccactggaaggctgggg

SEQ ID NO: 198313 - DNA, 120 bp, Artificial Sequence
  ENSG00000113648_51 (sequence is synthesized)
ccttggagaaacgctgagaactggttgtggtttagtttcctgtttccccttgggtgttatgggtgaggcttgggagctgcctctctattaggatgcctgtgtctgtgtggcccacattct

SEQ ID NO: 198314 - DNA, 120 bp, Artificial Sequence
  ENSG00000113648_52 (sequence is synthesized)
cctcttccttggccagaagccgccccagtgatgcaactttgccaggacgccatggttttgtaaaagacaattcacttttattgaaaataaaaatgatgcaaaggcttttaagacctgaga

SEQ ID NO: 198315 - DNA, 120 bp, Artificial Sequence
  ENSG00000113648_53 (sequence is synthesized)
atgagagttaactaatatttctttattgacatcaaaaaggggtgggaagaaagaattaaactcttcttaattttttaatcctatacttaaagaattaaaggaatgaatttgacgttccaa

SEQ ID NO: 198316 - DNA, 120 bp, Artificial Sequence
  ENSG00000113648_54 (sequence is synthesized)
agctgccacctctgatgctgactttactagaaacatgcagcagcaacaggtgtgacattctcactctgccatttaaagcctgtgctgctttccaggacaggtagaggcaggagggcagtc

SEQ ID NO: 198317 - DNA, 120 bp, Artificial Sequence
  ENSG00000113648_55 (sequence is synthesized)
tgagatcatgaagggtaacacaaaatcccacctcaaggatgctaagtttgtgccaccctctctcggacacagctgagagctcccctgggctatggctgctggtcatgttcatctgcacac

SEQ ID NO: 198318 - DNA, 120 bp, Artificial Sequence
  ENSG00000113648_56 (sequence is synthesized)
cccaggtttcctacagcgggtgggtacaggcccagtcctagccattagccctggttcttatttgggacaaagcccaagctatttactcttcttcccagacacctcccggggttagttcac

SEQ ID NO: 198319 - DNA, 120 bp, Artificial Sequence
  ENSG00000113648_57 (sequence is synthesized)
ccctgcagaacaaacattcaaaggaggcaagtttcactaagataattaaccctggtcatcgcagggtgactccaaagagaatttgggctggtgcattccgatgcaccttgaccgtcccat

SEQ ID NO: 198320 - DNA, 120 bp, Artificial Sequence
  ENSG00000113648_58 (sequence is synthesized)
accagaattgtgccaggtgcacctggaattttccaagacagatgtgaatcttaaggggagtattttgtcctcttgtgaggaaaagtactttaaaatgtgcaaaactgaggaatcagagct

SEQ ID NO: 198321 - DNA, 120 bp, Artificial Sequence
  ENSG00000113648_59 (sequence is synthesized)
taaggaagactcagaccccattctggccaaacttgaaaggctgatcttgttgctaactttgattgccacttgctatcccacatgagcatcaacccagagttctcataggtgttggtgatc

SEQ ID NO: 198322 - DNA, 120 bp, Artificial Sequence
  ENSG00000113648_60 (sequence is synthesized)
ttgtttgggaacttggttttcacagcaggaactgattacttagcaagtgccctaattgaagaaaacacattgctcccaatctccattggcttttgtgaaaaatctggtcctgagcagtta

SEQ ID NO: 198323 - DNA, 120 bp, Artificial Sequence
  ENSG00000113648_61 (sequence is synthesized)
gacatcctcctttccaagctttttatagaacacagattaatctttaagctctgcttctgatgttgcccttctttactgaaaacaattctgaatcattagtgtaattaagaaaataccgtc

SEQ ID NO: 198324 - DNA, 120 bp, Artificial Sequence
  ENSG00000113648_62 (sequence is synthesized)
tgaggccatttttattttgtatttgcatatgacaccaaagctgcaaaacaggaactaagcatggtaataatgctggtccaaaggtggccaggtatgaacacttccttctaggcctgctgc

SEQ ID NO: 198325 - DNA, 120 bp, Artificial Sequence
  ENSG00000113648_63 (sequence is synthesized)
caggaggagagctggcttattgatgggagcattgtatgctgctgaaacctccttacttgggggttctccccagagacagagaagaaaacctaaggcaggcattagtcttggaaaccagta

SEQ ID NO: 198326 - DNA, 120 bp, Artificial Sequence
  ENSG00000113648_64 (sequence is synthesized)
cagctagtatctcatgccaatgaaaagcatccaggacaagcatgtttgcaaaaaacaagcatgtcctgtctctttcacatctctggcacatccatgatcaccctgagtcagacccaaata

SEQ ID NO: 198327 - DNA, 120 bp, Artificial Sequence
  ENSG00000113648_65 (sequence is synthesized)
aggggcagcagagacagccagatgaagcagcaatttgagggtagtaactggtgatgacaaagcccttctcaattttactttattaacttagccaaggcttagttcctgttttgcagcctg

SEQ ID NO: 198328 - DNA, 120 bp, Artificial Sequence
  ENSG00000113648_66 (sequence is synthesized)
atggaaatttaatagatcatttgaagtatgtaatcacctgacatgctaagtgtctgtgtgtgccggagacacagaatggcaacctgaccccaccctgtccttgtctaggaaacacgctgg

SEQ ID NO: 198329 - DNA, 120 bp, Artificial Sequence
  ENSG00000113648_67 (sequence is synthesized)
gccagaagtgacacggttccctcgctcacgtcattgcaagttctcctcctacccctttccctctttctgtcactaattgcactctctctcatgatgcaattcctgtggtggactctgtgt

SEQ ID NO: 198330 - DNA, 120 bp, Artificial Sequence
  ENSG00000113648_68 (sequence is synthesized)
tccagaaaataaccattactgtttacatttttaaccattctttgtattttgtatgcatttttcaaaagaaaaagtagcactagttgtcatcttaaggtctggggatttgaaagtttttgt

SEQ ID NO: 198331 - DNA, 120 bp, Artificial Sequence
  ENSG00000113648_69 (sequence is synthesized)
cttttgcttgccccacaaactttcatcttaatgtaacacatttctattctattttttagttctgcaacaaaaataatgtatataaatttcaattttgaaaaagtgttttttgacttttat

SEQ ID NO: 198332 - DNA, 120 bp, Artificial Sequence
  ENSG00000113648_70 (sequence is synthesized)
aaaagcattaagtagtagattctacaagattggatagttagcacatttattaataatatacaattgatcaaactgacaaatgcattacaaattctaataactgttaaggaaaaggtaaaa

SEQ ID NO: 198333 - DNA, 120 bp, Artificial Sequence
  ENSG00000113648_71 (sequence is synthesized)
ttttattggaaaaacatcttgtaatgggctgggtggattttttccccctaactagttcaggtatcctcagatgaatattacttattgttgaaatgaaacagggcttagcatcctattttt

SEQ ID NO: 198334 - DNA, 120 bp, Artificial Sequence
  ENSG00000113648_72 (sequence is synthesized)
atatatttctaggtatgaatgtctggaaaatcttgttcactaaaaaaaattgaaatggaaagggttttgttatagcaacatcattcagtcctctgaactctttgatatatgccaacaata

SEQ ID NO: 198335 - DNA, 120 bp, Artificial Sequence
  ENSG00000113648_73 (sequence is synthesized)
catagtgtaatctcatcaatttgttttaataaacattttagaatagtgttagatttacatagcgttacaaagatagtacagagagttcttgaatatccctcacccagtttccccattgtt

SEQ ID NO: 198336 - DNA, 120 bp, Artificial Sequence
  ENSG00000113648_74 (sequence is synthesized)
aacatctcacataaccgtggtacacatggtcacaacaaggaaatcaacactggtccattactgttaacttcaccagtctattttctgaagatctatcagctgttaactcaattaggtatt

SEQ ID NO: 198337 - DNA, 120 bp, Artificial Sequence
  ENSG00000113648_75 (sequence is synthesized)
gcttcagttttgttgaaagcacaggattaaaaacacctgacttgtgaaagtctgttatgcagcctttcctattcttggctcctgaaaagtatatcaaaaagggcttcactaagatttacc

SEQ ID NO: 198338 - DNA, 120 bp, Artificial Sequence
  ENSG00000113648_76 (sequence is synthesized)
atataattgttgattatacctgtttctctttcactcatcaaatgttaaacactcagtaggaaaatcaaaatagtgataatttgtaatgtatatttgccagtactatatttcttgataaag

SEQ ID NO: 198339 - DNA, 120 bp, Artificial Sequence
  ENSG00000113648_77 (sequence is synthesized)
tgctttttctcttacttatagcataaccttggaacttgagatttagctcactaaatttagaaaaaatgtttgccatataacctaattgctaaagcagcccttattgttaaaagccattag

SEQ ID NO: 198340 - DNA, 120 bp, Artificial Sequence
  ENSG00000113648_78 (sequence is synthesized)
caaaagtagaccttacttttcattgtaagtaaaaaatgttaatatgctcctgttaatgaatttgaatcctaaataggcaaatggataggacacaggccttgcccagagtttattcagatt

SEQ ID NO: 198341 - DNA, 120 bp, Artificial Sequence
  ENSG00000113648_79 (sequence is synthesized)
tatccttcaggaaagcatggccatctgtaatatttctcaccccttctttctggattttctcccactagaccctccctcaggagtgaagtactttttattaataatttggggaagggaaag

SEQ ID NO: 198342 - DNA, 120 bp, Artificial Sequence
  ENSG00000113648_80 (sequence is synthesized)
gtgaagtgtctaaatgaaaaccaatgttgttctcactatccttactctacaatttatttgaatgcagaaaatctccaaattagccaaagtatccatttctaatacaggctttgtccttaa

SEQ ID NO: 198343 - DNA, 120 bp, Artificial Sequence
  ENSG00000113648_81 (sequence is synthesized)
tagaaatatgccaaaaacacgcatccctactcccacagtggtgtgccatattagtatttactctgggaagtgggaggagggtagttatgaaaggagctctggcgtggcaccttgaccaca

SEQ ID NO: 198344 - DNA, 120 bp, Artificial Sequence
  ENSG00000113648_82 (sequence is synthesized)
ggtgtacttcttacggcagatcagttgtaggaaaatgttaggaagtagaggatcggaaagttgttttcttaaactctccatgtcatgtacctctctcagaagttccttgggaactccagg

SEQ ID NO: 198345 - DNA, 120 bp, Artificial Sequence
  ENSG00000113648_83 (sequence is synthesized)
gcatacatatttcagtcttaataatgctgaggaagaagctgaagaccaagccaagaaccatgggtcaaggggtctgcagggagacagatggttcatcacagccaccacatgcgtccttct

SEQ ID NO: 198346 - DNA, 120 bp, Artificial Sequence
  ENSG00000113648_84 (sequence is synthesized)
ctaacactggctttaaggaaggaagggtggaagcgagtctgaccttctggagtcaggaaggttagagggttatagtccttagtcggctttttgagaattagtgacctagaacagtttttc

SEQ ID NO: 198347 - DNA, 120 bp, Artificial Sequence
  ENSG00000113648_85 (sequence is synthesized)
ttcttaagcttgaatagtattacagacatctagaaaggaaagacacttaaagatccttaattaagagacatttacttggtctgaatttatgaaaatggttctattctaaatgatcactgt

SEQ ID NO: 198348 - DNA, 120 bp, Artificial Sequence
  ENSG00000113648_86 (sequence is synthesized)
acagagtgggctgtgagctttgggagtggcctcagggagggctagatgctggggaggccacaatgctgagggaggaccctggcagctggggaagggagacagtggtaaaaaagaagaggg

SEQ ID NO: 198349 - DNA, 120 bp, Artificial Sequence
  ENSG00000113648_87 (sequence is synthesized)
caggcagctcctgtgggagatggggacccttggttagtctggaggaggagctgcttctgtgggataaactggtcatcagatagcaccagccagggaatcaggcagaagtcaagccttggt

SEQ ID NO: 198350 - DNA, 120 bp, Artificial Sequence
  ENSG00000113648_88 (sequence is synthesized)
ggtggaaggtgaacaacctagccggcagcctgcttgtcctggggggcactaacggtagagcctcaggtctgattcagggctctacaggggattgttttcagactgtactgatgggtgcac

SEQ ID NO: 198351 - DNA, 120 bp, Artificial Sequence
  ENSG00000113648_89 (sequence is synthesized)
tgtattgaaagttaacgtgacccatccacattacttccatttgaaatacagagcagttcagcccttggggtcaccttctccctcttttccccactctgcccttaggcactcccaccctgg

SEQ ID NO: 198352 - DNA, 120 bp, Artificial Sequence
  ENSG00000113648_90 (sequence is synthesized)
cctctcccctgcctatgttcttgttacctcctgccagccactccaaaggcagcctcagatcagaattcctcatacctcccttgctggatgaactaaaatatttccaaagtagcagcaaat

SEQ ID NO: 198353 - DNA, 120 bp, Artificial Sequence
  ENSG00000113648_91 (sequence is synthesized)
atggctgtaaaaatgtccatgcaaaatgcagatgcccttcttgttgctgtgatcttctgaaagaaatgggatcacggcctcctctgggctctgtttgttagccctggaggggagggggca

SEQ ID NO: 198354 - DNA, 120 bp, Artificial Sequence
  ENSG00000113648_92 (sequence is synthesized)
aacaccacagacatcttgctagcttctcccaagagccaggaacatgtcagctctcagcaactcaactcttccttttcagatacatctggtctcagggccaggcatcacacgaataaaaat

SEQ ID NO: 198355 - DNA, 120 bp, Artificial Sequence
  ENSG00000113648_93 (sequence is synthesized)
aaagtacagtagagtaaaattttggctaataatgactgttccctactcagagttggtagggtgaggatacaaaaagccatagaaaagtattgatactctataataaattacaaacatatc

SEQ ID NO: 198356 - DNA, 120 bp, Artificial Sequence
  ENSG00000113648_94 (sequence is synthesized)
atttaatgttatttttaaaaatggagaatgaaagcagtgaacttagcttaacagtgaaattaatgtgcttatcttgacttttggaaggaaaatttgaaaggaatggttaagctgccaccc

SEQ ID NO: 198357 - DNA, 120 bp, Artificial Sequence
  ENSG00000113648_95 (sequence is synthesized)
agtataaaatggtcagccataagaggggctgaatgtagacccagacagaccacctagccttctttcccatatcaccccctttttagtggtgaaaacaaaacaccaggctaccaagaaact

SEQ ID NO: 198358 - DNA, 120 bp, Artificial Sequence
  ENSG00000113648_96 (sequence is synthesized)
gcccttcctgtttaatgtgcttgtgactttatgatccaagagtcacatatccaggaagaggtacccaaaaatctagtgctgcagacactgtttagcagaataaactccatgtttccaaaa

SEQ ID NO: 198359 - DNA, 120 bp, Artificial Sequence
  ENSG00000113648_97 (sequence is synthesized)
taaagcagcatcttaagtcagcctaagcaccagtgttagaaactagggttccaactgccctttctggaatcctacacccctgcagcatgagacggagtgagcattgatacattagagcat

SEQ ID NO: 198360 - DNA, 120 bp, Artificial Sequence
  ENSG00000113648_98 (sequence is synthesized)
tattttgaagcattactttctggctttttattggctattactgtcaggtgaaaatcatggcatatagtgtaaaaaaggcaaaaatcatgaaactaacacacagtttttacaaaaagcaca

SEQ ID NO: 198361 - DNA, 120 bp, Artificial Sequence
  ENSG00000113648_99 (sequence is synthesized)
tttaaaatattatagacattaattttgacttggattttaggaaatgtttcaaaaggggtactttagaatggtgactatatggtaccctgtgtcctatgaatctcatttttctatctgtga

SEQ ID NO: 198362 - DNA, 120 bp, Artificial Sequence
  ENSG00000113648_100 (sequence is synthesized)
cactgaaaccagtgcttgaagattgcaagcaagctggggtggagaaaggtgatattgtgcatgctacagccctgtaaggcatggttgctaagctactcaggaagcatggcccaggcttag

SEQ ID NO: 198363 - DNA, 120 bp, Artificial Sequence
  ENSG00000113648_101 (sequence is synthesized)
gagcctgaccattgatgttaatgatgtatttcacatactgaagtctcaggagtcatcatagccattactctctgattttgcccaatgttcacacacattgttgaattgttttaaaaaaga

SEQ ID NO: 198364 - DNA, 120 bp, Artificial Sequence
  ENSG00000113648_102 (sequence is synthesized)
aatcagtgctgtgaatctgagtcaactaaatgcttttgctttgtgttcagccaagatttgcagccttttttcagaggttttaaaattttcagaaaaaacatttctaatgtgtctaatgtg

SEQ ID NO: 198365 - DNA, 120 bp, Artificial Sequence
  ENSG00000113648_103 (sequence is synthesized)
tcagtggtaacactgacttaatggtaaatggtaaatgatttaagtttccttgtcagagtcagtattatttgaaggagttaggaaggcagtctgaggctgtgatgagtctccttacctccc

SEQ ID NO: 198366 - DNA, 120 bp, Artificial Sequence
  ENSG00000113648_104 (sequence is synthesized)
ttttctccctttgatccacatacccttctcccgggagctggaagaactgtgaggagaaagggagctcttgaagttgaagcatcagtgaggagaaaaaccattcaccccttccccccacta

SEQ ID NO: 198367 - DNA, 120 bp, Artificial Sequence
  ENSG00000113648_105 (sequence is synthesized)
tggctgaggactggcttctgagacagtttaggaaactgacaaagccatgaaggaatggctcagctatcgaccatctggacatccagcagtatctatccatgtccttatctttgtggggct

SEQ ID NO: 198368 - DNA, 120 bp, Artificial Sequence
  ENSG00000113648_106 (sequence is synthesized)
ctttctagctggacacactagattctgcccggcccaaggcctctggagaaatccagcttgggcatgcatgcatgcagggagagccacacagcacagctgtgagggcaggagccagccctg

SEQ ID NO: 198369 - DNA, 120 bp, Artificial Sequence
  ENSG00000113648_107 (sequence is synthesized)
gagtgtgccccagggaagacacagctctcaggaggagactggaaagggtcctatggaagacattgcccttcccattcccctcgttgaagtgaactttggggacaggaaaataactgcatt

SEQ ID NO: 198370 - DNA, 120 bp, Artificial Sequence
  ENSG00000113648_108 (sequence is synthesized)
ttaggtggtcagccaggcttccttccttatctgttatgagaaaatgagagacaccaaaatctgacagttacaggctagatttaacatactactcaggcactatctttaacagccactttc

SEQ ID NO: 198371 - DNA, 120 bp, Artificial Sequence
  ENSG00000113648_109 (sequence is synthesized)
attaactaaaattgggtttctaatcatatttttttaaaagaaccaagaaggaatgtactatttcctgtagccaagtaggtcaggtcaggcagtctgcatgtccatccagacactccttcc

SEQ ID NO: 198372 - DNA, 120 bp, Artificial Sequence
  ENSG00000113648_110 (sequence is synthesized)
ctgtcatcatcgacagaccgcctcctgccctgccctaaatggtgggggccagcctcccatccaggcgaggacagcttggctctgagccacctcagatacaagccaggcccagggctcaat

SEQ ID NO: 198373 - DNA, 120 bp, Artificial Sequence
  ENSG00000113648_111 (sequence is synthesized)
ttctgagctctggcatttccattaacaatgccttaaaggaaagcaagcaggggcagtcattttatgagttatatctaaggatgtttgatgttcagttctaactctacatgcccaggggaa

SEQ ID NO: 198374 - DNA, 120 bp, Artificial Sequence
  ENSG00000113648_112 (sequence is synthesized)
ccccagcactggcttaggcactgtgcagcactcagggttagggggccacacccactcctgccttcaaagagattatactctgatgagcatataccatgagtaaagaacaagggtttccac

SEQ ID NO: 198375 - DNA, 120 bp, Artificial Sequence
  ENSG00000113648_113 (sequence is synthesized)
ggacatcctcaccacagggaagactcgggtactgcttgtatcagaagctggcccagcagagccagtgaggttaggattatcggatcccagtgctggaagggatcttgaaggtcccttggc

SEQ ID NO: 198376 - DNA, 120 bp, Artificial Sequence
  ENSG00000113648_114 (sequence is synthesized)
tacgaccctttctgccaactgtgcagccacgcggggacccccttctgctctataactggcagtgccctatgattactttcctcagtggctaacagtcttcatagctgctttaaattcctc

SEQ ID NO: 198377 - DNA, 120 bp, Artificial Sequence
  ENSG00000113648_115 (sequence is synthesized)
atgctgtggtttaaaacttagttttccatctttcctaacgacggtacaaagaagcagtcaccttattcaaattctgaaaccattaatgatccttattcctcccagaaaatcagactaatt

SEQ ID NO: 198378 - DNA, 120 bp, Artificial Sequence
  ENSG00000113648_116 (sequence is synthesized)
ttgggaatttttacagttcccagaaatctgatttcctaacccacaaggaccacttctctgccatgtacttcagatggacacacacccctctggctgataaaccccactggatctgaccct

SEQ ID NO: 198379 - DNA, 120 bp, Artificial Sequence
  ENSG00000113648_117 (sequence is synthesized)
ggctggtgggaggggaccctggggcctcctaggactggacctctgtcttggctctatctcgcttattcatttgtgactggacagtgggagcctgtccagacacatgtgtacctggtccat

SEQ ID NO: 198380 - DNA, 120 bp, Artificial Sequence
  ENSG00000113648_118 (sequence is synthesized)
ttgcacgctatgctcatgggctttcttctgtatagtggagctactgtcttcgttcatgatcatctcactgtcagcttctgcccactggcccacctgccaagctgattacccatttgtcct

SEQ ID NO: 198381 - DNA, 120 bp, Artificial Sequence
  ENSG00000113648_119 (sequence is synthesized)
tccaaagtacttgaattaatttgtcttctccccttcccattctcttcccctgatgcacacatcccaagcacacactttctagtcaagattgtttaaaaatacatatttgtacacatttta

SEQ ID NO: 198382 - DNA, 120 bp, Artificial Sequence
  ENSG00000113648_120 (sequence is synthesized)
cagcaaaaaaacttttgtggctcagctgcataccctgaggacttctgctgagccccagtgcatagcagagcatagttggaaaatcacagctctagcctcatccacagatgtgaagagtga

SEQ ID NO: 198383 - DNA, 120 bp, Artificial Sequence
  ENSG00000113648_121 (sequence is synthesized)
aacagcacttggttggcaggaaatcctcaatgctgagtagtagtggctccctgaggtactgtagtctgcacttccaagagtggggatgcctctggtcagaagggaaggtagtgagtccaa

SEQ ID NO: 198384 - DNA, 120 bp, Artificial Sequence
  ENSG00000113648_122 (sequence is synthesized)
aggaagctgagaattctccatgagcttgagttctgttcgcaactgctcccttccttcagcaaatccaagtttcccccagagaatcccattcccctagacagagcaggtggttctcccgcg

SEQ ID NO: 198385 - DNA, 120 bp, Artificial Sequence
  ENSG00000113648_123 (sequence is synthesized)
aagagagtcagatacaggccactgagggggtcttcctggctagctgaagcagagcccgccaaaatagcttcttttccaatgaaacatttctgaatataacaccagaagcatctatacaat

SEQ ID NO: 198386 - DNA, 120 bp, Artificial Sequence
  ENSG00000113648_124 (sequence is synthesized)
tggaaaaaattgcgtgaattttaaggattgaacatgtattgttttaaacataggaatttataggtgccttaaaagcatacacatccacattacactgagtagatcgagtctttttctcct

SEQ ID NO: 198387 - DNA, 120 bp, Artificial Sequence
  ENSG00000113648_125 (sequence is synthesized)
ttgcctgccttcctcaccaacctcctgcctcttcacactgtgtggggtgtgttttggtggtgtgtggtggggagtattggcttaatttgagtttttgtaaatagcatttgcttggagcca

SEQ ID NO: 198388 - DNA, 120 bp, Artificial Sequence
  ENSG00000113648_126 (sequence is synthesized)
aatgcagaactaaataatagagtaaaatcctttgccttgttctaaatcctgagagttcacttgccttaccctaaggcccccgactctgtgcccacccacacccctactccccagtggcag

SEQ ID NO: 198389 - DNA, 120 bp, Artificial Sequence
  ENSG00000113648_127 (sequence is synthesized)
cagtcaggccccagcccccatgctgtctcttttctgtgcctctgtcctggtgccagggctctgagctgctgagagcttcgctttgtgagatcacccccatggcttccttcagcttcaagg

SEQ ID NO: 198390 - DNA, 120 bp, Artificial Sequence
  ENSG00000113648_128 (sequence is synthesized)
gtgtgggtggcctctaaatcactctatagtgcgaggagcaataacccagaaagtccatatgaataatacttggtcctcttctctgagtctttaaccaaaaatgaagtccactgccctggc

SEQ ID NO: 198391 - DNA, 120 bp, Artificial Sequence
  ENSG00000113648_129 (sequence is synthesized)
cagaattcttccttggctgtttgacaaaacttaattccacaactgtttcctcccagaggatgactcttagtgtaagcacatccctctttgagaatctgactgtttctgggaatcaaaaat

SEQ ID NO: 198392 - DNA, 120 bp, Artificial Sequence
  ENSG00000113648_130 (sequence is synthesized)
gtgggtttatatttccgatacttctggagtgccaggttgtttggttttgttttcaacaaaatgtttggccctagaaatgcagcaacttgctctgttgccaggagcttccctgccaagtgt

SEQ ID NO: 198393 - DNA, 120 bp, Artificial Sequence
  ENSG00000113648_131 (sequence is synthesized)
cttgtgcacagccctctcctgggtgagctcctggacaaagcctcatgccctggtaaaccctgcagactgcagccactattctggcctaggtcatagtcttgagcaccagctctgctaggg

SEQ ID NO: 198394 - DNA, 120 bp, Artificial Sequence
  ENSG00000113648_132 (sequence is synthesized)
ctactcaggcattgcacttgtctgcaggtgttaggaatttatgttactgaagagtgagcaatgtcattgtgagagcatgtgcaagagcaagctttcctgcaatacctaaagaaaagcaag

SEQ ID NO: 198395 - DNA, 120 bp, Artificial Sequence
  ENSG00000113648_133 (sequence is synthesized)
gggaatagtaggacctgggacagcagtcctaggcccattaattccccttgcccctctgacagaatttcgaactcagtattcttcgaatactcagatgccagggttgccattgtaacagaa

SEQ ID NO: 198396 - DNA, 120 bp, Artificial Sequence
  ENSG00000113648_134 (sequence is synthesized)
taacagtggctgggggacacccattcagtggctcttcagaaagaacaaattcactgggtggatataacacttaaggaaaatgctcaataagccacccattgagtctcagagcaacctgac

SEQ ID NO: 198397 - DNA, 120 bp, Artificial Sequence
  ENSG00000113648_135 (sequence is synthesized)
caacaaggtgaaaaccatttaaaagacacattgtcttgctggagaaccttcctcccctgggtttcaccatggaacttcagcattacatgactaatgggcacgtaaattaaatgttactaa

SEQ ID NO: 198398 - DNA, 120 bp, Artificial Sequence
  ENSG00000113648_136 (sequence is synthesized)
gcaagagactattctcacttcttgccaccctgagcagggcagggaagccagccagcagtcacagtgatggggacagccttaaaggcccatagtcacttggaagacaatggcagagccctt

SEQ ID NO: 198399 - DNA, 120 bp, Artificial Sequence
  ENSG00000113648_137 (sequence is synthesized)
aggggtttgcccaagccaggtaggatgttagcaccagcctagtgctcaaggatgaggacagtcacatccaccagcccccaaccctcagcaatgagtactcattctaggtcctgatagctg

SEQ ID NO: 198400 - DNA, 120 bp, Artificial Sequence
  ENSG00000113648_138 (sequence is synthesized)
ccttactttggcccccagatcacaagtccctttaaaggaaagctgatctcctcgtccactgtggcttgtgcttccttttgtcccaggtgccacccacgggctctgaacattcatcctagt

SEQ ID NO: 198401 - DNA, 120 bp, Artificial Sequence
  ENSG00000113648_139 (sequence is synthesized)
ttgcttgctcccgcatcccgagcagcatttgagtcttatgtttgaaatgggttcatttgagccagcaactccctgcttcccttttgtgcctcgtgcacttggagtgtccactgtccttta

SEQ ID NO: 198402 - DNA, 120 bp, Artificial Sequence
  ENSG00000113648_140 (sequence is synthesized)
ttgcagctgccgccgccgccaccgagccgccgcggatcaaactgctccagcggagtgcatcacctggacccggagggccctgcagctacagacagtggcatctgcaggcaggcctggggc

SEQ ID NO: 198403 - DNA, 120 bp, Artificial Sequence
  ENSG00000113649_0 (sequence is synthesized)
acgtcgggtcggcgggtggatgaacgcggccctctgtaatggcggagcgtggcggggacgggggcgagagtgaacgattcaacccgggggagctcaggatggcccaacagcaggccttga

SEQ ID NO: 198404 - DNA, 120 bp, Artificial Sequence
  ENSG00000113649_1 (sequence is synthesized)
ggttccgaggtccggctcccccaccaaatgcagtgatgcgaggcccaccacctctgatgcgacctcctccaccttttggtatgatgcgaggccctcctccaccaccacggccgccctttg

SEQ ID NO: 198405 - DNA, 120 bp, Artificial Sequence
  ENSG00000113649_2 (sequence is synthesized)
gacgtcctccttttgatcctaatatgccgccaatgcctcctccaggagggatacctccacctatgggccctccacacctccagagaccacctttcatgcctcctcccatgagttccatgc

SEQ ID NO: 198406 - DNA, 120 bp, Artificial Sequence
  ENSG00000113649_3 (sequence is synthesized)
ctcctcctccgggtatgatgtttccaccaggaatgcctcctgtgactgctcctggtactccagcactacctcctacggaggagatatgggttgaaaataaaactccagatgggaaggttt

SEQ ID NO: 198407 - DNA, 120 bp, Artificial Sequence
  ENSG00000113649_4 (sequence is synthesized)
attattataatgctcggacacgtgaatctgcatggaccaagccagatggagttaaggttattcagcaatcagaactgacacctatgcttgcagcccaggcacaggttcaggctcaggccc

SEQ ID NO: 198408 - DNA, 120 bp, Artificial Sequence
  ENSG00000113649_5 (sequence is synthesized)
gcccaggcgcaggctcaggcccaggcgcaggctcaggcccaggcacaagctcaggcccaggctcaggctcaggcccaggcccaggcccaggcccaggcccaggcccaagcccaagcccag

SEQ ID NO: 198409 - DNA, 120 bp, Artificial Sequence
  ENSG00000113649_6 (sequence is synthesized)
aggctcaggctcaggcacaagctcaggcccaggcccaggctcaggtccaggcccaggtccaggcacaagtgcaagcacaagcagttggagcttccacccctacgaccagtagcccagcac

SEQ ID NO: 198410 - DNA, 120 bp, Artificial Sequence
  ENSG00000113649_7 (sequence is synthesized)
ctgcagtatccacttcaacatcatcatccaccccttcctctaccacttctaccacaacaactgctacttcagttgcgcagacagtatcaacacccacaacacaagatcagaccccaagtt

SEQ ID NO: 198411 - DNA, 120 bp, Artificial Sequence
  ENSG00000113649_8 (sequence is synthesized)
ctgctgtttcagttgccacgcctacagttagtgtttcaactcctgctcctacagccacacctgtgcaaaccgttccccagccgcaccctcagacgttacctcctgctgttcctcattcag

SEQ ID NO: 198412 - DNA, 120 bp, Artificial Sequence
  ENSG00000113649_9 (sequence is synthesized)
tacctcagccaacaacagcaatacctgcttttccaccagtaatggtacctccgtttcgtgttccccttcctggcatgccaattccacttccaggtgtagcaatgatgcaaatagtcagct

SEQ ID NO: 198413 - DNA, 120 bp, Artificial Sequence
  ENSG00000113649_10 (sequence is synthesized)
gcccgtatgtaaagacagtcgctaccaccaagaccggtgtattgccaggaatggcccctcctatcgtacccatgatacatccccaggttgctattgcagcttcacctgctaccttagctg

SEQ ID NO: 198414 - DNA, 120 bp, Artificial Sequence
  ENSG00000113649_11 (sequence is synthesized)
gagcaacagcagtttctgaatggactgaatataaaacagcagatgggaagacatattattataataatagaacattagaatcaacctgggaaaaaccccaagaactaaaggaaaaagaaa

SEQ ID NO: 198415 - DNA, 120 bp, Artificial Sequence
  ENSG00000113649_12 (sequence is synthesized)
agttagaagagaagattaaagagccaattaaagaaccctctgaagagcctctgccaatggagacggaggaggaggatcctaaagaagagcctataaaggagataaaggaggagcccaaag

SEQ ID NO: 198416 - DNA, 120 bp, Artificial Sequence
  ENSG00000113649_13 (sequence is synthesized)
aagaggagatgactgaagaagaaaaggctgcccagaaggcaaagccagttgctactgctcctattcctggtactccatggtgtgtcgtttggactggtgatgagcgggtcttcttttata

SEQ ID NO: 198417 - DNA, 120 bp, Artificial Sequence
  ENSG00000113649_14 (sequence is synthesized)
atcccaccactcgtctttctatgtgggaccgacctgatgatctgattggcagggcagatgttgacaaaattattcaggagccccctcataaaaaaggaatggaggaattgaagaaactaa

SEQ ID NO: 198418 - DNA, 120 bp, Artificial Sequence
  ENSG00000113649_15 (sequence is synthesized)
ggcacccaactccgacaatgctgtcgatccaaaagtggcaattctctatgagtgcaattaaagaggaacaagaattaatggaagaaattaatgaagatgagcctgttaaagcaaaaaaac

SEQ ID NO: 198419 - DNA, 120 bp, Artificial Sequence
  ENSG00000113649_16 (sequence is synthesized)
ggaagagagacgataataaagacattgactcagagaaagaagctgccatggaagctgaaattaaagctgcccgagaaagggccattgtccctctggaggctcgaatgaagcagttcaagg

SEQ ID NO: 198420 - DNA, 120 bp, Artificial Sequence
  ENSG00000113649_17 (sequence is synthesized)
acatgctgctagagagaggggtgtctgctttttcaacgtgggagaaggagttgcacaagatagtttttgatccccggtacttacttctcaatcctaaagagagaaaacaggtgtttgatc

SEQ ID NO: 198421 - DNA, 120 bp, Artificial Sequence
  ENSG00000113649_18 (sequence is synthesized)
agtatgtaaagaccagggcagaggaagaacgcagggaaaagaaaaataaaataatgcaagccaaggaagatttcaaaaaaatgatggaagaagcaaaatttaatccaagagcaactttta

SEQ ID NO: 198422 - DNA, 120 bp, Artificial Sequence
  ENSG00000113649_19 (sequence is synthesized)
tgctaggaagaaagagaaagaagattcgaagaccagaggtgagaagattaaatcggatttctttgaactattatctaatcatcacttggacagtcagtctcgatggagcaaagtaaaaga

SEQ ID NO: 198423 - DNA, 120 bp, Artificial Sequence
  ENSG00000113649_20 (sequence is synthesized)
caaagtagaaagtgatccacgttacaaagcagtagatagttcatcaatgagagaagaccttttcaaacagtacattgaaaaaatagccaagaatttagactcagaaaaagaaaaggagct

SEQ ID NO: 198424 - DNA, 120 bp, Artificial Sequence
  ENSG00000113649_21 (sequence is synthesized)
tgaaaggcaagcccgcattgaggcaagccttcgagaacgagaaagggaggttcaaaaggcccgttcagaacaaacaaaagaaatagatcgagagagagagcagcacaaacgagaagaagc

SEQ ID NO: 198425 - DNA, 120 bp, Artificial Sequence
  ENSG00000113649_22 (sequence is synthesized)
tatccagaatttcaaagctcttctgtctgacatggtacgttcttcagatgtgtcatggtctgatactcgtaggaccctccgaaaagatcaccgctgggaatctggatccttattggaaag

SEQ ID NO: 198426 - DNA, 120 bp, Artificial Sequence
  ENSG00000113649_23 (sequence is synthesized)
agaggagaaagagaagctttttaatgaacacattgaagcacttaccaaaaaaaagagagagcactttaggcaacttctggatgaaacttctgcaattaccttaacatccacgtggaaaga

SEQ ID NO: 198427 - DNA, 120 bp, Artificial Sequence
  ENSG00000113649_24 (sequence is synthesized)
agtaaaaaaaatcattaaggaagatcctcgatgtattaagttctcctccagtgacaggaaaaaacaaagagaatttgaagaatatatcagagacaaatatatcacagccaaagctgactt

SEQ ID NO: 198428 - DNA, 120 bp, Artificial Sequence
  ENSG00000113649_25 (sequence is synthesized)
caggacgcttttgaaagagaccaaatttataacatatagatccaaaaaattaatccaagaatcagatcagcacctgaaagatgtagaaaaaattttacagaatgacaaacggtatctagt

SEQ ID NO: 198429 - DNA, 120 bp, Artificial Sequence
  ENSG00000113649_26 (sequence is synthesized)
actggactgtgtgccagaggagaggcgtaaactgattgtggcatatgttgatgacctggatcgccggggtccacccccacctcccacagcatcggagcccacgagacgatcaacaaaata

SEQ ID NO: 198430 - DNA, 120 bp, Artificial Sequence
  ENSG00000113649_27 (sequence is synthesized)
attctaaatactcttccataggggcatctattcaaaatgcttgcatgagccaattttcaggtttttacatatatgtgcattagtcaacctattgcgaaaccatctgacaaacagaaggag

SEQ ID NO: 198431 - DNA, 120 bp, Artificial Sequence
  ENSG00000113649_28 (sequence is synthesized)
aagcatttgtgaacagtttctgaacagaacactttggaaatatttatgcttttctttgtgtggcatgactgacatacatactcaaatataggctgtctctagtaaatcttaaaatcttga

SEQ ID NO: 198432 - DNA, 120 bp, Artificial Sequence
  ENSG00000113649_29 (sequence is synthesized)
agctaaaattcatccttttatgaggtgtggaagtcagtgacttggtgacgttcttcctagcagtgttaatacatgcaagaagtaagagcatttgtggcttgaacttgccagatgcaaata

SEQ ID NO: 198433 - DNA, 120 bp, Artificial Sequence
  ENSG00000113649_30 (sequence is synthesized)
ccacagactccaagaaaacccgagttggggtttgttttgttttgattttttttttttaaagcgggtaaaagagaaaacactgaaaattgaattcttatcttccagaggctacaattatta

SEQ ID NO: 198434 - DNA, 120 bp, Artificial Sequence
  ENSG00000113649_31 (sequence is synthesized)
taatggacaatacttttacctttgtctctaaagatcagattagttttatttgttcacttacgtgctttgattatcccctctgaattatagaccgagtcttgttgtttagcctaagagaag

SEQ ID NO: 198435 - DNA, 120 bp, Artificial Sequence
  ENSG00000113649_32 (sequence is synthesized)
atttatgtagtaatttcttctcaggtatggaaccacggtcataactaacatgttggccagaatagaaccactggttaaacatattttattcaccattaagtgatctttatcaatattctg

SEQ ID NO: 198436 - DNA, 120 bp, Artificial Sequence
  ENSG00000113649_33 (sequence is synthesized)
gattagacaacaaattacctttctgggtgtttcttgtaaactatactcctgtttgaatgttaaactttgttgctaaagtttaattttaagatgtttgaatgttcagtttatgtatttgaa

SEQ ID NO: 198437 - DNA, 120 bp, Artificial Sequence
  ENSG00000113649_34 (sequence is synthesized)
ctacaataaaccaaccctttttatatatctgtattgtatatgattattgttacttaatttttaagagcttattttaacctgtttttaaaagcagcaaatagaatttcccacaaagtaagt

SEQ ID NO: 198438 - DNA, 120 bp, Artificial Sequence
  ENSG00000113649_35 (sequence is synthesized)
tgactctaaatcttaagtattacctagtttttaaaggtttgaatataataatgcagtatttgcagtataaaaaggaaggaatttgtagagaatcattttggtgctcaagtctcttagcag

SEQ ID NO: 198439 - DNA, 120 bp, Artificial Sequence
  ENSG00000113649_36 (sequence is synthesized)
tgccttattgcctcatagcaagaagatgctggggttttttttgtttttgtcctttgtattaatgtatgatggtttgcgcctttttggcattctttcaacatgtcgtgtacatcacaccat

SEQ ID NO: 198440 - DNA, 120 bp, Artificial Sequence
  ENSG00000113649_37 (sequence is synthesized)
gaatcagttcctaattgatatatctagctttacctcccgagttaaaaaaaaatctttttattttatgccttcataggttgctcgtttcagagtgccacataaataaaatgtttaacaaaa

SEQ ID NO: 198441 - DNA, 120 bp, Artificial Sequence
  ENSG00000113649_38 (sequence is synthesized)
tctcagaggaaatgtgtaaaatcaaattctactacataattttatatgttgaattagaatcatgttaatgaattatttgctacttttgattttagaataacctatttaagaaaaccaagt

SEQ ID NO: 198442 - DNA, 120 bp, Artificial Sequence
  ENSG00000113649_39 (sequence is synthesized)
agaaaaccaagtaaataagtgattgtttgattttgtatgattgcttttatagaaattaaatgtatttatatttgcatttgtaactgattttctttttctaaacactttttttataactat

SEQ ID NO: 198443 - DNA, 120 bp, Artificial Sequence
  ENSG00000113649_40 (sequence is synthesized)
cattttaatctggatgaatcttgttagtaatttcttaaagcaaagcattgatatgatttttagtgtcatggtctttagattcattactggaatgcatcttatgacaattctctgatttta

SEQ ID NO: 198444 - DNA, 120 bp, Artificial Sequence
  ENSG00000113649_41 (sequence is synthesized)
aagtaatacatacgatttgattgaggtagattatatcttttaaaagtcgatttggtaataatttgtgattggaagggacaggtaatgtgaatgttgttaggaggcatgattgctctctta

SEQ ID NO: 198445 - DNA, 120 bp, Artificial Sequence
  ENSG00000113649_42 (sequence is synthesized)
atttagaaatgcctattctttgcagttttcacattcataactgctcccatagtaattcaaaatgtccttagccatgtggtcagtgatccctcctaataatagatttagcaaatttcttct

SEQ ID NO: 198446 - DNA, 120 bp, Artificial Sequence
  ENSG00000113649_43 (sequence is synthesized)
tttgatccattttcaatttggtactatggcctcttgttcggcagtttgtacgctttgttatccaggttttgttcctttttatttgctctctttttggtgatggtttcttcagaagttatg

SEQ ID NO: 198447 - DNA, 120 bp, Artificial Sequence
  ENSG00000113649_44 (sequence is synthesized)
atgtttgcccatgtaaatacagggtttgcaggtgattgtcttaggccaccttgaaagtatggccatgaaaataactcttgtggcaagccaacaaaaagaaattgcattaacgctgcttcc

SEQ ID NO: 198448 - DNA, 120 bp, Artificial Sequence
  ENSG00000113649_45 (sequence is synthesized)
ctgtccctaactagtccagttacgcttgggcattacaagagatcgcaggtcagtgtgtaatattatgtacctatgtgctgcagtttgactccctaagtaaaagtgagttgtatttatgtt

SEQ ID NO: 198449 - DNA, 120 bp, Artificial Sequence
  ENSG00000113649_46 (sequence is synthesized)
atgagattgtaggactggaggtgtaactgactgcaggagataccctgaaactttgttgaaaatctttctcccttacccctcagagttgttgagccttgctgaacatgcttaatgaaccat

SEQ ID NO: 198450 - DNA, 120 bp, Artificial Sequence
  ENSG00000113649_47 (sequence is synthesized)
accatccttccattgctcacggcagtccctctacctgatatgatttggaagtgttcctgttgcagtgacagactttctcgttcttcaggggtacgttcttcagatgtgtcatggtctgat

SEQ ID NO: 198451 - DNA, 120 bp, Artificial Sequence
  ENSG00000113649_48 (sequence is synthesized)
ttatattccctatgaatacatggcagttctgagatctaaagttatcaacaatctgaaaaagcctttttctatattttaataatttctttataaaatattatttatcttgaatttggcaaa

SEQ ID NO: 198452 - DNA, 120 bp, Artificial Sequence
  ENSG00000113649_49 (sequence is synthesized)
ttttagatgaaagcctatatgcttgtcgatgtttacatttctagtaaaagaacacttctgatcttttactgtaattctactctaaatgcctatattttaaaagttattattctcatattt

SEQ ID NO: 198453 - DNA, 120 bp, Artificial Sequence
  ENSG00000113649_50 (sequence is synthesized)
aaggtaggtgaactttttttctagttgtaaatatttaagatatgatgaatttctcatggtacattattttccctcccatcccactacctgttttaaaatacagattaaatcggatttctt

SEQ ID NO: 198454 - DNA, 120 bp, Artificial Sequence
  ENSG00000113649_51 (sequence is synthesized)
ttaatgttctttaattctgagggagataatttgctaaattagaaagcatttaaaaattgaatacttggtattagtactgttagtataggaaaaaacccaagttattcaacaaattcagaa

SEQ ID NO: 198455 - DNA, 120 bp, Artificial Sequence
  ENSG00000113649_52 (sequence is synthesized)
tgtagaagatttgggtattcatatatgtattatgactccaaatgatagttttggaattaattctttttggaaatttattaggtctcaattttatgaaaagttagtttcctccctcattta

SEQ ID NO: 198456 - DNA, 120 bp, Artificial Sequence
  ENSG00000113649_53 (sequence is synthesized)
gaccccaatggataccattccagagatctcataaaaacagacacagacttctccctctttatatggttatcttacgacttacctagtccttgagtctggtcattaactccttggtgagga

SEQ ID NO: 198457 - DNA, 120 bp, Artificial Sequence
  ENSG00000113649_54 (sequence is synthesized)
ggattgcccgagcttctctatttaggtacaaagctaaaagcctgtttttcctggcttagtttttcttttatttcctttattgagatagatagtgatagtttgtattgtgacattttcatt

SEQ ID NO: 198458 - DNA, 120 bp, Artificial Sequence
  ENSG00000113649_55 (sequence is synthesized)
atagttctataaaggttatttgtttttattagttacttcttggatgtcttttaactctaactatttaaatagttttaaaattattattataagagggtatattgtttggcaaattgcttt

SEQ ID NO: 198459 - DNA, 120 bp, Artificial Sequence
  ENSG00000113649_56 (sequence is synthesized)
cttttacctgtttgttttgtgcatatcttaggtcacagactatctcgctaagttcctgcaggtcacggactatgtcttctatttcttttgattcattgcctaagttgctaagtacctctc

SEQ ID NO: 198460 - DNA, 120 bp, Artificial Sequence
  ENSG00000113649_57 (sequence is synthesized)
acttgcatttgtgggttagccttagttccatttaaatctctggggctacctacagtttcctgtatagcatgcttttgaatttccacatgttctgttttcctaattcccttaagtttgtat

SEQ ID NO: 198461 - DNA, 120 bp, Artificial Sequence
  ENSG00000113649_58 (sequence is synthesized)
agggaataagagccaatttttaaaatatacttagcagatcatatttaagaaggaagatctgctaaaatacacccagatattattgaattacatacttttttggattatttacgtgaatgg

SEQ ID NO: 198462 - DNA, 120 bp, Artificial Sequence
  ENSG00000113649_59 (sequence is synthesized)
gcctttttcatagtgcatatatttgagaggtgccgtgattccatgtttacaatttcacttgagtaccacacagaaacagggttgcccttacacctgaggtgcatttttggaggaacaaga

SEQ ID NO: 198463 - DNA, 120 bp, Artificial Sequence
  ENSG00000113649_60 (sequence is synthesized)
agtagtttagtcattgatgaacagttctaattccacctaactactcctgggcccatgttgctctctgggacctgtccttcaacttaaatctcaacttatcacccagaaagtgagtaataa

SEQ ID NO: 198464 - DNA, 120 bp, Artificial Sequence
  ENSG00000113649_61 (sequence is synthesized)
aaagtcaggtaggtaaggtatatatcttacatattcacttggccaagattgcagatattttagttttatttttaaaatgaatgtttgagattactaaaacattataccacttaataccaa

SEQ ID NO: 198465 - DNA, 120 bp, Artificial Sequence
  ENSG00000113649_62 (sequence is synthesized)
agattttacaaaatattttatgtgtttataatgtaaaacattttggaaaatactgttttttctatatttcaagaactaaaaaaattatattttgtgctgtttgattctgacacatagagg

SEQ ID NO: 198466 - DNA, 120 bp, Artificial Sequence
  ENSG00000113649_63 (sequence is synthesized)
catagaggtttactgcagtgttaaacttttttttttttaagtaaggttgctccctttttatgttattaaccagtgtcagggagagacagcccattaaaggtgtatttttttcctaataat

SEQ ID NO: 198467 - DNA, 120 bp, Artificial Sequence
  ENSG00000113649_64 (sequence is synthesized)
gtagccattgtaaatcattagaagcccattttaattttgttattatgaaagttatttatcccttagagttcatttgaaaccctcaatataatttgtttttgccaaaaatatgctgctcag

SEQ ID NO: 198468 - DNA, 120 bp, Artificial Sequence
  ENSG00000113649_65 (sequence is synthesized)
aggacgcttttgaaagagaccaaatttataacatatagttaatttagtgaaagatgtgaaagtgaaagcttgtgaaagatgctgggattggcagccccgcagactgaagtcctctgttca

SEQ ID NO: 198469 - DNA, 120 bp, Artificial Sequence
  ENSG00000113657_0 (sequence is synthesized)
ggcagatgcaaagaggaaaatcaatagggataagagagaagagggaggagtcgcagatcagccattcttgtcttatggggtcccagctggcgcagcaaaagaaaaaaaaaaacaaaaccc

SEQ ID NO: 198470 - DNA, 120 bp, Artificial Sequence
  ENSG00000113657_1 (sequence is synthesized)
gggcgtgaacgcgggtggaggagggtgtgcgtgggggggcgggggtgaaagggggaccggggagatttactattgtctctggcagccgccgcgggagcccgggaggggggcggaggcggg

SEQ ID NO: 198471 - DNA, 120 bp, Artificial Sequence
  ENSG00000113657_2 (sequence is synthesized)
cggaggcggcggcgcggccagcgcaccattcactccacctgatctcggggcgctgtgcgctgaggaaggcgcgggcgagccggagcagaagaaggagggagggagccagccgctgcagcc

SEQ ID NO: 198472 - DNA, 120 bp, Artificial Sequence
  ENSG00000113657_3 (sequence is synthesized)
accaccgccaccatgtcctaccaaggcaagaagaacatcccgcggatcacgagtgaccgtctccttatcaagggaggcagaatcgtcaatgatgatcagtccttttatgctgatatttac

SEQ ID NO: 198473 - DNA, 120 bp, Artificial Sequence
  ENSG00000113657_4 (sequence is synthesized)
atggaagatggcttaataaaacaaattggagacaatctgattgttcctggaggagtgaagaccattgaagccaatgggaagatggtgatccctggaggcatcgatgtccatactcacttc

SEQ ID NO: 198474 - DNA, 120 bp, Artificial Sequence
  ENSG00000113657_5 (sequence is synthesized)
cagatgccatataagggaatgaccacagtagatgacttcttccaagggacaaaggcggccttagcaggtggcaccaccatgatcattgaccatgtggtgcctgagcctgagtccagcctg

SEQ ID NO: 198475 - DNA, 120 bp, Artificial Sequence
  ENSG00000113657_6 (sequence is synthesized)
actgaggcctatgagaaatggagagagtgggctgatgggaagagttgctgtgactatgccctgcatgtggacatcacccactggaatgacagcgtcaagcaggaagtgcagaacctcatc

SEQ ID NO: 198476 - DNA, 120 bp, Artificial Sequence
  ENSG00000113657_7 (sequence is synthesized)
aaggacaaaggggttaactccttcatggtttatatggcttataaggatttgtatcaagtatctaacacagagctctatgagatcttcacctgcctgggagagctgggggccattgctcaa

SEQ ID NO: 198477 - DNA, 120 bp, Artificial Sequence
  ENSG00000113657_8 (sequence is synthesized)
gttcatgctgagaatggggatatcattgcccaggagcaaacccgcatgttggaaatggggataactggcccagaaggccatgtactgagcaggccagaagagctggaagctgaggctgtg

SEQ ID NO: 198478 - DNA, 120 bp, Artificial Sequence
  ENSG00000113657_9 (sequence is synthesized)
ttccgtgccatcaccattgccagccaaaccaattgccctctctacgtcacaaaggtcatgagcaagagtgcagctgacctcatctcacaagccaggaaaaaaggaaatgtagtctttggt

SEQ ID NO: 198479 - DNA, 120 bp, Artificial Sequence
  ENSG00000113657_10 (sequence is synthesized)
gagcccatcactgccagcctcggcatagatggaacccattattggagcaagaactgggccaaggcggctgcatttgtgacatccccacccctgagccctgacccaactactccggactac

SEQ ID NO: 198480 - DNA, 120 bp, Artificial Sequence
  ENSG00000113657_11 (sequence is synthesized)
atcaactccttgctggccagcggggatctgcagctatctgggagtgcccactgcaccttcagcactgcccagaaagcaattgggaaggacaacttcacagccattcctgagggcaccaat

SEQ ID NO: 198481 - DNA, 120 bp, Artificial Sequence
  ENSG00000113657_12 (sequence is synthesized)
ggtgtggaggagcggatgtctgtcatctgggacaaggctgtggccacagggaaaatggacgaaaaccagttcgtggctgtgacaagcacaaacgctgccaagatcttcaacctgtatccc

SEQ ID NO: 198482 - DNA, 120 bp, Artificial Sequence
  ENSG00000113657_13 (sequence is synthesized)
cgcaagggaagaatatctgtgggttctgacagcgacctcgtcatctgggatccagatgctgtgaagatcgtctctgccaagaaccaccagtctgcggcagagtacaacatctttgaaggg

SEQ ID NO: 198483 - DNA, 120 bp, Artificial Sequence
  ENSG00000113657_14 (sequence is synthesized)
atggagctgcgcggggctcctctggttgtcatctgccagggcaagatcatgctggaagatggcaacctgcacgtgacccagggggctggccgcttcataccctgcagcccgttctccgac

SEQ ID NO: 198484 - DNA, 120 bp, Artificial Sequence
  ENSG00000113657_15 (sequence is synthesized)
tatgtctacaagcgcattaaagcacggaggaagatggcagacctgcatgccgtcccaaggggcatgtacgatgggcctgtgtttgacctgaccaccacccccaaaggtggcacccccgca

SEQ ID NO: 198485 - DNA, 120 bp, Artificial Sequence
  ENSG00000113657_16 (sequence is synthesized)
ggctctgctcggggctctcctactcggccgaacccacctgtgaggaatcttcatcagtcgggatttagcctgtcaggcacccaagtggatgagggggttcgctcagccagcaagcgcatc

SEQ ID NO: 198486 - DNA, 120 bp, Artificial Sequence
  ENSG00000113657_17 (sequence is synthesized)
gtggcgcccccaggcggccgttctaatatcacatctctgagttaagcaagccttcctcaaagagaggggcagaagcaagaagagattgttttgaagccaaaatggtacaccgatatttaa

SEQ ID NO: 198487 - DNA, 120 bp, Artificial Sequence
  ENSG00000113657_18 (sequence is synthesized)
gaaggaaagcgaatccaaacggttgtgatctaaagaatcaataagcctcaagccttatgtttctccaatgttacgctcgcttgcctagctttacgaatattgctttgttttctgtttatg

SEQ ID NO: 198488 - DNA, 120 bp, Artificial Sequence
  ENSG00000113657_19 (sequence is synthesized)
catagccttgatttgtttgactcccctccccccatttacatgcatgcaatcagacaggccactaaggtaaaagagtctgctctatcatagtgttgagagcgtgtgtagtgctgcatctta

SEQ ID NO: 198489 - DNA, 120 bp, Artificial Sequence
  ENSG00000113657_20 (sequence is synthesized)
tgacaaggggacagacaagctgggacgtcagggaaatgaacaaaagggacgcaggttatttggggtgagtgggtggtgggagcctggagcaaggtggagggtgcagaggggctggggtag

SEQ ID NO: 198490 - DNA, 120 bp, Artificial Sequence
  ENSG00000113657_21 (sequence is synthesized)
ggcatgtaggagggaggtgggtgggtcaggtgagtggaaggggtgttgtatattgtgttgatgacgtacgttatttccatggaagatagccgctgtggcagctgtcacatcaccacagct

SEQ ID NO: 198491 - DNA, 120 bp, Artificial Sequence
  ENSG00000113657_22 (sequence is synthesized)
ctttgggttctgttctttgtcacgtcccctacaagtaaattttgtttctttgaacgtttattaaaatgccaagacccaaccatttcttccacctgcttgattgtgccagtgtttgctcag

SEQ ID NO: 198492 - DNA, 120 bp, Artificial Sequence
  ENSG00000113657_23 (sequence is synthesized)
gcctctttcttagtgttgctttcaaatccttctctttcctgggttgggaaggccaggcagggacagagcaaatgacacttctcttcctcttgccctccctgcctctttggtgctcttaaa

SEQ ID NO: 198493 - DNA, 120 bp, Artificial Sequence
  ENSG00000113657_24 (sequence is synthesized)
agccagcagctgagaacatagcacaggcccacgtggtgagggcacccacagcttaaagacgcttccttctaaacacggcgaggtcacctctcactcttctgtctttgcaaaccgagaaga

SEQ ID NO: 198494 - DNA, 120 bp, Artificial Sequence
  ENSG00000113657_25 (sequence is synthesized)
gtggcatgcttctggcatcccaagtcaggattttagctcagatgaggcagaatgaagggcctctcttacaggcagtttgtgtttgattctctcgatcctggcacatccatgataaatagg

SEQ ID NO: 198495 - DNA, 120 bp, Artificial Sequence
  ENSG00000113657_26 (sequence is synthesized)
agtttttgaaagttggttttattaggtgttccctaatttttaccgtaataggtcatctcagcttatatgaaagtcaagtggggaactgggaaagccaaagtcagtcttgagcagagggag

SEQ ID NO: 198496 - DNA, 120 bp, Artificial Sequence
  ENSG00000113657_27 (sequence is synthesized)
cacattttgtggacctggttccacctttccattccaaaccacctgtttccccttccattagcagaaactctgggggaactttgtgtctcagtcctagaatctccccaagtgagtggaagt

SEQ ID NO: 198497 - DNA, 120 bp, Artificial Sequence
  ENSG00000113657_28 (sequence is synthesized)
gacatgatgcagtcttcctcatggggcacctgaaagaaattagtgtgggtgcttcgatctaccttgtctgtcagagttgaatatctctttccctatcatgctgcttctgaaaattcagtt

SEQ ID NO: 198498 - DNA, 120 bp, Artificial Sequence
  ENSG00000113657_29 (sequence is synthesized)
ttggagcaagtcctgtgagcaagataagaatctatagaaccaagatgctcattttcagaagaaatatgttcaacctgggatcagacttccatgctctggggaatccaagtggtagcacct

SEQ ID NO: 198499 - DNA, 120 bp, Artificial Sequence
  ENSG00000113657_30 (sequence is synthesized)
gtaaccctgtgtactaagtgctttgaagagaagagcaggcctcagacaccttttaattgcttaggagaaaccattgtctctgactgcaggtttgaataagttgaagaccagagaaaagta

SEQ ID NO: 198500 - DNA, 120 bp, Artificial Sequence
  ENSG00000113657_31 (sequence is synthesized)
cacactgggctacaaaggaatttggagatagccaaggaacaggatttcccctagcaagctaccttctgttcaaatcatgaaaaaagactatttccccttagaatagggaagcttgctatt

SEQ ID NO: 198501 - DNA, 120 bp, Artificial Sequence
  ENSG00000113657_32 (sequence is synthesized)
ttaaagctcttgtagtgcttttcttttaagggagatgtagtaaaagggaaaatgtagctcttagtttacacttcaaagatgtgggggtctttcagagaactaagaataacagttttatgt

SEQ ID NO: 198502 - DNA, 120 bp, Artificial Sequence
  ENSG00000113657_33 (sequence is synthesized)
gcagagagagtttgccagatctgaagcatatacctcattgactaggctgttactttgggataggttgcagtaccagccacagccagcagatagaggaaaagacacacataaactcgcttc

SEQ ID NO: 198503 - DNA, 120 bp, Artificial Sequence
  ENSG00000113657_34 (sequence is synthesized)
tgagcgtccacttctgcactctctgctctgctgttactcagcccctgagtctgactcatctctgcacaacctctctgtgccatgaagataagtcttccatggccaaatcggtcatccgca

SEQ ID NO: 198504 - DNA, 120 bp, Artificial Sequence
  ENSG00000113657_35 (sequence is synthesized)
ctgcccttgggacttccgaagtgaaccattccaccagaacctttgattctgcacaagatttccttgctctgggaacaacccccaaatgcccttgggaggaacaacatgagctcaggaagc

SEQ ID NO: 198505 - DNA, 120 bp, Artificial Sequence
  ENSG00000113657_36 (sequence is synthesized)
ctctctttcttcacttaccattactaactctccaagcatagaaatccctgggaattgcgagaataactcccactattttaaaatttatattcagatttgtttcgtttcataagacacatc

SEQ ID NO: 198506 - DNA, 120 bp, Artificial Sequence
  ENSG00000113657_37 (sequence is synthesized)
aaacaggcctatacaaaaggtttaggaaaagaaaacaatggtgagtcccggccctcttcgaattcactggcacctcatgcaagtgtaggaaggcacgctggatcgtctatctgattccaa

SEQ ID NO: 198507 - DNA, 120 bp, Artificial Sequence
  ENSG00000113657_38 (sequence is synthesized)
agctgtcctttgccatctcatcccttggcctgccccccaaccctgaggatgcccctgccatccccccaacctcctcatattgcctctgaacccagatggcaatccatcccggttctctct

SEQ ID NO: 198508 - DNA, 120 bp, Artificial Sequence
  ENSG00000113657_39 (sequence is synthesized)
gagggccacgggcttgggtagtggaaagggtgtttgggaaattgttaaatcagttacccgtagtagagctatttcttgtacttctaagttttctagaagtggaaggattgtagtcatcct

SEQ ID NO: 198509 - DNA, 120 bp, Artificial Sequence
  ENSG00000113657_40 (sequence is synthesized)
gaaaatgggtttacttcaaaatccctcagccttgttcttcacgactgtctatactgagagtgtcatgtttccacaaagggctgacacctgagcctggattttcactcatccctgagaagc

SEQ ID NO: 198510 - DNA, 120 bp, Artificial Sequence
  ENSG00000113657_41 (sequence is synthesized)
cctttccagtagggtgggcaattcccaacttccttgccacaagcttcccaggctttctcccctggaaaactccagcttgagtcccagatacactcatgggctgccctgggcagccagcat

SEQ ID NO: 198511 - DNA, 120 bp, Artificial Sequence
  ENSG00000113657_42 (sequence is synthesized)
tcattgtaagttccctctttgaaaactggtgtgtgggtgttcagttctgtgtctggtgggtatggacagacagtaatctcctgtgatctgtgctagctgtgaggcagctctggaacgtga

SEQ ID NO: 198512 - DNA, 120 bp, Artificial Sequence
  ENSG00000113657_43 (sequence is synthesized)
agagctgtttggtttgaaccgtgaacaaaactgtgttttgagtttagctgacattaaagaaaaaagttcatcacgtgactgttaatgtaaacctggttattaaaataactatgaaattac

SEQ ID NO: 198513 - DNA, 120 bp, Artificial Sequence
  ENSG00000113657_44 (sequence is synthesized)
actctgggcccctgctccgcgcgctagctggctgtgtggctcgctggctcgctagggacaagcaggaatcggagcagcactgccgcctctggcgcgaaggctcaggcgcctcctcccgcc

SEQ ID NO: 198514 - DNA, 120 bp, Artificial Sequence
  ENSG00000113657_45 (sequence is synthesized)
acagtcactgtggctcggcgcacgctgccggcggctgccctttccgcctctggggaagaaaaacccgcgggccgctttcgtgcttgaaccatggcctcgggccggaggggctgggacagc

SEQ ID NO: 198515 - DNA, 120 bp, Artificial Sequence
  ENSG00000113657_46 (sequence is synthesized)
tcccacgaagacgatctgcccgtgtacctggccaggccgggcaccacggaccaggtcccgcggcagaaatacggcggcatgttctgcaacgtggagggcgccttcgagagcaagacgctg

SEQ ID NO: 198516 - DNA, 120 bp, Artificial Sequence
  ENSG00000113657_47 (sequence is synthesized)
gatttcgatgccctcagcgtggggcagcggggcgcgaagactcctcggagcggccagggcagcgaccgaggatcggggagtcggcccgggatcgagggggacaccccgcgcaggggccaa

SEQ ID NO: 198517 - DNA, 120 bp, Artificial Sequence
  ENSG00000113657_48 (sequence is synthesized)
ggccgggaagagagcagggagcccgcgcccgcctcccccgcccccgccggggtagagatccggagcgccaccggcaaagaggtgttgcagaacctcggccccaaggacaagagtgaccgt

SEQ ID NO: 198518 - DNA, 120 bp, Artificial Sequence
  ENSG00000113657_49 (sequence is synthesized)
actccacctgatctcggggcgctgtgcgctgaggaaggcgcgggcgagccggagcagaagaaggagggagggagccagccgctgcagccaccaccgccacagggaaaatggacgaaaacc

SEQ ID NO: 198519 - DNA, 120 bp, Artificial Sequence
  ENSG00000113657_50 (sequence is synthesized)
gcggccgccgcattcgacccgcgccatggcagaggagagcgggtgccgggagggaagccgggaaccgtctccattctgaaactagggcggggaagccgccgcgggagcccgggagggggg

SEQ ID NO: 198520 - DNA, 120 bp, Artificial Sequence
  ENSG00000113657_51 (sequence is synthesized)
aaattaaccctttgctgaccacttactgctgcaggaaaggatttgaggaaccatgatgcctaactgccttggctggttattttagacataatggtttgctattgtgtttgcccagagatt

SEQ ID NO: 198521 - DNA, 120 bp, Artificial Sequence
  ENSG00000113657_52 (sequence is synthesized)
ctgtcctgagaagattgaggagcaaaggctttcattcagatgtcacctttgtgataaccacagaggctaaggaaaaagtacttaccctctgccagacattgctctcagatgacaatgctg

SEQ ID NO: 198522 - DNA, 120 bp, Artificial Sequence
  ENSG00000113657_53 (sequence is synthesized)
tgctatactattttactagtgagggatagaggcactgggaagctgagtaaagtgacacagttaggaagtggtagatctgagatgtggatataggctatctaattccagatcctgccaaaa

SEQ ID NO: 198523 - DNA, 120 bp, Artificial Sequence
  ENSG00000113657_54 (sequence is synthesized)
agagatccggagcgccaccggcaaagaggtgttgcagaacctcggccccaaggacaaggtttattactgaggaacttggctgttggtctccactgggaaagaaacacaaggatatggaat

SEQ ID NO: 198524 - DNA, 120 bp, Artificial Sequence
  ENSG00000113657_55 (sequence is synthesized)
tctacttggaaaactcaggtcttcctgtttgctggataaatacagagacaaaatcacaatgagccctctcacattgatgtgaaaaaagatctttggatagaaacctactcatttattctc

SEQ ID NO: 198525 - DNA, 120 bp, Artificial Sequence
  ENSG00000113657_56 (sequence is synthesized)
aggactttaagtgccctgcttcatgttttggcatgttgcaactgactttattttatttattttattacaagcaagagaaacaaagtctggttcccgtatgatttaaaaaagaaaacaaaa

SEQ ID NO: 198526 - DNA, 120 bp, Artificial Sequence
  ENSG00000113657_57 (sequence is synthesized)
caatattggctgaaaaatttgacaagaatgaaaaatggcatggtacaagctccaggaagatgttgcagagatgagcttcagatgcatttcattttgcgttgttattaatggcttggaaag

SEQ ID NO: 198527 - DNA, 120 bp, Artificial Sequence
  ENSG00000113657_58 (sequence is synthesized)
aggccataaacctattatggtaattatgtctgcagatgagggtaaataggatggtgttataaacaccagtaagcaagagacgtagtacagagcaacctagggagattagaaatatggaca

SEQ ID NO: 198528 - DNA, 120 bp, Artificial Sequence
  ENSG00000113657_59 (sequence is synthesized)
ggaaatgaacaaacgagatcagcctggaaaagtgaaaacatgcatctggagaaatacataatttgaaaaacagagagatacttaaaggcagggtcatacttggaaagcagtaatggtaaa

SEQ ID NO: 198529 - DNA, 120 bp, Artificial Sequence
  ENSG00000113658_0 (sequence is synthesized)
ggagaagcgcagcgacggcgtcgggagagcgcgcctagccggctcgcgagtgagtgagggtccccggcgcgcgcgggcgaggggaactgggggctgcaggctctgccccggcggactcgg

SEQ ID NO: 198530 - DNA, 120 bp, Artificial Sequence
  ENSG00000113658_1 (sequence is synthesized)
ggactcgggccgaggcgggggcgttcggccgcggacggagcggaaacgacccagggcctgtcgggcgggaggtaggccgagtcctggcctgccggggtcccggctggcggacacggtgcg

SEQ ID NO: 198531 - DNA, 120 bp, Artificial Sequence
  ENSG00000113658_2 (sequence is synthesized)
gctgcggaggcctcgctggctgcccggggcgtcctgaggcggggccggggctggccctcgtcccagccccgctgttaccgcccagactttggagggaggcgtctgggacgccctggaggg

SEQ ID NO: 198532 - DNA, 120 bp, Artificial Sequence
  ENSG00000113658_3 (sequence is synthesized)
gaccccctgaccccgcgctgtcctggggagcggtttgctttcctaactcatcggatgtaccaccctggatacacacccttgataggactgcggtgctcggccgggcagcctgggctgctg

SEQ ID NO: 198533 - DNA, 120 bp, Artificial Sequence
  ENSG00000113658_4 (sequence is synthesized)
cactgcgaagctgtccaatggcttgatgaatccgtgccgccgtcgctttgtgtttcaaagataaggatccgcgcttatcggtgggaattacactctgggcagttgtgaccggctactgca

SEQ ID NO: 198534 - DNA, 120 bp, Artificial Sequence
  ENSG00000113658_5 (sequence is synthesized)
atcagctggtagttagacctggtttctgccacttgccatgtcagttttcaccactgcaaggatttcttctacttcatgtaaacttctctgtgctgcaaagagaatgccaaagcagcgtct

SEQ ID NO: 198535 - DNA, 120 bp, Artificial Sequence
  ENSG00000113658_6 (sequence is synthesized)
ttttgccttcaccatattcagccgctggccgggtcctatacttcaatatcagggctcaaattaatattccagtctcttcccctccccttttcccctctcctcctttcagctgctgttact

SEQ ID NO: 198536 - DNA, 120 bp, Artificial Sequence
  ENSG00000113658_7 (sequence is synthesized)
acgtggagtttggagcctaagctttgaaaactcccatgtggcgcgcccgtcttaagtctgagcatgctcagtagccaaaacagatttttggttgcagaactcgggcgaggatacttgggg

SEQ ID NO: 198537 - DNA, 120 bp, Artificial Sequence
  ENSG00000113658_8 (sequence is synthesized)
tatttggacgtttgccggcttcccaacagaatgttccggttctggtggtgatggcattggagaatggggcttaggcaagcctgtagaaaggaagctgttgaagttattgaagtacctgtt

SEQ ID NO: 198538 - DNA, 120 bp, Artificial Sequence
  ENSG00000113658_9 (sequence is synthesized)
gctatattctaagaaattaaaatgtccagaaatctgcctctgacttgacccaatgaaagaagcatatggcacttgtgaagataaatgttactcctccctttttaattggaacttctgctt

SEQ ID NO: 198539 - DNA, 120 bp, Artificial Sequence
  ENSG00000113658_10 (sequence is synthesized)
aggacctgtgtatgacgtttcacctgtgatctgttctttcggtagccactgactttgagttacaggaaggtctccgaagatttgtgtcaaatgacgtcaatggccagcttgttttctttt

SEQ ID NO: 198540 - DNA, 120 bp, Artificial Sequence
  ENSG00000113658_11 (sequence is synthesized)
actagtccagcagtaaagcgattgttgggctggaaacaaggtgatgaggaggagaaatgggcagaaaaggcagttgatgctttggtgaagaaactaaaaaagaaaaagggtgccatggag

SEQ ID NO: 198541 - DNA, 120 bp, Artificial Sequence
  ENSG00000113658_12 (sequence is synthesized)
gaactggagaaagccttgagcagtccaggacagccgagtaaatgtgtcactattcccagatctttagatggacgcctgcaggtttctcacagaaaaggcttaccccatgttatatattgt

SEQ ID NO: 198542 - DNA, 120 bp, Artificial Sequence
  ENSG00000113658_13 (sequence is synthesized)
tgtatcaacccataccactataagagagtggagagtccagtcttacctccagtattagtgcctcgtcataatgaattcaatccacaacacagccttctggttcagtttaggaacctgagc

SEQ ID NO: 198543 - DNA, 120 bp, Artificial Sequence
  ENSG00000113658_14 (sequence is synthesized)
cacaatgaaccacacatgccacaaaatgccacgtttccagattctttccaccagcccaacaacactccttttcccttatctccaaacagcccttatcccccttctcctgctagcagcaca

SEQ ID NO: 198544 - DNA, 120 bp, Artificial Sequence
  ENSG00000113658_15 (sequence is synthesized)
tatcccaactccccagcaagttctggaccaggaagtccatttcagctcccagctgatacgcctcctcctgcctatatgccacctgatgatcagatgggtcaagataattcccagcctatg

SEQ ID NO: 198545 - DNA, 120 bp, Artificial Sequence
  ENSG00000113658_16 (sequence is synthesized)
gatacaagcaataatatgattcctcagattatgcccagtatatccagcagggatgttcagcctgttgcctatgaagagcctaaacattggtgttcaatagtctactatgaattaaacaat

SEQ ID NO: 198546 - DNA, 120 bp, Artificial Sequence
  ENSG00000113658_17 (sequence is synthesized)
cgtgttggagaagcttttcatgcatcttctactagtgtgttagtagatggattcacagatccttcaaataacaaaagtagattctgcttgggtttgttgtcaaatgttaatcgtaattcg

SEQ ID NO: 198547 - DNA, 120 bp, Artificial Sequence
  ENSG00000113658_18 (sequence is synthesized)
acaattgaaaacactaggcgacatattggaaaaggtgttcatctgtactatgttggtggagaggtgtatgcggaatgcctcagtgacagcagcatatttgtacagagtaggaactgcaac

SEQ ID NO: 198548 - DNA, 120 bp, Artificial Sequence
  ENSG00000113658_19 (sequence is synthesized)
tttcatcatggctttcatcccaccactgtctgtaagattcccagcagctgcagcctcaaaatttttaacaatcaggagtttgctcagcttctggctcaatctgtcaaccatgggtttgag

SEQ ID NO: 198549 - DNA, 120 bp, Artificial Sequence
  ENSG00000113658_20 (sequence is synthesized)
gcagtatatgagctcaccaaaatgtgtaccattcggatgagttttgtcaagggttggggagcagaatatcaccggcaggatgtaaccagcaccccatgttggattgagattcatcttcat

SEQ ID NO: 198550 - DNA, 120 bp, Artificial Sequence
  ENSG00000113658_21 (sequence is synthesized)
gggcctcttcagtggctggataaagtccttactcagatgggctcccctctgaaccccatatcttctgtttcataatgcagaagtattcttttcaattatattgttagtggacttgtttta

SEQ ID NO: 198551 - DNA, 120 bp, Artificial Sequence
  ENSG00000113658_22 (sequence is synthesized)
attttagagaaactttgagtacagatactgtgagcttacattgaaaacagatattacagcttatttttttctacataattgtgaccaatacatttgtattttgtgatgaatctacatttg

SEQ ID NO: 198552 - DNA, 120 bp, Artificial Sequence
  ENSG00000113658_23 (sequence is synthesized)
tttgtattcatgttcatgtgattaactcttagaagtgttgtaaaagatgcagagtaagtattatgccccagttcagaaatttggcattgatcttaaactggaacatgcttttactttatt

SEQ ID NO: 198553 - DNA, 120 bp, Artificial Sequence
  ENSG00000113658_24 (sequence is synthesized)
gccctaacaattttttattaaatttatttgaaaatgcatcacatgatgaaaaattatagtagcttataagagggcatatacagtgaagagtaagttttccctcctactctcgatcttcca

SEQ ID NO: 198554 - DNA, 120 bp, Artificial Sequence
  ENSG00000113658_25 (sequence is synthesized)
gaagctgtacttttaccagtttctttgtcccaccaacttaaaaaaaaaaagtacaattcattgttttgcaaaagtgtatggtaggggcttaaaagaaactataaagttttatttgaatga

SEQ ID NO: 198555 - DNA, 120 bp, Artificial Sequence
  ENSG00000113658_26 (sequence is synthesized)
atccgggtcctgggcgagcgggcgccgtgcgcgtgtcccgcggccgagctgctaataaagttgcagcgaggagaagcgcagcgacggcgtcgggagagcgcgcctagccggctcgcgaaa

SEQ ID NO: 198556 - DNA, 120 bp, Artificial Sequence
  ENSG00000113658_27 (sequence is synthesized)
tgctatatatcttttgtaagacatttccttttttaaaaaaatttttgcaaataactgatctcaagtatatgtcatttactcaaaatctgtcataagcattactttatagctagtgacagt

SEQ ID NO: 198557 - DNA, 120 bp, Artificial Sequence
  ENSG00000113658_28 (sequence is synthesized)
gcatgcacagccttgttcaactatgtttgctgcttttggacaatgttgcaagaactctatttttgacatgcattaatcttttattttgcacttttatgggtgacagtttttagcataacc

SEQ ID NO: 198558 - DNA, 120 bp, Artificial Sequence
  ENSG00000113658_29 (sequence is synthesized)
tttgataaaatacactcaagtgacttggacttagatgcttatccttacgtccttggtaccttttttgtattaacaaacactgcaatttatagattacatttgtaggaagttatgcttttt

SEQ ID NO: 198559 - DNA, 120 bp, Artificial Sequence
  ENSG00000113658_30 (sequence is synthesized)
tctggtttttgttttactttcaacctaggttataagactgttattctatagctccaacttaaggtgcctttttaattccctacagttttatgggtgttatcagtgctggagaatcatgta

SEQ ID NO: 198560 - DNA, 120 bp, Artificial Sequence
  ENSG00000113658_31 (sequence is synthesized)
gttaatcccattgctcttacaagtgtcagcttacttgtatcagcctccctacgcaaggacctatgcactggagccgtaggaggctcttcagttgggccccaaggataaggctactgattt

SEQ ID NO: 198561 - DNA, 89 bp, Artificial Sequence
  ENSG00000113658_32 (sequence is synthesized)
aggctcttcagttgggccccaaggataaggctactgatttgatactaaatgaatcagcagtggatgtagggatagctgattttaaaaca

SEQ ID NO: 198562 - DNA, 62 bp, Artificial Sequence
  ENSG00000113658_33 (sequence is synthesized)
caaaacaaaacaaaacactcacccatcaacgaatatagactcttctctcatttatcgatgat

SEQ ID NO: 198563 - DNA, 120 bp, Artificial Sequence
  ENSG00000113658_34 (sequence is synthesized)
ccatcaacgaatatagactcttctctcatttatcgatgatcctctttttccattttttaagtacttatgtggaagctagtctcccaaaacacaatctttagagagaaaagacatgaacga

SEQ ID NO: 198564 - DNA, 120 bp, Artificial Sequence
  ENSG00000113658_35 (sequence is synthesized)
tgaaccagtttttttctcaggagctgtcaaatggacacttaattatgacatgagaatgaagaaattattttggaaaaaaaaaatgacctaatttacctatcagtgaaagctttattttct

SEQ ID NO: 198565 - DNA, 120 bp, Artificial Sequence
  ENSG00000113658_36 (sequence is synthesized)
ggtgccttttgaaagtatatggagtcatatcattcttctgtttaaaatgttagtttggtttgactttccactttgtcctttctgctcttgtgaagaaaaaaaaaagcattttcgaggaaa

SEQ ID NO: 198566 - DNA, 120 bp, Artificial Sequence
  ENSG00000113658_37 (sequence is synthesized)
gaattatgcaatttcttttgttttctgtgtcattatttattgctttttcaatgtgcagccagtggatggttttagttctttcagatgaactgccatttgtgtttcagctcacagttcttt

SEQ ID NO: 198567 - DNA, 120 bp, Artificial Sequence
  ENSG00000113658_38 (sequence is synthesized)
gctgggtaaaagaaatactttctgacagtcacctgagccttaaatgtaagtattacatgacatgcattctgtttcttccagagttctgtctgccacacgaaagagaatatttgcttactt

SEQ ID NO: 198568 - DNA, 120 bp, Artificial Sequence
  ENSG00000113658_39 (sequence is synthesized)
gatagaactttggcattttcatcattcttttacttaaccaggcttatggcatgatctctggaacaaatttgtaggaaaaaattactccaattgaatgactgatgtatgtaatcaacttca

SEQ ID NO: 198569 - DNA, 120 bp, Artificial Sequence
  ENSG00000113658_40 (sequence is synthesized)
ttgggctgcagtaaactagtggaaattagagagttgttttattggtgttttctactgtgagttaattaaaaattgtttttatttggggtcattatgtcacagtcttgagttaacaagatc

SEQ ID NO: 198570 - DNA, 120 bp, Artificial Sequence
  ENSG00000113658_41 (sequence is synthesized)
ttacgtgattggccttttctttgttttctcttaggagttgtgtctcatgaatgacagtactaaagctattaacaactaagagtttgacagagaactataagcctgttgtatctcctaaaa

SEQ ID NO: 198571 - DNA, 120 bp, Artificial Sequence
  ENSG00000113658_42 (sequence is synthesized)
gttgtcaactccccacccttggactttaaatgaaaattttattcagtccagctattcttacagtccctaaggattttcatatatctatgtataggagataaaatttgctagtaagatttt

SEQ ID NO: 198572 - DNA, 120 bp, Artificial Sequence
  ENSG00000113658_43 (sequence is synthesized)
taaaaactggctagtgaaaggaaagtacctctgaaagaaaccattttagcaaattatggttatatgttttaatttaatctacagaatgttttatagtaaaattctagcaccactagaata

SEQ ID NO: 198573 - DNA, 120 bp, Artificial Sequence
  ENSG00000113658_44 (sequence is synthesized)
atcacatagcatgtacaatatatttatgctggctgaaaagacagaatctgggaataataaaattgcaaccagtttggtaatgcaaacagcagaatagaatgaaatctcagtaatgaatta

SEQ ID NO: 198574 - DNA, 120 bp, Artificial Sequence
  ENSG00000113658_45 (sequence is synthesized)
aagcaacaaaaagatattgattggcaaaaagcaagatataagagattcatttgcttaacatttctacataatatttatggtctggtcagtattggtctggtcagtattgcctggctgacg

SEQ ID NO: 198575 - DNA, 120 bp, Artificial Sequence
  ENSG00000113658_46 (sequence is synthesized)
tgaaatgtaaactagtaggcgtgttattgatctgctaaaactaaccctctttttaagaggagatttaaggaagacgtcaatcaaaatgtcaaatatgtgtgtcagaatataaataatttt

SEQ ID NO: 198576 - DNA, 120 bp, Artificial Sequence
  ENSG00000113658_47 (sequence is synthesized)
tcacattgtattgttgctatataaaaaaaataatagaattggttgggtttctgaggtgaaatccagagtaagagtactagacagttcaacaagccacatctaatggcacagatagaggat

SEQ ID NO: 198577 - DNA, 120 bp, Artificial Sequence
  ENSG00000113658_48 (sequence is synthesized)
gtagctattttatacctttcataacatttgagagtaagatatccttcaggatgtgaagtgattattaagtactcatacctgaaatctgttgtcaagattagaactggggttcatgttaaa

SEQ ID NO: 198578 - DNA, 120 bp, Artificial Sequence
  ENSG00000113658_49 (sequence is synthesized)
aaccttccatattacctgagggtacctgtggggaacagttccttcccctgtgtggtagtattttgttggaagagaatgtttatacaaaaaatgaaattcttccaacagcagagaaactct

SEQ ID NO: 198579 - DNA, 120 bp, Artificial Sequence
  ENSG00000113658_50 (sequence is synthesized)
aaaaagtttgatagtacctatcaaagtgctgtacttctgtgatagagaacatctgatgtaccaatttagatctatttctttatactttttctaatcaattgcttaatagtactttggatg

SEQ ID NO: 198580 - DNA, 120 bp, Artificial Sequence
  ENSG00000113658_51 (sequence is synthesized)
attatcacctttgccacttaaaatatataaatatcctttttacttcatgaggaaggaagaattttttgataattactgagttcagccttttgtgatgacttatattttggacttacattt

SEQ ID NO: 198581 - DNA, 120 bp, Artificial Sequence
  ENSG00000113658_52 (sequence is synthesized)
taactttaaagaatgtcagatcccttctttgtcttactagttaaatcctcacctaatctcttgggtatgaatataaatgtgtgtcatcgttatattgttcagctagatgagcaagtatct

SEQ ID NO: 198582 - DNA, 120 bp, Artificial Sequence
  ENSG00000113658_53 (sequence is synthesized)
tagggtagtaggtagcctggtggttttagaagtgtttggtgatttttatggagagagttttcctaagtggtggtttataggtggtatcagatattattagggcagctttttggggagtaa

SEQ ID NO: 198583 - DNA, 120 bp, Artificial Sequence
  ENSG00000113658_54 (sequence is synthesized)
tctcaggtctcccagagcagcagcatttttctcattgatataagtaagattcttaggagcttttcttatcacacaagatgcctgaatcgaatgtgagaattgaaggcatttcttctgcat

SEQ ID NO: 198584 - DNA, 120 bp, Artificial Sequence
  ENSG00000113658_55 (sequence is synthesized)
aaacaaagaattctacctgctggacagaaacctggaaagttctttggaattcgctgaattacagtttagtatgtcctgattacagagtgacaatatttatcaagcctttgttatattgga

SEQ ID NO: 198585 - DNA, 120 bp, Artificial Sequence
  ENSG00000113658_56 (sequence is synthesized)
ttatcttctctcttaaaatacaactgtattataattgaaatgacagcccaaaattggatggtttaccaaaaccaatgaaagggatttcacacatcaatttttatttctgttttgaagagc

SEQ ID NO: 198586 - DNA, 120 bp, Artificial Sequence
  ENSG00000113658_57 (sequence is synthesized)
acatgctatataataattgctagtagcaactgcagtaaaacaggtgataagttattttctctgaaaagatccagtcctagagcaggattcttcgatcattcatggcagagtgaaaaaggt

SEQ ID NO: 198587 - DNA, 120 bp, Artificial Sequence
  ENSG00000113658_58 (sequence is synthesized)
ttgtatggttcttgtccaaataactcagttcttaaaattcttaaaatgatcgtaaaccattatcctttaaaggtttatttgaagatgctgttaaagtacagaattttgtgtacaggtaga

SEQ ID NO: 198588 - DNA, 120 bp, Artificial Sequence
  ENSG00000113658_59 (sequence is synthesized)
tttttccgtccctcattaatagtgccttcttaattaatacagactggtgttagctataacaaaactccagtaaggccaaagaatcccaagttctttgtggaaaaaaaaaaaaaatctttt

SEQ ID NO: 198589 - DNA, 120 bp, Artificial Sequence
  ENSG00000113658_60 (sequence is synthesized)
agggtcagattttcccttctaatatcattgaagatgatgttgcattgatttattcataaagtattttaactataggaactctagaagataatggttaggcaagtgattttttttttaaat

SEQ ID NO: 198590 - DNA, 120 bp, Artificial Sequence
  ENSG00000113658_61 (sequence is synthesized)
atggttggcgtaagttgtattttgaaattcacttattttaaaatcgaagaggattgtaatcatggaaatagaatgtttgtatctacctgcccacattttcttaaaaagatatttcatata

SEQ ID NO: 198591 - DNA, 120 bp, Artificial Sequence
  ENSG00000113658_62 (sequence is synthesized)
cagataatgaagaccaagctagtggctgcactgtaggtctgctgcttatttgtatttgttgtgcttctgtttatgttgtagaagctgaaattctagcaacatgcttcaattctgttattt

SEQ ID NO: 198592 - DNA, 120 bp, Artificial Sequence
  ENSG00000113658_63 (sequence is synthesized)
tgatacttatgaaaatgtattaggttttactatattgtgcttttgaaagccataactcttaagaactttgtttttgcatattgtttgctaattctttactttaataaacctcaaaacctg

SEQ ID NO: 198593 - DNA, 120 bp, Artificial Sequence
  ENSG00000113658_64 (sequence is synthesized)
ccgggtcctgggcgagcgggcgccgtgcgcgtgtcccgcggccgagctgctaataaagttgcagcgaggagaagcgcagcgacggcgtcgggagagcgcgcctagccggctcgcgagact

SEQ ID NO: 198594 - DNA, 120 bp, Artificial Sequence
  ENSG00000113658_65 (sequence is synthesized)
gtccagaaatctgcctctaaatgggatctcactatgttgctcagactggacgtgattgaactcctgggctcaagtgagtctcccgaataactgggattacaggacttgacccaatgaaag

SEQ ID NO: 198595 - DNA, 120 bp, Artificial Sequence
  ENSG00000113658_66 (sequence is synthesized)
catgaaccatgcattgtgaaaggtgctagaaacatacaaagaagtttgacacgtggcctctgccttaagttgccgatattgaagaatgtattaatcaaataaagacatgatgttccctca

SEQ ID NO: 198596 - DNA, 120 bp, Artificial Sequence
  ENSG00000113658_67 (sequence is synthesized)
ttgaatgttttggagaagtcaggaatatgaagaacaattacagacctgtaagggaagaaaattccttggcaggagggtttctttctaggaggcagtctgtacagtggtttggaatatgga

SEQ ID NO: 198597 - DNA, 120 bp, Artificial Sequence
  ENSG00000113658_68 (sequence is synthesized)
ttctgcagctggactgccagggttcaattctcagctctgtttcttgctttctgtataattaagcaagttacatttaatttccctttgcctgttttctcatctgtaaaatgagaataatgg

SEQ ID NO: 198598 - DNA, 120 bp, Artificial Sequence
  ENSG00000113658_69 (sequence is synthesized)
atgagctcaccaaaatgtgtaccattcggatgagttttgtcaagtctctgcaggagatatagtaataactgaagtgttacacaggtggagacgggaaacgttagttgctaagaactttgg

SEQ ID NO: 198599 - DNA, 120 bp, Artificial Sequence
  ENSG00000113658_70 (sequence is synthesized)
aaaggagtgttcaactcaatatttcacctgatacaagatgatgaaacgggctatcagaaatacagaaataacgatgaaggcatggagtggatgatcaagctcaggtcattggctccagaa

SEQ ID NO: 198600 - DNA, 120 bp, Artificial Sequence
  ENSG00000113658_71 (sequence is synthesized)
ctcagactcttggtcaccactatgctacctctccttgactcctagcatctgcagctacctccccaccgtgatctccagcctctcccccaacccccaccaacaaaaatgcgttaacctcaa

SEQ ID NO: 198601 - DNA, 120 bp, Artificial Sequence
  ENSG00000113712_0 (sequence is synthesized)
ggggactgggggcattttgtgttggctggagctggagtaacaagatggcgtcgtccgcggagtgacaggggtccctctgggccggagccggcggcagtggtggcagcggtatcgccgccc

SEQ ID NO: 198602 - DNA, 120 bp, Artificial Sequence
  ENSG00000113712_1 (sequence is synthesized)
tagctcaccgcgccccttttccagcccgcgacgtcgccgcgcaagcgaggcagcggcggccgccgagaaacaagtggcccagcctggtaaccgccgagaagcccttcacaaactgcggcc

SEQ ID NO: 198603 - DNA, 120 bp, Artificial Sequence
  ENSG00000113712_2 (sequence is synthesized)
tggcaaaaagaaacctgactgagcggcggtgatcaggttcccctctgctgattctgggccccgaaccccggtaaaggcctccgtgttccgtttcctgccgccctcctccgtagccttgcc

SEQ ID NO: 198604 - DNA, 120 bp, Artificial Sequence
  ENSG00000113712_3 (sequence is synthesized)
tagtgtaggagccccgaggcctccgtcctcttcccagaggtgtcggggcttggccccagcctccatcttcgtctctcaggatggcgagtagcagcggctccaaggctgaattcattgtcg

SEQ ID NO: 198605 - DNA, 120 bp, Artificial Sequence
  ENSG00000113712_4 (sequence is synthesized)
gagggaaatataaactggtacggaagatcgggtctggctccttcggggacatctatttggcgatcaacatcaccaacggcgaggaagtggcagtgaagctagaatctcagaaggccaggc

SEQ ID NO: 198606 - DNA, 120 bp, Artificial Sequence
  ENSG00000113712_5 (sequence is synthesized)
atccccagttgctgtacgagagcaagctctataagattcttcaaggtggggttggcatcccccacatacggtggtatggtcaggaaaaagactacaatgtactagtcatggatcttctgg

SEQ ID NO: 198607 - DNA, 120 bp, Artificial Sequence
  ENSG00000113712_6 (sequence is synthesized)
gacctagcctcgaagacctcttcaatttctgttcaagaaggttcacaatgaaaactgtacttatgttagctgaccagatgatcagtagaattgaatatgtgcatacaaagaattttatac

SEQ ID NO: 198608 - DNA, 120 bp, Artificial Sequence
  ENSG00000113712_7 (sequence is synthesized)
acagagacattaaaccagataacttcctaatgggtattgggcgtcactgtaataagtgtttagaatctccagtggggaagaggaaaagaagcatgactgttagtacttctcaggacccat

SEQ ID NO: 198609 - DNA, 120 bp, Artificial Sequence
  ENSG00000113712_8 (sequence is synthesized)
ctttctcaggattaaaccagttattccttattgattttggtttggccaaaaagtacagagacaacaggacaaggcaacacataccatacagagaagataaaaacctcactggcactgccc

SEQ ID NO: 198610 - DNA, 120 bp, Artificial Sequence
  ENSG00000113712_9 (sequence is synthesized)
gatatgctagcatcaatgcacatcttggtattgagcagagtcgccgagatgacatggaatcattaggatatgttttgatgtattttaatagaaccagcctgccatggcaagggctaaagg

SEQ ID NO: 198611 - DNA, 120 bp, Artificial Sequence
  ENSG00000113712_10 (sequence is synthesized)
acgcctgttgaagttttatgtaaggggtttcctgcagaatttgcgatgtacttaaactattgtcgtgggctacgctttgaggaagccccagattacatgtatctgaggcagctattccgc

SEQ ID NO: 198612 - DNA, 120 bp, Artificial Sequence
  ENSG00000113712_11 (sequence is synthesized)
attcttttcaggaccctgaaccatcaatatgactacacatttgattggacaatgttaaagcagaaagcagcacagcaggcagcctcttccagtgggcagggtcagcaggcccaaaccccc

SEQ ID NO: 198613 - DNA, 120 bp, Artificial Sequence
  ENSG00000113712_12 (sequence is synthesized)
acaggtttctaagcatgaattgaggaacagaagaagcagagcagatgatcggagcagcatttgtttctccccaaatctagaaattttagttcatatgtacactagccagtggttgtggac

SEQ ID NO: 198614 - DNA, 120 bp, Artificial Sequence
  ENSG00000113712_13 (sequence is synthesized)
aaccatttacttggtgtaaagaacttaatttcagtataaactgactctgggcagcattggtgatgctgtatcctgagttgtagcctctgtaattgtgaatattaactgagatagtgaaac

SEQ ID NO: 198615 - DNA, 120 bp, Artificial Sequence
  ENSG00000113712_14 (sequence is synthesized)
atggtgtccggttttctattgcattttttcaagtggaaaagttaactaaatggttgacacacaaaaattggtggagaaattgtgcatatgccaattttttgttaaaaccttttgttttga

SEQ ID NO: 198616 - DNA, 120 bp, Artificial Sequence
  ENSG00000113712_15 (sequence is synthesized)
actatactgctttgagatctcatttcagaagaacggcatgaacagtcttcagccacagttgtgatggttgttaaatgctcacaattgtgcattcttagggtttttccatccctggggttt

SEQ ID NO: 198617 - DNA, 120 bp, Artificial Sequence
  ENSG00000113712_16 (sequence is synthesized)
gcaagttgttcacttaaaacattcttaaaatggttggcttcttgtctgcaagccagctgatatggtagcaaccaaagattccagtgtttgagcatatgaaagactctgcctgcttaattg

SEQ ID NO: 198618 - DNA, 120 bp, Artificial Sequence
  ENSG00000113712_17 (sequence is synthesized)
tgctagaaataacagcatctaaagtgaagacttaagaaaaacttagtgactactagattatccttaggactctgcattaactctataatgttcttggtattaaaaaaaaagcatatttgt

SEQ ID NO: 198619 - DNA, 120 bp, Artificial Sequence
  ENSG00000113712_18 (sequence is synthesized)
cacagaaatttagttaacatcttacaactgaacatgtatgtatgttgcttagataaatgtaatcactgtaaacatctatatgatctgggattttgtttttattttgaaatgggagctttt

SEQ ID NO: 198620 - DNA, 120 bp, Artificial Sequence
  ENSG00000113712_19 (sequence is synthesized)
ttgtttacaagttcattaaaaactaaaaactgtttctgtaaggaaatgagattttttttaaacaacaaaaaatgccttgctgactcactattaaataaaaatctccccaattttttgata

SEQ ID NO: 198621 - DNA, 120 bp, Artificial Sequence
  ENSG00000113712_20 (sequence is synthesized)
gactacttcaagccatttgttacatggtattcctttgcaagtcaatttaggtttcgtgttataacttttcctctttttttaagaaaaatgaaaaaagtaattcttttgtctgaaggggaa

SEQ ID NO: 198622 - DNA, 120 bp, Artificial Sequence
  ENSG00000113712_21 (sequence is synthesized)
acttgcaggcacaatatctagtactgcaactgccagaacttggtattgtagctgctgcccgctgactagcagctggactgattttgaataaaaatgaaagcattaaagggtttccctaca

SEQ ID NO: 198623 - DNA, 120 bp, Artificial Sequence
  ENSG00000113712_22 (sequence is synthesized)
aaacatttttctttaaaatacttttgaaatggctataagcagttgactttcacccttggagagcatcacactgtgtgaggttcagtgattgttgaccctccccagcccctcctgcttctt

SEQ ID NO: 198624 - DNA, 120 bp, Artificial Sequence
  ENSG00000113712_23 (sequence is synthesized)
taagttatctgtgtgcgtgcgcttcctctcaatcttctttgcacgctcatttctttttctctgacccatgagaaaggaaaacttactgatgataatttttaaatagtgtaatttattcat

SEQ ID NO: 198625 - DNA, 120 bp, Artificial Sequence
  ENSG00000113712_24 (sequence is synthesized)
ttatagcatgtcaggataaattaaaagaacatttgtctggaaatgctgccgggagcctattgtgtaaatgtaggtattttgtaaaataaccttgaaattgtaaattgacacgtgtttggt

SEQ ID NO: 198626 - DNA, 120 bp, Artificial Sequence
  ENSG00000113712_25 (sequence is synthesized)
tttgttttcttttttcttttttttatttgaaaactactttagcaataattaattccatgattatcacattctgccattaagggatattagtaccgtaatactgaagaaattttattaagt

SEQ ID NO: 198627 - DNA, 120 bp, Artificial Sequence
  ENSG00000113712_26 (sequence is synthesized)
aatactgaagaaattttattaagtctgaacttctggggtaggcagcttctttgtttcttttctatccacccttgtcggttgaggtatttgtttcttgactaataaaccctttgatacttt

SEQ ID NO: 198628 - DNA, 120 bp, Artificial Sequence
  ENSG00000113712_27 (sequence is synthesized)
tagccagaaatcagtctcataaagctatttttgagtatagtttgtgtaaaataaaaatgtttagctttggtaataacttccaagctgaactccctctagcaagatatttttcagtgcttt

SEQ ID NO: 198629 - DNA, 120 bp, Artificial Sequence
  ENSG00000113712_28 (sequence is synthesized)
tatttactatgcacttagactatgcactttttctgaaatatttttgtaacacttttttgtatttttgccatttgaaaaggttgtggtgtagttggtctgtaattaagttgcagatttaaa

SEQ ID NO: 198630 - DNA, 120 bp, Artificial Sequence
  ENSG00000113712_29 (sequence is synthesized)
actgctgttagctttgtaaatcaaaatataggtgttttttgtcctggtatatcgtcattccatctgcagctggagctggaatcccattgatcttctagctaccattcattttcttcactg

SEQ ID NO: 198631 - DNA, 120 bp, Artificial Sequence
  ENSG00000113712_30 (sequence is synthesized)
ttcacaaaagaagagtgtgaaattcagtgaatgctgttactaatcctgttacgagatgaatctcatttcaccaaaattaaattatgtttttccgctaaaatgatgatacaagttgaagac

SEQ ID NO: 198632 - DNA, 120 bp, Artificial Sequence
  ENSG00000113712_31 (sequence is synthesized)
acatcactctgaaattggaagacctcaccacttaaggctccacagtggcttactcagctgaactctaggttactactctttactttgttcacccattggggggtgcagtttttttaaaat

SEQ ID NO: 198633 - DNA, 120 bp, Artificial Sequence
  ENSG00000113712_32 (sequence is synthesized)
gttgggagatggccattctaactactgttgaatgtctctgttttgggaaggtataacaagaaataaaaaagaatatatatgaagggagagactggttatctcctcccatatggttgtgct

SEQ ID NO: 198634 - DNA, 120 bp, Artificial Sequence
  ENSG00000113712_33 (sequence is synthesized)
tatcctcttatggcttacaaatgaatatttggaggtttgctttcacaatgatttcccatcaacaaatatttttagtaggatttttcctgtttctgttagtccttgcagtactcataaatg

SEQ ID NO: 198635 - DNA, 120 bp, Artificial Sequence
  ENSG00000113712_34 (sequence is synthesized)
ttttaagctgagcatactgtaatagtcataagtttaatttcattataataaaaataatcaaacaaaaggactttagaacccaagacaatgagctagttttccctaaagtttgctgaacta

SEQ ID NO: 198636 - DNA, 120 bp, Artificial Sequence
  ENSG00000113712_35 (sequence is synthesized)
ttaaggaatatgttcttatagcttttgactagaatgagtcatgggaattctaagaagggatggcctagacatttttagctcagttaaattcagcatttaatgcaggtgagttcctgggtc

SEQ ID NO: 198637 - DNA, 120 bp, Artificial Sequence
  ENSG00000113712_36 (sequence is synthesized)
gttttccaactagtctggaacagtctggttctgactcaaactggtataaagcattattttaggttttctctttgccagtttttaagcagttataaccatgtaaatcaagatgtgaggaca

SEQ ID NO: 198638 - DNA, 120 bp, Artificial Sequence
  ENSG00000113712_37 (sequence is synthesized)
tctatatgaagtatagtaaagaagtggtgtcagcagatcaatatgtgtgtcctgggtgtgctgctctcttaagtgagactttgtgagactatactttaaatgcattattaccattgctta

SEQ ID NO: 198639 - DNA, 120 bp, Artificial Sequence
  ENSG00000113712_38 (sequence is synthesized)
cattttgggggattttcttcctcctcaaaacttccatttctattgtaatattcttaatgacaatctttttttttttttagcagtgtatgtttgaaacagccaaagatggcgatgaaccaa

SEQ ID NO: 198640 - DNA, 120 bp, Artificial Sequence
  ENSG00000113712_39 (sequence is synthesized)
gtgtaaattgatctaagcagcccatgcagtttgtgttgaatcaacaaacagtgtattgttgaagtgaaattattttctgaaatgacttgttagaccagttttgaggacatactcaaaagt

SEQ ID NO: 198641 - DNA, 120 bp, Artificial Sequence
  ENSG00000113712_40 (sequence is synthesized)
agttttgaggacatactcaaaagtagagtaataatggctcctgggatggagaaatatgagatgaacctggaacattctattatggtgccacaaaggaaatctaaaaaaaaaaaaaaaaaa

SEQ ID NO: 198642 - DNA, 82 bp, Artificial Sequence
  ENSG00000113712_41 (sequence is synthesized)
aaaaaaaaaaaaaaaaaaaagtggttggctaggagcagtggcacacgcctgtgattccagcactttgggaggccgaagtggg

SEQ ID NO: 198643 - DNA, 120 bp, Artificial Sequence
  ENSG00000113712_42 (sequence is synthesized)
gagactccgtctcaacaacaacaaaaaggtggatacatgtcaaaagggcacaggagccacttgaaggattatacttgctaaatctgtgtcaattatcaaaataaactggtagcaacgtta

SEQ ID NO: 198644 - DNA, 120 bp, Artificial Sequence
  ENSG00000113712_43 (sequence is synthesized)
aaaccaagagtaacatgaaaggaaatgcggatgaaagtgcaagagttggtttgtggtcatctggagtccatgtctccaagactgctggaccttcaaattctgcaacttgttagatcatct

SEQ ID NO: 198645 - DNA, 120 bp, Artificial Sequence
  ENSG00000113712_44 (sequence is synthesized)
ggatgatagcacaactgttagaagacctagaagaatacagcgttgctatgactcagtggtgttgaatgcagaccatctaccagctggggaaagaatcaattataaacaggaataaaggga

SEQ ID NO: 198646 - DNA, 120 bp, Artificial Sequence
  ENSG00000113712_45 (sequence is synthesized)
ttcattcctcattttaactgatgttacagtgaagatgggttcttgaactcttggaagcctggatgagccacctaatctgcaagataaaaaccaaagaccaatgcgtattggggaaaagaa

SEQ ID NO: 198647 - DNA, 120 bp, Artificial Sequence
  ENSG00000113712_46 (sequence is synthesized)
acgcactcgccagggagtccagggagctagttttcctggcttacgaacctcgtccgctgtctccctaaaagggtcaagaacccgatagaaaggaagtggcagtgaagctagaatctcaga

SEQ ID NO: 198648 - DNA, 120 bp, Artificial Sequence
  ENSG00000113712_47 (sequence is synthesized)
ctatactgcagcttcaatctatctgccaccttgactcttccctttatgacagcccatgccccaaaatggtttgcccctgcctggtggtatggtcaggaaaaagactacaatgtactagtc

SEQ ID NO: 198649 - DNA, 120 bp, Artificial Sequence
  ENSG00000113712_48 (sequence is synthesized)
gtagccaagaaccaagtgacgttacagggaaaaaattgaatacaaaattgggtaattcatttctaacagtgttagatcaaggaggtggttttaaaatacataaaaatttggctctgcgtt

SEQ ID NO: 198650 - DNA, 120 bp, Artificial Sequence
  ENSG00000113712_49 (sequence is synthesized)
tacgagagcaagctctataagattcttcaaggtggggttggcatcccccacatacgagttttgttcttgttgcccaggcaggagtgcaatagcgtgatctcggctcactgcaacctcggc

SEQ ID NO: 198651 - DNA, 120 bp, Artificial Sequence
  ENSG00000113712_50 (sequence is synthesized)
caagtagctggattacagatgatcagtagaattgaatatgtgcatacaaagaattttatacacagagacattaaaccagataacttcctaatgggtattgggcgtcactgtaataagtta

SEQ ID NO: 198652 - DNA, 120 bp, Artificial Sequence
  ENSG00000113712_51 (sequence is synthesized)
cagcttttcacttcttcttgtagtcgcgacttggagttttgctaatgtctccctcctttcctaagtgacattgaatccgtagggatgttgatgccatcatcccctctttcccctgcagga

SEQ ID NO: 198653 - DNA, 120 bp, Artificial Sequence
  ENSG00000113712_52 (sequence is synthesized)
ctcttgggattttgggtcatttttttaacaactgcatcttttttactcattcattaaccccctttccaaaaatttggtgttgggaatataatataatcaatcaatccaaaatcctagacc

SEQ ID NO: 198654 - DNA, 120 bp, Artificial Sequence
  ENSG00000113712_53 (sequence is synthesized)
taacacttgttgatttctaataatgaatttggttagccatattttgactttatttcagactaacaatgttaagattttttattttgcatgttaatgctttagcatttaaaatggaaaatt

SEQ ID NO: 198655 - DNA, 120 bp, Artificial Sequence
  ENSG00000113712_54 (sequence is synthesized)
gtgaacatgttgtaatttcaagaggtgagtttggcattacccccaaagtgtctatcttctcagttgcagagcatctcattttctctcttaaatgctcaaataaatgcaaagctcagcaca

SEQ ID NO: 198656 - DNA, 120 bp, Artificial Sequence
  ENSG00000113712_55 (sequence is synthesized)
gaggaaggagatggcatagtgacagtgtttgtgatctctgcagcagatgtgacacgaaattgttgaattacactatgtaaaatccttcgtagttcttttaaaagtgttaattactctttc

SEQ ID NO: 198657 - DNA, 120 bp, Artificial Sequence
  ENSG00000113712_56 (sequence is synthesized)
tcctaaacatacttcagtaacatcttaggacaattcactggagaaatgttgatccctggctggaatgtcataccattgacccatttgaagagttaaagctggatttgactgctctattct

SEQ ID NO: 198658 - DNA, 120 bp, Artificial Sequence
  ENSG00000113712_57 (sequence is synthesized)
accaggaatattgttagggtagccttttaccagtttctaaacaattgtaatcatttattgactcagcaattcctcagataacaggtcaaaagatgtacagatacattctgaagttttctt

SEQ ID NO: 198659 - DNA, 120 bp, Artificial Sequence
  ENSG00000113712_58 (sequence is synthesized)
gctattaaaggcacaagagtttccttgtattttgactgacaatgtagcatgtttccattttagtttgttagtgatggtggttttccctttgaaagccatttggtatattcaccataacaa

SEQ ID NO: 198660 - DNA, 120 bp, Artificial Sequence
  ENSG00000113712_59 (sequence is synthesized)
ttagtttaatatgattacataagaaaactatgataaaacccagcaattttagtagttgtgaaaatacgttttttaaatcatgtttaagaagaattgcaagacttgaaaccaaatcctgat

SEQ ID NO: 198661 - DNA, 120 bp, Artificial Sequence
  ENSG00000113712_60 (sequence is synthesized)
gggggaattctgtttaatcctgtttaatctgtttaatttctgtttaatccttagtttcttaacctgcatagcttatcctgtattgtactttttttcttttttaaactcccaaacaagaag

SEQ ID NO: 198662 - DNA, 120 bp, Artificial Sequence
  ENSG00000113712_61 (sequence is synthesized)
cttgaaacttttcctgtattttaaaattgaaatttggtcacagggtatagtcagatttttattaaggtttggtttgacaacctttaaaagaaaggtttacctcgctaatacttcttaata

SEQ ID NO: 198663 - DNA, 120 bp, Artificial Sequence
  ENSG00000113712_62 (sequence is synthesized)
acatgcatcaaatgatattccctatggtgaagtatattctcaaagttatgttatctttcatttttggcatttggtgcttatggacttagtacccaggcaacaaagatctattatgcacct

SEQ ID NO: 198664 - DNA, 120 bp, Artificial Sequence
  ENSG00000113712_63 (sequence is synthesized)
actctcttgtatgttcgctattatttcccaaaaaaaaaaaggggcatatatgcataagaaataaatattagaattattttgtttctcccacaaagcccatgggagatggcccaacaaatg

SEQ ID NO: 198665 - DNA, 90 bp, Artificial Sequence
  ENSG00000113712_64 (sequence is synthesized)
gtttctcccacaaagcccatgggagatggcccaacaaatgtttaaaaagtaaaagaagctgggcacggtggctcccacctgtaaccccca

SEQ ID NO: 198666 - DNA, 120 bp, Artificial Sequence
  ENSG00000113716_0 (sequence is synthesized)
gatccgtggtgtgccgctactgccggtgcagccgccaaaccggtgcctcggtgacgaccgtgtccctgccgtcttcctcgagctccccggggcttgacccccggggccctcggcaggcat

SEQ ID NO: 198667 - DNA, 120 bp, Artificial Sequence
  ENSG00000113716_1 (sequence is synthesized)
cggtgaggagcctgcggagcgaacctgtgctcctattcttgcccttcaggaccccatatcgcgactccgaggaggggaagcgagaggggctgtcgcgactccgcgccgtgtgtcgccggg

SEQ ID NO: 198668 - DNA, 120 bp, Artificial Sequence
  ENSG00000113716_2 (sequence is synthesized)
cggggccgcggggccggggctccttcagcccccgggatgcgcgcgcgagccctcgcctccacttccttgttgctgctgtcacgactggagccgcctctcgccgacagcggggagcgcgag

SEQ ID NO: 198669 - DNA, 120 bp, Artificial Sequence
  ENSG00000113716_3 (sequence is synthesized)
tgcgccagccatccccctcgtccagccgccgggccaagcgcctccgggaatgtgagcggcgcagcttgcacgctcctccggccatggacgcatcatatgatggtactgaggtaactgtcg

SEQ ID NO: 198670 - DNA, 120 bp, Artificial Sequence
  ENSG00000113716_4 (sequence is synthesized)
tgatggaggaaattgaggaagcctattgttacacctctcctgggccacccaagaagaagaaaaagtataaaatacatggagaaaagacaaagaaacccaggtctgcttaccttctgtact

SEQ ID NO: 198671 - DNA, 120 bp, Artificial Sequence
  ENSG00000113716_5 (sequence is synthesized)
attacgacatctacctgaaagtgcagcaggagctcccccacctccctcagtctgagatcaataagaagattagtgagagttggaggcttctcagcgtggccgagaggagttactacttgg

SEQ ID NO: 198672 - DNA, 120 bp, Artificial Sequence
  ENSG00000113716_6 (sequence is synthesized)
agaaagccaaactagagaaggaaggtttggatcctaactctaagctctctgcactgactgctgtggttccggacatcccaggtttccgcaagatcctcccacgctcagattatatcatca

SEQ ID NO: 198673 - DNA, 120 bp, Artificial Sequence
  ENSG00000113716_7 (sequence is synthesized)
tccccaagagcagcctgcaggaggaccggagctgccctcagctagagctatgtgtggctcagaaccagatgtccccgaaaggacctcctcttgtgtccaacactgccccggagacagtgc

SEQ ID NO: 198674 - DNA, 120 bp, Artificial Sequence
  ENSG00000113716_8 (sequence is synthesized)
ccagccatgcaggcatggcagagcagtgcctggctgtggaggccctggctgaggaggtgggagcccttacccagtcaggtgctgtacaggagattgccacctcagagatcctcagccagg

SEQ ID NO: 198675 - DNA, 120 bp, Artificial Sequence
  ENSG00000113716_9 (sequence is synthesized)
atgtgctcctagaggacgcttccctagaagtaggggagagccaccaaccttaccagacaagcctggtaattgaagagaccttggtgaatggctcaccagacctccccactggaagcctgg

SEQ ID NO: 198676 - DNA, 120 bp, Artificial Sequence
  ENSG00000113716_10 (sequence is synthesized)
ctgtgccccacccccaggttggggagagtgtatcagtggtaacagtcatgagggattccagtgagagtagctcctctgcaccagccacacagttcatcatgttgcctctgcctgcctact

SEQ ID NO: 198677 - DNA, 120 bp, Artificial Sequence
  ENSG00000113716_11 (sequence is synthesized)
cggttgtggagaaccccacctccatcaaactgaccactacatatacccgccggggccatgggacatgcaccagcccagggtgctcctttacatatgtcaccaggcacaagccacctaagt

SEQ ID NO: 198678 - DNA, 120 bp, Artificial Sequence
  ENSG00000113716_12 (sequence is synthesized)
gccctacctgtggtaacttcctaggagggaagtggatcccaaaggaaaagccagccaaagtaaaagtggaattggcttctggcgtctcttccaaaggctctgtggtgaaaagaaatcagc

SEQ ID NO: 198679 - DNA, 120 bp, Artificial Sequence
  ENSG00000113716_13 (sequence is synthesized)
aacctgtcaccactgagcaaaattcctctaaggaaaatgcctccaaactgactctggagaattcggaagctgtaagccagctcctgaacgtagctcctcccagagaagtaggtgaggaga

SEQ ID NO: 198680 - DNA, 120 bp, Artificial Sequence
  ENSG00000113716_14 (sequence is synthesized)
gtgagtgggaggaagtgatcatctccgatgcccatgttttggttaaggaagctcccgggaattgtggtacagcagtcactaagacgccagtcgtcaaaagtggtgtgcagcctgaggtca

SEQ ID NO: 198681 - DNA, 120 bp, Artificial Sequence
  ENSG00000113716_15 (sequence is synthesized)
ctctggggacaactgacaatgacagtcctggagcagacgtaccaacaccatccgaggggacaagtacctccagtccactccctgctcctaaaaaacctacaggagctgacctgcttaccc

SEQ ID NO: 198682 - DNA, 120 bp, Artificial Sequence
  ENSG00000113716_16 (sequence is synthesized)
ctgggtccagagctccagagcttaaaggcagagcacggggcaagccctcattactggctgcagcaagacccatgagagcaattttgccagccccagttaacgtggggcgaggcagcagca

SEQ ID NO: 198683 - DNA, 120 bp, Artificial Sequence
  ENSG00000113716_17 (sequence is synthesized)
tgggactgcccagggccaggcaggccttttccctgagtgataagactccctctgtgaggacttgtggtctgaagccaagcacactgaagcagctgggccagcccattcaacagccatctg

SEQ ID NO: 198684 - DNA, 120 bp, Artificial Sequence
  ENSG00000113716_18 (sequence is synthesized)
gccctggtgaggtgaagctaccaagtggcccatccaacaggacttctcaggtgaaagttgtggaggtcaagcccgatatgtttcctccatataagtacagctgcactgtcacattggatt

SEQ ID NO: 198685 - DNA, 120 bp, Artificial Sequence
  ENSG00000113716_19 (sequence is synthesized)
tgggcctggctacatcaagaggccggggaaagtgcaagaatccctcttgtagctatgtctacaccaacaggcacaaacctcgaatttgtcccagctgtggtgttaaccttgccaaagacc

SEQ ID NO: 198686 - DNA, 120 bp, Artificial Sequence
  ENSG00000113716_20 (sequence is synthesized)
ggactgagaaaaccaccaaggctatcgaggtgagctcaccactcccagatgtactgaatgccacagagcccctgagcacagcccagagggagatccagcgccagtccacactgcagctgc

SEQ ID NO: 198687 - DNA, 120 bp, Artificial Sequence
  ENSG00000113716_21 (sequence is synthesized)
gtgagtgaggagacagtcaccatcgagcaaacctcttggtcgaattattatgagtctccgtccacgcagtgccttctctgtagcagcccattattcaaagggggacaaaactccctggct

SEQ ID NO: 198688 - DNA, 120 bp, Artificial Sequence
  ENSG00000113716_22 (sequence is synthesized)
gggccccaggagtgctggctgctgacagccagccgtctgcagacagtgactgcccaggtgaagatgtgtctgaacccccattgtctggccctgcacagcttcatagacatctacacaggt

SEQ ID NO: 198689 - DNA, 120 bp, Artificial Sequence
  ENSG00000113716_23 (sequence is synthesized)
ctctttaatgtggggaacaagctgctggtaagcctggacttgctttttgcaatcagaaatcagatcaagctcggagaggaccccagagtgtccatcaatgttgttctgaagtcggtgcag

SEQ ID NO: 198690 - DNA, 120 bp, Artificial Sequence
  ENSG00000113716_24 (sequence is synthesized)
gagcagacagagaagactctgacctcggaggagctgagccagctgcaggagctgctgtgcaatggctattgggcctttgagtgcctcactgtccgagactacaatgacatgatctgtggc

SEQ ID NO: 198691 - DNA, 120 bp, Artificial Sequence
  ENSG00000113716_25 (sequence is synthesized)
atctgtggtgtggcccccaaagtggaaatggctcagaggagtgaagagaatgtgctagcactgaagagcgtggagttcacctggcctgaattcctgggctctaatgaggtaaatgtggag

SEQ ID NO: 198692 - DNA, 120 bp, Artificial Sequence
  ENSG00000113716_26 (sequence is synthesized)
gacttttgggccacgatggagacagaggtgattgagcaggtggcatttcctgccagcatccctatcaccaaatttgatgcgtctgttattgcccccttcttcccaccactcatgagagga

SEQ ID NO: 198693 - DNA, 120 bp, Artificial Sequence
  ENSG00000113716_27 (sequence is synthesized)
gctgtggtcgtcaacactgagaaagacaaaaacctggatgtgcagccagtacctggcagtggcagtgccttggtgaggctgctccaggagggcacctgcaagcttgatgagattggctcc

SEQ ID NO: 198694 - DNA, 120 bp, Artificial Sequence
  ENSG00000113716_28 (sequence is synthesized)
tacagtgaagagaagctgcagcacctgctaaggcagtgtggaatcccctttggggcagaagactccaaggaccagctctgcttctccttgttggccctctacgaatctgtacagaatgga

SEQ ID NO: 198695 - DNA, 120 bp, Artificial Sequence
  ENSG00000113716_29 (sequence is synthesized)
gctagagctatacggcccccacgtcacttcacaggtggtaaaatctacaaggtgtgcccccatcaggtggtctgcggctccaagtatcttgtgcgaggtgagagtgcccgtgaccatgtg

SEQ ID NO: 198696 - DNA, 120 bp, Artificial Sequence
  ENSG00000113716_30 (sequence is synthesized)
gacctgcttgcctcttcccgccactggccgcctgtctatgtggtagatatggccacgtcagtggccctgtgtgctgacctctgctacccagagctgactaaccagatgtgggggaggaac

SEQ ID NO: 198697 - DNA, 120 bp, Artificial Sequence
  ENSG00000113716_31 (sequence is synthesized)
cagggctgtttctctagccccacagagccacctgtgagtgtgtcctgcccagagctcttggaccagcattatactgtggacatgacagaaactgagcactctatccagcacccagtcacc

SEQ ID NO: 198698 - DNA, 120 bp, Artificial Sequence
  ENSG00000113716_32 (sequence is synthesized)
aagactgccacgcggcgcatcgtccatgcaggcctacagcccaatcctggtgaccccagtgctgggcaccactccttggccctgtgccctgaattggcaccttacgcaaccatcctggcc

SEQ ID NO: 198699 - DNA, 120 bp, Artificial Sequence
  ENSG00000113716_33 (sequence is synthesized)
tccatcgtggacagcaaaccaaacggtgtccgccagcggcccattgccttcgacaatgccactcactattacctctacaaccgcctcatggacttcctcaccagccgcgaaattgtcaat

SEQ ID NO: 198700 - DNA, 120 bp, Artificial Sequence
  ENSG00000113716_34 (sequence is synthesized)
cgtcagatccatgacattgtacagagctgccagcctggtgaggtggtcattcgtgacaccctctaccgccttggggttgctcagatcaagacagagacagaggaggagggtgaggaagag

SEQ ID NO: 198701 - DNA, 120 bp, Artificial Sequence
  ENSG00000113716_35 (sequence is synthesized)
gaggtggccgcagtggcagaataagccaggctgttgtacagggactacaccatctctcaagccatagtaaggcccttgcctgaggcagagctatccaggggacctgcagaagtggtctcc

SEQ ID NO: 198702 - DNA, 120 bp, Artificial Sequence
  ENSG00000113716_36 (sequence is synthesized)
tgtggggagggcctctgactgctgggactgaccaaagagcttccattccctgagcatggtgggacccagggtcctcagttctcaaccctccaggggtcaggagtggtaccaggaaacctc

SEQ ID NO: 198703 - DNA, 120 bp, Artificial Sequence
  ENSG00000113716_37 (sequence is synthesized)
ttctggccccgagagagcacttgggggacacggtatgtttaatggaggggaggctgagggaaaggctcgtagctggtgggttccgtggggcctgcggtgtgggtcagggtggaggtcctg

SEQ ID NO: 198704 - DNA, 120 bp, Artificial Sequence
  ENSG00000113716_38 (sequence is synthesized)
ggtgggctaaggcgtgagccccagcactaggtgggaaggctgctgaggtctctcccacccctgaggagccctggtttcagccccctcagtctgatgaattgcttagcctgttgcctttga

SEQ ID NO: 198705 - DNA, 120 bp, Artificial Sequence
  ENSG00000113716_39 (sequence is synthesized)
ctaggggcctgggtggcctcattaactctaggggtccctttgggctcttgattctccctgaaggagggatgcatttctctcttgctcttcctgtacccacatttgggggaagctgaggag

SEQ ID NO: 198706 - DNA, 120 bp, Artificial Sequence
  ENSG00000113716_40 (sequence is synthesized)
ggaggaacagtcagccacagctctcttccagcactgtcctctccaccccaagctttgaggaagagcatccccttcctcctttccctggccactgctgctgcagccaatatcctctctggg

SEQ ID NO: 198707 - DNA, 120 bp, Artificial Sequence
  ENSG00000113716_41 (sequence is synthesized)
cctgggaccctctccacagaggggatgtggtccctggtcatgacataacctagcagcagtaggaaaaactcccttctatgaaggggaagcagactgggccataaggaaacagcaggactg

SEQ ID NO: 198708 - DNA, 120 bp, Artificial Sequence
  ENSG00000113716_42 (sequence is synthesized)
gctcaagtgcccaaggtttgtttagggcctgggaattggccatgtgttaatttattgagtggagtaggtggctttttttccctccctcttcccccaacaagaataaagtttattaaatta

SEQ ID NO: 198709 - DNA, 120 bp, Artificial Sequence
  ENSG00000113716_43 (sequence is synthesized)
atgagagggaaagactgagacaggctgaggtcaggccttgaacgtcgtgctgaggagagggtggtattgtaggcttcccagcgcccgacgtggctctgaaaggtgaggcggggcctagat

SEQ ID NO: 198710 - DNA, 120 bp, Artificial Sequence
  ENSG00000113716_44 (sequence is synthesized)
ccctcacgctcagcacagccccgcccctgttacctgaacgccccacagcagtgcccgggggctgagcggccggggcgtcccaccgccggcagccacagcttcctcctccgcccgggacct

SEQ ID NO: 198711 - DNA, 120 bp, Artificial Sequence
  ENSG00000113716_45 (sequence is synthesized)
ctggccggaagcagtccgttcgccttactagacccgctccaagcctttgagcagttcgtgtgggtccgctcccaagctagggctgggctgttgcgcttgcgccaggggtcgcatgcagtc

SEQ ID NO: 198712 - DNA, 120 bp, Artificial Sequence
  ENSG00000113716_46 (sequence is synthesized)
acttgagttccacctctgccagcactgggggagggcttggtgcagagctggcttccactgtttgctgttttgtgggcctagccttggcctctggtgactggcggcagcaccctcccacca

SEQ ID NO: 198713 - DNA, 120 bp, Artificial Sequence
  ENSG00000113716_47 (sequence is synthesized)
aaaaagcaaattttgtagatagtggtaaagagggagaaacaaccatgattgtcctcttaccctgtgacattttagtgaatagtctttcagacatctttctatgcaaagttgttcaaccat

SEQ ID NO: 198714 - DNA, 120 bp, Artificial Sequence
  ENSG00000113716_48 (sequence is synthesized)
gtatttatatgtataaaagctattatgtgcttttataactcagtagtagttgtaaatctgattcatggtgtttctaatacatggtattagaaactgcacagaagcatgtggcaaggcctg

SEQ ID NO: 198715 - DNA, 120 bp, Artificial Sequence
  ENSG00000113716_49 (sequence is synthesized)
gacttgaacatgacactcagcctttggtgggcttgtgactgccaactggcagtccagagggctcatttggagaatagctctacaaattccccgggaaagcattccctcaagtcgtttcag

SEQ ID NO: 198716 - DNA, 80 bp, Artificial Sequence
  ENSG00000113719_0 (sequence is synthesized)
cgggaggcgagtggcgagtggcgagtggcgagtgtcaggggggcggccggcgggggcggggcggccggaggaggcgttgg

SEQ ID NO: 198717 - DNA, 120 bp, Artificial Sequence
  ENSG00000113719_1 (sequence is synthesized)
ggcccgcctggcctgcagcgctcccacccccggcggcggcacgatgccctttgacttcaggaggtttgacatctacaggaaggtgcccaaggaccttacgcagccaacgtacaccggggc

SEQ ID NO: 198718 - DNA, 120 bp, Artificial Sequence
  ENSG00000113719_2 (sequence is synthesized)
cattatctccatctgctgctgcctcttcatcctcttcctcttcctctcggagctcaccggatttataacgacagaagttgtgaacgagctctatgtcgatgacccagacaaggacagcgg

SEQ ID NO: 198719 - DNA, 120 bp, Artificial Sequence
  ENSG00000113719_3 (sequence is synthesized)
tggcaagatcgacgtcagtctgaacatcagtttacccaatctgcactgcgagttggttgggcttgacattcaggatgagatgggcaggcacgaagtgggccacatcgacaactccatgaa

SEQ ID NO: 198720 - DNA, 120 bp, Artificial Sequence
  ENSG00000113719_4 (sequence is synthesized)
gatcccgctgaacaatggggcaggctgccgcttcgaggggcagttcagcatcaacaaggtccccggcaacttccacgtgtccacacacagtgccacagcccagccacagaacccagacat

SEQ ID NO: 198721 - DNA, 120 bp, Artificial Sequence
  ENSG00000113719_5 (sequence is synthesized)
gacgcatgtcatccacaagctctcctttggggacacgctacaggtccagaacatccacggagctttcaatgctctcgggggagcagacagactcacctccaaccccctggcctcccacga

SEQ ID NO: 198722 - DNA, 120 bp, Artificial Sequence
  ENSG00000113719_6 (sequence is synthesized)
ctacatcctgaagattgtgcccacggtttatgaggacaagagtggcaagcagcggtactcctaccagtacacggtggccaacaaggaatacgtcgcctacagccacacgggccgcatcat

SEQ ID NO: 198723 - DNA, 120 bp, Artificial Sequence
  ENSG00000113719_7 (sequence is synthesized)
ccctgcaatctggttccgctacgacctcagccccatcacggtcaagtacacagagagacggcagccgctgtacagattcatcaccacgatctgtgccatcattggcgggaccttcaccgt

SEQ ID NO: 198724 - DNA, 120 bp, Artificial Sequence
  ENSG00000113719_8 (sequence is synthesized)
cgccggcatcctggactcatgcatcttcacagcctctgaggcctggaagaagatccagctgggcaagatgcattgacgccacacccagcctaatggccgaggaccctgggcatcgccagc

SEQ ID NO: 198725 - DNA, 120 bp, Artificial Sequence
  ENSG00000113719_9 (sequence is synthesized)
cttgcctccagtgccctgtctcctttggccctcaatctggtcccaaatctggctgtgtcccaaagggtgtgtgggaagtggggggaaagtagaggatggctcgatgttttgcagctacct

SEQ ID NO: 198726 - DNA, 120 bp, Artificial Sequence
  ENSG00000113719_10 (sequence is synthesized)
cttttccccgtgtttctttttagacaaattacactgcctgaagttgcagttcccctttccctggggagccccaagaacagagtcaggcaaggggtggggagtccagggatcttggggacc

SEQ ID NO: 198727 - DNA, 120 bp, Artificial Sequence
  ENSG00000113719_11 (sequence is synthesized)
cctcctaggagagctgcagtctcttccctcaggggaacatcccagaatgcatatcgatcagctctcagccaggcttcgacaatctcgcagcccccactaggtggacacattaatgatttg

SEQ ID NO: 198728 - DNA, 120 bp, Artificial Sequence
  ENSG00000113719_12 (sequence is synthesized)
tgccccagaggcaccagacctgggctttcagctttgggaccaggctgcccaaaggtactcctttatacacccggcaccttccacgaaagatggtacttcccaagcaagcccctatgattt

SEQ ID NO: 198729 - DNA, 120 bp, Artificial Sequence
  ENSG00000113719_13 (sequence is synthesized)
gtcactatagatggaaccctgacttctgccccatcccttcctgcccaacctagaacccaggcctcaagtctttaccccacccctttcttgttcttccaagaagcagatgcccagttgctc

SEQ ID NO: 198730 - DNA, 120 bp, Artificial Sequence
  ENSG00000113719_14 (sequence is synthesized)
agcagcagcggtagagacttgaatctgcccaccagtcacaaggcgggtcacagattcctcttcctctcttctcctcgttcctctgaaccctccaccaatgtgcctcagcctgtgtgctgt

SEQ ID NO: 198731 - DNA, 120 bp, Artificial Sequence
  ENSG00000113719_15 (sequence is synthesized)
gtggcaacagcattctggttcccactgccaagatctcccaccactctgctgggatctgcagtggcagggagtgggggttgtgtaaaggggaagtcatcttttgagatccagatagacatg

SEQ ID NO: 198732 - DNA, 120 bp, Artificial Sequence
  ENSG00000113719_16 (sequence is synthesized)
gtttgtgcacttacgtccagatgggaagcatccttcctgcaaccctaaaataatcatgcagcctctcagacggacgccatcggtcccaaggccttaggtggaggaagcaaagcaggccag

SEQ ID NO: 198733 - DNA, 120 bp, Artificial Sequence
  ENSG00000113719_17 (sequence is synthesized)
gcctgtcctgtccgtggacctctaccttctggactccctacgggtgcagagcacttgggtttctctacagccatcgtggcccacttgacactgtgctcctccatcagctggtcacatgcc

SEQ ID NO: 198734 - DNA, 120 bp, Artificial Sequence
  ENSG00000113719_18 (sequence is synthesized)
aacacgttcccagcccctgaggcagctccagggtgccccacctgctcctgaggtgggtccctaccctgctgctcctcttcatcctttcccttttgtcctgaaagggaggagcaatggtcc

SEQ ID NO: 198735 - DNA, 120 bp, Artificial Sequence
  ENSG00000113719_19 (sequence is synthesized)
aggcattaattccacccagggaattttagctatgccctcatgtcccagggagagagccacacgcctgttttccatttatagcaagattgtttgcatacttttgtaatgaaggggagtgtc

SEQ ID NO: 198736 - DNA, 120 bp, Artificial Sequence
  ENSG00000113719_20 (sequence is synthesized)
cagtggaaggatttttaaaattatcttatggatagctcaagtctctgccatttgtaatttttggctctaagctccgattggagacgcttctccttgtgcatgtgagttgactgatgttgt

SEQ ID NO: 198737 - DNA, 120 bp, Artificial Sequence
  ENSG00000113719_21 (sequence is synthesized)
gagtgtaaatgcatttggttatttctggtatcggtggccacttggatggatttttttacattctgttccccagttacaggaaggagtccctttggtgtgtgaatatgtgtgcctgtagag

SEQ ID NO: 198738 - DNA, 120 bp, Artificial Sequence
  ENSG00000113719_22 (sequence is synthesized)
ggtggggcagggtggggtggggatggaaatgtgtggcatgcacatgagttgaaattcttttatgcatttttttgaagaaaaaaaaaaaaacaactctgaggacataggggatgtcagttt

SEQ ID NO: 198739 - DNA, 120 bp, Artificial Sequence
  ENSG00000113719_23 (sequence is synthesized)
cctatggaagagacacctctgacccgttattcttataatcaaaatctgaagggaaaaaaatgttttagttctttccccactcgttgggttcaactagattaaaaggctgattttcagaaa

SEQ ID NO: 198740 - DNA, 120 bp, Artificial Sequence
  ENSG00000113719_24 (sequence is synthesized)
agaagaggactgactcgactctgcgaccaggcttagaacccacaggcctaaatttctgtgttattttagctctgtagtccgtgacccgagattgtggaaggcccatgagcttcctccctg

SEQ ID NO: 198741 - DNA, 120 bp, Artificial Sequence
  ENSG00000113719_25 (sequence is synthesized)
gcctcccacgactacatcctgaagattgtgcccacggtttatgaggacaagagtggcaagcagcggtactcctaccagtacacggtggccaacaaggtgcgcgggcggtggctgggccga

SEQ ID NO: 198742 - DNA, 120 bp, Artificial Sequence
  ENSG00000113719_26 (sequence is synthesized)
gctgtgtgcggcggcgccctctgctgacggagagcagagatgacaggcggctgcaccgacgcactttcttctgattcctttctggaggcctttcctgggggttagcttgggccaggcgct

SEQ ID NO: 198743 - DNA, 120 bp, Artificial Sequence
  ENSG00000113719_27 (sequence is synthesized)
gtccctgggtaaaattgaaaagcccagtccctgccatgtggcagtctcagagtcaaggagaacagatctaaccaggagatagggtgtgatgcgtttgacaaagagcaggtagtctctgtc

SEQ ID NO: 198744 - DNA, 120 bp, Artificial Sequence
  ENSG00000113719_28 (sequence is synthesized)
ctacaaaggtcctggggttgcaggtctcaaacagccctgcatctggtccgagtccttcagacacagacccctgggtgctcaacacagacagacactcctgctctcagggcacaggcactt

SEQ ID NO: 198745 - DNA, 120 bp, Artificial Sequence
  ENSG00000113719_29 (sequence is synthesized)
tacccaaactcatgaggctactgagtcacaccaagatggctgttgattaatttgctgttgattgacaggggtgtccccaggaccccaacactcaaagtcatggagaagacgccaggcctt

SEQ ID NO: 198746 - DNA, 120 bp, Artificial Sequence
  ENSG00000113719_30 (sequence is synthesized)
agtgggcagcagagcatggtcagagtctgcagagtgggatgacccagcaattagtggtctcaagacaagacagccttgggcttccctgggggtatcccaccaatgggacatgaatacttg

SEQ ID NO: 198747 - DNA, 120 bp, Artificial Sequence
  ENSG00000113719_31 (sequence is synthesized)
aaacctgttggttgaaatgcccctgctagaccctggcggatgggtttttcccacttaccaccaggactgtcctttttcttctgttccaaggctgcccaaaccccttataagtgatacctg

SEQ ID NO: 198748 - DNA, 120 bp, Artificial Sequence
  ENSG00000113719_32 (sequence is synthesized)
tttagctcagttaattataacaacagtaggaggcatagctgtcactcattgagtacttcctgggggctagacatgctaagctctcttcttccgtcttctcaatcatcatgacagctctga

SEQ ID NO: 198749 - DNA, 120 bp, Artificial Sequence
  ENSG00000113719_33 (sequence is synthesized)
tgttgagactgttattgagcccattttgttgatttgaccattgaggcactgagaggtggttgtagagctataaagtggctgagtggggattagaacaggttttccttgggctccagagcc

SEQ ID NO: 198750 - DNA, 120 bp, Artificial Sequence
  ENSG00000113719_34 (sequence is synthesized)
tggcttcttgatcacctcacgcctcggtctgaggaaggggctgtgagtctgcccacctgcgagctgctctctgtccaatgacttagtccctctgttctgactcaccctaaattgatgttc

SEQ ID NO: 198751 - DNA, 120 bp, Artificial Sequence
  ENSG00000113719_35 (sequence is synthesized)
ccgggagcccctgtttcttttattcactgtttcacagggggcatctcattgtaaccctcacatgctcatagcagctaacagatggaaaagcacagatgcaagctcaggaccacgctgcag

SEQ ID NO: 198752 - DNA, 120 bp, Artificial Sequence
  ENSG00000113719_36 (sequence is synthesized)
ttcaaattccagctcagtcattcactagctattgaccccggacatgtcacatagccactgtgtgcctcagtttactcattcataaaatggagatgatactttataagagtgctgtcacat

SEQ ID NO: 198753 - DNA, 120 bp, Artificial Sequence
  ENSG00000113719_37 (sequence is synthesized)
gaggcaatgttttcaaaaatgcctagcccaccaaaaaaaaaaagcctttaggtaagtgatactgactgctgctatttttcactctttttctctgtccctcagctctgggttgtgacccag

SEQ ID NO: 198754 - DNA, 120 bp, Artificial Sequence
  ENSG00000113719_38 (sequence is synthesized)
acagtcatcctgccccagcagctctcctggagaaagctggtcttcccttgcacaaagctccttttcccaatgctttggcaaggcccagcagccaaatacagcttgcttagcttctctatg

SEQ ID NO: 198755 - DNA, 120 bp, Artificial Sequence
  ENSG00000113719_39 (sequence is synthesized)
gctgcagccgcactctgccctgggagcaggcagcagcgacccagcgggaggtcagggctcagtgttacttacccccggagtggcctgggctcctcaggctcagcatgtggggttgggggt

SEQ ID NO: 198756 - DNA, 120 bp, Artificial Sequence
  ENSG00000113719_40 (sequence is synthesized)
accccagtggttcaatttggcctccagttgttgcagactttagcaccttgaagtgcccaaactggagagatcccagggatcatcatcccaggcccatccgtgtttagatggggaagccaa

SEQ ID NO: 198757 - DNA, 120 bp, Artificial Sequence
  ENSG00000113719_41 (sequence is synthesized)
gtccctgagggagggaggggctggcccaaggatgcactgttagctcagcctcgtagtatccttagtccctgctgtgtgcattctcaggaaggttggtggcagggcggggccttctggctt

SEQ ID NO: 198758 - DNA, 120 bp, Artificial Sequence
  ENSG00000113719_42 (sequence is synthesized)
tgcagttcagtctattcctctgaagaagctagcccactccccacgtggcatttacacccatcacacacacacacacactgggactcctgcttattcatcatgtgtggctcagaatgtccc

SEQ ID NO: 198759 - DNA, 120 bp, Artificial Sequence
  ENSG00000113719_43 (sequence is synthesized)
ctccccagtctcccagatgccgcccgggagaatgggtcattcattcattcccctcaactctccatgttcctccatcccacatgcatgatgtcacagtgttagggatattcttatgtcttc

SEQ ID NO: 198760 - DNA, 120 bp, Artificial Sequence
  ENSG00000113719_44 (sequence is synthesized)
ctccttctgcagactgcgactccctctgggtaaagggcaggacttgctcacctcggggtccccagcagccagccatgggccaccacagtggaggcgttcagcaaaccattgttgaataaa

SEQ ID NO: 198761 - DNA, 120 bp, Artificial Sequence
  ENSG00000113719_45 (sequence is synthesized)
tgaatggatttcgcgtggcccagaggttgaaggaggcaatagccaaaaattgcacttttccttttacagctctgctttctaatttattttctgattctggtgctgcttgcagctcacttg

SEQ ID NO: 198762 - DNA, 120 bp, Artificial Sequence
  ENSG00000113719_46 (sequence is synthesized)
gtcaatttctaaacaaccaagggtatcaaaaatgcccagctgtgcacggcagagttcagggcctccaggggaagggatgtgagagagggagtgggggagtctggcttcgtggggcagaga

SEQ ID NO: 198763 - DNA, 120 bp, Artificial Sequence
  ENSG00000113719_47 (sequence is synthesized)
ggcccctttccttggcacccctcacctgttctcgctgaaacaggaggcagcctgcagggctaggggctctggctgggcacaggaggcttcgaccccaaggatgctgagaaatgttgtcag

SEQ ID NO: 198764 - DNA, 120 bp, Artificial Sequence
  ENSG00000113719_48 (sequence is synthesized)
aaacacatcagtatcgatgacgttttgtctagaaagtattttccagaggggaatgccctgaaatccatttaattcctgaagcaaatctccatatggttccactagatgtttaggattttc

SEQ ID NO: 198765 - DNA, 120 bp, Artificial Sequence
  ENSG00000113719_49 (sequence is synthesized)
tccagctttttattgttatggaaattattcttagcagagtttatcctttaatgtgtaaattttgcaccaaagattgaactcatttttttttccaggtctaatttccagttatagctgctg

SEQ ID NO: 198766 - DNA, 120 bp, Artificial Sequence
  ENSG00000113719_50 (sequence is synthesized)
atagggtccgatttttccctttccttcctctctgttctctcttttttgccatggtctctaccacatccagttttctctagggcagattcaagctgatgttagttttcctttatgctgatt

SEQ ID NO: 198767 - DNA, 120 bp, Artificial Sequence
  ENSG00000113719_51 (sequence is synthesized)
atttctatcatgtctactgtttcctggcctcccattcagaaggtccttagggtcagaacaggagggtcagggtgcccttcttcacccaagaggcccaggaggtactgaagaagccagagt

SEQ ID NO: 198768 - DNA, 120 bp, Artificial Sequence
  ENSG00000113719_52 (sequence is synthesized)
tagctgaggtggaagagacagggtggctatccctacttcacagatttggaaactgagacctaaagataaatatggcattgggaggcccttatgcttctgtacttcttcatgcttgtaatg

SEQ ID NO: 198769 - DNA, 120 bp, Artificial Sequence
  ENSG00000113719_53 (sequence is synthesized)
atggttcaagatcaagggccttggctctttcatttcccgcaataactaggtcagtattagtcaggactctgttaccgaagatccagaaccagaccttgagctggcctgaggagtagaagg

SEQ ID NO: 198770 - DNA, 120 bp, Artificial Sequence
  ENSG00000113719_54 (sequence is synthesized)
cctcaggcatggctggatccagcctccaacattgccaggagtaggtctctatcttcggatctgctttccgctacactggcttcatcttcaagtagaatttaccagtagaaatggcctctt

SEQ ID NO: 198771 - DNA, 120 bp, Artificial Sequence
  ENSG00000113719_55 (sequence is synthesized)
tctcagtcattctaaccaagtcctagataggacagagctctcactggcccagctcaggcctcatgccatccttgtggcctgggaaatcaaatgctctggttggccaggcttaggccctgt

SEQ ID NO: 198772 - DNA, 120 bp, Artificial Sequence
  ENSG00000113719_56 (sequence is synthesized)
accctctctggtgtcaaccccatccaaaccgcagggacacagattgtgaggaatgaggtttctcaagagaaaaggcaggggccagctactggaagaggaaagagtgggtgccaggaggca

SEQ ID NO: 198773 - DNA, 120 bp, Artificial Sequence
  ENSG00000113719_57 (sequence is synthesized)
gaacagtgggatgttgtgacagggtctctgccttctcatctgtgaagtaagaacgatcatctctgttcctgccacctcccagggccttgtgggactcagaggagattgtgaaaggagaag

SEQ ID NO: 198774 - DNA, 120 bp, Artificial Sequence
  ENSG00000113719_58 (sequence is synthesized)
gactcagaggagattgtgaaaggagaagctgtttgcagatgtgaaaagccaagtaggacggggcacagtggctcacacttgtagtcccagcagtttgggaggctgaggcgggaggatcgc

SEQ ID NO: 198775 - DNA, 83 bp, Artificial Sequence
  ENSG00000113719_59 (sequence is synthesized)
tcgtgtgaaggcttgtctctaagaatcttcttaaattagctggatacggtggtatatgcacctgtagtcccagctacttagga

SEQ ID NO: 198776 - DNA, 120 bp, Artificial Sequence
  ENSG00000113719_60 (sequence is synthesized)
ttttaaggttagagtgagtcatgatcgtgccacttcactctagcctgggcaacagagcgagaccctttctctaaaaaacaaaaatccccagaaaacagacagagagatacaaagggtgtc

SEQ ID NO: 198777 - DNA, 120 bp, Artificial Sequence
  ENSG00000113719_61 (sequence is synthesized)
ataagtctggtgcttacatgagcctcagaacagttttttgctgttctctttgaccacataaaagttagaaactcctgttcaacaaacggcacataacataaagcaaaaatctcacacgca

SEQ ID NO: 198778 - DNA, 120 bp, Artificial Sequence
  ENSG00000113719_62 (sequence is synthesized)
gcctgggaaaagatacttgccatccaaatgggaaaggggtagccttcagaattcatatgtaaagaactcctacagatcagtaagaaaaagttaacaaccaaaaaagcagacaaggccaag

SEQ ID NO: 198779 - DNA, 120 bp, Artificial Sequence
  ENSG00000113719_63 (sequence is synthesized)
gaccagctcttcacagaggaggtgatattggcagtgaaaagatgcccaagttcactagaaattggagggatgggatttaaaacaagactcaattcaggccagacgtggtagctcacacct

SEQ ID NO: 198780 - DNA, 120 bp, Artificial Sequence
  ENSG00000113719_64 (sequence is synthesized)
ttgaggccaggagtttgaaaccagcctggtcaccgcagcaagaccccctccctacaaaagaaaagttaaaaaattagctagacatagtggtgcatgcctgtagtttcagctagttgggag

SEQ ID NO: 198781 - DNA, 120 bp, Artificial Sequence
  ENSG00000113719_65 (sequence is synthesized)
ggaggctgaggtgggaggattgcttgagcgtgggaggttgacactgcagtgggccatgatggcgccactgccctccagcctgggcaacagtgagacccggtctcagaaaaataaaaaaat

SEQ ID NO: 198782 - DNA, 120 bp, Artificial Sequence
  ENSG00000113719_66 (sequence is synthesized)
caacagtgagacccggtctcagaaaaataaaaaaattaaaagacccagttgaatcctattggactgacagaaattgaaaacttgcccggctcacacctgtaattccaggactttgggagg

SEQ ID NO: 198783 - DNA, 71 bp, Artificial Sequence
  ENSG00000113719_67 (sequence is synthesized)
gctacttgggaggctgaggtgggagaattacttgaacctgggagggagaggttgcggtgagccaggatcac

SEQ ID NO: 198784 - DNA, 120 bp, Artificial Sequence
  ENSG00000113719_68 (sequence is synthesized)
gaaatccagctagtcctgtctgtcataacctcctgggctcctgtttgcctctctccctccagctcctttgctcttggtggcctctgattggggccaacactacaagcaaggtcaagcgca

SEQ ID NO: 198785 - DNA, 120 bp, Artificial Sequence
  ENSG00000113719_69 (sequence is synthesized)
gaagcccaggctctccttagttgactgtgtgttaatcacccagcaatttcattactcaacagctctccagagttgcacattacagctggggtagaaattgggtgctgaaggccaggcaga

SEQ ID NO: 198786 - DNA, 120 bp, Artificial Sequence
  ENSG00000113719_70 (sequence is synthesized)
gggtagaaattgggtgctgaaggccaggcagagcatttggctgtagggaggccgatcctcctcgggcctgttaccggcgggtctttgttcttagacctggggttcttggcctcacggatt

SEQ ID NO: 198787 - DNA, 120 bp, Artificial Sequence
  ENSG00000113719_71 (sequence is synthesized)
tctacctgctcccctttcctgctgtctccccgctccctggaaactggttgtggaggcactcactcgacctgaccctgacacagcccccagcaagcgagggttcgtgtccagctgcctggc

SEQ ID NO: 198788 - DNA, 120 bp, Artificial Sequence
  ENSG00000113719_72 (sequence is synthesized)
cgttcctgctgagaatctggatgggggtccaggctccctggggttttaagcccctgatggctggttcaggaaggagctactcttctctccagtgagggggacaatgatgagaagacctga

SEQ ID NO: 198789 - DNA, 120 bp, Artificial Sequence
  ENSG00000113719_73 (sequence is synthesized)
ggatttgcagcccccagccctgggttcaagtcccagctctaccccttcttggcccctacaagtcacttgacccatcttaggctgagggtgtgatggcgataatagtatcacgataccacc

SEQ ID NO: 198790 - DNA, 120 bp, Artificial Sequence
  ENSG00000113719_74 (sequence is synthesized)
cacttcacaaagtttgtgtggggattaaatgagctaatgcagattcattcattcagaaaaatttttgaatggcacgttctgtgttccagggtcggtgataggctctggggcagcgttcct

SEQ ID NO: 198791 - DNA, 120 bp, Artificial Sequence
  ENSG00000113719_75 (sequence is synthesized)
gggctggtggggctcccattctggtagagggagacagtctacaaaccagaaagcatcagggatgctaagtgcagtgatgaggaataaagccaaggggagtgagatgaggtgggcttgaaa

SEQ ID NO: 198792 - DNA, 120 bp, Artificial Sequence
  ENSG00000113719_76 (sequence is synthesized)
gtaccttgtccgctcagaaggaccattcaaggttcactgttgttttgtcctcagaaccaggagcttcagatcctaagtcaagtgggtgaacgcagtgcccttgggagggccgaggcaccc

SEQ ID NO: 198793 - DNA, 120 bp, Artificial Sequence
  ENSG00000113719_77 (sequence is synthesized)
ggtggcagctggcagggttttgctcagcacgtgccggccttcctcgaagctcggtactgtcacagtggagcctctcaacaacgctgtgaggcagcaccatttgacaggttaggatgctgg

SEQ ID NO: 198794 - DNA, 120 bp, Artificial Sequence
  ENSG00000113719_78 (sequence is synthesized)
ggcccagagaggttaagtgtcttgcccgaggtcacacagctatctgcatgtcccacaactccccttcccagccccagccaaactgagccactggccactcctggcttctccttgtccctc

SEQ ID NO: 198795 - DNA, 120 bp, Artificial Sequence
  ENSG00000113719_79 (sequence is synthesized)
ctgcagcctctgctcagaacgcccttcctccagaccctgacacctgagctggggttgcaaagtcactggccacatccagcccaaagataaattttgtttgtccagtatagcatttaactg

SEQ ID NO: 198796 - DNA, 120 bp, Artificial Sequence
  ENSG00000113719_80 (sequence is synthesized)
catcagaaccagtatgaaaagaccaggaatccagatttctggcttttaaaagtcagaggctctcactacactgggtccgtgttcccgctatgacaatgacctggcaccaatgggcagtgt

SEQ ID NO: 198797 - DNA, 120 bp, Artificial Sequence
  ENSG00000113719_81 (sequence is synthesized)
tcccctttagagagggtgtgtgctgtcccttcccacagtccctggcaggcggctggaaggccaggcctggtcatctgtcaagcagggtggacttcttacgtgacagttcagggctccctt

SEQ ID NO: 198798 - DNA, 120 bp, Artificial Sequence
  ENSG00000113719_82 (sequence is synthesized)
aagtgctaaagcagaagctgcaaggctttcttaaggtttcgagtgttgctgggagaaatctgctgcatgttgtgggttaaagggagtctctcaccagcccaggccctcaggaggaggaga

SEQ ID NO: 198799 - DNA, 120 bp, Artificial Sequence
  ENSG00000113719_83 (sequence is synthesized)
gatggaaagccatttgagggttttgaacagggaggcaatgtaatcagatttatgccttagaactggactatccaataggttgccaccagccacataaggctatttaaattaattcaaatt

SEQ ID NO: 198800 - DNA, 120 bp, Artificial Sequence
  ENSG00000113719_84 (sequence is synthesized)
aaatgtacaattcagtcactcattctcatcaaccacatttcaagtgctcaaagccacgtgctggctaggggccacagcgttagacagtgcagagagaaagcacttccatcgctgaggaaa

SEQ ID NO: 198801 - DNA, 80 bp, Artificial Sequence
  ENSG00000113719_85 (sequence is synthesized)
tagacagtgcagagagaaagcacttccatcgctgaggaaagttctgctggaccgcacacccttagaaggatggctctggt

SEQ ID NO: 198802 - DNA, 64 bp, Artificial Sequence
  ENSG00000113719_86 (sequence is synthesized)
gatcgaaaaggatggggctgggctggagagggtggcaggcagtggttgtggcagtggagctggg

SEQ ID NO: 198803 - DNA, 120 bp, Artificial Sequence
  ENSG00000113719_87 (sequence is synthesized)
ggagagggtggcaggcagtggttgtggcagtggagctggggagatgtggtcggattagggaggtagaatcaataagactcagtgaagaatcggatgtgggggtaagggcacatgtggaag

SEQ ID NO: 198804 - DNA, 120 bp, Artificial Sequence
  ENSG00000113719_88 (sequence is synthesized)
caaagaaacctttgacgtctttgtcttgacaaccgggtggtcctgtttctagacatggaagcttagaaaagcctggagtctgtgggaagtaggtagggctgggcactggtcattccactc

SEQ ID NO: 198805 - DNA, 120 bp, Artificial Sequence
  ENSG00000113719_89 (sequence is synthesized)
tggtttcctttggggttcccattaggtgtctacagggagaggtgaaattggaagttggaggtgtggagagttcaggagagggttctggaccacagatgttgaggtgggagtcattagtga

SEQ ID NO: 198806 - DNA, 120 bp, Artificial Sequence
  ENSG00000113719_90 (sequence is synthesized)
atagatgatgttggaagtcatgggtcctcagagtgggggctccttaagcctccaggccagcagcatcagcatcacctgggagattgttaggaatgcagattctcaggcccccctaagacc

SEQ ID NO: 198807 - DNA, 120 bp, Artificial Sequence
  ENSG00000113719_91 (sequence is synthesized)
caccgactctgtgctagaacaagcgcccctcagagattctgatgccactgaagtttgaggagcattggtttaagcaagattacctacggagaggctgtagatccgtgttctaaacctggg

SEQ ID NO: 198808 - DNA, 120 bp, Artificial Sequence
  ENSG00000113719_92 (sequence is synthesized)
gtccacagacacccccaagaagagcggattgaatgcaagagatctatgaagttggatgggggaaaaattgacatctttatttttgctaaactcgatctaaagtttagcatttccatctgc

SEQ ID NO: 198809 - DNA, 120 bp, Artificial Sequence
  ENSG00000113719_93 (sequence is synthesized)
gatgaatgtaggccacaaaccacagtagtattagcagtgcctgggacctcctcaacaacagaaattgccggtatttatagcacgttacagttgttgcagataatttccagagactgttta

SEQ ID NO: 198810 - DNA, 67 bp, Artificial Sequence
  ENSG00000113719_94 (sequence is synthesized)
cacgttacagttgttgcagataatttccagagactgtttatatgcaccactgttttaaaattacggt

SEQ ID NO: 198811 - DNA, 120 bp, Artificial Sequence
  ENSG00000113719_95 (sequence is synthesized)
caacatgtcaaaaccctgtacctacaaaaaaatacaaaagttaaccaagcctatgcttgtagtcacagctactcgggaggccgaggtgggagggtcttctgagcccagggaggtagaggc

SEQ ID NO: 198812 - DNA, 120 bp, Artificial Sequence
  ENSG00000113719_96 (sequence is synthesized)
ctccagcctgggtgacagagtgaaacccttaatcaatcagtcaataaaaattacagtaattattagacccaccactaggtcatcttatttgatgcatcagtaaagcagcatattcaaatg

SEQ ID NO: 198813 - DNA, 120 bp, Artificial Sequence
  ENSG00000113719_97 (sequence is synthesized)
tgcatcagtaaagcagcatattcaaatgtggatttttaaatattttaattactatttaaatatctctttactttgtaatcctatgcattttacgcattaaaacattttaagcatttaaaa

SEQ ID NO: 198814 - DNA, 120 bp, Artificial Sequence
  ENSG00000113719_98 (sequence is synthesized)
cgacagaagtgcccacacttggtgaggaatcggtgcaggcttcctggcagtggctgacgcagagttaaaccattcctgattcctagaattatctgttgtctggataacctagtaaacgct

SEQ ID NO: 198815 - DNA, 120 bp, Artificial Sequence
  ENSG00000113719_99 (sequence is synthesized)
ctggggtgtgtgtaacagaatgccattaggattatgcagtcacgacctcatcggacgcccctctgtgatggaattagacccaggagcttcctgcctttggcactggcttgaggcttcaaa

SEQ ID NO: 198816 - DNA, 120 bp, Artificial Sequence
  ENSG00000113719_100 (sequence is synthesized)
ggagctcggccctggccacccactctcctgctcaacactggaattttctttttcactaatgggatttcttggtttcctttgcctccactcagccacaagacaataggaaactaaatacat

SEQ ID NO: 198817 - DNA, 120 bp, Artificial Sequence
  ENSG00000113719_101 (sequence is synthesized)
agctgcttagcccaagaagactctcattatacaagcattaccacctttagttctcaaacagcctcaggagggagctgccccctctttacaaagaggaaattgaggcccagggaggtggag

SEQ ID NO: 198818 - DNA, 120 bp, Artificial Sequence
  ENSG00000113719_102 (sequence is synthesized)
ggacctgcccacagccatacagttaggagctggctcccagccctgcctatctccctagcccacatgtgtttgaccagcacactgaaaggcctatgagacaggagggctggtctcaccttg

SEQ ID NO: 198819 - DNA, 120 bp, Artificial Sequence
  ENSG00000113719_103 (sequence is synthesized)
tttctgggtatacctttcagccctcccctggcatgggagagtttgcctttcctggtcactctgatcctgttttaaccctgatggcgccaaagcccaggggaccttttacagtggtgggaa

SEQ ID NO: 198820 - DNA, 120 bp, Artificial Sequence
  ENSG00000113719_104 (sequence is synthesized)
agatggcatccaggcatcagaggagggagcagtgcgtccaacagacgtgagctgagactgcagctctcgacatgtgaccttagcaagtttcttcactgctctgagcctccattttctttt

SEQ ID NO: 198821 - DNA, 120 bp, Artificial Sequence
  ENSG00000113719_105 (sequence is synthesized)
ctgtaaaatgggaattatcagatgacaaagtcaaaggattcagtgttgtttgtttagtcattcattcattcaaaaagtgtctattgagcacctgctatgtgtcggagtctggggagcaca

SEQ ID NO: 198822 - DNA, 120 bp, Artificial Sequence
  ENSG00000113719_106 (sequence is synthesized)
gccgcttcgaggggcagttcagcatcaacaaggaagttgaccagcagccagatgtcagagtttgcgtgttttgagcagcagcggcagcctcaccagagaccccacggtgacctcgtttca

SEQ ID NO: 198823 - DNA, 120 bp, Artificial Sequence
  ENSG00000113719_107 (sequence is synthesized)
tcagccagccccgcaggaggaggacaggatggggtgaggggtatggggcctggctccagctatatgtttttaaaatccatcagagacactgacgtaggttcctaagtcacaggctctaaa

SEQ ID NO: 198824 - DNA, 120 bp, Artificial Sequence
  ENSG00000113719_108 (sequence is synthesized)
gctacaggtccagaacatccacggagctttcaatgctctcgggggagcagacagactcacctccaaccctaaccagtgggaaggtggacccagccccgtccagacccagaccctgatgga

SEQ ID NO: 198825 - DNA, 120 bp, Artificial Sequence
  ENSG00000113719_109 (sequence is synthesized)
atccttagttgaactaattacctaagatcccacagggagctatggcagaaccaggatctgttctgcctccaggtcgcaccgtgagaacaggtctgtgggtggcccagtcagctgtgacca

SEQ ID NO: 198826 - DNA, 120 bp, Artificial Sequence
  ENSG00000113719_110 (sequence is synthesized)
catggctgcctcccccacacctcactctcctcctgctcagactcctcccatcgatagtggctcctcctagagtcctcgccctccttagctccctggcaccttggcccagatcaaagagaa

SEQ ID NO: 198827 - DNA, 120 bp, Artificial Sequence
  ENSG00000113719_111 (sequence is synthesized)
gacatgcttacaaaatcagactttgatgggctgctgcacgataagctatattccctcctcggacacagctcgcacagtcttcttcattgggctggaataaggtccccggcaacttccacg

SEQ ID NO: 198828 - DNA, 120 bp, Artificial Sequence
  ENSG00000113719_112 (sequence is synthesized)
gggttgctggggggccctctgcaatccagtccccgccccccctgagacacagtttgtacttctgattcttatatcctctaccccaggaatacgtcgcctacagccacacgggccgcatca

SEQ ID NO: 198829 - DNA, 120 bp, Artificial Sequence
  ENSG00000113719_113 (sequence is synthesized)
tgtgaacgagctctatgtcgatgacccagacaaggacagcggtggcaagatcgacgtcagtctgaacatcagtttacccaatctgcactgcgagttctttggaccccagaccatgagctc

SEQ ID NO: 198830 - DNA, 120 bp, Artificial Sequence
  ENSG00000113719_114 (sequence is synthesized)
ctggaggtccccagcccggcctgcccctgcaatggatgaatgaaggctcccagagagaacaggctggcccccatcctcccgcgtctctgggtttgtgactgttgtctccctttggctcct

SEQ ID NO: 198831 - DNA, 120 bp, Artificial Sequence
  ENSG00000113721_0 (sequence is synthesized)
agcagccagcagtgactgcccgccctatctgggacccaggatcgctctgtgagcaacttggagccagagaggagatcaacaaggaggaggagagagccggcccctcagccctgctgccca

SEQ ID NO: 198832 - DNA, 120 bp, Artificial Sequence
  ENSG00000113721_1 (sequence is synthesized)
gcagcagcctgtgctcgccctgcccaacgcagacagccagacccagggcggcccctctggcggctctgctcctcccgaaggatgcttggggagtgaggcgaagctgggccgctcctctcc

SEQ ID NO: 198833 - DNA, 120 bp, Artificial Sequence
  ENSG00000113721_2 (sequence is synthesized)
cctacagcagcccccttcctccatccctctgttctcctgagccttcaggagcctgcaccagtcctgcctgtccttctactcagctgttacccactctgggaccagcagtctttctgataa

SEQ ID NO: 198834 - DNA, 120 bp, Artificial Sequence
  ENSG00000113721_3 (sequence is synthesized)
ctgggagagggcagtaaggaggacttcctggagggggtgactgtccagagcctggaactgtgcccacaccagaagccatcagcagcaaggacaccatgcggcttccgggtgcgatgccag

SEQ ID NO: 198835 - DNA, 120 bp, Artificial Sequence
  ENSG00000113721_4 (sequence is synthesized)
ctctggccctcaaaggcgagctgctgttgctgtctctcctgttacttctggaaccacagatctctcagggcctggtcgtcacacccccggggccagagcttgtcctcaatgtctccagca

SEQ ID NO: 198836 - DNA, 120 bp, Artificial Sequence
  ENSG00000113721_5 (sequence is synthesized)
ccttcgttctgacctgctcgggttcagctccggtggtgtgggaacggatgtcccaggagcccccacaggaaatggccaaggcccaggatggcaccttctccagcgtgctcacactgacca

SEQ ID NO: 198837 - DNA, 120 bp, Artificial Sequence
  ENSG00000113721_6 (sequence is synthesized)
acctcactgggctagacacgggagaatacttttgcacccacaatgactcccgtggactggagaccgatgagcggaaacggctctacatctttgtgccagatcccaccgtgggcttcctcc

SEQ ID NO: 198838 - DNA, 120 bp, Artificial Sequence
  ENSG00000113721_7 (sequence is synthesized)
ctaatgatgccgaggaactattcatctttctcacggaaataactgagatcaccattccatgccgagtaacagacccacagctggtggtgacactgcacgagaagaaaggggacgttgcac

SEQ ID NO: 198839 - DNA, 120 bp, Artificial Sequence
  ENSG00000113721_8 (sequence is synthesized)
tgcctgtcccctatgatcaccaacgtggcttttctggtatctttgaggacagaagctacatctgcaaaaccaccattggggacagggaggtggattctgatgcctactatgtctacagac

SEQ ID NO: 198840 - DNA, 120 bp, Artificial Sequence
  ENSG00000113721_9 (sequence is synthesized)
tccaggtgtcatccatcaacgtctctgtgaacgcagtgcagactgtggtccgccagggtgagaacatcaccctcatgtgcattgtgatcgggaatgaggtggtcaacttcgagtggacat

SEQ ID NO: 198841 - DNA, 120 bp, Artificial Sequence
  ENSG00000113721_10 (sequence is synthesized)
acccccgcaaagaaagtgggcggctggtggagccggtgactgacttcctcttggatatgccttaccacatccgctccatcctgcacatccccagtgccgagttagaagactcggggacct

SEQ ID NO: 198842 - DNA, 120 bp, Artificial Sequence
  ENSG00000113721_11 (sequence is synthesized)
acacctgcaatgtgacggagagtgtgaatgaccatcaggatgaaaaggccatcaacatcaccgtggttgagagcggctacgtgcggctcctgggagaggtgggcacactacaatttgctg

SEQ ID NO: 198843 - DNA, 120 bp, Artificial Sequence
  ENSG00000113721_12 (sequence is synthesized)
agctgcatcggagccggacactgcaggtagtgttcgaggcctacccaccgcccactgtcctgtggttcaaagacaaccgcaccctgggcgactccagcgctggcgaaatcgccctgtcca

SEQ ID NO: 198844 - DNA, 120 bp, Artificial Sequence
  ENSG00000113721_13 (sequence is synthesized)
cgcgcaacgtgtcggagacccggtatgtgtcagagctgacactggttcgcgtgaaggtggcagaggctggccactacaccatgcgggccttccatgaggatgctgaggtccagctctcct

SEQ ID NO: 198845 - DNA, 120 bp, Artificial Sequence
  ENSG00000113721_14 (sequence is synthesized)
tccagctacagatcaatgtccctgtccgagtgctggagctaagtgagagccaccctgacagtggggaacagacagtccgctgtcgtggccggggcatgccccagccgaacatcatctggt

SEQ ID NO: 198846 - DNA, 120 bp, Artificial Sequence
  ENSG00000113721_15 (sequence is synthesized)
ctgcctgcagagacctcaaaaggtgtccacgtgagctgccgcccacgctgctggggaacagttccgaagaggagagccagctggagactaacgtgacgtactgggaggaggagcaggagt

SEQ ID NO: 198847 - DNA, 120 bp, Artificial Sequence
  ENSG00000113721_16 (sequence is synthesized)
ttgaggtggtgagcacactgcgtctgcagcacgtggatcggccactgtcggtgcgctgcacgctgcgcaacgctgtgggccaggacacgcaggaggtcatcgtggtgccacactccttgc

SEQ ID NO: 198848 - DNA, 120 bp, Artificial Sequence
  ENSG00000113721_17 (sequence is synthesized)
cctttaaggtggtggtgatctcagccatcctggccctggtggtgctcaccatcatctcccttatcatcctcatcatgctttggcagaagaagccacgttacgagatccgatggaaggtga

SEQ ID NO: 198849 - DNA, 120 bp, Artificial Sequence
  ENSG00000113721_18 (sequence is synthesized)
ttgagtctgtgagctctgacggccatgagtacatctacgtggaccccatgcagctgccctatgactccacgtgggagctgccgcgggaccagcttgtgctgggacgcaccctcggctctg

SEQ ID NO: 198850 - DNA, 120 bp, Artificial Sequence
  ENSG00000113721_19 (sequence is synthesized)
gggcctttgggcaggtggtggaggccacggctcatggcctgagccattctcaggccacgatgaaagtggccgtcaagatgcttaaatccacagcccgcagcagtgagaagcaagccctta

SEQ ID NO: 198851 - DNA, 120 bp, Artificial Sequence
  ENSG00000113721_20 (sequence is synthesized)
tgtcggagctgaagatcatgagtcaccttgggccccacctgaacgtggtcaacctgttgggggcctgcaccaaaggaggacccatctatatcatcactgagtactgccgctacggagacc

SEQ ID NO: 198852 - DNA, 120 bp, Artificial Sequence
  ENSG00000113721_21 (sequence is synthesized)
tggtggactacctgcaccgcaacaaacacaccttcctgcagcaccactccgacaagcgccgcccgcccagcgcggagctctacagcaatgctctgcccgttgggctccccctgcccagcc

SEQ ID NO: 198853 - DNA, 120 bp, Artificial Sequence
  ENSG00000113721_22 (sequence is synthesized)
atgtgtccttgaccggggagagcgacggtggctacatggacatgagcaaggacgagtcggtggactatgtgcccatgctggacatgaaaggagacgtcaaatatgcagacatcgagtcct

SEQ ID NO: 198854 - DNA, 120 bp, Artificial Sequence
  ENSG00000113721_23 (sequence is synthesized)
caactttgatcaacgagtctccagtgctaagctacatggacctcgtgggcttcagctaccaggtggccaatggcatggagtttctggcctccaagaactgcgtccacagagacctggcgg

SEQ ID NO: 198855 - DNA, 120 bp, Artificial Sequence
  ENSG00000113721_24 (sequence is synthesized)
ctaggaacgtgctcatctgtgaaggcaagctggtcaagatctgtgactttggcctggctcgagacatcatgcgggactcgaattacatctccaaaggcagcacctttttgcctttaaagt

SEQ ID NO: 198856 - DNA, 120 bp, Artificial Sequence
  ENSG00000113721_25 (sequence is synthesized)
ggatggctccggagagcatcttcaacagcctctacaccaccctgagcgacgtgtggtccttcgggatcctgctctgggagatcttcaccttgggtggcaccccttacccagagctgccca

SEQ ID NO: 198857 - DNA, 120 bp, Artificial Sequence
  ENSG00000113721_26 (sequence is synthesized)
tgaacgagcagttctacaatgccatcaaacggggttaccgcatggcccagcctgcccatgcctccgacgagatctatgagatcatgcagaagtgctgggaagagaagtttgagattcggc

SEQ ID NO: 198858 - DNA, 120 bp, Artificial Sequence
  ENSG00000113721_27 (sequence is synthesized)
cccccttctcccagctggtgctgcttctcgagagactgttgggcgaaggttacaaaaagaagtaccagcaggtggatgaggagtttctgaggagtgaccacccagccatccttcggtccc

SEQ ID NO: 198859 - DNA, 120 bp, Artificial Sequence
  ENSG00000113721_28 (sequence is synthesized)
aggcccgcttgcctgggttccatggcctccgatctcccctggacaccagctccgtcctctatactgccgtgcagcccaatgagggtgacaacgactatatcatccccctgcctgacccca

SEQ ID NO: 198860 - DNA, 120 bp, Artificial Sequence
  ENSG00000113721_29 (sequence is synthesized)
aacccgaggttgctgacgagggcccactggagggttcccccagcctagccagctccaccctgaatgaagtcaacacctcctcaaccatctcctgtgacagccccctggagccccaggacg

SEQ ID NO: 198861 - DNA, 120 bp, Artificial Sequence
  ENSG00000113721_30 (sequence is synthesized)
aaccagagccagagccccagcttgagctccaggtggagccggagccagagctggaacagttgccggattcggggtgccctgcgcctcgggcggaagcagaggatagcttcctgtaggggg

SEQ ID NO: 198862 - DNA, 120 bp, Artificial Sequence
  ENSG00000113721_31 (sequence is synthesized)
ctggcccctaccctgccctgcctgaagctccccccctgccagcacccagcatctcctggcctggcctgaccgggcttcctgtcagccaggctgcccttatcagctgtccccttctggaag

SEQ ID NO: 198863 - DNA, 120 bp, Artificial Sequence
  ENSG00000113721_32 (sequence is synthesized)
ctttctgctcctgacgtgttgtgccccaaaccctggggctggcttaggaggcaagaaaactgcaggggccgtgaccagccctctgcctccagggaggccaactgactctgagccagggtt

SEQ ID NO: 198864 - DNA, 120 bp, Artificial Sequence
  ENSG00000113721_33 (sequence is synthesized)
cccccagggaactcagttttcccatatgtaaaatgggaaagttaggcttgatgacccagaatctaggattctctccctggctgacaggtggggagaccgaatccctccctgggaagattc

SEQ ID NO: 198865 - DNA, 120 bp, Artificial Sequence
  ENSG00000113721_34 (sequence is synthesized)
ttggagttactgaggtggtaaattaacttttttctgttcagccagctacccctcaaggaatcatagctctctcctcgcacttttatccacccaggagctagggaagagaccctagcctcc

SEQ ID NO: 198866 - DNA, 120 bp, Artificial Sequence
  ENSG00000113721_35 (sequence is synthesized)
ctggctgctggctgagctagggcctagccttgagcagtgttgcctcatccagaagaaagccagtctcctccctatgatgccagtccctgcgttccctggcccgagctggtctggggccat

SEQ ID NO: 198867 - DNA, 120 bp, Artificial Sequence
  ENSG00000113721_36 (sequence is synthesized)
taggcagcctaattaatgctggaggctgagccaagtacaggacacccccagcctgcagcccttgcccagggcacttggagcacacgcagccatagcaagtgcctgtgtccctgtccttca

SEQ ID NO: 198868 - DNA, 120 bp, Artificial Sequence
  ENSG00000113721_37 (sequence is synthesized)
ggcccatcagtcctggggctttttctttatcaccctcagtcttaatccatccaccagagtctagaaggccagacgggccccgcatctgtgatgagaatgtaaatgtgccagtgtggagtg

SEQ ID NO: 198869 - DNA, 120 bp, Artificial Sequence
  ENSG00000113721_38 (sequence is synthesized)
gccacgtgtgtgtgccagtatatggccctggctctgcattggacctgctatgaggctttggaggaatccctcaccctctctgggcctcagtttccccttcaaaaaatgaataagtcggac

SEQ ID NO: 198870 - DNA, 120 bp, Artificial Sequence
  ENSG00000113721_39 (sequence is synthesized)
ttattaactctgagtgccttgccagcactaacattctagagtattccaggtggttgcacatttgtccagatgaagcaaggccatataccctaaacttccatcctgggggtcagctgggct

SEQ ID NO: 198871 - DNA, 120 bp, Artificial Sequence
  ENSG00000113721_40 (sequence is synthesized)
cctgggagattccagatcacacatcacactctggggactcaggaaccatgccccttccccaggcccccagcaagtctcaagaacacagctgcacaggccttgacttagagtgacagccgg

SEQ ID NO: 198872 - DNA, 120 bp, Artificial Sequence
  ENSG00000113721_41 (sequence is synthesized)
tgtcctggaaagcccccagcagctgccccagggacatgggaagaccacgggacctctttcactacccacgatgacctccgggggtatcctgggcaaaagggacaaagagggcaaatgaga

SEQ ID NO: 198873 - DNA, 120 bp, Artificial Sequence
  ENSG00000113721_42 (sequence is synthesized)
tcacctcctgcagcccaccactccagcacctgtgccgaggtctgcgtcgaagacagaatggacagtgaggacagttatgtcttgtaaaagacaagaagcttcagatgggtaccccaagaa

SEQ ID NO: 198874 - DNA, 120 bp, Artificial Sequence
  ENSG00000113721_43 (sequence is synthesized)
ggatgtgagaggtgggcgctttggaggtttgcccctcacccaccagctgccccatccctgaggcagcgctccatgggggtatggttttgtcactgcccagacctagcagtgacatctcat

SEQ ID NO: 198875 - DNA, 120 bp, Artificial Sequence
  ENSG00000113721_44 (sequence is synthesized)
tgtccccagcccagtgggcattggaggtgccaggggagtcagggttgtagccaagacgcccccgcacggggagggttgggaagggggtgcaggaagctcaacccctctgggcaccaaccc

SEQ ID NO: 198876 - DNA, 120 bp, Artificial Sequence
  ENSG00000113721_45 (sequence is synthesized)
tgcattgcaggttggcaccttacttccctgggatccccagagttggtccaaggagggagagtgggttctcaatacggtaccaaagatataatcacctaggtttacaaatatttttaggac

SEQ ID NO: 198877 - DNA, 120 bp, Artificial Sequence
  ENSG00000113721_46 (sequence is synthesized)
tcacgttaactcacatttatacagcagaaatgctattttgtatgctgttgagtttttctatctgtgtacttttttttaagggaaagattttaatattaaacctggtgcttctcactcaca

SEQ ID NO: 198878 - DNA, 120 bp, Artificial Sequence
  ENSG00000113721_47 (sequence is synthesized)
agaccttctgctcccaagtgtgagactagaacccaggcctccagccttctcacaggtgcccttccaggacatcgtgtggctactccaggcagcattcctccattgcaagcagggaggagt

SEQ ID NO: 198879 - DNA, 120 bp, Artificial Sequence
  ENSG00000113721_48 (sequence is synthesized)
atctctgcttccctctgtgacctcccaattgcacagaggcctctagtgacaagttctgaagtcatgcagtcctcccctgtctccaagcaggagaccctgaatccacagccttcagggaca

SEQ ID NO: 198880 - DNA, 120 bp, Artificial Sequence
  ENSG00000113721_49 (sequence is synthesized)
tacagtccctgaacacctacctcatgcaggcatagagcctggtacttcacacaccttggagtcctcatggcaagtttttgaaatcagtgttattacctactttttgtagatgaggaagct

SEQ ID NO: 198881 - DNA, 120 bp, Artificial Sequence
  ENSG00000113721_50 (sequence is synthesized)
gagatctggagaggctaagtgactttcccagggccatacggtgagttaaggtggtgtttaggctgaagtctgcctgactctaaaggcttacctcgtgctccccgggaagctcccagtcag

SEQ ID NO: 198882 - DNA, 120 bp, Artificial Sequence
  ENSG00000113721_51 (sequence is synthesized)
ccggaggacaggctgtcagagctggtaggctactggataccatccagcccaacttcccctccctcactgtacagacagggaaactaaggcacagagagagtctggggacgcagccgaggc

SEQ ID NO: 198883 - DNA, 120 bp, Artificial Sequence
  ENSG00000113721_52 (sequence is synthesized)
acacttagcctctcccagggtggcctgatgctgatttgcaggcactagaggggccatcacactgcagcaggcactgctcccgagtctgggtctggtttgggaaagagcgttcctctccct

SEQ ID NO: 198884 - DNA, 120 bp, Artificial Sequence
  ENSG00000113721_53 (sequence is synthesized)
ccccctaccctggcctcttcccctcctcagagtgtgggtgctcacccccgccaggctgcctgggtcttgcagcacagggcggggcagaagagtcagaataggctcctgtggtggggcctc

SEQ ID NO: 198885 - DNA, 120 bp, Artificial Sequence
  ENSG00000113721_54 (sequence is synthesized)
catggagcctccatgactgggcctggcctggggcccccattttcctcagccacagcccgcagcagtgagaagcaagcccttatgtcggagctgaagatcatgagtcaccttgggccccac

SEQ ID NO: 198886 - DNA, 120 bp, Artificial Sequence
  ENSG00000113721_55 (sequence is synthesized)
ctgaacgtggtcaacctgttgggggcctgcaccaaaggaggtaccgagcccactgccccagaggcctcagggaaagtgcccaccaccaaggccaggccccgcctacccccccctcaggcc

SEQ ID NO: 198887 - DNA, 120 bp, Artificial Sequence
  ENSG00000113722_0 (sequence is synthesized)
ggcaggacagccgagttcaggtgagcggttgctcgtcgtcggggcggccggcagcggcggctccagggcccagcatgcgcgggggaccccgcggccaccatgtatgtgggctatgtgctg

SEQ ID NO: 198888 - DNA, 120 bp, Artificial Sequence
  ENSG00000113722_1 (sequence is synthesized)
cccgtgtaccccggcccagccaggccagccagcctcggcctgggcccgcaagcctacggccccccggccccgcccccggcgcccccgcagtaccccgacttctccagctactctcacgtg

SEQ ID NO: 198889 - DNA, 120 bp, Artificial Sequence
  ENSG00000113722_2 (sequence is synthesized)
agtaccccgacttctccagctactctcacgtggagccggcccccgcgcccccgacggcctggggggcgcccttccctgcgcccaaggacgactgggccgccgcctacggcccgggccccg

SEQ ID NO: 198890 - DNA, 80 bp, Artificial Sequence
  ENSG00000113722_3 (sequence is synthesized)
gcttcgctggcattcgggccccctccagactttagcccggtgccggcgccccctgggcccggcccgggcctcctggcgca

SEQ ID NO: 198891 - DNA, 120 bp, Artificial Sequence
  ENSG00000113722_4 (sequence is synthesized)
cagaggccgacgccctacgagtggatgcggcgcagcgtggcggccggaggcggcggtggcagcggtaagactcggaccaaggacaagtaccgcgtggtctacaccgaccaccaacgcctg

SEQ ID NO: 198892 - DNA, 120 bp, Artificial Sequence
  ENSG00000113722_5 (sequence is synthesized)
gagctggagaaggagtttcattacagccgttacatcacaatccggcggaaatcagagctggctgccaatctggggctcactgaacggcaggtgaagatctggttccaaaaccggcgggca

SEQ ID NO: 198893 - DNA, 120 bp, Artificial Sequence
  ENSG00000113722_6 (sequence is synthesized)
aaggagcgcaaagtgaacaagaagaaacagcagcagcaacagcccccacagccgccgatggcccacgacatcacggccaccccagccgggccatccctggggggcctgtgtcccagcaac

SEQ ID NO: 198894 - DNA, 120 bp, Artificial Sequence
  ENSG00000113722_7 (sequence is synthesized)
cgggtgctgggagtgtggctcctgtgggcccaggaggtctggtccgagtctcagccctgaccttctgggacatggtggacagtcacctatccaccctctgcatccccttggcccatctgt

SEQ ID NO: 198895 - DNA, 120 bp, Artificial Sequence
  ENSG00000113722_8 (sequence is synthesized)
gcagtaagcctgttggataaagaccttccagctcctgtgttctagacctctgggggataagggagtccagggtggatgatctcaatctcccgtgggcatctcaagccccaaatggttggg

SEQ ID NO: 198896 - DNA, 120 bp, Artificial Sequence
  ENSG00000113722_9 (sequence is synthesized)
ggaggggcctagacaaggctccaggccccacctcctcctccatacgttcagaggtgcagctggaggctgctgtggggaccacactgatcctggagaaaagggatggagctgaaaaagatg

SEQ ID NO: 198897 - DNA, 120 bp, Artificial Sequence
  ENSG00000113722_10 (sequence is synthesized)
gaatgcttgcagagcatgacctgaggagggaggaacgtggtcaactcacacctgcctcttcctgcagcctcacttctacctgcccccatcataagggcactgagcccttcccaggctgga

SEQ ID NO: 198898 - DNA, 120 bp, Artificial Sequence
  ENSG00000113722_11 (sequence is synthesized)
tactaagcacaaagcccatagcactgggctctgatggctgctccactgggttacagaatcacagccctcatgatcattctcagtgagggctctggattgagagggaggccctgggaggag

SEQ ID NO: 198899 - DNA, 120 bp, Artificial Sequence
  ENSG00000113722_12 (sequence is synthesized)
agaagggggcagagtcttccctaccaggtttctacacccccgccaggctgcccatcagggcccagggagcccccagaggactttattcggaccaagcagagctcacagctggacaggtgt

SEQ ID NO: 198900 - DNA, 120 bp, Artificial Sequence
  ENSG00000113722_13 (sequence is synthesized)
tgtatatagagtggaatctcttggatgcagcttcaagaataaatttttcttctcttttcaaaaatgtataaaaatcattatacatagcattaaagaaacatttttgagaagtacaaatca

SEQ ID NO: 198901 - DNA, 120 bp, Artificial Sequence
  ENSG00000113732_0 (sequence is synthesized)
ggggtaggggttggcgctcaggcggcgaccatggcgtatcacggcctcactgtgcctctcattgtgatgagcgtgttctggggcttcgtcggcttcttggtgccttggttcatccctaag

SEQ ID NO: 198902 - DNA, 120 bp, Artificial Sequence
  ENSG00000113732_1 (sequence is synthesized)
ggtcctaaccggggagttatcattaccatgttggtgacctgttcagtttgctgctatctcttttggctgattgcaattctggcccaactcaaccctctctttggaccgcaattgaaaaat

SEQ ID NO: 198903 - DNA, 120 bp, Artificial Sequence
  ENSG00000113732_2 (sequence is synthesized)
atcattggccttgaggaagaagacatgctctacagtgctcagtctttgaggtgactatgcttgtgacctttcttatcagtatggtcaggcagtcagagtttgccttgactttttctcaca

SEQ ID NO: 198904 - DNA, 120 bp, Artificial Sequence
  ENSG00000113732_3 (sequence is synthesized)
ttttatggccattttaacacgtggcaagggcaagctgctgaatgcaaacacgatctgaagagcagaaataaaattggaacttaagccttagcttacctaaatctcattaagattcttttt

SEQ ID NO: 198905 - DNA, 120 bp, Artificial Sequence
  ENSG00000113732_4 (sequence is synthesized)
tcagtctttgaggtcacgagaagagaatgccttctagatgcaaaatcacctccaaaccagaccacttttcttgacttgcctgttttggccattagctgccttaaacgttaacagcacatt

SEQ ID NO: 198906 - DNA, 120 bp, Artificial Sequence
  ENSG00000113732_5 (sequence is synthesized)
tgaatgccttattctacaatgcagcgtgttttcctttgccttttttgcactttggtgaattacgtgcctccataacctgaactgtgccgactccacaaaacgattatgtactcttctgag

SEQ ID NO: 198907 - DNA, 120 bp, Artificial Sequence
  ENSG00000113732_6 (sequence is synthesized)
tttagaaactgctgcaagacaaacaagactccagtggggtggtcagtaggagagcacgttcagagggaagagccatctcaacagaatcgcaccaaactatactttcaggatgaatttctt

SEQ ID NO: 198908 - DNA, 120 bp, Artificial Sequence
  ENSG00000113732_7 (sequence is synthesized)
ctttctgccatcttttggaataaatattttcctcctttctatggaaatctgggctcggtgtttgtaaagttcatttttataagcttttctatcgctacataatgcctttttaaaaaatga

SEQ ID NO: 198909 - DNA, 120 bp, Artificial Sequence
  ENSG00000113732_8 (sequence is synthesized)
ttttgtagtctaaacttaggttgagtatataaaccctgccatgtagcttgagatgcctgaaaagactggtaagtgcgtttcttaatcgttcagtaactatttgagtgcctactgcagcca

SEQ ID NO: 198910 - DNA, 120 bp, Artificial Sequence
  ENSG00000113732_9 (sequence is synthesized)
aggcactggagggatcaaagatgtgtaaatttggagtccctgcaagttcacaagctatttggagagataaggttagtatacatagaactgtaatataaggttgtgttggagcattgtcct

SEQ ID NO: 198911 - DNA, 120 bp, Artificial Sequence
  ENSG00000113732_10 (sequence is synthesized)
taaagatggtaccatggtgagcagttcaaggttacctgccagctgcagaacaaggcagcaaatgctcctgagatggaaccatcacagcctcagacataggactaaagaagtcaagagtga

SEQ ID NO: 198912 - DNA, 120 bp, Artificial Sequence
  ENSG00000113732_11 (sequence is synthesized)
ttaaaaagccaggggcaggagacagtaattttgtatttcagtagcaggcatctcgatacactaatttgagagctttattacttttaagaaattaaaaattaaaatgaacctaaattttca

SEQ ID NO: 198913 - DNA, 120 bp, Artificial Sequence
  ENSG00000113734_0 (sequence is synthesized)
cctgccgctgcccgtagccggcgtccccaacatggcggctccccaagacgtccacgtccggatctgtaaccaagagattgtcaaatttgacctggaggtgaaggcgcttattcaggatat

SEQ ID NO: 198914 - DNA, 120 bp, Artificial Sequence
  ENSG00000113734_1 (sequence is synthesized)
ccgtgattgttcaggacccttaagtgctcttactgaactgaatactaaagtaaaagagaaatttcaacagttgcgtcacagaatacaggacctggagcagttggctaaagagcaagacaa

SEQ ID NO: 198915 - DNA, 120 bp, Artificial Sequence
  ENSG00000113734_2 (sequence is synthesized)
agaatcagagaaacaacttctactccaggaagtggagaatcacaaaaagcagatgctcagcaatcaggcctcatggaggaaagctaatctcacctgcaaaattgcaatcgacaatctaga

SEQ ID NO: 198916 - DNA, 120 bp, Artificial Sequence
  ENSG00000113734_3 (sequence is synthesized)
gaaagcagaacttcttcagggaggagatctcttaaggcaaaggaaaaccaccaaagagagcctggcccagacatccagtaccatcactgagagcctcatggggatcagcaggatgatggc

SEQ ID NO: 198917 - DNA, 120 bp, Artificial Sequence
  ENSG00000113734_4 (sequence is synthesized)
agctgggccggaagcttatcacaaaatacaatcgccgggagctgacggacaagcttctcatcttccttgcgctagccctgtttcttgctacggtcctctatattgtgaaaaagcggctct

SEQ ID NO: 198918 - DNA, 120 bp, Artificial Sequence
  ENSG00000113734_5 (sequence is synthesized)
ttccatttttgtgagatcccaaaggtgccagttctggccctttcagctcctgtttcaggatctgtcctggttcctgagctctaggctgctaagctgagccacacacccctccgtttgcac

SEQ ID NO: 198919 - DNA, 120 bp, Artificial Sequence
  ENSG00000113734_6 (sequence is synthesized)
cagttgcctgcaggttggatggaacacagtgccccacttttctgcaagtagctggcttgtaaagggtgaacagagccatgggaggaaggtctggcattgggatgccgccctggggacata

SEQ ID NO: 198920 - DNA, 120 bp, Artificial Sequence
  ENSG00000113734_7 (sequence is synthesized)
cgaaccgcctccttccaccattgtgcactatgggaggccgctgctgcgtggagcacttaaagtccagcctccaggaccggatgcccctcctgtctcccgctcccatcgtgcccttaaatg

SEQ ID NO: 198921 - DNA, 120 bp, Artificial Sequence
  ENSG00000113734_8 (sequence is synthesized)
ccagatctggtggagggaagagagaagaggtaggaagaaaggtgatgaaaactcctggtcattccttgaataaacttgattttatttaatagaataaaatgtatttgattttgtaagata

SEQ ID NO: 198922 - DNA, 120 bp, Artificial Sequence
  ENSG00000113734_9 (sequence is synthesized)
actgagagcctcatggggatcagcaggatgatggcccagcaggtccagcagagcgaggaggccatgcagtctctagttccttttaaaagatgtgaatcagaggctacaggagagactgct

SEQ ID NO: 198923 - DNA, 120 bp, Artificial Sequence
  ENSG00000113734_10 (sequence is synthesized)
tgagaccatctggtttcctccaatagttttcccagagtgtctcctctgtgatggagaagagtatcagccctctccagggtccttcagtataagacaacagaaaaagggcgtttactcctt

SEQ ID NO: 198924 - DNA, 120 bp, Artificial Sequence
  ENSG00000113734_11 (sequence is synthesized)
gaaacgcttttggaaaattgcacacgtggacaaaaggagaaagcatggtatcctgaatcccctgagccctgagtccattaccccagccagtctcgtttcagttctaccctcagcccatcc

SEQ ID NO: 198925 - DNA, 120 bp, Artificial Sequence
  ENSG00000113734_12 (sequence is synthesized)
cccatctggattattttgaagcaaatcccagacatcatccataaatatctcagtacatctctctaaaagataagggactctttggggaaaaagcagaagcaaccccataactacaatacc

SEQ ID NO: 198926 - DNA, 120 bp, Artificial Sequence
  ENSG00000113734_13 (sequence is synthesized)
caaataggcagaagcaaaaggaaagcaagcaggtgaccccaaggtcactccttgagtttgcagcttacctgaacatctgggctcggaaccagccaggggcttcctctcagcgtgtgctgt

SEQ ID NO: 198927 - DNA, 120 bp, Artificial Sequence
  ENSG00000113734_14 (sequence is synthesized)
gggagaggccttggagagagagggagcaaggcgacaacttggcctctgagcccagggcttttatgctctggtgtggcgacagcataccccccgctaacagtgggaaggaaacacaaatgc

SEQ ID NO: 198928 - DNA, 120 bp, Artificial Sequence
  ENSG00000113734_15 (sequence is synthesized)
tggtggcttctggggtgttgagagggtcccggtgttcttggggcccattttgtacaagcgataactattgaagaaaagagaagaatacagttcttaaccctttccttatgcctcacaaat

SEQ ID NO: 198929 - DNA, 120 bp, Artificial Sequence
  ENSG00000113734_16 (sequence is synthesized)
tcagcttgatttaaaagcctactaggaccataattttaaaacaaaaagcttattaggaatatggtgtctggaatttgctccacaattgcaggagtagttgcagttggggggagggggagc

SEQ ID NO: 198930 - DNA, 120 bp, Artificial Sequence
  ENSG00000113734_17 (sequence is synthesized)
aggatttcagaggttggtggttcttggttatgggtggtggacacatggcatttcatgatattatgctgtctgctctgtgatggttcaaaattctccgtaataataaagtttaaaaagaaa

SEQ ID NO: 198931 - DNA, 120 bp, Artificial Sequence
  ENSG00000113734_18 (sequence is synthesized)
cttcaactcagcatgacttcaactctccaactacacctgttaccttcagtgacctggagcagttggctaaagagcaagacaaagaatcagagaaacaacttctactccaggaagtggaga

SEQ ID NO: 198932 - DNA, 120 bp, Artificial Sequence
  ENSG00000113739_0 (sequence is synthesized)
tttctccttccctccacgggccgggtgagaaagtagccgggggctatcccgacccggcggttcttggggagggggccgaacaagaaaagggaggagatggagataacttccccggattta

SEQ ID NO: 198933 - DNA, 120 bp, Artificial Sequence
  ENSG00000113739_1 (sequence is synthesized)
gcttttttgtctttgtttttgttctcaccacttccatcggatgactggagagtaaaagggaacccggagcggggtggcgagcagcgctttgagaaaatgcaggagtgtgtttggagacgc

SEQ ID NO: 198934 - DNA, 120 bp, Artificial Sequence
  ENSG00000113739_2 (sequence is synthesized)
gtaaagttgcctttcaagctctggcctccgggcacgcgatgctccgcggcgggctgactcagggctgccttgggcctccctgccaccctcctggaaatgatgcaagtcctgactgtcacc

SEQ ID NO: 198935 - DNA, 120 bp, Artificial Sequence
  ENSG00000113739_3 (sequence is synthesized)
tggatccctgcagcccagcctggaatgcgtctggattaggggaaagacgagaaacgacactccaggtgttgcacggcccaccaaagcgggaagatagggcagttgctcagaccaaatact

SEQ ID NO: 198936 - DNA, 120 bp, Artificial Sequence
  ENSG00000113739_4 (sequence is synthesized)
gtatctagtgcttctgctcctatcttcaatcgtggggttctttttaatgcaaagtgtcacaaggccaggaattcccatgtgtgctcagttggcccacagcatcattgtgcctaggaaact

SEQ ID NO: 198937 - DNA, 120 bp, Artificial Sequence
  ENSG00000113739_5 (sequence is synthesized)
gcttcaatttatcaagtcctctgggctgggaatctcactgaattccaaacggcggaaagaggaaactttcccaacccgatgtgggtgtgacgcgagccaggggccccagggacactgtcc

SEQ ID NO: 198938 - DNA, 120 bp, Artificial Sequence
  ENSG00000113739_6 (sequence is synthesized)
cagagcacaccgtccccctttaacagcaactggagcttggattcgctcttatattgtacagtcctttcgaccattgccctggagcacccgcacacgcgcacgcatctccggccgcgctca

SEQ ID NO: 198939 - DNA, 120 bp, Artificial Sequence
  ENSG00000113739_7 (sequence is synthesized)
cacacactcatacacacgcacgcaaacgcgtggccgccgccaggtcggcaactttgtccggcgctcccagcggcgctcggcttcctcctgtagtagttgagcgcaggccccgcctcccgg

SEQ ID NO: 198940 - DNA, 120 bp, Artificial Sequence
  ENSG00000113739_8 (sequence is synthesized)
ccgtgttgtcaaaagggccggggtctcggattggtccagccgccgggacaacacctgctcgactccttcattcaagtgacaccagagcttccagggatatttgaggcaccatccctgcca

SEQ ID NO: 198941 - DNA, 120 bp, Artificial Sequence
  ENSG00000113739_9 (sequence is synthesized)
ttgccgggcactcgcggcgctgctaacggcctggtcacatgctctccggagagctacgggagggcgctgggtaacctctatccgagccgcggccgcgaggaggagggaaaaggcgagcaa

SEQ ID NO: 198942 - DNA, 120 bp, Artificial Sequence
  ENSG00000113739_10 (sequence is synthesized)
aaaggaagagtgggaggaggaggggaagcggcgaaggaggaagaggaggaggaggaagaggggagcacaaaggatccaggtctcccgacgggaggttaataccaagaaccatgtgtgccg

SEQ ID NO: 198943 - DNA, 120 bp, Artificial Sequence
  ENSG00000113739_11 (sequence is synthesized)
agcggctgggccagttcatgaccctggctttggtgttggccacctttgacccggcgcgggggaccgacgccaccaacccacccgagggtccccaagacaggagctcccagcagaaaggcc

SEQ ID NO: 198944 - DNA, 120 bp, Artificial Sequence
  ENSG00000113739_12 (sequence is synthesized)
gcctgtccctgcagaatacagcggagatccagcactgtttggtcaacgctggcgatgtggggtgtggcgtgtttgaatgtttcgagaacaactcttgtgagattcggggcttacatggga

SEQ ID NO: 198945 - DNA, 120 bp, Artificial Sequence
  ENSG00000113739_13 (sequence is synthesized)
tttgcatgacttttctgcacaacgctggaaaatttgatgcccagggcaagtcattcatcaaagacgccttgaaatgtaaggcccacgctctgcggcacaggttcggctgcataagccgga

SEQ ID NO: 198946 - DNA, 120 bp, Artificial Sequence
  ENSG00000113739_14 (sequence is synthesized)
agtgcccggccatcagggaaatggtgtcccagttgcagcgggaatgctacctcaagcacgacctgtgcgcggctgcccaggagaacacccgggtgatagtggagatgatccatttcaagg

SEQ ID NO: 198947 - DNA, 120 bp, Artificial Sequence
  ENSG00000113739_15 (sequence is synthesized)
acttgctgctgcacgaaccctacgtggacctcgtgaacttgctgctgacctgtggggaggaggtgaaggaggccatcacccacagcgtgcaggttcagtgtgagcagaactggggaagcc

SEQ ID NO: 198948 - DNA, 120 bp, Artificial Sequence
  ENSG00000113739_16 (sequence is synthesized)
tgtgctccatcttgagcttctgcacctcggccatccagaagcctcccacggcgccccccgagcgccagccccaggtggacagaaccaagctctccagggcccaccacggggaagcaggac

SEQ ID NO: 198949 - DNA, 120 bp, Artificial Sequence
  ENSG00000113739_17 (sequence is synthesized)
atcacctcccagagcccagcagtagggagactggccgaggtgccaagggtgagcgaggtagcaagagccacccaaacgcccatgcccgaggcagagtcgggggccttggggctcagggac

SEQ ID NO: 198950 - DNA, 120 bp, Artificial Sequence
  ENSG00000113739_18 (sequence is synthesized)
cttccggaagcagcgagtgggaagacgaacagtctgagtattctgatatccggaggtgaaatgaaaggcctggccacgaaatctttcctccacgccgtccattttcttatctatggacat

SEQ ID NO: 198951 - DNA, 120 bp, Artificial Sequence
  ENSG00000113739_19 (sequence is synthesized)
tccaaaacatttaccattagagaggggggatgtcacacgcaggattctgtggggactgtggacttcatcgaggtgtgtgttcgcggaacggacaggtgagatggagacccctggggccgt

SEQ ID NO: 198952 - DNA, 120 bp, Artificial Sequence
  ENSG00000113739_20 (sequence is synthesized)
ggggtctcaggggtgcctggtgaattctgcacttacacgtactcaagggagcgcgcccgcgttatcctcgtacctttgtcttctttccatctgtggagtcagtgggtgtcggccgctctg

SEQ ID NO: 198953 - DNA, 120 bp, Artificial Sequence
  ENSG00000113739_21 (sequence is synthesized)
ttgtgggggaggtgaaccagggaggggcagggcaaggcagggcccccagagctgggccacacagtgggtgctgggcctcgccccgaagcttctggtgcagcagcctctggtgctgtctcc

SEQ ID NO: 198954 - DNA, 120 bp, Artificial Sequence
  ENSG00000113739_22 (sequence is synthesized)
gggtggagaggaggcaggggccgagggggtgcttggtgccaaactgaaattcagtttcttgtgtggggccttgcggttcagagctcttggcgagggtggagggaggagtgtcatttctat

SEQ ID NO: 198955 - DNA, 120 bp, Artificial Sequence
  ENSG00000113739_23 (sequence is synthesized)
gtgtaatttctgagccattgtactgtctgggctgggggggacactgtccaagggagtggcccctatgagtttatattttaaccactgcttcaaatctcgatttcactttttttatttatc

SEQ ID NO: 198956 - DNA, 120 bp, Artificial Sequence
  ENSG00000113739_24 (sequence is synthesized)
cagttatatctacatatctgtcatctaaataaatggctttcaaacaaagcaactgggtcattaaaaccagctcaaagggggtttaaaaaaaaaaaaccagcccatcctttgaggctgatt

SEQ ID NO: 198957 - DNA, 120 bp, Artificial Sequence
  ENSG00000113739_25 (sequence is synthesized)
tttcttttttttaagttctattttaaaagctatcaaacagcgacatagccatacatctgactgcctgacatggactcctgcccacttgggggaaaccttatacccagaggaaaatacaca

SEQ ID NO: 198958 - DNA, 120 bp, Artificial Sequence
  ENSG00000113739_26 (sequence is synthesized)
cctggggagtacatttgacaaatttcccttaggatttcgttatctcaccttgaccctcagccaagattggtaaagctgcgtcctggcgattccaggagacccagctggaaacctggcttc

SEQ ID NO: 198959 - DNA, 120 bp, Artificial Sequence
  ENSG00000113739_27 (sequence is synthesized)
tccatgtgaggggatgggaaaggaaagaagagaatgaagactacttagtaattcccatcaggaaatgctgaccttttacataaaatcaaggagactgctgaaaatctctaagggacagga

SEQ ID NO: 198960 - DNA, 120 bp, Artificial Sequence
  ENSG00000113739_28 (sequence is synthesized)
ttttccagatcctaattggaaatttagcaataaggagaggagtccaaggggacaaataaaggcagagagaagagacagaactaaaaatacgaggaaaggagagtgaggattttcattaaa

SEQ ID NO: 198961 - DNA, 120 bp, Artificial Sequence
  ENSG00000113739_29 (sequence is synthesized)
agtctcagcagtgggtttcttgggttatttaaaacatcacctaaataggccttttcttcctaattggccatcaaattaaagcctatcctttctcaagcaggagctggtattgtagggagt

SEQ ID NO: 198962 - DNA, 120 bp, Artificial Sequence
  ENSG00000113739_30 (sequence is synthesized)
ggccgggtattctgggctgggctcttctggagtagggggtcagcaaacattgtctgcaaagggccagatactgaatccagtactttcagtttggcgagccgtgaggtctctgtcgaaact

SEQ ID NO: 198963 - DNA, 120 bp, Artificial Sequence
  ENSG00000113739_31 (sequence is synthesized)
actcaactctgccgtcctagcacaaaagcagccatagacaacacacaaacgagagggcttggctcccttccaggaagatttatttaacaggctcccagctgaatttcactcacaggacac

SEQ ID NO: 198964 - DNA, 120 bp, Artificial Sequence
  ENSG00000113739_32 (sequence is synthesized)
agtttactgatctctgttctagtgagtgggtcaaaaagcatatgcatccttatccgtcaactcatcagctcttcctcaaggcaacctgaggccagacaccaagaaaccaagcgtatctgc

SEQ ID NO: 198965 - DNA, 120 bp, Artificial Sequence
  ENSG00000113739_33 (sequence is synthesized)
tctaaaatgacttgttcctggggaatgccttcaaccaaaacacagctagtatttctatgccccaaatccaatcccagtctttcatgatccatgccggcggttgggtggggaggggaatca

SEQ ID NO: 198966 - DNA, 120 bp, Artificial Sequence
  ENSG00000113739_34 (sequence is synthesized)
ttggttgggggaagggaggaaaccccacctccagcccccgccaccgggctccctgggcacccagcaagatctggggctgcagagaacagaagagctggtgcacttaatccagctctgccc

SEQ ID NO: 198967 - DNA, 120 bp, Artificial Sequence
  ENSG00000113739_35 (sequence is synthesized)
ttggggggaggaggacctgtgtgtcaggctctgccatgggaacgagtgtaaaccgtggctgtctcctgcagtgagccaccgcggcaggcacgttgactgttttactgacatcactcaaaa

SEQ ID NO: 198968 - DNA, 120 bp, Artificial Sequence
  ENSG00000113739_36 (sequence is synthesized)
gctaaagcaataacattctcctgcgttgctgagtcagctgttcatttgtccgccagctcctggactggatgtgtgaaaggcatcacatttccattttcctccgtgtaaatgttttatgtg

SEQ ID NO: 198969 - DNA, 120 bp, Artificial Sequence
  ENSG00000113739_37 (sequence is synthesized)
ttcgcctactgatcccattcgttgcttctattgtaaatatttgtcatttgtatttattatctctgtgttttccccctaaggcataaaatggtttactgtgttcatttgaacccatttact

SEQ ID NO: 198970 - DNA, 120 bp, Artificial Sequence
  ENSG00000113739_38 (sequence is synthesized)
gatctctgttgtatatttttcatgccactgctttgttttctcctcagaagtcgggtagatagcatttctatcccatccctcacgttattggaagcatgcaacagtatttattgctcaggg

SEQ ID NO: 198971 - DNA, 120 bp, Artificial Sequence
  ENSG00000113739_39 (sequence is synthesized)
tcttctgcttaaaactgaggaaggtccacattcctgcaagcattgattgagacatttgcacaatctaaaatgtaagcaaagtagtcattaaaaatacaccctctacttgggctttatact

SEQ ID NO: 198972 - DNA, 120 bp, Artificial Sequence
  ENSG00000113739_40 (sequence is synthesized)
gcatacaaatttactcatgagccttcctttgaggaaggatgtggatctccaaataaagatttagtgtttattttgagctctgcatcttaacaagatgatctgaacacctctcctttgtat

SEQ ID NO: 198973 - DNA, 120 bp, Artificial Sequence
  ENSG00000113739_41 (sequence is synthesized)
caataaatagccctgttattctgaagtgagaggaccaagtatagtaaaatgctgacatctaaaactaaataaatagaaaacaccaggccagaactatagtcatactcacacaaagggaga

SEQ ID NO: 198974 - DNA, 120 bp, Artificial Sequence
  ENSG00000113739_42 (sequence is synthesized)
aatttaaactcgaaccaagcaaaaggcttcacggaaatagcatggaaaaacaatgcttccagtggccacttcctaaggaggaacaaccccgtctgatctcagaattggcaccacgtgagc

SEQ ID NO: 198975 - DNA, 120 bp, Artificial Sequence
  ENSG00000113739_43 (sequence is synthesized)
ttgctaagtgataatatctgtttctactacggatttaggcaacaggacctgtacattgtcacattgcattatttttcttcaagcgttaataaaagttttaaataaatggcttccacttga

SEQ ID NO: 198976 - DNA, 120 bp, Artificial Sequence
  ENSG00000113739_44 (sequence is synthesized)
aagggagcagcaccgagctcgcctccacacccccaacagctgtctcctttctaggataagcacaatcagacggggttgccaggaaagagaactgcaggccagatgtatgcctggctgcct

SEQ ID NO: 198977 - DNA, 120 bp, Artificial Sequence
  ENSG00000113739_45 (sequence is synthesized)
tcgccactcggaggcagggagcgtgggggaggggccgccagtgcggcagttcagactccagatgctgccaggcagggtgccaggccagccttttagaggcaataatccgaacagtttaaa

SEQ ID NO: 198978 - DNA, 120 bp, Artificial Sequence
  ENSG00000113739_46 (sequence is synthesized)
ccccgcagagggcctgggtgaaggggccacccagcaaggatggcaatgtgtatgggaggagagccgcgttgcttctagaggctgaatgcctgtcaaatggagaaggcttccatttacttc

SEQ ID NO: 198979 - DNA, 120 bp, Artificial Sequence
  ENSG00000113739_47 (sequence is synthesized)
agaaagctacactgactctactaaaaggcccctttcctgctggcttttaggaaaagagagaattccctcatcagtctcaaaatcacaagcaacagaaatgggaaatcgttttactaagaa

SEQ ID NO: 198980 - DNA, 120 bp, Artificial Sequence
  ENSG00000113739_48 (sequence is synthesized)
tgccccttccgagagaggactgggggccacattcggtgaagggctgcaagcttcctcccgggctgcgggaattctaggggattgggtgatacctcacccggatccctaattaaaaggagc

SEQ ID NO: 198981 - DNA, 120 bp, Artificial Sequence
  ENSG00000113742_0 (sequence is synthesized)
actcggctcggtcctgaggagaaggactcagccgcggctgcgggacccgggcaccgggaggcggtggcggcggcggcggcggcagcagcggcgacagcagaggaggaagaggaggaagaa

SEQ ID NO: 198982 - DNA, 120 bp, Artificial Sequence
  ENSG00000113742_1 (sequence is synthesized)
ggaaagaaaaagaagaaccaggaggagtcctcaacaacgacagcggggactgcgggaccagggtaaagcggcgacggcggcgacggcccagcaaccgtgaggagaaacaaaagccttcta

SEQ ID NO: 198983 - DNA, 120 bp, Artificial Sequence
  ENSG00000113742_2 (sequence is synthesized)
aattatagtttaaaaaaaaattctgggggaaaagagagagaaagccgaggggggaggcccttctcctttaaaataactacggtagtgggtttttcctttttttcctcttttttccctctc

SEQ ID NO: 198984 - DNA, 120 bp, Artificial Sequence
  ENSG00000113742_3 (sequence is synthesized)
tgcggagaatcgaactgagggaactgaacaaaccgcccctgggtcccatgagggaaaaaaaccccggagccgcagagaggggaagaggcagaaaccgcaggaccttccaggtcgccccct

SEQ ID NO: 198985 - DNA, 120 bp, Artificial Sequence
  ENSG00000113742_4 (sequence is synthesized)
cggtccccgcacccccaggccgcccgctcaccctcgtcgagtctcgctaatccctcctgatcgcgacccccgcaagagggagaaacgggtgtttccaacccctttcatgggggagaggaa

SEQ ID NO: 198986 - DNA, 120 bp, Artificial Sequence
  ENSG00000113742_5 (sequence is synthesized)
gccgcggggagcccaggaacagcgaccgcagcaagatctgcacccggagcctcaggaacagccccagaggccaaaactgcaccctgcgaaagagcagaaaacaggaccaggaacagcaga

SEQ ID NO: 198987 - DNA, 120 bp, Artificial Sequence
  ENSG00000113742_6 (sequence is synthesized)
aacctccctgcaatcatctttccattagtcaatgctgatttcctctcccgaaaccaggaattcacttcccaccccagataacctaatataatctatatatataaatatataatatataat

SEQ ID NO: 198988 - DNA, 120 bp, Artificial Sequence
  ENSG00000113742_7 (sequence is synthesized)
gttcttaaattattcctgatttttttttaaccaagctgccaagaaaagaacgtattcccctcttagtcctattctaatttttatgtgagtgaatctaaactgctgaggaaaaccatatgt

SEQ ID NO: 198989 - DNA, 120 bp, Artificial Sequence
  ENSG00000113742_8 (sequence is synthesized)
gattgttaaattatatatatctatatttttactccgcgcaaggcttattcttctacatccatagatgcttgagaagctctgtttttgtcattcatgtacattttcctttggaaaaagaaa

SEQ ID NO: 198990 - DNA, 120 bp, Artificial Sequence
  ENSG00000113742_9 (sequence is synthesized)
gcgcctattttactaaccaaagacttgatttttaccctcttcatttttattccctcctaaaaataagcccaattggatccaagtcaatgttttaagagatttttttaagagttgtttttt

SEQ ID NO: 198991 - DNA, 120 bp, Artificial Sequence
  ENSG00000113742_10 (sequence is synthesized)
ctttcagagaccagaattccaaatcagaacaatttaaggtgataagctgcgatctttgagctagctataaataagacatttcaagcaagcaagcaaacaacttaaatttggggtagagga

SEQ ID NO: 198992 - DNA, 120 bp, Artificial Sequence
  ENSG00000113742_11 (sequence is synthesized)
aaaaaaaggcgtgagacatcaggttgtcattttttattgtgagattctgctcctaaagataataaatgggggattacgggtttggagtgctagtgcaaagcaatactgggaataaatctg

SEQ ID NO: 198993 - DNA, 120 bp, Artificial Sequence
  ENSG00000113742_12 (sequence is synthesized)
cttttccagtcagattccatccacatctgcagcctccacaccatcaccaaaatgccacccccagccctgctgcttttataaataataacacagctgccaatggcagcagtgctgggtcag

SEQ ID NO: 198994 - DNA, 120 bp, Artificial Sequence
  ENSG00000113742_13 (sequence is synthesized)
cttggctttttcctgctccagctacccataacattcaggatgagatcttggggtcagaaaaagcaaaaagtcagcaacaggaacagcaagaccccttagaaaagcagcagctttccccaa

SEQ ID NO: 198995 - DNA, 120 bp, Artificial Sequence
  ENSG00000113742_14 (sequence is synthesized)
gtccaggtcaggaagctggaatactgcctgaaacagagaaggcaaaatcagaagaaaatcaaggggacaattcttcggaaaatggcaatgggaaggagaaaataaggatcgaatctccag

SEQ ID NO: 198996 - DNA, 120 bp, Artificial Sequence
  ENSG00000113742_15 (sequence is synthesized)
tgttgacagggtttgattatcaagaagccactgggctaggtacttcaacccaacccttgacatctagcgcatcgtctcttactggtttcagtaactggtcagcagcgatagcgccttcct

SEQ ID NO: 198997 - DNA, 120 bp, Artificial Sequence
  ENSG00000113742_16 (sequence is synthesized)
cctctacaataatcaatgaagatgcaagtttctttcaccagggaggggtccctgctgcttcggctaataacggtgctctgttgtttcaaaatttcccccatcatgtcagccctggctttg

SEQ ID NO: 198998 - DNA, 120 bp, Artificial Sequence
  ENSG00000113742_17 (sequence is synthesized)
gaggcagcttctctcctcagatcgggcctctctcacagcaccacccacatcaccctcatttccagcatcatcacagccagcatcagcagcaaaggaggtctcctgccagtccccatcccc

SEQ ID NO: 198999 - DNA, 120 bp, Artificial Sequence
  ENSG00000113742_18 (sequence is synthesized)
cacccttcacacatagaaatgctgcttttaaccagctgcctcatttggcgaataatcttaacaaacccccctctccgtggagcagctaccagagtccgtcaccaacaccctcctcttcct

SEQ ID NO: 199000 - DNA, 120 bp, Artificial Sequence
  ENSG00000113742_19 (sequence is synthesized)
ggagcccgggcggtggtggatatggtggctggggaggttcccaaggccgagatcaccgcagagggctgaatggtggaataacgcccctgaactccatctcgcctttgaagaaaaattttg

SEQ ID NO: 199001 - DNA, 120 bp, Artificial Sequence
  ENSG00000113742_20 (sequence is synthesized)
caagcaatcatattcagctccagaagtatgctcgccccagctctgcctttgcacctaaatcctggatggaagatagcttgaacagggctgacaacatttttccttttccggatcgcccca

SEQ ID NO: 199002 - DNA, 120 bp, Artificial Sequence
  ENSG00000113742_21 (sequence is synthesized)
ggacattcgacatgcactcactggagagttcactcattgacataatgagagctgaaaatgataccattaaaggtcgtctaaactattcatatccaggatccgatagctctctgcttatta

SEQ ID NO: 199003 - DNA, 120 bp, Artificial Sequence
  ENSG00000113742_22 (sequence is synthesized)
atgcaaggacatatgggcgaaggagaggtcagtcttcactgtttccaatggaagatggattcttggatgatggccgtggggatcagcctcttcatagtggcctgggttcacctcactgct

SEQ ID NO: 199004 - DNA, 120 bp, Artificial Sequence
  ENSG00000113742_23 (sequence is synthesized)
tcagtcaccagaatggggaaagagtggaacgatattctcgaaaggtgtttgtaggcggattgcctccagacattgatgaagatgagatcacagctagttttcgtcgctttggccctctga

SEQ ID NO: 199005 - DNA, 120 bp, Artificial Sequence
  ENSG00000113742_24 (sequence is synthesized)
ttgtggattggcctcataaagctgagagcaaatcctattttcctcctaaaggctatgcattcctgctgtttcaagatgaaagctctgtgcaggctctcattgatgcatgcattgaagaag

SEQ ID NO: 199006 - DNA, 120 bp, Artificial Sequence
  ENSG00000113742_25 (sequence is synthesized)
atggaaaactctacctttgtgtatcaagtcccactatcaaggataagccagtccagattcggccttggaatctcagtgacagtgactttgtgatggatggttcacagccacttgacccac

SEQ ID NO: 199007 - DNA, 120 bp, Artificial Sequence
  ENSG00000113742_26 (sequence is synthesized)
gaaaaactatatttgttggtggtgttcctcgaccattacgagctgtggagcttgcgatgataatggatcggctatatggaggtgtgtgctacgctgggattgataccgaccctgagctaa

SEQ ID NO: 199008 - DNA, 120 bp, Artificial Sequence
  ENSG00000113742_27 (sequence is synthesized)
aatacccaaaaggagctgggagagttgcgttctctaatcaacagagttacatagctgctatcagtgcccgctttgttcagctgcagcatggagagatagataaacgggtggaagttaagc

SEQ ID NO: 199009 - DNA, 120 bp, Artificial Sequence
  ENSG00000113742_28 (sequence is synthesized)
catatgtcttggatgatcagctgtgtgatgaatgtcagggggcccgttgtggggggaaatttgctccatttttctgtgctaatgttacctgtctgcagtattactgtgaatattgctggg

SEQ ID NO: 199010 - DNA, 120 bp, Artificial Sequence
  ENSG00000113742_29 (sequence is synthesized)
ctgctatccattctcgtgctggcagggaattccacaagcccctggtgaaggaaggcggtgaccgccctcggcatatttcattccgctggaactaaaggataactgcagtgctcattttca

SEQ ID NO: 199011 - DNA, 120 bp, Artificial Sequence
  ENSG00000113742_30 (sequence is synthesized)
ggcctcagaataagtgcactcttctgttcattctgaccccttcctcaacctcttcacgctggcatgtccttttgtagcagtctgtaacttaactatagtataatgaaaagaatgacctat

SEQ ID NO: 199012 - DNA, 120 bp, Artificial Sequence
  ENSG00000113742_31 (sequence is synthesized)
aatataggtgttttgtagattcttgtgtcactgcaaacaatatgaactcctttttcgtattgccatcgggttgcatggaagttttattctcttgttttgctggaaaccaagaggatccaa

SEQ ID NO: 199013 - DNA, 120 bp, Artificial Sequence
  ENSG00000113742_32 (sequence is synthesized)
acttcctgcaacattttcttagaggagagagagaaatattaaaagagaaatgaaacaatagagtattttgggtttttaattaaattattgttaataatataacatataagaatactttta

SEQ ID NO: 199014 - DNA, 120 bp, Artificial Sequence
  ENSG00000113742_33 (sequence is synthesized)
tataagaatacttttattaaaataaccatgcaacaataacactatcggtctatctgacagtttttcccccagggaagtgcttttgccttttcctttcttttttttttttttttcatcttt

SEQ ID NO: 199015 - DNA, 120 bp, Artificial Sequence
  ENSG00000113742_34 (sequence is synthesized)
ttccatccctttttaatttttttaacagcaatggaggaagttaacaatttttaatggaaagagcatgttagagcaaacaaatgcataagcaagactgagcagcattataattaattttca

SEQ ID NO: 199016 - DNA, 120 bp, Artificial Sequence
  ENSG00000113742_35 (sequence is synthesized)
gggttttgaggctgaacataatttcattatccctcaaaaagttaccaccacatcagaaaaaataaaaaaaaaatagtaaagtaggcagagctaggtttattttctcttaaacaattttta

SEQ ID NO: 199017 - DNA, 120 bp, Artificial Sequence
  ENSG00000113742_36 (sequence is synthesized)
aaattcagaatgtaaaaattgggtaaatttactactgaggggagtgcacttatttatttaacttacttatctggtcaaagccccaggaaacctaccaaagctagaattaatgacaactgg

SEQ ID NO: 199018 - DNA, 120 bp, Artificial Sequence
  ENSG00000113742_37 (sequence is synthesized)
tgggaaacctagcatttcctctcctgaagaataaatgtataaatgttatttttgatgtttatatataaactctatatcctaatttactaatactcatcagatgtcagcctttgctctcca

SEQ ID NO: 199019 - DNA, 120 bp, Artificial Sequence
  ENSG00000113742_38 (sequence is synthesized)
ttttgacgttaaaaaacaacaacagatctagagatacctcaaggatatcatttttgattttgtgttacagtacacttgtagccaaaactggaagacaaaaccaatatataatttggctgc

SEQ ID NO: 199020 - DNA, 120 bp, Artificial Sequence
  ENSG00000113742_39 (sequence is synthesized)
atagaaaatgaaaaaacagttaaaaaaagtgaagtagttgcaaagtgttttgcactgttgaactaagtaactgtgtaaatctgtgcaaaggtacgtatgtttatcttactcttcctataa

SEQ ID NO: 199021 - DNA, 120 bp, Artificial Sequence
  ENSG00000113742_40 (sequence is synthesized)
actaaaataacattacagtttccgaatttagcatgggacatagtcagtgtttgaagtgccaacttcatcaagtaatgcatgctttattataaataaaattctagctttgaaaggcgttat

SEQ ID NO: 199022 - DNA, 120 bp, Artificial Sequence
  ENSG00000113742_41 (sequence is synthesized)
gtgttgaacagtatgcttcaggggtaaatttaaaatagtctcttgaagccctagtcatggaagtaacttttattttaattgacattctcttattaaatgccctatccatcattaaaaggt

SEQ ID NO: 199023 - DNA, 120 bp, Artificial Sequence
  ENSG00000113742_42 (sequence is synthesized)
ttattatcagtgggcaaaacatgaaataatatgatcgaatggcaatcttgctagttgcgctacctaacagtaccatcttggatccttcaaaaccaaagacttgccccagcactgctgtgg

SEQ ID NO: 199024 - DNA, 120 bp, Artificial Sequence
  ENSG00000113742_43 (sequence is synthesized)
aaccacctggcttatgacccctatggatgatctttaggaaaagcagccctttacttttaatacaggctttaatgaactatacctgttaagttccaaaggtcaaaatggaggcatttgctg

SEQ ID NO: 199025 - DNA, 120 bp, Artificial Sequence
  ENSG00000113742_44 (sequence is synthesized)
tctaatattcaaacatagaaagggagctgcttttaaagaattccctgcaaatactgaaagcagtcatgcgaatggagggtgctcttgtgtagctggtcagggacttttttttcttttctc

SEQ ID NO: 199026 - DNA, 120 bp, Artificial Sequence
  ENSG00000113742_45 (sequence is synthesized)
ctgaactacatgattctaattggaatgttcatttgcctctttttactcttttaaatgcttgtaggtggcttggggtgtgctatcgtgctgttcctactcagtaaacaggtgtgatgagtt

SEQ ID NO: 199027 - DNA, 120 bp, Artificial Sequence
  ENSG00000113742_46 (sequence is synthesized)
aacaagaaataacactgtttgagaactagctttgaataataatttttccctttgtacatgacctgctgaatttcggtacagtgtttttgtagctaacttattttgtcatgcacataatgt

SEQ ID NO: 199028 - DNA, 120 bp, Artificial Sequence
  ENSG00000113742_47 (sequence is synthesized)
atatttgttatgcactacttttgtatatcttgtttttccaacagtgaacatttttaggcacacttttcactgacgggatatctctttatgcaatacctcaatttttcatattgcaaagag

SEQ ID NO: 199029 - DNA, 120 bp, Artificial Sequence
  ENSG00000113742_48 (sequence is synthesized)
atcttcatatacttcattttttaatataaataattttaataaattttattttcttatattctgctttttatacatttcagtgctctgcatacattttaaattatgaatgtcgtgcactgg

SEQ ID NO: 199030 - DNA, 120 bp, Artificial Sequence
  ENSG00000113742_49 (sequence is synthesized)
attttaaattatgaatgtcgtgcactggcaatgctattttagagtctgcagagaagagaaagcatgttgcttaaacatccttccccagcaccagctattggtgtacctataatttaagaa

SEQ ID NO: 199031 - DNA, 120 bp, Artificial Sequence
  ENSG00000113742_50 (sequence is synthesized)
atagtctatgtaaagtcacaaattaatgaaaaaaattcgcatgaaaatgacagataacactgtagttcctaaaaaaaaaattaaatgcataagcataaggtagaaattaaaataacaaaa

SEQ ID NO: 199032 - DNA, 120 bp, Artificial Sequence
  ENSG00000113742_51 (sequence is synthesized)
ttgtctacagcttcttactaagtttttaaaattattcataaaatgcagacatttttggtgaatgtttagccatttttaatattaataaattgatgttaagtgtttgattcagagatgtct

SEQ ID NO: 199033 - DNA, 120 bp, Artificial Sequence
  ENSG00000113742_52 (sequence is synthesized)
gctcttttaaattatatataaggaaaaaaaatagcctgccttgggacaggtgtgtaatgttagtgtgcatgactaatgtaagaaattgttattctactaatatttacttgtgattgtgtg

SEQ ID NO: 199034 - DNA, 120 bp, Artificial Sequence
  ENSG00000113742_53 (sequence is synthesized)
acaagtgtgtttacagattattggttacacttcaatttacagggcataaacaatgattatctattactctgaactttatgattacatgttcttcagattacatgggattgtagttgggag

SEQ ID NO: 199035 - DNA, 120 bp, Artificial Sequence
  ENSG00000113742_54 (sequence is synthesized)
ttaccatgtaactcaaacataattaacatgtaattagtttacagattgtagggcatcacttcaattcaccaagcatgtagttctagcgcactagcatggcgccagccatgtacttacaat

SEQ ID NO: 199036 - DNA, 120 bp, Artificial Sequence
  ENSG00000113742_55 (sequence is synthesized)
gtagttacagagtaattacatggtgatttttgcaatgtaaaataaagtgtttctgattattttctatgtaaaggaaccctctcctttccccttctggtccctgcgctttggtataatata

SEQ ID NO: 199037 - DNA, 120 bp, Artificial Sequence
  ENSG00000113742_56 (sequence is synthesized)
tatacttctccatacacagacctctgcagaatgcaaaataaaacttgcagtgaatgaatttagcattttatgagagtgctgttggaaagacttgataattcaccccttttgttttgaaga

SEQ ID NO: 199038 - DNA, 120 bp, Artificial Sequence
  ENSG00000113742_57 (sequence is synthesized)
gttgaatcttctgttaaaaggtgatttaaaacttgaatgtgatgaattgtggcaagttaacttcaagttatgtgcaatacttatttcaaacttttgaaagatctttgcagtgtaattctt

SEQ ID NO: 199039 - DNA, 120 bp, Artificial Sequence
  ENSG00000113742_58 (sequence is synthesized)
tgtttttaattgcagacatttaaaaatgtcattttctactgttaagagtaatcctctttcttgctggtgtttctaaagaaaagaatcagaaatcaatctttctactaatgtaaatttgag

SEQ ID NO: 199040 - DNA, 120 bp, Artificial Sequence
  ENSG00000113742_59 (sequence is synthesized)
attatttttaaaaatggaataaaagaggttttggtcatttgctttattttattattttaaagctactgtgattgatagcattgtaagaatcgggacaatattgtattcaactgttttatt

SEQ ID NO: 199041 - DNA, 120 bp, Artificial Sequence
  ENSG00000113742_60 (sequence is synthesized)
ttttaaaatttaaagtataattagtttttataattttcatcagatttttgttatattttttggaagtgaaacttttagcaagtgggtgtctagtttttactaatccctaattttttttcc

SEQ ID NO: 199042 - DNA, 120 bp, Artificial Sequence
  ENSG00000113742_61 (sequence is synthesized)
ttttttccagtgtattgctcatattatcagaaggaaaagttatttaagtatgtcagttaattgtactacttggctgaatttccatatagtttttactgtgtatggggaggttgtagtatt

SEQ ID NO: 199043 - DNA, 120 bp, Artificial Sequence
  ENSG00000113742_62 (sequence is synthesized)
tattatagcattttaaataagggtaattcattttttattaaagtcattttcacgttaagttcctatttttgtatgttctactcttaagttatataacacagttccttttttaaaagagtt

SEQ ID NO: 199044 - DNA, 120 bp, Artificial Sequence
  ENSG00000113742_63 (sequence is synthesized)
catttgttgaagtgctagtgaaaaattaatgttattaaatagtttgcaaatgactatttataccagtatgcatataatttttaaatatttgtaatgtgagatgttgaatgaataaaactt

SEQ ID NO: 199045 - DNA, 120 bp, Artificial Sequence
  ENSG00000113742_64 (sequence is synthesized)
ttaactcagatttcttttaatatacttatttctttttaacacaagtagatgatgctttcttgactgggaatgtaacattttaaaatattaggaatatactgttcagctaatgcagcacaa

SEQ ID NO: 199046 - DNA, 120 bp, Artificial Sequence
  ENSG00000113742_65 (sequence is synthesized)
accaataggaaaaaatcttcagtcatataagtactgtggccagtgtgcattcttatgtaagcctataagcgtcggtgggtggttgtgtctttggcctgtactgttagttcacctgctgcc

SEQ ID NO: 199047 - DNA, 120 bp, Artificial Sequence
  ENSG00000113742_66 (sequence is synthesized)
tgccctgcagagttctttttatttgtagccttcaatatgtatacagggagtaagcccaggatctaagcattcagttatcagttgaaggccaaatgcccaacaaaagtgaaaaacccaatg

SEQ ID NO: 199048 - DNA, 120 bp, Artificial Sequence
  ENSG00000113742_67 (sequence is synthesized)
tttagttaataatgaaagtccgtatctgggaggttcagttttgagtctttgtcaatgaatagtcttgatttgtggccacactaccaaagggcttgaaaacaagtctcttttgacttccaa

SEQ ID NO: 199049 - DNA, 120 bp, Artificial Sequence
  ENSG00000113742_68 (sequence is synthesized)
ttcccagttcctccatagaccttaatgtcataggatacggtgtgtgggattataatctctatggcatgtcaattgaaaatattatctttgatttgatccattaatcatgtggactaccaa

SEQ ID NO: 199050 - DNA, 120 bp, Artificial Sequence
  ENSG00000113742_69 (sequence is synthesized)
gtgctgtaatgtgttagtatttatattttaaactgcattctcaaacttttaacataaggatttattataacaaaatataacactgagaatatcctgttttgtcagatttaatatctgttc

SEQ ID NO: 199051 - DNA, 120 bp, Artificial Sequence
  ENSG00000113742_70 (sequence is synthesized)
tttcttgagtatagtattctcaagactagaagaggttcttgtcctgagagaaatggactatgagatcttttgcgtctaagttgtctttcccaacaggcagctcttctaactatagagatt

SEQ ID NO: 199052 - DNA, 120 bp, Artificial Sequence
  ENSG00000113742_71 (sequence is synthesized)
actgagggtaagggcaggctggacagcttcccctttctctcatctggcaattcccaaaccttacgttgagcattcaatgaagggccttgaggaaaccccagggatgggacactggagatg

SEQ ID NO: 199053 - DNA, 120 bp, Artificial Sequence
  ENSG00000113742_72 (sequence is synthesized)
tgggtggcatttggttatcaagtctataatattcctaggcattctgggatggtttcactattttaagaaaagaaaaaaaagatagcccaagcatatttagtttattttaggaaatgttta

SEQ ID NO: 199054 - DNA, 120 bp, Artificial Sequence
  ENSG00000113742_73 (sequence is synthesized)
tttcaggtaagtgagatatcaatgatatgtgatataacaactctatcttgaaattacataggtgcattgctttgggtgttttaaatcacagaatggtgtgtctggaaagggtgtaagagg

SEQ ID NO: 199055 - DNA, 120 bp, Artificial Sequence
  ENSG00000113742_74 (sequence is synthesized)
cttcctgggctatatttcttcattcactgattgcctaaacctacccaacgaggaaaattctttttatttttatcttttgtttttactgtctaaccagatgaataaacagtggaaattctc

SEQ ID NO: 199056 - DNA, 120 bp, Artificial Sequence
  ENSG00000113742_75 (sequence is synthesized)
taccacactcttaacaatcaagtcatttcataaccccttttggtaatgggtgtttgtgtccacagctagatcagaaagtaagtactttttctagggatttttttttttttttaagtttgg

SEQ ID NO: 199057 - DNA, 120 bp, Artificial Sequence
  ENSG00000113742_76 (sequence is synthesized)
gaaatagtttgatcaaaagtcatggggaaagtaatctctgattttaaaaattgaagaatactgaaggtgtcagtgagttagaaatttttaaggagtaattattttctgaaatgtgtaata

SEQ ID NO: 199058 - DNA, 120 bp, Artificial Sequence
  ENSG00000113742_77 (sequence is synthesized)
accgaataataaacaagacaaaactctaatatttcagactgtgatcttcagaggactaggatagtcctttccacaagaaaaagacaaaaaaaaataaagttttaccattaaatacactta

SEQ ID NO: 199059 - DNA, 120 bp, Artificial Sequence
  ENSG00000113742_78 (sequence is synthesized)
atgagatcacagctagttttcgtcgctttggccctctgattgtggattggcctcataaagctgagagcaaatcctattttcctcctaaagttttgtgcatgattcctttcccctgaagaa

SEQ ID NO: 199060 - DNA, 120 bp, Artificial Sequence
  ENSG00000113742_79 (sequence is synthesized)
gtcgtctaaactattcatatccaggatccgatagctctctgcttattaatgacatttaccaggaaatgaagaatatagtcacagtttttccattttcaaaagctggtagatgaaatcaca

SEQ ID NO: 199061 - DNA, 120 bp, Artificial Sequence
  ENSG00000113742_80 (sequence is synthesized)
gagagcacacgcacacatgtatgaggagagagctagcagtggggtgatttgaaagtcacaagagaaataaatgatttgaaaaaaatctctatgacaagaaactcctaattgggttttgaa

SEQ ID NO: 199062 - DNA, 120 bp, Artificial Sequence
  ENSG00000113742_81 (sequence is synthesized)
tccggtctgaacagcctgaattgatggacttggcaattcctcttaaacctctgcaaattttggcctacctttcatcagtaaggactatctagtgagagaaatgatctaaatgttttcttc

SEQ ID NO: 199063 - DNA, 120 bp, Artificial Sequence
  ENSG00000113742_82 (sequence is synthesized)
atccccatttatttttgaacactgtgaaactgttcatctcagagtgactctttatgcctttcacccgtttgtttattttccaatgttaacattgaagatgtagataattaaaccattcct

SEQ ID NO: 199064 - DNA, 120 bp, Artificial Sequence
  ENSG00000113742_83 (sequence is synthesized)
gagagctgaaaatgataccattaaaggtaagtttagaaatatacccaattgatttcagacaatagttttaaatgtgtattaactatttaatctgatacacagtatggcaaatattatgga

SEQ ID NO: 199065 - DNA, 120 bp, Artificial Sequence
  ENSG00000113742_84 (sequence is synthesized)
gtcactttgtatgcagtaagttctatcaattttacacatatacctcttgttgttaaaaaatccaacatacttgatgaacctctatagtggagccatcgtgataccaggtaagagtactac

SEQ ID NO: 199066 - DNA, 120 bp, Artificial Sequence
  ENSG00000113742_85 (sequence is synthesized)
atgtgtgattaccaatattagaacgggagcattttatgacaataaagtgacagctgacaattttgcctatagagttaattatggtctataatacatgaaataatgtcctatgaatttctt

SEQ ID NO: 199067 - DNA, 120 bp, Artificial Sequence
  ENSG00000113749_0 (sequence is synthesized)
gtagagtcccaggatggcacccaatggcacagcctcttccttttgcctggactctaccgcatgcaagatcaccatcaccgtggtccttgcggtcctcatcctcatcaccgttgctggcaa

SEQ ID NO: 199068 - DNA, 120 bp, Artificial Sequence
  ENSG00000113749_1 (sequence is synthesized)
tgtggtcgtctgtctggccgtgggcttgaaccgccggctccgcaacctgaccaattgtttcatcgtgtccttggctatcactgacctgctcctcggcctcctggtgctgcccttctctgc

SEQ ID NO: 199069 - DNA, 120 bp, Artificial Sequence
  ENSG00000113749_2 (sequence is synthesized)
catctaccagctgtcctgcaagtggagctttggcaaggtcttctgcaatatctacaccagcctggatgtgatgctctgcacagcctccattcttaacctcttcatgatcagcctcgaccg

SEQ ID NO: 199070 - DNA, 120 bp, Artificial Sequence
  ENSG00000113749_3 (sequence is synthesized)
gtactgcgctgtcatggacccactgcggtaccctgtgctggtcaccccagttcgggtcgccatctctctggtcttaatttgggtcatctccattaccctgtcctttctgtctatccacct

SEQ ID NO: 199071 - DNA, 120 bp, Artificial Sequence
  ENSG00000113749_4 (sequence is synthesized)
ggggtggaacagcaggaacgagaccagcaagggcaatcataccacctctaagtgcaaagtccaggtcaatgaagtgtacgggctggtggatgggctggtcaccttctacctcccgctact

SEQ ID NO: 199072 - DNA, 120 bp, Artificial Sequence
  ENSG00000113749_5 (sequence is synthesized)
gatcatgtgcatcacctactaccgcatcttcaaggtcgcccgggatcaggccaagaggatcaatcacattagctcctggaaggcagccaccatcagggagcacaaagccacagtgacact

SEQ ID NO: 199073 - DNA, 120 bp, Artificial Sequence
  ENSG00000113749_6 (sequence is synthesized)
ggccgccgtcatgggggccttcatcatctgctggtttccctacttcaccgcgtttgtgtaccgtgggctgagaggggatgatgccatcaatgaggtgttagaagccatcgttctgtggct

SEQ ID NO: 199074 - DNA, 120 bp, Artificial Sequence
  ENSG00000113749_7 (sequence is synthesized)
gggctatgccaactcagccctgaaccccatcctgtatgctgcgctgaacagagacttccgcaccgggtaccaacagctcttctgctgcaggctggccaaccgcaactcccacaaaacttc

SEQ ID NO: 199075 - DNA, 120 bp, Artificial Sequence
  ENSG00000113749_8 (sequence is synthesized)
tctgaggtccaacgcctctcagctgtccaggacccaaagccgagaacccaggcaacaggaagagaaacccctgaagctccaggtgtggagtgggacagaagtcacggccccccagggagc

SEQ ID NO: 199076 - DNA, 120 bp, Artificial Sequence
  ENSG00000113749_9 (sequence is synthesized)
cacagacaggaagccagcactgtcctgcactacgtgctccagcaacctcctgagctgctgcaagagcctgtgggggctcaggttccttcagagacacatgggaggcccctcggaggagct

SEQ ID NO: 199077 - DNA, 120 bp, Artificial Sequence
  ENSG00000113749_10 (sequence is synthesized)
atcgggggagccactgtctgaggagccacagaagagacctccccagaaagcggtgaggacgctgccctctgaggctgtctagacctagccccaggacactgaagataccgctcccggtcc

SEQ ID NO: 199078 - DNA, 120 bp, Artificial Sequence
  ENSG00000113749_11 (sequence is synthesized)
ccaagatgtgactcctggagctcctaaggacccagtctccaaagccaccaaggactcaccctggactgaatctgggggctcccagaacacacagctgggtgtggggtcctcaggcctagg

SEQ ID NO: 199079 - DNA, 120 bp, Artificial Sequence
  ENSG00000113749_12 (sequence is synthesized)
gcggaacagcctattctgtgctcagcattcccagacaggcacgcaagactcctctgggcccgagtgggctgaatcccatgggttcaaagctcacgttggtgctggccctgggagtcatga

SEQ ID NO: 199080 - DNA, 120 bp, Artificial Sequence
  ENSG00000113749_13 (sequence is synthesized)
gcagagacggtgggacagacggggatgcgtgcacatgtgtgtgcatgggtgcatacgtgtagggacgtgcatgacctctgagcaaggcagagggtattgaagaaagcattggcctctcac

SEQ ID NO: 199081 - DNA, 120 bp, Artificial Sequence
  ENSG00000113749_14 (sequence is synthesized)
tccctcatgggttctgcaggatgaaggaaaggaaaggaaaagacagagaaaggaaggaaatagcttttcatgagcacctactgtgtaccaggtgcttccctggcatgagctctcgtaacc

SEQ ID NO: 199082 - DNA, 120 bp, Artificial Sequence
  ENSG00000113749_15 (sequence is synthesized)
cttatagcaacatgagtttagagcaagaatcacaccccgactttacagagatggaaactgaggctcagagaagtaagggacctgcccaaggccactcagcacctagaaagtgtgcctagc

SEQ ID NO: 199083 - DNA, 120 bp, Artificial Sequence
  ENSG00000113749_16 (sequence is synthesized)
caggagagaaggcaaatatttccttgactcagccaccttcctcctagcaaggcttagacccccaggctctgggggtcccttcctgctacagtatgaccctctctggtgcttgtcatcaag

SEQ ID NO: 199084 - DNA, 120 bp, Artificial Sequence
  ENSG00000113749_17 (sequence is synthesized)
aagtggtatgcggtggacttgctggagagagtgtctgcagccaggcatcatggagggagggatggatcttgagggactgtaatggttgtgaatgggggagttggcccccagcactctctg

SEQ ID NO: 199085 - DNA, 120 bp, Artificial Sequence
  ENSG00000113749_18 (sequence is synthesized)
gtggccgtatgaccttgggcacgtctcctgaccactctaagcagcttttgattcccctgtccaagagggtaggccccctgttcctatttacaggatccataaagagactcaaagagatag

SEQ ID NO: 199086 - DNA, 120 bp, Artificial Sequence
  ENSG00000113749_19 (sequence is synthesized)
ggtagtgccagccccagagagagggggctgtggagggacttctacccccagggcttctcagtggcatctcctggctggcccctgacactcaatcttccttggtttccaagatgcttcatg

SEQ ID NO: 199087 - DNA, 120 bp, Artificial Sequence
  ENSG00000113749_20 (sequence is synthesized)
atcttccccctccctgacatccccgacctcccttttctgtcccttttgcaactcattgtcctctacctgccatcagatgtggctgttcctcagtctcagtccagagtcctctcttctcac

SEQ ID NO: 199088 - DNA, 120 bp, Artificial Sequence
  ENSG00000113749_21 (sequence is synthesized)
tcagcatctctcctcctgtgacctcgtctgcacccacaactccagttacaaggcacgaggtttggttatgaaatcactcacagatttataactgcaggcttggctccttccgggagcttg

SEQ ID NO: 199089 - DNA, 120 bp, Artificial Sequence
  ENSG00000113749_22 (sequence is synthesized)
agacccactgccgcctccgcaacacctccacctgggagtttcagaggcgctctccctcagcgtgtctgcagctgcgtgcctgcagctgcgtgcctgccttctccctgcacctgctctgct

SEQ ID NO: 199090 - DNA, 120 bp, Artificial Sequence
  ENSG00000113749_23 (sequence is synthesized)
ccccaggtccctttctcagaccaaagcctgcccgggcttcacaggctgagggtccaccttgccacctccgtttgcctcagtcctcatggagccctggctccactgtctgctggcttctcc

SEQ ID NO: 199091 - DNA, 120 bp, Artificial Sequence
  ENSG00000113749_24 (sequence is synthesized)
ccatctactctgtgtcactccatccgaccaccattgtctccatcaggacagttggaacacctcttctcagcactctcgcccccacccagtccaccccctacctgacagccagagtgggcc

SEQ ID NO: 199092 - DNA, 120 bp, Artificial Sequence
  ENSG00000113749_25 (sequence is synthesized)
atgccagatgcaacccaggtcatgccacacaggtagataaaaccatcttcagcccagccctcaggccctgtgtgctgggaccctgctgggccctctccagcctccccctgcgccaggcct

SEQ ID NO: 199093 - DNA, 120 bp, Artificial Sequence
  ENSG00000113749_26 (sequence is synthesized)
cctccgtcacttcactctggccctgctgttcttttccttttagtttgattaactcactctgcccattccatgctcaaagctgtttccgtgaggaaaggctcctcctgctcattttagtgc

SEQ ID NO: 199094 - DNA, 120 bp, Artificial Sequence
  ENSG00000113749_27 (sequence is synthesized)
cctgaaatgtcacttccttgaggaagtcttccttgaccctccacaccaaaccaggccccctgccacacccctcagagctctccttggaaggcactggcatggctgtttgcgtgattcctt

SEQ ID NO: 199095 - DNA, 120 bp, Artificial Sequence
  ENSG00000113749_28 (sequence is synthesized)
gaacgttgtctgtctctcctcctcaccaggctgtgggtcctgtctgtttctggtgaccgttgtctgtctaacccctagaggagagtttgtcacatggtaggagcttaataaatatgtgtt

SEQ ID NO: 199096 - DNA, 120 bp, Artificial Sequence
  ENSG00000113749_29 (sequence is synthesized)
ggatgaatgatcagagaaaagagagtgcagagagtggccaaaacagatgctttcagcagtgtatctgccaataaacctaaaggcatgatttgccctggtgatccccccagaggtgcttag

SEQ ID NO: 199097 - DNA, 120 bp, Artificial Sequence
  ENSG00000113749_30 (sequence is synthesized)
tctcttggctgaattccttctggaatccccagaatccccctccttggaagttttcccaggagtctgaggcaggcaggtctctcagtcacggccacatgacctcaagtgaaaacaaaccag

SEQ ID NO: 199098 - DNA, 120 bp, Artificial Sequence
  ENSG00000113749_31 (sequence is synthesized)
tctggctgttcacagactcagctggtcagagctctggcccgaggggcccacgcaccacccgccactgcagaagacgcctccacgtctgtctctgggctgcctccaccttctgcaggcctc

SEQ ID NO: 199099 - DNA, 120 bp, Artificial Sequence
  ENSG00000113749_32 (sequence is synthesized)
ctggagcctctgctggctgcagaagtggggtgcatgctgcctggaggaggaacatctgtggtgggaccccaaatccatgtttgtgttaccatcgtgttccaataaaactatcgaaacaga

SEQ ID NO: 199100 - DNA, 120 bp, Artificial Sequence
  ENSG00000113749_33 (sequence is synthesized)
cgcgccgcccgctgcatccctgcccggagcgcagccggcgcgggcgcgggaccgaggcgaaccgggtgcggagccaatacccgcggcagcagcaccagctcctgccctccactgactcca

SEQ ID NO: 199101 - DNA, 120 bp, Artificial Sequence
  ENSG00000113749_34 (sequence is synthesized)
caccagctcctgccctccactgactccagagagggagatccccagtacttgactccatcacgcagatgggagcaggcaccagctatggagagggatacagctgcgtctccacatgaccca

SEQ ID NO: 199102 - DNA, 120 bp, Artificial Sequence
  ENSG00000113749_35 (sequence is synthesized)
tcctgcatgacaccaaagccaccgccagacagtgcctcggattctatgcaaaacctgggaagcggagacctaccccagccccgggaggaagctagctcttcaggggaccgtctgaggact

SEQ ID NO: 199103 - DNA, 120 bp, Artificial Sequence
  ENSG00000113749_36 (sequence is synthesized)
ggagtttgatccatgaacctggcttcgaggccttgcttttctctcttcttcattcatattcattcccaacaccttagaaggtgttgcttaatttatttctagaaaagcagcccagagtca

SEQ ID NO: 199104 - DNA, 120 bp, Artificial Sequence
  ENSG00000113749_37 (sequence is synthesized)
gtcattgaagccttccccaccccctggccaaaaaaaaaaaaaaaaaaaaactggacacattttggatctgttgggagcttggagtccagtggttggcatagttgtcacattgggagcaga

SEQ ID NO: 199105 - DNA, 120 bp, Artificial Sequence
  ENSG00000113749_38 (sequence is synthesized)
agacagaccatggctttgccttccagaatgctggtctgtggaactgacccattcattcattcatttgttcattcattcatttgcaaacattcatccaattcccaccacatgccaggaatt

SEQ ID NO: 199106 - DNA, 120 bp, Artificial Sequence
  ENSG00000113749_39 (sequence is synthesized)
atgatgaatactggggatgtagaaatgagattttttgggtttatggtgatgaagttacagaaaatcaatggcacagccctggtctcagctctgccgtcactcaacttgtatcttgagcaa

SEQ ID NO: 199107 - DNA, 120 bp, Artificial Sequence
  ENSG00000113749_40 (sequence is synthesized)
gttcctccccatctcaggcctcagtttcctcatcgcatagagagttggtcttccctcaccgggcttcctacttgccctccagagttgcctgaagctcacatgagcgaagggacatgaaca

SEQ ID NO: 199108 - DNA, 120 bp, Artificial Sequence
  ENSG00000113749_41 (sequence is synthesized)
tgctctgccatctcccaataggacataagtccacgctggagcgctgagcatcagactcaagaaaagcttgcgtggatattgcagacccaccaacaagggctccaggttctggagttgtgg

SEQ ID NO: 199109 - DNA, 120 bp, Artificial Sequence
  ENSG00000113749_42 (sequence is synthesized)
aggcaaaactgcctagtgagaaccctacatattccctctggtccttgcagctgccacccccattcccaggggtggagtgtccctccatagacttggatcctgggccctctgctccttcac

SEQ ID NO: 199110 - DNA, 120 bp, Artificial Sequence
  ENSG00000113749_43 (sequence is synthesized)
cactgtccatctgaagcaagcctggttgctccggcactgaactgtggcctcgggccctggaccctgcccctcaaatccaccctccaagtgcacacctggaaacttccgcttccagtcctg

SEQ ID NO: 199111 - DNA, 120 bp, Artificial Sequence
  ENSG00000113749_44 (sequence is synthesized)
atgggtaaaacgcccacctaccatatccttgcgcaatctcttattcaggaggcagctggagtgcaaagctgacttagttcacaaagtataaaaaaatacagggatgtggttcagctagaa

SEQ ID NO: 199112 - DNA, 80 bp, Artificial Sequence
  ENSG00000113758_0 (sequence is synthesized)
gcgtggccctgcgggagcccatcccccaccctaccccccgggcccgggggacaggtgtgcacggggcggccaagggcacc

SEQ ID NO: 199113 - DNA, 120 bp, Artificial Sequence
  ENSG00000113758_1 (sequence is synthesized)
gccaagggcaccttcgccaccttcgagcgggcgaggtccgggcggggacggggcggggaccgagctagcggagccagcgcagcctgcccggctcagcccggcccggccacagcacaaagg

SEQ ID NO: 199114 - DNA, 120 bp, Artificial Sequence
  ENSG00000113758_2 (sequence is synthesized)
acagcacaaaggaaagcgagggcgggggaggagcggagcgggctgggggccgggcgccccgcccaccggggggcctctcggagtgggccgccctccccccgaaacctgggctggagtgag

SEQ ID NO: 199115 - DNA, 120 bp, Artificial Sequence
  ENSG00000113758_3 (sequence is synthesized)
ttgctgccacatggcgaccgcgaagtgactcccttaccgccgcgggtcgcggaggaggcagggggaaggtgcccatctggttcctaggcctcctctccctgctggcagatgggaacaggt

SEQ ID NO: 199116 - DNA, 120 bp, Artificial Sequence
  ENSG00000113758_4 (sequence is synthesized)
tcttcttgaggaaactgaggcaaagaggagggcaggtctgagggaccccgcttgggctggcctcacccgcacactgggagggcagccaggtggggactctgacctgggggcttctggagg

SEQ ID NO: 199117 - DNA, 120 bp, Artificial Sequence
  ENSG00000113758_5 (sequence is synthesized)
agaggatgagatggctgggcatccatggcatggtactgcagcactggccagcagccaggcctggagggatggacgcgagagacaagctctcgtgtcctgcagggctctgtacacatatga

SEQ ID NO: 199118 - DNA, 120 bp, Artificial Sequence
  ENSG00000113758_6 (sequence is synthesized)
agatggctccgatgacctcaagcttgcagcatcaggagaagggggcttgcaggagctttcgggacactttgagaaccagaaggtgatgtacggcttctgcagtgtcaaggactcccaagc

SEQ ID NO: 199119 - DNA, 120 bp, Artificial Sequence
  ENSG00000113758_7 (sequence is synthesized)
tgctctgccaaaatacgtgctcatcaactgggtgggcgaagatgtgcctgatgcccgcaagtgcgcttgtgccagccacgtggctaaggtggcggagttcttccagggtgtcgacgtgat

SEQ ID NO: 199120 - DNA, 120 bp, Artificial Sequence
  ENSG00000113758_8 (sequence is synthesized)
cgtgaacgccagcagcgtggaagacatagacgcgggtgccatcgggcagcggctctctaacgggctggcgcgactctccagccctgtgctgcaccgactgcggctgcgagaggatgagaa

SEQ ID NO: 199121 - DNA, 120 bp, Artificial Sequence
  ENSG00000113758_9 (sequence is synthesized)
cgcagagcccgtgggcaccacctaccagaagacggatgcagctgtggaaatgaagcggattaaccgagagcagttctgggagcaggccaagaaggaagaagagctgcggaaggaggagga

SEQ ID NO: 199122 - DNA, 120 bp, Artificial Sequence
  ENSG00000113758_10 (sequence is synthesized)
gcggaagaaggccctggatgagaggctcaggttcgagcaggagcggatggagcaggagcggcaggagcaagaggagcgcgagcggcgctaccgggagcgggagcagcagatcgaggagca

SEQ ID NO: 199123 - DNA, 120 bp, Artificial Sequence
  ENSG00000113758_11 (sequence is synthesized)
caggaggaaacagcagactttagaagcggaagaggccaagaggcggttgaaggagcagtctatctttggtgaccatcgggatgaggaggaagagacccacatgaagaagtcagagtcgga

SEQ ID NO: 199124 - DNA, 120 bp, Artificial Sequence
  ENSG00000113758_12 (sequence is synthesized)
agtcgcatcggcctctgcgggcagctgtgatgtaccctcgcccttcaaccatcgaccaggcagccacctggacagccaccggaggatggcgcccactcccatccccacgcggagcccgtc

SEQ ID NO: 199125 - DNA, 120 bp, Artificial Sequence
  ENSG00000113758_13 (sequence is synthesized)
tgactccagcaccgcctccacccctgtcgctgagcagatagagcgggccctggatgaggtcacctcctcgcagcctccaccactgccaccgccacccccaccagcccaagagacccagga

SEQ ID NO: 199126 - DNA, 120 bp, Artificial Sequence
  ENSG00000113758_14 (sequence is synthesized)
gcccagccccatcctagacagtgaggagaccagagcagcagcccctcaggcctgggccggccccatggaggagccccctcaggcacaggcgcctccccgggggccaggcagccctgcaga

SEQ ID NO: 199127 - DNA, 120 bp, Artificial Sequence
  ENSG00000113758_15 (sequence is synthesized)
ggacttgatgttcatggagtctgcagagcaggctgtcctggctgctcccgtggagcctgccacagctgacgccacggagatccacgatgcagctgacaccattgaaactgacactgccac

SEQ ID NO: 199128 - DNA, 120 bp, Artificial Sequence
  ENSG00000113758_16 (sequence is synthesized)
tgctgacaccactgttgccaacaacgtaccccccgccgccaccagcctcattgacctatggcctggcaacggggaaggggcctccacactccagggtgagcccagggcccccacgccacc

SEQ ID NO: 199129 - DNA, 120 bp, Artificial Sequence
  ENSG00000113758_17 (sequence is synthesized)
ctcgggtactgaggtcaccctggcagaggtgcccctgctggatgaggtggctccggagccactgctgccagcaggcgaaggctgtgccacccttctcaactttgatgagctgcctgagcc

SEQ ID NO: 199130 - DNA, 120 bp, Artificial Sequence
  ENSG00000113758_18 (sequence is synthesized)
gccagccaccttctgtgacccagaggaagtggaaggggagtccctggctgccccccagaccccaactctgccctcagcccttgaggagctggagcaagagcaggagccggagccccacct

SEQ ID NO: 199131 - DNA, 120 bp, Artificial Sequence
  ENSG00000113758_19 (sequence is synthesized)
gctaaccaatggcgagaccacccagaaggaggggacccaggccagtgaggggtacttcagtcaatcacaggaggaggagtttgcccaatcggaagagctctgtgccaaggctccgcctcc

SEQ ID NO: 199132 - DNA, 120 bp, Artificial Sequence
  ENSG00000113758_20 (sequence is synthesized)
tgtgttctacaacaagcctccagagatcgacatcacatgctgggatgcagacccagttccagaagaggaggagggcttcgagggtggtgattagcggtggcgccagccctaggctaccct

SEQ ID NO: 199133 - DNA, 120 bp, Artificial Sequence
  ENSG00000113758_21 (sequence is synthesized)
tgccaaggccgcccacctgcatcagcctctggccagacggcccgccgtgcctgcattcgcagcagctccgcctggcacccactccggattccggccctggctggggacttggccgcttcc

SEQ ID NO: 199134 - DNA, 120 bp, Artificial Sequence
  ENSG00000113758_22 (sequence is synthesized)
ctacccacagggcctgacttttacagcttttctctttttttaaaaagttgataggagacttgtacagttgactggctttcctctcgttggtagttgagacgctgttgcaaattccacccc

SEQ ID NO: 199135 - DNA, 120 bp, Artificial Sequence
  ENSG00000113758_23 (sequence is synthesized)
tccttccctggtccagattgtagctcttagtcctccctgctcagctggccgggttggaggcctcaccctgcttggggcctggcgtggggggagctctggtgggaaaatgtcccccacctc

SEQ ID NO: 199136 - DNA, 120 bp, Artificial Sequence
  ENSG00000113758_24 (sequence is synthesized)
ttttcctagttttatgtttcttgggaaaatatcactttgtattctctgtccagggcttcagatattttgcacgaattttaaaacatggcaataaatggctcgtgggctctggctccctgg

SEQ ID NO: 199137 - DNA, 80 bp, Artificial Sequence
  ENSG00000113758_25 (sequence is synthesized)
ggccggctcccctcccccggccgctggctcgctcggctcgcgacgctgcagaggctccgaggcggcggcggcgactccct

SEQ ID NO: 199138 - DNA, 120 bp, Artificial Sequence
  ENSG00000113758_26 (sequence is synthesized)
ggctccgaggcggcggcggcgactccctctttccctccctcctcctccgtccgcccgtccgtccgcgcgtctgtccgttcggcccggtccggcccgaagcatggccggcgtcagcttcag

SEQ ID NO: 199139 - DNA, 120 bp, Artificial Sequence
  ENSG00000113758_27 (sequence is synthesized)
accccccgtctcctgccgggcaggtcccaggttggaggccctaggcgcggttcaggtcagggctatggatggggcccaggggctttggtggcccctccccaactccttcctctttgcttg

SEQ ID NO: 199140 - DNA, 80 bp, Artificial Sequence
  ENSG00000113758_28 (sequence is synthesized)
ggttcctttttcacgtttagcacaaacttctgtaacgggtcgtgctcatgtctgttaataaagaaatccagatcccttcg

SEQ ID NO: 199141 - DNA, 120 bp, Artificial Sequence
  ENSG00000113758_29 (sequence is synthesized)
actgccctttcataaaggcatcggacagtgggccttcctcctcctcctcttcctcctcctcccctccacggactccctttccctatatcacctgccaccgcaccccaaacctctcttcct

SEQ ID NO: 199142 - DNA, 120 bp, Artificial Sequence
  ENSG00000113758_30 (sequence is synthesized)
aaaggatctcctagctggccccatctgagagggcacaggcgtggaggggaggagaggcctggaatggagggataatgagctggcatggccggcgtcagcttcagcggccaccgcctggag

SEQ ID NO: 199143 - DNA, 120 bp, Artificial Sequence
  ENSG00000113758_31 (sequence is synthesized)
tgttttcttccccacccacctggctgtaggccacctccctgcctgcaccctgcagccccacacttgtctggatctggcgggtgtccttcctccagtcatccctgtgtccccagggtgggg

SEQ ID NO: 199144 - DNA, 120 bp, Artificial Sequence
  ENSG00000113758_32 (sequence is synthesized)
aggaatctcagagccttgttgaatgttggacttctgaggctgagcctccaacagggaaagtgacttatctgaagccacacagctgggacactttgggggaagggccctattcaccgcctt

SEQ ID NO: 199145 - DNA, 120 bp, Artificial Sequence
  ENSG00000113758_33 (sequence is synthesized)
gtccttccccaggaagcagtggccacgctgcagctggaaaccagagggcctggcccccgggtggggagcaggcatttgggagggaggccagtctcccatgctgaggcttggaggtgggaa

SEQ ID NO: 199146 - DNA, 120 bp, Artificial Sequence
  ENSG00000113758_34 (sequence is synthesized)
cgggtgtgcctgttctgggaactgactgcgtcgtgctgaggacttgatgtctacatctcacaggtgaccatcgggatgaggaggaagagacccacatgaagaagtcagagtcggaggtgg

SEQ ID NO: 199147 - DNA, 120 bp, Artificial Sequence
  ENSG00000113758_35 (sequence is synthesized)
gcgagaccacccagaaggaggggacccaggtgcggcagggactgcctggtgggagggatgggagggagtgggggctgagcagggtgctggccctgcattcctcatgcttgcaccagtacc

SEQ ID NO: 199148 - DNA, 120 bp, Artificial Sequence
  ENSG00000113758_36 (sequence is synthesized)
cccttctctgtgacccacattatttgaggggaagtccatcccaccctccctccctgggccggctctgcttttgttcccaaggcaggcatccttgtttccctggcaaccactgatggaatc

SEQ ID NO: 199149 - DNA, 120 bp, Artificial Sequence
  ENSG00000113758_37 (sequence is synthesized)
attggttgctggggaaacgggctcaggcctgataggtcagccccagtcctgctgggtggggccaagtgacctgatgctttcccctgcaggccagtgaggggtacttcagtcaatcacagg

SEQ ID NO: 199150 - DNA, 120 bp, Artificial Sequence
  ENSG00000113758_38 (sequence is synthesized)
aggaggagtttgcccaatcggaagagctctgtgccaaggctccgcctcctgtgttctacaacaagcctccaggtagtactgggctggatgatggggaggaatttgggtgcgggggctgga

SEQ ID NO: 199151 - DNA, 120 bp, Artificial Sequence
  ENSG00000113758_39 (sequence is synthesized)
tttgagtgtgggtagccaccccaccactacccaccgctcacagaggctggggacacaagcggtctgctaggtccctaactcctctccctttctaacgccacagagatcgacatcacatgc

SEQ ID NO: 199152 - DNA, 120 bp, Artificial Sequence
  ENSG00000113758_40 (sequence is synthesized)
tgagagctgggggcaccagccaggtgaggcagacagggctatctcagcttgcctggcccagccccaaccttttcctcgtgccctcaggaggcagcagctattattgcccagcggcctgac

SEQ ID NO: 199153 - DNA, 120 bp, Artificial Sequence
  ENSG00000113761_0 (sequence is synthesized)
aggcgcctgagaggctctctaccggtgagggtttgcggggaagatggagtatcccgcgccggccacggtgcaggccgcggacggcggagcggccgggccttacagcagctcggagttgct

SEQ ID NO: 199154 - DNA, 120 bp, Artificial Sequence
  ENSG00000113761_1 (sequence is synthesized)
ggagggccaggagccggacggggtgcgctttgaccgcgagagggcgcgccgcctgtgggaagccgtgtccggtgcccagccggtgggtagagaggaagtggagcacatgatccagaagaa

SEQ ID NO: 199155 - DNA, 120 bp, Artificial Sequence
  ENSG00000113761_2 (sequence is synthesized)
ccaatgtctcttcaccaacacccagtgtaaggtttgctgcgccttgcttatttctgagtcccagaagctggcacattaccagagcaaaaaacatgccaacaaagtgaagagatacctagc

SEQ ID NO: 199156 - DNA, 120 bp, Artificial Sequence
  ENSG00000113761_3 (sequence is synthesized)
aatccatggaatggagacattaaagggggaaacgaagaagctagactcagatcagaagagcagcagaagcaaagacaagaaccagtgctgccccatctgtaacatgaccttttcctcccc

SEQ ID NO: 199157 - DNA, 120 bp, Artificial Sequence
  ENSG00000113761_4 (sequence is synthesized)
tgtcgtggcccagtcgcactacctggggaagacccacgcaaagaacttaaagctgaagcagcagtccactaaggtggaagccttgcaccagaatagagagatgatagacccagacaagtt

SEQ ID NO: 199158 - DNA, 120 bp, Artificial Sequence
  ENSG00000113761_5 (sequence is synthesized)
ctgcagcctctgccatgcaactttcaacgaccctgtcatggctcaacaacattatgtgggcaagaaacacagaaaacaggagaccaagctcaaactaatggcacgctatgggcggctggc

SEQ ID NO: 199159 - DNA, 120 bp, Artificial Sequence
  ENSG00000113761_6 (sequence is synthesized)
ggaccctgctgtcactgactttccagctggaaagggctacccctgcaaaacatgtaagatagtgctgaactccatagaacagtaccaagctcatgtcagcggcttcaaacacaagaacca

SEQ ID NO: 199160 - DNA, 120 bp, Artificial Sequence
  ENSG00000113761_7 (sequence is synthesized)
gtcaccaaaaacagtggcatcatccctgggccagattccaatgcaaaggcaacccattcagaaagactcaaccaccttggaagactagaggtgattctgcccagcatcccatattgggcc

SEQ ID NO: 199161 - DNA, 120 bp, Artificial Sequence
  ENSG00000113761_8 (sequence is synthesized)
agccatgagccagcttcccgtgactgctcagcccttggctccctcttgctcgttgttctcaccaggaaagtacacgggcctgaggcaggattgggccacagacagcctctcattggtccg

SEQ ID NO: 199162 - DNA, 120 bp, Artificial Sequence
  ENSG00000113761_9 (sequence is synthesized)
ggctaattcactcctgctgctcccctttggcaggggtcctgtaggtcatgacaggggaggcaagggtattgagagactcggggtctcgcggggtggtagtttggagggtggctttcccca

SEQ ID NO: 199163 - DNA, 120 bp, Artificial Sequence
  ENSG00000113761_10 (sequence is synthesized)
tttcccaacccctctgggccttaggtgctgaggcccctgccacctgtctttcctctaaaggtcagttttgggccagttcttgcaactaaagagcagagatctctctgggccctagacatt

SEQ ID NO: 199164 - DNA, 120 bp, Artificial Sequence
  ENSG00000113761_11 (sequence is synthesized)
tccagcaaaacctggaactttcatgccaaacctggggcagggcaggaaacagaggaaatggctgcaacatgggagcttggagctaatacgacactctgccttcccccagaaggtgcaggc

SEQ ID NO: 199165 - DNA, 120 bp, Artificial Sequence
  ENSG00000113761_12 (sequence is synthesized)
tttcctgagtcttagaccagatatggccagttgcgcaggtttctgccaactgtgaagtatcctcctggagcagtgacacaatcttggcggagcattgctacccccgctgccccctccaca

SEQ ID NO: 199166 - DNA, 120 bp, Artificial Sequence
  ENSG00000113761_13 (sequence is synthesized)
gttcctgaatggtgctaaggatctgcagcagttggcaacgagctggggctgggggcggcctccatgtccactgagatcataggacactccaatggggatgggacctttcccctcctccat

SEQ ID NO: 199167 - DNA, 120 bp, Artificial Sequence
  ENSG00000113761_14 (sequence is synthesized)
cagaggtgctctgaccctaggttacacgggaaagtgccccacatgcaagtctccctgagggttctgcccctaaaggcagactgcctcatgcccgctagctgtgaggttcattgctaccct

SEQ ID NO: 199168 - DNA, 120 bp, Artificial Sequence
  ENSG00000113761_15 (sequence is synthesized)
cggccctactagccctctcttcccccttgtgcagcggaccacttgcccagtttgctgtggtgctagccttccccatcatccaccgggtgatttctgggtcccagggaaagaaagagagag

SEQ ID NO: 199169 - DNA, 120 bp, Artificial Sequence
  ENSG00000113761_16 (sequence is synthesized)
ctgatgcaggtttctacagtgaggaacaggcgtttcccaggccccacacccagatttctctatctttgctgtgttttatggcctgggactgagtccacacggatagatttttccttgtaa

SEQ ID NO: 199170 - DNA, 120 bp, Artificial Sequence
  ENSG00000113761_17 (sequence is synthesized)
gtgtgtgtgtgtgtgtttgtgtgtatgtgtgtgcttctgtgtgtgcctaatgctctgtctcttggtcactgaagcatccaaataaagaatttccctcatgggccagactacaacttaaca

SEQ ID NO: 199171 - DNA, 120 bp, Artificial Sequence
  ENSG00000113761_18 (sequence is synthesized)
aataaagaatttccctcatgggccagactacaacttaacagacctagggttttgagccatattgccattggatctagtatgtctgtcttgacccctcacccccaccccattcagacctca

SEQ ID NO: 199172 - DNA, 120 bp, Artificial Sequence
  ENSG00000113761_19 (sequence is synthesized)
gtagtccccagtagtcactttaggagttgggacagagtcgagcaccctgtgaaagtctcccttgagttcaggtgccctgaactcagtacagcctcatcttctcatccaccaccttctcct

SEQ ID NO: 199173 - DNA, 120 bp, Artificial Sequence
  ENSG00000113761_20 (sequence is synthesized)
gcttctcctgtcacatagggcctcatgaaggtctttaaagggtttaagctggggatctgctttatgtttgagagaactgttctggctgttatgtaaaggagtgcagggaggggcaggaaa

SEQ ID NO: 199174 - DNA, 120 bp, Artificial Sequence
  ENSG00000113761_21 (sequence is synthesized)
ggagacaaggaggccagtatggacactgtgtccagtatggctttccaggctaatcacttagggcagagacccagccttattcatctctacttcctgatgtccatagtggtgtgtcatgaa

SEQ ID NO: 199175 - DNA, 120 bp, Artificial Sequence
  ENSG00000113761_22 (sequence is synthesized)
tttttattgaatgaacaaatgaggtgtatgaggagagatggttttctcctgctcagctcttacacagtgataggtttgttccatgggacttatcataggcctggtgattcttgaaagagc

SEQ ID NO: 199176 - DNA, 120 bp, Artificial Sequence
  ENSG00000113761_23 (sequence is synthesized)
atttttcatgactcaaaaatgagctgagaaggagtgttatggccaggtgcggcgtcatgcacctatagtcccagctgctcaggaggctaaggcagaaagaccattcaagcccaggagttc

SEQ ID NO: 199177 - DNA, 120 bp, Artificial Sequence
  ENSG00000113761_24 (sequence is synthesized)
cagcctgaagtatgctgtgatcatgcctgtgaataaccactgcactccagccagggcaacataacaagactctatctaaaaaaaaaaaaaaattataaaaataaatttgaaggctgggcg

SEQ ID NO: 199178 - DNA, 78 bp, Artificial Sequence
  ENSG00000113761_25 (sequence is synthesized)
aggcaggtggatagcaaaaccccgtccctataaaaaatacgaaaatcagctgcgcctggtggcacacatctgtagtcc

SEQ ID NO: 199179 - DNA, 120 bp, Artificial Sequence
  ENSG00000113761_26 (sequence is synthesized)
tccagcctaggtgacagagtgagactcctgtctcaaaataaataaataataaattttaaaagaaggtagccaggtgtggtggtgcattcctgtagtcctggctacctggaagggtgaggc

SEQ ID NO: 199180 - DNA, 120 bp, Artificial Sequence
  ENSG00000113761_27 (sequence is synthesized)
cattcctgtagtcctggctacctggaagggtgaggcaggaggatcgctttaaccatgagttcaaggcagcagtgagctatgattatgccactgtactccagcctggacaacagagcaaga

SEQ ID NO: 199181 - DNA, 120 bp, Artificial Sequence
  ENSG00000113761_28 (sequence is synthesized)
taaaaaaagaaaggaatgttatggcctcaagagctctttgtccatcctttactgtagacagccagatttgaggaaggggcccaggcagcctcagctcccattcagtgccactcagcccct

SEQ ID NO: 199182 - DNA, 120 bp, Artificial Sequence
  ENSG00000113761_29 (sequence is synthesized)
gctcctggtcagctgtgaaaggctctacacagccccaagggaggttctcagcttcccatgatcagactgcctcagcaattccccagagtccttctaagccacctagtatgtcagattcag

SEQ ID NO: 199183 - DNA, 120 bp, Artificial Sequence
  ENSG00000113761_30 (sequence is synthesized)
ccccatctaccaagcaaggaaatgaagggcagggggtgagtgggctatcataccgtgagcctccggcctgcaagaccactttgtagtccctaccagctgtgtggccagccctgttggtaa

SEQ ID NO: 199184 - DNA, 120 bp, Artificial Sequence
  ENSG00000113761_31 (sequence is synthesized)
agggacctagagatgaacactttcttgcccttaggggttcacacacagtcaaagatcatgatgacaatgataagaatgcccaggatgcaggagctgactcagccaagggcatgaaaaagc

SEQ ID NO: 199185 - DNA, 120 bp, Artificial Sequence
  ENSG00000113761_32 (sequence is synthesized)
gcatgaaaaagctggagaggttggaaagctagcatttcatctgcataacaacctttgagctaagagttaatattccatatagagaaggaggccaggcagggtggctcacatctgtaatcc

SEQ ID NO: 199186 - DNA, 61 bp, Artificial Sequence
  ENSG00000113761_33 (sequence is synthesized)
tgggaggccaaggcgggtgtatcacttgcggccgggagtttaagaccatccatggagagaa

SEQ ID NO: 199187 - DNA, 120 bp, Artificial Sequence
  ENSG00000113761_34 (sequence is synthesized)
ccttgatttcttcctctataaaaatgaggatggtaatatcaactacctttcaggattttttagaactaaaattgagggcagatttataaaaagcacccaattcagagcctggcacatagt

SEQ ID NO: 199188 - DNA, 120 bp, Artificial Sequence
  ENSG00000113761_35 (sequence is synthesized)
agggactcagtaatggagctggtattacatattaccgcctagtggtttgttagagcaagacaagagaaaatggaaagaagccaggctgcttgctttcttgagggccaaggaaaagaacta

SEQ ID NO: 199189 - DNA, 120 bp, Artificial Sequence
  ENSG00000113761_36 (sequence is synthesized)
tcttccttcctcctgcctctgcacaaatgtgacggcagcagctgaagccaacatcttgcgaccatgagagaaaaacctggagaacggacgagtcctcaaccctgacttcagaccaaccta

SEQ ID NO: 199190 - DNA, 120 bp, Artificial Sequence
  ENSG00000113761_37 (sequence is synthesized)
cacccacctctggacgtggggctaagtgagagatggatacactgtttcatttaggccctgctcacttaggtttctgttattcacaccccaacgaaaccctccatggtccagggcaccggg

SEQ ID NO: 199191 - DNA, 120 bp, Artificial Sequence
  ENSG00000113761_38 (sequence is synthesized)
cacgagtttacttcccgcttccctggagaccaccaaccctctcacccttccagcccagcctctgccacttcccagctgtcggtcctcctccaaacagacgtgcatgccaacacccggtgg

SEQ ID NO: 199192 - DNA, 120 bp, Artificial Sequence
  ENSG00000113761_39 (sequence is synthesized)
gtgtgaggcttgtaggcccaagtctagagaggctgagtctggcaaagcctgaaagcccctgtcctagcaagccaggccacaggtctagagtatccgagaccagtgaataaggggacgggg

SEQ ID NO: 199193 - DNA, 120 bp, Artificial Sequence
  ENSG00000113761_40 (sequence is synthesized)
ggtgctactgaggctgtgagaagccccaggaccagcccagggtagttagaactgagtgaggttagccgggactaacctcactcagatccctcctccccagttcccctccatccactttgg

SEQ ID NO: 199194 - DNA, 120 bp, Artificial Sequence
  ENSG00000113761_41 (sequence is synthesized)
tttggaagcctccccagagctctcccaggctgtcatcagctctaaactctctgcctccacaaaaatgccctgggcaacctgtaactcacagccctgctgtcttcagagtataaactggag

SEQ ID NO: 199195 - DNA, 120 bp, Artificial Sequence
  ENSG00000113761_42 (sequence is synthesized)
acagatgtacccagaattgaggacgggtgggaaatgaggagaaatgaaggctgaggaggggtcattctcacagtccctccctttcggtcacaggagggtgttgcccatgcttttgggtgg

SEQ ID NO: 199196 - DNA, 120 bp, Artificial Sequence
  ENSG00000113761_43 (sequence is synthesized)
gtcccaggcccatagctgcaaatattcatattggctactcttcagtgagcaaggggtatatgccaggcactggcattgtgcttgacatacatcatcatactgagtcctcacggaagatgt

SEQ ID NO: 199197 - DNA, 120 bp, Artificial Sequence
  ENSG00000113761_44 (sequence is synthesized)
attattcccatttcacagaagatgaaactgaggcttgaggttaagtgatttgtccgtgaccacaaagagttttcgggactcaaacccagatctgtcactgggcaaggtggctcacaccta

SEQ ID NO: 199198 - DNA, 73 bp, Artificial Sequence
  ENSG00000113761_45 (sequence is synthesized)
acctataatcccagccctttgggagactgaggccagcagatctcctgtggccaggagttcaagcctggccaac

SEQ ID NO: 199199 - DNA, 90 bp, Artificial Sequence
  ENSG00000113761_46 (sequence is synthesized)
gtgagcctagatcgtgccactgcattccagcctgagccccagatctgtccgactctgacacccaacctttaatcactcactttctgtcaa

SEQ ID NO: 199200 - DNA, 120 bp, Artificial Sequence
  ENSG00000113761_47 (sequence is synthesized)
gactctgacacccaacctttaatcactcactttctgtcaatgtcacctccgttttgaccagccaagctagacctccctggagcctgtggagaagccaaggtagaaaagggttggaaaaga

SEQ ID NO: 199201 - DNA, 120 bp, Artificial Sequence
  ENSG00000113761_48 (sequence is synthesized)
gagaagccaaggtagaaaagggttggaaaagaatgataaaataggccaggtgcggtggctcaagcctgtactcccagcacttttggaggccgagacaggcagattgcttgagcccaggag

SEQ ID NO: 199202 - DNA, 120 bp, Artificial Sequence
  ENSG00000113761_49 (sequence is synthesized)
ctgtttcaacttaaaaaaaagaaatggtaatgaacaattgtcaattctgagcagctgggtatggtatgaccctgtgtactttttctgtattttaaaatgttctcaaaataaaacttgttt

SEQ ID NO: 199203 - DNA, 80 bp, Artificial Sequence
  ENSG00000113763_0 (sequence is synthesized)
gcattgctgcgctcccgtgcccaagggagccacgcgccgcgtgcgcccggcagccggccgcccggaggcagcgcagtccg

SEQ ID NO: 199204 - DNA, 80 bp, Artificial Sequence
  ENSG00000113763_1 (sequence is synthesized)
ccgcccgcctgcccgcccgcggccatggccgtccggcccggcctgtggccagcgctcctgggcatagtcctcgccgcttg

SEQ ID NO: 199205 - DNA, 120 bp, Artificial Sequence
  ENSG00000113763_2 (sequence is synthesized)
gccgcttggctccgcggctcgggtgcccagcagagtgccaccgtggccaacccagtgcctggtgccaacccggacctgcttccccacttcctggtggagcccgaggatgtgtacatcgtc

SEQ ID NO: 199206 - DNA, 120 bp, Artificial Sequence
  ENSG00000113763_3 (sequence is synthesized)
aagaacaagccagtgctgcttgtgtgcaaggccgtgcccgccacgcagatcttcttcaagtgcaacggggagtgggtgcgccaggtggaccacgtgatcgagcgcagcacagacgggagc

SEQ ID NO: 199207 - DNA, 120 bp, Artificial Sequence
  ENSG00000113763_4 (sequence is synthesized)
agtgggctgcccaccatggaggtccgcattaatgtctcaaggcagcaggtcgagaaggtgttcgggctggaggaatactggtgccagtgcgtggcatggagctcctcgggcaccaccaag

SEQ ID NO: 199208 - DNA, 120 bp, Artificial Sequence
  ENSG00000113763_5 (sequence is synthesized)
agtcagaaggcctacatccgcatagcctatttgcgcaagaacttcgagcaggagccgctggccaaggaggtgtccctggagcagggcatcgtgctgccctgccgtccaccggagggcatc

SEQ ID NO: 199209 - DNA, 120 bp, Artificial Sequence
  ENSG00000113763_6 (sequence is synthesized)
cctccagccgaggtggagtggctccggaacgaggacctggtggacccgtccctggaccccaatgtatacatcacgcgggagcacagcctggtggtgcgacaggcccgccttgctgacacg

SEQ ID NO: 199210 - DNA, 120 bp, Artificial Sequence
  ENSG00000113763_7 (sequence is synthesized)
gccaactacacctgcgtggccaagaacatcgtggcacgtcgccgcagcgcctccgctgctgtcatcgtctacgtggacggcagctggagcccgtggagcaagtggtcggcctgtgggctg

SEQ ID NO: 199211 - DNA, 120 bp, Artificial Sequence
  ENSG00000113763_8 (sequence is synthesized)
gactgcacccactggcggagccgtgagtgctctgacccagcaccccgcaacggaggggaggagtgccagggcactgacctggacacccgcaactgtaccagtgacctctgtgtacacact

SEQ ID NO: 199212 - DNA, 120 bp, Artificial Sequence
  ENSG00000113763_9 (sequence is synthesized)
gcttctggccctgaggacgtggccctctatgtgggcctcatcgccgtggccgtctgcctggtcctgctgctgcttgtcctcatcctcgtttattgccggaagaaggaggggctggactca

SEQ ID NO: 199213 - DNA, 120 bp, Artificial Sequence
  ENSG00000113763_10 (sequence is synthesized)
gatgtggctgactcgtccattctcacctcaggcttccagcccgtcagcatcaagcccagcaaagcagacaacccccatctgctcaccatccagccggacctcagcaccaccaccaccacc

SEQ ID NO: 199214 - DNA, 120 bp, Artificial Sequence
  ENSG00000113763_11 (sequence is synthesized)
taccagggcagtctctgtccccggcaggatgggcccagccccaagttccagctcaccaatgggcacctgctcagccccctgggtggcggccgccacacactgcaccacagctctcccacc

SEQ ID NO: 199215 - DNA, 120 bp, Artificial Sequence
  ENSG00000113763_12 (sequence is synthesized)
tctgaggccgaggagttcgtctcccgcctctccacccagaactacttccgctccctgccccgaggcaccagcaacatgacctatgggaccttcaacttcctcgggggccggctgatgatc

SEQ ID NO: 199216 - DNA, 120 bp, Artificial Sequence
  ENSG00000113763_13 (sequence is synthesized)
cctaatacaggaatcagcctcctcatccccccagatgccataccccgagggaagatctatgagatctacctcacgctgcacaagccggaagacgtgaggttgcccctagctggctgtcag

SEQ ID NO: 199217 - DNA, 120 bp, Artificial Sequence
  ENSG00000113763_14 (sequence is synthesized)
accctgctgagtcccatcgttagctgtggaccccctggcgtcctgctcacccggccagtcatcctggctatggaccactgtggggagcccagccctgacagctggagcctgcgcctcaaa

SEQ ID NO: 199218 - DNA, 120 bp, Artificial Sequence
  ENSG00000113763_15 (sequence is synthesized)
agggcagctgggaggatgtgctgcacctgggcgaggaggcgccctcccacctctactactgccagctggaggccagtgcctgctacgtcttcaccgagcagctgggccgctttgccctgg

SEQ ID NO: 199219 - DNA, 120 bp, Artificial Sequence
  ENSG00000113763_16 (sequence is synthesized)
tgggagaggccctcagcgtggctgccgccaagcgcctcaagctgcttctgtttgcgccggtggcctgcacctccctcgagtacaacatccgggtctactgcctgcatgacacccacgatg

SEQ ID NO: 199220 - DNA, 120 bp, Artificial Sequence
  ENSG00000113763_17 (sequence is synthesized)
cactcaaggaggtggtgcagctggagaagcagctggggggacagctgatccaggagccacgggtcctgcacttcaaggacagttaccacaacctgcgcctatccatccacgatgtgccca

SEQ ID NO: 199221 - DNA, 120 bp, Artificial Sequence
  ENSG00000113763_18 (sequence is synthesized)
gctccctgtggaagagtaagctccttgtcagctaccaggagatccccttttatcacatctggaatggcacgcagcggtacttgcactgcaccttcaccctggagcgtgtcagccccagca

SEQ ID NO: 199222 - DNA, 120 bp, Artificial Sequence
  ENSG00000113763_19 (sequence is synthesized)
ctagtgacctggcctgcaagctgtgggtgtggcaggtggagggcgacgggcagagcttcagcatcaacttcaacatcaccaaggacacaaggtttgctgagctgctggctctggagagtg

SEQ ID NO: 199223 - DNA, 120 bp, Artificial Sequence
  ENSG00000113763_20 (sequence is synthesized)
aagcgggggtcccagccctggtgggccccagtgccttcaagatccccttcctcattcggcagaagataatttccagcctggacccaccctgtaggcggggtgccgactggcggactctgg

SEQ ID NO: 199224 - DNA, 120 bp, Artificial Sequence
  ENSG00000113763_21 (sequence is synthesized)
cccagaaactccacctggacagccatctcagcttctttgcctccaagcccagccccacagccatgatcctcaacctgtgggaggcgcggcacttccccaacggcaacctcagccagctgg

SEQ ID NO: 199225 - DNA, 120 bp, Artificial Sequence
  ENSG00000113763_22 (sequence is synthesized)
ctgcagcagtggctggactgggccagccagacgctggcctcttcacagtgtcggaggctgagtgctgaggccggccaggcccgacacctacactctcaccagctttggcacccaccaagg

SEQ ID NO: 199226 - DNA, 120 bp, Artificial Sequence
  ENSG00000113763_23 (sequence is synthesized)
acaggcagaagccggacaggggcccttccccacaccggggagagctgctcggacaggccccctcccggccgaagctgtcccttaatgctggtccttcagaccctgcccgaactcccacct

SEQ ID NO: 199227 - DNA, 120 bp, Artificial Sequence
  ENSG00000113763_24 (sequence is synthesized)
ctccatggcctgcctagccaggctggcactgccactcacactcggccccagggcccaggagggacagtgcctggagcctgggccaggcccagcccatctgtgtgtgtgtatgtgcgtgtg

SEQ ID NO: 199228 - DNA, 120 bp, Artificial Sequence
  ENSG00000113763_25 (sequence is synthesized)
atgctacctctcctcccgtccctctccaggggccccgcatacacacggccatgcacgcacacactgggcctgggccagggccccagagctcctgcctgagctggaccttatgcaaacatt

SEQ ID NO: 199229 - DNA, 120 bp, Artificial Sequence
  ENSG00000113763_26 (sequence is synthesized)
tctgtgcctgctgggtaggggcacgtctgaggggccctgctccaagcctgcaggaccgagggccacagccggacagggggtagcccctggattcaggcacacgaccaccacacgagcacg

SEQ ID NO: 199230 - DNA, 120 bp, Artificial Sequence
  ENSG00000113763_27 (sequence is synthesized)
tgccacgcatgcctcgtgtgctcatctcacacacacccccctcccgggtcacgcagacaccccccaaccacacacatctcatgctgtacacctgaggctgctcacgtctcacgcccagtg

SEQ ID NO: 199231 - DNA, 120 bp, Artificial Sequence
  ENSG00000113763_28 (sequence is synthesized)
ttggtgcacatttgcctctcacatgctgccctctccacccacccagggacaccccacggctcctccctgcccctgcccctcccccagccttgaggtgccctgcccggcggggcctgtgaa

SEQ ID NO: 199232 - DNA, 120 bp, Artificial Sequence
  ENSG00000113763_29 (sequence is synthesized)
tatgcaatgggagtcccaggctgtacagtggtgagtgtgtgtgtggcgtggcgtgcccgtccccagggctggctggtgccccacgcggggcctgtcatgtgaagctcgtgtcctgacttt

SEQ ID NO: 199233 - DNA, 120 bp, Artificial Sequence
  ENSG00000113763_30 (sequence is synthesized)
gtcttaagtgcattcacgcacttactcttggccttatgtacacagccttgcccggccgccggggcacataggggttttatcgggcgtgaatgtaaataaattatatatatatattgctaa

SEQ ID NO: 199234 - DNA, 120 bp, Artificial Sequence
  ENSG00000113763_31 (sequence is synthesized)
tgggtggtcgacgtggaccgagtggtccgtctgcagcgccagctgtgggcgcggctggcagaaacggagccggagctgcaccaacccggcgcctctcaacgggggcgctttctgtgaggg

SEQ ID NO: 199235 - DNA, 120 bp, Artificial Sequence
  ENSG00000113763_32 (sequence is synthesized)
ggcggccaatgtagcccaacagaaccctgggcaccaacacctcccaggaccagagcctctcccggccccagcggaggtgccagaggcctccctgcccagcagcagggcccaccttgtctt

SEQ ID NO: 199236 - DNA, 120 bp, Artificial Sequence
  ENSG00000113763_33 (sequence is synthesized)
gctgggagggtctgcaggagaaccgcagggtcctcttctgccccgagcatccgactccagcctcccatggccggaacatctgaacgttcattgatctcatcgatttctcaacccaaagcc

SEQ ID NO: 199237 - DNA, 120 bp, Artificial Sequence
  ENSG00000113763_34 (sequence is synthesized)
atcgagtgctttgaggtgaagaaaaaggctttccttacccacggcagataccacggcagtggcgccacgccgccaaagaccaaagaccccaaaccagaaacgttctgtggtcagacaggg

SEQ ID NO: 199238 - DNA, 120 bp, Artificial Sequence
  ENSG00000113790_0 (sequence is synthesized)
agaggtgccctcggtgatagaggaaacatggccgagtatacgcggctgcacaacgccttggcgctaatccgcctccgaaacccgccggtcaacgcgatcagtacgactttactccgtgac

SEQ ID NO: 199239 - DNA, 120 bp, Artificial Sequence
  ENSG00000113790_1 (sequence is synthesized)
ataaaagaaggactacagaaagctgtaatagaccatacaataaaagccattgtgatttgtggagcagagggcaaattttctgcaggtgctgatattcgtggcttcagtgctcctaggaca

SEQ ID NO: 199240 - DNA, 120 bp, Artificial Sequence
  ENSG00000113790_2 (sequence is synthesized)
tttggccttacactgggacatgtagtagatgaaatacagagaaatgagaagcccgtggtggcagcaatccaaggcatggctttcggagggggactagagctggccctgggctgtcactat

SEQ ID NO: 199241 - DNA, 120 bp, Artificial Sequence
  ENSG00000113790_3 (sequence is synthesized)
aggattgcccacgcagaggctcaagttggcttaccagaagttacactgggacttctccctggtgcaagaggaacccagcttctccccagactcactggagttcctgctgcacttgactta

SEQ ID NO: 199242 - DNA, 120 bp, Artificial Sequence
  ENSG00000113790_4 (sequence is synthesized)
attacctcaggaagacgtattttagcagatgaagcactcaagctgggcattctagataaagttgtaaactcagacccggttgaagaagcaatcagatttgctcagagagtttcagatcaa

SEQ ID NO: 199243 - DNA, 120 bp, Artificial Sequence
  ENSG00000113790_5 (sequence is synthesized)
cctctagaatcccgtagactctgcaacaagccaattcagagcttgcccaacatggacagcatttttagtgaggccctcttgaagatgcggaggcagcaccctgggtgtcttgcacaggag

SEQ ID NO: 199244 - DNA, 120 bp, Artificial Sequence
  ENSG00000113790_6 (sequence is synthesized)
gcttgtgtccgtgcagtccaggctgctgtgcagtatccctatgaagtgggcatcaagaaggaggaggagctgtttctatatcttttgcaatcagggcaggctagagccctgcaatatgct

SEQ ID NO: 199245 - DNA, 120 bp, Artificial Sequence
  ENSG00000113790_7 (sequence is synthesized)
ttcttcgctgaaaggaaagcaaataagtggtcaactccctccggagcatcgtggaaaacagcatcagcgcggcctgtctcctcagttggtgttgttggcttgggaacaatgggccgaggc

SEQ ID NO: 199246 - DNA, 120 bp, Artificial Sequence
  ENSG00000113790_8 (sequence is synthesized)
attgtcatttcttttgcaagggccaggattcctgtgattgctgtagactcggacaaaaaccagctagcaactgcaaacaagatgataacctctgtcttggaaaaagaagcctccaaaatg

SEQ ID NO: 199247 - DNA, 120 bp, Artificial Sequence
  ENSG00000113790_9 (sequence is synthesized)
caacagagcggccacccttggtcaggaccaaaacccaggttaacttcatctgtgaaggagcttggtggtgtagatttagtcattgaagcagtatttgaggaaatgagcctgaagaagcag

SEQ ID NO: 199248 - DNA, 120 bp, Artificial Sequence
  ENSG00000113790_10 (sequence is synthesized)
gtctttgctgaactctcagctgtgtgcaaaccagaagcatttttgtgcactaatacttcagccctggatgttgatgagattgcttcttccactgatcgtcctcacttggtcattggcacc

SEQ ID NO: 199249 - DNA, 120 bp, Artificial Sequence
  ENSG00000113790_11 (sequence is synthesized)
cacttcttttcgccagctcatgtcatgaagttgttagaggttattcccagccaatactcttcccccactaccattgccactgttatgaacttatcaaaaaagattaaaaagattggagtc

SEQ ID NO: 199250 - DNA, 120 bp, Artificial Sequence
  ENSG00000113790_12 (sequence is synthesized)
gttgtaggcaactgttttggatttgtggggaatcgaatgttgaatccttactacaatcaggcatatttcttgttagaagaaggcagcaaaccagaggaggtagatcaggtgctggaagag

SEQ ID NO: 199251 - DNA, 120 bp, Artificial Sequence
  ENSG00000113790_13 (sequence is synthesized)
tttggttttaaaatgggaccttttagagtgtctgatcttgctgggttggatgtgggctggaaatctagaaaggggcaaggtcttactggacctacattgcttccaggaactcctgcccga

SEQ ID NO: 199252 - DNA, 120 bp, Artificial Sequence
  ENSG00000113790_14 (sequence is synthesized)
aaaaggggtaataggaggtactgcccaattcctgatgtgctctgtgaattaggacgatttggccagaagacaggtaagggttggtatcaatatgacaagccattgggtaggattcacaaa

SEQ ID NO: 199253 - DNA, 120 bp, Artificial Sequence
  ENSG00000113790_15 (sequence is synthesized)
atccttgaacgctgcttatattcacttatcaatgaagcattccgtatcttgggagaagggatagctgctagcccagagcacattgatgttgtctatttacatggatatggatggccaagg

SEQ ID NO: 199254 - DNA, 120 bp, Artificial Sequence
  ENSG00000113790_16 (sequence is synthesized)
cacaagggcgggcccatgttctatgcttccacagttgggttgcccacagttctagagaaattgcagaaatattacaggcagaaccctgatattccccaactggagccaagtgactatcta

SEQ ID NO: 199255 - DNA, 120 bp, Artificial Sequence
  ENSG00000113790_17 (sequence is synthesized)
aaaaaactggcttctcagggaaaccctcccctgaaagaatggcaaagcttggcaggctcccctagcagtaaattgtgattcagtcttccagattatgcctcacatgctagcatcaggtaa

SEQ ID NO: 199256 - DNA, 120 bp, Artificial Sequence
  ENSG00000113790_18 (sequence is synthesized)
tgctgactgaatttcagtgaaattaaatcaaaaatccaaagtaagattgttctgaaatacaaagcaaaataaataatcattagaatcttctgtgtaacgactctaatggtcaaatcttta

SEQ ID NO: 199257 - DNA, 120 bp, Artificial Sequence
  ENSG00000113790_19 (sequence is synthesized)
ggaatgtgcttcctatgcctctgaatctgtccttatcagataaattcaatgcatgaacttgtgtgaatataataccataatagctaatgaaagaggctcaggcataagttgagattctca

SEQ ID NO: 199258 - DNA, 120 bp, Artificial Sequence
  ENSG00000113790_20 (sequence is synthesized)
aatgcttttatcattggataaatgtgtcatcaattaataaatgataaatgcagctaagtcatacattcattttgactcctttcaatgtcacacacatagtattgatcagaaatcttatga

SEQ ID NO: 199259 - DNA, 120 bp, Artificial Sequence
  ENSG00000113790_21 (sequence is synthesized)
atcatacatacactcaacaaacattaaagttgtaggaaaaagacagttggaaattggtaagggaactgagtacttcaaaccagcacagggaacttaggttagtgtggcaagcctttcctc

SEQ ID NO: 199260 - DNA, 120 bp, Artificial Sequence
  ENSG00000113790_22 (sequence is synthesized)
ttctggtctttcctcttctgtttatggagaaataatagaaagtagtaagtcgttaacttagtgtaagaagggtcttagagaacatctaaccttctaggatttcccaattctgtgatagag

SEQ ID NO: 199261 - DNA, 120 bp, Artificial Sequence
  ENSG00000113790_23 (sequence is synthesized)
taatgacaccagttttcctgtcatgacaagcctctgtgatgttacatatggaaatggttgaatcttgaaaaatctaaaattgttgcaaaacatattttgtatgattttgttgtaagagtt

SEQ ID NO: 199262 - DNA, 120 bp, Artificial Sequence
  ENSG00000113790_24 (sequence is synthesized)
cttctctttttactttttgccttgtgtagttaaaaattaaggggctggtcaatacaaaaacttgtacacaaatatttatagcagaattattcataatggccaaaagctgaatacaaccca

SEQ ID NO: 199263 - DNA, 120 bp, Artificial Sequence
  ENSG00000113790_25 (sequence is synthesized)
gaatacaacccaaatgtctatgaactaatgaatagataaaccaaatctggtatatccatacaatggactatattattcagccataaaaagaaataaagggccaggcacagtggctcacac

SEQ ID NO: 199264 - DNA, 67 bp, Artificial Sequence
  ENSG00000113790_26 (sequence is synthesized)
atttccgtacattagtggttgcctaaggctagaattgggggtgatgaatggggagtacaggattcat

SEQ ID NO: 199265 - DNA, 120 bp, Artificial Sequence
  ENSG00000113790_27 (sequence is synthesized)
gctagaattgggggtgatgaatggggagtacaggattcatctaatgggtacaggatttctttatggttcatgaaaatggtctaaacttattgtggtaatggtcacataacaatatattaa

SEQ ID NO: 199266 - DNA, 120 bp, Artificial Sequence
  ENSG00000113790_28 (sequence is synthesized)
aaaccattgagttgtatattttaagtgggtgaattatatggtatgtgaattatatctcaataaagttgttagtaaataaatggggctgaagatgttatccttcattgtggtgtaaatgaa

SEQ ID NO: 199267 - DNA, 120 bp, Artificial Sequence
  ENSG00000113790_29 (sequence is synthesized)
ctttcacaatattttcacctgtgaacccaaataaaatgattaaagttctgatggaaaaatcttgaatggagtataagttttccgttgttaaaaagcaaacaaaaaaccaacaaaaaatcc

SEQ ID NO: 199268 - DNA, 120 bp, Artificial Sequence
  ENSG00000113790_30 (sequence is synthesized)
aagtgtgccttgaattgtacagagcacaattattatgtttgaaatgtgtactacttaattttatataatttggtttgtgaaattaaagacatcaataaaaatgattcctgaaagtagtaa

SEQ ID NO: 199269 - DNA, 120 bp, Artificial Sequence
  ENSG00000113790_31 (sequence is synthesized)
gaggtgccctcggtgatagaggaaacatggccgagtatacgcggctgcacaacgccttggcgctaatccgcctccgaaacccgccggtcaacgcgatcaggtaacgggctcggtcgcctc

SEQ ID NO: 199270 - DNA, 120 bp, Artificial Sequence
  ENSG00000113790_32 (sequence is synthesized)
cagcccggggaccgtgcgggccttagccgccctctggctccggaggctttgactctcccccgtcggtttaaaccgagaaggacactcaagagttgagcaactgtacgactttactccgtg

SEQ ID NO: 199271 - DNA, 120 bp, Artificial Sequence
  ENSG00000113790_33 (sequence is synthesized)
aggattgcccacgcagagatcaacctctagaatcccgtagactctgcaacaagccaattcagagcttgcccaacatggacagcatttttagtgaggccctcttgaagatgcggaggcagc

SEQ ID NO: 199272 - DNA, 120 bp, Artificial Sequence
  ENSG00000113790_34 (sequence is synthesized)
tttgcccaaaaatttcgcagaatgacagaactgaaaggaacttttagaggcaatcacttagtcaacctcttgctgttacagaaaacttgtcacagattgagtattccagattggagatga

SEQ ID NO: 199273 - DNA, 120 bp, Artificial Sequence
  ENSG00000113790_35 (sequence is synthesized)
gcaaatcctcagccatcctgggagggagctttagatacgactttactccgtgacataaaagaaggactacagaaagctgtaatagaccatacaataaaagccattgtgatttgtggagca

SEQ ID NO: 199274 - DNA, 120 bp, Artificial Sequence
  ENSG00000113790_36 (sequence is synthesized)
tggcagacttgagtgagaatgagtaacactgtggagaaagggacaggaattacaagagagacccagagaagggcttagtctcttttattgtggattgggcttttagagtatatttagttc

SEQ ID NO: 199275 - DNA, 120 bp, Artificial Sequence
  ENSG00000113790_37 (sequence is synthesized)
cagacttgatggctgttatacacctgctgatatatacctgcattgcatgtatctccaccatatgtgggcttgggcaaatctctttaacttcctgaacctcaatttctctatctataaagt

SEQ ID NO: 199276 - DNA, 120 bp, Artificial Sequence
  ENSG00000113790_38 (sequence is synthesized)
gggaacaataatatctattttaaggggtttttgtgacattaagcgagataacatatctgaaagcctctactacagtacctacacaaagaagatggtcaataaatgttattgtttaattca

SEQ ID NO: 199277 - DNA, 120 bp, Artificial Sequence
  ENSG00000113805_0 (sequence is synthesized)
gagttactcttgcatttggcaattaaagatgatgtttccatggaaacagttgatcctgctttcattcattggctgcttaggaggtgagcttctcttacaaggccctgtatttatcaaaga

SEQ ID NO: 199278 - DNA, 120 bp, Artificial Sequence
  ENSG00000113805_1 (sequence is synthesized)
acccagcaacagcattttccctgttggttcagaagataaaaaaataactttgcattgtgaagcaagaggcaatccatcacctcattacagatggcagctgaatggaagtgatattgatat

SEQ ID NO: 199279 - DNA, 120 bp, Artificial Sequence
  ENSG00000113805_2 (sequence is synthesized)
gagtatggaacatcgttataagttgaatggaggaaatcttgtggttattaatcccaacagaaattgggatacaggaacttaccaatgttttgcaacaaattcacttggaacaattgtcag

SEQ ID NO: 199280 - DNA, 120 bp, Artificial Sequence
  ENSG00000113805_3 (sequence is synthesized)
cagagaagccaaacttcagtttgcctatcttgaaaattttaaaaccaaaatgaggagtacagtgtctgtgcgtgaaggccagggagttgtgctgctctgcggccccccaccacactctgg

SEQ ID NO: 199281 - DNA, 120 bp, Artificial Sequence
  ENSG00000113805_4 (sequence is synthesized)
agaactgtcatatgcttggatcttcaatgaatacccatcgtttgttgaagaagatagtcggagatttgtctcccaggagacagggcacctctacatatctaaggtggagccgtctgatgt

SEQ ID NO: 199282 - DNA, 120 bp, Artificial Sequence
  ENSG00000113805_5 (sequence is synthesized)
gggaaattacacatgtgtggtgacaagtatggtgacaaatgcccgagtgctgggctctccaactcctttggtgctacgttctgatggtgtgatgggtgaatatgaacctaaaatagaagt

SEQ ID NO: 199283 - DNA, 120 bp, Artificial Sequence
  ENSG00000113805_6 (sequence is synthesized)
tcagtttccagaaactcttccagcagctaaaggttcgactgtgaaattggaatgttttgcccttggaaatcccatacctcagattaattggagaagaagtgatgggctgccattttccag

SEQ ID NO: 199284 - DNA, 120 bp, Artificial Sequence
  ENSG00000113805_7 (sequence is synthesized)
caaaattaaattaaggaagttcagtggtgtgcttgaaatccccaacttccaacaggaagatgcaggttcctatgaatgcattgctgagaattcacgaggaaaaaatgttgccagagggcg

SEQ ID NO: 199285 - DNA, 120 bp, Artificial Sequence
  ENSG00000113805_8 (sequence is synthesized)
tctcacttactatgcaaagccccattgggttcaactcataaaggatgtggaaatagccgtggaggacagtctttattgggaatgcagggcaagcggcaagcccaagccttcctaccgatg

SEQ ID NO: 199286 - DNA, 120 bp, Artificial Sequence
  ENSG00000113805_9 (sequence is synthesized)
gctgaaaaatggagcagccctggtgctagaggagagaacacagatagaaaatggtgcccttacaatatcaaacctaagtgtgactgattctggcatgttccaatgcatagcagaaaacaa

SEQ ID NO: 199287 - DNA, 120 bp, Artificial Sequence
  ENSG00000113805_10 (sequence is synthesized)
acatggccttgtttattccagtgctgagctcaaagttgttgcttctgctccagatttttcaaagaatccaatgaagaagttggttcaggtgcaggtgggcagcctggtcagcttggattg

SEQ ID NO: 199288 - DNA, 120 bp, Artificial Sequence
  ENSG00000113805_11 (sequence is synthesized)
taaacccagagcctccccaagggcactctcttcctggaagaagggggatgtgagcgtgcaggagcatgaaagaatttctttgttaaacgatggaggactcaaaatagccaatgtgactaa

SEQ ID NO: 199289 - DNA, 120 bp, Artificial Sequence
  ENSG00000113805_12 (sequence is synthesized)
agctgatgctggaacttacacctgcatggcagaaaaccagtttgggaaagcaaatggcacaacacatttggttgttacggaaccaacaagaataactttggcaccatctaacatggatgt

SEQ ID NO: 199290 - DNA, 120 bp, Artificial Sequence
  ENSG00000113805_13 (sequence is synthesized)
ttctgttggtgaaagcgtcatattgccctgccaggtacaacatgacccgctgttagacatcatctttacctggtatttcaatggggcccttgcagattttaagaaagatggatctcactt

SEQ ID NO: 199291 - DNA, 120 bp, Artificial Sequence
  ENSG00000113805_14 (sequence is synthesized)
tgagaaagttggtgggagttcatctggtgatttaatgatcagaaacattcagctgaaacacagtgggaaatatgtttgtatggtgcaaacgggggtggacagtgtttcatctgctgctga

SEQ ID NO: 199292 - DNA, 120 bp, Artificial Sequence
  ENSG00000113805_15 (sequence is synthesized)
cctcatagtaagaggttcacctggaccaccagaaaatgtgaaggtagatgaaattacagacacaacagcccaactctcttggaaagaaggtaaagacaaccatagcccagttatatccta

SEQ ID NO: 199293 - DNA, 120 bp, Artificial Sequence
  ENSG00000113805_16 (sequence is synthesized)
ttctatccaggctcggacacctttctccgtgggttggcaaaccgtcacaacagtgcctgaggtcatcgatgggaagacgcacacagccactgtagttgagttaaacccatgggtggaata

SEQ ID NO: 199294 - DNA, 120 bp, Artificial Sequence
  ENSG00000113805_17 (sequence is synthesized)
tgaatttcgggttgtagccagtaacaaaattggaggtggagaaccaagtttaccctcagaaaaagtaagaactgaagaggcagttccagaagtgcctccttctgaagtcaatggaggagg

SEQ ID NO: 199295 - DNA, 120 bp, Artificial Sequence
  ENSG00000113805_18 (sequence is synthesized)
cggaagccggtctgaacttgtgataacctgggatccagtccctgaagaactacagaatggtgaaggttttgggtatgttgttgctttccgccctcttggggttaccacctggatccagac

SEQ ID NO: 199296 - DNA, 120 bp, Artificial Sequence
  ENSG00000113805_19 (sequence is synthesized)
agtggtgacatcccctgacaccccaagatatgtctttaggaatgaaagcatcgtgccatattcaccatatgaagttaaagtgggtgtttataataacaaaggtgaaggaccatttagccc

SEQ ID NO: 199297 - DNA, 120 bp, Artificial Sequence
  ENSG00000113805_20 (sequence is synthesized)
gagcctacagtggccccatctcaagtctctgcaaatagcctatcttcctcagaaattgaggtttcatggaacaccattccttggaagttgagcaatggacatttactgggctatgaggtg

SEQ ID NO: 199298 - DNA, 120 bp, Artificial Sequence
  ENSG00000113805_21 (sequence is synthesized)
cggtactggaatgggggtggaaaggaggaatcatccagtaagatgaaagtggcaggaaatgagacatcagccagactacggggcctgaagagcaacctggcctattacacggctgtccgg

SEQ ID NO: 199299 - DNA, 120 bp, Artificial Sequence
  ENSG00000113805_22 (sequence is synthesized)
gcttacaacagtgccggcgctgggccttttagcgccacagttaatgtaaccaccaagaaaacgcctcccagtcagccaccaggaaatgttgtttggaatgccacagacactaaagtgtta

SEQ ID NO: 199300 - DNA, 120 bp, Artificial Sequence
  ENSG00000113805_23 (sequence is synthesized)
cttaattgggagcaagttaaagccatggagaatgagtcagaagtaacaggatataaagttttctataggactagcagtcaaaataacgtacaagtactgaacacaaataaaacttcagct

SEQ ID NO: 199301 - DNA, 120 bp, Artificial Sequence
  ENSG00000113805_24 (sequence is synthesized)
gaacttgtgctgcccattaaagaggactacattattgaagtcaaggccacaacagatggaggggatgggaccagtagtgaacagatcaggattccacgaataaccagtatggatgcaaga

SEQ ID NO: 199302 - DNA, 120 bp, Artificial Sequence
  ENSG00000113805_25 (sequence is synthesized)
ggatccacttcagccatctcgaatgtccaccctatgtcaagttatatgcctatagtactgttcttaattgtatatgtcctgtggtgatattaactcctttttattatttattggaaagtt

SEQ ID NO: 199303 - DNA, 120 bp, Artificial Sequence
  ENSG00000113805_26 (sequence is synthesized)
atttggttaccaaaaaaagtgctttcatgaaatgcagtgattatgcatgtttttttcaactcttatttttaactttctacttcattataggtaaatatgaatataattaaaaaaacagta

SEQ ID NO: 199304 - DNA, 120 bp, Artificial Sequence
  ENSG00000113805_27 (sequence is synthesized)
aatccttttaggggaatctgaaatgccttaatattaacttgataaaccaaaggaatttacatattacatacttcagacttttgatataaatgttcttaaactatgagtttaagcactgcc

SEQ ID NO: 199305 - DNA, 120 bp, Artificial Sequence
  ENSG00000113805_28 (sequence is synthesized)
tatggataaagactcacacactctcacatgtacacacacacgcatgagaatttctttttacattgaaaaactctttcatttaattcaaatgctattttcccattataatagcattatttg

SEQ ID NO: 199306 - DNA, 120 bp, Artificial Sequence
  ENSG00000113805_29 (sequence is synthesized)
gaagacttaaccagtatcaatttgaaatgctgatttaagtccccaaggatgaaaaatacattttaaaaattattttgttggagaggagtggcatgtgattcaaaagagcattgttggaaa

SEQ ID NO: 199307 - DNA, 120 bp, Artificial Sequence
  ENSG00000113805_30 (sequence is synthesized)
atgctactgtggggcttagaagaatgatgtttggtttggtatgctgctaactagttgtaagactttacaaatcactttgccatctgtacctctcaattattcctctataaaatatggaga

SEQ ID NO: 199308 - DNA, 120 bp, Artificial Sequence
  ENSG00000113805_31 (sequence is synthesized)
taataatacctatctgatcagactttgccccatgaattagtttttaaaagataaagactgaagtatgaaagtgcttttgtcaccccaaatgcaattgacccatgcaaaatattagcatga

SEQ ID NO: 199309 - DNA, 120 bp, Artificial Sequence
  ENSG00000113805_32 (sequence is synthesized)
atttatttaatcacataaaagtcatgaagaccagccagattttcaagcttcattctgtttcattcagttatattccaaaattcaaatgatcacattttattctttctcaaaaaaaaaaag

SEQ ID NO: 199310 - DNA, 120 bp, Artificial Sequence
  ENSG00000113805_33 (sequence is synthesized)
tttttttaaattaaaaaaggaattgtttccttcacagctatgaataagctttcaggttttattaaaacctagaggaaaaaatcaggaatgacctgaatctcaacccaaatattaaacaaa

SEQ ID NO: 199311 - DNA, 120 bp, Artificial Sequence
  ENSG00000113805_34 (sequence is synthesized)
atccacataatccctcatttcaatttccaattccattaagggaccctctctttttggatggcagagatggttttttaatgaaatcccaccatctatctgagtgagtctggcaggcttttt

SEQ ID NO: 199312 - DNA, 120 bp, Artificial Sequence
  ENSG00000113805_35 (sequence is synthesized)
agttcctgagttaaatttgtaatagaaccaaggcaatgctgctgactttgatatgtatgactcagtctttcaatatgtggttttcaaaaaattgttgaagacgtgacttcatagcaatat

SEQ ID NO: 199313 - DNA, 120 bp, Artificial Sequence
  ENSG00000113805_36 (sequence is synthesized)
atagagaataaattaaaatcagcagattgagttttcaacattgcaaaatcagttttttacctctttcctaccaatttcacattttgcagaaacttgttcacatttccaacaatatcagaa

SEQ ID NO: 199314 - DNA, 120 bp, Artificial Sequence
  ENSG00000113805_37 (sequence is synthesized)
ttagaaaacagttcagataacaagaaagattaaaaattagggaaattctgatatcaccataaagcactattttacatttagagattacatttaagataaagtcatcatacacaaaaacaa

SEQ ID NO: 199315 - DNA, 120 bp, Artificial Sequence
  ENSG00000113805_38 (sequence is synthesized)
taaatatttataactttctctataaggtccgcatatactgtatatattgaaacaatctgaatgactagtagatttcatatgaccattgttatttccactttctccaatacttgtatttta

SEQ ID NO: 199316 - DNA, 120 bp, Artificial Sequence
  ENSG00000113805_39 (sequence is synthesized)
tgctacatgtaatgaagttggacctttttattatttagtaattcctatatgttcctatacttttcattttcaagatgattgctctattgtttcatgttgtttctagcaatatatctccat

SEQ ID NO: 199317 - DNA, 120 bp, Artificial Sequence
  ENSG00000113805_40 (sequence is synthesized)
gagatatgcactttgtttcatattgaaaagtataaaatttatctttcaattcctgtgtgtgtatcctatggttatctgtatgtattattttctattctaataaaatttataacaagcaaa

SEQ ID NO: 199318 - DNA, 120 bp, Artificial Sequence
  ENSG00000113805_41 (sequence is synthesized)
tatactctgttatttttttctgatttcatctattacaccaagcattaccaaaggcatcccgttctacttccactagcttcctatgatagccgccatctcctccgtgtaaaatatcacttg

SEQ ID NO: 199319 - DNA, 120 bp, Artificial Sequence
  ENSG00000113810_0 (sequence is synthesized)
ccttaattagaaatgcgttagcgaatattatacgcttatactatgggcggacgggtggagagccttaaaaacaacaacaacaaactaagcagttgctcaatcgttgattgatcctcaggc

SEQ ID NO: 199320 - DNA, 120 bp, Artificial Sequence
  ENSG00000113810_1 (sequence is synthesized)
acgtctagattttcccacttacataggtcttgttaagaaaccagtcctgccttcttgccactcgtgtctttcgatggctcccttcccgaagtcccgctgcctctaagcggagtgttaagc

SEQ ID NO: 199321 - DNA, 120 bp, Artificial Sequence
  ENSG00000113810_2 (sequence is synthesized)
ggggctctcggaagccggtggaccgagatttccccgggtggggcgggcgcggtgtagcggcccgcgggctgacttgctcccggctgtcccccggccccagcgaccatgccccgtaaaggc

SEQ ID NO: 199322 - DNA, 120 bp, Artificial Sequence
  ENSG00000113810_3 (sequence is synthesized)
gtaaaggcacccagccctccactgcccggcgcagagaggaagggccgccgccgccgtcccctgacggcgccagcagcgacgcggagcctgagccgccgtccggccgcacggagagcccag

SEQ ID NO: 199323 - DNA, 120 bp, Artificial Sequence
  ENSG00000113810_4 (sequence is synthesized)
gcagagactgcaagtgaggaacttgataatagaagtttagaagagattttgaacagcattcctcctcccccgcctccagcaatgaccaatgaagctggagctcctcggcttatgataact

SEQ ID NO: 199324 - DNA, 120 bp, Artificial Sequence
  ENSG00000113810_5 (sequence is synthesized)
catattgtaaaccagaacttcaaatcctatgctggggagaaaattctgggacctttccataagcgcttttcctgtattatcgggccaaatggcagtggcaaatccaatgttattgattct

SEQ ID NO: 199325 - DNA, 120 bp, Artificial Sequence
  ENSG00000113810_6 (sequence is synthesized)
atgctttttgtgtttggctatcgagcacaaaaaataagatctaaaaaactctcagtattaatacataattctgatgaacacaaggacattcagagttgtacagtagaagttcattttcaa

SEQ ID NO: 199326 - DNA, 120 bp, Artificial Sequence
  ENSG00000113810_7 (sequence is synthesized)
aagataattgataaggaaggggatgattatgaagtcattcctaacagtaatttctatgtatccagaacggcctgcagagataatacttctgtctatcacataagtggaaagaaaaagaca

SEQ ID NO: 199327 - DNA, 120 bp, Artificial Sequence
  ENSG00000113810_8 (sequence is synthesized)
tttaaggatgttggaaatcttcttcgaagccatggaattgacttggaccataatagatttttaattttacagggtgaagttgaacaaattgctatgatgaaaccaaaaggccagactgaa

SEQ ID NO: 199328 - DNA, 120 bp, Artificial Sequence
  ENSG00000113810_9 (sequence is synthesized)
cacgatgagggtatgcttgaatatttagaagatataattggttgtggacggctaaatgaacctattaaagtcttgtgtcggagagttgaaatattaaatgaacacagaggagagaagtta

SEQ ID NO: 199329 - DNA, 120 bp, Artificial Sequence
  ENSG00000113810_10 (sequence is synthesized)
aacagggtaaagatggtggaaaaggaaaaggatgccttagaaggagagaaaaacatagctatcgaatttcttaccttggaaaatgaaatatttagaaaaaagaatcatgtttgtcaatat

SEQ ID NO: 199330 - DNA, 120 bp, Artificial Sequence
  ENSG00000113810_11 (sequence is synthesized)
tatatttatgagttgcagaaacgaattgctgaaatggaaactcaaaaggaaaaaattcatgaagataccaaagaaattaatgagaagagcaatatactatcaaatgaaatgaaagctaag

SEQ ID NO: 199331 - DNA, 120 bp, Artificial Sequence
  ENSG00000113810_12 (sequence is synthesized)
aataaagatgtaaaagatacagaaaagaaactgaataaaattacaaaatttattgaggagaataaagaaaaatttacacagctagatttggaagatgttcaagttagagaaaagttaaaa

SEQ ID NO: 199332 - DNA, 120 bp, Artificial Sequence
  ENSG00000113810_13 (sequence is synthesized)
catgccacgagtaaagccaaaaaactggagaaacaacttcaaaaagataaagaaaaggttgaagaatttaaaagtatacctgccaagagtaacaatatcattaatgaaacaacaaccaga

SEQ ID NO: 199333 - DNA, 120 bp, Artificial Sequence
  ENSG00000113810_14 (sequence is synthesized)
aacaatgccctcgagaaggaaaaagagaaagaagaaaaaaaattaaaggaagttatggatagccttaaacaggaaacacaagggcttcagaaagaaaaagaaagtcgagagaaagaactt

SEQ ID NO: 199334 - DNA, 120 bp, Artificial Sequence
  ENSG00000113810_15 (sequence is synthesized)
atgggtttcagcaaatcggtaaatgaagcacgttcaaagatggatgtagcccagtcagaacttgatatctatctcagtcgtcataatactgcagtgtctcaattaactaaggctaaggaa

SEQ ID NO: 199335 - DNA, 120 bp, Artificial Sequence
  ENSG00000113810_16 (sequence is synthesized)
gctctaattgcagcttctgagactctcaaagaaaggaaagctgcaatcagagatatagaaggaaaactccctcaaactgaacaagaattaaaggagaaagaaaaagaacttcaaaaactt

SEQ ID NO: 199336 - DNA, 120 bp, Artificial Sequence
  ENSG00000113810_17 (sequence is synthesized)
acacaagaagaaacaaactttaaaagtttggttcatgatctctttcaaaaagttgaagaagcaaagagctcattagcaatgaatcgaagtagggggaaagtccttgatgcaataattcaa

SEQ ID NO: 199337 - DNA, 120 bp, Artificial Sequence
  ENSG00000113810_18 (sequence is synthesized)
gaaaaaaaatctggcaggattccaggaatatatggaagattgggggacttaggagccattgatgaaaaatacgacgtggctatatcatcctgttgtcatgcactggactacattgttgtt

SEQ ID NO: 199338 - DNA, 120 bp, Artificial Sequence
  ENSG00000113810_19 (sequence is synthesized)
gattctattgatatagcccaagaatgtgtaaacttccttaaaagacaaaatattggagttgcaacctttataggtttagataagatggctgtatgggcgaaaaagatgaccgaaattcaa

SEQ ID NO: 199339 - DNA, 120 bp, Artificial Sequence
  ENSG00000113810_20 (sequence is synthesized)
actcctgaaaatactcctcgtttatttgatttagtaaaagtaaaagatgagaaaattcgccaagctttttattttgctttacgagataccttagtagctgacaacttggatcaagccaca

SEQ ID NO: 199340 - DNA, 120 bp, Artificial Sequence
  ENSG00000113810_21 (sequence is synthesized)
agagtagcatatcaaaaagatagaagatggagagtggtaactttacagggacaaatcatagaacagtcaggtacaatgactggtggtggaagcaaagtaatgaaaggaagaatgggttcc

SEQ ID NO: 199341 - DNA, 120 bp, Artificial Sequence
  ENSG00000113810_22 (sequence is synthesized)
tgcaaatccaagaacagaaagtacaacttgaagaaagagtagttaagttacggcatagtgaacgagaaatgaggaacacactagaaaaatttactgcaagcatccagcgtttaatagagc

SEQ ID NO: 199342 - DNA, 120 bp, Artificial Sequence
  ENSG00000113810_23 (sequence is synthesized)
aagaagaatatttgaatgtccaagttaaggaacttgaagctaatgtacttgctacagcccctgacaaaaaaaagcagaaattgctagaagaaaacgttagtgctttcaaaacagaatatg

SEQ ID NO: 199343 - DNA, 120 bp, Artificial Sequence
  ENSG00000113810_24 (sequence is synthesized)
atgctgtggctgagaaagctggtaaagtagaagctgaggttaaacgcttacacaataccatcgtagaaatcaataatcataaactcaaggcccaacaagacaaacttgataaaataaata

SEQ ID NO: 199344 - DNA, 120 bp, Artificial Sequence
  ENSG00000113810_25 (sequence is synthesized)
agcaattagatgaatgtgcttctgctattactaaagcccaagtagcaatcaagactgctgacagaaaccttcaaaaggcacaagactctgtcttgcgtacagagaaagaaataaaagata

SEQ ID NO: 199345 - DNA, 120 bp, Artificial Sequence
  ENSG00000113810_26 (sequence is synthesized)
ctgagaaagaggtggatgacctaacagcagagctgaaaagtcttgaggacaaagcagcagaggtcgtaaagaatacaaatgctgcagaggaatccttaccagagatccagaaagaacatc

SEQ ID NO: 199346 - DNA, 120 bp, Artificial Sequence
  ENSG00000113810_27 (sequence is synthesized)
gcaatctgcttcaagaattaaaagttattcaagaaaatgaacatgctcttcaaaaagatgcacttagtattaagttgaaacttgaacaaatagatggtcacattgctgaacataattcta

SEQ ID NO: 199347 - DNA, 120 bp, Artificial Sequence
  ENSG00000113810_28 (sequence is synthesized)
aaataaaatattggcacaaagagatttcaaaaatatcactgcatcctatagaagataatcctattgaagagatttcggttctaagcccagaggatcttgaagcgatcaagaatccagatt

SEQ ID NO: 199348 - DNA, 120 bp, Artificial Sequence
  ENSG00000113810_29 (sequence is synthesized)
ctataacaaatcaaattgcacttttggaagcccggtgtcatgaaatgaaaccaaacctcggtgccatcgcagagtataaaaagaaggaagaattgtatttgcaacgggtagcagaattgg

SEQ ID NO: 199349 - DNA, 120 bp, Artificial Sequence
  ENSG00000113810_30 (sequence is synthesized)
acaaaattacttatgaaagagacagttttagacaggcatatgaagatcttcggaaacaaaggcttaatgaatttatggcaggtttttatataataacaaataaattaaaggaaaattacc

SEQ ID NO: 199350 - DNA, 120 bp, Artificial Sequence
  ENSG00000113810_31 (sequence is synthesized)
aaatgcttactttgggaggggacgccgaactcgagcttgtagacagcttggatcctttctctgaaggaatcatgttcagtgttcgaccacctaagaaaagttggaaaaagatcttcaacc

SEQ ID NO: 199351 - DNA, 120 bp, Artificial Sequence
  ENSG00000113810_32 (sequence is synthesized)
tttcgggaggagagaaaacacttagttcattggctttagtatttgctcttcaccactacaagcccactcccctttacttcatggatgagattgatgcagcccttgattttaaaaatgtgt

SEQ ID NO: 199352 - DNA, 120 bp, Artificial Sequence
  ENSG00000113810_33 (sequence is synthesized)
ccattgttgcattttatatatatgaacaaacaaaaaatgcacagttcataataatttctcttcgaaataatatgtttgagatttcggatagacttattggaatttacaagacatacaaca

SEQ ID NO: 199353 - DNA, 120 bp, Artificial Sequence
  ENSG00000113810_34 (sequence is synthesized)
taacaaaaagtgttgctgtaaatccaaaagaaattgcatctaagggactttgttgaactttatgctgaagattcttcaagttgattcagtgtattactgatttttttctatttgtaaagg

SEQ ID NO: 199354 - DNA, 120 bp, Artificial Sequence
  ENSG00000113810_35 (sequence is synthesized)
attatgagttgtataaaatacatactccctaaactagatcatgaaactggtttctgttttatgcagttgtcatttgtaaagtctaataaaatattctctataattgcttctagattacaa

SEQ ID NO: 199355 - DNA, 120 bp, Artificial Sequence
  ENSG00000113810_36 (sequence is synthesized)
aaatatgacaatcttgtaagtagcagactatggagaaaaatgagttacctggagggtcaggtaacttgccaaactaaaaagtatgttagttgaggcaaagtcctaagcaaggttgtgcta

SEQ ID NO: 199356 - DNA, 120 bp, Artificial Sequence
  ENSG00000113810_37 (sequence is synthesized)
tcaaggctcagcataccttcgtgggcctttgatttaccaacactggaaatgcctgccaactaatcttggatagattctttaaggcattccacttagcttgccagttgagacaatcaccac

SEQ ID NO: 199357 - DNA, 120 bp, Artificial Sequence
  ENSG00000113810_38 (sequence is synthesized)
agttattacccaaatactatgaacatatttttgtaaaccagtcattctgaattatagtgatgagaatttaaatatatgcttttctagaatttgatgtttgaccatttatgacttaattac

SEQ ID NO: 199358 - DNA, 120 bp, Artificial Sequence
  ENSG00000113810_39 (sequence is synthesized)
cagagagccagtaaattaggacagtgtttcaacaagcctaggctatctcgtaagttgaaaaatatcccactatagttgcttcatgagtatgaagtaagatggcctctgatttacactggt

SEQ ID NO: 199359 - DNA, 120 bp, Artificial Sequence
  ENSG00000113810_40 (sequence is synthesized)
tcaatttacaaattttcaactttatgataggtttatccgggtactaaatgcatttcaacttgatagtttcaacttatgataggtttaccaggatgtagtcccactgttgaggagcatcta

SEQ ID NO: 199360 - DNA, 120 bp, Artificial Sequence
  ENSG00000113810_41 (sequence is synthesized)
tttaggggttaattactttagtaataagtggaaagtaagataccttgagtaatgtttgcctataaaattgtcagcgtatttttacactattggctcaagaatgttataatgctaagggac

SEQ ID NO: 199361 - DNA, 120 bp, Artificial Sequence
  ENSG00000113810_42 (sequence is synthesized)
ataagttggcaaccacttggtttttggaaggactttcggtattgtattagaagtctgccctagctgttaaatttctgggtatttatcctaaggaattaattaaagagttaattgttcctt

SEQ ID NO: 199362 - DNA, 120 bp, Artificial Sequence
  ENSG00000113810_43 (sequence is synthesized)
tcttcagtgggccattgttttagatatttaaaaaatccaacagtttctatcataatgtaactgtaaaaatgtaaacacattattagcatggacttttaaataaagatttaaagaaagcaa

SEQ ID NO: 199363 - DNA, 120 bp, Artificial Sequence
  ENSG00000113810_44 (sequence is synthesized)
attttcgagtgaaggacccggagccgaaacaccggtaggagcggggaggtgggtactacacaaccgtctccagccttggtctgagtggactgtcctgcagcgaccatgccccgtaaaggc

SEQ ID NO: 199364 - DNA, 120 bp, Artificial Sequence
  ENSG00000113810_45 (sequence is synthesized)
attaagtcaaagcccttctcttttcctagagaaacatgaagactgaagtgaaaaaaaatctctaaatattgttttgtgtgactgaatgtgttagctcatgcctgtaattccagcactttg

SEQ ID NO: 199365 - DNA, 120 bp, Artificial Sequence
  ENSG00000113810_46 (sequence is synthesized)
catagcaagaccccatctctacaaaaaaaggaattatgtggtgaacttatccaatgtgaggactatctggctgtgacacctgtcatcccgttgatcaccagggttgaatttattaaatta

SEQ ID NO: 199366 - DNA, 120 bp, Artificial Sequence
  ENSG00000113810_47 (sequence is synthesized)
gtaagtttggacttttaatgtccaacattcctaaaactagtcaacctagacttagatgactattcttttaattcctgctgacatgttttttaaaaagtttactaaatgagagtttgtagt

SEQ ID NO: 199367 - DNA, 120 bp, Artificial Sequence
  ENSG00000113810_48 (sequence is synthesized)
ttatacatattttgtattttgttgtgtacccttttgttctctttaaaaccatgtctacataaagtttttcaattaaaagaagtttttaaaacttgatgaatgaaatggtcctgtgctttt

SEQ ID NO: 199368 - DNA, 120 bp, Artificial Sequence
  ENSG00000113810_49 (sequence is synthesized)
aggcgccattttcgagtgaaggacccggagccgaaacaccggtaggagcggggaggtgggtactacacaaccgtctccagccttggtctgagtggactgtcctgcagcgcttttcctgta

SEQ ID NO: 199369 - DNA, 120 bp, Artificial Sequence
  ENSG00000113810_50 (sequence is synthesized)
tggaaggggcatgaggagagattggtaattccttcatctctgtaatgtgaaaatgatggctctatttggaaaattctatctagcagttcttttcggtgtttaggaatccttaccagagat

SEQ ID NO: 199370 - DNA, 120 bp, Artificial Sequence
  ENSG00000113810_51 (sequence is synthesized)
ggatatatgacagtgcctagaatgtagtaagcactcatagacttaaagttttataactatcaatttttatttgtacaataagaatactataatttgtgaatttaaatgcttaaattattt

SEQ ID NO: 199371 - DNA, 120 bp, Artificial Sequence
  ENSG00000113810_52 (sequence is synthesized)
taaaatggaaggggcatgaggagagattggtaattccttcatctctgtaatgtgaaaatgatggctctatttggaaaattctatctagcagttcttttcggtgtttaggaatccttacca

SEQ ID NO: 199372 - DNA, 120 bp, Artificial Sequence
  ENSG00000113810_53 (sequence is synthesized)
cggagccgaaacaccggtaggagcggggaggtgggtactacacaaccgtctccagccttggtctgagtggactgtcctgcaggtaaagtacttctcttcctggtcaggttgtcacgctct

SEQ ID NO: 199373 - DNA, 120 bp, Artificial Sequence
  ENSG00000113810_54 (sequence is synthesized)
tacttcctgccttgtccgcgagcgcctggaaaatagaggccttgagcccgagcggcgaagtccgggcttgaagctgccgctgggagatttctcttgctgtcacccctcccccctcggccg

SEQ ID NO: 199374 - DNA, 120 bp, Artificial Sequence
  ENSG00000113810_55 (sequence is synthesized)
ctccccggcggcccgggctcccgcgcgcagctcccgggcgccacttttccaagctactcaaatgtctcggggaggccctgagcctcgcagatcttttctttaaaaaatcctagtctctat

SEQ ID NO: 199375 - DNA, 120 bp, Artificial Sequence
  ENSG00000113810_56 (sequence is synthesized)
ctggaaaagggcgtctccccctacccctcttccttctgccaacggactagtcaccgggtctcagccttcgctggtgacctttcatggtttactgtccaacgggactccgcctggggagct

SEQ ID NO: 199376 - DNA, 120 bp, Artificial Sequence
  ENSG00000113810_57 (sequence is synthesized)
ggagagacaaactcttgccactccaaaattagcaagcgctgccagcgtccgacttgaagttgctagtggttagtcccagccttcgcccttcgcggtccgaccgctgagaggagggagact

SEQ ID NO: 199377 - DNA, 120 bp, Artificial Sequence
  ENSG00000113810_58 (sequence is synthesized)
tcgttatgccccgggccgtcaacggcgccaggagctaaagggcgggcagacgaaagcgggcggcgagtcgccagttagtcttcaccgctctggagagagttgctagccacgggatcctga

SEQ ID NO: 199378 - DNA, 120 bp, Artificial Sequence
  ENSG00000113810_59 (sequence is synthesized)
taacatttttatttataccttattaaatcattgcactactaactgtacattatttagatgtttattactcttggctttattatttaactgctcccaattctcacttaagattgatttagc

SEQ ID NO: 199379 - DNA, 120 bp, Artificial Sequence
  ENSG00000113810_60 (sequence is synthesized)
ctaaaagtatttagataattgtattacatgtgtatttatatataaagttacttctagcacattgtgagtgtaagacatttgccagcatatcaagtggtggcccccttagtgaaaaaaaaa

SEQ ID NO: 199380 - DNA, 120 bp, Artificial Sequence
  ENSG00000113810_61 (sequence is synthesized)
ttgtatagtaagtttattgtatagtaacttgtaagtatattcgtaaaaggtaaaaccaaaattttactcctatggtaaaatttttatatacctagacattgtagtcactggaaaatgtgt

SEQ ID NO: 199381 - DNA, 120 bp, Artificial Sequence
  ENSG00000113810_62 (sequence is synthesized)
tattttccctccaacttagaaaggcaaaatagctgtcataatcaaaaatacaggtgcttcttcaactatggggagagggatcatcttggaataaggagagttttaggatcctgccttatt

SEQ ID NO: 199382 - DNA, 120 bp, Artificial Sequence
  ENSG00000113810_63 (sequence is synthesized)
aagagcctggacatatttatagaggaagtgttccaggtaggaaatgtggttttaaaatatgtgcacattcaaaataatgacttacaatatacttgctttgctaggaaactgaataaaatt

SEQ ID NO: 199383 - DNA, 120 bp, Artificial Sequence
  ENSG00000113811_0 (sequence is synthesized)
gagcagagggagatacagaaaccgacaggggccaggcgcccggtggctccgaagcggggaagtgggacaagatggtttacatctcgaacggacaagtgttggacagccggagtcagtctc

SEQ ID NO: 199384 - DNA, 120 bp, Artificial Sequence
  ENSG00000113811_1 (sequence is synthesized)
catggagattatctttgataacagatttcttctggggaatagctgagtttgtggttttgtttttcaaaactctgcttcagcaagatgtgaaaaaaagaagaagctatggaaactcatctg

SEQ ID NO: 199385 - DNA, 120 bp, Artificial Sequence
  ENSG00000113811_2 (sequence is synthesized)
attccagatatgatgatggaagagggccaccaggaaaccctccccgaagaatgggtagaatcaatcatctgcgtggccctagtccccctccaatggctggtggatgaggaaggtaaatgt

SEQ ID NO: 199386 - DNA, 120 bp, Artificial Sequence
  ENSG00000113811_3 (sequence is synthesized)
ctgctctaagaagcagacaaccggacatgcgcattcatagcagaaggaaaccatcaagaagtggaaggctgaccatgatgagcagtagatgaatgtgtatgtctaaacaaggactgctct

SEQ ID NO: 199387 - DNA, 120 bp, Artificial Sequence
  ENSG00000113811_4 (sequence is synthesized)
gtgtcctcacagatgaatgaggtcatgctgggaattccctctgcagggaactggcctgactgacatgcagttccataaatgcagatgtttgtctcattacctttttgtatagtttattaa

SEQ ID NO: 199388 - DNA, 120 bp, Artificial Sequence
  ENSG00000113811_5 (sequence is synthesized)
agtattaatatagttttaataagtaaatatttttaggttgcagaatggactcctcatctttatattcacgaaaaagcaatctgaagaaaacaaataaaagcctgtgtatttagcactgtt

SEQ ID NO: 199389 - DNA, 120 bp, Artificial Sequence
  ENSG00000113811_6 (sequence is synthesized)
aatcactgtatttattttagtagtatgcatagcatatctgtgctcttgaattaatttttatctttaacatatttgtctcatcaatctttaatacactgtgtctaatttgctaccaaatgt

SEQ ID NO: 199390 - DNA, 120 bp, Artificial Sequence
  ENSG00000113811_7 (sequence is synthesized)
aattatcagggtatttataaaaccatagctaacaaaactgagctacaaaatgaaaatttactaaatagtttttaaaatcatggacttcagcctggcgcggtggctcatgcctgtaatccc

SEQ ID NO: 199391 - DNA, 120 bp, Artificial Sequence
  ENSG00000113811_8 (sequence is synthesized)
ctgtgggaggctgaggcgggcagatcgcctaagttcacgagtttgagaccagcctgcagcatgacgaaacctaaaataacaaaaattagccaggcgtggtagagtgcacctgtaatccct

SEQ ID NO: 199392 - DNA, 76 bp, Artificial Sequence
  ENSG00000113811_9 (sequence is synthesized)
cgcttcaacccgggaggcggaggttgctgtgagcatgccactgcactcctaccatgggcttccatgctatcttgac

SEQ ID NO: 199393 - DNA, 120 bp, Artificial Sequence
  ENSG00000113811_10 (sequence is synthesized)
aataaaaccatgggcttccatgctatcttgacaaatttgcactctatagcatcactcaaaatactgcctattggctttaaactccatctgaatactgataactttcacattctttcacta

SEQ ID NO: 199394 - DNA, 120 bp, Artificial Sequence
  ENSG00000113811_11 (sequence is synthesized)
gagtggaagctctgagactaggaattttgttgtctttaccccagtcctttgaatagtgactacatgtaagatagtcatgtagtatttattggaaataaatatttattggaaaaacgaaaa

SEQ ID NO: 199395 - DNA, 120 bp, Artificial Sequence
  ENSG00000113811_12 (sequence is synthesized)
gagattatctttgataacagatttcttctggggaatagctgagtttgtggttttgttgtaagtatagaagagctcttaattgccctgatatttaagttgacaggtatacatcatgtgcat

SEQ ID NO: 199396 - DNA, 120 bp, Artificial Sequence
  ENSG00000113811_13 (sequence is synthesized)
taaagttgctaccaccagatagcttatgattatgagtatatgttagttggattggtaaacttgaccacatcttaaccttggtggtaactacttcaacctatggctgggtccgtcaattct

SEQ ID NO: 199397 - DNA, 120 bp, Artificial Sequence
  ENSG00000113811_14 (sequence is synthesized)
gatgctaaatgactggacctcactttctctctactattcttgttttgtttttttctttgtgcatgcaactttcattccatattatataacaagtaaataaaaggttttatatcctggttt

SEQ ID NO: 199398 - DNA, 120 bp, Artificial Sequence
  ENSG00000113811_15 (sequence is synthesized)
gcggcctgtgacgctcgaagggcggggagcagagggagatacagaaaccgacaggggccaggcgcccggtggctccgaagcggggaagtgggacaagatggtttacatctcgaacggagc

SEQ ID NO: 199399 - DNA, 120 bp, Artificial Sequence
  ENSG00000113811_16 (sequence is synthesized)
ctagagctgcctgcccacctgtttgactcaggacaagtgttggacagccggagtcagtctccatggagattatctttgataacagatttcttctggggaatagctgagtttgtggttttg

SEQ ID NO: 199400 - DNA, 120 bp, Artificial Sequence
  ENSG00000113812_0 (sequence is synthesized)
agtcgtggctgcagcgctgaggcgagaggttggtgggtgtctccggccataatgacccaggctgagaagggtgatacggagaacggaaaggagaagggcggcgagaaggagaaggagcag

SEQ ID NO: 199401 - DNA, 120 bp, Artificial Sequence
  ENSG00000113812_1 (sequence is synthesized)
cgcggcgtgaagcggcccatcgtgcccgcgctggtgccggagtcgctgcaagagcaaatccagagcaacttcatcattgtcatacatccaggttcaacaactttaaggattggtcgagcc

SEQ ID NO: 199402 - DNA, 120 bp, Artificial Sequence
  ENSG00000113812_2 (sequence is synthesized)
acagacactcttcctgccagcattcctcacgtcattgcccgaagacacaaacaacaagggcagcccctatacaaggacagttggctcctaagggagggactaaataaaccagaaagtaat

SEQ ID NO: 199403 - DNA, 120 bp, Artificial Sequence
  ENSG00000113812_3 (sequence is synthesized)
gaacaaagacaaaatggccttaaaatggtggatcaagcaatatggtctaaaaagatgtccaatggtacaagacgcattcctgtgtcccctgaacaggcacgctcctacaataagcagatg

SEQ ID NO: 199404 - DNA, 120 bp, Artificial Sequence
  ENSG00000113812_4 (sequence is synthesized)
cgacctgcaattttagatcactgttcgggaaataagtggacaaacacatctcatcaccctgagtatttagtaggagaagaggccttgtatgttaatccactggactgttacaatattcac

SEQ ID NO: 199405 - DNA, 120 bp, Artificial Sequence
  ENSG00000113812_5 (sequence is synthesized)
tggcctatcagaagaggtcagttaaatattcacccaggccctgggggctctcttacagctgttctggcagatattgaagtaatatggtctcatgcgatacaaaaatacttggaaatccca

SEQ ID NO: 199406 - DNA, 120 bp, Artificial Sequence
  ENSG00000113812_6 (sequence is synthesized)
ctgaaagatttaaagtattatagatgtatcttgttaattcctgatatctataataagcagcatgtgaaagaactagtgaatatgatactaatgaagatgggtttttcagggattgtggtc

SEQ ID NO: 199407 - DNA, 120 bp, Artificial Sequence
  ENSG00000113812_7 (sequence is synthesized)
catcaggagtctgtgtgtgccacctatggaagtggcttaagcagcacgtgtattgtagacgttggggaccagaagacaagtgtatgctgtgtggaggatggggtgtctcatcggaatact

SEQ ID NO: 199408 - DNA, 120 bp, Artificial Sequence
  ENSG00000113812_8 (sequence is synthesized)
cggctttgtctggcatacggaggatctgatgtgtcaagatgtttttactggctaatgcagcgagctgggttcccttacagagaatgccagttaacaaataaaatggattgtcttcttctg

SEQ ID NO: 199409 - DNA, 120 bp, Artificial Sequence
  ENSG00000113812_9 (sequence is synthesized)
caacaccttaaagaaactttttgtcatttagatcaggacatctctgggcttcaggaccatgagtttcagattcgacatcctgattctcctgccctgctttaccagtttcgattaggagat

SEQ ID NO: 199410 - DNA, 120 bp, Artificial Sequence
  ENSG00000113812_10 (sequence is synthesized)
gaaaaactgcaggctccaatggctttgttttaccccgcaacttttggaatcgttggacagaaaatgacgactttgcagcacagatctcagggcgatcctgaggatcctcacgatgaacat

SEQ ID NO: 199411 - DNA, 120 bp, Artificial Sequence
  ENSG00000113812_11 (sequence is synthesized)
tacctgctggccacacagagcaaacaagaacagtctgcaaaagctactgctgaccgaaagtctgcatccaaacctattggatttgaaggggatcttcgtggccagtcctctgatcttcca

SEQ ID NO: 199412 - DNA, 120 bp, Artificial Sequence
  ENSG00000113812_12 (sequence is synthesized)
gaaagactccattcccaggaggtagatttggggtctgcacagggagatggcctgatggccggcaacgattccgaggaggccctcactgcactgatgtccaggaagactgccatctcgctg

SEQ ID NO: 199413 - DNA, 120 bp, Artificial Sequence
  ENSG00000113812_13 (sequence is synthesized)
tttgaaggaaaagccctgggcctggataaagccatcctccatagcatagactgctgttcatctgacgacaccaaaaagaagatgtacagctccatcctagtggtgggaggtggtttgatg

SEQ ID NO: 199414 - DNA, 120 bp, Artificial Sequence
  ENSG00000113812_14 (sequence is synthesized)
aaggacatggacccccggctgattgcatggaaaggaggggcagtgttggcttgtttggatacaacacaggaactgtggatttatcagcgagagtggcagcgctttggtgtccgcatgtta

SEQ ID NO: 199415 - DNA, 120 bp, Artificial Sequence
  ENSG00000113812_15 (sequence is synthesized)
cgagagcgggctgcgtttgtgtggtgaatggggaggaaatgtcactgccgaagaccaaaaacaagcttcttggtataaaagactcttacagaatatgtgtattgtaatttattgatctgg

SEQ ID NO: 199416 - DNA, 120 bp, Artificial Sequence
  ENSG00000113812_16 (sequence is synthesized)
atgcttaagtgtcatggacagtaaatgaatttgaactttatgttgaggacatgacattggtttgaaaatataaactgcttttgagcagtttagtcagggcatttgagaataaataggaac

SEQ ID NO: 199417 - DNA, 120 bp, Artificial Sequence
  ENSG00000113812_17 (sequence is synthesized)
tttctcttcagttgtaaactctcttgccctctctcagggtctcataaactccccagtgatgtaaacgttgctattgaaggttctcatgtggtgaagcccttcatttaagttggcttgaat

SEQ ID NO: 199418 - DNA, 120 bp, Artificial Sequence
  ENSG00000113812_18 (sequence is synthesized)
ctcatcagcaggcagcctcatgcaaccatgagggatagtatgtgacgagggagaactgtccactcatgccattttctctcttgtctagtatttcattaggatctaaagttgtctgagtta

SEQ ID NO: 199419 - DNA, 120 bp, Artificial Sequence
  ENSG00000113812_19 (sequence is synthesized)
aatgcacttatgtgactcatgtgtcctcttagaatcccaaatagggggaaaaagttttggtggtttttgttttttttttcattttctgttggattacagaaaaagaatgggacccattca

SEQ ID NO: 199420 - DNA, 120 bp, Artificial Sequence
  ENSG00000113812_20 (sequence is synthesized)
ggtctcgatttccaaaggtaaagatggaaggctgggcagactggcttttgttacctgacatgccgtagggtgagcttagaggaagaaagaaaacaatttttatttggccaaaacagaaca

SEQ ID NO: 199421 - DNA, 120 bp, Artificial Sequence
  ENSG00000113812_21 (sequence is synthesized)
aatgctgaaaaggaaatcttgtttttttcctaaagccaaatagaaatgatttgggtataatttaagagtccttgtgttgtacagatatggtgactgatgtagttattaatactaccaact

SEQ ID NO: 199422 - DNA, 120 bp, Artificial Sequence
  ENSG00000113812_22 (sequence is synthesized)
tagtcatcaagcctcaattttcctttacctgaaggattaagtgaaagcttttggagttcatgatgttcagtatgatcagttaaccttaacctctgagcatcctgaagcaaaatctaaata

SEQ ID NO: 199423 - DNA, 120 bp, Artificial Sequence
  ENSG00000113812_23 (sequence is synthesized)
atgcagctattaccactggtggtccaggctctggtgaagccctctgagcccaggaggaagagaaagcattgtccagaggtaggaacacagtctgggagcccagagctctgggaggagtgg

SEQ ID NO: 199424 - DNA, 120 bp, Artificial Sequence
  ENSG00000113812_24 (sequence is synthesized)
gaaaatgctgcttcctgctgcttgcttctaggcacctgcttccgccatctcacttaccatggctagagatgggggtgagactggggaaggacaaaagcagggaacagataagtgatggaa

SEQ ID NO: 199425 - DNA, 120 bp, Artificial Sequence
  ENSG00000113812_25 (sequence is synthesized)
atcagaagggaatatagaaagaactctggatgtggagaaatgccggtacctgagcattttgtatcaatgggagtaccctctgtaactgctcagtaggttacaaatgaagagtccaccagt

SEQ ID NO: 199426 - DNA, 120 bp, Artificial Sequence
  ENSG00000113812_26 (sequence is synthesized)
attagaaacaatttaaacttgccagtaccaactgggatgtgtgccttcaatttgaaaattgtatgttttattttttaaatttgttaacagcattaatttatagagtattgatgtcattta

SEQ ID NO: 199427 - DNA, 120 bp, Artificial Sequence
  ENSG00000113812_27 (sequence is synthesized)
tgtttctgaggtgtttcaacacaattttggatcagctgcctgtttgcaaaaacataatatatttctgttaaacagttcttcacctaacagcatattgctcttataactggtagagctgtt

SEQ ID NO: 199428 - DNA, 120 bp, Artificial Sequence
  ENSG00000113812_28 (sequence is synthesized)
tcaaaggaagttggtttctggtccaagttttgacctaaaccatgtccatcttctattaccagcacttacaagcactgtgaaaactgatcatgacaaataagtaaaatttgctacattaaa

SEQ ID NO: 199429 - DNA, 120 bp, Artificial Sequence
  ENSG00000113812_29 (sequence is synthesized)
agtgcggaagcggtcgttcttttccgggtggtggcgcgccgggacgccgagggctgggaggtgcggagcgccaggagccaggcggagcccccgcagggacaccgctccgatctcccgcac

SEQ ID NO: 199430 - DNA, 120 bp, Artificial Sequence
  ENSG00000113812_30 (sequence is synthesized)
gccccaccgtctggttgtgtgcgctcctgcccgggctctggcctcagcttccccgaccataaaacgaccacgcaaatccagagcaacttcatcattgtcatacatccaggttcaacaact

SEQ ID NO: 199431 - DNA, 120 bp, Artificial Sequence
  ENSG00000113812_31 (sequence is synthesized)
cgtagggttcccctggctgcagtgtggagggtgggctggagggaaatctttgagaaggctattgcacttgctcaagcaagaggtgttggtggcttggcctagaattatggatgtggagaa

SEQ ID NO: 199432 - DNA, 120 bp, Artificial Sequence
  ENSG00000113812_32 (sequence is synthesized)
gccctgggcctggataaagccatcctccatagcatagactgctgttgtaagcacatctggggagaccgggagatagcagtgaaacaagatagcagttaaataaattggttcagtctagga

SEQ ID NO: 199433 - DNA, 120 bp, Artificial Sequence
  ENSG00000113838_0 (sequence is synthesized)
gcgggcccagcgagcggacgccgggcgcggcggcgcgcggagaagtgcggcggagcggcgcctgcattagcaggtatgcaaagaagccttttcaccctgatgtccttagagataatatgg

SEQ ID NO: 199434 - DNA, 120 bp, Artificial Sequence
  ENSG00000113838_1 (sequence is synthesized)
atcagtccagagttctcctctgggtgaaagcagaaccctttatagtgggtgccttgcaggtcccccctccatccaagtttagtcttcactatctcaggaagatatccacctatgtgcaaa

SEQ ID NO: 199435 - DNA, 120 bp, Artificial Sequence
  ENSG00000113838_2 (sequence is synthesized)
tccgggccacagaaggagcttacccgcgcctctactggtctacatggaggcacatcgcttgtgggaagctgcagttggccaaggacctggcgtggctttacttcgaaatatttgatagtc

SEQ ID NO: 199436 - DNA, 120 bp, Artificial Sequence
  ENSG00000113838_3 (sequence is synthesized)
tttcaatgaagacacctgaggagcgcctggaatggtctgaggttctgtccaactgcatgtctgaggaggaagttgaaaagcagagaaatcagctttcagtggacacgctacagtttctgc

SEQ ID NO: 199437 - DNA, 120 bp, Artificial Sequence
  ENSG00000113838_4 (sequence is synthesized)
tcttcttatacattcaacagttgaacaaggtctccctaaggacatctttgattggcgaagagtggcccagtcccagaaacaaatctcagtctcctgacctgactgaaaaatctaattgtc

SEQ ID NO: 199438 - DNA, 120 bp, Artificial Sequence
  ENSG00000113838_5 (sequence is synthesized)
ataataagaactggaatgattacagtcaccaagcttttgtctatgatcatctgtctgatctcctcgagctgcttttagatccaaaacaactcactgcatcatttcattcaacccatagta

SEQ ID NO: 199439 - DNA, 120 bp, Artificial Sequence
  ENSG00000113838_6 (sequence is synthesized)
gtctagtgtctcgagaagctgttgtggcgctcagcttccttattgaaggtacaataagtagagccaggaagatctatccacttcatgaacttgcactgtggcaaccactgcatgcagata

SEQ ID NO: 199440 - DNA, 120 bp, Artificial Sequence
  ENSG00000113838_7 (sequence is synthesized)
gtggcttctcaaagatctctaagactttctctttctacaaactggaaacctggttgaggtcctgtttgactgggaatccatttggtacatcagcttgcctcaagtctggaaagaaattgg

SEQ ID NO: 199441 - DNA, 120 bp, Artificial Sequence
  ENSG00000113838_8 (sequence is synthesized)
cttgggctcatcaagttgaagggaccaccaaaagagctaagattgcttgtaatactcatgtggcccctaggatgcaccgactggtagtgatgagccaggtttacaagcagacactggcta

SEQ ID NO: 199442 - DNA, 120 bp, Artificial Sequence
  ENSG00000113838_9 (sequence is synthesized)
agagctcagacactctggcgggggcacatgtaaagattcatcgttgcaacgaatcttttatatatctgctctctcccttacgatctgtgacaattgagaagtgcaggaatagcatctttg

SEQ ID NO: 199443 - DNA, 120 bp, Artificial Sequence
  ENSG00000113838_10 (sequence is synthesized)
tcttgggccctgtagggactacacttcacctccacagttgtgacaatgttaaagtcattgctgtttgccatcgtttgtccatctcttctacaacaggttgcatctttcacgttcttacgc

SEQ ID NO: 199444 - DNA, 120 bp, Artificial Sequence
  ENSG00000113838_11 (sequence is synthesized)
attacccaatgctagaggaccatatggccaggactggccttgctacagtgcctaactattgggataatccaatggttgtgtgcagagagaacagcgacacaagagtcttccagcttttac

SEQ ID NO: 199445 - DNA, 120 bp, Artificial Sequence
  ENSG00000113838_12 (sequence is synthesized)
caccttgtgaattctatgtatttattattccctttgaaatggaaggggacacaacagagatacccgggggtcttccatctgtatatcagaaagcactgggtcaaagagaacagaagatac

SEQ ID NO: 199446 - DNA, 120 bp, Artificial Sequence
  ENSG00000113838_13 (sequence is synthesized)
agatctggcagaaaactgtgaaggaggctcatttgacaaaggatcaaaggaagcagttccaggtactggtagagaacaagttttatgaatggttgattaatacaggacatcgccaacagc

SEQ ID NO: 199447 - DNA, 120 bp, Artificial Sequence
  ENSG00000113838_14 (sequence is synthesized)
tggacagccttgtaccccctgcagcaggctccaaacaagcagctggataaggatcttacatgcagacactgggccctggaaatacaaggataaatggaggatggtgctcatcttgaaact

SEQ ID NO: 199448 - DNA, 88 bp, Artificial Sequence
  ENSG00000113838_15 (sequence is synthesized)
aatacaaggataaatggaggatggtgctcatcttgaaacttgaaactaaattgggaaggtgctattgctgcttaagagacattggggg

SEQ ID NO: 199449 - DNA, 120 bp, Artificial Sequence
  ENSG00000113838_16 (sequence is synthesized)
tctgttctatttaagaactttgatttccattccattttcatttattactgtttaggccgaattttcgctaaacttctgactttcatataaacatattgcttatagaacatcagaagactc

SEQ ID NO: 199450 - DNA, 120 bp, Artificial Sequence
  ENSG00000113838_17 (sequence is synthesized)
gtctttgtgatgcccaaatgaaaaagttggtgaaggtagtaccattgtatgtatgttaatattaaagcaactgagtgtagatttgcaactatagtgtgtatcttcatttgtgtgatgaaa

SEQ ID NO: 199451 - DNA, 120 bp, Artificial Sequence
  ENSG00000113838_18 (sequence is synthesized)
gagttttattctttctagagttaaataagagttttatagttctttgtaactatttaaaaggaaattgctactccttttaaaaaataattggaaaggaagtatgatttgttggtatataga

SEQ ID NO: 199452 - DNA, 120 bp, Artificial Sequence
  ENSG00000113838_19 (sequence is synthesized)
catagaaatagttttatactatattttagtccttaaagtatggaacttaatgaaattgtttaaaaaaatctttatttttcacttcctgcttcaaattttcaataaacaaactctaaagaa

SEQ ID NO: 199453 - DNA, 120 bp, Artificial Sequence
  ENSG00000113838_20 (sequence is synthesized)
acgtcagagggtcgcgccgctgcaggaacccgctctgcctgagctaccgcgagtcgtagaaaattacgtaatgatagggggccggtcagagtgagggcacctgaggtacacgaaatccct

SEQ ID NO: 199454 - DNA, 120 bp, Artificial Sequence
  ENSG00000113838_21 (sequence is synthesized)
ccggcttgcccacttcctcggactttccaccaatcaggagcttcctccccagcaccaaccaattgtgggagagaagttttctctgtgctacaagcccggaatttcattcatacccagcta

SEQ ID NO: 199455 - DNA, 120 bp, Artificial Sequence
  ENSG00000113838_22 (sequence is synthesized)
cgctccgaatgagggagcagaggtacagcggccgaatgagcgggaacagttattccacgacaggtgtacatcagacgcattgcttaggcctcttattttacgttctccaagcaactccat

SEQ ID NO: 199456 - DNA, 120 bp, Artificial Sequence
  ENSG00000113838_23 (sequence is synthesized)
aagacaactgtctcggaaaggctacagtgatgacagaccgacttaagttcggattcggcttccaccgcttcttagtggtatgcaaagaagccttttcaccctgatgtccttagagataat

SEQ ID NO: 199457 - DNA, 120 bp, Artificial Sequence
  ENSG00000113838_24 (sequence is synthesized)
cagagaaatcagttgaacaaggtctccctaaggacatctttgattggcgaagagtggcccagtcccagaaacaaatctcagtctcctgacctgactgaaaaatctaattgtcataataag

SEQ ID NO: 199458 - DNA, 120 bp, Artificial Sequence
  ENSG00000113838_25 (sequence is synthesized)
ggaattaagtactttacccaaagtcacacaggagccaggattcacacctaatcaacctggttccagaggttctttttttttctctgttctgacttctcagtaaccagaggttcttaaatg

SEQ ID NO: 199459 - DNA, 120 bp, Artificial Sequence
  ENSG00000113838_26 (sequence is synthesized)
cctctaatgtcttcattgttttctttcaaatattgtcataccatatcatactgtacaataataacattataataatgtgttgtaaaaatggatgatcatgaaaaaacattcttttaaagc

SEQ ID NO: 199460 - DNA, 120 bp, Artificial Sequence
  ENSG00000113845_0 (sequence is synthesized)
gtcgtatttccaaggactccaaagcgaggccggggactgaaggtgtgggtgtcgagccctctggcagagggttaacctgggtcaaatgcacggattctcacctcgtacagttacgctctc

SEQ ID NO: 199461 - DNA, 120 bp, Artificial Sequence
  ENSG00000113845_1 (sequence is synthesized)
ccgcggcacgtccgcgaggacttgaagtcctgagcgctcaagtttgtccgtaggtcgagagaaggccatggaggtgccgccaccggcaccgcggagctttctctgtagagcattgtgcct

SEQ ID NO: 199462 - DNA, 120 bp, Artificial Sequence
  ENSG00000113845_2 (sequence is synthesized)
atttccccgagtctttgctgccgaagctgtgactgccgattcggaagtccttgaggagcgtcagaagcggcttccctacgtcccagagccctattacccggaatctggatgggaccgcct

SEQ ID NO: 199463 - DNA, 120 bp, Artificial Sequence
  ENSG00000113845_3 (sequence is synthesized)
ccgggagctgtttggcaaagatgaacagcagagaatttcaaaggaccttgctaatatctgtaagacggcagctacagcaggcatcattggctgggtgtatgggggaataccagcttttat

SEQ ID NO: 199464 - DNA, 120 bp, Artificial Sequence
  ENSG00000113845_4 (sequence is synthesized)
tcatgctaaacaacaatacattgagcagagccaggcagaaatttatcataaccggtttgatgctgtgcaatctgcacatcgtgctgccacacgaggcttcattcgttatggctggcgctg

SEQ ID NO: 199465 - DNA, 120 bp, Artificial Sequence
  ENSG00000113845_5 (sequence is synthesized)
gggttggagaactgcagtgtttgtgactatattcaacacagtgaacactagtctgaatgtataccgaaataaagatgccttaagccattttgtaattgcaggagctgtcacgggaagtct

SEQ ID NO: 199466 - DNA, 120 bp, Artificial Sequence
  ENSG00000113845_6 (sequence is synthesized)
ttttaggataaacgtaggcctgcgtggcctggtggctggtggcataattggagccttgctgggcactcctgtaggaggcctgctgatggcatttcagaagtactctggtgagactgttca

SEQ ID NO: 199467 - DNA, 120 bp, Artificial Sequence
  ENSG00000113845_7 (sequence is synthesized)
ggaaagaaaacagaaggatcgaaaggcactccatgagctaaaactggaagagtggaaaggcagactacaagttactgagcacctccctgagaaaattgaaagtagtttacaggaagatga

SEQ ID NO: 199468 - DNA, 120 bp, Artificial Sequence
  ENSG00000113845_8 (sequence is synthesized)
acctgagaatgatgctaagaaaattgaagcactgctaaaccttcctagaaacccttcagtaatagataaacaagacaaggactgaaagtgctctgaacttgaaactcactggagagctga

SEQ ID NO: 199469 - DNA, 120 bp, Artificial Sequence
  ENSG00000113845_9 (sequence is synthesized)
tcttgtctttttcttttctttttaactaagaatggggctgttgtactctcactttacttatccttaaatttaaatacatacttatgtttgtattaatctatcaatatatgcatacatgaa

SEQ ID NO: 199470 - DNA, 120 bp, Artificial Sequence
  ENSG00000113845_10 (sequence is synthesized)
tatatccacccacctagattttaagcagtaaataaaacatttcgcaaaagattaaagttgaattttacagttcgtatattcatgtggtcctttgaaagggtattctagaaatcactggaa

SEQ ID NO: 199471 - DNA, 120 bp, Artificial Sequence
  ENSG00000113845_11 (sequence is synthesized)
agaggagaggaaagaaccaggtaggcaaatggtctgtgaaacccttgggtcctggaagcagtgtgagtgtaaatgtgtagtgtttggtttcatctaaataaacaaagatgatttctttga

SEQ ID NO: 199472 - DNA, 120 bp, Artificial Sequence
  ENSG00000113845_12 (sequence is synthesized)
cacttgaaataaaatacaaattcaacaaaaagtagatcagcattattaaagaaacggttcaactttgtttcttcccttagtattgctgacaaagtatctgctgtagaatacaggaattac

SEQ ID NO: 199473 - DNA, 120 bp, Artificial Sequence
  ENSG00000113845_13 (sequence is synthesized)
ttagaatagaaacatagtcatcacaactgttactaaatggaaaagaaaagaattattgagttaagtattcctgtcaatacgggaaacactgctagtaccttatgttggtgttagacctct

SEQ ID NO: 199474 - DNA, 120 bp, Artificial Sequence
  ENSG00000113845_14 (sequence is synthesized)
ctgccctacactgagaatatagttttacacaggagcaaggtttgtgaagcagcatagtgaggtagctaaagccatgggctggctctaaaggctttaaatcccagccatgtggcttagctg

SEQ ID NO: 199475 - DNA, 120 bp, Artificial Sequence
  ENSG00000113845_15 (sequence is synthesized)
ccatgagatgtgcatttgagaaatgttgtcttcttttgctgttcaactccagattttcagatgataatgtgattatcccagcttaagttgcgtccacttctggtctagtgaattgtggaa

SEQ ID NO: 199476 - DNA, 120 bp, Artificial Sequence
  ENSG00000113845_16 (sequence is synthesized)
ggcagttttagagaaaggagtcatgagtaacatgaacagcagttggctatgtctttccagttctctgctgatgtcagaaagacccagaaataccaaggagaaaaagccatcttagggatc

SEQ ID NO: 199477 - DNA, 120 bp, Artificial Sequence
  ENSG00000113845_17 (sequence is synthesized)
taaggaggccctatggaaagttactaccttagacatttgaagatagcttactgcttagtacatacactgtaaacaacgatctcattttaaatgagaactttctcataaatattttacaaa

SEQ ID NO: 199478 - DNA, 120 bp, Artificial Sequence
  ENSG00000113845_18 (sequence is synthesized)
tgaggtcaaactagcataaagccatttaaagagattatcagtccaatatgaaccagttaagtctttggactatccctttcctccttgactactgctttgacgtacctaaatcattcgtct

SEQ ID NO: 199479 - DNA, 120 bp, Artificial Sequence
  ENSG00000113845_19 (sequence is synthesized)
gactgccgattcggaagtccttgaggagcgtcagaagcggcttccctacgtcccagagccctattacccggaatctggatgggaccgcctccgggagctgtttggcaaagagtaaaacac

SEQ ID NO: 199480 - DNA, 120 bp, Artificial Sequence
  ENSG00000113845_20 (sequence is synthesized)
attttcacaaactgaacatagctgtacccagcactaagaaagaaatggcaactattgtaacatcccaaaagctccccttgtgccttttccggtcattgtcttttcaggagttgccactat

SEQ ID NO: 199481 - DNA, 120 bp, Artificial Sequence
  ENSG00000113845_21 (sequence is synthesized)
cctaattctaacaccatagcttcgttttgtctgagactacgttccttttaatataactgaactgtttaattcatctgagaattctacctatgatgaaaaatgttgtggtggtagcatttg

SEQ ID NO: 199482 - DNA, 120 bp, Artificial Sequence
  ENSG00000113851_0 (sequence is synthesized)
gcctcctttgcgggtaaacagacatggccggcgaaggagatcagcaggacgctgcgcacaacatgggcaaccacctgccgctcctgcctgcagagagtgaggaagaagatgaaatggaag

SEQ ID NO: 199483 - DNA, 120 bp, Artificial Sequence
  ENSG00000113851_1 (sequence is synthesized)
ttgaagaccaggatagtaaagaagccaaaaaaccaaacatcataaattttgacaccagtctgccgacatcacatacatacctaggtgctgatatggaagaatttcatggcaggactttgc

SEQ ID NO: 199484 - DNA, 120 bp, Artificial Sequence
  ENSG00000113851_2 (sequence is synthesized)
acgatgacgacagctgtcaggtgattccagttcttccacaagtgatgatgatcctgattcccggacagacattacctcttcagctttttcaccctcaagaagtcagtatggtgcggaatt

SEQ ID NO: 199485 - DNA, 120 bp, Artificial Sequence
  ENSG00000113851_3 (sequence is synthesized)
taattcagaaagatagaacctttgctgttcttgcatacagcaatgtacaggaaagggaagcacagtttggaacaacagcagagatatatgcctatcgagaagaacaggattttggaattg

SEQ ID NO: 199486 - DNA, 120 bp, Artificial Sequence
  ENSG00000113851_4 (sequence is synthesized)
agatagtgaaagtgaaagcaattggaagacaaaggttcaaagtccttgagctaagaacacagtcagatggaatccagcaagctaaagtgcaaattcttcccgaatgtgtgttgccttcaa

SEQ ID NO: 199487 - DNA, 120 bp, Artificial Sequence
  ENSG00000113851_5 (sequence is synthesized)
ccatgtctgcagttcaattagaatccctcaataagtgccagatatttccttcaaaacctgtctcaagagaagaccaatgttcatataaatggtggcagaaataccagaagagaaagtttc

SEQ ID NO: 199488 - DNA, 120 bp, Artificial Sequence
  ENSG00000113851_6 (sequence is synthesized)
attgtgcaaatctaacttcatggcctcgctggctgtattccttatatgatgctgagaccttaatggacagaatcaagaaacagctacgtgaatgggatgaaaatctaaaagatgattctc

SEQ ID NO: 199489 - DNA, 120 bp, Artificial Sequence
  ENSG00000113851_7 (sequence is synthesized)
ttccttcaaatccaatagatttttcttacagagtagctgcttgtcttcctattgatgatgtattgagaattcagctccttaaaattggcagtgctatccagcgacttcgctgtgaattag

SEQ ID NO: 199490 - DNA, 120 bp, Artificial Sequence
  ENSG00000113851_8 (sequence is synthesized)
acattatgaataaatgtacttccctttgctgtaaacaatgtcaagaaacagaaataacaaccaaaaatgaaatattcagtttatccttatgtgggccgatggcagcttatgtgaatcctc

SEQ ID NO: 199491 - DNA, 120 bp, Artificial Sequence
  ENSG00000113851_9 (sequence is synthesized)
gaatctgataggccggccttctacagaacacagctggtttcctgggtatgcctggactgttgcccagtgtaagatctgtgcaagccatattggatggaagtttacggccaccaaaaaaga

SEQ ID NO: 199492 - DNA, 120 bp, Artificial Sequence
  ENSG00000113851_10 (sequence is synthesized)
catgtcacctcaaaaattttggggcttaacgcgatctgctctgttgcccacgatcccagacactgaagatgaaataagtccagacaaagtaatactttgcttgtaaacagatgtgataga

SEQ ID NO: 199493 - DNA, 120 bp, Artificial Sequence
  ENSG00000113851_11 (sequence is synthesized)
gataaagttatctaacaaattggttatattctaagatctgctttggaaattattgcctctgatacatacctaagtaaacataacattaatacctaagtaaacataacattacttggaggg

SEQ ID NO: 199494 - DNA, 120 bp, Artificial Sequence
  ENSG00000113851_12 (sequence is synthesized)
ttgcagtttctaagtgaaactgtatttgaaacttttaagtatactttaggaaacaagcatgaacggcagtctagaataccagaaacatctacttgggtagcttggtgccattatcctgtg

SEQ ID NO: 199495 - DNA, 120 bp, Artificial Sequence
  ENSG00000113851_13 (sequence is synthesized)
gaatctgatatgtctggtagcatgtcattgatgggacatgaagacatctttggaaatgatgagattatttcctgtgttaaaaaaaaaaaaaatcttaaattcctacaatgtgaaactgaa

SEQ ID NO: 199496 - DNA, 120 bp, Artificial Sequence
  ENSG00000113851_14 (sequence is synthesized)
actaataatttgatcctgatgtatgggacagcgtatctgtaccagtgctctaaataacaaaagctagggtgacaagtacatgttccttttggaaagaagcaaggcaatgtatattaatta

SEQ ID NO: 199497 - DNA, 120 bp, Artificial Sequence
  ENSG00000113851_15 (sequence is synthesized)
ttctaaaagggctttgttcctttccattttctttaacttctctgagatactgatttgtaaattttgaaaattagttaaaatatgcagttttttgagcccacgaatagttgtcatttcctt

SEQ ID NO: 199498 - DNA, 120 bp, Artificial Sequence
  ENSG00000113851_16 (sequence is synthesized)
tatgtgcctgttagtaaaaagtagtattgtgtatttgctcagtatctgaactataagcccatttatactgttccatacaaaagctatttttcaaaaattaatttgaaccaaaactactac

SEQ ID NO: 199499 - DNA, 120 bp, Artificial Sequence
  ENSG00000113851_17 (sequence is synthesized)
tatagggaaaagatgccaaaacatgtcccctcacccagactaaacttgatactgtattattttgttcaatgtaaattgaagaaaatctgtaagtaagtaaaccttaagtgtgaaactaaa

SEQ ID NO: 199500 - DNA, 120 bp, Artificial Sequence
  ENSG00000113851_18 (sequence is synthesized)
atggaggcatttaaactgggactgagatgggactgagtgattaaattgctaccagtgttagttttaagagttgaaaagcttaatagtaaattttaataagcccatgaacttgattatggc

SEQ ID NO: 199501 - DNA, 120 bp, Artificial Sequence
  ENSG00000113851_19 (sequence is synthesized)
ataaaatgtgtaaccttaaagagaagggtttatttcaaaaggatattatccgatttgtaagttctctgatgcttatctgactcctaagtttaaaacttgaaaaaccatgtcttgaagatt

SEQ ID NO: 199502 - DNA, 120 bp, Artificial Sequence
  ENSG00000113851_20 (sequence is synthesized)
caaatctaacttcatggcctcgctggctgtattccttatatgatgctgtaagtaacttaccttaaatttactttatatatggtaggccatgtcataattaagggtcattaaaaaacaaag

SEQ ID NO: 199503 - DNA, 87 bp, Artificial Sequence
  ENSG00000113851_21 (sequence is synthesized)
ggtaggccatgtcataattaagggtcattaaaaaacaaaggtttagtttttccagtttctagtgccttataacttaagatatcgtta

SEQ ID NO: 199504 - DNA, 120 bp, Artificial Sequence
  ENSG00000113851_22 (sequence is synthesized)
caacatggtgaaaccccatctctacaaatacaaaaattagccaggtttggtggcatgtggctgtagtcccagctgcttgagaggctgaggtggaaggattgattgagcctgggaggtcaa

SEQ ID NO: 199505 - DNA, 120 bp, Artificial Sequence
  ENSG00000113851_23 (sequence is synthesized)
gagcctgggaggtcaaggctgccgtgagctgagattgtgtcactgtactccagcctggacaacagagcaagactgtctcaaaagggaaaaaaaaaggtatcacaagactctttagagttt

SEQ ID NO: 199506 - DNA, 120 bp, Artificial Sequence
  ENSG00000113851_24 (sequence is synthesized)
tattaagcatgtgaaattttgttgggttgggtgatagttacatttagaacattaaagcatccatattttactgttttggtttttctctaaacaagtatattaacttacgtctcttgatca

SEQ ID NO: 199507 - DNA, 120 bp, Artificial Sequence
  ENSG00000113851_25 (sequence is synthesized)
ttagtctattaattaatgcatccaggagggtttttgctccttaaagtttaacactaggcattgccacattttgcaaaactaagggacagtgctgaaatggtttaaagaatctggatttca

SEQ ID NO: 199508 - DNA, 120 bp, Artificial Sequence
  ENSG00000113851_26 (sequence is synthesized)
gatcagagactgacttcagagtctgatttctgtcacttactctgtgggcctggagcaaattacttctccaaggacctatgaaatggatataatggtagctattgtacctggtgtgcatag

SEQ ID NO: 199509 - DNA, 120 bp, Artificial Sequence
  ENSG00000113851_27 (sequence is synthesized)
cgggcattcaataaatgctagccatttcccttaatgaatcactgcccacaaatctggagtcctgggaaaactcaacaacatgcacgacactaaaggaaactgcagttgatctccgctctt

SEQ ID NO: 199510 - DNA, 120 bp, Artificial Sequence
  ENSG00000113851_28 (sequence is synthesized)
tagcagcttttcagcaattacaaagacacaatatatgagtttttgcatgttttgcatatgcttgtgaaaattatgtagtaaataggtgccaagtaaggtatgtagatagcaagtgctagt

SEQ ID NO: 199511 - DNA, 120 bp, Artificial Sequence
  ENSG00000113851_29 (sequence is synthesized)
gcaatttataggtgccataatccctatggactgggtcagaaatggcctaatagaaggcagaagagaggccagttccaagcaggggcatagaacagaacaatctgcaagggagttgggagc

SEQ ID NO: 199512 - DNA, 120 bp, Artificial Sequence
  ENSG00000113851_30 (sequence is synthesized)
gctataaaaaatagctttttcatggatgcgatccaatcatatcttctaggttttaagactgattaaaacattttaattctgaaaagcataatttcctttgagcagttgaaaaaaaatgag

SEQ ID NO: 199513 - DNA, 120 bp, Artificial Sequence
  ENSG00000113851_31 (sequence is synthesized)
tattttaaaattaattgcaataaaatcctcatattctgtgagcactccaattttagacaagttttccataaaaagttcaaattgcaggaagtggctgtcatccaaaaacacttcctgtgt

SEQ ID NO: 199514 - DNA, 120 bp, Artificial Sequence
  ENSG00000113851_32 (sequence is synthesized)
aaggactcctttccctgttcttcaaggtgcctttaaaagaagtgagtctagttccaggacttgccttaattatagatactctctttatctgtttataaggtatagtttagttatttttct

SEQ ID NO: 199515 - DNA, 120 bp, Artificial Sequence
  ENSG00000113851_33 (sequence is synthesized)
agtctcttggcaaataacttctaacatggatttgagttcatgtttaacataaaaggattttaccaaaaaaagtataagaaaagcaattaaatttagagcttctgaaaagtgtatctttga

SEQ ID NO: 199516 - DNA, 120 bp, Artificial Sequence
  ENSG00000113851_34 (sequence is synthesized)
ctgtatagagtccagtaatgtagtcatgcaattcagatttcaattgggatcttacaaacaaactcattgttttgtgtttgtcaaatatgaatacatttatcaacttagtgaaaaataact

SEQ ID NO: 199517 - DNA, 120 bp, Artificial Sequence
  ENSG00000113851_35 (sequence is synthesized)
tgatttctgcatggaaatatccaaggttatatatcactattcctttactctagagaaggtcatttagttttatgtaaatatgtggcagatctcagtttcagtgactttcgtgctccatct

SEQ ID NO: 199518 - DNA, 120 bp, Artificial Sequence
  ENSG00000113851_36 (sequence is synthesized)
ttaaaagtgtttttgaatgcttggaaggaaaatgtgatattcagagagagcaatatctttataagtaagtttcttgatgatctatgtgattacatgataaagtgaatgccagtttttcct

SEQ ID NO: 199519 - DNA, 120 bp, Artificial Sequence
  ENSG00000113851_37 (sequence is synthesized)
ctgctttgccacctacctctttgcttatattcaagggtttagtgggtccttccttccacatttgtatgataactttcgttttattggtagtcctttgctactttaaaactaatcaggtta

SEQ ID NO: 199520 - DNA, 120 bp, Artificial Sequence
  ENSG00000113851_38 (sequence is synthesized)
aatgtttactcaaatgtagtaatagtatgaggccaaaatacatgccttgaaggtggagtgaaatcagttgagtgtcacactgcatatttatgtaaatagagtaaatgaaaattcaagaat

SEQ ID NO: 199521 - DNA, 120 bp, Artificial Sequence
  ENSG00000113851_39 (sequence is synthesized)
acttccaatcaggatatgcccctgccttattttttctaaggtctacttttactactttaataattttgggtttgtgtgacttcactggtctggtttgttcctatagttcttacactgcac

SEQ ID NO: 199522 - DNA, 120 bp, Artificial Sequence
  ENSG00000113851_40 (sequence is synthesized)
taaaacttacttactccaggaagttcctgtcagtagcatagtacctctctgtaggctgaactctaaaccagttgcaatgagttaccttgtccctctgaaaagttaaaatttcagtatgtc

SEQ ID NO: 199523 - DNA, 120 bp, Artificial Sequence
  ENSG00000113851_41 (sequence is synthesized)
ccataccgtttactagcaaataaaattttctgatctgtaaaaacacacatatactatactactactgaaaatggttttacacatgacaaaaccagacctgatagctaaatctgcatactt

SEQ ID NO: 199524 - DNA, 120 bp, Artificial Sequence
  ENSG00000113851_42 (sequence is synthesized)
tctatacagaaatagtatgtattatatgacgttgggtctaaatctgtattttggcagtacttaaatattttaagtaagtatttcaaagtattattttataatgcatctaattactgacct

SEQ ID NO: 199525 - DNA, 120 bp, Artificial Sequence
  ENSG00000113851_43 (sequence is synthesized)
gtatgcagtcatttctgaggctttcttgcatcatagcccctgtgacatttcctcttagaaatattacactctacaaaattgttttatcaaggtccaaaattactatttgctcatagagta

SEQ ID NO: 199526 - DNA, 120 bp, Artificial Sequence
  ENSG00000113851_44 (sequence is synthesized)
caaagatgttatgactggctacacagaaaggaaataaattatgaaatgtcagtatagcagctgaaattatagcagctgaaataaacagtttgtattatacattttatttacctgatgaaa

SEQ ID NO: 199527 - DNA, 120 bp, Artificial Sequence
  ENSG00000113851_45 (sequence is synthesized)
tgattcattacccagccaccttgtatggcaatattccagctacatttgatcctctaaaaattgcacaggcagctactttatgtaaaagcagtttacaaaagcaataaaatgtcacacagc

SEQ ID NO: 199528 - DNA, 120 bp, Artificial Sequence
  ENSG00000113851_46 (sequence is synthesized)
aggaacttcatcatgaagtctcaagtaaacgaacattttatctttcttgggattctatcacttcttaatgtttgcccttatagtgattcagctgattctcatttaaagtttttacacaaa

SEQ ID NO: 199529 - DNA, 120 bp, Artificial Sequence
  ENSG00000113851_47 (sequence is synthesized)
aacagtttggattatatcttgaggttttcacttcagatactggacaagtaattagtataaaggcaactaacatggtcataatagaagtatggtgtttactctcaacatttatcttcccaa

SEQ ID NO: 199530 - DNA, 120 bp, Artificial Sequence
  ENSG00000113851_48 (sequence is synthesized)
agttgtcttcagcattgaaattttaatgtttgacctttttaaataggaatgaagattctagttacaatatatatttgaaggatataggaagcatgatttcacacttcatagatagtcacg

SEQ ID NO: 199531 - DNA, 120 bp, Artificial Sequence
  ENSG00000113851_49 (sequence is synthesized)
tcatgggattatctacaaaattttttatctttttaaaattagatgttttcctaggccaaaatcatttttcagatgttgctcattccagcattagaatctttattctgtggggttttttaa

SEQ ID NO: 199532 - DNA, 120 bp, Artificial Sequence
  ENSG00000113851_50 (sequence is synthesized)
gtcagatgggtatagcccagtggtttccaaccttgctatgcatcagaatcacctgggaagcttttaaaactatagaagcttgagttccaacctcatctcccatctccagagagtgatgag

SEQ ID NO: 199533 - DNA, 120 bp, Artificial Sequence
  ENSG00000113851_51 (sequence is synthesized)
gctgcagcatcttttaaaaatgattttcaggtgattctaatgtctctccaggtttgagaacaatcatgtaaatccaaagggaagtgttgtttgggatttggcttctttaggattgaaggc

SEQ ID NO: 199534 - DNA, 120 bp, Artificial Sequence
  ENSG00000113851_52 (sequence is synthesized)
ctctcggagcataagaggatagggagaccagaggcttgtgagctgttcgtgtgctcaccaggacagctgtggtttttgtagcattgctatgatgtttgaaagccacactggttacatctg

SEQ ID NO: 199535 - DNA, 120 bp, Artificial Sequence
  ENSG00000113851_53 (sequence is synthesized)
cctactgctccagctgagctataaaagccatttatatttcgtgtccctctccagtgtgaattttatatcacccagaaatgctatttacataataaatgatcaataaatacttgtagtcta

SEQ ID NO: 199536 - DNA, 120 bp, Artificial Sequence
  ENSG00000113851_54 (sequence is synthesized)
cggcccatccaagtttcgattatgtctttatgctttgattctttaaatcatataacaggtatttcttttcaccaaaatcattttgttgtgaaccatcaccgatttccatgactacctaaa

SEQ ID NO: 199537 - DNA, 120 bp, Artificial Sequence
  ENSG00000113851_55 (sequence is synthesized)
accgtaagctgtatgaaggcgaacactttcactcgttcattaccacgtttaatgcacctaacacagggattgacctgtggtaagcattcaaacatctgtgtaattaataaatcaatggag

SEQ ID NO: 199538 - DNA, 120 bp, Artificial Sequence
  ENSG00000113851_56 (sequence is synthesized)
gaaatatcaatcaaaaagaaaaatggacatttaaaaagatgacttaaaattgtaggaaagatgacataaagtatatgtgcgttctgggaatgaaaatacaatatgaagtagctaagtaat

SEQ ID NO: 199539 - DNA, 120 bp, Artificial Sequence
  ENSG00000113851_57 (sequence is synthesized)
tttcactcataagtcatagggtgctaggtctccactggagacagacatttgggatgtcaccattttgtacactgacctgctgtgggtttcgtatgaccactgttatgctctagtcatgat

SEQ ID NO: 199540 - DNA, 120 bp, Artificial Sequence
  ENSG00000113851_58 (sequence is synthesized)
attaaaactatcattttttatttttaaaaattcttacctgaagtatcttaaaattctaagataatcctcttgtattctctgtttagcatgtccaacaaatctaactttcttattttttaa

SEQ ID NO: 199541 - DNA, 120 bp, Artificial Sequence
  ENSG00000113851_59 (sequence is synthesized)
agtggtcagtgttgaagccaaagcaggctgttatttcgcatgtacaggagaggttgggtaagaatgtgaggttaggaatttggttaagtagaagtttgatagtgcaagttggagtatttt

SEQ ID NO: 199542 - DNA, 120 bp, Artificial Sequence
  ENSG00000113889_0 (sequence is synthesized)
atttaacctttgggaacaaggcaactagcgtctggcagcaggaatccaaccagtgccctgagttctgaggcagagaggaggacagaagaaacaagaggctggagattgtcaaattcagta

SEQ ID NO: 199543 - DNA, 120 bp, Artificial Sequence
  ENSG00000113889_1 (sequence is synthesized)
tcccagttggctcttgattcttggtgaaaccatccctcagctcctagagggagattgttagatcatgaaactaattaccatccttttcctctgctccaggctgctactaagtttaaccca

SEQ ID NO: 199544 - DNA, 120 bp, Artificial Sequence
  ENSG00000113889_2 (sequence is synthesized)
ggaatcacagtccgaggaaattgactgcaatgacaaggatttatttaaagctgtggatgctgctctgaagaaatataacagtcaaaaccaaagtaacaaccagtttgtattgtaccgcat

SEQ ID NO: 199545 - DNA, 120 bp, Artificial Sequence
  ENSG00000113889_3 (sequence is synthesized)
aactgaagccactaagacggttggctctgacacgttttattccttcaagtacgaaatcaaggagggggattgtcctgttcaaagtggcaaaacctggcaggactgtgagtacaaggatgc

SEQ ID NO: 199546 - DNA, 120 bp, Artificial Sequence
  ENSG00000113889_4 (sequence is synthesized)
tgcaaaagcagccactggagaatgcacggcaaccgtggggaagaggagcagtacgaaattctccgtggctacccagacctgccagattactccagccgagggccctgtggtgacagccca

SEQ ID NO: 199547 - DNA, 120 bp, Artificial Sequence
  ENSG00000113889_5 (sequence is synthesized)
gtacgactgcctcggctgtgtgcatcctatatcaacgcagagcccagacctggagcccattctgagacacggcattcagtactttaacaacaacactcaacattcctccctcttcatgct

SEQ ID NO: 199548 - DNA, 120 bp, Artificial Sequence
  ENSG00000113889_6 (sequence is synthesized)
taatgaagtaaaacgggcccaaagacaggtggtggctggattgaactttcgaattacctactcaattgtgcaaacgaattgttccaaagagaattttctgttcttaactccagactgcaa

SEQ ID NO: 199549 - DNA, 120 bp, Artificial Sequence
  ENSG00000113889_7 (sequence is synthesized)
gtccctttggaatggtgataccggtgaatgtacagataatgcatacatcgatattcagctacgaattgcttccttctcacagaactgtgacatttatccagggaaggattttgtacaacc

SEQ ID NO: 199550 - DNA, 120 bp, Artificial Sequence
  ENSG00000113889_8 (sequence is synthesized)
agctggaggagacactgactcacaccatcacaaagcttaatgcagagaataacgcaactttctatttcaagattgacaatgtgaaaaaagcaagagtacaggtggtggctggcaagaaat

SEQ ID NO: 199551 - DNA, 120 bp, Artificial Sequence
  ENSG00000113889_9 (sequence is synthesized)
attttattgacttcgtggccagggaaaccacatgttccaaggaaagtaatgaagagttgaccgaaagctgtgagaccaaaaaacttggccaaagcctagattgcaacgctgaagtttatg

SEQ ID NO: 199552 - DNA, 120 bp, Artificial Sequence
  ENSG00000113889_10 (sequence is synthesized)
tggtaccctgggagaaaaaaatttaccctactgtcaactgtcaaccactgggaatgatctcactgatgaaaaggcctccaggtttttcacctttccgatcatcacgaataggggaaataa

SEQ ID NO: 199553 - DNA, 120 bp, Artificial Sequence
  ENSG00000113889_11 (sequence is synthesized)
aagaagaaacaactagtcacctaaggtcctgcgagtacaagggtcgacccccaaaggcaggggcagagccagcatctgagagggaggtctcttgaccaatgggcagaatcttcactccag

SEQ ID NO: 199554 - DNA, 120 bp, Artificial Sequence
  ENSG00000113889_12 (sequence is synthesized)
gcacatagccccaaccacctctgccagcaaccttgagaggaaggacaagaagaaagatgggatagaatttaaatagagaagaatgccattttatcactctgcctctgggtgaaataaaga

SEQ ID NO: 199555 - DNA, 120 bp, Artificial Sequence
  ENSG00000113889_13 (sequence is synthesized)
tcagtcttgatgttctaactctaattcacagtggtctcctttcagccctacccattctgcagcaaattccagctggtcagagagtcagtgctgtggctctgccatggaggctcataaccc

SEQ ID NO: 199556 - DNA, 120 bp, Artificial Sequence
  ENSG00000113889_14 (sequence is synthesized)
aacactggaacattccctagccaaggcagaagtccttaggcgggacttccttaccaccacgggtgctaaaagaagagttagtaggtcatgcttctaccagtaatctaaggactctctcct

SEQ ID NO: 199557 - DNA, 120 bp, Artificial Sequence
  ENSG00000113889_15 (sequence is synthesized)
tctcttcttcctctttctccagatttccaagccttagctaagagtaatttggcttgtttagtattgttttcttatggtccagttaattaccaaaaatatttttaaaatcatctctgttaa

SEQ ID NO: 199558 - DNA, 120 bp, Artificial Sequence
  ENSG00000113889_16 (sequence is synthesized)
tagaatgtctaccaacttctcactatcagaaaatactcaacctccaaacaatttgaaattatctttctgatccaggtaaagaagcaaattgaaaatcaataaagtaaaaagtgacggaga

SEQ ID NO: 199559 - DNA, 120 bp, Artificial Sequence
  ENSG00000113889_17 (sequence is synthesized)
aggaaaagaacaagggcatactcgtagacatgactggggccatgaaaaacaaagaaaacataatcttggccatggccataaacatgaacgtgaccaagggcatgggcaccaaagaggaca

SEQ ID NO: 199560 - DNA, 120 bp, Artificial Sequence
  ENSG00000113889_18 (sequence is synthesized)
tggccttggccatggacacgaacaacagcatggtcttggtcatggacataagttcaaacttgatgatgatcttgaacaccaagggggccatgtccttgaccatggacataagcataagca

SEQ ID NO: 199561 - DNA, 120 bp, Artificial Sequence
  ENSG00000113889_19 (sequence is synthesized)
tggtcatggccacggaaaacataaaaataaaggcaaaaagaatggaaagcacaatggttggaaaacagagcatttggcaagctcttctgaagacagtactacaccttctgcacagacaca

SEQ ID NO: 199562 - DNA, 120 bp, Artificial Sequence
  ENSG00000113889_20 (sequence is synthesized)
agagaagacagaagggccaacacccatcccttccctagccaagccaggtgtaacagttaccttttctgactttcaggactctgatctcattgcaactatgatgcctcctatatcaccagc

SEQ ID NO: 199563 - DNA, 120 bp, Artificial Sequence
  ENSG00000113889_21 (sequence is synthesized)
tcccatacagagtgatgacgattggatccctgatatccagatagacccaaatggcctttcatttaacccaatatcagattttccagacacgacctccccaaaatgtcctggacgcccctg

SEQ ID NO: 199564 - DNA, 120 bp, Artificial Sequence
  ENSG00000113889_22 (sequence is synthesized)
gtatcaatatccctctctccattgtccagatgaaaatatcctgatataatgcaccaaaaaccatgcagcttcggaacagtctaaagagaagtggtgagactcccagtggagacaccatca

SEQ ID NO: 199565 - DNA, 120 bp, Artificial Sequence
  ENSG00000113889_23 (sequence is synthesized)
gtctccacggactgcataaaattgtgtgccacaattctaactcttttctgaatcttcttcccaagttttctaaactagcacagtaaacagacaaactaatgtgccgtatggcctgctgca

SEQ ID NO: 199566 - DNA, 120 bp, Artificial Sequence
  ENSG00000113889_24 (sequence is synthesized)
attggcttctctgataacaaatatgtaccttacaacatatgtcatgaatttgcatacaaagattcttgtcattcttaataaactgtggcacttggtatttgaatgtgtgtgaaaataagg

SEQ ID NO: 199567 - DNA, 87 bp, Artificial Sequence
  ENSG00000113889_25 (sequence is synthesized)
aactgtggcacttggtatttgaatgtgtgtgaaaataagggaagtcaagagattaaatgctgaacttattaatggaatagaaataat

SEQ ID NO: 199568 - DNA, 90 bp, Artificial Sequence
  ENSG00000113889_26 (sequence is synthesized)
cttccagatttcaaagtaacaagaaagaagacaggttggccaaagggaggaaaggggggacataaattaattgactttctattcccaaaa

SEQ ID NO: 199569 - DNA, 120 bp, Artificial Sequence
  ENSG00000113889_27 (sequence is synthesized)
aaaggggggacataaattaattgactttctattcccaaaatgggctagttatatcaaataaatactcccactgccctttctgagtgagagtgtttctcataagtcaaaaatttctgttta

SEQ ID NO: 199570 - DNA, 120 bp, Artificial Sequence
  ENSG00000113889_28 (sequence is synthesized)
ctcattaactactctttgcaacaggctttcatatagaagtattctgtttatttttgctgagcctagattgagtaattcttagtttacagaagctccgagcttaatgataaggatgaaaag

SEQ ID NO: 199571 - DNA, 120 bp, Artificial Sequence
  ENSG00000113889_29 (sequence is synthesized)
cagagggagcaatatagaagcaggcttgctaataaaactttttaaataattgacaagggaatattatggaatgtgatgcaaagtttgttccgaaattttatgaggaaattactctctagt

SEQ ID NO: 199572 - DNA, 120 bp, Artificial Sequence
  ENSG00000113889_30 (sequence is synthesized)
ctcactttatagtctttttgctatgactttgaagaccattgatttttgagaagcagaataataggattgcctttcattgccctatagtgcaaagaaggtatatgctttataaccaatgtt

SEQ ID NO: 199573 - DNA, 120 bp, Artificial Sequence
  ENSG00000113889_31 (sequence is synthesized)
gtacttttgcctagaaaaacaagatatggctttaaatagctacaatcatctttggatgtatatgtcactgctgcttcaagttattggatgcatttgaacctctgagtttgtctttcattt

SEQ ID NO: 199574 - DNA, 120 bp, Artificial Sequence
  ENSG00000113889_32 (sequence is synthesized)
taaatattgtctgttcttttaaataaacaaccacagatgtcaggaaaaagtcttaccttgtcaactggttgctccactttttaaaaatgattgaatgataacatcatattaactgcgttt

SEQ ID NO: 199575 - DNA, 120 bp, Artificial Sequence
  ENSG00000113889_33 (sequence is synthesized)
tctccgttgaccctgccagatttttttactgatgcagaaatgatggctactggtgagcctgtttatgagaaatgcaaataaacattccaatgtgtagaaaagtcagatgctttatatctg

SEQ ID NO: 199576 - DNA, 120 bp, Artificial Sequence
  ENSG00000113889_34 (sequence is synthesized)
tgttcttgtatagacagaaaaatcatggagaagccagcagttaaacatggagaaagcctttccatgagaagggggctctagtgtccagccagaacatgtggctcagactccagagagata

SEQ ID NO: 199577 - DNA, 120 bp, Artificial Sequence
  ENSG00000113889_35 (sequence is synthesized)
acaaattgacatttgggccaagccaaagagctggcgaggggagggggtgggtgcttccattgcacaacgttaagtgcaaatcttgactctgccttccattagctgtgtgatagcggggga

SEQ ID NO: 199578 - DNA, 120 bp, Artificial Sequence
  ENSG00000113905_0 (sequence is synthesized)
ttaatcaattgcgtgtgtttcagaaagtctgtataaaattctctgcagtggcagatcatagcaagggatggtttaacaaaatgaaggcactcattgcagcactgcttttgatcacattgc

SEQ ID NO: 199579 - DNA, 120 bp, Artificial Sequence
  ENSG00000113905_1 (sequence is synthesized)
agtattcgtgtgccgtgagtcccactgactgcagtgctgttgagccggaggctgagaaagctctagacctgatcaataaaaggcgacgggatggctaccttttccaattgctgcggattg

SEQ ID NO: 199580 - DNA, 120 bp, Artificial Sequence
  ENSG00000113905_2 (sequence is synthesized)
ctgatgcccacttggacagagtggaaaatacaactgtatattacttagtcttagatgtgcaagaatcggactgttcggtcctatccaggaaatactggaatgactgtgagccacctgatt

SEQ ID NO: 199581 - DNA, 120 bp, Artificial Sequence
  ENSG00000113905_3 (sequence is synthesized)
ccagacgtccatctgaaatagtgatcggacaatgtaaggtaatagctacaagacattcccatgaatctcaggacctcagagtgattgactttaactgcaccacaagttctgtctcttcag

SEQ ID NO: 199582 - DNA, 120 bp, Artificial Sequence
  ENSG00000113905_4 (sequence is synthesized)
cactggccaataccaaagatagtccggtcctcatagatttctttgaggatactgagcgctacagaaaacaagccaacaaagcccttgagaagtacaaagaggagaatgatgactttgcct

SEQ ID NO: 199583 - DNA, 120 bp, Artificial Sequence
  ENSG00000113905_5 (sequence is synthesized)
ctttcagagtggaccgaatcgagagagttgcaagagtgagaggaggggaaggaactggttacttcgtggacttctctgtgcggaactgccccagacaccatttccccagacaccccaatg

SEQ ID NO: 199584 - DNA, 120 bp, Artificial Sequence
  ENSG00000113905_6 (sequence is synthesized)
tctttggattctgcagagcagatttgttctatgatgtagaagccttggacttggaaagcccgaaaaaccttgtcataaactgtgaagtcttcgaccctcaggaacatgagaacatcaatg

SEQ ID NO: 199585 - DNA, 120 bp, Artificial Sequence
  ENSG00000113905_7 (sequence is synthesized)
gtgtaccgcctcatttgggacatcccttccactggggtgggcatgagcgttcttctaccaccaagcctccattcaagccccatggatctagagatcatcatcatccccacaagccacacg

SEQ ID NO: 199586 - DNA, 120 bp, Artificial Sequence
  ENSG00000113905_8 (sequence is synthesized)
agttgtcaacatgccacttttggcacaaatggggcccaaagacattctcataataataattccagtgacctccatccccataagcatcattcccatgaacagcatccccacggacaccat

SEQ ID NO: 199587 - DNA, 120 bp, Artificial Sequence
  ENSG00000113905_9 (sequence is synthesized)
ccccatgcacaccatcctcatgaacatgatacccatagacagcatccccatggacaccacccccatggacaccatcctcatggacaccacccccatggacaccatccccatggacaccat

SEQ ID NO: 199588 - DNA, 120 bp, Artificial Sequence
  ENSG00000113905_10 (sequence is synthesized)
ccccactgccatgatttccaagactatggaccttgtgacccaccaccccataaccaaggtcactgttgccatggccacggcccaccacctgggcacttaagaaggcgaggcccaggtaaa

SEQ ID NO: 199589 - DNA, 120 bp, Artificial Sequence
  ENSG00000113905_11 (sequence is synthesized)
ggaccccgtcccttccattgcagacaaattggatctgtgtaccgactccctcctctaagaaaaggtgaggtgctgccacttcctgaggccaattttcccagcttcccattgccgcaccac

SEQ ID NO: 199590 - DNA, 120 bp, Artificial Sequence
  ENSG00000113905_12 (sequence is synthesized)
aaacatcctctaaagccagacaatcagccctttcctcaatcagtctctgaatcatgtccagggaagttcaagagtgggtttccacaagtttccatgttttttacacatacatttccaaaa

SEQ ID NO: 199591 - DNA, 120 bp, Artificial Sequence
  ENSG00000113905_13 (sequence is synthesized)
taaaatgtgattcctttgaagaggaaaatgaataatacattgaattagaaacataaataaaatgaccagtaattgtgaaaattacagttcttttcaacctactttcatactgaagatgca

SEQ ID NO: 199592 - DNA, 120 bp, Artificial Sequence
  ENSG00000113905_14 (sequence is synthesized)
gcaaaatgtgaatgggaaaagagatggcctgagaagagagatcaaatggaaaggagaggaaagaactcagtgctgcctattagtagttaattctgtcactcaccactacatcacttgaga

SEQ ID NO: 199593 - DNA, 120 bp, Artificial Sequence
  ENSG00000113905_15 (sequence is synthesized)
caaatctatgccactcagaatctccttctttcctggacttaactctaattctagagtctctgttactgcttgggctatacctgggcatactaataaagtatggtattgaaactattgtta

SEQ ID NO: 199594 - DNA, 88 bp, Artificial Sequence
  ENSG00000113905_16 (sequence is synthesized)
atgcctcagccgcacacgcctaagccgcagcagtcaagcattcctacaggacttcctgagccactaggccaaggaatgcccacagccc

SEQ ID NO: 199595 - DNA, 87 bp, Artificial Sequence
  ENSG00000113905_17 (sequence is synthesized)
aaatctagccactatcagccgtatcccatctgtgtaggactccactgaaaatcagactcttcaactcacctggcagccactcccaga

SEQ ID NO: 199596 - DNA, 72 bp, Artificial Sequence
  ENSG00000113905_18 (sequence is synthesized)
cccgtaggccatcacggacgccaagcttgaagtaactctcagagtagaaaatggaatctcacactgtcgccc

SEQ ID NO: 199597 - DNA, 120 bp, Artificial Sequence
  ENSG00000113905_19 (sequence is synthesized)
cggcgattacagtattcgtgtgccgtgagtcccactgactgcagtgctgttgagccggaggctgagaaagctctagacctgatcaataaaaggcgacgggatggctaccttttccaattg

SEQ ID NO: 199598 - DNA, 120 bp, Artificial Sequence
  ENSG00000113905_20 (sequence is synthesized)
cggactgttcggtcctatccaggaaatactggaatgactgtgagccacctgattccagacgtccatctgaaatagtggagaacatgaagatgaataagcagagattcaagatttcatttc

SEQ ID NO: 199599 - DNA, 120 bp, Artificial Sequence
  ENSG00000113905_21 (sequence is synthesized)
cagaaaatgagaggttcacactcctggaactttcaccactttttcccttgaaaatgtttggggtatggccatgatgctttaaatagtttctcgctggttctcctgaggattttgagtgcc

SEQ ID NO: 199600 - DNA, 120 bp, Artificial Sequence
  ENSG00000113905_22 (sequence is synthesized)
aacaggatgcagcacacagaaactgactaagaaaatgcagggtttgagacaagctttgatgaaagaaatgcatttttaaatgaacagtaggaggatgttgcatcacctttttgctctttc

SEQ ID NO: 199601 - DNA, 120 bp, Artificial Sequence
  ENSG00000113905_23 (sequence is synthesized)
agaaggagaggaaggagaagaaggagaagaggaatgagaaggagaaaatgaggaggaggagaaggaggaagaaatgtctgtgaaatacaaagtatcatctgggaagcacttagtacctgc

SEQ ID NO: 199602 - DNA, 78 bp, Artificial Sequence
  ENSG00000113905_24 (sequence is synthesized)
tgaaatacaaagtatcatctgggaagcacttagtacctgccaggcactcttctaagtgatttacacatcagataactt

SEQ ID NO: 199603 - DNA, 120 bp, Artificial Sequence
  ENSG00000113905_25 (sequence is synthesized)
atgttgatcaggttggtctcaaactccttatctcaggtgtccacccacttcggctgggattacaaatcaaagtgctggggttacaggcgcaagccaccatgcccagcctatgataactta

SEQ ID NO: 199604 - DNA, 120 bp, Artificial Sequence
  ENSG00000113905_26 (sequence is synthesized)
ttaaccctcacactaccatatgagatagataccatttttaatcccaaattagcagataggggaactgaggcacagagaacataagcgaaccataagaacatgattttataatatacatga

SEQ ID NO: 199605 - DNA, 120 bp, Artificial Sequence
  ENSG00000113905_27 (sequence is synthesized)
tatatacctaaacttaaaactaagtttctaactgattaggattaaaggcttagttagaactatagcagttcgtactaagaccctacgccaagtggttttattaattccacatcatcacac

SEQ ID NO: 199606 - DNA, 120 bp, Artificial Sequence
  ENSG00000113905_28 (sequence is synthesized)
tcacaggaatcccacttgacaaatgaggaggtaactgaaaatcagcaaaggaaaggtcttgccgatgttcacaaccaagctgagattaaaacttagttattctcatacaaagtccagtgg

SEQ ID NO: 199607 - DNA, 120 bp, Artificial Sequence
  ENSG00000113905_29 (sequence is synthesized)
gatttttcctctaatcatttacaaatagattcccatgtacctgccagaagacattattaataccacctggcatttgcatggtgacctacagttaaagaaacacctccacatctgttattg

SEQ ID NO: 199608 - DNA, 120 bp, Artificial Sequence
  ENSG00000113905_30 (sequence is synthesized)
ccaggagagcctcatgaaaatcctgctgacaaggaaaagcaagtatctgcctacatttcctgtgacaaggggacctgaaattaaaaccacttacctaaaggcacttagctagagagtgtt

SEQ ID NO: 199609 - DNA, 120 bp, Artificial Sequence
  ENSG00000113905_31 (sequence is synthesized)
aggaaatggaattttaattatgatgccaagtccaggatttttctgaggtttaacaacacattctccctggtcaaaagggagaaaccatccattagtacctttgttagctcttctaatgtc

SEQ ID NO: 199610 - DNA, 120 bp, Artificial Sequence
  ENSG00000113905_32 (sequence is synthesized)
caacaaacccttcatgatcttggtgtggataatgtaaacccagagttgaagcaccagagctgaagaggaggctcaggggtaagtgttttacagcatcctcttgtttaattaatccctccc

SEQ ID NO: 199611 - DNA, 120 bp, Artificial Sequence
  ENSG00000113905_33 (sequence is synthesized)
acaacctgtgagtacatagtattatccccattttacaatggctgactttcagaaatcttttgtaactttcccaaactcagacaactaggaaatggagaagccaggattaacataggtctc

SEQ ID NO: 199612 - DNA, 120 bp, Artificial Sequence
  ENSG00000113905_34 (sequence is synthesized)
tctgattcccaaactgtactcagaacctcaatgcttagcaatttcttctagcagacagccgtcctcttgtcctagtcgatctttcacaggtgggtttaggagcatctggagcacaggagt

SEQ ID NO: 199613 - DNA, 120 bp, Artificial Sequence
  ENSG00000113905_35 (sequence is synthesized)
ggcagccagttgtagccctggcacttgggtggagtcagcagacacttgccttgacaatgtccatgaaaacccatctttatgctatacagatgccctcctgtccaacactttcctccaagg

SEQ ID NO: 199614 - DNA, 120 bp, Artificial Sequence
  ENSG00000113905_36 (sequence is synthesized)
gaccagctgaagttgtaaaaatccctctttgacaccattcctcattgtcctaggcacaggcaactgaggtctccagtgcagaagggttggcctaaaggcaaggcagcaatgatgtggttt

SEQ ID NO: 199615 - DNA, 120 bp, Artificial Sequence
  ENSG00000113905_37 (sequence is synthesized)
tcctcatcatttccatcacccatggggaagcccagtgctggtgcctgctcatgaaaaaaaccacagcaactttagtgatacccttcaccacctgcactttccccaaagtgttaacaagga

SEQ ID NO: 199616 - DNA, 120 bp, Artificial Sequence
  ENSG00000113905_38 (sequence is synthesized)
aagattgctgaacgactggtgggaatatctgatcatattaccctgatttttctaaagcacttcttccttttctgaatgtctggaagctaactctggctggtcatcttcacaccacctgga

SEQ ID NO: 199617 - DNA, 120 bp, Artificial Sequence
  ENSG00000113916_0 (sequence is synthesized)
gccacttgtcatggtgaaatggcaaatctgggcttcctgtggttccagaagcctgcgactggaaatccacaagcgagctggtggttgaagctggttaaagaacagcctaggtattccaga

SEQ ID NO: 199618 - DNA, 120 bp, Artificial Sequence
  ENSG00000113916_1 (sequence is synthesized)
agtgtttgaggatcccttccatgaaggaagagaggaaagtttttaagtaaacctcccactcccatgtgtcttcagctttcttttgcaaaggagaaaatccttgaagtttggtaaagaccg

SEQ ID NO: 199619 - DNA, 120 bp, Artificial Sequence
  ENSG00000113916_2 (sequence is synthesized)
agttagtctatctctctttgcctatctcgagttgggctggggagaggaggagataggttcttttgtctttttctgtcttctcccttccccacttccttccctccagtccccactcactca

SEQ ID NO: 199620 - DNA, 120 bp, Artificial Sequence
  ENSG00000113916_3 (sequence is synthesized)
catgcacacactaaccttggagccgatgggattgagtgactggcacttgggaccacagagaaatgtcagagtgtttggttacagactcaaggaaacctctcattttagagtgctcatttg

SEQ ID NO: 199621 - DNA, 120 bp, Artificial Sequence
  ENSG00000113916_4 (sequence is synthesized)
gttttgagcaaaattttggactgtgaagcaaggcattggtgaagacaaaatggcctcgccggctgacagctgtatccagttcacccgccatgccagtgatgttcttctcaaccttaatcg

SEQ ID NO: 199622 - DNA, 120 bp, Artificial Sequence
  ENSG00000113916_5 (sequence is synthesized)
tctccggagtcgagacatcttgactgatgttgtcattgttgtgagccgtgagcagtttagagcccataaaacggtcctcatggcctgcagtggcctgttctatagcatctttacagacca

SEQ ID NO: 199623 - DNA, 120 bp, Artificial Sequence
  ENSG00000113916_6 (sequence is synthesized)
gttgaaatgcaaccttagtgtgatcaatctagatcctgagatcaaccctgagggattctgcatcctcctggacttcatgtacacatctcggctcaatttgcgggagggcaacatcatggc

SEQ ID NO: 199624 - DNA, 120 bp, Artificial Sequence
  ENSG00000113916_7 (sequence is synthesized)
tgtgatggccacggctatgtacctgcagatggagcatgttgtggacacttgccggaagtttattaaggccagtgaagcagagatggtttctgccatcaagcctcctcgtgaagagttcct

SEQ ID NO: 199625 - DNA, 120 bp, Artificial Sequence
  ENSG00000113916_8 (sequence is synthesized)
caacagccggatgctgatgccccaagacatcatggcctatcggggtcgtgaggtggtggagaacaacctgccactgaggagcgcccctgggtgtgagagcagagcctttgcccccagcct

SEQ ID NO: 199626 - DNA, 120 bp, Artificial Sequence
  ENSG00000113916_9 (sequence is synthesized)
gtacagtggcctgtccacaccgccagcctcttattccatgtacagccacctccctgtcagcagcctcctcttctccgatgaggagtttcgggatgtccggatgcctgtggccaacccctt

SEQ ID NO: 199627 - DNA, 120 bp, Artificial Sequence
  ENSG00000113916_10 (sequence is synthesized)
ccccaaggagcgggcactcccatgtgatagtgccaggccagtccctggtgagtacagccggccgactttggaggtgtcccccaatgtgtgccacagcaatatctattcacccaaggaaac

SEQ ID NO: 199628 - DNA, 120 bp, Artificial Sequence
  ENSG00000113916_11 (sequence is synthesized)
gcccgaaatgccccctacttcccttgtgacaaggccagcaaagaagaagagagaccctcctcggaagatgagattgccctgcatttcgagccccccaatgcacccctgaaccggaagggt

SEQ ID NO: 199629 - DNA, 120 bp, Artificial Sequence
  ENSG00000113916_12 (sequence is synthesized)
ctggttagtccacagagcccccagaaatctgactgccagcccaactcgcccacagagtcctgcagcagtaagaatgcctgcatcctccaggcttctggctcccctccagccaagagcccc

SEQ ID NO: 199630 - DNA, 120 bp, Artificial Sequence
  ENSG00000113916_13 (sequence is synthesized)
actgaccccaaagcctgcaactggaagaaatacaagttcatcgtgctcaacagcctcaaccagaatgccaaaccagaggggcctgagcaggctgagctgggccgcctttccccacgagcc

SEQ ID NO: 199631 - DNA, 120 bp, Artificial Sequence
  ENSG00000113916_14 (sequence is synthesized)
tacacggccccacctgcctgccagccacccatggagcctgagaaccttgacctccagtccccaaccaagctgagtgccagcggggaggactccaccatcccacaagccagccggctcaat

SEQ ID NO: 199632 - DNA, 120 bp, Artificial Sequence
  ENSG00000113916_15 (sequence is synthesized)
aacatcgttaacaggtccatgacgggctctccccgcagcagcagcgagagccactcaccactctacatgcaccccccgaagtgcacgtcctgcggctctcagtccccacagcatgcagag

SEQ ID NO: 199633 - DNA, 120 bp, Artificial Sequence
  ENSG00000113916_16 (sequence is synthesized)
atgtgcctccacaccgctggccccacgttccctgaggagatgggagagacccagtctgagtactcagattctagctgtgagaacggggccttcttctgcaatgagtgtgactgccgcttc

SEQ ID NO: 199634 - DNA, 120 bp, Artificial Sequence
  ENSG00000113916_17 (sequence is synthesized)
tctgaggaggcctcactcaagaggcacacgctgcagacccacagtgacaaaccctacaagtgtgaccgctgccaggcctccttccgctacaagggcaacctcgccagccacaagaccgtc

SEQ ID NO: 199635 - DNA, 120 bp, Artificial Sequence
  ENSG00000113916_18 (sequence is synthesized)
cataccggtgagaaaccctatcgttgcaacatctgtggggcccagttcaaccggccagccaacctgaaaacccacactcgaattcactctggagagaagccctacaaatgcgaaacctgc

SEQ ID NO: 199636 - DNA, 120 bp, Artificial Sequence
  ENSG00000113916_19 (sequence is synthesized)
ggagccagatttgtacaggtggcccacctccgtgcccatgtgcttatccacactggtgagaagccctatccctgtgaaatctgtggcacccgtttccggcaccttcagactctgaagagc

SEQ ID NO: 199637 - DNA, 120 bp, Artificial Sequence
  ENSG00000113916_20 (sequence is synthesized)
cacctgcgaatccacacaggagagaaaccttaccattgtgagaagtgtaacctgcatttccgtcacaaaagccagctgcgacttcacttgcgccagaagcatggcgccatcaccaacacc

SEQ ID NO: 199638 - DNA, 120 bp, Artificial Sequence
  ENSG00000113916_21 (sequence is synthesized)
aaggtgcaataccgcgtgtcagccactgacctgcctccggagctccccaaagcctgctgaagcatggagtgttgatgctttcgtctccagccccttctcagaatctacccaaaggatact

SEQ ID NO: 199639 - DNA, 120 bp, Artificial Sequence
  ENSG00000113916_22 (sequence is synthesized)
atcatagctgggggttgggggtggtgggggtcggggcctgggggactgggagccgcagcagctccccctcccccactgccataaaacattaagaaaatcatattgcttcttctcctatgt

SEQ ID NO: 199640 - DNA, 120 bp, Artificial Sequence
  ENSG00000113916_23 (sequence is synthesized)
gtaaggtgaaccatgtcagcaaaaagcaaaatcattttatatgtcaaagcaggggagtatgcaaaagttctgacttgactttagtctgcaaaatgaggaatgtatatgttttgtgggaac

SEQ ID NO: 199641 - DNA, 120 bp, Artificial Sequence
  ENSG00000113916_24 (sequence is synthesized)
agatgtttcttttgtatgtaaatgtgcattcttttaaaagacaagacttcagtatgttgtcaaagagagggctttaatttttttaaccaaaggtgaaggaatatatggcagagttgtaaa

SEQ ID NO: 199642 - DNA, 120 bp, Artificial Sequence
  ENSG00000113916_25 (sequence is synthesized)
taaatatatatatatataaaataaatatatataaacctaaaaaagatatattaaaaatataaaactgcgttaaaggctcgattttgtatctgcaggcagacacggatctgagaatcttta

SEQ ID NO: 199643 - DNA, 120 bp, Artificial Sequence
  ENSG00000113916_26 (sequence is synthesized)
tttattgagaaagagcacttaagagaatattttaagtattgcatctgtataagtaagaaaatattttgtctaaaatgcctcagtgtatttgtatttttttgcaagtgaaggtttacaatt

SEQ ID NO: 199644 - DNA, 120 bp, Artificial Sequence
  ENSG00000113916_27 (sequence is synthesized)
tacaaagtgtgtattaaaaaaaacaaaaagaacaaaaaaatctgcagaaggaaaaatgtgtaattttgttctagttttcagtttgtatatacccgtacaacgtgtcctcacggtgccttt

SEQ ID NO: 199645 - DNA, 120 bp, Artificial Sequence
  ENSG00000113916_28 (sequence is synthesized)
tttcacggaagttttcaatgatgggcgagcgtgcaccatccctttttgaagtgtaggcagacacagggacttgaagttgttactaactaaactctctttgggaatgtttgtctcatccca

SEQ ID NO: 199646 - DNA, 120 bp, Artificial Sequence
  ENSG00000113916_29 (sequence is synthesized)
ttctgcgtcatgcttgtgttataactactccggagacagggtttggctgtgtctaaactgcattaccgcgttgtaaaatatagctgtacaaatataagaataaaatgttgaaaagtcaaa

SEQ ID NO: 199647 - DNA, 120 bp, Artificial Sequence
  ENSG00000113916_30 (sequence is synthesized)
gttcttagaagtggtgatgcaagaagtttctaggaaaggccggacaccagctcttttaaaggatctgtcttctcaaggagcctagttggctatgcacaaggaaagcgccaaaagagctaa

SEQ ID NO: 199648 - DNA, 120 bp, Artificial Sequence
  ENSG00000113916_31 (sequence is synthesized)
agggaggaagggaagagaaaacatttaactctcccatggtggttactgacccagcgtgggtgcggggagattgggatgggaagtccaggtctgggggcagccagcagttgtcagtttctc

SEQ ID NO: 199649 - DNA, 120 bp, Artificial Sequence
  ENSG00000113916_32 (sequence is synthesized)
attgacagccctgctccttggagattgtttttgtgggtagtcttgtgtgtggcattggtggaatggctgaatctaggagacgcggcgtgtccagaacttgctggaaattggttttgagat

SEQ ID NO: 199650 - DNA, 120 bp, Artificial Sequence
  ENSG00000113916_33 (sequence is synthesized)
tttgggcaaggcctctcacccggagcctcagttccctccctaataaagcagggctgttataaggataagatgcaatcttgagggggtgggaaaggactaagagctctgtaaaaatacaaa

SEQ ID NO: 199651 - DNA, 120 bp, Artificial Sequence
  ENSG00000113916_34 (sequence is synthesized)
tgcccacactcaacccacacactcaggagttggggggggctggttcttaagacgagttggcttgcaaaggagtgaacttgagaaggacctgcgcctcgtgtatgtacatttgtttttggc

SEQ ID NO: 199652 - DNA, 120 bp, Artificial Sequence
  ENSG00000113916_35 (sequence is synthesized)
cttgaggccgctctctgacctgcggggatgtggagggcagggaaggaggtggagcgcagggaaggaggtggagcagggaggcagtggaactgtttgctcccatctcaagcacacagtggg

SEQ ID NO: 199653 - DNA, 120 bp, Artificial Sequence
  ENSG00000113916_36 (sequence is synthesized)
gcaaccactacgctaatggttggaagacctagatctgggcccaatggccagacaccctgcttgaccttggcccaagcattaggggactcatctttaaaatgagggtatgggactaggtga

SEQ ID NO: 199654 - DNA, 120 bp, Artificial Sequence
  ENSG00000113916_37 (sequence is synthesized)
tctgggccttaggagaggagtctagactgtggatacatagacttgattcactccacctagattcattcatttcacaaatacttattgattgcctcctggacaccccatactgggctagat

SEQ ID NO: 199655 - DNA, 120 bp, Artificial Sequence
  ENSG00000113916_38 (sequence is synthesized)
tcttagaactggggttcttagaagtggtgatgcaagaagtttctaggaaaggccggacaccaggttttgagcaaaattttggactgtgaagcaaggcattgggtaagtaaataaaattat

SEQ ID NO: 199656 - DNA, 120 bp, Artificial Sequence
  ENSG00000113916_39 (sequence is synthesized)
atgctttaaaatgttgggacaaactgtttcttttgaatttgccaatacatgtgtctctgtgaactttgccactgttcattatatgagacaaggataaccagttccctctacatcactcct

SEQ ID NO: 199657 - DNA, 120 bp, Artificial Sequence
  ENSG00000113916_40 (sequence is synthesized)
ggtcaatcattgttactctttctttgtacaaactaatttagccagctaatgttcaccaacaatatgctagctcctcgaggtacaaaagtcaagcaactctaaagcctaacagtagagaga

SEQ ID NO: 199658 - DNA, 120 bp, Artificial Sequence
  ENSG00000113916_41 (sequence is synthesized)
gaccaatggtgactgagatgatgaaataagatacctatgagaatagctatgagttttgagagcctcctatgaacgaggaatgtatttctaacttttataaccacataggtattactactt

SEQ ID NO: 199659 - DNA, 120 bp, Artificial Sequence
  ENSG00000113916_42 (sequence is synthesized)
accatcgtcttgggcccggggagggagagccaccttcaggcccctcgagcctcgaaccggaacctccaaatccgagacgctctgcttatgaggacctcgaaatatgccggccagtgaaaa

SEQ ID NO: 199660 - DNA, 120 bp, Artificial Sequence
  ENSG00000113916_43 (sequence is synthesized)
aatcttgtggctttgagggcttttggttggccaggggcagtaaaaatctcggagagctgacaccaagtcctcccctgccacgtagcagtggtaaagtccgaagctcaaattccgagaatt

SEQ ID NO: 199661 - DNA, 120 bp, Artificial Sequence
  ENSG00000113916_44 (sequence is synthesized)
tcctggcggctgccggggccggcagcttcctggaaagttacttcttgttggagccggcaataggcaaagtgtgttctgtgaaatccgcagagccgagattgactacgttccgggaatgag

SEQ ID NO: 199662 - DNA, 81 bp, Artificial Sequence
  ENSG00000113916_45 (sequence is synthesized)
aaatccgcagagccgagattgactacgttccgggaatgagagggctgtgtcattcccctcattgcctgctgcattgacggc

SEQ ID NO: 199663 - DNA, 120 bp, Artificial Sequence
  ENSG00000113924_0 (sequence is synthesized)
agtgaagcgcagtgaagcagtgggaaccggaatatccaaagagtggtttgaaggagaaagaagcattgtggctttatatcctctgggcctgggtttcctgaagtcaccacacatagagga

SEQ ID NO: 199664 - DNA, 120 bp, Artificial Sequence
  ENSG00000113924_1 (sequence is synthesized)
gagagaaaatggctgagttaaagtacatttctggatttgggaatgagtgttcttcagaggatcctcgctgcccaggttccctgccagaaggacagaataatcctcaggtctgcccctaca

SEQ ID NO: 199665 - DNA, 120 bp, Artificial Sequence
  ENSG00000113924_2 (sequence is synthesized)
atctctatgctgagcagctctcaggatcggctttcacttgtccacggagcaccaataagagaagctggctgtataggattctaccttcagtttctcacaagccctttgaatccattgacg

SEQ ID NO: 199666 - DNA, 120 bp, Artificial Sequence
  ENSG00000113924_3 (sequence is synthesized)
aaggccaagtcactcacaactgggatgaagttgatcctgatcctaaccagcttagatggaaaccatttgagattccaaaagcatctcagaagaaagtagactttgtgagtggcctgcata

SEQ ID NO: 199667 - DNA, 120 bp, Artificial Sequence
  ENSG00000113924_4 (sequence is synthesized)
ccttgtgtggagctggagacataaagtctaacaatgggcttgctatccacattttcctctgcaatacctccatggagaacagatgcttttacaattcagatggggacttcttgattgttc

SEQ ID NO: 199668 - DNA, 120 bp, Artificial Sequence
  ENSG00000113924_5 (sequence is synthesized)
cgcagaaagggaaccttctcatttacaccgagtttggcaagatgcttgtacagcccaatgagatctgcgtcattcagagaggaatgcggttcagcatagatgtctttgaggagaccaggg

SEQ ID NO: 199669 - DNA, 120 bp, Artificial Sequence
  ENSG00000113924_6 (sequence is synthesized)
atcgccaagtaccaggtggttacacggtcattaataaataccagggcaagctgtttgctgccaaacaggatgtctccccgttcaatgttgtggcctggcacgggaattatacaccctaca

SEQ ID NO: 199670 - DNA, 120 bp, Artificial Sequence
  ENSG00000113924_7 (sequence is synthesized)
agtacaacctgaagaatttcatggttatcaactcagtggcctttgaccatgcagacccatccattttcacagtattgactgctaagtctgtccgccctggagtggccattgctgattttg

SEQ ID NO: 199671 - DNA, 120 bp, Artificial Sequence
  ENSG00000113924_8 (sequence is synthesized)
tcatcttcccacctcgatggggggttgctgataagaccttcaggcctccttattaccataggaactgcatgagtgagttcatgggactcatccgaggtcactatgaggcaaagcaaggtg

SEQ ID NO: 199672 - DNA, 120 bp, Artificial Sequence
  ENSG00000113924_9 (sequence is synthesized)
ggttcctgccagggggagggagtctacacagcacaatgaccccccatggacctgatgctgactgctttgagaaggccagcaaggtcaagctggcacctgagaggattgccgatggcacca

SEQ ID NO: 199673 - DNA, 120 bp, Artificial Sequence
  ENSG00000113924_10 (sequence is synthesized)
tggcatttatgtttgaatcatctttaagtctggcggtcacaaagtggggactcaaggcctccaggtgtttggatgagaactaccacaagtgctgggagccactcaagagccacttcactc

SEQ ID NO: 199674 - DNA, 120 bp, Artificial Sequence
  ENSG00000113924_11 (sequence is synthesized)
ccaactccaggaacccagcagaacctaattgagactggaacattgctaccataattaagagtagatttgtgaagatttcttcagaatctcatgctttctggtagtattggaggagggggt

SEQ ID NO: 199675 - DNA, 120 bp, Artificial Sequence
  ENSG00000113924_12 (sequence is synthesized)
tggttaaaatgaaaattcacttttcatagtcaagtaactcagaacttttatggaaacgcatttgcaaagttctatggctgtcaccttaattactcaataaacttgctggtgttctgtgga

SEQ ID NO: 199676 - DNA, 120 bp, Artificial Sequence
  ENSG00000113924_13 (sequence is synthesized)
acacatagaggagagagaaaatggctgagttaaagactgttgttggcctgatcatcactcacacatccaggcttgttacatctccacgccactgagtatcagggaacctgccccaatatt

SEQ ID NO: 199677 - DNA, 120 bp, Artificial Sequence
  ENSG00000113924_14 (sequence is synthesized)
aattgaagcttatcatatacccaaagccttgactagaaatacctaaatagaataccatggtcattggaaaaaatagatagttttttaaagtattattttaataaatgctaaagtgtgtct

SEQ ID NO: 199678 - DNA, 120 bp, Artificial Sequence
  ENSG00000113924_15 (sequence is synthesized)
tcggctttcacttgtccacggagcaccaataagagaaggtacaaggattagatgaattctgacctgcagactgtgggtactatgacagggactttgtgctgcctccttcccctgggccac

SEQ ID NO: 199679 - DNA, 120 bp, Artificial Sequence
  ENSG00000113924_16 (sequence is synthesized)
agcctcccagagctgcccaagatcctgcttcttataggctatggtctgggtcatggtcagaagagaatgaacttcctgccagctagcaccaagtgactggtggaagaaggtgaaggaaag

SEQ ID NO: 199680 - DNA, 120 bp, Artificial Sequence
  ENSG00000113924_17 (sequence is synthesized)
ctgcacagagctgggaaaatacacatgtccagttccatttacaaattacctcctatattcagaaggaaatattcctaatagtttggtcttcttctaaagactgtcctgttgagttttggc

SEQ ID NO: 199681 - DNA, 120 bp, Artificial Sequence
  ENSG00000113924_18 (sequence is synthesized)
cagagagtggaactcgagacctctgataatccacatggccatggagtagagctgtgcctgccaagaatgccaatatgaatgttttatgattgttcttctgtcaatccatattctttatta

SEQ ID NO: 199682 - DNA, 120 bp, Artificial Sequence
  ENSG00000113924_19 (sequence is synthesized)
atcctatacaatttactagtttctcctgtgttcttggaattctgcagaaataatgtttaaggggctttgtgttttactggtcttgccttggataataaaaataatactgcttcaaccttc

SEQ ID NO: 199683 - DNA, 120 bp, Artificial Sequence
  ENSG00000113924_20 (sequence is synthesized)
aaatggctgagttaaagtacatttctggatttgggaatgagtgttcttcagaggatcctcgctgcccaggttccctgccagaaggacagctggctgtataggattctaccttcagtttct

SEQ ID NO: 199684 - DNA, 120 bp, Artificial Sequence
  ENSG00000113924_21 (sequence is synthesized)
tcgagaacaaaatcaaatcaaaagaagagagaggtatactcagtacatattgtgggatcacagctacaaaagcattagatggtaaaattatcctttcctgctttttgtgtttaggatgtc

SEQ ID NO: 199685 - DNA, 120 bp, Artificial Sequence
  ENSG00000113946_0 (sequence is synthesized)
cttcttccgagtggggaggagaatagctcactctccctagagggcctaagaaagatcagtttacaggttccagcatggggtgggacccttcctccttcccccgtcttggcactggcactt

SEQ ID NO: 199686 - DNA, 120 bp, Artificial Sequence
  ENSG00000113946_1 (sequence is synthesized)
ggtctggtgaccaccactagcccacagttgggtcagaaaacgttacagaactcctctctcccccacccgaaacacactcagcccttgcactgacctgccttctgattggaggctggttgc

SEQ ID NO: 199687 - DNA, 120 bp, Artificial Sequence
  ENSG00000113946_2 (sequence is synthesized)
ttcggataatgacctccaggaccccactgttggttacagcctgtttgtattattcttactgcaactcaagacacctgcagcagggcgtgagaaaaagtaaaagaccagtattttcacatt

SEQ ID NO: 199688 - DNA, 120 bp, Artificial Sequence
  ENSG00000113946_3 (sequence is synthesized)
gccaggtaccagaaacacagaagactgacacccgccacttaagtggggccagggctggtgtctgcccatgttgccatcctgatgggctgcttgccacaatgagggatcttcttcaataca

SEQ ID NO: 199689 - DNA, 120 bp, Artificial Sequence
  ENSG00000113946_4 (sequence is synthesized)
tcgcttgcttctttgcctttttctctgctgggtttttgattgtggccacctggactgactgttggatggtgaatgctgatgactctctggaggtgagcacaaaatgccgaggcctctggt

SEQ ID NO: 199690 - DNA, 120 bp, Artificial Sequence
  ENSG00000113946_5 (sequence is synthesized)
gggaatgcgtcacaaatgcttttgatgggattcgcacctgtgatgagtacgattccatacttgcggagcatcccttgaagctggtggtaactcgagcgttgatgattactgcagatattc

SEQ ID NO: 199691 - DNA, 120 bp, Artificial Sequence
  ENSG00000113946_6 (sequence is synthesized)
tagctgggtttggatttctcaccctgctccttggtcttgactgcgtgaaattcctccctgatgagccgtacattaaagtccgcatctgctttgttgctggagccacgttactaatagcag

SEQ ID NO: 199692 - DNA, 120 bp, Artificial Sequence
  ENSG00000113946_7 (sequence is synthesized)
gtaccccaggaatcattggctctgtgtggtatgctgttgatgtgtatgtggaacgttctactttggttttgcacaatatatttcttggtatccaatataaatttggttggtcctgttggc

SEQ ID NO: 199693 - DNA, 120 bp, Artificial Sequence
  ENSG00000113946_8 (sequence is synthesized)
tcggaatggctgggtctctgggttgctttttggctggagctgttctcacctgctgcttatatctttttaaagatgttggacctgagagaaactatccttattccttgaggaaagcctatt

SEQ ID NO: 199694 - DNA, 120 bp, Artificial Sequence
  ENSG00000113946_9 (sequence is synthesized)
cagccgcgggtgtttccatggccaagtcatactcagcccctcgcacagagacggccaaaatgtatgctgtagacacaagggtgtaaaatgcacgtttcagggtgtgtttgcatatgattt

SEQ ID NO: 199695 - DNA, 120 bp, Artificial Sequence
  ENSG00000113946_10 (sequence is synthesized)
aatcaatcagtatggttacattgataaaatagtaagtcaatccaggaacagttatttagaattcatattgaattaaattaattgctagcttaatcaaaatgtttgattctcctatacttt

SEQ ID NO: 199696 - DNA, 120 bp, Artificial Sequence
  ENSG00000113946_11 (sequence is synthesized)
ttctttctattactcttatattttcccgtcattctctctgctaaccttccaccttatgcacacactttccctatattttaagataagtctgctaggatgtagaaatatttgtttgtgatt

SEQ ID NO: 199697 - DNA, 120 bp, Artificial Sequence
  ENSG00000113946_12 (sequence is synthesized)
tctatatagctattagagattatgacatagtaatattaaaatgaaatgatacttaaacagaaagcaatttccaaagaggccagggaccctaatctttgaagagatgaagaaacttacttt

SEQ ID NO: 199698 - DNA, 120 bp, Artificial Sequence
  ENSG00000113946_13 (sequence is synthesized)
taacaagtgggtgaattatttgataattttgaggaagattattcttttaaattcaaactagtatgtcaatgcctaccattactctgattatattaaaacagaaaaaggaaataacaactt

SEQ ID NO: 199699 - DNA, 120 bp, Artificial Sequence
  ENSG00000113946_14 (sequence is synthesized)
cgtataccagccactggtgagagttaaagacaagagctgcccccccacccccaaatgtcaaaggcaaatgctaaattgatactggagctcgtggtgactttctacctcactaacaacata

SEQ ID NO: 199700 - DNA, 120 bp, Artificial Sequence
  ENSG00000113946_15 (sequence is synthesized)
agggatctccatattatttcaccactattctagctttgctgatatattgccaaatgattagactacagaatagttcaaccagagaatttactcatttattgattaaacatccaaatacta

SEQ ID NO: 199701 - DNA, 120 bp, Artificial Sequence
  ENSG00000113946_16 (sequence is synthesized)
ttgtaatatactatgttaaaattcatcaattcaagtgcccacacaccactgaatcatcagcaccaagcaatatattagacatatggcaaaattcaacaaatatattttgatataaataaa

SEQ ID NO: 199702 - DNA, 120 bp, Artificial Sequence
  ENSG00000113946_17 (sequence is synthesized)
ggcaaaattcaacaaatatattttgatataaataaataaacgttcacgactttacttaaaaaatcaatgttgcggctgggcacggtagctcgcgtctgtaatccccgcactttgggaggc

SEQ ID NO: 199703 - DNA, 82 bp, Artificial Sequence
  ENSG00000113946_18 (sequence is synthesized)
caccattgcactccagttaaataaataaataaatattcttcataaaatgtgggttttggggaaaatatagaattacatatac

SEQ ID NO: 199704 - DNA, 120 bp, Artificial Sequence
  ENSG00000113946_19 (sequence is synthesized)
gggttttggggaaaatatagaattacatatacatttaacgaagtcgctaatgacatttcattcatattcataatgtaaccatcttgaatttttttaattgtagcgattttaaaaatgttt

SEQ ID NO: 199705 - DNA, 120 bp, Artificial Sequence
  ENSG00000113946_20 (sequence is synthesized)
gtaaaatttaatttccagttttctaattacttgtcagtcacattaataacattagtacctttatggtacccttgcagtacctgaaaagaatatcaacctgaaaagaatatcaactcaccc

SEQ ID NO: 199706 - DNA, 120 bp, Artificial Sequence
  ENSG00000113946_21 (sequence is synthesized)
agaaattagttctttgaaaaaaaagaaattaagttgtgaatttctaaagaccttgaaataagtgtttcaaatttaaagaacaaagaatgatgtgaaaatgagattatgattcctactaca

SEQ ID NO: 199707 - DNA, 120 bp, Artificial Sequence
  ENSG00000113946_22 (sequence is synthesized)
tgaattaacgtttcgagattgctgtttattacttcccagagtatctttaacagtattctctgaagcagttccaatctagttggagaattaacagcaattgatttaactatctcattttta

SEQ ID NO: 199708 - DNA, 120 bp, Artificial Sequence
  ENSG00000113946_23 (sequence is synthesized)
ttaactgtaatttactttaaaaatatttgcaaatcatactcattagttatttgatcattgttctatgcattttaaaattaattttgtgttgttcctctcaatatttgtttttaacattta

SEQ ID NO: 199709 - DNA, 120 bp, Artificial Sequence
  ENSG00000113946_24 (sequence is synthesized)
ttcccatttttattttatactattgtctgtcatgctttatgtattccaataagtgtcttgaaatccttgtggggaaaggcaggacaaaaataattagttaattagatttgaaaaatgtaa

SEQ ID NO: 199710 - DNA, 120 bp, Artificial Sequence
  ENSG00000113946_25 (sequence is synthesized)
tttttccattttaaatatttcatttgtataagaaaatatttcagagaaccatgatgataatggatatgtgtgactgttttgaatttttttctcaattaaaacattttgtatgtaatggga

SEQ ID NO: 199711 - DNA, 120 bp, Artificial Sequence
  ENSG00000113946_26 (sequence is synthesized)
atgactctctggagatgttggacctgagagaaactatccttattccttgaggaaagcctattcagccgcgggtgtttccatggccaagtcatactcagcccctcgcacagagacggccaa

SEQ ID NO: 199712 - DNA, 120 bp, Artificial Sequence
  ENSG00000113946_27 (sequence is synthesized)
gagagggcgccgggagcgcccggttggggaacgcgcggctggcggcgtggggaccacccggcaggaccaggcaccagagctgcgtccctgctcgctttctctcgtggatcttctcgctcc

SEQ ID NO: 199713 - DNA, 120 bp, Artificial Sequence
  ENSG00000113946_28 (sequence is synthesized)
cctcaaacatcggactccaagttcttgagttttgggactcagactggctttcttgctcctcagcttgcagatgaactactgtgggatcttgtgatcatgactgaactcgttgttggccac

SEQ ID NO: 199714 - DNA, 120 bp, Artificial Sequence
  ENSG00000113966_0 (sequence is synthesized)
aactcccatgatgctacgccgggaactgcccggctcctcgcaggaaataggcagctcaccctgccacctgtgcacacatttttcttcaatgtatagttcctcggcgcgcctctgaccttt

SEQ ID NO: 199715 - DNA, 120 bp, Artificial Sequence
  ENSG00000113966_1 (sequence is synthesized)
tcccggagctcttcaatcccagaagctatagcacaacggctgaatcgccaggacccccggggaggcgtggcttcaggaccggaagaagctcctgttgccaagggaacggtgcctgccaag

SEQ ID NO: 199716 - DNA, 120 bp, Artificial Sequence
  ENSG00000113966_2 (sequence is synthesized)
gcgcctgctcagcgactgatgcacagactgctgcagaggctgccggttttcccaacttctagagacggctttgctcattaccaggcatccttcccatgtaggcatcgagaagaaggctga

SEQ ID NO: 199717 - DNA, 120 bp, Artificial Sequence
  ENSG00000113966_3 (sequence is synthesized)
gggaccctcgcaccagatttccatcccggagaccgatacgagtgcgtccattcctgttgccagctcctgcgccctccggactaacctcaaaaaccagaaaaactgcctgctcttctaaat

SEQ ID NO: 199718 - DNA, 120 bp, Artificial Sequence
  ENSG00000113966_4 (sequence is synthesized)
tgtgtgtcccaaaatatttcattaacaagtatcaagtgataatccatggaaaagtgatggaaagtcacaatacaagctggtttgtaaatatttgaatcacattatgggattgctagacag

SEQ ID NO: 199719 - DNA, 120 bp, Artificial Sequence
  ENSG00000113966_5 (sequence is synthesized)
actttcagtcttgcttggcctgaagaagaaggaggttcatgttttgtgccttgggctagataatagtggcaaaacgacgatcattaacaaacttaaaccttcaaatgctcaatctcaaaa

SEQ ID NO: 199720 - DNA, 120 bp, Artificial Sequence
  ENSG00000113966_6 (sequence is synthesized)
atgtcaggtcaaggaagatacagaaatctctgggaacactattataaagaaggccaagctattatttttgtcattgatagtagtgatagattaagaatggttgtggccaaagaagaactc

SEQ ID NO: 199721 - DNA, 120 bp, Artificial Sequence
  ENSG00000113966_7 (sequence is synthesized)
gatactcttctgaatcatccagatattaaacaccgtcgaattccaatcttattctttgcaaataaaatggatcttagagatgcagtgacatctgtaaaagtgtctcagttgctgtgttta

SEQ ID NO: 199722 - DNA, 120 bp, Artificial Sequence
  ENSG00000113966_8 (sequence is synthesized)
gagaacatcaaagataaaccctggcatatttgtgctagtgatgccataaaaggagaaggcttgcaagaaggtgtagactggcttcaagatcagatccagactgtgaagacatgaaaagat

SEQ ID NO: 199723 - DNA, 120 bp, Artificial Sequence
  ENSG00000113966_9 (sequence is synthesized)
aatagttggaaacctcagcaattttcaattcaaggaatctatctaagacaaatagaatacattttgtaaaagatgtttatgcatcaaaaaatataattttctgcttgcatttatggactc

SEQ ID NO: 199724 - DNA, 120 bp, Artificial Sequence
  ENSG00000113966_10 (sequence is synthesized)
tgacctttttaagaacataggacttcaggtatgctaatttggccattaattatttaaaaactaaatattccctcaaaagggctccctagaattatcaagttcttagtgaaggtctacatt

SEQ ID NO: 199725 - DNA, 120 bp, Artificial Sequence
  ENSG00000113966_11 (sequence is synthesized)
tgtacgtagaatgtttaaaagtcagttataagccatctcatcccatcataatttatgatatgtttaatatattttattttttaattgtctttttaaaaaatttagtttatgactttgcag

SEQ ID NO: 199726 - DNA, 120 bp, Artificial Sequence
  ENSG00000113966_12 (sequence is synthesized)
gcagtatgaattgtgcttgtgaaaaagaactttaaatatttataagggaccatgggtaattaatatatattcaatttttactatgtgtcactgtcaataaaatgtaaaatataatgtgcc

SEQ ID NO: 199727 - DNA, 120 bp, Artificial Sequence
  ENSG00000113966_13 (sequence is synthesized)
aagaataatgctctgttagtatggtatttcgtgtcatactgtcaagcatttgtaaaccatctgagactaagttaagctgaatttatttattcagtgtatgttgaacatctctacaccaac

SEQ ID NO: 199728 - DNA, 120 bp, Artificial Sequence
  ENSG00000113966_14 (sequence is synthesized)
tagtcagacatagtcctaggcaatgatgttacgaggtaaataagacatatccttatcttcagagaacttaaaatttaatgagggataatttgagaacctttccatggatagtatctaatt

SEQ ID NO: 199729 - DNA, 120 bp, Artificial Sequence
  ENSG00000113966_15 (sequence is synthesized)
ttatttcattggctgaatgaaaatattgcatcttcagattaagaggtataaagtaaattaatatttgactgttcagtaatcattactgacatcttgtttttcacttttaaatgcctccaa

SEQ ID NO: 199730 - DNA, 120 bp, Artificial Sequence
  ENSG00000113966_16 (sequence is synthesized)
tttaccatagcactttgttaaaataaattgtgacttttaactttttcatgaacataactgctacataaatgttctttagaattttagacatatctcaggcacacaaattattagttctca

SEQ ID NO: 199731 - DNA, 120 bp, Artificial Sequence
  ENSG00000113966_17 (sequence is synthesized)
caaattagagaacacttataattgtgaactctaaatagaaaccttcattttaatcactgagcaacagtatatagagcaatattgttgatcctgataaacactgcatataaagaaaaactg

SEQ ID NO: 199732 - DNA, 120 bp, Artificial Sequence
  ENSG00000113966_18 (sequence is synthesized)
tgcttagctttgaaaatgatgaaaatagaaggcaaaagtaagtgagtaataaagatgttatagtaactgcagtagtggtacatgtttcacaaagattttaataaaagcacataaagctac

SEQ ID NO: 199733 - DNA, 120 bp, Artificial Sequence
  ENSG00000113966_19 (sequence is synthesized)
aataaaagttctatattccagtttcttatagtccagaaatagcagtgatttggcatttggcaaattgaaagttacccagaaaattccaatggctcagcatcttagctagtttaccatctc

SEQ ID NO: 199734 - DNA, 120 bp, Artificial Sequence
  ENSG00000113966_20 (sequence is synthesized)
tcttgtaaattgttttagaggatacaaaatgaaaatctcattaatctaaagttgctgcagatataggaaggacataaggatggaaacaatgaatgtaattttttaaaaaactgatatgct

SEQ ID NO: 199735 - DNA, 120 bp, Artificial Sequence
  ENSG00000113966_21 (sequence is synthesized)
acaactattttaggatggagaaagaattgattgagaattcaaatcctcactcacttaccataaggtagtaataaaattaataatagttactactatatgatcattatattataagcaggt

SEQ ID NO: 199736 - DNA, 120 bp, Artificial Sequence
  ENSG00000113966_22 (sequence is synthesized)
attacacatacagaattttcaacatttaatcctcccaataagcctatgtggcaggttttattatttccattttatagatcagtaaactgaggcgttaaaatgttatgtaatttgccaaag

SEQ ID NO: 199737 - DNA, 120 bp, Artificial Sequence
  ENSG00000113966_23 (sequence is synthesized)
ttcaaaaagctggtaagtctggtactaggattcagtaccaagcagtctgttttaagacagatgattcaagagtatgatagatattagaaatacagatatatctgccagaataacaattaa

SEQ ID NO: 199738 - DNA, 120 bp, Artificial Sequence
  ENSG00000113966_24 (sequence is synthesized)
aataacaattaaaatgatagaaaaggctcttacttgggacagcaaccaggacagggatggtagagggaaggtcagagactagagactactctttgctttttttgttttctttttttttct

SEQ ID NO: 199739 - DNA, 120 bp, Artificial Sequence
  ENSG00000113966_25 (sequence is synthesized)
aacactactcaaattttaaactctggatacaaatgactttgataaaagtccttaaaactattttgacattaaattatttggtattccacaaactacagtagctcatacctatgcaaatat

SEQ ID NO: 199740 - DNA, 120 bp, Artificial Sequence
  ENSG00000113966_26 (sequence is synthesized)
ttagaagaaggagaagtaccctttttctttgttttcatgatctccaaaatctagtttttagtctataaacatccatccctactccacattttcatgtaaagattatgtagaagttgggca

SEQ ID NO: 199741 - DNA, 120 bp, Artificial Sequence
  ENSG00000113966_27 (sequence is synthesized)
acagtgtagtcacaggatgtcatataagtgtgaataagctgagattattgcatttgtatttagcatattatacaattaaaatgtattttattaaacctgaagcaagttttctttcatgtc

SEQ ID NO: 199742 - DNA, 120 bp, Artificial Sequence
  ENSG00000113966_28 (sequence is synthesized)
tagacatcagtgtgttacagagtttaattcattaagctctgtatttgaatataacaccttgtaaaaatgtttgaaacttatcctcttgtatgttaaatatttaaatatttgtatatggcc

SEQ ID NO: 199743 - DNA, 120 bp, Artificial Sequence
  ENSG00000113966_29 (sequence is synthesized)
ctattcagcctgtgctttataaatcacaaaagagctgggttttatatgtttgttttttatttctaagctctctgcgaaaaagttacaaattgtctccttaagatattttttctttgtaat

SEQ ID NO: 199744 - DNA, 120 bp, Artificial Sequence
  ENSG00000113966_30 (sequence is synthesized)
ttttttatatcatgttgtgatttccataaatatgtgcagttactcttgataatacttgtcttattcatttcaggttgctataacaaagtaccatagactgggtggcttataaacgacaga

SEQ ID NO: 199745 - DNA, 120 bp, Artificial Sequence
  ENSG00000113966_31 (sequence is synthesized)
aatttatttcttacagctctggagctggaagtctgagatcagattaccagcatggttgggttctggtgagagccgtcttggttgcagactgccatcttcttgtatcctcacatggccaaa

SEQ ID NO: 199746 - DNA, 120 bp, Artificial Sequence
  ENSG00000113966_32 (sequence is synthesized)
agaggacaagagaactctctggagtctgtttgataagagcatgaatcccattacatcttcacatggctcctcccaaagaccccacctcctaatatcatcacatgtcatcacatagggggt

SEQ ID NO: 199747 - DNA, 120 bp, Artificial Sequence
  ENSG00000113966_33 (sequence is synthesized)
tagaatttcaacatagaaattttgggagaacacaaacattcagtcagttgcaatacttaaggcaaattcatcttgcttataactctggtgcatgtgcattaaaatactattgcattgtaa

SEQ ID NO: 199748 - DNA, 120 bp, Artificial Sequence
  ENSG00000113966_34 (sequence is synthesized)
ctgagtttgtacctattttctgctttctgattatttcctttgttcatgaaaataaatgactggtattacaaggtcacctaaataaataggtttgtgtacgtctgcgactagagagaaata

SEQ ID NO: 199749 - DNA, 120 bp, Artificial Sequence
  ENSG00000113966_35 (sequence is synthesized)
gacagaagagttcaatgacctagtcaagctccctcagctaataagaaaatgattgagatctaccgactttttgttttactctaccagcttaccaaacctataattatgggtttttatcct

SEQ ID NO: 199750 - DNA, 120 bp, Artificial Sequence
  ENSG00000113971_0 (sequence is synthesized)
gttccgctgcccagtcctgctggtactcactaggtagtagcggcaacggacgccatggggaccgcctcgtcgctcgtgagccccgcgggcggggaagtgatcgaggacacgtacggggcg

SEQ ID NO: 199751 - DNA, 120 bp, Artificial Sequence
  ENSG00000113971_1 (sequence is synthesized)
tcgaggacacgtacggggcgggcggcggcgaggcctgcgagatcccggtggaggtgaagcccaaggcccgcctgctgcgcaactcgttccgccgaggcgcgggggcggcagcaggggccg

SEQ ID NO: 199752 - DNA, 120 bp, Artificial Sequence
  ENSG00000113971_2 (sequence is synthesized)
ggggtgggcgcgggcgggctgctgggggccagcttcaagtccactggctcgtcggtgccagagctggagtacgcggcggccgagtacgagcggctcaggaaggagtacgagatctttcgc

SEQ ID NO: 199753 - DNA, 120 bp, Artificial Sequence
  ENSG00000113971_3 (sequence is synthesized)
gtcagcaagaaccaggagttgttgtccatgggccgccgcgaggccaagctggacacggagaacaagcggctgcgggccgaactgcaggcacttcaaaaaacgtatcagaagatacttcga

SEQ ID NO: 199754 - DNA, 120 bp, Artificial Sequence
  ENSG00000113971_4 (sequence is synthesized)
gaaaaagaaagtgctttagaagcgaaataccaagcaatggagagagcagcaacatttgaacatgacagagataaagttaaaaggcaattcaagatttttagggagaccaaagaaaatgaa

SEQ ID NO: 199755 - DNA, 120 bp, Artificial Sequence
  ENSG00000113971_5 (sequence is synthesized)
attcaggacttactgagggccaagagggagttggagagcaaacttcagaggctacaggctcagggtatccaagtatttgatcctggggagtctgattcagatgacaactgtacagatgtc

SEQ ID NO: 199756 - DNA, 120 bp, Artificial Sequence
  ENSG00000113971_6 (sequence is synthesized)
actgctgctggaacccaatgtgaatattggactggcggagccttgggaagtgaaccttccataggaagcatgatccagcttcagcagtccttcagaggccctgagtttgcccatagttct

SEQ ID NO: 199757 - DNA, 120 bp, Artificial Sequence
  ENSG00000113971_7 (sequence is synthesized)
atagatgtggaaggaccctttgcaaatgttaatagagatgactgggatattgctgtagctagtttattacaagttactcctctgttttcacattctctgtggagtaacactgtcagatgt

SEQ ID NO: 199758 - DNA, 120 bp, Artificial Sequence
  ENSG00000113971_8 (sequence is synthesized)
tacctcatttatacagatgaaacccagcctgagatggatcttttccttaaggactattcacctaaacttaagagaatgtgcgagacaatgggatattttttccatgctgtttattttcca

SEQ ID NO: 199759 - DNA, 120 bp, Artificial Sequence
  ENSG00000113971_9 (sequence is synthesized)
atagatgttgaaaatcaatacctcactgtaagaaaatgggaaattgagaaaagttctttagttattttatttattcacttaacattaccaagccttttattggaagactgtgaagaagct

SEQ ID NO: 199760 - DNA, 120 bp, Artificial Sequence
  ENSG00000113971_10 (sequence is synthesized)
tttctgaaaaaccctgaaggaaaacctcgattaatctttcatcgtttggaagatggaaaagtcagttctgactctgtccagcaattgattgatcaagtttctaatctaaacaagaccagc

SEQ ID NO: 199761 - DNA, 120 bp, Artificial Sequence
  ENSG00000113971_11 (sequence is synthesized)
aaagccaagatcattgatcactcaggagatcctgcagaaggagtatataaaacttatatttgtgtagaaaagattattaaacaggacatactgggttttgagaacacagacttggagact

SEQ ID NO: 199762 - DNA, 120 bp, Artificial Sequence
  ENSG00000113971_12 (sequence is synthesized)
aaggatttgggcagtgaggattccattccagaagaagatgattttggtgatgttctgtgggacatacatgatgaacaagagcaaatggaaacttttcagcaggcttctaattcagcccat

SEQ ID NO: 199763 - DNA, 120 bp, Artificial Sequence
  ENSG00000113971_13 (sequence is synthesized)
gagttgggatttgagaaatattaccaacgccttaatgatctagtggcagcaccagccccgattccacctcttctcgtgtctggaggaccaggttctgggaagtctcttcttttatcaaag

SEQ ID NO: 199764 - DNA, 120 bp, Artificial Sequence
  ENSG00000113971_14 (sequence is synthesized)
tggattcaattacaacagaagaattcccccaacacactgattctttcccattttgtgggaaggcccatgtcaaccagctcagagtcctccttgattattaaacgactaactctaaagttg

SEQ ID NO: 199765 - DNA, 120 bp, Artificial Sequence
  ENSG00000113971_15 (sequence is synthesized)
atgcagcactcttggtcagtctctgctctgacactggatcctgctaagcttctggaagaatttccacgttggctggaaaaactctctgctcgtcatcaaggcagcatcatcatcgttatt

SEQ ID NO: 199766 - DNA, 120 bp, Artificial Sequence
  ENSG00000113971_16 (sequence is synthesized)
gattctatagatcaagttcagcaagttgaaaaacacatgaaatggctgatagatccactgccagtgaatgtaagagtaattgtttctgtgaatgtagaaacatgccctccagcatggagg

SEQ ID NO: 199767 - DNA, 120 bp, Artificial Sequence
  ENSG00000113971_17 (sequence is synthesized)
ttgtggcctacacttcatcttgatcccttaagtccaaaagatgcaaaatctattataattgcagaatgccactctgtagacattaaattgagtaaagagcaggagaagaagctagaacga

SEQ ID NO: 199768 - DNA, 120 bp, Artificial Sequence
  ENSG00000113971_18 (sequence is synthesized)
cactgtcgttctgctacaacctgcaatgccctttatgtcacccttttcggcaaaatgatcgcgcgtgctgggagagcaggcaatttagataaaatccttcatcagtgtttccagtgtcaa

SEQ ID NO: 199769 - DNA, 120 bp, Artificial Sequence
  ENSG00000113971_19 (sequence is synthesized)
gatactctttcattatatagacttgttctgcactctatccgggagtccatggcaaatgatgtggataaagagctaatgaagcagatcctctgccttgtcaatgttagtcacaatggtgtg

SEQ ID NO: 199770 - DNA, 120 bp, Artificial Sequence
  ENSG00000113971_20 (sequence is synthesized)
agtgaatcagaactgatggaactctatcctgagatgtcctggactttcttgacctcccttattcacagtttatacaaaatgtgtttgttgacttatggatgtggcttgcttaggtttcaa

SEQ ID NO: 199771 - DNA, 120 bp, Artificial Sequence
  ENSG00000113971_21 (sequence is synthesized)
catctgcaggcttgggaaacagtgagattggagtacctggaaggccccactgttacttcttcatacaggcaaaagctaatcaactatttcaccttgcagctaagtcaggacagagtgact

SEQ ID NO: 199772 - DNA, 120 bp, Artificial Sequence
  ENSG00000113971_22 (sequence is synthesized)
ccttcttaatctctttgtgtctcaaaacctttataaaaggggacactttgctgagttgctgagttattggcagtttgttggcaaagacaaaagtgcaatggcaacagaatacttcgattc

SEQ ID NO: 199773 - DNA, 120 bp, Artificial Sequence
  ENSG00000113971_23 (sequence is synthesized)
attgaagcagtatgagaaaaactgcgaaggcgaggacaacatgagttgcttagctgatctttatgaaaccttggggcgatttctcaaggatctaggccttctcagtcaggccatagtacc

SEQ ID NO: 199774 - DNA, 120 bp, Artificial Sequence
  ENSG00000113971_24 (sequence is synthesized)
tttgcagaggtctttagagattcgagaaacagctttagatcccgatcacccaagagtagcccagtccctccaccaactagcaagtgtatacgtgcagtggaagaagtttggcaatgcaga

SEQ ID NO: 199775 - DNA, 120 bp, Artificial Sequence
  ENSG00000113971_25 (sequence is synthesized)
acaactgtataaacaggcgttggaaatctcagaaaatgcttatggtgcggaccatccatatactgctcgtgaacttgaagcacttgcaactttgtaccagaaacaaaataaatatgaaca

SEQ ID NO: 199776 - DNA, 120 bp, Artificial Sequence
  ENSG00000113971_26 (sequence is synthesized)
agctgaacattttaggaaaaaatcctttaaaattcatcagaaagctataaagaaaaaaggcaacttgtacggatttgcccttttacgtagacgggctttacagttagaagagcttacatt

SEQ ID NO: 199777 - DNA, 120 bp, Artificial Sequence
  ENSG00000113971_27 (sequence is synthesized)
aggtaaggacacacctgataatgctcggaccctcaatgaactgggtgttctctactatcttcaaaataacctggaaacagctgaccagtttctgaagcgttccttagaaatgagggagcg

SEQ ID NO: 199778 - DNA, 120 bp, Artificial Sequence
  ENSG00000113971_28 (sequence is synthesized)
agttctaggaccagatcaccctgactgtgctcagtctttgaataatctggcagctctatgcaatgaaaagaaacagtatgataaagcagaagaactttatgaaagagctttagatattcg

SEQ ID NO: 199779 - DNA, 120 bp, Artificial Sequence
  ENSG00000113971_29 (sequence is synthesized)
gagacgtgcattagctcctgatcacccttctttggcatatacggtgaagcatcttgccatcttgtataagaaaatggggaaacttgacaaagctgtacctttgtatgaattggctgttga

SEQ ID NO: 199780 - DNA, 120 bp, Artificial Sequence
  ENSG00000113971_30 (sequence is synthesized)
aattcgacagaaatcttttggcccaaagcaccctagtgtagctactgccttggtgaacttagctgttctttatagccaaatgaaaaaacacgttgaagctttgccattatatgaaagagc

SEQ ID NO: 199781 - DNA, 120 bp, Artificial Sequence
  ENSG00000113971_31 (sequence is synthesized)
attaaagatttatgaagatagcctgggtcggatgcatcctcgagttggagaaacactgaaaaatttagctgtgcttagctatgaaggaggagattttgaaaaagctgctgaattatacaa

SEQ ID NO: 199782 - DNA, 120 bp, Artificial Sequence
  ENSG00000113971_32 (sequence is synthesized)
aagggcaatggaaataaaagaagcagaaacatcactcttgggtggaaaagctccttcacgccattcatcaagtggagacacgtttagcttaaaaacagctcattctcctaatgttttcct

SEQ ID NO: 199783 - DNA, 120 bp, Artificial Sequence
  ENSG00000113971_33 (sequence is synthesized)
tcagcaaggacaaaggtaatagcagcagttagaattctttgcaaatgtaccttaagacaaaataattaaacatttggaacatttgaatttgaaactttaaaaaaatgttgtacgaaattt

SEQ ID NO: 199784 - DNA, 120 bp, Artificial Sequence
  ENSG00000113971_34 (sequence is synthesized)
tactacgtgtgatttaactgctatttgtatgaagttgtattggattacattaagttggaattgtgattatgtctgttttagttgtttaaaagaattttcctattatatggtatccaagga

SEQ ID NO: 199785 - DNA, 120 bp, Artificial Sequence
  ENSG00000113971_35 (sequence is synthesized)
tgtagacacattagaattataagaagacatgaggagcaaatcatgaagagcggattggtctttgttcaacaagagctggcagagtagttaagacaaggagttcaaaaattccatgaatct

SEQ ID NO: 199786 - DNA, 70 bp, Artificial Sequence
  ENSG00000113971_36 (sequence is synthesized)
agagtagttaagacaaggagttcaaaaattccatgaagtgatgcaggaggatcacttgaggccaggagtt

SEQ ID NO: 199787 - DNA, 66 bp, Artificial Sequence
  ENSG00000113971_37 (sequence is synthesized)
caagtggaggttgctatgagctgagattgtgccagttcattccaccctgggcaacagggtgagact

SEQ ID NO: 199788 - DNA, 82 bp, Artificial Sequence
  ENSG00000113971_38 (sequence is synthesized)
tgattcttttgagctctcaagagctactttagccttgccattcctcttgcttttcagcagtagtctggcccaattctctacc

SEQ ID NO: 199789 - DNA, 120 bp, Artificial Sequence
  ENSG00000113971_39 (sequence is synthesized)
cctcttgcttttcagcagtagtctggcccaattctctacctcaaaggaaagtttcaaggattaaagggttaatgtttatgaacgattcaaattgtcttcagtgaaacacattagtcacaa

SEQ ID NO: 199790 - DNA, 120 bp, Artificial Sequence
  ENSG00000113971_40 (sequence is synthesized)
gaatccctgattgctgcactttaaaaaattctttaccttttccttgagcagattggtccagtccctctgctttctgttctgtctacattgtgtattatttattactatatagtatatgta

SEQ ID NO: 199791 - DNA, 120 bp, Artificial Sequence
  ENSG00000113971_41 (sequence is synthesized)
tctgcataatgtctgaagtcattaatgcagtaacaggtcaagctctttagcattctttgacttttcccaaaatatagatatgacattctcctttatcttccttcttagatggcctaaatc

SEQ ID NO: 199792 - DNA, 120 bp, Artificial Sequence
  ENSG00000113971_42 (sequence is synthesized)
tgtctcttcatttacctcaaactcaaattagtatgccattttcatactgaaaattaaatatttttatggattttataaatattgcaacattttagatattgttttggaccatttgtgtat

SEQ ID NO: 199793 - DNA, 120 bp, Artificial Sequence
  ENSG00000113971_43 (sequence is synthesized)
ttatatataataaaatcatcaatttaatacttgtaagatcctaacatgtattgattgtaaaagtgaaatatgtaatagccacacttcactgttttaaaataaaagtgcaatttcaagttc

SEQ ID NO: 199794 - DNA, 120 bp, Artificial Sequence
  ENSG00000113971_44 (sequence is synthesized)
aactgtacagatgtcactgtatcattggaatctgaccaacatcctggaatttttattgctaacttttaaggaaaaaaaatgaaggccgggcacggtggcttatgcctgtaataccagcac

SEQ ID NO: 199795 - DNA, 120 bp, Artificial Sequence
  ENSG00000113971_45 (sequence is synthesized)
gagaacaagcggctgcgggccgaactgcagggtctcgctgcggtggcacgatcgcggctcactgcaacctggaactcctgggctcaatgatcctcccgcctcggcctcctaaagttctgg

SEQ ID NO: 199796 - DNA, 120 bp, Artificial Sequence
  ENSG00000113971_46 (sequence is synthesized)
gattacaggagtgagccaccgcgcctggtccccgcttttctatttctggtttattcattgaggcacctagaagaaattagccggaaagtgtcctgaggaggcaaatgccaatctccagct

SEQ ID NO: 199797 - DNA, 120 bp, Artificial Sequence
  ENSG00000113971_47 (sequence is synthesized)
ccactgccgcccccgcgcccaccccctcagaaggctggtgacatctgttgaagcaactcagcaaactcttcctaggagtttcacccccctccccaccataaaaattttaagtgggtctcc

SEQ ID NO: 199798 - DNA, 120 bp, Artificial Sequence
  ENSG00000113971_48 (sequence is synthesized)
ttatatatagtaaaataaacccaatgactctagcagccccataaaactaccactttcctttatcatgttttattgaatttgttattggttgcagtacaaaaaatagagttcacgttgttt

SEQ ID NO: 199799 - DNA, 120 bp, Artificial Sequence
  ENSG00000113971_49 (sequence is synthesized)
ttaatcgatctcaaaattttcacagatgttggcaatctgtaagaaattaaatctcttctcgattccaacagtgctgggagagcaggcaatttagataaaatccttcatcagtgtttccag

SEQ ID NO: 199800 - DNA, 120 bp, Artificial Sequence
  ENSG00000113971_50 (sequence is synthesized)
ggagaaacactgaaaaatttagctgtgcttaggtaagaatttttttcactttccttatacagcctcttttattcgaagtagctttgtcttagaatagcacaaaatatgtattactgaatg

SEQ ID NO: 199801 - DNA, 120 bp, Artificial Sequence
  ENSG00000113971_51 (sequence is synthesized)
ttttttcttagagtggggaggggttgttttttgctgactgacttcaagaagtactgaagtagtatccagaaatgaaatgaagcctgcatgatctattttgcagaggagcatatgtatgca

SEQ ID NO: 199802 - DNA, 120 bp, Artificial Sequence
  ENSG00000113971_52 (sequence is synthesized)
tcatggcaaacagtgaaggatggtttatactacatctggctctgggagtaatatgggtaatttgctgtccccagagtgaagttgccattaagtatatgttgacttttgcttgctcatttg

SEQ ID NO: 199803 - DNA, 120 bp, Artificial Sequence
  ENSG00000113971_53 (sequence is synthesized)
tatttttctcaggatgcagagaatacctaactttgcttagcaatttcactgcctctattacaacatggttttaatgatatccatatgagacacaaaaatactgatactggtagaaaggag

SEQ ID NO: 199804 - DNA, 120 bp, Artificial Sequence
  ENSG00000113971_54 (sequence is synthesized)
ttgttttactggtctgcttgagtgaatacactggaaaaagaggggaaatgggcaaatatttacagcttctttttctgtatcccataaggtcattttgaattggtaagaggttatattctc

SEQ ID NO: 199805 - DNA, 120 bp, Artificial Sequence
  ENSG00000113971_55 (sequence is synthesized)
aataatgaaaataattaaccattttctctttgatgcaatgctgttttacatttttgtcaagtctaaagctagaaaaaaaatgataaaaaccacgcaaaatttcatgtatgatgttatata

SEQ ID NO: 199806 - DNA, 120 bp, Artificial Sequence
  ENSG00000113971_56 (sequence is synthesized)
aaaaaccacgcaaaatttcatgtatgatgttatataatgagcatacacatacctaaagaccatggcattttctctactgtgtttcttttcacactcttttttttttttttgagacggagt

SEQ ID NO: 199807 - DNA, 120 bp, Artificial Sequence
  ENSG00000113971_57 (sequence is synthesized)
tttcttaactgaaaagttattctgtagcttccctggtgtattttatatatttatgaaaagtgagtttgtgtagatattgtgcataagatctcacagaagcagcagcttgggactaatggt

SEQ ID NO: 199808 - DNA, 120 bp, Artificial Sequence
  ENSG00000113971_58 (sequence is synthesized)
aaataatgtagacggtttctagttttgtcagtttatttgggcaaaaggattcaaaatgacatttatatttatatgttataaaaagtatttttggacttcatatatcagaaaaatataaca

SEQ ID NO: 199809 - DNA, 120 bp, Artificial Sequence
  ENSG00000113971_59 (sequence is synthesized)
aatttgaaactttggatgtcagaaaagtataataaatctgtagcccacttacagaaacttatataaaaaataatgatttattcttttgttaaaaattatttagtactggctgggcatgat

SEQ ID NO: 199810 - DNA, 120 bp, Artificial Sequence
  ENSG00000113971_60 (sequence is synthesized)
tttgttaaaaattatttagtactggctgggcatgatagctcatgcctgtaatcccagagctttaggaggctgaggcattaggatcacttgaagccaggaattcaagaccagcctgggcaa

SEQ ID NO: 199811 - DNA, 78 bp, Artificial Sequence
  ENSG00000113971_61 (sequence is synthesized)
gtgagaccctgtctctacaaaaaaaattaataaattagccagacatggtggtacacacctgtagacccagctacttga

SEQ ID NO: 199812 - DNA, 120 bp, Artificial Sequence
  ENSG00000113971_62 (sequence is synthesized)
aaaaatcttttattggacctaggtctaataatttttaaagtataaaagtttgttttggaaaatatctatcagtttttctttcagaagtggagaattgaggcaatcatccacacattttag

SEQ ID NO: 199813 - DNA, 120 bp, Artificial Sequence
  ENSG00000113971_63 (sequence is synthesized)
gccctcaaactgtcaggaaaagggcaggaagagataggggtggggaagagggggaaagtaagattttgagctgaatctcttattttaactagaatctaagaataaagatgagtcagttct

SEQ ID NO: 199814 - DNA, 120 bp, Artificial Sequence
  ENSG00000113971_64 (sequence is synthesized)
ccacttaatttaggggtcaggattccaaactctagaaaatagatagtttaagccattttgggattgtgttcacagaacagctgaccagtttctgaagcgttccttagaaatgagggagcg

SEQ ID NO: 199815 - DNA, 120 bp, Artificial Sequence
  ENSG00000113971_65 (sequence is synthesized)
gtacttcctgctgcaaagagtttatgtcctaataaattatgaatatttttatatttatgtgtgttagtaacagtctgcctttgaggttttttccttcagattttaactggtgtctaagct

SEQ ID NO: 199816 - DNA, 120 bp, Artificial Sequence
  ENSG00000113971_66 (sequence is synthesized)
gtacagttggaaatgttttttagaatttttttttgtaaaatgtttttaacttccttcttattatgatttcttttttattgtattcttgtttattttcatctttctctttttaatcctctc

SEQ ID NO: 199817 - DNA, 120 bp, Artificial Sequence
  ENSG00000113971_67 (sequence is synthesized)
tttgaatttgagatgataaccagaattatgttaatcagtatctttgaactttgccaaaagtcgatggcaaagtattttcaaaatcatttgaatatttgtaatattttcatattttttaaa

SEQ ID NO: 199818 - DNA, 62 bp, Artificial Sequence
  ENSG00000113971_68 (sequence is synthesized)
tgccgaacctggatctatttttatgttaacttttcagcttggtggttcccagggtttggact

SEQ ID NO: 199819 - DNA, 120 bp, Artificial Sequence
  ENSG00000113971_69 (sequence is synthesized)
atgttaacttttcagcttggtggttcccagggtttggacttctcagcccactccaagcccacaagcttcctcgtattctctccacgtctgtgggctaatgtttttctcatgcaccccttc

SEQ ID NO: 199820 - DNA, 120 bp, Artificial Sequence
  ENSG00000113971_70 (sequence is synthesized)
actgagggtgaaggtccttcaaagcccttcaaagatcctggtgttgacaagaaatctaattctacctccttgcctcacacagcttaagggctcaccttccatcccactgtggctgtgaaa

SEQ ID NO: 199821 - DNA, 120 bp, Artificial Sequence
  ENSG00000113971_71 (sequence is synthesized)
gctccactgcccccatagccagcagttccagccctttacactctgacttcaatttcctattcatttttggcagttggaggatttccctttatttatctaaaaactgtgcttttagaaatg

SEQ ID NO: 199822 - DNA, 120 bp, Artificial Sequence
  ENSG00000113971_72 (sequence is synthesized)
tgtctgatattcatacgtgtttataataggagggctattttcttccactgtcttcctggaattggaattctgccattaattataataatacattttatgcagttttaattttcactgtac

SEQ ID NO: 199823 - DNA, 120 bp, Artificial Sequence
  ENSG00000113971_73 (sequence is synthesized)
ttttttctgtaagagtgttatctttggtgtgctagattttatatatacactatcttaatcttcattaatgtcttttggacagtgtgttttaataaatctgtttcttgatttattaaatca

SEQ ID NO: 199824 - DNA, 120 bp, Artificial Sequence
  ENSG00000113971_74 (sequence is synthesized)
tttgaattataagttttggtaaaaagaaatagccttaaaagaattatggaacttttaatggccgttagttacttatacaggtgctttatgattactgttaatttgtttttctacctagat

SEQ ID NO: 199825 - DNA, 120 bp, Artificial Sequence
  ENSG00000114013_0 (sequence is synthesized)
agtcattgccgaggaaggcttgcacagggtgaaagctttgcttctctgctgctgtaacagggactagcacagacacacggatgagtggggtcatttccagatattaggtcacagcagaag

SEQ ID NO: 199826 - DNA, 120 bp, Artificial Sequence
  ENSG00000114013_1 (sequence is synthesized)
cagccaaaatggatccccagtgcactatgggactgagtaacattctctttgtgatggccttcctgctctctggtgctgctcctctgaagattcaagcttatttcaatgagactgcagacc

SEQ ID NO: 199827 - DNA, 120 bp, Artificial Sequence
  ENSG00000114013_2 (sequence is synthesized)
tgccatgccaatttgcaaactctcaaaaccaaagcctgagtgagctagtagtattttggcaggaccaggaaaacttggttctgaatgaggtatacttaggcaaagagaaatttgacagtg

SEQ ID NO: 199828 - DNA, 120 bp, Artificial Sequence
  ENSG00000114013_3 (sequence is synthesized)
ttcattccaagtatatgggccgcacaagttttgattcggacagttggaccctgagacttcacaatcttcagatcaaggacaagggcttgtatcaatgtatcatccatcacaaaaagccca

SEQ ID NO: 199829 - DNA, 120 bp, Artificial Sequence
  ENSG00000114013_4 (sequence is synthesized)
caggaatgattcgcatccaccagatgaattctgaactgtcagtgcttgctaacttcagtcaacctgaaatagtaccaatttctaatataacagaaaatgtgtacataaatttgacctgct

SEQ ID NO: 199830 - DNA, 120 bp, Artificial Sequence
  ENSG00000114013_5 (sequence is synthesized)
catctatacacggttacccagaacctaagaagatgagtgttttgctaagaaccaagaattcaactatcgagtatgatggtgttatgcagaaatctcaagataatgtcacagaactgtacg

SEQ ID NO: 199831 - DNA, 120 bp, Artificial Sequence
  ENSG00000114013_6 (sequence is synthesized)
acgtttccatcagcttgtctgtttcattccctgatgttacgagcaatatgaccatcttctgtattctggaaactgacaagacgcggcttttatcttcacctttctctatagagcttgagg

SEQ ID NO: 199832 - DNA, 120 bp, Artificial Sequence
  ENSG00000114013_7 (sequence is synthesized)
accctcagcctcccccagaccacattccttggattacagctgtacttccaacagttattatatgtgtgatggttttctgtctaattctatggaaatggaagaagaagaagcggcctcgca

SEQ ID NO: 199833 - DNA, 120 bp, Artificial Sequence
  ENSG00000114013_8 (sequence is synthesized)
actcttataaatgtggaaccaacacaatggagagggaagagagtgaacagaccaagaaaagagaaaaaatccatatacctgaaagatctgatgaagcccagcgtgtttttaaaagttcga

SEQ ID NO: 199834 - DNA, 120 bp, Artificial Sequence
  ENSG00000114013_9 (sequence is synthesized)
agacatcttcatgcgacaaaagtgatacatgtttttaattaaagagtaaagcccatacaagtattcattttttctaccctttcctttgtaagttcctgggcaacctttttgatttcttcc

SEQ ID NO: 199835 - DNA, 120 bp, Artificial Sequence
  ENSG00000114013_10 (sequence is synthesized)
agaaggcaaaaagacattaccatgagtaataagggggctccaggactccctctaagtggaatagcctccctgtaactccagctctgctccgtatgccaagaggagactttaattctctta

SEQ ID NO: 199836 - DNA, 120 bp, Artificial Sequence
  ENSG00000114013_11 (sequence is synthesized)
aatacctcctccagatcagattcttctcttaatttcatagattgtgttttttttttaaatagacctctcaatttctggaaaactgccttttatctgcccagaattctaagctggtgcccc

SEQ ID NO: 199837 - DNA, 120 bp, Artificial Sequence
  ENSG00000114013_12 (sequence is synthesized)
actgaattttgtgtgtacctgtgactaaacaactacctcctcagtctgggtgggacttatgtatttatgaccttatagtgttaatatcttgaaacatagagatctatgtactgtaatagt

SEQ ID NO: 199838 - DNA, 120 bp, Artificial Sequence
  ENSG00000114013_13 (sequence is synthesized)
gtgattactatgctctagagaaaagtctacccctgctaaggagttctcatccctctgtcagggtcagtaaggaaaacggtggcctagggtacaggcaacaatgagcagaccaacctaaat

SEQ ID NO: 199839 - DNA, 120 bp, Artificial Sequence
  ENSG00000114013_14 (sequence is synthesized)
ttggggaaattaggagaggcagagatagaacctggagccacttctatctgggctgttgctaatattgaggaggcttgccccacccaacaagccatagtggagagaactgaataaacagga

SEQ ID NO: 199840 - DNA, 120 bp, Artificial Sequence
  ENSG00000114013_15 (sequence is synthesized)
aaatgccagagcttgtgaaccctgtttctcttgaagaactgactagtgagatggcctggggaagctgtgaaagaaccaaaagagatcacaatactcaaaagagagagagagagaaaaaag

SEQ ID NO: 199841 - DNA, 120 bp, Artificial Sequence
  ENSG00000114013_16 (sequence is synthesized)
agagatcttgatccacagaaatacatgaaatgtctggtctgtccaccccatcaacaagtcttgaaacaagcaacagatggatagtctgtccaaatggacataagacagacagcagtttcc

SEQ ID NO: 199842 - DNA, 120 bp, Artificial Sequence
  ENSG00000114013_17 (sequence is synthesized)
ctggtggtcagggaggggttttggtgatacccaagttattgggatgtcatcttcctggaagcagagctggggagggagagccatcaccttgataatgggatgaatggaaggaggcttagg

SEQ ID NO: 199843 - DNA, 120 bp, Artificial Sequence
  ENSG00000114013_18 (sequence is synthesized)
actttccactcctggctgagagaggaagagctgcaacggaattaggaagaccaagacacagatcacccggggcttacttagcctacagatgtcctacgggaacgtgggctggcccagcat

SEQ ID NO: 199844 - DNA, 120 bp, Artificial Sequence
  ENSG00000114013_19 (sequence is synthesized)
agggctagcaaatttgagttggatgattgtttttgctcaaggcaaccagaggaaacttgcatacagagacagatatactgggagaaatgactttgaaaacctggctctaaggtgggatca

SEQ ID NO: 199845 - DNA, 120 bp, Artificial Sequence
  ENSG00000114013_20 (sequence is synthesized)
ctaagggatggggcagtctctgcccaaacataaagagaactctggggagcctgagccacaaaaatgttcctttattttatgtaaaccctcaagggttatagactgccatgctagacaagc

SEQ ID NO: 199846 - DNA, 120 bp, Artificial Sequence
  ENSG00000114013_21 (sequence is synthesized)
ttgtccatgtaatattcccatgtttttaccctgcccctgccttgattagactcctagcacctggctagtttctaacatgttttgtgcagcacagtttttaataaatgcttgttacattca

SEQ ID NO: 199847 - DNA, 120 bp, Artificial Sequence
  ENSG00000114013_22 (sequence is synthesized)
ccctttctgtatttgagttctaccgtcagtcctggcattatttctctctctacaaggagccttaggaggtacggggagctcgcaaatactccttttggtttattcttaccaccttgcttc

SEQ ID NO: 199848 - DNA, 120 bp, Artificial Sequence
  ENSG00000114013_23 (sequence is synthesized)
gaaggaagtgttatgattgagagcagctgatggcaggcagctgggatggagctctcccccccgtgtgcttcttcctcctctgcagtctcacatcagtgagcctagatgctcagagtaggg

SEQ ID NO: 199849 - DNA, 120 bp, Artificial Sequence
  ENSG00000114013_24 (sequence is synthesized)
tagcctggcccatcccatggggatgggggaaggctgctgcactgaggcccctgagacttgactcttttgttccacacatattctcttctggtcttctctgaccctgtttctgtctttctc

SEQ ID NO: 199850 - DNA, 120 bp, Artificial Sequence
  ENSG00000114013_25 (sequence is synthesized)
aggctcctaggaaacaactgacagaattccaaaagtctcccttcattcggagcactggctttcacgtccctgacttccctaccctctctcactcccttccctacagcccatgcacatacc

SEQ ID NO: 199851 - DNA, 120 bp, Artificial Sequence
  ENSG00000114013_26 (sequence is synthesized)
tgctctctggtaagaacctttcagctttgttaagtcctggaatcctactgtctcctgatgagtctgaccacagcaagcccaggcctgagacttggtgctgctcctctgaagattcaagct

SEQ ID NO: 199852 - DNA, 120 bp, Artificial Sequence
  ENSG00000114019_0 (sequence is synthesized)
cggagggcggaggagggcggtgcgctgagaggttatttgtggttcgctttgatcccgagggggaacctgaaactctcacattcctggcatagcagccgcctccggcgcgggccgaccctg

SEQ ID NO: 199853 - DNA, 120 bp, Artificial Sequence
  ENSG00000114019_1 (sequence is synthesized)
gggctgcgcgctggggcgcgaacagccagagcgtcggcgccacggccgagaacacatcttcgccgccgagctgagctgggccgagccggaggttgtggtgtctgactgcgctgggcaccc

SEQ ID NO: 199854 - DNA, 120 bp, Artificial Sequence
  ENSG00000114019_2 (sequence is synthesized)
tcgggccgcagcggtgctctggggccaggtgccaccggccattgtccaggcagctgtgtgcaagccaaagaagcatgaggacactggaagactcctcggggacagtcctgcaccgcctca

SEQ ID NO: 199855 - DNA, 120 bp, Artificial Sequence
  ENSG00000114019_3 (sequence is synthesized)
tccaggagcagctgcgctacggcaacctgactgagacgcgcacgctgctagccatccagcagcaggccctgaggggtggggctggaactgggggtacagggagcccccaggcctccctgg

SEQ ID NO: 199856 - DNA, 120 bp, Artificial Sequence
  ENSG00000114019_4 (sequence is synthesized)
agatcctggccccagaggacagtcaggtgctgcagcaggccaccaggcaggagccccagggccaggagcaccagggcggtgagaaccacctggcagagaacaccctctaccggctatgcc

SEQ ID NO: 199857 - DNA, 120 bp, Artificial Sequence
  ENSG00000114019_5 (sequence is synthesized)
cacagcccagcaagggagaggagctgcccacctatgaggaggccaaagcccactcgcagtactatgcggcccagcaggcagggacccggccacatgcgggggaccgagatccccgtgggg

SEQ ID NO: 199858 - DNA, 120 bp, Artificial Sequence
  ENSG00000114019_6 (sequence is synthesized)
ccccgggaggcagtcggaggcaggacgaggccctgcgggagctgaggcatgggcacgtgcgctcgttgagtgaacggctccttcagttgtccctggagaggaacggcgcccgggccccca

SEQ ID NO: 199859 - DNA, 120 bp, Artificial Sequence
  ENSG00000114019_7 (sequence is synthesized)
gccacatgagctcctcccacagcttcccacagctggcccgcaaccagcagggccccccactgaggggcccccctgctgagggcccagagtcccgaggacccccacctcagtaccctcatg

SEQ ID NO: 199860 - DNA, 120 bp, Artificial Sequence
  ENSG00000114019_8 (sequence is synthesized)
ttgtactagctcatgagaccaccactgctgtcactgacccacggtaccgtgcccgcggcagcccgcacttccagcatgctgaagtcaggatcctgcaggcccaggtgcctcctgtgttcc

SEQ ID NO: 199861 - DNA, 120 bp, Artificial Sequence
  ENSG00000114019_9 (sequence is synthesized)
tccaacagcagcagcagtaccagtacctgcagcaatctcaggagcacccccctcccccacatccagctgctctcggccatggccccctgagctccctcagtccacctgctgtggaggggc

SEQ ID NO: 199862 - DNA, 120 bp, Artificial Sequence
  ENSG00000114019_10 (sequence is synthesized)
cagtgagtgcccaggcctcctcagccacctcgggcagtgcccacctggcccagatggaggccgtgctgagggagaatgccaggctgcagagagacaatgagcggctgcagagggagctgg

SEQ ID NO: 199863 - DNA, 120 bp, Artificial Sequence
  ENSG00000114019_11 (sequence is synthesized)
agagctctgcggagaaggctggccgcattgagaagctggaaagcgaaatccagcggctctctgaggcccatgagagcctgaccagagcctcctccaagcgtgaggccctggagaagacca

SEQ ID NO: 199864 - DNA, 120 bp, Artificial Sequence
  ENSG00000114019_12 (sequence is synthesized)
tgcggaacaagatggacagtgaaatgaggaggctgcaagacttcaaccgggatcttagagagagattggaatctgcaaatcgccgcctggcaagcaagacacaggaggcccaggccggca

SEQ ID NO: 199865 - DNA, 120 bp, Artificial Sequence
  ENSG00000114019_13 (sequence is synthesized)
gtcaggacatggtggccaagctgcttgctcagagctacgaacagcagcaggagcaagagaagctggagcgagagatggcactgctgcgcggcgccatcgaggaccagcggcggcgtgccg

SEQ ID NO: 199866 - DNA, 120 bp, Artificial Sequence
  ENSG00000114019_14 (sequence is synthesized)
agctgctggagcaggctctgggcaatgcgcagggccgggcagctcgagccgaagaggagctgcgcaagaagcaggcctatgtggagaaagtggagcggctgcagcaggcgctcgggcagc

SEQ ID NO: 199867 - DNA, 120 bp, Artificial Sequence
  ENSG00000114019_15 (sequence is synthesized)
tgcaggcagcctgtgagaagcgggagcagctggagctgcgtctgcggactcgcctggagcaggaactcaaggccctgcgtgcacagcagagacaggcaggtgccccaggtggtagcagtg

SEQ ID NO: 199868 - DNA, 120 bp, Artificial Sequence
  ENSG00000114019_16 (sequence is synthesized)
gcagtggtgggtctccagagctcagcgccctgcgactgtcagaacaactgcgagagaaggaggagcagatcctggcgctggaggccgacatgaccaagtgggagcagaagtatttggagg

SEQ ID NO: 199869 - DNA, 120 bp, Artificial Sequence
  ENSG00000114019_17 (sequence is synthesized)
aacgtgccatgaggcagtttgccatggatgcggctgccacggctgctgctcagcgtgacaccactctcatccgacattccccccagccctcacccagcagcagcttcaatgagggtctgc

SEQ ID NO: 199870 - DNA, 120 bp, Artificial Sequence
  ENSG00000114019_18 (sequence is synthesized)
tccatgcccagatcctggagaaggatgcagtgatcaaggtccttcagcagcgctccaggagagaccctggcaaggccatccagggctccctgcggcctgccaagtcggtgccatctgttt

SEQ ID NO: 199871 - DNA, 120 bp, Artificial Sequence
  ENSG00000114019_19 (sequence is synthesized)
tcgcggctgcggcagcaggaacccagggctggcaagggctctcttctagtgagcgacaaacagcagacgcccctgctcggctgactacagcagacagagcacccacagaggagccagtgg

SEQ ID NO: 199872 - DNA, 120 bp, Artificial Sequence
  ENSG00000114019_20 (sequence is synthesized)
tcacagctccccctgctgcccatgccaaacacgggagcagagatgggagcacccagactgagggccccccagacagcacctccacctgcctgccaccggagcctgacagccttctggggt

SEQ ID NO: 199873 - DNA, 120 bp, Artificial Sequence
  ENSG00000114019_21 (sequence is synthesized)
gcagcagtagccagagagcagcctctctggactctgtagctacatccagagtccaggacttgtcagacatggtggagatactgatctgaaggaggtggtgcttcaggactctgagccatt

SEQ ID NO: 199874 - DNA, 120 bp, Artificial Sequence
  ENSG00000114019_22 (sequence is synthesized)
ctctcccctcctctgccctgtgccactctcagccatttcagcagccccgtcaaccgctgctccgtccctttccccagccagacactcattcccattgaccatctggtcccaggagctcag

SEQ ID NO: 199875 - DNA, 120 bp, Artificial Sequence
  ENSG00000114019_23 (sequence is synthesized)
gaggaggaccccaggggagaggagagctgtgagagcaccggcacccccagaagactctgcttcttagcccacattcctccgggccttatggagaatgaggattcagccttgacttcttgc

SEQ ID NO: 199876 - DNA, 120 bp, Artificial Sequence
  ENSG00000114019_24 (sequence is synthesized)
ccaaggcctgctactggggtagcaactgacagctcagaaaggagctgagctccctctgccctgccagttgtcagtcaggcagggagggagtggctgtgttggtttggggaactaatttcc

SEQ ID NO: 199877 - DNA, 120 bp, Artificial Sequence
  ENSG00000114019_25 (sequence is synthesized)
acggacggctgcccgtggacaccaggtggactggttcactaatcaagtcagccatattgttctctggctaagtttggttccagccaacgtcatctgctcttcagttcctcactgccttct

SEQ ID NO: 199878 - DNA, 120 bp, Artificial Sequence
  ENSG00000114019_26 (sequence is synthesized)
tgggatactaagacttgaattttttggggactattaagggtgttagtcttggagaagacacagcctcaccttctcacttgctgtgggtgaggggccatttaagtggactgggagacagtg

SEQ ID NO: 199879 - DNA, 120 bp, Artificial Sequence
  ENSG00000114019_27 (sequence is synthesized)
cgcagtttgtatataattccctttcttgtggaacagaagactgaggcctgcaggttccgatgtgtctccatgggctgtgctcccctcttcctactgtcagtttctgaaacttctgactgg

SEQ ID NO: 199880 - DNA, 120 bp, Artificial Sequence
  ENSG00000114019_28 (sequence is synthesized)
cctcccagttatgcctcctcctcaagttcctggcccgtggatgttaaagctgctcgattcccaggatctcggctgccttttcctctatcttgagccctataaatgcccacgggaccccca

SEQ ID NO: 199881 - DNA, 120 bp, Artificial Sequence
  ENSG00000114019_29 (sequence is synthesized)
ccaccagcctcttgaagtggctccacagctcctgtccctggaacatcctgtcagtttggtcataaaccctgagccagatgaaatgagccaccgtgaacagacatctgccatgcccccagg

SEQ ID NO: 199882 - DNA, 120 bp, Artificial Sequence
  ENSG00000114019_30 (sequence is synthesized)
tgggcttcggtggccctacccggtaccagttctttctgagaaactggagatgtcttgttagcataagtgtcttcattcccacctggagggtttgggagaggagcaaagcagttgaaaact

SEQ ID NO: 199883 - DNA, 120 bp, Artificial Sequence
  ENSG00000114019_31 (sequence is synthesized)
agttaatgagctacaagagtcaaatagtcctctgaatggagcccccatcacaaaacagtgcccaggaggctggctcctcaagctacccatgcccagcgccctaaagcagcaccagatgct

SEQ ID NO: 199884 - DNA, 120 bp, Artificial Sequence
  ENSG00000114019_32 (sequence is synthesized)
ttggaattggggtgaaacacccacatggcagcctgctagcagcagtgactttgacttctggtcttaaagagtccctcacttcagccccaggagctattggtgggttttagcagttttgtc

SEQ ID NO: 199885 - DNA, 120 bp, Artificial Sequence
  ENSG00000114019_33 (sequence is synthesized)
tttaccgtttttagttctccttgattctttgttttcttcctttatcgtttttaggtttggtatgtgttgttttatttccatggttcctcaagtttcctttttaaacatttgcatttgctg

SEQ ID NO: 199886 - DNA, 120 bp, Artificial Sequence
  ENSG00000114019_34 (sequence is synthesized)
gacaattgcaattttttttaaaaaattcccctacccctgtttaaagctgaaaaatacatttggttcatgtgcattgtttacaaagcaaaaagaaaaaagaggaaaaaaaggcaaaaaata

SEQ ID NO: 199887 - DNA, 120 bp, Artificial Sequence
  ENSG00000114019_35 (sequence is synthesized)
ttgtgaaagaaaaaaaacaacttaatatattttggattaatatttggtatttcttttaaagtattttttgtgctgtgaacattttctgccaaagaccatgatgtgtgtctgtatgtttaa

SEQ ID NO: 199888 - DNA, 120 bp, Artificial Sequence
  ENSG00000114019_36 (sequence is synthesized)
gttatcgtaaatatttaaaatgtaaacatggctgttttgttatgccaccctgtaccaggattgctgccgcattccactgggtataacagtattttaattaaaaaaaaataattaaaagtg

SEQ ID NO: 199889 - DNA, 120 bp, Artificial Sequence
  ENSG00000114019_37 (sequence is synthesized)
aagagggctcgagagggagggaggcggacccgcgatgcttaaagacctctccgggcctcgggctaccctcaccggctcgccccaggcgtaccagcggccaccggtgctccaggtccgccc

SEQ ID NO: 199890 - DNA, 120 bp, Artificial Sequence
  ENSG00000114019_38 (sequence is synthesized)
gggctcgtggtggggcgggagccctggctggggtgccagaacctcctagcttggagactgtctttggttccttaggcgagcaggagcccaggccaaggctggagacgcgcgctggcttag

SEQ ID NO: 199891 - DNA, 120 bp, Artificial Sequence
  ENSG00000114019_39 (sequence is synthesized)
gatagccagggaggggttttgagaatgagaaaccaagcagcccagtggttgattacctggttctcactgtgtgtgactctgggcacgctgcttaagctctctgagccctggtgtcctcat

SEQ ID NO: 199892 - DNA, 120 bp, Artificial Sequence
  ENSG00000114019_40 (sequence is synthesized)
ttacaacacagggatgataacagaactccgttggagggtgcttggcagggctgaatcggatgactgggcgaaaagccagcggtggcacaccttgcactctgcgtaaaggggcgcctatta

SEQ ID NO: 199893 - DNA, 120 bp, Artificial Sequence
  ENSG00000114019_41 (sequence is synthesized)
cttttccgggagtcggagcctcgaggatcgagcgtcctcggggcgcagtgcgccctttcgaggcagccgcagtgcctggcaagggccgctctgcccagggagcgcagcgcgctgggcttt

SEQ ID NO: 199894 - DNA, 120 bp, Artificial Sequence
  ENSG00000114019_42 (sequence is synthesized)
gcggggctctagaaacgcgcgggtctcttggggctgggggagaggggagagggccgactccggagacaacagccacagtgtttcgggttgcaggaatagtaagtctccatgaatgttatc

SEQ ID NO: 199895 - DNA, 120 bp, Artificial Sequence
  ENSG00000114019_43 (sequence is synthesized)
aggtcaaaccaccccatcatggctggagtctttcggtgcccacttctggccaactgtactcagtttcttggtggaagccagccaagagtagaatgtttccttctggacactgggcacagg

SEQ ID NO: 199896 - DNA, 120 bp, Artificial Sequence
  ENSG00000114019_44 (sequence is synthesized)
gaagctgtgtttagtcaccccgcaggcagctacttccaaagtacctggccctgggttcactcagcatctggtccttggggcagccgatgggaccgttgcttgctggtcccagcagtctat

SEQ ID NO: 199897 - DNA, 120 bp, Artificial Sequence
  ENSG00000114019_45 (sequence is synthesized)
tctacttccggaggctacaagcttctgaccatcccaccatagtcacctggaggttttgctcctgtttggtggcctctcatctgtcaccttttctgatggagagtagtgggtcagcctcga

SEQ ID NO: 199898 - DNA, 120 bp, Artificial Sequence
  ENSG00000114019_46 (sequence is synthesized)
cgagagggagggaggcggacccgcgatgcttaaagacctctccgggcctcgggctaccctcaccggctcgccccaggcgtaccagcggccaccggtgctccaggcgagcaggagcccagg

SEQ ID NO: 199899 - DNA, 120 bp, Artificial Sequence
  ENSG00000114019_47 (sequence is synthesized)
agggctcgagagggagggaggcggacccgcgatgcttaaagacctctccgggcctcgggctaccctcaccggctcgccccaggcgtaccagcggccaccggtgctccaggtgctctgggg

SEQ ID NO: 199900 - DNA, 120 bp, Artificial Sequence
  ENSG00000114021_0 (sequence is synthesized)
agtccgcgccgcaggtggtgcttgtctgcagagtcatgacctctttccgcttggccctcatccagcttcagatttcttccatcaaatcagataacgtcactcgcgcttgtagcttcatcc

SEQ ID NO: 199901 - DNA, 120 bp, Artificial Sequence
  ENSG00000114021_1 (sequence is synthesized)
gggaggcagcaacgcaaggagccaaaatagtttctttgccggaatgctttaattctccatatggagcgaaatattttcctgaatatgcagagaaaattcctggtgaatccacacagaagc

SEQ ID NO: 199902 - DNA, 120 bp, Artificial Sequence
  ENSG00000114021_2 (sequence is synthesized)
tttctgaagtagcaaaggaatgcagcatatatctcattggaggctctatccctgaagaggatgctgggaaattatataacacctgtgctgtgtttgggcctgatggaactttactagcaa

SEQ ID NO: 199903 - DNA, 120 bp, Artificial Sequence
  ENSG00000114021_3 (sequence is synthesized)
agtatagaaagatccatctgtttgacattgatgttcctggaaaaattacatttcaagaatctaaaacattgagtccgggtgatagtttctccacatttgatactccttactgcagagtgg

SEQ ID NO: 199904 - DNA, 120 bp, Artificial Sequence
  ENSG00000114021_4 (sequence is synthesized)
gtctgggcatctgctacgacatgcggtttgcagagcttgcacaaatctacgcacagagaggctgccagctgttggtatatccaggagcttttaatctgaccactggaccagcccattggg

SEQ ID NO: 199905 - DNA, 120 bp, Artificial Sequence
  ENSG00000114021_5 (sequence is synthesized)
agttacttcagcgaagccgggctgttgataatcaggtgtatgtggccacagcctctcctgcccgggatgacaaagcctcctatgttgcctggggacacagcaccgtggtgaacccttggg

SEQ ID NO: 199906 - DNA, 120 bp, Artificial Sequence
  ENSG00000114021_6 (sequence is synthesized)
gggaggttctagccaaagctggcacagaagaagcaatcgtgtattcagacatagacctgaagaagctggctgaaatacgccagcaaatccccgtttttagacagaagcgatcagacctct

SEQ ID NO: 199907 - DNA, 120 bp, Artificial Sequence
  ENSG00000114021_7 (sequence is synthesized)
atgctgtggagatgaaaaagccctaaagtttatgtttctaatgtgtcacagaataggacgatatgattctacaacataatcaactccctattaaattctttaatgaagatttttttttta

SEQ ID NO: 199908 - DNA, 120 bp, Artificial Sequence
  ENSG00000114021_8 (sequence is synthesized)
attcggccttgtccttcctaggttctctattgagatgagaaagcctcattatgctgacattttccacgccacattaaatagttaaaaaggatgcagcctggagccagagagcagaaagct

SEQ ID NO: 199909 - DNA, 120 bp, Artificial Sequence
  ENSG00000114021_9 (sequence is synthesized)
gggctggttctgaagcttcttccatacttaagttgcctccaagcagtttgtgaaagtatcagatcttggtatcctggtgattgattcacctaatataaatatatttgtgtcatgaacctc

SEQ ID NO: 199910 - DNA, 120 bp, Artificial Sequence
  ENSG00000114021_10 (sequence is synthesized)
ttatcccgttgctggagttgtaatctccatcatctagaaaacgtggtctggtgctattcttttccaagcagtaccttgaagttccatttttggttcatgagtagctatagaacgcaaggt

SEQ ID NO: 199911 - DNA, 120 bp, Artificial Sequence
  ENSG00000114021_11 (sequence is synthesized)
gatacatctttggtgtttgccagagaagttggcagccccacccctcctaccagcctttgcactcttcaaatttaaaaaggagctacttatcaaccccaggcccttctggtcttagaggaa

SEQ ID NO: 199912 - DNA, 120 bp, Artificial Sequence
  ENSG00000114021_12 (sequence is synthesized)
ggactgggccaacaaagagcaccatgggagaatggcagtggtggcatttagtgaagacaatttagtatgaatgtctgcaaaagatttttttgatagcgttgagtgtctgaaagtcccatt

SEQ ID NO: 199913 - DNA, 120 bp, Artificial Sequence
  ENSG00000114021_13 (sequence is synthesized)
atttttcttttttctttttccccagtaacactttctagctccacggataaggaatcactgaacctagtagttcttagacagcttggtttgagaatccttttgcggttaaaaattagggac

SEQ ID NO: 199914 - DNA, 120 bp, Artificial Sequence
  ENSG00000114021_14 (sequence is synthesized)
tgagccaggcgcagtagcatgcgcctgtagtcctagccacattggaggctgaggtaggaggatcccttgagtccacaagtttgagttcagccagagaccctatctcactatatatatgta

SEQ ID NO: 199915 - DNA, 120 bp, Artificial Sequence
  ENSG00000114021_15 (sequence is synthesized)
tctcaaagacttcaatgggtttttgcttacatgggccagtaattgttgaacaaccagctatttgagaaaaagccctgattttgctgcttttcatggtgtaaatacttaaccatggctgag

SEQ ID NO: 199916 - DNA, 120 bp, Artificial Sequence
  ENSG00000114021_16 (sequence is synthesized)
tttgagctatctgcatgacacctctaaacacagagttgggaatagatgtgcacaatcagctctggggagctggtgcaatcctgccctagcacaccactggtttaagatagatatatcata

SEQ ID NO: 199917 - DNA, 120 bp, Artificial Sequence
  ENSG00000114021_17 (sequence is synthesized)
tagatatttaccatttaccatattggaaagtaaaatggagaaaaatttaaaacacaagatacatgagcacacattccattagctattaaggtgatggacacggtgtccaaatgacacggt

SEQ ID NO: 199918 - DNA, 120 bp, Artificial Sequence
  ENSG00000114021_18 (sequence is synthesized)
gtcatttaacttctggaaaacaacactgtgtactgagaacaagagaaagacaaatgacttttttaaattaagtttttaatttacaattgatgcataattttactttaaaaaaataagtgt

SEQ ID NO: 199919 - DNA, 120 bp, Artificial Sequence
  ENSG00000114021_19 (sequence is synthesized)
gcaatttggtaaactttgacatatacagctataaaccactccaatcaagataacatatttaccacccccaacagtttccatgtgctgtattataatccctctggctagtcctttgtcaat

SEQ ID NO: 199920 - DNA, 120 bp, Artificial Sequence
  ENSG00000114021_20 (sequence is synthesized)
cactgataaattttattactatagattagcttgcattttctaaaattatataaaaatgaaatcatgccattagtgctttttctgtatgtcttctttcactcaaaatcacttggaactcaa

SEQ ID NO: 199921 - DNA, 120 bp, Artificial Sequence
  ENSG00000114021_21 (sequence is synthesized)
aattacttctttcactcaaaatcactcaaaattacatactctgtatgtcttctttcactcaaaattacttctttcatttttagacggaagcatttagacctcaaaattacttggagattc

SEQ ID NO: 199922 - DNA, 120 bp, Artificial Sequence
  ENSG00000114021_22 (sequence is synthesized)
atctggtatgtgcattaataattcataattcattccttttttattgctgagtagtatacaatttgtttatccatttatctgctgttggagatttgggctatttccagattttggctgttg

SEQ ID NO: 199923 - DNA, 120 bp, Artificial Sequence
  ENSG00000114021_23 (sequence is synthesized)
caaaaaagcaacctcacagatccttttaaaggatgtcaggtgctttcaggtaaccctagactatagtaccactgctctctatcctagcaggcacactgaaagttaaaccttgtaatagtg

SEQ ID NO: 199924 - DNA, 120 bp, Artificial Sequence
  ENSG00000114021_24 (sequence is synthesized)
cgaaatcattttcttttttaaaaatatattttcttacttttatatattttactcaatctcatgacagattacattttcttttttaaatagaaagtcttactgtaaagcccacatctgtat

SEQ ID NO: 199925 - DNA, 120 bp, Artificial Sequence
  ENSG00000114021_25 (sequence is synthesized)
aaaaaaatgaaagaatgatctggttgatgtggatgtgtggaacctaggaaccttctcttggattttctcttattccccaaaaaacttcatttcctctaaagagctgctcagaagtttgaa

SEQ ID NO: 199926 - DNA, 120 bp, Artificial Sequence
  ENSG00000114021_26 (sequence is synthesized)
aaccagtggacaagccatcctagctgtcttgatgctagagaagcaaagacgctttacagagatgtagcattcctgtaacaggtaaggcaggtggatgctaaactttttacatttcttttt

SEQ ID NO: 199927 - DNA, 75 bp, Artificial Sequence
  ENSG00000114021_27 (sequence is synthesized)
tcctctacctccttggttgaagcaattctcaggcctcagcctcctaaaagtagctgagactacaggcacgtgcca

SEQ ID NO: 199928 - DNA, 120 bp, Artificial Sequence
  ENSG00000114021_28 (sequence is synthesized)
aagtgttgggattacagacgtgagccacggcacccagccttttgtttgtttttgtttttatgtatttcattaaatgaattgtccttttagtggtatatcaggagatcttgccttctggta

SEQ ID NO: 199929 - DNA, 120 bp, Artificial Sequence
  ENSG00000114021_29 (sequence is synthesized)
ggtactcttgaaaaatatgaaaagaaacaactgaagtaggcatctcctataattagtatgtagcattttattctcagaaaatgtgtggtaacctggccctggattttacctttttgcaaa

SEQ ID NO: 199930 - DNA, 120 bp, Artificial Sequence
  ENSG00000114021_30 (sequence is synthesized)
gtgatatccgaataaaatgaacactagattcccacttggagtggaagaacattgcagttgaggccttgggtaagttttaactgccatacccctgtactccccgactttctaatgaattag

SEQ ID NO: 199931 - DNA, 120 bp, Artificial Sequence
  ENSG00000114021_31 (sequence is synthesized)
acaatgatgttttatttttgttttttgtttttgcataatactttgaagtctgctatcacaagttgtgaacctctatctcttgcagtttaggtaaggcaacacatttaatgaattcacatt

SEQ ID NO: 199932 - DNA, 120 bp, Artificial Sequence
  ENSG00000114021_32 (sequence is synthesized)
taagtgaattcctcacagggatgacgacctctgttgaaataggtcaggatgtgcagtttgtggtgaaagttctacttgactttgacctagctgtttgaagctgagagctaacagataata

SEQ ID NO: 199933 - DNA, 120 bp, Artificial Sequence
  ENSG00000114021_33 (sequence is synthesized)
agtgttgcactggttgcaaatgaataaataagtaacattatggggttttaaatgaccaaggagtagattgtgacatcgactgggtatttagggaaggactccttcctgataccaaaagtt

SEQ ID NO: 199934 - DNA, 120 bp, Artificial Sequence
  ENSG00000114021_34 (sequence is synthesized)
aggtctgtgcaaagtacaccaagtggaaaaaagtttagacaagagtttaggtttcaagataaatgttctgctctattggcactggttttaagtcttttgtgctactttttaggcattgct

SEQ ID NO: 199935 - DNA, 120 bp, Artificial Sequence
  ENSG00000114021_35 (sequence is synthesized)
gtgtaagttttggtggtgcgtgggtacaatgaagccaggagggatagaaagggaaatgatgtgtgtgctgcaggctaaacaggggctcttccttatgcctcataaccacctgtgtgtgac

SEQ ID NO: 199936 - DNA, 120 bp, Artificial Sequence
  ENSG00000114021_36 (sequence is synthesized)
agtttcacatttcctatcaaattattatcttcattcatttctacttgtgaatgaagttcggagactaagaaaaagccagctgttggaatagaaagcactttaggataaaatggtcttgtt

SEQ ID NO: 199937 - DNA, 120 bp, Artificial Sequence
  ENSG00000114021_37 (sequence is synthesized)
aaaatcaccaattaaaaagttaagcccctgatgtacaaataactaaaacacatacatacaaagacagtgcttcttgttcaatgatttacttcacagctgattcataatcaaatgaacaag

SEQ ID NO: 199938 - DNA, 120 bp, Artificial Sequence
  ENSG00000114021_38 (sequence is synthesized)
aatctgcaagaacagaacatggtgggcagggtccagtaattccaaatgttgtcatcctagctcttcctgaagcatattgaatcctccaagtatatcccgttgtgctaactaggctttaag

SEQ ID NO: 199939 - DNA, 120 bp, Artificial Sequence
  ENSG00000114021_39 (sequence is synthesized)
tcttttgtctgtagattcattctcaaagtttctccctcagaacaaagagcacgccatcctgtaaagtactcttcctgattttttttcacccaatttcttagtttctttcaattgcttttc

SEQ ID NO: 199940 - DNA, 120 bp, Artificial Sequence
  ENSG00000114021_40 (sequence is synthesized)
agaccccggcaggcagattctgccctcatctgtccagtgacactcttctggcagattactaaagaccgatttgtagacctgtccatgtggcctctctcaacaccattggtgtgaccttgc

SEQ ID NO: 199941 - DNA, 120 bp, Artificial Sequence
  ENSG00000114021_41 (sequence is synthesized)
tcatactgcctctctcaccacttaacattgtcccttagatgttaaaggcccttatattaatagttttattttagctcctttacattttattttgtcctgaggaatctcagctacatgcat

SEQ ID NO: 199942 - DNA, 120 bp, Artificial Sequence
  ENSG00000114021_42 (sequence is synthesized)
ggtcttcaatatatgccgataattctcattcacatagctctcctgttggcttttccccactcgtttaaaaacaaccacttcactttgctggactctaccttgaatgcctcattttcagct

SEQ ID NO: 199943 - DNA, 120 bp, Artificial Sequence
  ENSG00000114021_43 (sequence is synthesized)
cacactcatgctgtgcctttatttagatttgttgtggttgtttccccacattctggaagctccttacctaaatcctgtttattccttaatgcttagcacaatttattactcttgtttcca

SEQ ID NO: 199944 - DNA, 120 bp, Artificial Sequence
  ENSG00000114021_44 (sequence is synthesized)
tggcactacattgtacttctgttttagagactaccttcctctgaagcatatgacaggttcatttactatccagcccaccaaaactcagtttttgagctcctctatgttcatctttttatg

SEQ ID NO: 199945 - DNA, 120 bp, Artificial Sequence
  ENSG00000114021_45 (sequence is synthesized)
gctaaccctcaccatcatgagtgcttagtaaatgttgagttggaatgaatttattcctacaggttgcacttgctctctcaccaagtgttctggccaaataattctggaatgatttcctta

SEQ ID NO: 199946 - DNA, 120 bp, Artificial Sequence
  ENSG00000114021_46 (sequence is synthesized)
ccttaagggagtctgatctgggaagagcctgggacgtgatgtaacttcatatgctgtagagctgaatattcatttacttaagatcttagctccattagaaagcagtgaaagcagtgttaa

SEQ ID NO: 199947 - DNA, 83 bp, Artificial Sequence
  ENSG00000114021_47 (sequence is synthesized)
tgcctgtgatcccagctactcgggagggtaaggcaggagtgggcaacagagttaaactgtatcaaaaaaaaaatgcagtattg

SEQ ID NO: 199948 - DNA, 120 bp, Artificial Sequence
  ENSG00000114021_48 (sequence is synthesized)
caacagagttaaactgtatcaaaaaaaaaatgcagtattgatttagagctaaggtcacctgatgctcaggccagtaatttctccctgcatcatgctgttgtctaaggcagacactgtaaa

SEQ ID NO: 199949 - DNA, 120 bp, Artificial Sequence
  ENSG00000114021_49 (sequence is synthesized)
gctctacactgctgaaaaactaagcttgagatgcataaaagaacacatagagatggggagtcagttctccatacattttgtgagtagaggcattggtgttttgttccaaactatccaatc

SEQ ID NO: 199950 - DNA, 120 bp, Artificial Sequence
  ENSG00000114021_50 (sequence is synthesized)
gagaatgttcatataatgacagctttggaaggtagagactatcttcctctggatcataggacaggtttgtttactatctgatacagtcaaaatagtgtttccctctaatgcgaaagtcag

SEQ ID NO: 199951 - DNA, 120 bp, Artificial Sequence
  ENSG00000114021_51 (sequence is synthesized)
gccagtttgcttgtgacctcattagatttgggctgtgacgcaaacccactgcatgtgcagtatccacctagcttgccctgtgtcactcccatgggatctgtggctcaaactcatgttgct

SEQ ID NO: 199952 - DNA, 120 bp, Artificial Sequence
  ENSG00000114021_52 (sequence is synthesized)
tgctatgttctaaataattaagtctgttgtctgacccaggagtctcatgtcttctgccagcattcagaaaactagttttcaagaagggtaacatcttagaccttttacagctcttgacac

SEQ ID NO: 199953 - DNA, 120 bp, Artificial Sequence
  ENSG00000114021_53 (sequence is synthesized)
agagcaatattgagaaataaaatcaggtaaaagttatttaatatagcagttcataatttaggccatggatcatctctgcagagaatcctaccatgctgcattcttgctttaaacctttcg

SEQ ID NO: 199954 - DNA, 120 bp, Artificial Sequence
  ENSG00000114021_54 (sequence is synthesized)
ccctctaaaacaatgcccaagagccaatgttagtcatggtcttcctgtatttgctctaggtaagctgtttcatagccttccaggacaacacttgcacaggttatctttaagcaccaacaa

SEQ ID NO: 199955 - DNA, 120 bp, Artificial Sequence
  ENSG00000114021_55 (sequence is synthesized)
aagaaatggagaaatttgagccatgtatcctgagctctgaaaggcagcaatcatcttgaccccaagcatacaccatgttcagcttcctccccttggccaggtaccacagctacttctatc

SEQ ID NO: 199956 - DNA, 120 bp, Artificial Sequence
  ENSG00000114021_56 (sequence is synthesized)
ccagtgatcagcaggccctccagcatgaagacctttgagaaggatctatagctgtcaactcctaatatgatttgtgcactatcaccttgaagtaaaccagactagttattttcatgctaa

SEQ ID NO: 199957 - DNA, 120 bp, Artificial Sequence
  ENSG00000114021_57 (sequence is synthesized)
gcttgtctgcagagtcatgacctgtaagtggcgcggccgcgcgctgcagctcgagttcgggccgcgggggaggctttggagcggcgccggcggtggctcggccggctcagcccctccgcc

SEQ ID NO: 199958 - DNA, 120 bp, Artificial Sequence
  ENSG00000114021_58 (sequence is synthesized)
gccttccctgaggcgggcgtccgcgtgggtccgggatcgcgtggccgggcggccgggcgcactcccgggattccaggcttccggggtggcgggcgaggcccagaaagcaccaggccaccc

SEQ ID NO: 199959 - DNA, 120 bp, Artificial Sequence
  ENSG00000114021_59 (sequence is synthesized)
ctcgtatgtaccagataagtttgcctctttagcaatctcagtagaagacaatcaggtatttatttcttttttgtctctctccgatttcttcacataacctaactgaaagaccataagtga

SEQ ID NO: 199960 - DNA, 120 bp, Artificial Sequence
  ENSG00000114021_60 (sequence is synthesized)
gaaaggcagagaatcatcacagatctggaaagttcgggcttatttgagaactaaggatttgacacgattttgccctttgatttgattgtagcttcctgttacggcttccagagtatacct

SEQ ID NO: 199961 - DNA, 120 bp, Artificial Sequence
  ENSG00000114021_61 (sequence is synthesized)
agataataagcattcaattagaatgaatttctcatctttactccgctgatgtaaatgatgtctttatgagatgaagtccaagtaggaatgagcttgtaaattatctctgtcctcaggtcc

SEQ ID NO: 199962 - DNA, 120 bp, Artificial Sequence
  ENSG00000114021_62 (sequence is synthesized)
tgtgttaatttatccctgtcagtgttttgtgatcattatgtcatggaggatttcccctgccacaccatgctgtagggagttaacttttcatttgtgcattttctgtttggaaacagctta

SEQ ID NO: 199963 - DNA, 120 bp, Artificial Sequence
  ENSG00000114021_63 (sequence is synthesized)
cagccttcctgatgtggattctgtccctgactcaggatgcccttgtatccaaatgcagttggaaaggatgaagctataaggaggacttctactgcacgtcactttctcctcagaagccac

SEQ ID NO: 199964 - DNA, 83 bp, Artificial Sequence
  ENSG00000114021_64 (sequence is synthesized)
caagagatacatgcgccaccatgccttgctaattttttattttttgtagagatagagcctcactctgttgatcaagctggtct

SEQ ID NO: 199965 - DNA, 120 bp, Artificial Sequence
  ENSG00000114021_65 (sequence is synthesized)
gctaattttttattttttgtagagatagagcctcactctgttgatcaagctggtctcaatctcctggcctcaagcgatcttcccgcctcagcttttcaaagtgctgggattacaggtgtg

SEQ ID NO: 199966 - DNA, 120 bp, Artificial Sequence
  ENSG00000114021_66 (sequence is synthesized)
ggaactgtggttttggcattttcaatattcagtgtattagatgggaagggatttcatttttctgtgattagatgtggattggtccctcttaagtcagttccagcaacttttacagagaaa

SEQ ID NO: 199967 - DNA, 120 bp, Artificial Sequence
  ENSG00000114021_67 (sequence is synthesized)
ttgagaaccacagagcttatgtcttcagagccccagaagccaattaaaaggcagggattagtttagcttgacctagggagagatttgtggtctgtacccagctgattctatgccattcag

SEQ ID NO: 199968 - DNA, 120 bp, Artificial Sequence
  ENSG00000114021_68 (sequence is synthesized)
atcaggatgcttatcctaccccctccttcacaccatcctactagtcctgagggtactgtgccaagaaactcatgagaagctcttgttcttctaacctataactccagggctttgcacaag

SEQ ID NO: 199969 - DNA, 120 bp, Artificial Sequence
  ENSG00000114021_69 (sequence is synthesized)
catctttggcaggtcacaggtgcctttccttagtcttctaaggctgagaggtggtgaagggcaaatagcataggtggacataagatggaagggaaaatgaatgtgactgtgagtgtgtct

SEQ ID NO: 199970 - DNA, 120 bp, Artificial Sequence
  ENSG00000114021_70 (sequence is synthesized)
gtctgtctgtaaagtgctctacagcccatgaaatgctggtctgagatgatggttttctttagaatttttaaaagttgaagtaatacaaaaaaagtgtactaattttaagcatagaggttg

SEQ ID NO: 199971 - DNA, 120 bp, Artificial Sequence
  ENSG00000114023_0 (sequence is synthesized)
actccaacgctgggtgacattgagctcaccagcgccaccgtccccggcgaagttctgcgctggtcggcggagtagcaagtggccatggggagcctcagcggtctgcgcctggcagcagga

SEQ ID NO: 199972 - DNA, 120 bp, Artificial Sequence
  ENSG00000114023_1 (sequence is synthesized)
agctgttttaggttatgtgaaagagatgtttcctcatctctaaggcttaccagaagctctgatttgaagagaataaatggattttgcacaaaaccacaggaaagtcccggagctccatcc

SEQ ID NO: 199973 - DNA, 120 bp, Artificial Sequence
  ENSG00000114023_2 (sequence is synthesized)
cgcacttacaacagagtgcctttacacaaacctacggattggcagaaaaagatcctcatatggtcaggtcgcttcaaaaaggaagatgaaatcccagagactgtctcgttggagatgctt

SEQ ID NO: 199974 - DNA, 120 bp, Artificial Sequence
  ENSG00000114023_3 (sequence is synthesized)
gatgctgcaaagaacaagatgcgagtgaagatcagctatctaatgattgccctgacggtggtaggatgcatcttcatggttattgagggcaagaaggctgcccaaagacacgagacttta

SEQ ID NO: 199975 - DNA, 120 bp, Artificial Sequence
  ENSG00000114023_4 (sequence is synthesized)
acaagcttgaacttagaaaagaaagctcgtctgaaagaggaagcagctatgaaggccaaaacagagtagcagaggtatccgtgttggctggattttgaaaatccaggaattatgttataa

SEQ ID NO: 199976 - DNA, 120 bp, Artificial Sequence
  ENSG00000114023_5 (sequence is synthesized)
cgtgcctgtattaaaaaggatgtggtatgaggatccatttcataaagtatgatttgcccaaacctgtaccatttccgtatttctgctgtagaagtagaaataaattttcttaaataatga

SEQ ID NO: 199977 - DNA, 120 bp, Artificial Sequence
  ENSG00000114023_6 (sequence is synthesized)
ctgtgttttattgttttgatccaagtcaagtgtagcctctcagccttttggagaaaaatgaaacaatttatttcaacttgaataccaactcttcagagaagcaggtaccatatcttactt

SEQ ID NO: 199978 - DNA, 120 bp, Artificial Sequence
  ENSG00000114023_7 (sequence is synthesized)
ctcttcccattatcaaagtaacctctccacaggcgaactcattttgaggagataaggaaggccagttgagtatatggcccaggtgcagcttggagggccagccttctcaaatgtcctggt

SEQ ID NO: 199979 - DNA, 120 bp, Artificial Sequence
  ENSG00000114023_8 (sequence is synthesized)
gtactggtggggaggctgccccctaatagagcgagcgctgagaagcagccagaccacattctataatctttgaacatgctggcagatggaggcttttaggagaatagttttttaaacatt

SEQ ID NO: 199980 - DNA, 120 bp, Artificial Sequence
  ENSG00000114023_9 (sequence is synthesized)
ctgacaaggtccagccaggaatttctaaggacttagaaatcccagcgtcatggagttgcttggggtcaacacaagtcacctcttagcttcatgccttagaattctcaactggctgttttc

SEQ ID NO: 199981 - DNA, 120 bp, Artificial Sequence
  ENSG00000114023_10 (sequence is synthesized)
ttaccacctgagaaactaaatttctcaattataaaaatctcatgtattattactgttagaagtatttgcacctcatatatatctcatttacagtttgaccttgggatatcgagttgtctc

SEQ ID NO: 199982 - DNA, 120 bp, Artificial Sequence
  ENSG00000114023_11 (sequence is synthesized)
atatttaggtatgaatacaggtttctattttaaacattgattctcacatgcttcttaattattcatggatgacaagccattatagtagtcccttcttatccacggctttgttttctgtgg

SEQ ID NO: 199983 - DNA, 120 bp, Artificial Sequence
  ENSG00000114023_12 (sequence is synthesized)
cataagttatagattacataccattcagtgtagcatgatgaaatctcttgccaatctgttccatccacctgggatgtgaatcatccctctctctggtgtattcacactgtatgtgctagc

SEQ ID NO: 199984 - DNA, 120 bp, Artificial Sequence
  ENSG00000114023_13 (sequence is synthesized)
cgtctctgttacgagatcagctgtcgtggaatcagtgctagtgttcaggtaactcttatttaataattgcctcaaagtgcattgtgctgtgcctaatttataaaataaacggtatcatag

SEQ ID NO: 199985 - DNA, 120 bp, Artificial Sequence
  ENSG00000114023_14 (sequence is synthesized)
gtatgtatgtatacgaaaaacatagtatatgcagggttgggtactatccacagtttcaggcatctactggggggtcttggaatatatccccagagggtaaggggtgactactgtatacag

SEQ ID NO: 199986 - DNA, 120 bp, Artificial Sequence
  ENSG00000114023_15 (sequence is synthesized)
ccatgccaacatgctggttctcagagagttataagagagattaaaaatacatgcagctgtttgggcactttcttcccaaataaaatacccagtaaaatgtaacatactacctatagcttg

SEQ ID NO: 199987 - DNA, 120 bp, Artificial Sequence
  ENSG00000114023_16 (sequence is synthesized)
ataatctatctgaggatgtttatgatgtctgtctatatactttaatttggccttagcttctttgtaggtatcaagttatcacttgcaaatttattttcaaaaagcatagtttcttgtaca

SEQ ID NO: 199988 - DNA, 120 bp, Artificial Sequence
  ENSG00000114023_17 (sequence is synthesized)
ttttagaagattagtttttcttattttgggacacctacaccaatgttttaaatgtggataaattttaatgtggaatttcttttaaaaataatcctcttcatagagcaatacaacaaaaat

SEQ ID NO: 199989 - DNA, 120 bp, Artificial Sequence
  ENSG00000114023_18 (sequence is synthesized)
gtgttgtatcttggagatttacattataaatgtagtaacatttatgagcttaaatttaatgaaaccttttttttttttttgagacagtcttgcactgtcgcccaggctagagtgcagggc

SEQ ID NO: 199990 - DNA, 62 bp, Artificial Sequence
  ENSG00000114023_19 (sequence is synthesized)
aaactcctgacctcaggtgatcaaacgtttttattacaaatattacattaaactaaagctca

SEQ ID NO: 199991 - DNA, 120 bp, Artificial Sequence
  ENSG00000114023_20 (sequence is synthesized)
aaacgtttttattacaaatattacattaaactaaagctcacaactgttattatgcatcaggaattaacagtcatttctcatttgtgttattctcctatttgataacatatagtgactatc

SEQ ID NO: 199992 - DNA, 120 bp, Artificial Sequence
  ENSG00000114023_21 (sequence is synthesized)
tctttatgggttaaatatcagtttcttggccagaattcaagatctgcccctaactaatcctacttctcccagtacccttacagcactcctaccctactagtaactctgatatctcatagt

SEQ ID NO: 199993 - DNA, 120 bp, Artificial Sequence
  ENSG00000114023_22 (sequence is synthesized)
cctcagatttatcaagcaaacgaaactgaatgagcactactataaggtaccacaaactacaaaaggagacagttttgcccttgttgctttcagttaaattattgtgctattttttgctta

SEQ ID NO: 199994 - DNA, 120 bp, Artificial Sequence
  ENSG00000114023_23 (sequence is synthesized)
atttctaggttttttttgcgtgtttatcatgtctccgtaggtaaagtgggcagaaatctttttctactttacatttcctgtaagtgctgtttgtttgaataaagttaatgtgtgaggtta

SEQ ID NO: 199995 - DNA, 120 bp, Artificial Sequence
  ENSG00000114023_24 (sequence is synthesized)
aggaggctactttctacattacatgagaaaagataagcaaaaaaataagacatattgggaacaagcctggaatatcatccttggggatagatagcaaatcctaactttggcgtggtgaag

SEQ ID NO: 199996 - DNA, 120 bp, Artificial Sequence
  ENSG00000114023_25 (sequence is synthesized)
aaggactagattcattttgtgtaatgtaaatttaaaaagtgtttctgatgacaggtgtcataatgtaaattaagaaataggacactggcatatttaatcacccactgcatatttccagag

SEQ ID NO: 199997 - DNA, 120 bp, Artificial Sequence
  ENSG00000114023_26 (sequence is synthesized)
tgctcttggtacccaagtgtatttaccctcaccataactgccttcagcatggtgagctttcttagcggggttctttatttgaagctcagccagacagggccatgtgtctaaggaccacag

SEQ ID NO: 199998 - DNA, 120 bp, Artificial Sequence
  ENSG00000114023_27 (sequence is synthesized)
ctcctaagcagtacataggaatacaagtccagaaatctttagcacagattataattaatagctatcactaattgaacactcactgcattccaggtacttttctagctggtatctcatctg

SEQ ID NO: 199999 - DNA, 120 bp, Artificial Sequence
  ENSG00000114023_28 (sequence is synthesized)
cttcccactccaacgctgggtgacattgagctcaccagcgccaccgtccccggcgaagttctgcgctggtcggcggagtagcaagtggccatggggagcctcagcggtctgcgcctggca

SEQ ID NO: 200000 - DNA, 120 bp, Artificial Sequence
  ENSG00000114023_29 (sequence is synthesized)
gcaggttggttcatgtgatcctggttaatggaacataagtgagattttatgggtgacagggagagagatcaggcttgacttgagagcacgtgggaaaagaagggggctatctcttcgcaa

SEQ ID NO: 200001 - DNA, 120 bp, Artificial Sequence
  ENSG00000114026_0 (sequence is synthesized)
ctacttccggtggtgctgtggtctgcccctggagaacccagaagaacacagctgtgcgcgcccacaggctctgggggcgggagaagataagtcgcaaggagggggcgggacctacacctc

SEQ ID NO: 200002 - DNA, 120 bp, Artificial Sequence
  ENSG00000114026_1 (sequence is synthesized)
aggaaagccggagaattggggcacgaagcggggctttgatgacccgcaaagggcgaggcatgcaggaggtggaggaattaagtgaaacagggaaggttgttaaacagcaccgtgtgggcg

SEQ ID NO: 200003 - DNA, 120 bp, Artificial Sequence
  ENSG00000114026_2 (sequence is synthesized)
aggccttaagggtcgtggtccttgtctgggcggggtctttgggcgtcgacgaggcctggttctgggtaggcggggctactacggggcggtgcctgctgtggaaatgcctgcccgcgcgct

SEQ ID NO: 200004 - DNA, 120 bp, Artificial Sequence
  ENSG00000114026_3 (sequence is synthesized)
tctgcccaggcgcatggggcatcgtactctagcctccactcctgccctgtgggcctccatcccgtgccctcgctctgagctgcgcctggacctggttctgccttctggacaatctttccg

SEQ ID NO: 200005 - DNA, 120 bp, Artificial Sequence
  ENSG00000114026_4 (sequence is synthesized)
gtggagggagcaaagtcctgcacactggagtggtgtactagcggatcaagtatggacactgactcagactgaggagcagctccactgcactgtgtaccgaggagacaagagccaggctag

SEQ ID NO: 200006 - DNA, 120 bp, Artificial Sequence
  ENSG00000114026_5 (sequence is synthesized)
caggcccacaccagacgagctggaggccgtgcgcaagtacttccagctagatgttaccctggctcaactgtatcaccactggggttccgtggactcccacttccaagaggtggctcagaa

SEQ ID NO: 200007 - DNA, 120 bp, Artificial Sequence
  ENSG00000114026_6 (sequence is synthesized)
attccaaggtgtgcgactgctgcgacaagaccccatcgaatgccttttctcttttatctgttcctccaacaacaacatcgcccgcatcactggcatggtggagcggctgtgccaggcttt

SEQ ID NO: 200008 - DNA, 120 bp, Artificial Sequence
  ENSG00000114026_7 (sequence is synthesized)
tggacctcggctcatccagcttgatgatgtcacctaccatggcttccccagcctgcaggccctggctgggccagaggtggaggctcatctcaggaagctgggcctgggctatcgtgcccg

SEQ ID NO: 200009 - DNA, 120 bp, Artificial Sequence
  ENSG00000114026_8 (sequence is synthesized)
ttacgtgagtgccagtgcccgagccatcctggaagaacagggcgggctagcctggctgcagcagctacgagagtcctcatatgaggaggcccacaaggccctctgcatcctgcctggagt

SEQ ID NO: 200010 - DNA, 120 bp, Artificial Sequence
  ENSG00000114026_9 (sequence is synthesized)
cgtggatgtccatatgtggcacattgcccaacgtgactacagctggcaccctaccacgtcccaggcgaagggaccgagcccccagaccaacaaggaactgggaaactttttccggagcct

SEQ ID NO: 200011 - DNA, 120 bp, Artificial Sequence
  ENSG00000114026_10 (sequence is synthesized)
gtggggaccttatgctggctgggcccaagcgggcctccttggcaatgcatttgatggccaccagcttctgcgtcctcttatcttctgccaggatcacctccgagaaggcccccctatcgg

SEQ ID NO: 200012 - DNA, 120 bp, Artificial Sequence
  ENSG00000114026_11 (sequence is synthesized)
gagaggggattcacaaggtgaagaactggaaccccagcttccctccagcctctcctccattccctatgggttctgtgaccactgctggaccaaggacgtggatgaccctcccctagtcac

SEQ ID NO: 200013 - DNA, 120 bp, Artificial Sequence
  ENSG00000114026_12 (sequence is synthesized)
tcatccatcccctggctccagagatggtcacatgacccaggcctggccagtcaaagtagtctctcccctggccacagtaattggtcatgtgatgcaagccagcttactagcactttgaga

SEQ ID NO: 200014 - DNA, 120 bp, Artificial Sequence
  ENSG00000114026_13 (sequence is synthesized)
atgagtctcctgttgagctggtaggatgtaagcctggagctaatggcgatcatctttgccaccacctggggagagcctgcttgggaatgaaattaacacaaaggaagtccaacctgagaa

SEQ ID NO: 200015 - DNA, 120 bp, Artificial Sequence
  ENSG00000114026_14 (sequence is synthesized)
atggccaaatatatttcctgataacattatgtggccctctggatccagccatgcctgaggtctacccctgggcttttggattatgtgtacagttggttcatccctttttctgctaattcg

SEQ ID NO: 200016 - DNA, 120 bp, Artificial Sequence
  ENSG00000114026_15 (sequence is synthesized)
agtcatggctaatttaacaccctttagaaccttaaagaaccatcagcatcacccgggaacttttttagaaatgcaaaatctctactgctttggatcctgggtcaaaaaaaagaaaaaaaa

SEQ ID NO: 200017 - DNA, 120 bp, Artificial Sequence
  ENSG00000114026_16 (sequence is synthesized)
aagaaatgcaaaactttaggccctgccccagatttactaaatcaatctgcagtttaacaaaatcctcaggtgatttgtatgctcattgaactttaagaagcagtgttttagaacaggttc

SEQ ID NO: 200018 - DNA, 120 bp, Artificial Sequence
  ENSG00000114026_17 (sequence is synthesized)
ttaaaaaggaacaaataaactcatttaactaaagttaactgattaaagaggatttgctagggtattctttccacatctgtttgctttctctgggagaataagaagtcataagtcaaagaa

SEQ ID NO: 200019 - DNA, 120 bp, Artificial Sequence
  ENSG00000114026_18 (sequence is synthesized)
caccctcctacaggtgctgttcagtgccgacctgcgccaatcccgccatgctcaggagccaccagcaaagcgcagaaagggttccaaagggccggaaggctagatggggcaccctggaca

SEQ ID NO: 200020 - DNA, 120 bp, Artificial Sequence
  ENSG00000114026_19 (sequence is synthesized)
aagaaattccccaagcaccttcccctccattccccacttctctctccccatccccacccagtctcatgttggggaggggcctccctgtgactacctcaaaggccaggcacccccaaatca

SEQ ID NO: 200021 - DNA, 120 bp, Artificial Sequence
  ENSG00000114026_20 (sequence is synthesized)
agcagtcagtttgcacaacaagatggggtgggggatattgagggagacagcgctaaggatggttttatcttccctttattacaagaaggaacaataaaatagaaacatttgtatggaaaa

SEQ ID NO: 200022 - DNA, 120 bp, Artificial Sequence
  ENSG00000114026_21 (sequence is synthesized)
gccctaaaggactctccagccacccctgtcccaaccccagtggattctcattgccttcggccctgttccccaaggactcttccacctcccaacactgtcactagtctcaccagccctgac

SEQ ID NO: 200023 - DNA, 120 bp, Artificial Sequence
  ENSG00000114026_22 (sequence is synthesized)
tgatgatgtcacctaccatggcttccccagcctgcaggccctggctggaaactttttccggagcctgtggggaccttatgctggctgggcccaagcggtgagtgtacctaggtgtcctcc

SEQ ID NO: 200024 - DNA, 120 bp, Artificial Sequence
  ENSG00000114026_23 (sequence is synthesized)
aggccttccatcagctttcaagatctgttcatttctcccctggttaccttctcaaggcttcctgccttcccaaacacttcccctatccagaaccgccctgcctggtctgatcaactccag

SEQ ID NO: 200025 - DNA, 120 bp, Artificial Sequence
  ENSG00000114026_24 (sequence is synthesized)
gaaatcagataagtgaagtgaaagagagagatcaaagtgttgtggcagcacaaaggagagactgactaactttctgctggggaatctgaaagagtgctttggtggaggtaacatgagatc

SEQ ID NO: 200026 - DNA, 120 bp, Artificial Sequence
  ENSG00000114026_25 (sequence is synthesized)
agggccttgaagggtgagtcaagtctgtcaaggagacaagagggagagaagagcttgccagaggcccagagaccagcgaggaggctgtggtgtcctggaatgagggcgagatacttggtg

SEQ ID NO: 200027 - DNA, 120 bp, Artificial Sequence
  ENSG00000114026_26 (sequence is synthesized)
ggactggtcaacacggcaatgaagagggatatggccgaggaaaatggagaggggcactggagctgtgccagcaaggactgggatgcgtggacttgatcctgtagataacgggaggaagaa

SEQ ID NO: 200028 - DNA, 120 bp, Artificial Sequence
  ENSG00000114026_27 (sequence is synthesized)
aggcctggatgcagcgccatgtcatgagcacatctgatcatgacagctcacctatgggaggattctccctcaacatttttctgtattttctaaattttctttaatggagcatgttttatt

SEQ ID NO: 200029 - DNA, 120 bp, Artificial Sequence
  ENSG00000114026_28 (sequence is synthesized)
cgagtagctgggactacaggtgtgcgccatgcccggttaaatttttgtattttttgtagaggtgaggtttcgccatgttgctcagactggaagatagcactgttacttgtattagtttcg

SEQ ID NO: 200030 - DNA, 120 bp, Artificial Sequence
  ENSG00000114026_29 (sequence is synthesized)
cagggagggaaggggagcaggctgcccccaagccctcccacgcagaggatcatgacccgaggtccagggccctagagctggtggggcagtgtgggggacagttctgtgcccggctccacg

SEQ ID NO: 200031 - DNA, 120 bp, Artificial Sequence
  ENSG00000114026_30 (sequence is synthesized)
cagcagtctcgacagcaacagccagctgccggccctgcatgggaagacagaacagaggtggccgcaggggcaggccctccactccagcccgggtgcacctttgtggaccacccatgccct

SEQ ID NO: 200032 - DNA, 120 bp, Artificial Sequence
  ENSG00000114026_31 (sequence is synthesized)
tctgcagagcccgctcctcacccccagccactggtgtcagcagctccccatggctcgccgtctgcccctgcccctcctggctggtgcccagctgcagtttcctcatgtgccgcaccacag

SEQ ID NO: 200033 - DNA, 120 bp, Artificial Sequence
  ENSG00000114026_32 (sequence is synthesized)
ccgtggcattgaaggcttgctggcattgaaggcattgaagggagaggggagaaaggacttttgagagagtcaagtcatggggcaggggcgcagtgggattcttgcaattgttctgttatt

SEQ ID NO: 200034 - DNA, 120 bp, Artificial Sequence
  ENSG00000114026_33 (sequence is synthesized)
ttcattcaggagttattttattaattcccctaaagccccccaaaaacctctacaaggctttattatatatttacacacacacacgcacatatgttagatgtatgtgtatctatatatata

SEQ ID NO: 200035 - DNA, 120 bp, Artificial Sequence
  ENSG00000114026_34 (sequence is synthesized)
aatagaaacataactataattcatattaatatgtaatagcaaacactatagcactgtatgtcaggcactgttctaagcactttacgtagtaattcatttaatcttcatgaaagtctttga

SEQ ID NO: 200036 - DNA, 120 bp, Artificial Sequence
  ENSG00000114026_35 (sequence is synthesized)
ggtaggtactattatcattttcaaaggaggaaactgaggcacagaaagctgaagtaacttgctcaggtgtgtctctattcaatatctccacctaggtgtcccacacacccctcaaattca

SEQ ID NO: 200037 - DNA, 120 bp, Artificial Sequence
  ENSG00000114026_36 (sequence is synthesized)
ccatgtctaaaactaaaaccatccccccaaaacatgtttctgtccctgtgataaccatctcagtcatggtaccaccaccatccattctgttcccagccacagtcttgggccagcccttga

SEQ ID NO: 200038 - DNA, 120 bp, Artificial Sequence
  ENSG00000114026_37 (sequence is synthesized)
catctctttcccccaacatccattgcatcgtcatgtcttgtcagtttcacctcctaaatgactcctggatcaaccactgttctctgccccctgttgctgctactgtggttccaaaccctt

SEQ ID NO: 200039 - DNA, 120 bp, Artificial Sequence
  ENSG00000114026_38 (sequence is synthesized)
accatctcctgcctgtatctctgccacagcctcctaatgcgtcacccagtctttactccatgccattctctgcatcctgagagctctttcttttttttttgaggtggagtctcactttgt

SEQ ID NO: 200040 - DNA, 120 bp, Artificial Sequence
  ENSG00000114026_39 (sequence is synthesized)
gcgtgagccaccatgcctggccctgagagccctttctatgcagcaaatacttgcctaagattcttctggggctcctcagtgccctcaggatcaagttggtgctcctctgtggcatatgag

SEQ ID NO: 200041 - DNA, 120 bp, Artificial Sequence
  ENSG00000114026_40 (sequence is synthesized)
gccctaagaggcctggccccttacctgcttctctaaattgggctcctgcctctcagtcccctcagcccctccagtctggccaggcttagcacttgcacttcccggaatggctatagacat

SEQ ID NO: 200042 - DNA, 120 bp, Artificial Sequence
  ENSG00000114026_41 (sequence is synthesized)
tattccgctatgcctcactaattcctacttaactgacagctctgtcaggtcatcaccacttttatgacctttctcggaccccataggctggatcagatgcctcctgaagaattacagact

SEQ ID NO: 200043 - DNA, 120 bp, Artificial Sequence
  ENSG00000114026_42 (sequence is synthesized)
tcttcctctagacttggaggtgagggaccctctctggaatagagaaggtgttgggagtgtttgttgaatgaaagagtgaatgaatgaagtccttcagtaaggatccctaagcagttactg

SEQ ID NO: 200044 - DNA, 120 bp, Artificial Sequence
  ENSG00000114026_43 (sequence is synthesized)
tgtgcccagtgtgatgccaggtgctgtgcaagctgagcctgggtagggatggggaggagtcctggggaggctgggaccagaactagggatatggactcaccttccacttgctcttggcaa

SEQ ID NO: 200045 - DNA, 120 bp, Artificial Sequence
  ENSG00000114026_44 (sequence is synthesized)
agttcttcttgatctgctcactcaccgactggtggatattcttatctagagctgtatctcctgcaatcctaggatggggttatgtggtgggttgcctatgagggcagaagcagacctgag

SEQ ID NO: 200046 - DNA, 120 bp, Artificial Sequence
  ENSG00000114026_45 (sequence is synthesized)
ggccccaaatcccgccccagctcacaggttgtgtgaattctcaccatgggtgctgcaaggcctgctcacaggtgaatcttttctctgggtccttctccatcaagtgccggatgaaatctt

SEQ ID NO: 200047 - DNA, 120 bp, Artificial Sequence
  ENSG00000114026_46 (sequence is synthesized)
tccccaagagcatacccactccctcaggtctggcctggcatcaagacaaagaggccaaatcagtccatgccccaccccacccaacctatgctcttcttcaggccctcccaccccgtgcct

SEQ ID NO: 200048 - DNA, 75 bp, Artificial Sequence
  ENSG00000114026_47 (sequence is synthesized)
ccaacctatgctcttcttcaggccctcccaccccgtgccttccagctctttcctttctctcttaagaaaaacata

SEQ ID NO: 200049 - DNA, 76 bp, Artificial Sequence
  ENSG00000114026_48 (sequence is synthesized)
gaaagaaaaaaaaaaaaaagttgttcttgactaatctcagtgcattcacactgatgataaacgatagtagcttcac

SEQ ID NO: 200050 - DNA, 120 bp, Artificial Sequence
  ENSG00000114026_49 (sequence is synthesized)
tcagtgcattcacactgatgataaacgatagtagcttcacaggtttgcttcttaatagggggcacaaaaggaggatgaaaatgtttatggtggtgttttagacattagggtgtcaatagg

SEQ ID NO: 200051 - DNA, 120 bp, Artificial Sequence
  ENSG00000114026_50 (sequence is synthesized)
ggagaggtattttcaaatagactatgtttgaagattgaacaaatgaatgcctagtttctcactctgggagccaagcagaaggaagtacccaagcagaaggaagaaggggtagggtgtctg

SEQ ID NO: 200052 - DNA, 120 bp, Artificial Sequence
  ENSG00000114026_51 (sequence is synthesized)
gtctcgaagacagctctttgtgtggtgctggaaaatccgacagaaggaaggcaggagggagaccgcccccaaagcaggtgagggaggaaccagaggcagggcccaggggaaaaaagcaaa

SEQ ID NO: 200053 - DNA, 120 bp, Artificial Sequence
  ENSG00000114026_52 (sequence is synthesized)
gccccaaataccagagtcagagatgtcgtcccagtaaggagagtcaaactcgtactcggccttcaaaatctgttcaaagagtttggcatcattctcgtcatagaagggagggtaaccgca

SEQ ID NO: 200054 - DNA, 120 bp, Artificial Sequence
  ENSG00000114026_53 (sequence is synthesized)
gagcctgggcagggagaaactcatcctcatttccactttcgggtgccgttggctccggggtggagcactggggcagtctcaggggtcaggcaggagccatggaaggagttccccctttat

SEQ ID NO: 200055 - DNA, 120 bp, Artificial Sequence
  ENSG00000114026_54 (sequence is synthesized)
aaactctaccagccctgcctgctcactcctgttctagctacattatcctttctgttccttgtatgtgccgccatcttgccctcctcagggcctttgcacttgccattgcttctgcctatg

SEQ ID NO: 200056 - DNA, 120 bp, Artificial Sequence
  ENSG00000114026_55 (sequence is synthesized)
ccactctttccccacacctccaatgtctggctccctcaccactcggtcatcacctccacagcgagcccttccctgacctccctactgaaatggcatcaccccgtctccctattcctgctt

SEQ ID NO: 200057 - DNA, 120 bp, Artificial Sequence
  ENSG00000114026_56 (sequence is synthesized)
ggtttttctccacagtatttatttttatcacctgacgtcagtttgtagatttatttacttgttgattgtctgtcttccctactagaaagaaagtcagctccctgagggcaggcactttgt

SEQ ID NO: 200058 - DNA, 120 bp, Artificial Sequence
  ENSG00000114026_57 (sequence is synthesized)
ctggtttgtgctgtgctaaatttaccccagtgcttgcttggcacagtgcttgaaacatagtatctattgaatgaagtaatactggtaattgattggtggaaggaagggagggagggaagg

SEQ ID NO: 200059 - DNA, 120 bp, Artificial Sequence
  ENSG00000114026_58 (sequence is synthesized)
aagggagggcagagggagagcagaggaaggaagagaggaaagtaggcgagaggacaactctggagccacagcctaccatggccaagccccacttacaagatgtaggcgatgacacctatg

SEQ ID NO: 200060 - DNA, 120 bp, Artificial Sequence
  ENSG00000114026_59 (sequence is synthesized)
gaccagcaatccacagccttgctgtagggcttctgggccaggacttcaggggctgtggagggaagaggacgtggtggtgacaaatctctgcccttcaactcctggttccccccaccatca

SEQ ID NO: 200061 - DNA, 120 bp, Artificial Sequence
  ENSG00000114026_60 (sequence is synthesized)
cagccccagcccagggccctccgcacccacgtatcccggagttccacaggcggtggagagcacactgcccgggtcctccatcttggagaggccaaagtcggagatcatgattttggagtc

SEQ ID NO: 200062 - DNA, 120 bp, Artificial Sequence
  ENSG00000114026_61 (sequence is synthesized)
ttcatccaggctgtagtacagcagattctctggcttgaagggcaggagggaagagaaggggcaatcagagatggttagaggctggtagaaccttctgccgctccaagcaccttctgagaa

SEQ ID NO: 200063 - DNA, 120 bp, Artificial Sequence
  ENSG00000114026_62 (sequence is synthesized)
ataatggatccccaaaagccactgtggcttcatggctgtcataagaaaatcaaggaagctctcaagaaggccaaaaattccaggaaggacaaggctcaagagggtgtgggggggaactgt

SEQ ID NO: 200064 - DNA, 120 bp, Artificial Sequence
  ENSG00000114026_63 (sequence is synthesized)
ctctaaacctcaggtgtgcactgtaaagccctaaaggaatgtttgaatgcctattttatgccagaccctggattagtgcttgatttaatgccatcctcactgcttccctgctaggccagt

SEQ ID NO: 200065 - DNA, 120 bp, Artificial Sequence
  ENSG00000114026_64 (sequence is synthesized)
ctgtataatctcacctaacagatgaggaaactgatgcctttggaggcaaagtgactcacccaagaacccacagttaggcagtagcagagccagaattcaaaaccaggcatgtcacacccc

SEQ ID NO: 200066 - DNA, 120 bp, Artificial Sequence
  ENSG00000114026_65 (sequence is synthesized)
aagtgcccttctcctagaacggattgagatgtactgctaaatgtgagccccgtcgctatttccgaggagtaggatttcggggatttctggcttttttctttatgttttgctgtcccatcc

SEQ ID NO: 200067 - DNA, 120 bp, Artificial Sequence
  ENSG00000114030_0 (sequence is synthesized)
gcactgcgaacgccggctgagctgagtctcgctgctcggtgcgaggcggcggagagcgaggcctggtgagcaccgccgaggcgcgggccagctcttcgaggttgtgcgcgggagtggcac

SEQ ID NO: 200068 - DNA, 120 bp, Artificial Sequence
  ENSG00000114030_1 (sequence is synthesized)
ggcgggcgggcgagcgaggggctaacttcagcggtggcaccgggatcggttgccttgagcctgaaatcatgaccaccccaggaaaagagaactttcgcctgaaaagttacaagaacaaat

SEQ ID NO: 200069 - DNA, 120 bp, Artificial Sequence
  ENSG00000114030_2 (sequence is synthesized)
ctctgaatcccgatgagatgcgcaggaggagggaggaagaaggactgcagttacgaaagcagaaaagagaagagcagttattcaagcggagaaatgttgctacagcagaagaagaaacag

SEQ ID NO: 200070 - DNA, 120 bp, Artificial Sequence
  ENSG00000114030_3 (sequence is synthesized)
aagaagaagttatgtcagatggaggctttcatgaggctcagattagtaacatggagatggcaccaggtggtgtcatcacttctgacatgattgaaatgatattttccaaaagcccagagc

SEQ ID NO: 200071 - DNA, 120 bp, Artificial Sequence
  ENSG00000114030_4 (sequence is synthesized)
aacagctttcagcaacacagaaattcaggaagctgctttcaaaagaacctaaccctcctattgatgaagttatcagcacaccaggagtagtggccaggtttgtggagttcctcaaacgaa

SEQ ID NO: 200072 - DNA, 120 bp, Artificial Sequence
  ENSG00000114030_5 (sequence is synthesized)
aagagaattgtacactgcagtttgaatcagcttgggtactgacaaatattgcttcaggaaattctcttcagacccgaattgtgattcaggcaggagctgtgcccatcttcatagagttgc

SEQ ID NO: 200073 - DNA, 120 bp, Artificial Sequence
  ENSG00000114030_6 (sequence is synthesized)
tcagctcagagtttgaagatgtccaggaacaggcagtctgggctcttggcaacattgctggagatagtaccatgtgcagggactatgtcttagactgcaatatccttccccctcttttgc

SEQ ID NO: 200074 - DNA, 120 bp, Artificial Sequence
  ENSG00000114030_7 (sequence is synthesized)
agttattttcaaagcaaaaccgcctgaccatgacccggaatgcagtatgggctttgtctaatctctgtagagggaaaagtccacctccagaatttgcaaaggtttctccatgtctgaatg

SEQ ID NO: 200075 - DNA, 120 bp, Artificial Sequence
  ENSG00000114030_8 (sequence is synthesized)
tgctttcctggttgctgtttgtcagtgacactgatgtactggctgatgcctgctgggccctctcatatctatcagatggacccaatgataaaattcaagcggtcatcgatgcgggagtat

SEQ ID NO: 200076 - DNA, 120 bp, Artificial Sequence
  ENSG00000114030_9 (sequence is synthesized)
gtaggagacttgtggaactgctgatgcataatgattataaagtggtttctcctgctttgcgagctgtgggaaacattgtcacaggggatgatattcagacacaggtaattctgaattgct

SEQ ID NO: 200077 - DNA, 120 bp, Artificial Sequence
  ENSG00000114030_10 (sequence is synthesized)
cagctctgcagagtttattgcatttgctgagtagcccaaaggaatctatcaaaaaggaagcatgttggacgatatctaatattacagctggaaatagggcacagatccagactgtgatag

SEQ ID NO: 200078 - DNA, 120 bp, Artificial Sequence
  ENSG00000114030_11 (sequence is synthesized)
atgccaacattttcccagccctcattagtattttacaaactgctgaatttcggacaagaaaagaagcagcttgggccatcacaaatgcaacttctggaggatcagctgaacagatcaagt

SEQ ID NO: 200079 - DNA, 120 bp, Artificial Sequence
  ENSG00000114030_12 (sequence is synthesized)
acctagtagaactgggttgtatcaagccgctctgtgatctcctcacggtcatggactctaagattgtacaggttgccctaaatggcttggaaaatatcctgaggcttggagaacaggaag

SEQ ID NO: 200080 - DNA, 120 bp, Artificial Sequence
  ENSG00000114030_13 (sequence is synthesized)
ccaaaaggaatggcactggcattaacccttactgtgctttgattgaagaagcttatggtctggataaaattgagttcttacagagtcatgaaaaccaggagatctaccaaaaggcctttg

SEQ ID NO: 200081 - DNA, 120 bp, Artificial Sequence
  ENSG00000114030_14 (sequence is synthesized)
atcttattgagcattacttcgggaccgaagatgaagacagcagcattgcaccccaggttgaccttaaccagcagcagtacatcttccaacagtgtgaggctcctatggaaggtttccagc

SEQ ID NO: 200082 - DNA, 120 bp, Artificial Sequence
  ENSG00000114030_15 (sequence is synthesized)
tttgaagcaatactctgctttcacgtacctgtgtcagaccaggctacccagtcgagtcctcttgtggagcccacagtcctcatggagctaacttctcaaatgttttccataatactgttt

SEQ ID NO: 200083 - DNA, 120 bp, Artificial Sequence
  ENSG00000114030_16 (sequence is synthesized)
gcgctcatttgcttgccttgcgcacctgctctcttacacacatctggaaaacctccggctctctgtggtggaatacccttctaataaaagggtaaccagaacggcccactctcttttacg

SEQ ID NO: 200084 - DNA, 120 bp, Artificial Sequence
  ENSG00000114030_17 (sequence is synthesized)
gaaaaatccctaggctttggagatccgcacttacattagagttatgggaatatacacatattaatgtggctccctttttcttgtgggggaataaaagaggactcctcctcattcccttta

SEQ ID NO: 200085 - DNA, 120 bp, Artificial Sequence
  ENSG00000114030_18 (sequence is synthesized)
acatgggggaaaaaactgacattaaaagatgagactaaatctttatcttgaattttacacaactacttacgacaagggagatgtttagacctgttgtgtatacttcagagtacttttcat

SEQ ID NO: 200086 - DNA, 120 bp, Artificial Sequence
  ENSG00000114030_19 (sequence is synthesized)
gagttcttccacagtgaacccttggattacctggtggctttttctagccagatttgcattaatccttactgagattggatggttttctttcctctattggcgccattcttcagatattaa

SEQ ID NO: 200087 - DNA, 120 bp, Artificial Sequence
  ENSG00000114030_20 (sequence is synthesized)
agttaaaccatccactccctcaccttcagccttcagtgaatgtgctttctagttgtcaggaatgctgaagaattaacactttgactcctaaatgtgatactggtttgtagattcccttag

SEQ ID NO: 200088 - DNA, 120 bp, Artificial Sequence
  ENSG00000114030_21 (sequence is synthesized)
agcagaaaggagaggggcacatattaatttgtatcgcttttgcttctctttggtcttttgtgtcttagaatttggaagtggttcatttctgttgctggtatgaggatttcgaatacttag

SEQ ID NO: 200089 - DNA, 120 bp, Artificial Sequence
  ENSG00000114030_22 (sequence is synthesized)
taatcgaaaaccatatcctgtaatttaataaaaaaaactaaggacgaaaaaaccctccaattttcccaaatgcaatcagtgtaactaggggctgtgtttctgcattaaaataaatgtttc

SEQ ID NO: 200090 - DNA, 120 bp, Artificial Sequence
  ENSG00000114030_23 (sequence is synthesized)
aggctttgtggtcctgatcaaggtcctcattaaaaaattggagttcaccctaggtgcttttcccctctgtgactggcagataacacatacttttgaaagtaactttgggatttttttctt

SEQ ID NO: 200091 - DNA, 120 bp, Artificial Sequence
  ENSG00000114030_24 (sequence is synthesized)
aggtgcagctcgattctaatcttttcatgctgcacacgattcctttaatgtagcatccttatctgaaagaaataaccatcttctcaacatgacctgcttaacccaaataagaacagtgat

SEQ ID NO: 200092 - DNA, 120 bp, Artificial Sequence
  ENSG00000114030_25 (sequence is synthesized)
cttataacctcattgtttcctaatcattttatttcatctcctgctagtactgtgccgcttccccctccccccacacaaaataaaaacagtatctgccttctggctcatttaatgatgact

SEQ ID NO: 200093 - DNA, 120 bp, Artificial Sequence
  ENSG00000114030_26 (sequence is synthesized)
gcaatctgtacctgcaaatggcgcttccagtactgtgttcagtgatccacatttgtgcttggactggaatgaaaaaatacgcttaattgccaagacaactgcaaatgagttcaatacgac

SEQ ID NO: 200094 - DNA, 120 bp, Artificial Sequence
  ENSG00000114030_27 (sequence is synthesized)
ttctcggtgctagttggccatcttgactcaatgttgggatacactaccagagaagatttttttgttgatgtgctgttcaaagtgaattctgaaggaaaaggttgctcacctctgtttcag

SEQ ID NO: 200095 - DNA, 120 bp, Artificial Sequence
  ENSG00000114030_28 (sequence is synthesized)
tataaccccaaagtgtaaaaactatttggaagttgcccctgacaagctattatacatctctggtaaatcctgctgaatgtaagggatattcagagcttttcatacctcatcatgatgtta

SEQ ID NO: 200096 - DNA, 120 bp, Artificial Sequence
  ENSG00000114030_29 (sequence is synthesized)
tttaagcagccaacttatgtgacctgatttaaacttttaaaaaatccacttcattcaaactagaaagagtcaaagacaaaggacatttatcagccaagagtgtgacgcattcttcgcatc

SEQ ID NO: 200097 - DNA, 120 bp, Artificial Sequence
  ENSG00000114030_30 (sequence is synthesized)
tagtctgtagtagtgtctgtgctctgggatggataccgtctgatgtctgtttgttattgatggcgcagccactgcaaaactagtcaactcccatctataactgttactttttctagtgct

SEQ ID NO: 200098 - DNA, 120 bp, Artificial Sequence
  ENSG00000114030_31 (sequence is synthesized)
gctttgtgctgagagaacattttagtttactgcacttgacctgtaaaagactgattctttgtaattttagggataaattaggtggttaatttaaagaagaaatttcaatgttgcctttac

SEQ ID NO: 200099 - DNA, 120 bp, Artificial Sequence
  ENSG00000114030_32 (sequence is synthesized)
atcacattaaaatataacttctttcagaaggataatagaagcactgattcatagtaaaaatcttgtttttagctttgacttttttgtggctgttttttaaaattgtaaattactagtaac

SEQ ID NO: 200100 - DNA, 120 bp, Artificial Sequence
  ENSG00000114030_33 (sequence is synthesized)
atgtcatttctataggatgttttaaattatgtaccttccattggatagttaaaataatttcattttataagccaatttgagtgggaaagatacaaagcacacagttgtctccccacatta

SEQ ID NO: 200101 - DNA, 120 bp, Artificial Sequence
  ENSG00000114030_34 (sequence is synthesized)
ggaagagtagtgtgcattcagacattcggaatttttgctagtagttggagatgtttcagtgagtgaattaaaacaaagtctatttaactgacgtgatctattttgtgtctaaaacagagg

SEQ ID NO: 200102 - DNA, 120 bp, Artificial Sequence
  ENSG00000114030_35 (sequence is synthesized)
aatttatcttgtcctagaagttcatgaactataagatctaagtttttttttcttttttaacaataaaatgattttttcttaaagtatcaaagttggaattggctaaaagtgaagtagcat

SEQ ID NO: 200103 - DNA, 120 bp, Artificial Sequence
  ENSG00000114030_36 (sequence is synthesized)
aactcagatatgttggaacttggtactgaagcaggctttttggtaacagaaatgacattttaaggggtaactgtatatcctgtttttagttctttgcctctcagattctgttaacttagt

SEQ ID NO: 200104 - DNA, 120 bp, Artificial Sequence
  ENSG00000114030_37 (sequence is synthesized)
ttaaattcactgaataccctaccactaaggcgttgctcattacaaaagcatgttaatttcaatacaggaaaactcttttgtagttttatatatggattggggaaagtgactttgttttac

SEQ ID NO: 200105 - DNA, 120 bp, Artificial Sequence
  ENSG00000114030_38 (sequence is synthesized)
ttttcctttttattcccctccatcctccaaacttccaatctatattatttgtaatgagaactttggtgggggaaaaaaagcattaagagaattttggatgtaaaggcatctggtatctga

SEQ ID NO: 200106 - DNA, 120 bp, Artificial Sequence
  ENSG00000114030_39 (sequence is synthesized)
tggaccagcaggtagatgtggttggattgagaaattttgggtaaggtagatgatagaagaaagagattttaggagacacagttctctgtggaacactttctttcatgttcctgtaactaa

SEQ ID NO: 200107 - DNA, 120 bp, Artificial Sequence
  ENSG00000114030_40 (sequence is synthesized)
ttgatcaagacccttttaaacgcttatctttgtcagttccgcttttgaaaaaactattgccctaggattgtttcttccatatgacagatgaaggttattggctctgagtcatttttggca

SEQ ID NO: 200108 - DNA, 120 bp, Artificial Sequence
  ENSG00000114030_41 (sequence is synthesized)
ttatcgtcacagataaaaagattggcaattaatctcataaaaaatctgaattattccagattgctgccgatttttgcctaagaaacaatatgtaagtatattttataaaccaaactttgt

SEQ ID NO: 200109 - DNA, 120 bp, Artificial Sequence
  ENSG00000114030_42 (sequence is synthesized)
caaccaattctattgtacgtctacccacaggcaactttgaatttacttctctagtgctaaataaacatttcagcgatttaatcccccaacttgggggatgcattatgaaaaggttttcct

SEQ ID NO: 200110 - DNA, 120 bp, Artificial Sequence
  ENSG00000114030_43 (sequence is synthesized)
ggagtcaaggggtttttctttctcgctagttttgtgaaaatttttatatcaataggcaaatcattataactttttaggggttgatggtttttaagtatattggaaattgtggtgtctaag

SEQ ID NO: 200111 - DNA, 120 bp, Artificial Sequence
  ENSG00000114030_44 (sequence is synthesized)
gatgatgttcagtgaagaaaagggatccacttttagaaaccagcattgtttgctttcaactttcatactgtatgctaactcctacgttccaaaatgtgctcatttgcagacacaggtatg

SEQ ID NO: 200112 - DNA, 120 bp, Artificial Sequence
  ENSG00000114030_45 (sequence is synthesized)
cctatatacatggaagtctcaaatctgaatttttatccatctcaatatgaccatttctctctgttgtgagctgaacagattaagtatatatctgccaggttgggaaatattttggtctat

SEQ ID NO: 200113 - DNA, 120 bp, Artificial Sequence
  ENSG00000114030_46 (sequence is synthesized)
cttttcctgtcatcagaacttaatttaaaaaaattatcaaaggtcagatgtgactactacagtaagttggctatcataaagaatattccataaaatgttttatctgccatacaaaattac

SEQ ID NO: 200114 - DNA, 120 bp, Artificial Sequence
  ENSG00000114030_47 (sequence is synthesized)
gtggctcatgcctgtaatcccagcagttcaggattacaggttatatacaggttataacaatggataccaggacatcagaatatctgataaagcaaatatttatatgctaatttaaaatat

SEQ ID NO: 200115 - DNA, 120 bp, Artificial Sequence
  ENSG00000114030_48 (sequence is synthesized)
tatatgctaatttaaaatatcaaattgctactggacataaaatacatctggaagcttggggtaagaagaaagaaaagaagtgttccgttctgttttcaactaagggtaaacgaagtccca

SEQ ID NO: 200116 - DNA, 120 bp, Artificial Sequence
  ENSG00000114030_49 (sequence is synthesized)
gagtgttttccctgtaggtcaaattaaggtaacatgtctttatttgatcatctattgtacaccagatacctggctaagggctttccttttttctcatgtagtcttccaaatgttctttga

SEQ ID NO: 200117 - DNA, 120 bp, Artificial Sequence
  ENSG00000114030_50 (sequence is synthesized)
taattgtcactatattatagatgacaaagtgaagacttacgagaaattactttgccccaaggttacaacacttagatggctgtccaagggcggggaagagccctgcaaattctgtgtctt

SEQ ID NO: 200118 - DNA, 120 bp, Artificial Sequence
  ENSG00000114030_51 (sequence is synthesized)
gaagaaagcagtggccacgcagtagttccgtgcccaggatctcccagaactagacttggcaaccacagctgggccagccttttttgttagaccattcttcctgactcctgcttaccatca

SEQ ID NO: 200119 - DNA, 120 bp, Artificial Sequence
  ENSG00000114030_52 (sequence is synthesized)
gcacccttaaaatgacgaaatcaggcttaagttgcttttaggttacacagactggagtgtaggccctctcaggccaaacatctttcctcttctgtggtgctaaaattctgtatgaccaga

SEQ ID NO: 200120 - DNA, 120 bp, Artificial Sequence
  ENSG00000114030_53 (sequence is synthesized)
caagtatggtaataggttttttttttttttttttttgtgcaaatgattttgtgtttagtaaaataatggctaaacacatggatccattcaaacgcacaaatgtggaaagtattgacacgg

SEQ ID NO: 200121 - DNA, 120 bp, Artificial Sequence
  ENSG00000114030_54 (sequence is synthesized)
aaggaaaggctttgaagaattactgcctcaggaagcagtgccatggatgcgaatttaacacagtctacttcttcctaaaggaatatcatcccaaggaatgtcaaaaattaaaatcacctt

SEQ ID NO: 200122 - DNA, 120 bp, Artificial Sequence
  ENSG00000114030_55 (sequence is synthesized)
ttaatgtactggttgttgagtgtttctgctttacctcaagtcattctgaccactctacatcctgcttcaaagtgttctgacacttagatttggaatggctctaatgattctttgtacttg

SEQ ID NO: 200123 - DNA, 120 bp, Artificial Sequence
  ENSG00000114030_56 (sequence is synthesized)
aatgtggtctgtcaggccatgggtgagtgccttgcacatagtagacattcaataaatactaaatgaaggaatatgcatgcatctttgtgatgttagtaaagggtgcttgataaaagaaaa

SEQ ID NO: 200124 - DNA, 120 bp, Artificial Sequence
  ENSG00000114030_57 (sequence is synthesized)
actttctactgtgagctttttaatgatagacaaagaatttggcttcattatattattaataatcttacacgtttctatatgtaaagattgtcctacctttatgtaacttctggggaaggt

SEQ ID NO: 200125 - DNA, 120 bp, Artificial Sequence
  ENSG00000114030_58 (sequence is synthesized)
aattgtacactgcaggtgagcctggcatttgctaggaaccagagtggaaccggcaaagtggccagcaacagagtcctgatccaaatggagaaagggaaccaggcgtacctcaacctggag

SEQ ID NO: 200126 - DNA, 76 bp, Artificial Sequence
  ENSG00000114030_59 (sequence is synthesized)
atgaagctgggattacaggcagccaccaccatatccagctaattcttttatttttagtagagatgaggttttgcca

SEQ ID NO: 200127 - DNA, 120 bp, Artificial Sequence
  ENSG00000114030_60 (sequence is synthesized)
acaggtgtgagccactgctcccagccaagtattcaataattttcataagaaaagaaaccaacagtcagctgactctcatcctagaaattctaaactactattttttttccccctggataa

SEQ ID NO: 200128 - DNA, 120 bp, Artificial Sequence
  ENSG00000114030_61 (sequence is synthesized)
aaattctaaactactattttttttccccctggataaagttgggtttttagaaactgatgattttttagtaaacttccctggagtaaccaactgagtcagtgcctttattagttacaaata

SEQ ID NO: 200129 - DNA, 120 bp, Artificial Sequence
  ENSG00000114030_62 (sequence is synthesized)
catgtgatccctaaattctcacctgtaggatctaatctcaaaggcttgggccctgagactatgcagctataaaaattggttaggtaccaagttgatcacaaaatgggattatctttctaa

SEQ ID NO: 200130 - DNA, 120 bp, Artificial Sequence
  ENSG00000114030_63 (sequence is synthesized)
gtaaatatttgccaaaaactagttaatcaaagatatcccccaccccttgtgtgctgttctttactctaaggctggagccatgtagacactggggcatttttgttaagtgatagctcctgt

SEQ ID NO: 200131 - DNA, 120 bp, Artificial Sequence
  ENSG00000114030_64 (sequence is synthesized)
ccccaggttccttactgtctacaccattatagattattcatacaacttgatgatttgccttgatgttttctctcctttcctcctatcccttctttctctttgttttacactctttgttgc

SEQ ID NO: 200132 - DNA, 120 bp, Artificial Sequence
  ENSG00000114030_65 (sequence is synthesized)
ggtgatgagttccttccagaggaaaaacaagaaatccagaaaagctgcctcctggattgtaattctggtccccatctaaggccaggatcatcagacacctgaaaaataatcacgttcacc

SEQ ID NO: 200133 - DNA, 120 bp, Artificial Sequence
  ENSG00000114030_66 (sequence is synthesized)
ctgagagcaagggaagagagacttttctcaggataaaaggaaatccagacaaccaacactgcagagaacagagcctgatcccctaagcaacctgccgagaaccagagggaccaaatgagg

SEQ ID NO: 200134 - DNA, 120 bp, Artificial Sequence
  ENSG00000114030_67 (sequence is synthesized)
ctgagctcttagaataacagagctcttcacagtaaactcatttgttctctccccacttgtattgtagaaatcatgaccaccccaggaaaagagaactttcgcctgaaaagttacaagaac

SEQ ID NO: 200135 - DNA, 120 bp, Artificial Sequence
  ENSG00000114030_68 (sequence is synthesized)
gctcggtgcgaggcggcggagagcgaggcctggtgagcaccgccgaggcgcgggccagctcttcgagaaatcatgaccaccccaggaaaagagaactttcgcctgaaaagttacaagaac

SEQ ID NO: 200136 - DNA, 120 bp, Artificial Sequence
  ENSG00000114030_69 (sequence is synthesized)
gcaggcgcactgcgaacgccggctgagctgagtctcgctgctcggtgcgaggcggcggagagcgaggcctgaaatcatgaccaccccaggaaaagagaactttcgcctgaaaagttacaa

SEQ ID NO: 200137 - DNA, 120 bp, Artificial Sequence
  ENSG00000114030_70 (sequence is synthesized)
ggagccctggtgtgatcgccatcgggaacgccggtcgaggctaggcggggcggggcggcgtggcgcggcggcggggctaaatcatgaccaccccaggaaaagagaactttcgcctgaaaa

SEQ ID NO: 200138 - DNA, 120 bp, Artificial Sequence
  ENSG00000114030_71 (sequence is synthesized)
atttgccttgatgttttctctcctttcctcctatcccttctttctctttgttttacactctttgttgcggtgatgagttccttccagaggaaaaacaagaaatccagaaaaggtagagta

SEQ ID NO: 200139 - DNA, 120 bp, Artificial Sequence
  ENSG00000114030_72 (sequence is synthesized)
cttcaatgtcacatcagtttttcttctccagtttgacacttaccagttcccatgctcatttgaattaaggttctgttttgctagctgcctcctggattgtaattctggtccccatctaag

SEQ ID NO: 200140 - DNA, 120 bp, Artificial Sequence
  ENSG00000114054_0 (sequence is synthesized)
aggtgcgccggtaggggacgcgccggcacagcaaaaatggcggcggcattacgggtggcggcggtcggggcaaggctcagcgttctggcgagcggtctccgcgccgcggtccgcagcctt

SEQ ID NO: 200141 - DNA, 120 bp, Artificial Sequence
  ENSG00000114054_1 (sequence is synthesized)
tgcagccaggccacctctgttaacgaacgcatcgaaaacaagcgccggaccgcgctgctgggagggggccaacgccgtattgacgcgcagcacaagcgaggaaagctaacagccagggag

SEQ ID NO: 200142 - DNA, 120 bp, Artificial Sequence
  ENSG00000114054_2 (sequence is synthesized)
aggatcagtctcttgctggaccctggcagctttgttgagagcgacatgtttgtggaacacagatgtgcagattttggaatggctgctgataagaataagtttcctggagacagcgtggtc

SEQ ID NO: 200143 - DNA, 120 bp, Artificial Sequence
  ENSG00000114054_3 (sequence is synthesized)
actggacgaggccgaatcaatggaagattggtttatgtcttcagtcaggattttacagtttttggaggcagtctgtcaggagcacatgcccaaaagatctgcaaaatcatggaccaggcc

SEQ ID NO: 200144 - DNA, 120 bp, Artificial Sequence
  ENSG00000114054_4 (sequence is synthesized)
ataacggtgggggctccagtgattgggctgaatgactctgggggagcacggatccaagaaggagtggagtctttggctggctatgcagacatctttctgaggaatgttacggcatccgga

SEQ ID NO: 200145 - DNA, 120 bp, Artificial Sequence
  ENSG00000114054_5 (sequence is synthesized)
gtcatccctcagatttctctgatcatgggcccatgtgctggtggggccgtctactccccagccctaacagacttcacgttcatggtaaaggacacctcctacctgttcatcactggccct

SEQ ID NO: 200146 - DNA, 120 bp, Artificial Sequence
  ENSG00000114054_6 (sequence is synthesized)
gatgttgtgaagtctgtcaccaatgaggatgttacccaggaggagctcggtggtgccaagacccacaccaccatgtcaggtgtggcccacagagcttttgaaaatgatgttgatgccttg

SEQ ID NO: 200147 - DNA, 120 bp, Artificial Sequence
  ENSG00000114054_7 (sequence is synthesized)
ggaatcaaccaaagcctacaacatggtggacatcatacactctgttgttgatgagcgtgaattttttgagatcatgcccaattatgccaagaacatcattgttggttttgcaagaatgaa

SEQ ID NO: 200148 - DNA, 120 bp, Artificial Sequence
  ENSG00000114054_8 (sequence is synthesized)
tgggaggactgttggaattgttggcaaccaacctaaggtggcctcaggatgcttggatattaattcatctgtgaaaggggctcgttttgtcagattctgtgatgcattcaatattccact

SEQ ID NO: 200149 - DNA, 120 bp, Artificial Sequence
  ENSG00000114054_9 (sequence is synthesized)
catcacttttgttgatgtccctggctttctacctggcacagcacaggaatacgggggcatcatccggcatggtgccaagcttctctacgcatttgctgaggcaactgtacccaaagtcac

SEQ ID NO: 200150 - DNA, 120 bp, Artificial Sequence
  ENSG00000114054_10 (sequence is synthesized)
agtcatcaccaggaaggcctatggaggtgcctatgatgtcatgagctctaagcacctttgtggtgataccaactatgcctggcccaccgcagagattgcagtcatgggagcaaagggcgc

SEQ ID NO: 200151 - DNA, 120 bp, Artificial Sequence
  ENSG00000114054_11 (sequence is synthesized)
tgtggagatcatcttcaaagggcatgagaatgtggaagctgctcaggcagagtacatcgagaagtttgccaaccctttccctgcagcagtgcgagggtttgtggatgacatcatccaacc

SEQ ID NO: 200152 - DNA, 120 bp, Artificial Sequence
  ENSG00000114054_12 (sequence is synthesized)
ttcttccacacgtgcccgaatctgctgtgacctggatgtcttggccagcaagaaggtacaacgtccttggagaaaacatgcaaatattccattgtaaacaaatcaaaggaaaagaaacca

SEQ ID NO: 200153 - DNA, 120 bp, Artificial Sequence
  ENSG00000114054_13 (sequence is synthesized)
agaactgaattactgtctgcccattcacatcccattcctgccttttgcaatcatgaaacctgggaatccaaatagttggataacttagaataactaagtttattaaattctagaaagatc

SEQ ID NO: 200154 - DNA, 120 bp, Artificial Sequence
  ENSG00000114054_14 (sequence is synthesized)
ccgaatcaatggaagattggtttatgtcttcagtcagatacgggcttctgccatgtcgcccaggctggtctcagactcctggactcaagccatccacctgccttggcctcccaaagtgtt

SEQ ID NO: 200155 - DNA, 120 bp, Artificial Sequence
  ENSG00000114054_15 (sequence is synthesized)
atggaagattggtttatgtcttcagtcagcaaataataggctgggcacagtggctcccgcttgtcatctcagcactttgggaggccgaggattttacagtttttggaggcagtctgtcag

SEQ ID NO: 200156 - DNA, 120 bp, Artificial Sequence
  ENSG00000114054_16 (sequence is synthesized)
atctgctgtgacctggatgtcttggccagcaagaaggtaagagtccaagaagtgtttcaccaggttgtgcagtctggacaccgagatggtagaggggctgtaagatggtagaggaaccag

SEQ ID NO: 200157 - DNA, 120 bp, Artificial Sequence
  ENSG00000114054_17 (sequence is synthesized)
ctcaggagagcagctgggctagcagctttacggaagccttggatggtggggaaactcccgtacagaaactcagctggtcaaagaaactcaaagccacaagaccttggaagctttgtcaag

SEQ ID NO: 200158 - DNA, 120 bp, Artificial Sequence
  ENSG00000114054_18 (sequence is synthesized)
tggaccagcctccatggaccacggaataccttgagagtaatgacagttgagtgttctcttgtgtgggaatgccttccccagctggtgccctcaccttaaagggaaaaagaaaatacactg

SEQ ID NO: 200159 - DNA, 120 bp, Artificial Sequence
  ENSG00000114054_19 (sequence is synthesized)
aattttgtaaatgggaaatacttgggtccactgagctgatagctgacaagtgtctgtctttaaactgagagcagataatatggtgagctgtggtgtaggaagcactgctagggtcttgct

SEQ ID NO: 200160 - DNA, 120 bp, Artificial Sequence
  ENSG00000114054_20 (sequence is synthesized)
ggtcctgccccgccttgtgttaatccagttcctcctgagctacacagctgacaagtggtgaagctgggatttgaactcagatgggtttgaccccagccaagcctgtgttctgatcatttc

SEQ ID NO: 200161 - DNA, 120 bp, Artificial Sequence
  ENSG00000114054_21 (sequence is synthesized)
aaagtactaccactcagctgatgaggaaggtgagatggacttctaagggttggcctaagagtaggggtgagggaggttggtggtctgttcccctgggcttgtcttaacccagaaagctac

SEQ ID NO: 200162 - DNA, 120 bp, Artificial Sequence
  ENSG00000114054_22 (sequence is synthesized)
tacatttagacagctttcctatctcccgcatgattctcttgcaaagcagtaccaacagatggccagtcatctttttgagttgctagagtaatggggagcacatccacaatacacccttct

SEQ ID NO: 200163 - DNA, 120 bp, Artificial Sequence
  ENSG00000114054_23 (sequence is synthesized)
aatgcttgttagaaagtgcttttgttgcaaagttcttctagcttctttttttgaccctgtcttggtctccccagcccaactttctgcctctggttgcactgatactttgtcctggtgctg

SEQ ID NO: 200164 - DNA, 120 bp, Artificial Sequence
  ENSG00000114054_24 (sequence is synthesized)
gtgcttaagatgtggtctgctcagccaaagaagtctgtgaaggatactcacccacatgtggagttgatgaatcagccctcttcacctattcaacagatgtgactgttttgtctttctggt

SEQ ID NO: 200165 - DNA, 120 bp, Artificial Sequence
  ENSG00000114054_25 (sequence is synthesized)
tccaaaggatttctggagagctatgactttacccttttagaagtattggtcctcatactctgtgcacctctgatgtcagcatgggatttctacaattccaagcaggagttgcagccactt

SEQ ID NO: 200166 - DNA, 120 bp, Artificial Sequence
  ENSG00000114054_26 (sequence is synthesized)
gataggcagtgcctcagtctggggcctctgtggaatccagctggcatattccagccaatgtggcagcctcaatagttagttaagttttgaccatgtccctactgtcctgggtggtgaaaa

SEQ ID NO: 200167 - DNA, 120 bp, Artificial Sequence
  ENSG00000114054_27 (sequence is synthesized)
tactccctttatgtgtccttgggagcagaaagatgctcttcaaaaagtggtgcctgatggagatctccacagaacaagacactcagaagggcagggatagaatcttacctgagcttggtc

SEQ ID NO: 200168 - DNA, 61 bp, Artificial Sequence
  ENSG00000114054_28 (sequence is synthesized)
tgagagcctgaggcaggagaatctcttgaaccccagaggcggaggttgctgtgagctgaga

SEQ ID NO: 200169 - DNA, 88 bp, Artificial Sequence
  ENSG00000114054_29 (sequence is synthesized)
ccgagaccctgtcttcacttaccgccccccccccccccccgaaaaaaaaaaggcaagcctgagtggcatcaaacctttgtttcccatg

SEQ ID NO: 200170 - DNA, 120 bp, Artificial Sequence
  ENSG00000114054_30 (sequence is synthesized)
aaaggcaagcctgagtggcatcaaacctttgtttcccatgaatatactagtccctgcttgatggactgttacctgggaacaggggcaaacagggagttacagtcaagccacaaatgggag

SEQ ID NO: 200171 - DNA, 120 bp, Artificial Sequence
  ENSG00000114054_31 (sequence is synthesized)
atttgcaagcctgacccaagcctgaaagtgctcatctagtctcatactcttgtaaccatctagatgagctgttacagaccatccttaaatgaccttccttccttggctgtctggaaagct

SEQ ID NO: 200172 - DNA, 120 bp, Artificial Sequence
  ENSG00000114054_32 (sequence is synthesized)
tgcttgctgatttgtctcccacacctttgccttttttgcataggcatattaggccatttaaggaactcaccccctattgccagacccatgaagtgtgtagggtatgacttcttaaagaaa

SEQ ID NO: 200173 - DNA, 120 bp, Artificial Sequence
  ENSG00000114054_33 (sequence is synthesized)
gagtgaggaggtctaatgccaagagaaactttttaagacagtctggctctgttacctagattggagtgcagtagtggtgcaatcttggctcactgcaacaacctccaccttgtgggctca

SEQ ID NO: 200174 - DNA, 120 bp, Artificial Sequence
  ENSG00000114054_34 (sequence is synthesized)
agccatcctcctaccttagcctcacgagtagctggtgtgcgccatcatacgcagctaatttttgtattttttgtagaggagttttaccatgctacccaggctggtctcgaactcttgagc

SEQ ID NO: 200175 - DNA, 88 bp, Artificial Sequence
  ENSG00000114054_35 (sequence is synthesized)
acttcatttctgtagctgcattgactctatgtggtcttcaaaagggcactgccagggtgcaattatgcatgtaagcccagagtctcaa

SEQ ID NO: 200176 - DNA, 120 bp, Artificial Sequence
  ENSG00000114054_36 (sequence is synthesized)
ctgccagggtgcaattatgcatgtaagcccagagtctcaagccgtgaggacccatgctacaggccagtggatgggtgttccctgaatgcctcatgcaaaactcagtttgcaagagactcc

SEQ ID NO: 200177 - DNA, 120 bp, Artificial Sequence
  ENSG00000114054_37 (sequence is synthesized)
ctcttaaaccacagatgacttggcctacacacactccagagaaatctaaggaatgaaagaaagtgagctattcctaaattctgctttcttaaaaaaaattaaaaagccaaaacaacaaaa

SEQ ID NO: 200178 - DNA, 120 bp, Artificial Sequence
  ENSG00000114054_38 (sequence is synthesized)
ccaccaactcactaataaggttaacttgctgccatttaacagattatcagaaattgcaaactctctcaagagccacaggacagaaaatcatctctttaaagccatacctggtagaaacaa

SEQ ID NO: 200179 - DNA, 120 bp, Artificial Sequence
  ENSG00000114054_39 (sequence is synthesized)
taggatgactaccacaagcctgattttgaatagtttattaaaggaaaggtgaagcatcagtttcaaattgtacaaaaggaaaaaaaacctcatattgcaaatgtacaatttacagaatta

SEQ ID NO: 200180 - DNA, 120 bp, Artificial Sequence
  ENSG00000114054_40 (sequence is synthesized)
ctagcaaaaccaatcaaggagacaccgaaaatacaaaaatttgattgacttcaaactgaactggaaacccattggagtagatatttagcctttttgtgtggcatggtagtctacaattct

SEQ ID NO: 200181 - DNA, 120 bp, Artificial Sequence
  ENSG00000114054_41 (sequence is synthesized)
gtcagcatctgttttccatacaagactgtcacgcaaaggatcaatttgtgcatgtgccagggcacctcatggcttgctccctggccaaaaccacaggcaggcagggctggggtggacagt

SEQ ID NO: 200182 - DNA, 120 bp, Artificial Sequence
  ENSG00000114054_42 (sequence is synthesized)
ccagtcattcctgcaccttcacttccagtgaagcccacaattctgggagaaagtgaggccccagctcccctaactggagcccaagaattgctgaattagcagagaagatatttttggtga

SEQ ID NO: 200183 - DNA, 120 bp, Artificial Sequence
  ENSG00000114054_43 (sequence is synthesized)
ccaggtttttttcagaactgtacaaatgttgagaaaaatgttttgtgtctttactaaaaggatgaataaaatcatccatcatcatcttgctttcccgcacaaaagatgatcactgggtgt

SEQ ID NO: 200184 - DNA, 120 bp, Artificial Sequence
  ENSG00000114054_44 (sequence is synthesized)
gcagaattttaaaaaatgtttttcgtatttgataaaaagggaaagcctcatgattctgttgcagctactttaaaaaccagcccagaaacagctgtggatgaattggtttggaaattctga

SEQ ID NO: 200185 - DNA, 120 bp, Artificial Sequence
  ENSG00000114054_45 (sequence is synthesized)
ggcttactttagaaatcagaaaggaagagagagactaagtggggtttttaaaacaatagcagcaagtcataaaagtctaggcagaatgtaactctaaaccattgtagactgtcctgaaga

SEQ ID NO: 200186 - DNA, 120 bp, Artificial Sequence
  ENSG00000114054_46 (sequence is synthesized)
ttcataatttctttccccaaaagaattattcttaatatgcacatttaacactgaaatgtagctgtaattcaaggtaagcttaggaacttcaccctctaagcacagacttctatgcagcac

SEQ ID NO: 200187 - DNA, 120 bp, Artificial Sequence
  ENSG00000114054_47 (sequence is synthesized)
atacttctataatcagtaaacttaattcacaaaattagcgcataagggtattaagtgcatgggaagtaaacacagttatgttacacttaaaattacttttgaatgattgataaaggattt

SEQ ID NO: 200188 - DNA, 120 bp, Artificial Sequence
  ENSG00000114054_48 (sequence is synthesized)
cttcatgattgattatcttaagaaaatggaagtctgtgtaacttgaatttggcagggcatgaaataagtggtaaaaacagcaaactgataacttgagaatcattttcgttttactgagaa

SEQ ID NO: 200189 - DNA, 120 bp, Artificial Sequence
  ENSG00000114054_49 (sequence is synthesized)
tactttatttgctggtagaagttgctaaaaatgcacagaacaaataccaatagaaaatgcactgtatttgaatctccctagtctatataaaatgaacggtgtacagcatctgttggaaaa

SEQ ID NO: 200190 - DNA, 120 bp, Artificial Sequence
  ENSG00000114054_50 (sequence is synthesized)
atggctgcatggacatttcttattttatgcccacttataaataaaaataaaccttttattcaagagtatataaaatctgggaattcatatccatatccacagagggtgtgtggtttttgg

SEQ ID NO: 200191 - DNA, 120 bp, Artificial Sequence
  ENSG00000114054_51 (sequence is synthesized)
cagagatgtactatgtcagaatttcatcttagcttgtcaatgttctgctccttcattatttgtgttccacaaaggtcaaccaaatccagtgaactccaaaacactcttcgcaattaggat

SEQ ID NO: 200192 - DNA, 120 bp, Artificial Sequence
  ENSG00000114054_52 (sequence is synthesized)
gagctgcttactcataggtttaataaaaatggttagcttttaaaacataaaaaggcaaaatgttaaaacggtttttaaattgtacaacaggaaaataaagttaaaaatatgttttttttt

SEQ ID NO: 200193 - DNA, 88 bp, Artificial Sequence
  ENSG00000114054_53 (sequence is synthesized)
tgccaccatgcgcagctaacttttttctatattttttgcagatacgggcttctgccatgtcgcccaggctggtctcagactcctggac

SEQ ID NO: 200194 - DNA, 87 bp, Artificial Sequence
  ENSG00000114054_54 (sequence is synthesized)
tgcgcagctaacttttttctatattttttgcagatacgggcttctgccatgtcgcccaggctggtctcagactcctggactcaagcc

SEQ ID NO: 200195 - DNA, 120 bp, Artificial Sequence
  ENSG00000114054_55 (sequence is synthesized)
tctgtgaattttctatttcttcctcccactgggttttcatctctagccagtcactatatttgacttgctgatttgtattttctttttaggattttacagtttttggaggcagtctgtcag

SEQ ID NO: 200196 - DNA, 120 bp, Artificial Sequence
  ENSG00000114054_56 (sequence is synthesized)
acttttgttgatgtccctggctttctacctggtaagtttttgacagagtgggggctaggagagttgcctttcccagtaaggtgcccactttatttggagatcttcttgcagaactccccg

SEQ ID NO: 200197 - DNA, 120 bp, Artificial Sequence
  ENSG00000114054_57 (sequence is synthesized)
aggacttgtgacttctccatgtattctgggtgtccagaagatagggctgtgtaaggaatggccctctccagaggtgggaaagacctcacagctgagagtggcaggataaccatgtgagga

SEQ ID NO: 200198 - DNA, 120 bp, Artificial Sequence
  ENSG00000114054_58 (sequence is synthesized)
acaggggataggatagtaggagaaggagaagcccacagaggaggcaggagaagaaccaggaagtagcgtgtccttgaggtgggagctgggagcagtagggaccctcgtgaggtgaggtgt

SEQ ID NO: 200199 - DNA, 120 bp, Artificial Sequence
  ENSG00000114054_59 (sequence is synthesized)
gcttctgtaggtctccctagaaaaaacctgtgtcagatccttcactaagcctgctttagtttccaccacctgcttctgcattctttttatggctccttaggtctccaggaaagctaacag

SEQ ID NO: 200200 - DNA, 89 bp, Artificial Sequence
  ENSG00000114054_60 (sequence is synthesized)
ctcctggcttcaagcaatccacccacctcggagaccgtaccctgccttgtgtttctttatacgtcctccttcattttcctggagacagc

SEQ ID NO: 200201 - DNA, 120 bp, Artificial Sequence
  ENSG00000114062_0 (sequence is synthesized)
gcggccgccgcagcccaggcgcgggggcgacgacaggttaaaaatctgtaagagcctgattttagaattcaccagctcctcagaagtttggcgaaatatgagttattaagcctacgctca

SEQ ID NO: 200202 - DNA, 120 bp, Artificial Sequence
  ENSG00000114062_1 (sequence is synthesized)
gatcaaggtagcagctagactggtgtgacaacctgtttttaatcagtgactcaaagctgtgatcaccctgatgtcaccgaatggccacagcttgtaaaagagagttacagtggaggtaaa

SEQ ID NO: 200203 - DNA, 120 bp, Artificial Sequence
  ENSG00000114062_2 (sequence is synthesized)
aggagtggcttgcaggatggagaagctgcaccagtgttattggaactcttctgtctgggagatacaagtttggaagcaatcttggggtacttacccacaaggctggtggagaccagatca

SEQ ID NO: 200204 - DNA, 120 bp, Artificial Sequence
  ENSG00000114062_3 (sequence is synthesized)
ggagaacctcagtctgacgacattgaagctagccgaatgaagcgagcagctgcaaagcatctaatagaacgctactaccaccagttaactgagggctgtggaaatgaagcctgcacgaat

SEQ ID NO: 200205 - DNA, 120 bp, Artificial Sequence
  ENSG00000114062_4 (sequence is synthesized)
gagttttgtgcttcctgtccaacttttcttcgtatggataataatgcagcagctattaaagccctcgagctttataagattaatgcaaaactctgtgatcctcatccctccaagaaagga

SEQ ID NO: 200206 - DNA, 120 bp, Artificial Sequence
  ENSG00000114062_5 (sequence is synthesized)
gcaagctcagcttaccttgagaactcgaaaggtgcccccaacaactcctgctctgagataaaaatgaacaagaaaggcgctagaattgattttaaagatgtgacttacttaacagaagag

SEQ ID NO: 200207 - DNA, 120 bp, Artificial Sequence
  ENSG00000114062_6 (sequence is synthesized)
aaggtatatgaaattcttgaattatgtagagaaagagaggattattcccctttaatccgtgttattggaagagttttttctagtgctgaggcattggtacagagcttccggaaagttaaa

SEQ ID NO: 200208 - DNA, 120 bp, Artificial Sequence
  ENSG00000114062_7 (sequence is synthesized)
caacacaccaaggaagaactgaaatctcttcaagcaaaagatgaagacaaagatgaagatgaaaaggaaaaagctgcatgttctgctgctgctatggaagaagactcagaagcatcttcc

SEQ ID NO: 200209 - DNA, 120 bp, Artificial Sequence
  ENSG00000114062_8 (sequence is synthesized)
tcaaggataggtgatagctcacagggagacaacaatttgcaaaaattaggccctgatgatgtgtctgtggatattgatgccattagaagggtctacaccagattgctctctaatgaaaaa

SEQ ID NO: 200210 - DNA, 120 bp, Artificial Sequence
  ENSG00000114062_9 (sequence is synthesized)
attgaaactgcctttctcaatgcacttgtatatttgtcacctaacgtggaatgtgacttgacgtatcacaatgtatactctcgagatcctaattatctgaatttgttcattatcgtaatg

SEQ ID NO: 200211 - DNA, 120 bp, Artificial Sequence
  ENSG00000114062_10 (sequence is synthesized)
gagaatagaaatctccacagtcctgaatatctggaaatggctttgccattattttgcaaagcgatgagcaagctaccccttgcagcccaaggaaaactgatcagactgtggtctaaatac

SEQ ID NO: 200212 - DNA, 120 bp, Artificial Sequence
  ENSG00000114062_11 (sequence is synthesized)
aatgcagaccagattcggagaatgatggagacatttcagcaacttattacttataaagtcataagcaatgaatttaacagtcgaaatctagtgaatgatgatgatgccattgttgctgct

SEQ ID NO: 200213 - DNA, 120 bp, Artificial Sequence
  ENSG00000114062_12 (sequence is synthesized)
tgacacttcaggaacttttgggagaagaaagaagaaacaagaaaggtcctcgagtggaccccctggaaactgaacttggtgttaaaaccctggattgtcgaaaaccacttatcccttttg

SEQ ID NO: 200214 - DNA, 120 bp, Artificial Sequence
  ENSG00000114062_13 (sequence is synthesized)
aagagtttattaatgaaccactgaatgaggttctagaaatggataaagattatacttttttcaaagtagaaacagagaacaaattctcttttatgacatgtccctttatattgaatgctg

SEQ ID NO: 200215 - DNA, 120 bp, Artificial Sequence
  ENSG00000114062_14 (sequence is synthesized)
tcacaaagaatttgggattatattatgacaatagaattcgcatgtacagtgaacgaagaatcactgttctctacagcttagttcaaggacagcagttgaatccatatttgagactcaaag

SEQ ID NO: 200216 - DNA, 120 bp, Artificial Sequence
  ENSG00000114062_15 (sequence is synthesized)
ttagacgtgaccatatcatagatgatgcacttgtccggctagagatgatcgctatggaaaatcctgcagacttgaagaagcagttgtatgtggaatttgaaggagaacaaggagttgatg

SEQ ID NO: 200217 - DNA, 120 bp, Artificial Sequence
  ENSG00000114062_16 (sequence is synthesized)
agggaggtgtttccaaagaattttttcagctggttgtggaggaaatcttcaatccagatattggtatgttcacatacgatgaatctacaaaattgttttggtttaatccatcttcttttg

SEQ ID NO: 200218 - DNA, 120 bp, Artificial Sequence
  ENSG00000114062_17 (sequence is synthesized)
aaactgagggtcagtttactctgattggcatagtactgggtctggctatttacaataactgtatactggatgtacattttcccatggttgtctacaggaagctaatggggaaaaaaggaa

SEQ ID NO: 200219 - DNA, 120 bp, Artificial Sequence
  ENSG00000114062_18 (sequence is synthesized)
cttttcgtgacttgggagactctcacccagttctatatcagagtttaaaagatttattggagtatgaagggaatgtggaagatgacatgatgatcactttccagatatcacagacagatc

SEQ ID NO: 200220 - DNA, 120 bp, Artificial Sequence
  ENSG00000114062_19 (sequence is synthesized)
tttttggtaacccaatgatgtatgatctaaaggaaaatggtgataaaattccaattacaaatgaaaacaggaaggaatttgtcaatctttattctgactacattctcaataaatcagtag

SEQ ID NO: 200221 - DNA, 120 bp, Artificial Sequence
  ENSG00000114062_20 (sequence is synthesized)
aaaaacagttcaaggcttttcggagaggttttcatatggtgaccaatgaatctcccttaaagtacttattcagaccagaagaaattgaattgcttatatgtggaagccggaatctagatt

SEQ ID NO: 200222 - DNA, 120 bp, Artificial Sequence
  ENSG00000114062_21 (sequence is synthesized)
tccaagcactagaagaaactacagaatatgacggtggctataccagggactctgttctgattagggagttctgggaaatcgttcattcatttacagatgaacagaaaagactcttcttgc

SEQ ID NO: 200223 - DNA, 120 bp, Artificial Sequence
  ENSG00000114062_22 (sequence is synthesized)
agtttacaacgggcacagacagagcacctgtgggaggactaggaaaattaaagatgattatagccaaaaatggcccagacacagaaaggttacctacatctcatacttgctttaatgtgc

SEQ ID NO: 200224 - DNA, 120 bp, Artificial Sequence
  ENSG00000114062_23 (sequence is synthesized)
gtgcttttacttccggaatactcaagcaaagaaaaacttaaagagagattgttgaaggccatcacgtatgccaaaggatttggcatgctgtaaaacaaaacaaaacaaaataaaacaaaa

SEQ ID NO: 200225 - DNA, 120 bp, Artificial Sequence
  ENSG00000114062_24 (sequence is synthesized)
gccgcggccgcgagatccgtgtgtctcccaagatggtggcgctgggctcggggtgactacaggagacgacggggccttttcccttcgccaggacccgacacaccaggcttcgctcgctcg

SEQ ID NO: 200226 - DNA, 120 bp, Artificial Sequence
  ENSG00000114062_25 (sequence is synthesized)
cgcacccctccgccgcgtagccatccgccagcgcgggcgcccgccatccgccgcctacttacgcttcacctctgccgacccggcgcgctcggctgcgggcggcggcgcctccttcggctc

SEQ ID NO: 200227 - DNA, 120 bp, Artificial Sequence
  ENSG00000114062_26 (sequence is synthesized)
ctcctcggaatagctcgcggcctgtagcccctggcaggagggcccctcagccccccggtgtggacaggcagcggcggctggcgacgaacgccgggatttcggcggccccggcgctccctt

SEQ ID NO: 200228 - DNA, 120 bp, Artificial Sequence
  ENSG00000114062_27 (sequence is synthesized)
tcccggcctcgttttccggataaggaagcgcgggtcccgcatgagccccggcggtggcggcagcgaaagagaacgaggcggtggcgggcggaggcggcgggcgagggcgactacgaccag

SEQ ID NO: 200229 - DNA, 120 bp, Artificial Sequence
  ENSG00000114062_28 (sequence is synthesized)
atataacgagggataaatttttggtggtgatagtgtcccagtacaaaaaggctgtaagatagtcaaccacagtagtcacctatgtctgtgcctcccttctttattggggacatgtgggct

SEQ ID NO: 200230 - DNA, 120 bp, Artificial Sequence
  ENSG00000114062_29 (sequence is synthesized)
ggaacagcagatttcagctacatatatgaacaaatcctttattattattataattatttttttgcgtgaaagtgttacatattctttcacttgtatgtacagagaggtttttctgaatat

SEQ ID NO: 200231 - DNA, 120 bp, Artificial Sequence
  ENSG00000114062_30 (sequence is synthesized)
ttattttaagggttaaatcacttttgcttgtgtttattactgcttgaggttgagccttttgagtatttaaaaaatatataccaacagaactactctcccaaggaaaatattgccaccatt

SEQ ID NO: 200232 - DNA, 120 bp, Artificial Sequence
  ENSG00000114062_31 (sequence is synthesized)
tgtagaccacgtaaccttcaagtatgtgctacttttttgtccctgtatctaactcaaatcaggaactgtattttttttaatgatttgcttttgaaacttgaagtcttgaaaacagtgtga

SEQ ID NO: 200233 - DNA, 120 bp, Artificial Sequence
  ENSG00000114062_32 (sequence is synthesized)
tgcaattactgctgttctagcccccaaagagttttctgtgcaaaatcttgagaatcaatcaataaagaaagatggaaggaagggagaaattggaatgttttaactgcagccctcagaact

SEQ ID NO: 200234 - DNA, 120 bp, Artificial Sequence
  ENSG00000114062_33 (sequence is synthesized)
ttagtaacagcacaacaaattaaaaacaaaaacaactcatgccacagtatgtcgtcttcatgtgtcttgcaatgaactgtttcagtagccaatcctctttcttagtatatgaaaggacag

SEQ ID NO: 200235 - DNA, 120 bp, Artificial Sequence
  ENSG00000114062_34 (sequence is synthesized)
ggatttttgttcttgttgttctcgttgttgttttaagtttactggggaaagtgcatttggccaaatgaaatggtagtcaagcctattgcaacaaagttaggaagtttgttgtttgtttat

SEQ ID NO: 200236 - DNA, 120 bp, Artificial Sequence
  ENSG00000114062_35 (sequence is synthesized)
attacctagattttaaatagacaatccaaagtctccccttcgtgttgccatcatcttgttgaatcagccattttatcgaggcacgtgatcagtgttgcaacataatgaaaaagatggcta

SEQ ID NO: 200237 - DNA, 120 bp, Artificial Sequence
  ENSG00000114062_36 (sequence is synthesized)
ctgtgccttgtgttacttaatcatacagtaagctgacctggaaatgaatgaaactattactcctaagaattacattgtatagccccacagattaaatttaattaattaattcaaaacatg

SEQ ID NO: 200238 - DNA, 120 bp, Artificial Sequence
  ENSG00000114062_37 (sequence is synthesized)
ttaaacgttactttcatgtactatggaaaagtacaagtaggtttacattactgatttccagaagtaagtagtttcccctttcctagtcttctgtgtatgtgatgttgttaatttctttta

SEQ ID NO: 200239 - DNA, 120 bp, Artificial Sequence
  ENSG00000114062_38 (sequence is synthesized)
ttgcattataaaataaaaggattatgtatttttaactaaggtgagacattgatatatccttttgctacaagctatagctaatgtgctgagcttgtgccttggtgattgattgattgattg

SEQ ID NO: 200240 - DNA, 120 bp, Artificial Sequence
  ENSG00000114062_39 (sequence is synthesized)
actgattgttttaactgattactgtagatcaacctgatgatttgtttgtttgaaattggcaggaaaaatgcagctttcaaatcattggggggagaaaaaggatgtctttcaggattattt

SEQ ID NO: 200241 - DNA, 120 bp, Artificial Sequence
  ENSG00000114062_40 (sequence is synthesized)
taattaatttttttcataattgagacagaactgtttgttatgtaccataatgctaaataaaactgtggcacttttcaccataatttaatttagtggaaaaagaagacaatgctttccata

SEQ ID NO: 200242 - DNA, 120 bp, Artificial Sequence
  ENSG00000114062_41 (sequence is synthesized)
ttgtgataaggtaacatggggtttttctgggccagcctttagaacactgttagggtacatacgctaccttgatgaaagggaccttcgtgcaactgtagtcatcttaaaggcttctcatcc

SEQ ID NO: 200243 - DNA, 120 bp, Artificial Sequence
  ENSG00000114062_42 (sequence is synthesized)
actgtgcttcttaatgtgtaattaaagtgaggagaaattaaatactctgagggcgttttatataataaattcgtgaagaaatgtgtgctcttcagttctcaagttttattattatggtat

SEQ ID NO: 200244 - DNA, 120 bp, Artificial Sequence
  ENSG00000114062_43 (sequence is synthesized)
ttattaaagttctacaattgtaataacgtatccatatgacaagttttaaagtggtaattgaaataggttatcagatatagagttgttcacatcaagtagacttttaacagagtcagaatg

SEQ ID NO: 200245 - DNA, 120 bp, Artificial Sequence
  ENSG00000114062_44 (sequence is synthesized)
aacctacccttaaaattttagagaaaaaaaatcgtcggttgcacagaatagctgctctagcttgcttaattatgccgggcatgttgtcactcctcttacttttgctgccttttcattact

SEQ ID NO: 200246 - DNA, 120 bp, Artificial Sequence
  ENSG00000114062_45 (sequence is synthesized)
atttaatggaatgtccctgaacaataaggaagagcaaaacatagacattttgactacagtggatacttcctctaccccaaatgttatgttataaaagtactttttttgcccaggtactct

SEQ ID NO: 200247 - DNA, 120 bp, Artificial Sequence
  ENSG00000114062_46 (sequence is synthesized)
attatatattttggttttctttgaattagacctcaatctccaggaagctctggagggaaaaaaaggaaccataaactaaagtaactggttttccaaataaatgtaaacttttttaacctt

SEQ ID NO: 200248 - DNA, 120 bp, Artificial Sequence
  ENSG00000114062_47 (sequence is synthesized)
ttattattatagaacatttcaaacatacataaaacatgaaaacagcctgcagccaaacttttctggaccttggcagctccagcaaatgagctggtcatcctaaccctggtttcctgagac

SEQ ID NO: 200249 - DNA, 120 bp, Artificial Sequence
  ENSG00000114062_48 (sequence is synthesized)
aactacttttggggatgcttgcttgtatagggagatgatagatagatagatacatatcaaaaagaaacttgaaaaaggcttcgaacagaacttgccgatgttactcatccctcctcggta

SEQ ID NO: 200250 - DNA, 120 bp, Artificial Sequence
  ENSG00000114062_49 (sequence is synthesized)
cagacattctgttagaacagatggttgtaatggggcagcatcactccctattcccattaaaaacatgaccattctgagatttcaggccccttcgaggaatttttctcaagaattccatac

SEQ ID NO: 200251 - DNA, 120 bp, Artificial Sequence
  ENSG00000114062_50 (sequence is synthesized)
aaactgtcagaggaagaaatgtcgtcccaagactagtccctgtgtagtcttgatccctttacctgcttactgtaattttttttctctgactttccgccagtgtctaagggccatctgtac

SEQ ID NO: 200252 - DNA, 120 bp, Artificial Sequence
  ENSG00000114062_51 (sequence is synthesized)
ccctcccacccttccatgagccactgtataatccaaaaacacaccttccatttgctccctcacttgtctccttttacctcaacagtgttagtgtgtaaagaattgcctggggagggtaga

SEQ ID NO: 200253 - DNA, 120 bp, Artificial Sequence
  ENSG00000114062_52 (sequence is synthesized)
gggttttacaagtacagagtcccaagtcttttctcccctccccgttagtgggttggcatttattaataggcactgcaagattttgatgcaggtgtggggtagatatcactgtgaaaggct

SEQ ID NO: 200254 - DNA, 120 bp, Artificial Sequence
  ENSG00000114062_53 (sequence is synthesized)
actaatgcatggtagtttcaccgaaagtacagtcttcaaggatccttataatctcctcattgccaaaatcagtaacatctataaccttgacaacaccctagcttgggctgttgcttctct

SEQ ID NO: 200255 - DNA, 120 bp, Artificial Sequence
  ENSG00000114062_54 (sequence is synthesized)
ggctacttgtttttccatcccagtttacccagattttagatggatactcctccaattctgcttaaagtccttacctgttcttgcccagttccctctagtcaacctcagtcactcccaaag

SEQ ID NO: 200256 - DNA, 120 bp, Artificial Sequence
  ENSG00000114062_55 (sequence is synthesized)
attcttccccaatcccatatcttttgctcagacctctgtctctgggatttctttgttacctcatagtcagtagtcctaaaaacaaaattcttcatcttgcatctctatcgaccgaccatt

SEQ ID NO: 200257 - DNA, 120 bp, Artificial Sequence
  ENSG00000114062_56 (sequence is synthesized)
ctttgtttctttttaagaaatgtaaccttcaccccaatcatcaaaatctctcattcctcaattgtcacaggttgtcacttctttccccctaaacctctcccatcattccttccttcttta

SEQ ID NO: 200258 - DNA, 120 bp, Artificial Sequence
  ENSG00000114062_57 (sequence is synthesized)
tactgcccttacaggtcctgatcctctgactcacccggacattcttagcagctgcctaatttcactccctgactctcatctccctcttccaatccttttcattgtgctagaacactatct

SEQ ID NO: 200259 - DNA, 120 bp, Artificial Sequence
  ENSG00000114062_58 (sequence is synthesized)
tgctaattttaatatcctctgcattcagtgcctccacagattgccccctcactgacctttccaatttggccttgtgttacacactttcctcgctgcattcctacccagcatcttcacttg

SEQ ID NO: 200260 - DNA, 120 bp, Artificial Sequence
  ENSG00000114062_59 (sequence is synthesized)
tcatatttctcaaatactcttcatgaccagatatttaaagtacctcatccatgaagacttcatcaacccccaaagtgcctccaatgcttccgtggtagcacagcataatggggtacattt

SEQ ID NO: 200261 - DNA, 120 bp, Artificial Sequence
  ENSG00000114062_60 (sequence is synthesized)
cttagttgaacagtgaggagtcactgggattcttacagagtgtcttagggtctcctcttgatactctttccacatttcagttaaggaattttcttacatctttttttcttctaataacct

SEQ ID NO: 200262 - DNA, 120 bp, Artificial Sequence
  ENSG00000114062_61 (sequence is synthesized)
ttgcctggagtgtaagtaaattcatgatagagactgtcatttttaaaaaaaaaaacaaaccattttgcctttcacatgttattacctccatctttctgttatcttgtcagtgttgccacc

SEQ ID NO: 200263 - DNA, 120 bp, Artificial Sequence
  ENSG00000114062_62 (sequence is synthesized)
taaatgattgaaaatgaccgagcatgcagtagaatgtagtgaagtttcctatttcatccattttttgcataagtgcattggtatctgtatatccatctgcccaagcaccagttgttgaaa

SEQ ID NO: 200264 - DNA, 120 bp, Artificial Sequence
  ENSG00000114062_63 (sequence is synthesized)
agactattatttccccatgaatggtcctggtacccttgtcaaagaacagttgaccataaatataagactttctggattctcagtcttactccattgccctatatgtctgtcgttatacca

SEQ ID NO: 200265 - DNA, 120 bp, Artificial Sequence
  ENSG00000114062_64 (sequence is synthesized)
gcaccgcactgtcttgatggctgtagcttggtagtaagtttagatttgggatgtgcaagtcctccattttttttttttttttccccaaaatcattttgtctgttttgggtcccttgcatt

SEQ ID NO: 200266 - DNA, 120 bp, Artificial Sequence
  ENSG00000114062_65 (sequence is synthesized)
gcatatgaatttttatatgatcattgtgtcaattcctgcaaaacagctgggatcttgatagggatttagttgaattggtagataaatttgagaaataactgctattttaatggtgttagg

SEQ ID NO: 200267 - DNA, 120 bp, Artificial Sequence
  ENSG00000114062_66 (sequence is synthesized)
ttttctgttccatgactgtgggatgtctttgcatttgcttaggtctttatttcagtgatgttttagagatttcagtgtgcaagtcttgacgtctttaatttttttctaagtattttactg

SEQ ID NO: 200268 - DNA, 120 bp, Artificial Sequence
  ENSG00000114062_67 (sequence is synthesized)
atttttgtattcatcactggtgttagaaataaaattaatttttgtatattgattttgtatattgtagcttttctaaaattctttttttgtcacttagtattttttgcatatgagatcatg

SEQ ID NO: 200269 - DNA, 120 bp, Artificial Sequence
  ENSG00000114062_68 (sequence is synthesized)
ttttgtcacttagtattttttgcatatgagatcatgcatctgtgaacagaaatacttttacttcttcctttccagtctagattcctattatttcattttcttgccttagtgtgctggcta

SEQ ID NO: 200270 - DNA, 120 bp, Artificial Sequence
  ENSG00000114062_69 (sequence is synthesized)
gcacctccagtacaatattggatagaagtgacaagagcagacatctttttcttgttcctgattttaaggggaaagcattcagtctttcaccattgagtatgatgttagctagctgtgggt

SEQ ID NO: 200271 - DNA, 120 bp, Artificial Sequence
  ENSG00000114062_70 (sequence is synthesized)
ttgcttcaagttgaggaaattcttttattaaacctagtttactgagtgttttttaatcaaaaaaaaaaaaaggaggggctgtgggttttgttaaatgcttcttctgtatcaagattttca

SEQ ID NO: 200272 - DNA, 120 bp, Artificial Sequence
  ENSG00000114062_71 (sequence is synthesized)
tgttgttttgtcctttattaatatgttgtattaatggacttttgtatattgaattaactttgcattcctgggataatctcagttgtccatgctacataaaccttgttctatgctgctgga

SEQ ID NO: 200273 - DNA, 120 bp, Artificial Sequence
  ENSG00000114062_72 (sequence is synthesized)
tttattttttgttttgcaagccagctctgcctccttacagtatgacatctgatgctggagggtcgcactttcaaaaatgagtcagctggtacatggggttatcatcaatttttagctctt

SEQ ID NO: 200274 - DNA, 120 bp, Artificial Sequence
  ENSG00000114062_73 (sequence is synthesized)
gcgcgggggcgacgacagagactgccatactgttttccacagtgactgcaccattttacattcccaccagcagtgaataagggttccaatttctctgcatcttttctaacacttgagggg

SEQ ID NO: 200275 - DNA, 120 bp, Artificial Sequence
  ENSG00000114062_74 (sequence is synthesized)
aggtatggtgtcaagaaaacatagtcaccattattacgaaaagtaaaatatggaagagatgatccctaccatcaatcagcttacaactagaggcactgacaaatgtatacagatagctgt

SEQ ID NO: 200276 - DNA, 120 bp, Artificial Sequence
  ENSG00000114062_75 (sequence is synthesized)
aatatgacggtggctataccagggactctgttctgattaggtgaggtacttagttcttcagaggaagatttgattcaccaaaggggtgtgtgattttgcttcagacctttatctctaggt

SEQ ID NO: 200277 - DNA, 120 bp, Artificial Sequence
  ENSG00000114062_76 (sequence is synthesized)
actaattcccaaataagcaaactcacaaattgtcatctatatacttagatttgtatttgtaatataatcaccatttttcagagctaatcttgtgatttatttcatgaatgaagtgttgtt

SEQ ID NO: 200278 - DNA, 120 bp, Artificial Sequence
  ENSG00000114062_77 (sequence is synthesized)
atatataagtctcatgtaatctcctgcatttggcgtatggattatctagtattcctcactggttagagtatgcttactgctggttagaagataattaaaataaggctaccatgtctgcaa

SEQ ID NO: 200279 - DNA, 120 bp, Artificial Sequence
  ENSG00000114062_78 (sequence is synthesized)
taattattaacttgtgactgtatacctaccgaaaaccttgcattcctcgtcacatacatatgaactgtctttatagtttctgagcacattcgtgattttatatacaaatccccaaatcat

SEQ ID NO: 200280 - DNA, 120 bp, Artificial Sequence
  ENSG00000114062_79 (sequence is synthesized)
attagacaattgagaaaatactttgctgtcattgtgtgaggaaacttttaagaaattgccctagttaaaaattattatggggctcacattggtttggaatcaaattagtgtgattcattt

SEQ ID NO: 200281 - DNA, 120 bp, Artificial Sequence
  ENSG00000114062_80 (sequence is synthesized)
acttttttgattcccagcttgttaattgaaagccatataacatgatcatctatttagaatggttacattgaggctcggaagattatcatttgattgtgctagaatcctgttatcaaatca

SEQ ID NO: 200282 - DNA, 120 bp, Artificial Sequence
  ENSG00000114062_81 (sequence is synthesized)
ttttcttagtcatattgccagcagtgtttctaataagcatttaagagcacacactttgcagtcttgtaaaacaggtttgagtattttctccaccttagaggaagttacttgacttctcag

SEQ ID NO: 200283 - DNA, 120 bp, Artificial Sequence
  ENSG00000114062_82 (sequence is synthesized)
tgacctaacctctaaagtgcatttactgatgtcctctctgtggttttgttgtggaaagatttagttaaatgaactgtaagaattcagtacctaaaatggtatctgttatgtagtaaaaac

SEQ ID NO: 200284 - DNA, 120 bp, Artificial Sequence
  ENSG00000114062_83 (sequence is synthesized)
tcaatggatacagtatcttatcatcgtcactagctttgagtaatttataggataaaggcaacttggtagttacacaacaaaaagtttatgatttgcattaatgtatagtttgcattgcag

SEQ ID NO: 200285 - DNA, 120 bp, Artificial Sequence
  ENSG00000114062_84 (sequence is synthesized)
accgtctcaactatatacaatctaaaaataggagcatttaattctaagtgtatttcccatgacttacagttttcctgtttttttccccttttctctatttaggttacctacatctcatac

SEQ ID NO: 200286 - DNA, 90 bp, Artificial Sequence
  ENSG00000114062_85 (sequence is synthesized)
gatcgtgccactccagcccacggaaaaaaatgaaaaattgttttcaaaaatagtatgttcacatacgatgaatctacaaaattgttttgg

SEQ ID NO: 200287 - DNA, 120 bp, Artificial Sequence
  ENSG00000114062_86 (sequence is synthesized)
gaattattacattttctcaaatgaagagatcatttaagaaaaacaaaatgctggaaaatagtccttaaaaacttttctataataattactcttctgatgaattttacattgacacctaat

SEQ ID NO: 200288 - DNA, 120 bp, Artificial Sequence
  ENSG00000114062_87 (sequence is synthesized)
cattttcccatggttgtctacaggaagctaatggggaaaaaaggaacttttcgtgacttgggagactctcacccagaatttgtcaatctttattctgactacattctcaataaatcagta

SEQ ID NO: 200289 - DNA, 120 bp, Artificial Sequence
  ENSG00000114062_88 (sequence is synthesized)
aataaaactagtatacttttctctcctagagagttacagtggaggtaaaaggagtggcttgcaggatggagaagctgcaccagtgttattggaagtgagccaccatttgaatttgctagc

SEQ ID NO: 200290 - DNA, 120 bp, Artificial Sequence
  ENSG00000114062_89 (sequence is synthesized)
tcatgctgcagtattcagattagtgggtgttttgtgatcatattttctgcgattcaaatcaagacctaaaattgattctcattctgagatttacattttattatccaatgttatttggtt

SEQ ID NO: 200291 - DNA, 120 bp, Artificial Sequence
  ENSG00000114062_90 (sequence is synthesized)
attgtttcagttttaaaatttctgacttgttattctgacacactttaggataacctaagtcaatagtttaatacaaaaatttccctttggttatatgttttgaattaggttatatgttct

SEQ ID NO: 200292 - DNA, 120 bp, Artificial Sequence
  ENSG00000114062_91 (sequence is synthesized)
gcatttacaagcacatacaggattcttacttccagcaacttggcagtaaaagaataagtagactctttaggagccaaagtcaagcttgggaactgttgctaggtggtatatatttcatag

SEQ ID NO: 200293 - DNA, 66 bp, Artificial Sequence
  ENSG00000114062_92 (sequence is synthesized)
caagcttgggaactgttgctaggtggtatatatttcatagtttatgtttgtttccaagacaagact

SEQ ID NO: 200294 - DNA, 120 bp, Artificial Sequence
  ENSG00000114062_93 (sequence is synthesized)
ccaagttgctgggactaaaggcacccaccaccacacccggctaagagacgaggtttcatcatgttgcccaggttgaccttgaactcctgagctcaagtggtccttatgtcttgacctccc

SEQ ID NO: 200295 - DNA, 120 bp, Artificial Sequence
  ENSG00000114062_94 (sequence is synthesized)
aaagtgctgagattacagacatgaactaccacacctggcatatgtcatagttttgagagtttgaattctaacctcgggactttggtaacttatttataatattctagaaatatactgtta

SEQ ID NO: 200296 - DNA, 120 bp, Artificial Sequence
  ENSG00000114062_95 (sequence is synthesized)
atatattcatttttctcttgattaaaaaacaatttccaatttgagtagaacaactttgctatgtttaatagacccaggacagatttattttaaggtaataatctttcaatccttcttctt

SEQ ID NO: 200297 - DNA, 120 bp, Artificial Sequence
  ENSG00000114062_96 (sequence is synthesized)
ctatactggattggtttaaattacttagcttgtcttatcaatggtttttaatagcctactttaatatatgtaaaaagtagtaattaatatgttacagtttggtggcaaacattttgatgc

SEQ ID NO: 200298 - DNA, 120 bp, Artificial Sequence
  ENSG00000114062_97 (sequence is synthesized)
caaagttcacatattctcttgcttagggaacagaaattgggaagatagatgtagttatcatttgataatgtatttaaactctatcccatttcaggatctcaaaactttgtaacagttaca

SEQ ID NO: 200299 - DNA, 120 bp, Artificial Sequence
  ENSG00000114062_98 (sequence is synthesized)
tattgtacttctaagacttagatttgtttttcttcttgtgtcttacctttttgcagtaatatttttattttcctatcatcatgtcctcattttttccctctcttctctttccctgttaat

SEQ ID NO: 200300 - DNA, 120 bp, Artificial Sequence
  ENSG00000114062_99 (sequence is synthesized)
agaagtaggcccctggtggccgcggctgctgcagccgtaactgtcagtcctggctgagcgacggcgggagggttttgtcgcccgaggggacgcgagcgggcccggggcggggcgggacgt

SEQ ID NO: 200301 - DNA, 120 bp, Artificial Sequence
  ENSG00000114062_100 (sequence is synthesized)
gcgaggcgtcgagatttgggcctcctaggagccaggctcttcgagccagccggggccccagacagggaagggcaggccctttccttcaaaggggagccctttctcggcgttttcaaggtt

SEQ ID NO: 200302 - DNA, 120 bp, Artificial Sequence
  ENSG00000114098_0 (sequence is synthesized)
gcttccacctctaacccaggctcagagtagctgctgtttctgagagaacgattcgtaggacagcccctgacgccattcccttttgcccttctttctgcgggcctttccggtacttgagcg

SEQ ID NO: 200303 - DNA, 120 bp, Artificial Sequence
  ENSG00000114098_1 (sequence is synthesized)
gtgtccagagcgtggccagttctcgtctatctggctgcctttagggagcggtgcctagcgttggccaatagttggctgtcgaaagtgccggcccccgcgccggcgcctgcagcagccggg

SEQ ID NO: 200304 - DNA, 120 bp, Artificial Sequence
  ENSG00000114098_2 (sequence is synthesized)
tgggaaggctcaagatggcgtgcttgttggagaccccaatccgcatgagcgtcctttcggaagtaacagctagcagtcgccactatgttgacaggctatttgaccctgatccccagaaag

SEQ ID NO: 200305 - DNA, 120 bp, Artificial Sequence
  ENSG00000114098_3 (sequence is synthesized)
ttctacaaggtgtcatagacatgaaaaatgctgtaattggaaacaacaagcagaaagccaatctcattgttttaggagctgttccaagattgttgtacttgcttcagcaagaaacctcaa

SEQ ID NO: 200306 - DNA, 120 bp, Artificial Sequence
  ENSG00000114098_4 (sequence is synthesized)
gcacagagctgaaaactgaatgtgcagtggtgttgggaagtcttgctatgggtactgaaaacaatgtcaagtctctactggactgccatattatccctgccttattgcaaggactactgt

SEQ ID NO: 200307 - DNA, 120 bp, Artificial Sequence
  ENSG00000114098_5 (sequence is synthesized)
ccccagacctgaagtttattgaagcttgcctccgatgcctgcgtaccatcttcaccagtcctgtcactccagaggagctactgtatacagatgccacagtgataccacacctcatggcac

SEQ ID NO: 200308 - DNA, 120 bp, Artificial Sequence
  ENSG00000114098_6 (sequence is synthesized)
tgcttagcaggtcccgctatacccaggagtacatctgtcagatcttctcacactgctgtaaagggccagatcatcaaacaattttatttaaccacggtgcagttcagaatattgctcacc

SEQ ID NO: 200309 - DNA, 120 bp, Artificial Sequence
  ENSG00000114098_7 (sequence is synthesized)
tactaacctcactgtcctacaaagttcgaatgcaagcactgaaatgtttctcagttttagcttttgaaaacccccaggtatcgatgaccctggtaaatgttttggttgatggagaattgt

SEQ ID NO: 200310 - DNA, 120 bp, Artificial Sequence
  ENSG00000114098_8 (sequence is synthesized)
taccacagatttttgtgaagatgttacagagggataagcctattgagatgcagctcacatcagcaaaatgtttaacttacatgtgtagagctggagcaattcggacagatgataactgta

SEQ ID NO: 200311 - DNA, 120 bp, Artificial Sequence
  ENSG00000114098_9 (sequence is synthesized)
ttgtattaaagacattaccttgtttggttcgaatgtgcagtaaggagagattactagaggagagagttgaaggagctgagacacttgcctatctgattgaaccagatgttgagctacaga

SEQ ID NO: 200312 - DNA, 120 bp, Artificial Sequence
  ENSG00000114098_10 (sequence is synthesized)
gaatcgctagcataactgatcacctcattgccatgcttgctgattatttcaagtatcccagctcagtgagtgccatcactgatattaaaaggcttgatcatgatttaaaacatgctcacg

SEQ ID NO: 200313 - DNA, 120 bp, Artificial Sequence
  ENSG00000114098_11 (sequence is synthesized)
aactccgccaggctgcattcaagctctatgcctctcttggagcaaatgatgaagacatccggaagaagatcattgagactgaaaatatgatggaccgaattgtgactggcttgtctgagt

SEQ ID NO: 200314 - DNA, 120 bp, Artificial Sequence
  ENSG00000114098_12 (sequence is synthesized)
ctagtgtcaaggtgcggttagctgccgtcagatgtttgcacagtttatccagatctgtgcagcagcttcgaaccagtttccaggatcatgctgtttggaaacctttaatgaaggttttac

SEQ ID NO: 200315 - DNA, 120 bp, Artificial Sequence
  ENSG00000114098_13 (sequence is synthesized)
aaaatgcaccagatgaaatcctagtggtagcatcttccatgctgtgtaatcttcttcttgaattttctccaagcaaagagccaattttggaatcaggagccgtagagctactttgtggat

SEQ ID NO: 200316 - DNA, 120 bp, Artificial Sequence
  ENSG00000114098_14 (sequence is synthesized)
taactcagagtgaaaatcctgctttacgagtgaatggaatttgggctttaatgaatatggcatttcaggctgaacaaaaaataaaagcagatattttacgaagcttgagtactgaacagc

SEQ ID NO: 200317 - DNA, 120 bp, Artificial Sequence
  ENSG00000114098_15 (sequence is synthesized)
tattccggttattatcagattcagatttgaatgtgctgatgaagacattgggacttcttagaaatctcctctccactcgtcctcatatagataaaataatgagtactcatggaaagcaaa

SEQ ID NO: 200318 - DNA, 120 bp, Artificial Sequence
  ENSG00000114098_16 (sequence is synthesized)
ttatgcaagccgtcactcttattctagaaggggaacataacattgaggtcaaagagcagacactgtgcatcttagccaacatagcggatgggacaacagcaaaagatcttattatgacca

SEQ ID NO: 200319 - DNA, 120 bp, Artificial Sequence
  ENSG00000114098_17 (sequence is synthesized)
atgatgatatcctacagaaaatcaagtattacatgggccattcacatgttaaactgcagcttgcagccatgttttgtatatcaaacctcatatggaatgaagaggaaggttcacaagaac

SEQ ID NO: 200320 - DNA, 120 bp, Artificial Sequence
  ENSG00000114098_18 (sequence is synthesized)
gccaggataaattacgagacatgggcatcgtagatattctacacaaactgagtcagtcaccagattcaaacctttgtgacaaggcaaagatggcactgcagcagtacctggcatgatggg

SEQ ID NO: 200321 - DNA, 120 bp, Artificial Sequence
  ENSG00000114098_19 (sequence is synthesized)
atttgcacaagtcaccttggactgcagggagctgttttgcaaaagcagtttagtaggcttagatctcaaattcatcttgagaacatttttttgaggtagtaatttcctcagaagactctt

SEQ ID NO: 200322 - DNA, 120 bp, Artificial Sequence
  ENSG00000114098_20 (sequence is synthesized)
gtgttttgttttggtttttttttctgagctactcggactctttattagaacaatcaatcattttcctttggacctacaatttttgcctatgctgcagccactttgtgagtgagaatgaat

SEQ ID NO: 200323 - DNA, 120 bp, Artificial Sequence
  ENSG00000114098_21 (sequence is synthesized)
atgtctgtgtgaacacacaggcatgcgtgtgtatgtgcacgtacatgggccagaatgaatggatgtgtgtgtgtgagggatacctcagatttttcttttcttattttgtgtgaaaatctc

SEQ ID NO: 200324 - DNA, 120 bp, Artificial Sequence
  ENSG00000114098_22 (sequence is synthesized)
ttttctacagattttccagggtttaagcattgcttgctgtataaaaaactttactgaattatatacagtttgaatgaaatgttattttaaaaacaaaacaattgttaagtgttccataaa

SEQ ID NO: 200325 - DNA, 120 bp, Artificial Sequence
  ENSG00000114098_23 (sequence is synthesized)
tccataaaggttatgttgaattttggtcagatgaatatttgtaagtaaaaaatatatgcatttctgaacctcaacttacatagattttctttatataaaaaaaaagaaaaaaaaagaaaa

SEQ ID NO: 200326 - DNA, 120 bp, Artificial Sequence
  ENSG00000114098_24 (sequence is synthesized)
atagttggcctgattaacaggcactatacatggtgctgtgcaaaatagtaagctagcatcttactgccgtcaatattagcaggtacagagccttttttcatcctaattcagtaagttctc

SEQ ID NO: 200327 - DNA, 120 bp, Artificial Sequence
  ENSG00000114098_25 (sequence is synthesized)
aggcttccaagtcaaatggagaagtaaagtgaggcaacagattcaccataggctttttgaagcatcaaagggaaatataactactgatagtgaaagcccagccatgacccagatgggctt

SEQ ID NO: 200328 - DNA, 120 bp, Artificial Sequence
  ENSG00000114098_26 (sequence is synthesized)
acccttgacaggaactggggaccaagagcctcccaattgccctaactcctgtcattggtattagcaatatctggccagatttagaaccagtcatggaaacttgtgctcaaactaaaagta

SEQ ID NO: 200329 - DNA, 120 bp, Artificial Sequence
  ENSG00000114098_27 (sequence is synthesized)
ggtcatcacttcccagaaacagaataccttgtgcttcctgaaacagcatatatcactgtgaaactaaagaatattctacagacacccctgtagaaagaaacaaagaacaggatagtttag

SEQ ID NO: 200330 - DNA, 120 bp, Artificial Sequence
  ENSG00000114098_28 (sequence is synthesized)
aaagctttctgttagctgtattcagcaaatttcatactagttgctcaggactgctagttggtatgcttttgtaaaacgagattgaaatttaataaaagatgcaactaaaatctttcctgc

SEQ ID NO: 200331 - DNA, 120 bp, Artificial Sequence
  ENSG00000114098_29 (sequence is synthesized)
atgaagctaaaagcactcaagttgagagaggggcaagggaatctccccaggatgactgaagatgacttctttttacagcaagtactgttagcctttctgcaccccttagcttggcccctg

SEQ ID NO: 200332 - DNA, 120 bp, Artificial Sequence
  ENSG00000114098_30 (sequence is synthesized)
ctccaacttctgggtcagcagcaaggtgaactcaacagaagttgctcttgactgtttgaaggtagaagcagcctaccttttctctttgctaaaagaaggtcaaaggcttcgcaaccagga

SEQ ID NO: 200333 - DNA, 120 bp, Artificial Sequence
  ENSG00000114098_31 (sequence is synthesized)
tgcaaggtctgcggtccagaagcttgcggtgagtgtgtgccactgatggagctccaagcccacccaccagccactcctgatggggttgctcacactgcagctgccctatcaccaccctgc

SEQ ID NO: 200334 - DNA, 120 bp, Artificial Sequence
  ENSG00000114098_32 (sequence is synthesized)
acgttccttggaagatttaaatgtttggttgcaaatgaatgttttaaaaatgtatttaatgcaatttttcctgctctcaacatgaccacccaagattcaaacacagagacttccaagtta

SEQ ID NO: 200335 - DNA, 120 bp, Artificial Sequence
  ENSG00000114098_33 (sequence is synthesized)
ctattttttcagaacatcaccgattttaaaatctgtcacaacaggacttggttttgtgcagatatcagagtgctaatgtgagaaacccagttaaaagaaaacttagtttattgggaagaa

SEQ ID NO: 200336 - DNA, 120 bp, Artificial Sequence
  ENSG00000114098_34 (sequence is synthesized)
agcctcaggcccactcgtttctagaactgtgaaaatatccttggttggcatttttaacacaaaacactatagtgttggtattaaatagtactaggtaaatataaagaaaccaataatgaa

SEQ ID NO: 200337 - DNA, 120 bp, Artificial Sequence
  ENSG00000114098_35 (sequence is synthesized)
ttgctgagacaatcttgaacccaaatagcattagaaagctgaaggcccaatgaaataacactttcacacttaaactctgtggataaattttgcctgtgggtataaacagatggtcaaatt

SEQ ID NO: 200338 - DNA, 120 bp, Artificial Sequence
  ENSG00000114098_36 (sequence is synthesized)
aaaaatgctttactataattaacttttctgatttgaatgaagggaaatgtatttattgaaacaaagctgtttgctgctttatgcaggtgcagtgttcagtcagcaaggaagtgggaagag

SEQ ID NO: 200339 - DNA, 120 bp, Artificial Sequence
  ENSG00000114098_37 (sequence is synthesized)
tggacatggtattgtgtctacacccaagttcttaactaagcttctcgctctaatactgcattctgtttctccttttgtgccctgattgtaatccaaaatttatgaactagaaaagaatgt

SEQ ID NO: 200340 - DNA, 120 bp, Artificial Sequence
  ENSG00000114098_38 (sequence is synthesized)
ccaatttaataagttgcatttttttttctttaagcactttattcagaacaatacatgttcttctggtagtgtttggataatatgattttaacacatgctaataaaagccaagaaaaatca

SEQ ID NO: 200341 - DNA, 120 bp, Artificial Sequence
  ENSG00000114098_39 (sequence is synthesized)
ataacctgccccttacgcctgtcattcagcctggcaggtccttagtgggctagacctacctttctgatgagctgcccgcccccagcgcaagatgattgtttgagaggtaaaaactcttgc

SEQ ID NO: 200342 - DNA, 120 bp, Artificial Sequence
  ENSG00000114098_40 (sequence is synthesized)
caaaaacaacgttaaacttttaatggatgttaacatacttgcatttacaagcagtgaagtttgtcaccttcatgttgttatttatgcagcattaacctttttctccagatcattgagact

SEQ ID NO: 200343 - DNA, 120 bp, Artificial Sequence
  ENSG00000114098_41 (sequence is synthesized)
gaaaatatgatggaccgaattgtgactggcttgtctgagtctagtgtcaaggtgcggttagctgccgtcaggtatgagctttaaatggtctgaataaaaaccttttgccatatatttaac

SEQ ID NO: 200344 - DNA, 120 bp, Artificial Sequence
  ENSG00000114098_42 (sequence is synthesized)
ctgtttcctttctggtccttcactgagtaaacacagactacaaatgttcctcaaaaatctgctcaggtgaattcatagagtatataacattgtctaacagagagcctggcctccaaaccc

SEQ ID NO: 200345 - DNA, 120 bp, Artificial Sequence
  ENSG00000114098_43 (sequence is synthesized)
cataaagtggtctgatgtagttcacttaacaatgtagatatgcttgaagtgtacattagtcattgtaaaatgccagccagtttgtttgaaaagtaaaagttttgatttcttgtgaagcta

SEQ ID NO: 200346 - DNA, 120 bp, Artificial Sequence
  ENSG00000114098_44 (sequence is synthesized)
cgcatgagcgtcctttcgtttttttaaagaaaaagacgactttcacctttcactatgttgctcttgaaccaggaccaggaatgaaagttactgggagataacttcgaaggattttgcaac

SEQ ID NO: 200347 - DNA, 120 bp, Artificial Sequence
  ENSG00000114098_45 (sequence is synthesized)
ctctcttggagcaaatgatgaagacatccggaagaaggtgagtctgggagaggggcgtcccccagtcctgacagccagcaggcagggagtgacgtcaacctgaaagtcgtggtgaagagc

SEQ ID NO: 200348 - DNA, 120 bp, Artificial Sequence
  ENSG00000114098_46 (sequence is synthesized)
atgggacccggatttggggggttgtttgtttgtttttagaacatagagtggcatggccgtgctggaatgacaaataactggcgtgctttttttttgtgtcattaatatgaattattatgt

SEQ ID NO: 200349 - DNA, 120 bp, Artificial Sequence
  ENSG00000114098_47 (sequence is synthesized)
tgcacatttttgcatgtgttctgataaaaatcaattctagcactgtgaagcttcagacaccttgaaagtcctaacattagaattgtaaatgttatttatggaaataccttccaatgctat

SEQ ID NO: 200350 - DNA, 120 bp, Artificial Sequence
  ENSG00000114098_48 (sequence is synthesized)
tgagaaattcaaatctctattgtatattgttctttgatatgtggcttagttttatgttttgattttttttgctactgtgcaagtttaatgtgaataaaatctttgtggaatgatgatttt

SEQ ID NO: 200351 - DNA, 120 bp, Artificial Sequence
  ENSG00000114098_49 (sequence is synthesized)
atgtttagtgagtggtcatctgaattttccagctccccagaaaatgtatgcactggtatagcacccttatgttactaaagcctagtctaacactgaactcatgttcttgatgagaatact

SEQ ID NO: 200352 - DNA, 120 bp, Artificial Sequence
  ENSG00000114098_50 (sequence is synthesized)
tctagatgaggagtatagtggtaagtaagctctgacttggctccttccacaaaccaaaaagctggaacttaccactcaaaaacatgtataacctaataaattctacacaaggctttcaag

SEQ ID NO: 200353 - DNA, 120 bp, Artificial Sequence
  ENSG00000114098_51 (sequence is synthesized)
accatcagagagcaaaaccacatgttctgtcttgaggagccatagcagaaagagcaaattagtcattatttactgaacatgatgatttactaaatctctccatctgcattagtattttaa

SEQ ID NO: 200354 - DNA, 120 bp, Artificial Sequence
  ENSG00000114098_52 (sequence is synthesized)
ggagcactgtgagagaaatcacaaagtattagagtttaccatgattcagagaagttcttcaggcctgtagaaagaggagtatggaacaaccttacatttgttgaaataacttgaaaagga

SEQ ID NO: 200355 - DNA, 120 bp, Artificial Sequence
  ENSG00000114098_53 (sequence is synthesized)
accatttcttgaagaaactgaagtaatagcaataagatttgatgtgtgagtagctttgatttaaaatcaatgcaaaaagcacaactaataaattgaatgtttccatgtacctcactttat

SEQ ID NO: 200356 - DNA, 120 bp, Artificial Sequence
  ENSG00000114098_54 (sequence is synthesized)
ttcagttaacaagatactttgacttgaagtgtttttagtgtatccctatgaaaatcatttttggtacatctaagttttcacttataaactgttatttcaaagcaaacatactagtgatat

SEQ ID NO: 200357 - DNA, 120 bp, Artificial Sequence
  ENSG00000114098_55 (sequence is synthesized)
atatatgatttatggatgttgacgccaatgttcagtttgggtacgttggtgtattgcaaggggagaggcttttataacaatagatttgaacatttttaaaaaattggactgtgtaactta

SEQ ID NO: 200358 - DNA, 120 bp, Artificial Sequence
  ENSG00000114098_56 (sequence is synthesized)
aatacacaattatttggtttaggatggttattagggcccattagaaacaggagaagtattttacccattcttaaagctctaaaaaaccatctcatggactgaaaggtagatagacagatg

SEQ ID NO: 200359 - DNA, 120 bp, Artificial Sequence
  ENSG00000114098_57 (sequence is synthesized)
gaccacaatgggaaataggatgtccatttgtacttctttgtacttttttgttaataaactgttttggaattaatggcttaatttgtgatatcatgttctagaaatacctgcaacatgaca

SEQ ID NO: 200360 - DNA, 120 bp, Artificial Sequence
  ENSG00000114098_58 (sequence is synthesized)
gtctaatcagtagtctattaaaacttgtattcataatgtgtataatttcctggtaaggctaactcctgatcgtttctgtagaaagatgacaaataaagaaaaagttataattattaatta

SEQ ID NO: 200361 - DNA, 120 bp, Artificial Sequence
  ENSG00000114098_59 (sequence is synthesized)
taaaagtgttggcagttagaagaagaaagaatcactagccatagaattctactggaggaagccacatccatttctttgtctctgcttagttgaaatatagtcctacatgagaagataagt

SEQ ID NO: 200362 - DNA, 120 bp, Artificial Sequence
  ENSG00000114098_60 (sequence is synthesized)
ctgtcttagccttgaaaaaaccattgagcatattttgccattgatactctctcagatgtgcataaattatttgaacatactagaaattttttttattgaccaataggacaatcatctata

SEQ ID NO: 200363 - DNA, 120 bp, Artificial Sequence
  ENSG00000114098_61 (sequence is synthesized)
aagtttattttattattgagtcctttttcattcaggcgaaaacaccctatccaaagcaaccagaaatggttgtactttcagtacataaagcaaaataaataagaattgtatttagaagaa

SEQ ID NO: 200364 - DNA, 120 bp, Artificial Sequence
  ENSG00000114098_62 (sequence is synthesized)
gcggccgagccaaagacgtttccaactccgggagctcccgccggtgcgggttcccaggatggcgtctggcaggcggggtggctgggcttatagacaactggctgggcggcgcggcttgga

SEQ ID NO: 200365 - DNA, 120 bp, Artificial Sequence
  ENSG00000114098_63 (sequence is synthesized)
ctttgccaagcgtttcactgagccttccttttagcgatgccgcttcccgggggccgaacgctctgccttgtgaagcgccgggcttgcagccggcctgagaacgagcgcccactcagctct

SEQ ID NO: 200366 - DNA, 120 bp, Artificial Sequence
  ENSG00000114098_64 (sequence is synthesized)
cccgggctttggcaagaagaggtgcaggctccttggcccccatttcctcagagctgccaggccaagtctgtgcggcttctatcgcgtcccagcacctgggcaccggctgaagcagtttgc

SEQ ID NO: 200367 - DNA, 120 bp, Artificial Sequence
  ENSG00000114098_65 (sequence is synthesized)
tctatgttccctgtgcctggtattccgtttttctttaaggggagtcaaacattgaaggggggaaaagggggtgagatttatttccccattgttgaaagaagggaacgtattgacatgcca

SEQ ID NO: 200368 - DNA, 74 bp, Artificial Sequence
  ENSG00000114098_66 (sequence is synthesized)
acaaaatcttcaaaagttgtgatggtttagaagatacttatgcaaaggttttttttttttttttctatctcggc

SEQ ID NO: 200369 - DNA, 120 bp, Artificial Sequence
  ENSG00000114098_67 (sequence is synthesized)
gcacaatttctggctcatgtaagcattcagtgcatgttctgtaattatcaatacatgaatgggtgtgttgagcacttgtgtagggttctgtgctaagtttaatcttagtatttaagctgt

SEQ ID NO: 200370 - DNA, 120 bp, Artificial Sequence
  ENSG00000114098_68 (sequence is synthesized)
ggttctaacattttggtgagaatttggcattttcaatgaattactcatgtatcgtgaattgtttggtttttatttgtttgtatcattttttgctttttgtctttaaaactgagcatttgc

SEQ ID NO: 200371 - DNA, 120 bp, Artificial Sequence
  ENSG00000114098_69 (sequence is synthesized)
ctctgtcagtaaggtaatgttctaaagtaaatggtttcagaaaaacaatatggtaacaagcctcaagataataacaactacaaatatttcagccgtctacaatataagtaaaatgatttt

SEQ ID NO: 200372 - DNA, 120 bp, Artificial Sequence
  ENSG00000114098_70 (sequence is synthesized)
acctgtttataactttcggtagaagccaacgtgagatgttttaatttttttcccccatcttgctaaaggaatgtaatcaaaaaggaaattcattaatttaaatttctgaagcgcttaatg

SEQ ID NO: 200373 - DNA, 120 bp, Artificial Sequence
  ENSG00000114098_71 (sequence is synthesized)
ttcagcgcctgcctggggaataaaaattaattatattcttattcaaaggcagcttataattgtttttcagtagaaccaaattattgactcgttcccaaagcccctgctgttaacctctga

SEQ ID NO: 200374 - DNA, 120 bp, Artificial Sequence
  ENSG00000114098_72 (sequence is synthesized)
atagttcatttctgatggatagctgtgttacaagttaaatgcctcttctgtgatacttctactgcatttggagttagaatattccaacttcatttaaactgagataatgtgttcatctta

SEQ ID NO: 200375 - DNA, 120 bp, Artificial Sequence
  ENSG00000114098_73 (sequence is synthesized)
tgtttcattttgaacatttttccctttttattatggaaaattctgaagtataaagaatacaacatgtgcccagcacctagcctcaaaatgtgtccatcattaggttatttatttttaaaa

SEQ ID NO: 200376 - DNA, 120 bp, Artificial Sequence
  ENSG00000114098_74 (sequence is synthesized)
ctatttggtaggtttttgtttcattttgtttttttaaatatctggcttaccatctgtatttgtcagttagttttctttgactattaaattgactgaacctccgaaaagcgaattgtcaaa

SEQ ID NO: 200377 - DNA, 120 bp, Artificial Sequence
  ENSG00000114098_75 (sequence is synthesized)
atcttcactctcaagataagtgatattatttggttttcgattttttaataaaatcttaaaggcaaataatttttcatttaaagctttaaactccaagcaaaaacttattttctgctgtct

SEQ ID NO: 200378 - DNA, 120 bp, Artificial Sequence
  ENSG00000114098_76 (sequence is synthesized)
cattttttgtttgttcatttatttttacaggttcgaatgcaagcactgaaatgtttctcagttttagcttttgaaaacccccaggtatcgatgaccctggtaaatggtaggctggagctt

SEQ ID NO: 200379 - DNA, 120 bp, Artificial Sequence
  ENSG00000114107_0 (sequence is synthesized)
gtagctgatcccagcctaacctggcccggctggctgctggtgggaggccggcgactgagtaagatgaagatccagtttcagacatgagactcgttgggtgatcatttcattgagatcaac

SEQ ID NO: 200380 - DNA, 120 bp, Artificial Sequence
  ENSG00000114107_1 (sequence is synthesized)
ctgaatgaccaggtgtaaagtgcaagagtaatatgctatgactgagtaactatgtttccggtagcccctaaaccccaggattccagtcaaccatcagacagactcatgactgaaaaacag

SEQ ID NO: 200381 - DNA, 120 bp, Artificial Sequence
  ENSG00000114107_2 (sequence is synthesized)
caggaagaagcagaatgggaaagcataaatgtgctattgatgatgcatggcttaaaacctttgtctctagtcaaaagaacagatctcaaagatctcatcatttttgacaaacagtcatca

SEQ ID NO: 200382 - DNA, 120 bp, Artificial Sequence
  ENSG00000114107_3 (sequence is synthesized)
caaaggatgagacagaatttgaaattgttggtggaagaaacatcatgtcaacagaacatgatacaggagcttatagaaactaatcaacagcttagaaatgaacttcagctagagcaaagc

SEQ ID NO: 200383 - DNA, 120 bp, Artificial Sequence
  ENSG00000114107_4 (sequence is synthesized)
cgagcagccaatcaagaacaacgagctaatgacttggaacaaattatggaaagtgtgaaatccaaaattggtgaattggaggatgaatcactaagtagggcttgccaccaacagaataaa

SEQ ID NO: 200384 - DNA, 120 bp, Artificial Sequence
  ENSG00000114107_5 (sequence is synthesized)
ataaaagatcttcaaaaggagcagaaaactttacaggtgaagtgccagcattataagaaaaaacgaacggagcaagaagaaactattgcttctttgcaaatggaagtctgtagattaaaa

SEQ ID NO: 200385 - DNA, 120 bp, Artificial Sequence
  ENSG00000114107_6 (sequence is synthesized)
aaggaggaagaagatcgcattgtcactcaaaacagagtgtttgcctatctgtgcaaaagagttcctcataccgtcttggatagacagttgctttgtctaattgattactatgaatctaaa

SEQ ID NO: 200386 - DNA, 120 bp, Artificial Sequence
  ENSG00000114107_7 (sequence is synthesized)
attagaaaaattcatacacaaaggcaatataaagaagatgaaagtcagtcagaagaagaaaacgactacagaaatctggatgcctcaccaacttataaaggccttttaatgtcattacag

SEQ ID NO: 200387 - DNA, 120 bp, Artificial Sequence
  ENSG00000114107_8 (sequence is synthesized)
aatcaactcaaggaatcaaaatctaagattgatgcactttcaagtgaaaagctgaacctccaaaaagatttggaaaccaggcctacgcagcatgaattaagactttataaacagcaggtg

SEQ ID NO: 200388 - DNA, 120 bp, Artificial Sequence
  ENSG00000114107_9 (sequence is synthesized)
aagaagctggaaaaagcccttaagaaaaacgtcaaattacaggagcttattaatcataagaaggctgaggacacagagaagaaagatgagcccagcaaatataatcagcaacaggcccta

SEQ ID NO: 200389 - DNA, 120 bp, Artificial Sequence
  ENSG00000114107_10 (sequence is synthesized)
tcttgttcaagattgtggatttgagcatcttgttcctgtaatagaaatgtgggcagatcaactgacatccttaaaggatttgtataagtccttgaaaacactatctgcagaactggtacc

SEQ ID NO: 200390 - DNA, 120 bp, Artificial Sequence
  ENSG00000114107_11 (sequence is synthesized)
ttggcttaatttgaagaagcaggatgaaaatgaaggtatcaaagttgaagatttgttgtttatagtagatactatgctggaagaagttgaaaataaggaaaaggacagcaatatgccaca

SEQ ID NO: 200391 - DNA, 120 bp, Artificial Sequence
  ENSG00000114107_12 (sequence is synthesized)
ctttcaaactttgcaagctattgtttctcacttccaaaagttatttgatgtgccttctttaaatggagtctatccccgaatgaatgaagtttatactaggcttggagaaatgaacaatgc

SEQ ID NO: 200392 - DNA, 120 bp, Artificial Sequence
  ENSG00000114107_13 (sequence is synthesized)
tgtgagaaacctccaagaactcttagaattagatagttcatcctcattgtgtgtgctagtaagcactgttggaaaactctgtaggctgattaatgaagatgtgaatgagcaggttatgca

SEQ ID NO: 200393 - DNA, 120 bp, Artificial Sequence
  ENSG00000114107_14 (sequence is synthesized)
ggtattaggacctgaagacctccagagcattatctacaaattggaagaacacgaggaatttttcccagcatttcaggcatttactaatgatctacttgaaatcttagaaattgatgactt

SEQ ID NO: 200394 - DNA, 120 bp, Artificial Sequence
  ENSG00000114107_15 (sequence is synthesized)
ggatgccattgtacctgcagtaaagaaattaaaagtactttcatactgaaaacaaatcaaatcatttttactgtgtaaattgtattcttaacattttgtattttgtaggattgatcttat

SEQ ID NO: 200395 - DNA, 120 bp, Artificial Sequence
  ENSG00000114107_16 (sequence is synthesized)
tttgagacaagggttgtaaaatgtatttgctctcagaattcatccccttcttagtattaggtcattcttcatctgtataatttttattaactttgagattcttatacagaaaatagttgc

SEQ ID NO: 200396 - DNA, 120 bp, Artificial Sequence
  ENSG00000114107_17 (sequence is synthesized)
aagggtaaggtaattaactttagatcccttcatttctaaagcaattattgagtgcttaaaatttaaggttgttttagagtggagtttgtgagtaaaagaggagcccagggagacagattg

SEQ ID NO: 200397 - DNA, 120 bp, Artificial Sequence
  ENSG00000114107_18 (sequence is synthesized)
caagtagtaggttgcaatcttttagattcagcttgtaataatctttgagccacaccaaaaggaatgccaagggctctctaaatttagccagtaggaagctactgctctcctggcaaggat

SEQ ID NO: 200398 - DNA, 120 bp, Artificial Sequence
  ENSG00000114107_19 (sequence is synthesized)
taattggcacattctgttaagatatccctcatgacagttgccctttcaaagcaggaggaagaaaaggaagaaagaaaaactgtttcatcatttctgttagggtaggaaatgaatcatagg

SEQ ID NO: 200399 - DNA, 120 bp, Artificial Sequence
  ENSG00000114107_20 (sequence is synthesized)
gtaaaatggatgagtagatagaagtctctcatttaaaaagtgtcttttgcaatcttgatgtaatgcactttttataaggacttgagatctcaaataaaatttctgtaaagaatttccaaa

SEQ ID NO: 200400 - DNA, 120 bp, Artificial Sequence
  ENSG00000114107_21 (sequence is synthesized)
aagaaagcagcattttatcaagtagcttcagggaccttctgacttccaaatgaaactgtcgtttagatggtggagattctacaaagataggacaactactcaactcggctgttgtagcac

SEQ ID NO: 200401 - DNA, 120 bp, Artificial Sequence
  ENSG00000114107_22 (sequence is synthesized)
atgagtgagcttgctttaggcttgtcctcatgtttaaaaagatcacagcaagtgaaaatgtaatttgaaagttaaacttgagatgaggtatgaaactgtataagtgtgttgtctgatatc

SEQ ID NO: 200402 - DNA, 120 bp, Artificial Sequence
  ENSG00000114107_23 (sequence is synthesized)
ctgaagagcctggtttcatagaataatatgattcttgctttgggattgctattaacttaagcagtgatgttctcatcattcataaatatttggcacattaataaacatattttaataggg

SEQ ID NO: 200403 - DNA, 120 bp, Artificial Sequence
  ENSG00000114107_24 (sequence is synthesized)
gatcccagcctaacctggcccggctggctgctggtgggaggccggcgactgagtaagcttttgcttcaaagcaaggttctgccccttcatgtcacctctcctgagacagaatgatttggt

SEQ ID NO: 200404 - DNA, 120 bp, Artificial Sequence
  ENSG00000114107_25 (sequence is synthesized)
cattccattttaactctttcctatttgggatgaagatccagtttcagacatgagactcgttgggtgatcatttcattgagatcaacctgaatgaccaggtgtaaagtgcaagagtaatat

SEQ ID NO: 200405 - DNA, 120 bp, Artificial Sequence
  ENSG00000114107_26 (sequence is synthesized)
ataagcctccatgtaagtgacagggcacccaaggagtgcgttggaagcgccagcgtgcccgagaccagcacatcgcaccgacgccttcgtttgcgatgaagatccagtttcagacatgag

SEQ ID NO: 200406 - DNA, 120 bp, Artificial Sequence
  ENSG00000114107_27 (sequence is synthesized)
tcacctgggcctaaaagtggtcagactgacccttgtcggggaggagccatctgggacagggtcgcgccaattaaaaatccctgcgtaagggtttggggatcggacaaaactgcctccagt

SEQ ID NO: 200407 - DNA, 120 bp, Artificial Sequence
  ENSG00000114107_28 (sequence is synthesized)
cccagctccccaggctttgtgttctttggcttctcctttaatgtctcagcgcctccgattctttatttgtatactaaagctggtaattcttgccttacaaggtggttgtgagggttaaat

SEQ ID NO: 200408 - DNA, 120 bp, Artificial Sequence
  ENSG00000114107_29 (sequence is synthesized)
cgcgaaggttgtttggggagtgaggactcggagcagaagggggcggttaggcgaatagcacagatgaagatccagtttcagacatgagactcgttgggtgatcatttcattgagatcaac

SEQ ID NO: 200409 - DNA, 120 bp, Artificial Sequence
  ENSG00000114107_30 (sequence is synthesized)
tgatatgtagctagattcattgttgtgtttgtttgtttgttttacctgatattatcttgggggtggttataactcttataaactagaaaagcctctctctcctcctcttctgcattgttt

SEQ ID NO: 200410 - DNA, 120 bp, Artificial Sequence
  ENSG00000114107_31 (sequence is synthesized)
ttccctgctcatcctgttcttttttttttttttttttgttctagaggtcctttgaagaatggaattgaacatttactaaaaataacactaaacttttaaataaattcataattaatcaga

SEQ ID NO: 200411 - DNA, 120 bp, Artificial Sequence
  ENSG00000114107_32 (sequence is synthesized)
tgaagatgtgaatgagcaggttatgcaggtattaggacctgaagacctccagaggtatttgttttaaaagtttacaaagtatcatccagaatggctgggtgtggtggcacacgcctgtag

SEQ ID NO: 200412 - DNA, 120 bp, Artificial Sequence
  ENSG00000114107_33 (sequence is synthesized)
acccaggagtttaagtccagtctgagcaaggcagtgagaccctgtctctaaacaataaaaattaaaataagtattatcgagagttcctggaggggtgaaattaaagactttcaaaactta

SEQ ID NO: 200413 - DNA, 120 bp, Artificial Sequence
  ENSG00000114113_0 (sequence is synthesized)
ctgcagcctgctccttgccatccaccacaaaccctcaccgaaccagtggccaccaccatgacaagggaccagaatggaacctgggagatggagagtaatgaaaactttgagggctacatg

SEQ ID NO: 200414 - DNA, 120 bp, Artificial Sequence
  ENSG00000114113_1 (sequence is synthesized)
aaggccctggatattgattttgccacccgcaagattgcagtacgtctcactcagacgaaggttattgatcaagatggtgataacttcaagacaaaaaccactagcacattccgcaactat

SEQ ID NO: 200415 - DNA, 120 bp, Artificial Sequence
  ENSG00000114113_2 (sequence is synthesized)
tccttgtgtgtgtgcaaaagggggagaaggagaaccgcggctggaagcagtggattgagggggacaagctgtacctggagctgacctgtggtgaccaggtgtgccgtcaagtgttcaaaa

SEQ ID NO: 200416 - DNA, 120 bp, Artificial Sequence
  ENSG00000114113_3 (sequence is synthesized)
agaaatgatggcgacgtgggaggcctgccaagcacaagctccccactgcccacactgagtggtctactggctttgagaaacagctgtggggaccttcccactcttgacagagccccatta

SEQ ID NO: 200417 - DNA, 120 bp, Artificial Sequence
  ENSG00000114113_4 (sequence is synthesized)
aggcatctgggtgggttttaaacagaatgcctatgtagcagtgatagacatattcccctcctttgaaacctagcattaaatggaaaaacaaaaattactcccatattttgaaacccttta

SEQ ID NO: 200418 - DNA, 120 bp, Artificial Sequence
  ENSG00000114113_5 (sequence is synthesized)
ctgctgcagtcagatgctcccaaggacagcagtctccagaaagcttcttgtaacctggaaagattggttatagttgatcattttcctccatcttaaaagtcacctgaagaattccacaag

SEQ ID NO: 200419 - DNA, 120 bp, Artificial Sequence
  ENSG00000114115_0 (sequence is synthesized)
cagtctccagccgtcccgcccgcttgtggccaactggctccagtcactccccgaaatgccagtcgacttcactgggtactggaagatgttggtcaacgagaatttcgaggagtacctgcg

SEQ ID NO: 200420 - DNA, 120 bp, Artificial Sequence
  ENSG00000114115_1 (sequence is synthesized)
cgccctcgacgtcaatgtggccttgcgcaaaatcgccaacttgctgaagccagacaaagagatcgtgcaggacggtgaccatatgatcatccgcacgctgagcacttttaggaactacat

SEQ ID NO: 200421 - DNA, 120 bp, Artificial Sequence
  ENSG00000114115_2 (sequence is synthesized)
tctgacaggcatagatgaccgcaagtgcatgacaacagtgagctgggacggagacaagctccagtgtgtgcagaagggtgagaaggaggggcgtggctggacccagtggatcgagggtga

SEQ ID NO: 200422 - DNA, 120 bp, Artificial Sequence
  ENSG00000114115_3 (sequence is synthesized)
tgagctgcacctggagatgagagtggaaggtgtggtctgcaagcaagtattcaagaaggtgcagtgaggcccaggcagacaaccttgtcccaaggaatcagcaggatgtgtgggccagga

SEQ ID NO: 200423 - DNA, 120 bp, Artificial Sequence
  ENSG00000114115_4 (sequence is synthesized)
aaacgaactgaacgtctgaaacgaaggtggcgcggcctggacaaacctgacccttcgacatcccccgcccctgcgcccgccctcgctaagcggggaggagcgaccgctacaatggatcct

SEQ ID NO: 200424 - DNA, 120 bp, Artificial Sequence
  ENSG00000114115_5 (sequence is synthesized)
cccgcaggctttgtgcgcgctgggaatccagctgtcgccgccccgcagagccccctgtccccggagggcgctcatttccgggccgcccaccacccgcgtagcaccggcagccgctgtccc

SEQ ID NO: 200425 - DNA, 120 bp, Artificial Sequence
  ENSG00000114115_6 (sequence is synthesized)
gaggcaaaaatgtccagccacccccaggcatctgttagcagagtctgtctcttggctttgtcacttttccttttcttaaaacaaagccatgccaataaagtgatctgtgttcaaaacgtc

SEQ ID NO: 200426 - DNA, 120 bp, Artificial Sequence
  ENSG00000114115_7 (sequence is synthesized)
aaggagtttgaggaggatctgacaggcatagatgaccgcaagtgcatggtgaggattcgcgtccacctggtgtctcctgcccagggggcctgaccaagggctgggctagttcatccgaga

SEQ ID NO: 200427 - DNA, 120 bp, Artificial Sequence
  ENSG00000114115_8 (sequence is synthesized)
aggctgccatgtgctgtgtctccactgcgttcaggcactctgcccggtgctttatgcacatgacttcacctaagcctcacacagcctttgagggagatatgaatatgcccattttacaga

SEQ ID NO: 200428 - DNA, 120 bp, Artificial Sequence
  ENSG00000114115_9 (sequence is synthesized)
tgaagaaacagtctcaaagagatgaagtaacatgtccagagtagcacagctagggagggtctggagttcaaagcatgtctgttgatgccgttctctggctgactgggctggtggagggta

SEQ ID NO: 200429 - DNA, 120 bp, Artificial Sequence
  ENSG00000114115_10 (sequence is synthesized)
aaagaaaagaaaggaggaaagaaaaaagaaacacagagtgaaactggcttttcctcttgaatgtgctgacttttgattccagccccccaggaatggatcagagaagaggagccgctaccc

SEQ ID NO: 200430 - DNA, 120 bp, Artificial Sequence
  ENSG00000114115_11 (sequence is synthesized)
acccactcatcagcctggcctcaggggcagctcatggactttttagccagagagaaccgggttcaagttatggctcaagccctaaccccttggtgatgggctggttacttatagaagcct

SEQ ID NO: 200431 - DNA, 120 bp, Artificial Sequence
  ENSG00000114115_12 (sequence is synthesized)
tgctgggattacaagtgtgagccactacacctggttcttctttccactgtttgctaactcccatggtgttttctggcatcacttccagcattatttctagccttacctcttccaggaagc

SEQ ID NO: 200432 - DNA, 120 bp, Artificial Sequence
  ENSG00000114115_13 (sequence is synthesized)
cttccctgatgggcctctgtctctaccttaaaggctgtcgaggtgccttctgacttccataacctccagcatttgtctaccagtacttaccattctgctggaattctctgtcttcttacc

SEQ ID NO: 200433 - DNA, 120 bp, Artificial Sequence
  ENSG00000114115_14 (sequence is synthesized)
ttcttctcagataatctgtgagccctcaagagcaggccactgaccttacttccctctctccagcacctacagctggtgcataggaggtgtgaaacccatgattgctgaatgccgttccct

SEQ ID NO: 200434 - DNA, 120 bp, Artificial Sequence
  ENSG00000114115_15 (sequence is synthesized)
tgcacagaaccacgtggtgaattcctattgctcagtcaagggtcagtttaaagcagggaactgcagagcacagtcatcaagagcatgagctctagagccaaatctcatctccccacttca

SEQ ID NO: 200435 - DNA, 120 bp, Artificial Sequence
  ENSG00000114115_16 (sequence is synthesized)
cggctgggtgaacttcaggcctcagtctccacatttgtaaaatgatgagaagcatacctgctctaggaggttgtcaggagtcaactggtatgacatatactttgcctagtaccctgccca

SEQ ID NO: 200436 - DNA, 120 bp, Artificial Sequence
  ENSG00000114115_17 (sequence is synthesized)
gcacataatgttgggcattatcattatcataacaacacatgttgttatgatattgattatggtgactgataatgacagcaatgctatcactcccaccagggagccttccctgacccccca

SEQ ID NO: 200437 - DNA, 120 bp, Artificial Sequence
  ENSG00000114115_18 (sequence is synthesized)
aggttctctgtcatctcccctacttttccctcctgatcacttatttaacacaagcaccagatgctgaaaaccctctaattgtcccaggaacacacataccctcaaagggagaagcacact

SEQ ID NO: 200438 - DNA, 120 bp, Artificial Sequence
  ENSG00000114115_19 (sequence is synthesized)
ttcaaatcaaactccaggatttgcatcttttagcaatttccattatgcggagaaagtatctactcactgtctggttttgaaattttaccccaaatcgaaagagcatgggttttggtgtca

SEQ ID NO: 200439 - DNA, 120 bp, Artificial Sequence
  ENSG00000114115_20 (sequence is synthesized)
tggctctggcctttgcaggcagtatcaccacgggcaaggcttcacctctcataacctggctgtggaaccacagaaacaacagaattcagtcccagccctccagaggtggatccgtaaaca

SEQ ID NO: 200440 - DNA, 120 bp, Artificial Sequence
  ENSG00000114115_21 (sequence is synthesized)
gagggactactagggctgggtggagggctgtgagtgatccaacatcccctgctcttgagagtggtgttttagcatgggagtgttaatgaatgtcacaagtttcttgataccaaatagagt

SEQ ID NO: 200441 - DNA, 120 bp, Artificial Sequence
  ENSG00000114115_22 (sequence is synthesized)
tcctaccatttgcaggtcataccggtcactgccaagagatggcttatttagtgggaattgtctggcactcctagtataagtcacctaagtggggcaagtgggccttgaaacatccctggg

SEQ ID NO: 200442 - DNA, 120 bp, Artificial Sequence
  ENSG00000114115_23 (sequence is synthesized)
agacactcactcaggctgcctgtgggagctgggctttttgtgtcactctcccatgcagcagtgacggctggggtttctaagtggtcagaggagctggaaaatggcttctgaagtaacagt

SEQ ID NO: 200443 - DNA, 120 bp, Artificial Sequence
  ENSG00000114115_24 (sequence is synthesized)
cccttgtcatagtggtacaaagatgtcttcattcatctgttggcacatgtctctgggtaaactgccggcaaggccaaagtgatgggggttattattagtttttaatagaaaagttagact

SEQ ID NO: 200444 - DNA, 120 bp, Artificial Sequence
  ENSG00000114115_25 (sequence is synthesized)
ggcttcactttccaaccagcttccctagttccagcccatttgcagacttttgggtggtctgtgggatgaaaatttcttgtgaggaggtgagctgaagatggccatccctcctggttgctc

SEQ ID NO: 200445 - DNA, 120 bp, Artificial Sequence
  ENSG00000114115_26 (sequence is synthesized)
ttggattgtctgggcttcatttctaaggcggtcccagagcccatgtgggggttgggggaagcagcattgtctagcccctttggtttgtacccatgttcaccccacccccacagccacctg

SEQ ID NO: 200446 - DNA, 120 bp, Artificial Sequence
  ENSG00000114115_27 (sequence is synthesized)
ccttttctgtgggacttgaaaagcatcaggaatatcttcctacctgaaattcttccattagaccctgattaattggattaatctaggaaaccagattaaatgaccatttaacgacccttt

SEQ ID NO: 200447 - DNA, 120 bp, Artificial Sequence
  ENSG00000114115_28 (sequence is synthesized)
tgaaattgacgtgagcacatcccagattatcaagtttgggagctgccccctcccccagcctccaggagctccccgcttgctcaggattgacaaatgtgtctctttcttggcagacaacag

SEQ ID NO: 200448 - DNA, 120 bp, Artificial Sequence
  ENSG00000114120_0 (sequence is synthesized)
gctttcagcctctggtgaagggcggcgcgcttaggcaggcggtggcgcggctggagtgccgcggggagggctgtgccggttgctttctgcagccgcatctcggccagctctcctcgccgt

SEQ ID NO: 200449 - DNA, 120 bp, Artificial Sequence
  ENSG00000114120_1 (sequence is synthesized)
ccccggggcgctgtgcgtctccagtccgggaccgaagccgcctgccgtagcgggcggccagatccgcgtcccgcctcagcggccggaggacatgcgggagagagaatgagccagagggac

SEQ ID NO: 200450 - DNA, 120 bp, Artificial Sequence
  ENSG00000114120_2 (sequence is synthesized)
acgctggtgcatctgtttgccggaggatgtggtggtacagtgggagctattctgacatgtccactggaagttgtaaaaacacgactgcagtcatcttctgtgacgctttatatttctgaa

SEQ ID NO: 200451 - DNA, 120 bp, Artificial Sequence
  ENSG00000114120_3 (sequence is synthesized)
gttcagctgaacaccatggctggagccagtgtcaaccgagtagtgtctcccggacctcttcattgcctaaaggtgatcttggaaaaagaagggcctcgttccttgtttagaggactaggc

SEQ ID NO: 200452 - DNA, 120 bp, Artificial Sequence
  ENSG00000114120_4 (sequence is synthesized)
cccaatttagtgggggtagccccttccagagcaatatactttgctgcttattcaaactgcaaggaaaagttgaatgatgtatttgatcctgattctacccaagtacatatgatttcagct

SEQ ID NO: 200453 - DNA, 120 bp, Artificial Sequence
  ENSG00000114120_5 (sequence is synthesized)
gcaatggcaggttttactgcaatcacagcaaccaaccccatttggcttataaagactcggttacagcttgatgcaaggaaccgcggggaaaggcgaatgggtgcttttgaatgtgttcgt

SEQ ID NO: 200454 - DNA, 120 bp, Artificial Sequence
  ENSG00000114120_6 (sequence is synthesized)
aaagtgtatcagacagatggactaaaaggattttataggggcatgtctgcttcatatgctggtatatcagagactgttatccattttgttatttatgaaagtataaaacaaaaactactg

SEQ ID NO: 200455 - DNA, 120 bp, Artificial Sequence
  ENSG00000114120_7 (sequence is synthesized)
gaatataagactgcttctacaatggaaaatgatgaagagtctgtgaaagaagcatcagattttgtgggaatgatgctagctgctgccacctcaaaaacttgtgccacaactatagcatat

SEQ ID NO: 200456 - DNA, 120 bp, Artificial Sequence
  ENSG00000114120_8 (sequence is synthesized)
ccacatgttgtaagaacaagactacgtgaagagggaacaaaatacagatctttttttcagactctatctttgcttgttcaagaagaaggttatgggtctctttatcgtggtctgacaact

SEQ ID NO: 200457 - DNA, 120 bp, Artificial Sequence
  ENSG00000114120_9 (sequence is synthesized)
catctagtgagacagattccaaacacagccattatgatggccacctatgaattggtggtttacctactcaatggatagcagcacgaggactgctgtactgcaaaaaaagaagaccaaaag

SEQ ID NO: 200458 - DNA, 120 bp, Artificial Sequence
  ENSG00000114120_10 (sequence is synthesized)
attacagtggaccatgggatacagaagccagcatggcagacagaagaaaaatagtttgggaacatgtaactattctaagtggaagttttgttgtaggaattatagtaatcacaccacatt

SEQ ID NO: 200459 - DNA, 120 bp, Artificial Sequence
  ENSG00000114120_11 (sequence is synthesized)
acttggcctttcggtaatgtgaaaaaaaaaaaaaacctcagagcctccaaggaaatgcctttagaagcactcctctctcaaaattgccattttctctaccatgtcccccagacacagttg

SEQ ID NO: 200460 - DNA, 120 bp, Artificial Sequence
  ENSG00000114120_12 (sequence is synthesized)
ggttttgttgatttatggcagtcttctaaacaaagccatccttaattttacatactgtattgtaactatccaaagatagtattggcagtcataaatttataacttctggcctttgtttaa

SEQ ID NO: 200461 - DNA, 120 bp, Artificial Sequence
  ENSG00000114120_13 (sequence is synthesized)
ttccagtaaaataacagcaatgacaatgagatcgtcagtattattttcacatttccctgagaggacctggcacaatattttaaatttaattatttggcagtagtcactgtttttgacaac

SEQ ID NO: 200462 - DNA, 120 bp, Artificial Sequence
  ENSG00000114120_14 (sequence is synthesized)
caatgaaatagcgtctaaatatcttgtatattttttagcatcaaaatgttttggtttccactgctgacaggtgcttgttgtttagcctaatgtggatatttaaattgttaacataccaaa

SEQ ID NO: 200463 - DNA, 120 bp, Artificial Sequence
  ENSG00000114120_15 (sequence is synthesized)
cacacatggtaatagtttgggacaaaataactagtaaaatgttgatttctcggctttttcactgactgcggcatgtcctcgtgtcttctctgattttgtggtacatgaatgaatgcattt

SEQ ID NO: 200464 - DNA, 120 bp, Artificial Sequence
  ENSG00000114120_16 (sequence is synthesized)
atctttttagtgacttactagttacgaacttgaattatcacctctttgtcatacttaagtatcatttacataaagtgtaaaagattttttcacttttgaatctttacctacttgctttca

SEQ ID NO: 200465 - DNA, 120 bp, Artificial Sequence
  ENSG00000114120_17 (sequence is synthesized)
cattaagaatttgaacttttgagttttttccaggtctatatataatagattacatttattttgtaaagaaaatagtaatttaaagttttgccattttaaggtgacaatatttgggacagt

SEQ ID NO: 200466 - DNA, 120 bp, Artificial Sequence
  ENSG00000114120_18 (sequence is synthesized)
ataaatattatagacaagggcccccttgctgtctgctttagcaggtagtgacattaattgacttatagttttgtgtaaatgaacaaactgcttttgacaagaaatttattctgtcctagt

SEQ ID NO: 200467 - DNA, 120 bp, Artificial Sequence
  ENSG00000114120_19 (sequence is synthesized)
ctattgagtcagctgtaccttttaatactttaaatgtgttatttgtatggcccttataaaggtgtttgctgtaattctgttaaaagacttcgcctatgccatactggtgtataaaaactg

SEQ ID NO: 200468 - DNA, 120 bp, Artificial Sequence
  ENSG00000114120_20 (sequence is synthesized)
ccgcaattggacgccggtgtggtactcatttcagtatacctgaactgtacattttgtgcaatggctttatctaaaagaatgacgcttcgtgaaagcactttgtggccttttttggggggg

SEQ ID NO: 200469 - DNA, 120 bp, Artificial Sequence
  ENSG00000114120_21 (sequence is synthesized)
agggtgagagagtaggagagaataccatgttaagattaaaaaaaaaaacaaaaacattggtcacgtattaggcagaaacagtgttcataacatttttctgggttttaaatatgttgtttc

SEQ ID NO: 200470 - DNA, 120 bp, Artificial Sequence
  ENSG00000114120_22 (sequence is synthesized)
ggatatccttaatataaatgttttaggtattctgtgtaccctgtcgtacccccaacattatagaatattgcagcgtgtcattgcaagctttctctgctgtcaccagtgaaacatagtgcc

SEQ ID NO: 200471 - DNA, 120 bp, Artificial Sequence
  ENSG00000114120_23 (sequence is synthesized)
ctgttaaattcccccactttaacttccttgtgatcaacagtaactggatgtttttgaggtgctcaattggaataaaaatattccaatctatttggagaccaaaggcaaaatcagttttct

SEQ ID NO: 200472 - DNA, 120 bp, Artificial Sequence
  ENSG00000114120_24 (sequence is synthesized)
tacctttggaattattcgtaccttttatggtaaatttcagctttgacatgtattatgaggaacgtaccaaaaaccggtttgtaacaaatctgtagagaaggtctgaatctatcgtgtttg

SEQ ID NO: 200473 - DNA, 120 bp, Artificial Sequence
  ENSG00000114120_25 (sequence is synthesized)
ccttttcaggtgccatttctactgcctaatacagtgccatttgccttgtgaagacccataaacattcattgtgttgaatgtaagatagagactctccctagtcttactgatctcagtacc

SEQ ID NO: 200474 - DNA, 120 bp, Artificial Sequence
  ENSG00000114120_26 (sequence is synthesized)
ccacaaatgattaagaatgatatgaaaaccagcagctaaggaacatcttattatttagttgtagcatattcataacaagtgtccttcaaggataaacatatattctctatttgtatttag

SEQ ID NO: 200475 - DNA, 120 bp, Artificial Sequence
  ENSG00000114120_27 (sequence is synthesized)
caagtaaaacttgtgttgacctttagtgcattatattcagcttttaacagtattatgtatgtactggaaagcaaagaaatcttagagtcttggacattgtttatttgtgcaacaactaga

SEQ ID NO: 200476 - DNA, 120 bp, Artificial Sequence
  ENSG00000114120_28 (sequence is synthesized)
aaggagcaatgaagtttatttcagttgtatttttccctaagcacaatctgcaatagtttatgtatgacagagataattcaaaaaggaaaactatatataaaagttgtatataaagtttgt

SEQ ID NO: 200477 - DNA, 120 bp, Artificial Sequence
  ENSG00000114120_29 (sequence is synthesized)
ctctgaaatatttctttgaagtttttaaaaaatcgactcatgtttaaaaacaaaaacacatattcagagcattggacttttttaacttgttttcatctgtttatcatgacttttttattt

SEQ ID NO: 200478 - DNA, 120 bp, Artificial Sequence
  ENSG00000114120_30 (sequence is synthesized)
ctggtgtagagtccacattatttagtttgttgtacttttaaatttcaaagttcaaatctgaagaattagcgtttgtgatttcgggataccatgcagtggttttaatcccaggaaaaaaac

SEQ ID NO: 200479 - DNA, 120 bp, Artificial Sequence
  ENSG00000114120_31 (sequence is synthesized)
tatcaccaaaagttcgtttgattctcattatgtaactttgtagaaccatcctttctagatgggtccaccacagtgaatttgtaactttgaagtcaggatagaatatcattagattatctg

SEQ ID NO: 200480 - DNA, 120 bp, Artificial Sequence
  ENSG00000114120_32 (sequence is synthesized)
tgagatagcattactatgttaggaccagcagagtttgggttggtaaaaataatgtttgctctattactgggttacagacatttcagcatttttaggttggttttaaatcactaaaaatat

SEQ ID NO: 200481 - DNA, 120 bp, Artificial Sequence
  ENSG00000114120_33 (sequence is synthesized)
ttattcggatttgaaggatttaagtgctaaaaatcaatccatttcttgcccttcaataattgtccatgcctgccttttgttgtttacatgctcttctgcccagactgttagtaatctagg

SEQ ID NO: 200482 - DNA, 120 bp, Artificial Sequence
  ENSG00000114120_34 (sequence is synthesized)
gaccccctttggagctgataagtacagttcagccttttctcctcaaatatataatgactttaacattcctaagaatataggtatttctgaatgatttaaatttgaggaattttaatacat

SEQ ID NO: 200483 - DNA, 120 bp, Artificial Sequence
  ENSG00000114120_35 (sequence is synthesized)
aaaatacaatgtacaaactttctgcccactcagatctcttctccatcatgtacttagtatttcccattaacctacacactgatttttatgctactccttgtagaaacaaaattctggttt

SEQ ID NO: 200484 - DNA, 120 bp, Artificial Sequence
  ENSG00000114120_36 (sequence is synthesized)
gactcagtttttgtgtttataaacttttggaatgtgtaccccgtttatgtgaagaattatgacctatcagtcatagctaaatagtgaacctcaaaagtgttaacttttgactattcatgt

SEQ ID NO: 200485 - DNA, 120 bp, Artificial Sequence
  ENSG00000114120_37 (sequence is synthesized)
gaggtttggtatcttgcatttatgtacatggctgtaaattatgtgcatttactctgtatttatgttatctagctgacttttacttgaattgttcaaattttaaaaattaaaatacgctca

SEQ ID NO: 200486 - DNA, 120 bp, Artificial Sequence
  ENSG00000114120_38 (sequence is synthesized)
aaatccattgccattttcaggttaagttttaggctcgcttgattcagtcagcaaaccttatcttgagcactttgtatctgttagatctagtgatgtctgaaggaacccaaaggtcaagta

SEQ ID NO: 200487 - DNA, 120 bp, Artificial Sequence
  ENSG00000114120_39 (sequence is synthesized)
atccaactccctcatagtgtacaaagaaatcttgcatatcttccacaggtttattgacttttatccaacacttttcatgttttaatttcagcctttgtgaaagttgatattaaaaataca

SEQ ID NO: 200488 - DNA, 120 bp, Artificial Sequence
  ENSG00000114120_40 (sequence is synthesized)
gaggtgagaacttgttagaataaccaaatgaatccacataatgttagatcaaaatacaaatgacaaagataaaatgctatgtagtgcctaccctctttacattttgtctattttatttaa

SEQ ID NO: 200489 - DNA, 120 bp, Artificial Sequence
  ENSG00000114120_41 (sequence is synthesized)
gtttttctgtattgtagttaacatcaaacattgtccagtcttgaggaaaccaggacgaaatatattttgtatttcaacattgacataaatctgaaattgttggttctactaatagtactc

SEQ ID NO: 200490 - DNA, 120 bp, Artificial Sequence
  ENSG00000114120_42 (sequence is synthesized)
tgcactgaaggcactggcaaaataatggttaaaattgagcacaggtgttccaagttgtgtgtgtgtgtttattactgaacattgggagccgtgatagggaagtaatttgtgagttcatga

SEQ ID NO: 200491 - DNA, 120 bp, Artificial Sequence
  ENSG00000114120_43 (sequence is synthesized)
tttcttaaggttctagtgtgacatttatacactgataaaactcaggcaagcaaaatgtaattaaatgttccccctgcccccccccccttttaatatatatacacggagcttcactcttgt

SEQ ID NO: 200492 - DNA, 87 bp, Artificial Sequence
  ENSG00000114120_44 (sequence is synthesized)
ctcagcctgacttcccttctgtttctttattttcgcactgtgtagaccagctgactgccttaatatgtattgaatcaattcaagatt

SEQ ID NO: 200493 - DNA, 120 bp, Artificial Sequence
  ENSG00000114120_45 (sequence is synthesized)
cagctgactgccttaatatgtattgaatcaattcaagatttatgttcatagagtgctgtgtttatacagtggtgtcatgtgatttcttaatagcctatagatccaataaatacagaggaa

SEQ ID NO: 200494 - DNA, 120 bp, Artificial Sequence
  ENSG00000114120_46 (sequence is synthesized)
cggttattttaacagtattagtatgtatatatgtagaaagtattcatggggccaaacaacagtcttttccactatataatcaactaaagatcaaactattggtaaaatttgacatttgtg

SEQ ID NO: 200495 - DNA, 120 bp, Artificial Sequence
  ENSG00000114120_47 (sequence is synthesized)
tagaattcattttgaatgtagtgatttgggatgctaatcaaaccccaggtaactgttttttttagctggttttaaggatcccaagtgcatgctttttagccgtagaatacacaaaatgtc

SEQ ID NO: 200496 - DNA, 120 bp, Artificial Sequence
  ENSG00000114120_48 (sequence is synthesized)
tatgtgtttgtagagatggatttctgaattcagcttagacagtagagagcaccctaaaggatattctaagtaggttgggaaagcaatttatattcattttgcttttaaaagaatctgtta

SEQ ID NO: 200497 - DNA, 120 bp, Artificial Sequence
  ENSG00000114120_49 (sequence is synthesized)
gttaaggacagaatttgagaattcatatagattggaagtgaagacaaatgtttgtcgtatgtgaaaagtgtaatatatacataaattagtagtttatttatatacattttcttgaatgta

SEQ ID NO: 200498 - DNA, 120 bp, Artificial Sequence
  ENSG00000114120_50 (sequence is synthesized)
catttactgtacatttctcccgagaaaagagtgagatcgtgtcatctcatgctccccatccgcaggtcacttcctgtagaaatatggactaacttaaacctccctcaaattcttttgtga

SEQ ID NO: 200499 - DNA, 120 bp, Artificial Sequence
  ENSG00000114120_51 (sequence is synthesized)
aggcttaatattgaattataagtttgtagtgaaaagttgatgattaatgtgcttttcattgattagatgatttttacgtttatcgatataaaccaaattaggtatatgtaaaatctgtca

SEQ ID NO: 200500 - DNA, 120 bp, Artificial Sequence
  ENSG00000114120_52 (sequence is synthesized)
tcagttgacatttttgtagtcaggagtttacatgctagggtacaagtaatatatttatattgccttgtgtagtccactgaatgtttagtgatcattgttaacagttttaagaatccaacc

SEQ ID NO: 200501 - DNA, 120 bp, Artificial Sequence
  ENSG00000114120_53 (sequence is synthesized)
ataattacactataaataagttatggagctgtaatttactcttctctcctcaatttctgttagtgccttttccctttttgctgcatgttttggcttctgtctgaaatgtgtcggcaattc

SEQ ID NO: 200502 - DNA, 120 bp, Artificial Sequence
  ENSG00000114120_54 (sequence is synthesized)
ttggtaaagtattcattttgtcctgtgctcaaatgctgaaatttttgtgagtgatgtattattattgacaattcagttactatgtgtattttttaaaattgtttattattctacataatt

SEQ ID NO: 200503 - DNA, 120 bp, Artificial Sequence
  ENSG00000114120_55 (sequence is synthesized)
cacactagacagcacctgaaatttagacactggctatgtgtacatgcttactatagaaatgtttccaggaactctctgtttctgtcatcactgataagtatatatgattctgaattaaaa

SEQ ID NO: 200504 - DNA, 120 bp, Artificial Sequence
  ENSG00000114120_56 (sequence is synthesized)
taactagttttaggtctttaccctgccataaagataaacagttggtttgaccaatctggttctggaatcatttgctgctatgcatgttagacaaagccacgaactttgattttccattga

SEQ ID NO: 200505 - DNA, 120 bp, Artificial Sequence
  ENSG00000114120_57 (sequence is synthesized)
aaattctccctaatatctgagatttattgtatatttactcatatctcacattttcaaattatgctgtaactttataaactgtagctgctttcatcagctattgatcaataaattgaatgt

SEQ ID NO: 200506 - DNA, 120 bp, Artificial Sequence
  ENSG00000114120_58 (sequence is synthesized)
caattatgtgcttaataatgagtgccttaaactgttaaacacttttggtttagaaataaagtgaatcaatttgacctatatacttcatgaagtaagtaagtttgaaatacaaatttctga

SEQ ID NO: 200507 - DNA, 120 bp, Artificial Sequence
  ENSG00000114120_59 (sequence is synthesized)
aaggtcaatagcccttatcgtattacaaattgtttttaaggctttttgtatttattaattgtcagttgattcactgaagctttaaaactggaagggacaatccaaaggtcaaaagagtga

SEQ ID NO: 200508 - DNA, 120 bp, Artificial Sequence
  ENSG00000114120_60 (sequence is synthesized)
tctcttagcttacccatggaatgagtcaagtggtctacatagatttggattttgagaattagttctttcatttagtgttatagagattatcttgttacaactagaattatttttaatgta

SEQ ID NO: 200509 - DNA, 120 bp, Artificial Sequence
  ENSG00000114120_61 (sequence is synthesized)
atttttacagatgttgaatattagtagataggatttttcccctacgaatttggatgtaaggtaaaggttggtggccagtgacaaaccttataaccactttatcaggttctttaaaaatat

SEQ ID NO: 200510 - DNA, 120 bp, Artificial Sequence
  ENSG00000114120_62 (sequence is synthesized)
atttctgaattaccagtgattatgtttttggcttataacctcagataattataaagaaatgttaatcttatttgaaagaattggaatctagaaagttagatgagcagtcattttatattg

SEQ ID NO: 200511 - DNA, 120 bp, Artificial Sequence
  ENSG00000114120_63 (sequence is synthesized)
atatttgttatatcagtatagcaaatgcagaggttcagaatatctttatttccactggaacatcttatttcattggagtatctcatcagaatttattactgtatttgtatcacattgcaa

SEQ ID NO: 200512 - DNA, 120 bp, Artificial Sequence
  ENSG00000114120_64 (sequence is synthesized)
agaatttcagtagaattgtcagtttgcacttttttctcaaatgtgtacaaatgttaacatatagttcatttttatctgtacattgatgccatttcccaacttgaattcctcaagttttgg

SEQ ID NO: 200513 - DNA, 120 bp, Artificial Sequence
  ENSG00000114120_65 (sequence is synthesized)
taaacttacaatctcatacttgttcagaggttattgcactgtacacttactgtgtagaaaatactgtttgaatttgtttgcagttacattgttctgagaactgtgctctcagagcttctg

SEQ ID NO: 200514 - DNA, 120 bp, Artificial Sequence
  ENSG00000114120_66 (sequence is synthesized)
tgcactattcatgagcattaacacttagctttgcagttttatacataactatatggttagtaaaactgaatggtccaatgcagactcattaaagtaggcttttgccccctttgttcttga

SEQ ID NO: 200515 - DNA, 120 bp, Artificial Sequence
  ENSG00000114120_67 (sequence is synthesized)
aataatctagaccagattactcggggttttttttaggattatttttataggtctaaatatgaatgatttgggggtatgaagtacttaaagatagttctgtgaaaaatcattttcagctgt

SEQ ID NO: 200516 - DNA, 120 bp, Artificial Sequence
  ENSG00000114120_68 (sequence is synthesized)
ctattcaagggaaaaaatgctaaccttgtcactttactacacaaaaccacactaaaataaaccattaatgatactgcctgcaagattttaacacaccagatagcacacacattaaggatt

SEQ ID NO: 200517 - DNA, 120 bp, Artificial Sequence
  ENSG00000114120_69 (sequence is synthesized)
tataaggcactgtacgtaatttttattccaagtgacctctcaattcattttcattttgcattttatccatatgaactcatgtttaatttagataataaaaatttattttattaaaaggac

SEQ ID NO: 200518 - DNA, 120 bp, Artificial Sequence
  ENSG00000114120_70 (sequence is synthesized)
agtttatttaaagtgggtctttttatttgttgtagtgcatactataagaatttgtaagcctctaaagttgagctataaattttcatgcattaaaaatttgtttcagttgtgaggatattt

SEQ ID NO: 200519 - DNA, 120 bp, Artificial Sequence
  ENSG00000114120_71 (sequence is synthesized)
aatcagattaaataatgttgactcttaatattttgcctgccttttttttctcctacacatgacctttgacagactaagtatatctcagctattgagggtatctgttttgttgcctgtata

SEQ ID NO: 200520 - DNA, 120 bp, Artificial Sequence
  ENSG00000114120_72 (sequence is synthesized)
ttttgtttaaattaacttgtatattcctttgtatacacctaggcacagatgtatgcaaaaaaaatttgttaaattacttctttctttatactaattctcaatttttaaaagattttatct

SEQ ID NO: 200521 - DNA, 120 bp, Artificial Sequence
  ENSG00000114120_73 (sequence is synthesized)
acattataaatgtaaaggaaatgaattctaattttaattggattatgtattcatacagttattctcaatttttaaaatactaataatgtaatcattgaatgtttcctacatacgtagtgg

SEQ ID NO: 200522 - DNA, 120 bp, Artificial Sequence
  ENSG00000114120_74 (sequence is synthesized)
gaatgtttcctacatacgtagtgggttttatttgctcacagcatacagttatttttcaatttatgtttttctattagacttaaatttcattataataaaggcttttactcattaaataca

SEQ ID NO: 200523 - DNA, 120 bp, Artificial Sequence
  ENSG00000114120_75 (sequence is synthesized)
tgattacccggacgccgctggacctggccgcacgccgcaatctagcaggcgtcggggatccagggccgctttgaggagcctggcttcggatttcgcgtaggttgcatggcccaaggggac

SEQ ID NO: 200524 - DNA, 120 bp, Artificial Sequence
  ENSG00000114120_76 (sequence is synthesized)
ggggcggaaagtgcggaggctgaggacaaaatgggcgccggagactcctttagccctcgctccttgcagcgctcgcttgggcctctgcacgtcactcacgccccacctcggacctcgggc

SEQ ID NO: 200525 - DNA, 120 bp, Artificial Sequence
  ENSG00000114120_77 (sequence is synthesized)
attcctttcttttttttaacttaaaattttcaaaaaagttagatctcacagtaaatatttctcaaatccttccaataggattcaatttgtacacatgtttctgatgaggtcactgcttgt

SEQ ID NO: 200526 - DNA, 120 bp, Artificial Sequence
  ENSG00000114120_78 (sequence is synthesized)
ggagtgttttttagtttgtttgcgttagtgagttccagatgtttgtttacttatattctgccacattgaaaatgattttttataaacctatttacagaagttactctgaattgtactcat

SEQ ID NO: 200527 - DNA, 120 bp, Artificial Sequence
  ENSG00000114120_79 (sequence is synthesized)
aaggaatgataatccctaatggagaagaacagttagacagataagataaagtgtaattttacttccaaatcatgtgtatttagaatatttctacatttatccagtggagttttttctaaa

SEQ ID NO: 200528 - DNA, 120 bp, Artificial Sequence
  ENSG00000114120_80 (sequence is synthesized)
gctattataagtattttattttggattattcatttacttttgaaatgtgataatgtttaatgctaactcctttcgtgtatatttttaatgttccaagtaagtacatccaattaatgataa

SEQ ID NO: 200529 - DNA, 120 bp, Artificial Sequence
  ENSG00000114124_0 (sequence is synthesized)
accctccacgggtcccacccacaggccacaggactcactgtaaatcccttggacgttgtctcacccgggaagggaaagcagccagcagccctccagccctcttgtgctttccctgggagt

SEQ ID NO: 200530 - DNA, 120 bp, Artificial Sequence
  ENSG00000114124_1 (sequence is synthesized)
gcgccccgtgctcagccatggtggacatgggggccctggacaacctgatcgccaacaccgcctacctgcaggcccggaagccctcggactgcgacagcaaagagctgcagcggcggcggc

SEQ ID NO: 200531 - DNA, 120 bp, Artificial Sequence
  ENSG00000114124_2 (sequence is synthesized)
gtagcctggccctgcccgggctgcagggctgcgcggagctccgccagaagctgtccctgaacttccacagcctgtgtgagcagcagcccatcggtcgccgcctcttccgtgacttcctag

SEQ ID NO: 200532 - DNA, 120 bp, Artificial Sequence
  ENSG00000114124_3 (sequence is synthesized)
ccacagtgcccacgttccgcaaggcggcaaccttcctagaggacgtgcagaactgggagctggccgaggagggacccaccaaagacagcgcgctgcaggggctggtggccacttgtgcga

SEQ ID NO: 200533 - DNA, 120 bp, Artificial Sequence
  ENSG00000114124_4 (sequence is synthesized)
gtgcccctgccccggggaacccgcaacccttcctcagccaggccgtggccaccaagtgccaagcagccaccactgaggaagagcgagtggctgcagtgacgctggccaaggctgaggcca

SEQ ID NO: 200534 - DNA, 120 bp, Artificial Sequence
  ENSG00000114124_5 (sequence is synthesized)
tggctttcttgcaagagcagccctttaaggatttcgtgaccagcgccttctacgacaagtttctgcagtggaaactcttcgagatgcaaccagtgtcagacaagtacttcactgagttca

SEQ ID NO: 200535 - DNA, 120 bp, Artificial Sequence
  ENSG00000114124_6 (sequence is synthesized)
gagtgctggggaaaggtggttttggggaggtatgtgccgtccaggtgaaaaacactgggaagatgtatgcctgtaagaaactggacaagaagcggctgaagaagaaaggtggcgagaaga

SEQ ID NO: 200536 - DNA, 120 bp, Artificial Sequence
  ENSG00000114124_7 (sequence is synthesized)
tggctctcttggaaaaggaaatcttggagaaggtcagcagccctttcattgtctctctggcctatgcctttgagagcaagacccatctctgccttgtcatgagcctgatgaatgggggag

SEQ ID NO: 200537 - DNA, 120 bp, Artificial Sequence
  ENSG00000114124_8 (sequence is synthesized)
acctcaagttccacatctacaacgtgggcacgcgtggcctggacatgagccgggtgatcttttactcggcccagatagcctgtgggatgctgcacctccatgaactcggcatcgtctatc

SEQ ID NO: 200538 - DNA, 120 bp, Artificial Sequence
  ENSG00000114124_9 (sequence is synthesized)
gggacatgaagcctgagaatgtgcttctggatgacctcggcaactgcaggttatctgacctggggctggccgtggagatgaagggtggcaagcccatcacccagagggctggaaccaatg

SEQ ID NO: 200539 - DNA, 120 bp, Artificial Sequence
  ENSG00000114124_10 (sequence is synthesized)
gttacatggctcctgagatcctaatggaaaaggtaagttattcctatcctgtggactggtttgccatgggatgcagcatttatgaaatggttgctggacgaacaccattcaaagattaca

SEQ ID NO: 200540 - DNA, 120 bp, Artificial Sequence
  ENSG00000114124_11 (sequence is synthesized)
aggaaaaggtcagtaaagaggatctgaagcaaagaactctgcaagacgaggtcaaattccagcatgataacttcacagaggaagcaaaagatatttgcaggctcttcttggctaagaaac

SEQ ID NO: 200541 - DNA, 120 bp, Artificial Sequence
  ENSG00000114124_12 (sequence is synthesized)
cagagcaacgcttaggaagcagagaaaagtctgatgatcccaggaaacatcatttctttaaaacgatcaactttcctcgcctggaagctggcctaattgaacccccatttgtgccagacc

SEQ ID NO: 200542 - DNA, 120 bp, Artificial Sequence
  ENSG00000114124_13 (sequence is synthesized)
atagcatggcaggaagaaattatagaaacgggactgtttgaggaactgaatgaccccaacagacctacgggttgtgaggagggtaattcatccaagtctggcgtgtgtttgttattgtaa

SEQ ID NO: 200543 - DNA, 120 bp, Artificial Sequence
  ENSG00000114124_14 (sequence is synthesized)
attgctctctttaccagacaggcagcaggagtctcggctgacataatcctcgaatgttccacacgtggaaatctgtggaatgagggctaatcagttaggagggacatcacaaccacaaaa

SEQ ID NO: 200544 - DNA, 120 bp, Artificial Sequence
  ENSG00000114124_15 (sequence is synthesized)
caattcaaaagacaggcaagctcactactagaacacattttattttctttttctttcttcataaagatgagtaaagtctcagttttcactgagggcagggaaaaggaacactcaggttta

SEQ ID NO: 200545 - DNA, 120 bp, Artificial Sequence
  ENSG00000114124_16 (sequence is synthesized)
ttttgataaactgaaagcatcagccttttaccatcatgtccctgtgtattacgcaaagtcctaggaacagagaatggaactttgtggtgtgcccagaaaatgagcatttgcaattcttag

SEQ ID NO: 200546 - DNA, 120 bp, Artificial Sequence
  ENSG00000114124_17 (sequence is synthesized)
taaataatcattttagtttttctttgtttatatctttttttcccttcatctttcttcgcttctatacttataaaaaggattttgaagctggaaacaaatgtttctgacattctcccccta

SEQ ID NO: 200547 - DNA, 120 bp, Artificial Sequence
  ENSG00000114124_18 (sequence is synthesized)
aaaaggagtggattacaatattttggcaatgttttaaatcacagaataattttcaatttcagtgacagtttcttttgcaattttgtggaaataatttactatcataatgttgaagcattt

SEQ ID NO: 200548 - DNA, 120 bp, Artificial Sequence
  ENSG00000114124_19 (sequence is synthesized)
taaacataaacatccatgacatctgtgaattaaagcattctgtaaatttagttgagtcctttaagtaatatggtacaaattgcttcaacttgcactaccatatgccatcggttcccaaac

SEQ ID NO: 200549 - DNA, 120 bp, Artificial Sequence
  ENSG00000114124_20 (sequence is synthesized)
tctgctgaactttggaatcatctagggatcttttaaaaaactaatgcctgattcccatccatagacattctgatccccactcccaggtatgagaacagcttgaccatttagaatttcaga

SEQ ID NO: 200550 - DNA, 120 bp, Artificial Sequence
  ENSG00000114124_21 (sequence is synthesized)
agctccccaggtgattctaatgtgcagcagagtttggcaggcactgctgtgcacatttgaatgttattacattcaatcttattttggttgctcaaaacttcaatcatacattttgatggc

SEQ ID NO: 200551 - DNA, 120 bp, Artificial Sequence
  ENSG00000114124_22 (sequence is synthesized)
aacttttcaaatgtccccaaagcatgtcattttagtaattgcagtataaatgaaacaagacagtctattcatcttatggcttctcttgtccttgcacactttagtttctcacacgtatct

SEQ ID NO: 200552 - DNA, 120 bp, Artificial Sequence
  ENSG00000114124_23 (sequence is synthesized)
tcacacgtatcttgggagctcggtctcttggctatttcaagtcctgaaggagacctatgggcttagaaattgagttgaacaggccaggtgcggtggctcatgcctgcaattccagcactt

SEQ ID NO: 200553 - DNA, 69 bp, Artificial Sequence
  ENSG00000114124_24 (sequence is synthesized)
caaggcagatggatcatgaggtcaggggctcaagactagcctggccaacatgttgcatctataatccca

SEQ ID NO: 200554 - DNA, 120 bp, Artificial Sequence
  ENSG00000114125_0 (sequence is synthesized)
cttccccaagccaacgtctccgccgtcggctccgcggcgccgccatggccgacgtggaagacggagaggaaacctgcgccctggcctctcactccgggagctcaggctccaagtcgggag

SEQ ID NO: 200555 - DNA, 120 bp, Artificial Sequence
  ENSG00000114125_1 (sequence is synthesized)
gcgacaagatgttctccctcaagaagtggaacgcggtggccatgtggagctgggacgtggagtgcgatacgtgcgccatctgcagggtccaggtgatggatgcctgtcttagatgtcaag

SEQ ID NO: 200556 - DNA, 120 bp, Artificial Sequence
  ENSG00000114125_2 (sequence is synthesized)
ctgaaaacaaacaagaggactgtgttgtggtctggggagaatgtaatcattccttccacaactgctgcatgtccctgtgggtgaaacagaacaatcgctgccctctctgccagcaggact

SEQ ID NO: 200557 - DNA, 120 bp, Artificial Sequence
  ENSG00000114125_3 (sequence is synthesized)
gggtggtccaaagaatcggcaaatgagagtggttagaaggcttcttagcgcagttgttcagagccctggtggatcttgtaatccagtgccctacaaaggctagaacactacaggggatga

SEQ ID NO: 200558 - DNA, 120 bp, Artificial Sequence
  ENSG00000114125_4 (sequence is synthesized)
attcttcaaataggagccgatggatctgtggtcctttgggactcatcaaagccttggtttagcattttgtcagttttatcttcagaaattctctgcgattaagaagataatttattaaag

SEQ ID NO: 200559 - DNA, 120 bp, Artificial Sequence
  ENSG00000114125_5 (sequence is synthesized)
gtggtccttcctacctctgtggtgtgtgtcgcgcacacagcttagaagtgctataaaaaaggaaagagctccaaattgaatcacctttataatttacccatttctatacaacaggcagtg

SEQ ID NO: 200560 - DNA, 120 bp, Artificial Sequence
  ENSG00000114125_6 (sequence is synthesized)
gaagcagtttcagagaactttttgcatgcttatggttgatcagttaaaaaagaatgttacagtaacaaataaagtgcagtttaaaacccaactcttactcttaatttgttcctaatacgt

SEQ ID NO: 200561 - DNA, 120 bp, Artificial Sequence
  ENSG00000114125_7 (sequence is synthesized)
atttttggcagggagagggaacggtccatgaaatctttatgtgatataaggattttaagtttgggccagtgaacagggtaaataaaatttaacttttgagcatatggaattttgattgcc

SEQ ID NO: 200562 - DNA, 120 bp, Artificial Sequence
  ENSG00000114125_8 (sequence is synthesized)
tttaaagttactattctgtatcattgattcatcaagaaaacctagatctgcactcacctcactgttcaatcattgagtggtaaaggacagaagtattttctagttctggtcagatgatat

SEQ ID NO: 200563 - DNA, 75 bp, Artificial Sequence
  ENSG00000114125_9 (sequence is synthesized)
taaaggacagaagtattttctagttctggtcagatgatataattttttttttttttttttgtgggggtgaactca

SEQ ID NO: 200564 - DNA, 120 bp, Artificial Sequence
  ENSG00000114125_10 (sequence is synthesized)
ttacaggtgtgggccactgcacctggcccagatgatataatttaactgtgttttaggtaacatgttaatgagggaaaatgtttaccagtgtagcattggatcaaaaagtttatcacacag

SEQ ID NO: 200565 - DNA, 120 bp, Artificial Sequence
  ENSG00000114125_11 (sequence is synthesized)
tcacacagtgttttaataaatggtttattctgcttaccttatttgaattgtcattataattttatatgcaaccttaatttgtcaagtaaatactttcatttaatttgaaagaattcatat

SEQ ID NO: 200566 - DNA, 120 bp, Artificial Sequence
  ENSG00000114125_12 (sequence is synthesized)
tcatttgctctttcatttgacaataataaaatttaaggtttattacctggaaagagtgcaagaaaatactaaacaactttatcaaactgattcacactgaggggaggttattttgtaaca

SEQ ID NO: 200567 - DNA, 120 bp, Artificial Sequence
  ENSG00000114125_13 (sequence is synthesized)
aataatggaccacaagttcattttgtattcttctgtagtagaggctactgatatgaatttaagaaaaaaccttagaatcttaacttttcacatctgcagatgcagtgtgccattctgaat

SEQ ID NO: 200568 - DNA, 120 bp, Artificial Sequence
  ENSG00000114125_14 (sequence is synthesized)
ttttcaatctaagggatgtggatacatagaatgtttaaaaagataacaattagaatgaaaaattaaaattatgtatgcttttatatgggttactttttattgatcacatttctctggaaa

SEQ ID NO: 200569 - DNA, 120 bp, Artificial Sequence
  ENSG00000114125_15 (sequence is synthesized)
tttttctttatattttttcacagttgtctttctagctactgaaaaaattatacaaatatctttggccatttaaatgtttatcattgtgcagtgaactgttttagtaactttctgtttgac

SEQ ID NO: 200570 - DNA, 120 bp, Artificial Sequence
  ENSG00000114125_16 (sequence is synthesized)
ctttttagaaggttgcatccttaaaatgtgaaccagatacatggctttgcattgaagaggaaagcagtagaatgtcaggttactttaggcagtgtgacagtatataaatgaaatgtggag

SEQ ID NO: 200571 - DNA, 120 bp, Artificial Sequence
  ENSG00000114125_17 (sequence is synthesized)
gatggtggtaacaatttgattttccacacagcaaaaccacagtcccgccacctaacaaagccctgtttatgccacacaccagcatctgagggaagaggaggcactgtgacaaagcagcgc

SEQ ID NO: 200572 - DNA, 120 bp, Artificial Sequence
  ENSG00000114125_18 (sequence is synthesized)
tgatgctgctcagcctgcgatgattacagctcatctgcacagccatctgaaagtttaatacatactcatcagagggaacatgccgggacaattttgggttccaatacaaaagttaagcat

SEQ ID NO: 200573 - DNA, 120 bp, Artificial Sequence
  ENSG00000114125_19 (sequence is synthesized)
caaacaggtttttctttccatttgattaaatgtgctgattttattttactgttgcattagaaacaaacaagttatctttcgctatttaattttccctctatgcaaattgtgttattacag

SEQ ID NO: 200574 - DNA, 120 bp, Artificial Sequence
  ENSG00000114125_20 (sequence is synthesized)
ctgaccgctatcagtaaatcttaattctgtcagtcccattgcttccttttttataaaaatactgtgtccccctttactgtcatgaagtgaaattcataaatatatttcctacacatataa

SEQ ID NO: 200575 - DNA, 120 bp, Artificial Sequence
  ENSG00000114125_21 (sequence is synthesized)
ggtccgaggccctgaacctaataaatgccagtgaaatgggatttgactgtagatctggctccacagccctcgctgtcccctctgtctcactggcttctcaccagccttgtctggatgacc

SEQ ID NO: 200576 - DNA, 120 bp, Artificial Sequence
  ENSG00000114125_22 (sequence is synthesized)
atcggtagcaacctattggaagcatacaaagcagtttattttagaggaactctcaagtgtcttagggtagaaagtaaaaagttgcttcttatgagttgctaaaggaaggcttctgtgtca

SEQ ID NO: 200577 - DNA, 120 bp, Artificial Sequence
  ENSG00000114125_23 (sequence is synthesized)
gtaagtatggatgactttaaaaaacttgtttatgaagcaattttttaatttaattttttataagttatatattcatatagttcagaaattgaggaagttatgtatattacctggaagagt

SEQ ID NO: 200578 - DNA, 120 bp, Artificial Sequence
  ENSG00000114126_0 (sequence is synthesized)
gctccgccgccaaagctcgcgcgggggaagcggggctgtagctgggcagggagagggcggacgaaatcggtagcgatctcggctgcggcgctgccgcagctgcccggcccgcggggcgcg

SEQ ID NO: 200579 - DNA, 120 bp, Artificial Sequence
  ENSG00000114126_1 (sequence is synthesized)
ccctgacccttcatctttgggcaggctcgagggcgcgcgcacggttggcgttctggggcctcaaactcctgggccttgaccgggcaggccgcgtctccccgggtgtgagtccaccgggac

SEQ ID NO: 200580 - DNA, 120 bp, Artificial Sequence
  ENSG00000114126_2 (sequence is synthesized)
ccggccgccgcctaagcgcgggcgccacagaagcggcggcgcccgaagacgcgctcctggctcggcccgacagcctcgcttggccgccagttcttctgcagccgaaggcggttgttcttt

SEQ ID NO: 200581 - DNA, 120 bp, Artificial Sequence
  ENSG00000114126_3 (sequence is synthesized)
taaagaattattgaagacgaaggtttttttctttttatttttttaatggctttacagaatcttaaatagaatacagtttgacatgacggcaaaaaatgttggtttgacttccacaaatgc

SEQ ID NO: 200582 - DNA, 120 bp, Artificial Sequence
  ENSG00000114126_4 (sequence is synthesized)
agaagtaagaggatttatagatcagaatctcagtccaacaaaaggtaaatacctagaagtggaattgctgggtcatatggcaacatttcatttgttgcatttccagtttccaataccaac

SEQ ID NO: 200583 - DNA, 120 bp, Artificial Sequence
  ENSG00000114126_5 (sequence is synthesized)
tcacctacaaagattttaccaaaaaccttaggaccaataaatgtgaatgttggaccccaaatgattataagcacaccacagagactaaccagttcaggaagtgttctgattgggagtcca

SEQ ID NO: 200584 - DNA, 120 bp, Artificial Sequence
  ENSG00000114126_6 (sequence is synthesized)
tatacccctgcaccagcaatggttactcagacacacatagcagaagctactggctgggtccctggtgatagaaaacgggctagaaaatttatagactctgatttttcagaaagtaaacga

SEQ ID NO: 200585 - DNA, 120 bp, Artificial Sequence
  ENSG00000114126_7 (sequence is synthesized)
gtgtgagaaagttcaacgaaaaggtacaacatcgtacaatgaagtcgctgatgagctggtgtcagagttcaccaattcaaataaccatttggctgctgattcgcaggcttatgatcagaa

SEQ ID NO: 200586 - DNA, 120 bp, Artificial Sequence
  ENSG00000114126_8 (sequence is synthesized)
gaacattaggcgaagagtttatgatgctttaaatgtgctaatggcaatgaacataatttcaaaggaaaaaaaagaaatcaagtggattggcctgcctaccaattctgctcaggaatgtca

SEQ ID NO: 200587 - DNA, 120 bp, Artificial Sequence
  ENSG00000114126_9 (sequence is synthesized)
gaatctggagatagagaagcagaggcggatagaacggataaagcagaagcgggcccagctgcaagaacttctcctacagcaaatcgctttcaaaaacctggtacagagaaatcgacaaaa

SEQ ID NO: 200588 - DNA, 120 bp, Artificial Sequence
  ENSG00000114126_10 (sequence is synthesized)
tgagcagcaaaaccagggcccgccggctctgaactctaccattcagctgccattcataatcatcaatacaagcagaaaaacagtcatagattgcagcatctccagtgacaagtttgagta

SEQ ID NO: 200589 - DNA, 120 bp, Artificial Sequence
  ENSG00000114126_11 (sequence is synthesized)
tcttttcaattttgacaacacctttgagatccatgatgacatagaagtactaaagcggatgggaatgtcgtttggcctggagtcaggcaaatgctctctggaggatctgaaacttgcgaa

SEQ ID NO: 200590 - DNA, 120 bp, Artificial Sequence
  ENSG00000114126_12 (sequence is synthesized)
atccctggtgccaaaggctttagaaggttatatcacagatatctccacaggaccttcttggttaaatcagggactacttctgaactctacccaatcagtttcaaatttagacctgaccac

SEQ ID NO: 200591 - DNA, 120 bp, Artificial Sequence
  ENSG00000114126_13 (sequence is synthesized)
tggtgccaccttaccccagtcaagtgtaaaccaagggttatgcttggatgcagaagtggccttagcaactgggcagttcctggccccaaacagtcaccagtccagcagtgcggcctctca

SEQ ID NO: 200592 - DNA, 120 bp, Artificial Sequence
  ENSG00000114126_14 (sequence is synthesized)
ctgctccgagtcccgaggcgagaccccctgttcgttcaatgatgaagatgaggaagatgatgaggaggattcctcctccccagaataaagacaagagaaagcctacgtttcaatatgtga

SEQ ID NO: 200593 - DNA, 120 bp, Artificial Sequence
  ENSG00000114126_15 (sequence is synthesized)
gacacagtctcaagtttccactgaatggtaacaaagactgtagaatgttgttggtactgcagtgagaggcatgcttccttagaccaggcaacatttcatttgttgcatttccagtttcca

SEQ ID NO: 200594 - DNA, 120 bp, Artificial Sequence
  ENSG00000114126_16 (sequence is synthesized)
tgtgagctcttgtttttgaaatgattgcttcagtctttgcctttgtttgcactgtgtgttcagtgaaaactagagaaacacaataagcaaatcacatgaaggctgagatgattgagatga

SEQ ID NO: 200595 - DNA, 120 bp, Artificial Sequence
  ENSG00000114126_17 (sequence is synthesized)
aagttaacatagtgtgaatgaaagtctggccaacagagcagtagatgatataacaaagaaagcatgctttctgaggagatagtggggataatccctgaagagttggcagtgtgagtgcaa

SEQ ID NO: 200596 - DNA, 120 bp, Artificial Sequence
  ENSG00000114126_18 (sequence is synthesized)
ctcatttatcttctgtgaggtgggatttttgtgttcctcacacccatgtaattattcttagaattgagattgctacacggagcagtccttgacgatcgtgtttctgacgtttctcttcct

SEQ ID NO: 200597 - DNA, 120 bp, Artificial Sequence
  ENSG00000114126_19 (sequence is synthesized)
tgcctggactgcctttgacaaggcagaaatgaacatgaaaagtccccaggagaggggagctgtgtagtgagggatactgagggcagtcctgtggctgaggggcacagattgaactgctga

SEQ ID NO: 200598 - DNA, 120 bp, Artificial Sequence
  ENSG00000114126_20 (sequence is synthesized)
actagttggaggtctagatgaggtgctttacgcatcagctgccttagacagcttctagaaaggagcgagcgctacttcttaagtacttaagtgacatttagataatttatagtaaaactg

SEQ ID NO: 200599 - DNA, 120 bp, Artificial Sequence
  ENSG00000114126_21 (sequence is synthesized)
aaattattattagccaatgcattggtgcatagaatttactagggctacttctggaagccaaaatagaatagcatttccatgtgcattaaatactttgccagcactgcctttgccagcatc

SEQ ID NO: 200600 - DNA, 120 bp, Artificial Sequence
  ENSG00000114126_22 (sequence is synthesized)
ctaaatctggagttttacaaagaaggaaactgtatctttaggttaatcaaagctatgcatttcatatagctttttcatttaaaacaagacaaagaaacaaattcctatgaccaaattgct

SEQ ID NO: 200601 - DNA, 120 bp, Artificial Sequence
  ENSG00000114126_23 (sequence is synthesized)
tgcctacagttccctgcagtaattgtatgatctcacccagtgtgcaatttgtgaaaatgaaccaaatgtcattacttttgtcttaaagaaaagtctatttcaagaatatgaacagcagtg

SEQ ID NO: 200602 - DNA, 120 bp, Artificial Sequence
  ENSG00000114126_24 (sequence is synthesized)
atttagtgtttcacagaaacactagaaaacgttgaacactcctactgcctggatatatggtagtgcagttatgttgtttatggctcaagatgtcattagaaatactgcagtggtgtattc

SEQ ID NO: 200603 - DNA, 120 bp, Artificial Sequence
  ENSG00000114126_25 (sequence is synthesized)
acagctgctccttctctgaatgaaagagtgtagggacacctgccaccatggccagaccctgactgaatttcacattaaggctttggaaaggagcaaataataatgggagaattaactcca

SEQ ID NO: 200604 - DNA, 120 bp, Artificial Sequence
  ENSG00000114126_26 (sequence is synthesized)
aaactttgacctgaatcatgtggatttgtcccaagattatgctagatgcaccaagcatggcccaaattggttcttttttaaatcccatgggggaagtgcaggctccttcctgtggtgcct

SEQ ID NO: 200605 - DNA, 120 bp, Artificial Sequence
  ENSG00000114126_27 (sequence is synthesized)
ctttatagcctcaccaccatgctaacactgagcatggtgaggaggaggaagctttggctagctaaacatgtttaataaggccataaaaactgagaaagaaaaacattcaactttagctga

SEQ ID NO: 200606 - DNA, 120 bp, Artificial Sequence
  ENSG00000114126_28 (sequence is synthesized)
agctcctttgatacaaaagtttcattctgtcagaaataagccatagtacagactcagagatagaggcagtttctagagaactcggtcttatcgtgggttctggagcacacctctcagacc

SEQ ID NO: 200607 - DNA, 120 bp, Artificial Sequence
  ENSG00000114126_29 (sequence is synthesized)
agtcaggaacactggggaggtgacagcaggtccccaggggcctgcagggaatctttcagctgcacggattgggatttccctccaaaccaaactgtcctttaaggggcagcctcctctttt

SEQ ID NO: 200608 - DNA, 120 bp, Artificial Sequence
  ENSG00000114126_30 (sequence is synthesized)
actaactccaccctttctcatctctgggacccagcagggacctggagaggccaacagccactgctacctttgtagtcttcaaaatattgaactgcaggtcccaagatgcatttcaggatt

SEQ ID NO: 200609 - DNA, 120 bp, Artificial Sequence
  ENSG00000114126_31 (sequence is synthesized)
taagacaggtgcactaatgataaccattccttcaccaagtagcaacattcttgccagagttcttgggaaacctgtttttttctctactctccatctctgctgctctcatgctttaaattg

SEQ ID NO: 200610 - DNA, 120 bp, Artificial Sequence
  ENSG00000114126_32 (sequence is synthesized)
ataaaatatgggctcaaaaaaagaaagccgccaaagactcttatccttattggtgccccatcattggccaccccagccataggtgtgtgctgttggtgggaaatggtctccttcctcagc

SEQ ID NO: 200611 - DNA, 120 bp, Artificial Sequence
  ENSG00000114126_33 (sequence is synthesized)
gttgtgtttgggttactggtgaggccagctcacagagtgacatcatggtcaccagtacatgtcgctggagtaaaatcttgcctttagaaactaggttgagctgttcagaaaggtcaattc

SEQ ID NO: 200612 - DNA, 120 bp, Artificial Sequence
  ENSG00000114126_34 (sequence is synthesized)
tcttctgtattccccctcaacatttatctgggtctaaagctcagcactgagtcacaatttcacacaagatcaaagtgaggcagtgttaggaaaccatgggctgggtgcagtgcctctcgc

SEQ ID NO: 200613 - DNA, 77 bp, Artificial Sequence
  ENSG00000114126_35 (sequence is synthesized)
cagtgttaggaaaccatgggctgggtgcagtgcctctcgcctgtaatcgtagcactttgggaggccgaggcgggcac

SEQ ID NO: 200614 - DNA, 120 bp, Artificial Sequence
  ENSG00000114126_36 (sequence is synthesized)
aattagctgggtgtggtggggcatgcctgtagtcctggctactcaagaggctgaggtgggaggattgcttgagcgcaggaggcggaggttgtagagccaagatcacaccactgcactcca

SEQ ID NO: 200615 - DNA, 120 bp, Artificial Sequence
  ENSG00000114126_37 (sequence is synthesized)
gtctcaaaaaaaaaaaaaaaaaaaatggaagttgtggtcacaatgcccaggcttctttgttatagtggcacgctgggttacttgccacacacagatcactcctcccagggctgctggcac

SEQ ID NO: 200616 - DNA, 120 bp, Artificial Sequence
  ENSG00000114126_38 (sequence is synthesized)
ggctgctggcacacactgattgtggggagttcaagaggccttttccccttgagggtgtggctgtccccctttcaggcgtgtggcgtcattcatggaggaagtgctggctctacttagcac

SEQ ID NO: 200617 - DNA, 120 bp, Artificial Sequence
  ENSG00000114126_39 (sequence is synthesized)
acgcacagtggcactaggacctgcgtgcctggccctcagtgggtagggcggtgctgcctaggcacacagcagcgcttacgggccccaggtgcctactaggctgccttcctcttccccgct

SEQ ID NO: 200618 - DNA, 120 bp, Artificial Sequence
  ENSG00000114126_40 (sequence is synthesized)
gtcagtctgtgtcctccacgtgcttatttcctgtggtgagagcagttgtggtgtttgtataccttgtgccttatgatcaaggtgggccttggaggagggcgggaaaggagcgaccaacat

SEQ ID NO: 200619 - DNA, 120 bp, Artificial Sequence
  ENSG00000114126_41 (sequence is synthesized)
cagcgacacccaccgcccgagaaactacagacaatggccacaagtttggcgtccttcaatttaattctttaaagaagtgctgggaagaaaaagctatgtggtttctaccattttagcagg

SEQ ID NO: 200620 - DNA, 120 bp, Artificial Sequence
  ENSG00000114126_42 (sequence is synthesized)
ataaagaggataactccttccattagcaaattttacagttgttaacagtactctgccatatttgaaaaataatgccagagtcagtccttgaaaacaaggtagctcctatcagaattcaaa

SEQ ID NO: 200621 - DNA, 120 bp, Artificial Sequence
  ENSG00000114126_43 (sequence is synthesized)
cgtgagccaccgcacccggcctcaaatggaaatatttcacagaggagtggttcagtttagccctgcaagacatctataacttgactgtttgctaaaccacaactctttttggctacttgg

SEQ ID NO: 200622 - DNA, 120 bp, Artificial Sequence
  ENSG00000114126_44 (sequence is synthesized)
ccacaactctttttggctacttgggtcatagagacagcagagttgctccaagtataaatgtgacttaggctccctccagcacacagtgtgtatgttggagggagtgtggattagcagaga

SEQ ID NO: 200623 - DNA, 120 bp, Artificial Sequence
  ENSG00000114126_45 (sequence is synthesized)
ggagggagtgtggattagcagagaatgagaactacctcagctattcctgccataaccacactgagagaggggggcacggtggggagcctatttagcttttttttttttttgagacggagt

SEQ ID NO: 200624 - DNA, 120 bp, Artificial Sequence
  ENSG00000114126_46 (sequence is synthesized)
acccggctctatttagctttttaaaaattatttcctttcaagggccctttaatatctatcaagctccctcccctaacaaaatgggctgtccctgcccaacaagtctgaaatagaccttaa

SEQ ID NO: 200625 - DNA, 120 bp, Artificial Sequence
  ENSG00000114126_47 (sequence is synthesized)
aactgtgctgccttagtggtaagtaaggggtgggggttggacagtgaatcttaagatttcatccttcattcagtaagcatttgagtacctactgtgagcaggcattggggcggagcagcg

SEQ ID NO: 200626 - DNA, 120 bp, Artificial Sequence
  ENSG00000114126_48 (sequence is synthesized)
agagccctgccgatgttgggttctcctcctattggggaaacttgatcacagatggaacacgtgcagattgattgatgagtgctgtggagaaagcagcagcgtagcgggaccgtttgggaa

SEQ ID NO: 200627 - DNA, 120 bp, Artificial Sequence
  ENSG00000114126_49 (sequence is synthesized)
aggctactttggctgggggtggctgggaaaggcccctctgggaaagagacagttttactgagtcagatggtggaaagacagatgtctctatactttcttaacaagccactctgtcccata

SEQ ID NO: 200628 - DNA, 120 bp, Artificial Sequence
  ENSG00000114126_50 (sequence is synthesized)
acatgcacttggaatctctcctaagttccagaggccccactgttccagtttcaagccttcattttggagtctgtttgggaacttttaagacttcaaagcaaagttagctaccagcaattt

SEQ ID NO: 200629 - DNA, 120 bp, Artificial Sequence
  ENSG00000114126_51 (sequence is synthesized)
aagttagctaccagcaatttctgtaaaccaagagaagattgtcacaaagattcactactttccaactgaatctatgcagtagaaaaatcattagaaaatacaaaaattagccgggcgtgg

SEQ ID NO: 200630 - DNA, 120 bp, Artificial Sequence
  ENSG00000114126_52 (sequence is synthesized)
aagaaaaaagaaagaaagaaaaatgattagaaattgagaactattttacgtgtttctaagttgttggctacatcaaagagatcatctgtattctgcatatgggctggctttggtgaagct

SEQ ID NO: 200631 - DNA, 120 bp, Artificial Sequence
  ENSG00000114126_53 (sequence is synthesized)
gatgactggacttctaagaaccgttttcccaaatgggttcccatattcatgcacccaaagcaatggtccccaagcactgatgaaaactaatatgcatttcccaaagacccacactatgta

SEQ ID NO: 200632 - DNA, 120 bp, Artificial Sequence
  ENSG00000114126_54 (sequence is synthesized)
tcaggagcctgcaccatgccatttgaatgaccctcagcaatgtgcctccctgccctcaaattcccagttgataacagtgtttgattaaatttccactcaagccaaacatggttactaaga

SEQ ID NO: 200633 - DNA, 78 bp, Artificial Sequence
  ENSG00000114126_55 (sequence is synthesized)
ttgattaaatttccactcaagccaaacatggttactaagaagagaaaaacctgatgtttgcataatattttttttccc

SEQ ID NO: 200634 - DNA, 79 bp, Artificial Sequence
  ENSG00000114126_56 (sequence is synthesized)
aagattttatgattaaaaaaaattcaagctcaatacccacataaattataacgtttctcaggaagtagtcccttaacca

SEQ ID NO: 200635 - DNA, 120 bp, Artificial Sequence
  ENSG00000114126_57 (sequence is synthesized)
cataaattataacgtttctcaggaagtagtcccttaaccaaaacgtctctgagaagtgatgcttaggtaatctctgggatccgattttcccacatgtctcactccacagtatgctaaaga

SEQ ID NO: 200636 - DNA, 120 bp, Artificial Sequence
  ENSG00000114126_58 (sequence is synthesized)
agaaaaagtgagtgggcacaacactttgaccctctggctaagccctgggagtccctgacaggtccagaaacttctctgacacccattcaccagggtgctgagataggagaaagtgctcat

SEQ ID NO: 200637 - DNA, 120 bp, Artificial Sequence
  ENSG00000114126_59 (sequence is synthesized)
ttataatgtgtattctgtgcagctgttctcagacaagaccggatcttgtcatcttaccttttgctttacaaaaaaggcctgttgaagtcaatgctgtcttgccccttgctgtttcagcag

SEQ ID NO: 200638 - DNA, 120 bp, Artificial Sequence
  ENSG00000114126_60 (sequence is synthesized)
gttagactttggtcttcactgcttatagctgcattggaggccaacgtagctgatgctcagggtcaggcctcgccccttcgccgcaggtctcaggatcggggataacatcgctcccaccct

SEQ ID NO: 200639 - DNA, 120 bp, Artificial Sequence
  ENSG00000114126_61 (sequence is synthesized)
gctcatttagagatgggaaacaagcaagagcttgacttgcctcccatccctcagcctgtctgtggcagagcctgcaccaaaacccagagcttcttccctccgtgagggccacgctgtcac

SEQ ID NO: 200640 - DNA, 120 bp, Artificial Sequence
  ENSG00000114126_62 (sequence is synthesized)
cacagtcctcccagatgggttttggattagcatcagtcctgtgtcaccaagtgccaaacagctgaggggtagaagtgggactcctttcccgagccccagcatgaggctgtggtgtcaggt

SEQ ID NO: 200641 - DNA, 120 bp, Artificial Sequence
  ENSG00000114126_63 (sequence is synthesized)
ttaggcctctctcaagtcagaaaaccccgggctgagacctccacagacaagggctccccatgctggccattggcaggggcccaagaagttcagtgaccaactggtccttccacaccacac

SEQ ID NO: 200642 - DNA, 120 bp, Artificial Sequence
  ENSG00000114126_64 (sequence is synthesized)
cagctggtgctgcccatgtctgtcgaatcataacggaaaattccccagatcacgtttggatttaaaaactcatcccttgtcgtgcttcaatgcatgccatttgtcacttaccatacttca

SEQ ID NO: 200643 - DNA, 120 bp, Artificial Sequence
  ENSG00000114126_65 (sequence is synthesized)
ccatggccgagcttcatgtcacatggcctggcgattgtgcttgttcacactggggccaggattttcatactaaaacgtcactgacaatggggctacttttctcctgaatagctcctctgg

SEQ ID NO: 200644 - DNA, 120 bp, Artificial Sequence
  ENSG00000114126_66 (sequence is synthesized)
gcttgttgcagttctagttttcccagtagttccatggcaggttcaacctctcagtgtcctgaaaaatggaaccacccactaaccatatgcactggctgcccaggtggctgcactccgggg

SEQ ID NO: 200645 - DNA, 120 bp, Artificial Sequence
  ENSG00000114126_67 (sequence is synthesized)
tgcactccggggatcacgtttcagtactgagttccttcacgcacttggttcaccaccatcactcttgagttttggacaaaagaggtgggtatgccaggcacagtggctcacgcctgtgat

SEQ ID NO: 200646 - DNA, 69 bp, Artificial Sequence
  ENSG00000114126_68 (sequence is synthesized)
gcaggagaatctcttgaacccaggaggcaaaagttgcaatgagctgagatcgtgccaggtgggtaaagg

SEQ ID NO: 200647 - DNA, 120 bp, Artificial Sequence
  ENSG00000114126_69 (sequence is synthesized)
tcaaaaaaaaaaggtgggtaaagggccatgagcccaaaccactaggttgttcaccttttcatctgaaaatgctttactctgactatgtgctattgggttttatttccagaaaatatagtt

SEQ ID NO: 200648 - DNA, 120 bp, Artificial Sequence
  ENSG00000114126_70 (sequence is synthesized)
ctccttttttctgcatgaaggatacatcgtggtgccacatgctttaagcaatttaaacaagagagataagaggaaaatgcaaccaccacatctgacttgcccaatgtagactttccttta

SEQ ID NO: 200649 - DNA, 120 bp, Artificial Sequence
  ENSG00000114126_71 (sequence is synthesized)
ttagattgaagtacacaacctaatatgatatattattttgtagtatctcagactttgtaaataaatgccattatttttatatggaaattttatagaagagctatttctgtatacgtaatt

SEQ ID NO: 200650 - DNA, 120 bp, Artificial Sequence
  ENSG00000114126_72 (sequence is synthesized)
actcctgattttctgaaattgcttctggtagataacagacaagtcctaagcagtgttccactaagggtggttccaggcctgcctgccgtggagttgactgggggaattttacagttttgc

SEQ ID NO: 200651 - DNA, 120 bp, Artificial Sequence
  ENSG00000114126_73 (sequence is synthesized)
gatcctaggatgcgtcccagacgctcagtcagaagtgctggaggtggggcctgggaagctgtatttgtaatgaactctggtgttttttgtccattaaagtgtatctttgtccatcctata

SEQ ID NO: 200652 - DNA, 120 bp, Artificial Sequence
  ENSG00000114126_74 (sequence is synthesized)
agattaaaggaaagaaaaagcatctcaaatgagtgtaagttgttcttgagaaaaaaatgtatcagacttttatgatttgaatgaaatgtattatagaaaaaaataaacactttaaaataa

SEQ ID NO: 200653 - DNA, 120 bp, Artificial Sequence
  ENSG00000114126_75 (sequence is synthesized)
ggctgggtccctgggtaagagtgttgcaagttactatttttaaaaccttaaaaaaagtttagacatttttttcttactatcttgtcttctgttcttgttttagtttagttcttaaaaaca

SEQ ID NO: 200654 - DNA, 120 bp, Artificial Sequence
  ENSG00000114126_76 (sequence is synthesized)
aatgtttttcctttaaaatcacctattttatttcactttatatcttagatataaataatctctggaataactatttttaaacagaaaaaaacagtgcaataactcataactaaaccctgt

SEQ ID NO: 200655 - DNA, 120 bp, Artificial Sequence
  ENSG00000114126_77 (sequence is synthesized)
tttaactgctttggagatataaaaactatatttttatatatttttaactcacacagaaaaggagttaaatattaagtgttggctatactcagaatttcccctatgaattacttccataaa

SEQ ID NO: 200656 - DNA, 120 bp, Artificial Sequence
  ENSG00000114126_78 (sequence is synthesized)
gaccagaaaagggtaggaaaagaggccagataaattttttattaaatttcctcttctttttaaacgctgaacaattgaatcaatatcccttctgttactaatttgtcacttttagtacaa

SEQ ID NO: 200657 - DNA, 120 bp, Artificial Sequence
  ENSG00000114126_79 (sequence is synthesized)
acttctatatgtttcatctttgcatgtaaaatacttatacctttctccactctttatcattttagtacctcatacttccataaaagaaaaataagtaagataaattactcaaaacctcat

SEQ ID NO: 200658 - DNA, 120 bp, Artificial Sequence
  ENSG00000114126_80 (sequence is synthesized)
tttgttaccttagacgttttgttactttagaagttatttacatggtggaatactgcattggtgattctgtcatatgtgagtttgagcaagcagatggtaagtcttagttaagtaagaatc

SEQ ID NO: 200659 - DNA, 120 bp, Artificial Sequence
  ENSG00000114126_81 (sequence is synthesized)
atgcaaccagaaggcatcatctttgaagcagagaataaaccctcaccaggcactgaatctgccggcactttcattttggacctctcagcaacctccagaacaattataagcacaccacag

SEQ ID NO: 200660 - DNA, 120 bp, Artificial Sequence
  ENSG00000114126_82 (sequence is synthesized)
tgatagaaaacgggctagaaaatttatagactctgatttttcagaaagggctgaaacttggagaactgatcccagggaaacaactgcctgcttcagctggtttaagaattttagtatgcc

SEQ ID NO: 200661 - DNA, 120 bp, Artificial Sequence
  ENSG00000114126_83 (sequence is synthesized)
ccagaacaggttttcctcatactggcatttgtatttgtgggaagagagagagaccagactggctgcctgcttgtctgcttagcagcaaatacaacctgaagttaagcttgttgccagcat

SEQ ID NO: 200662 - DNA, 120 bp, Artificial Sequence
  ENSG00000114126_84 (sequence is synthesized)
gagaagttgtggttagccctccacaagtgggggaaccttcttaggaaaacaagcgtgcatacaagaagctcatgtaaactctatatattgaaaacttgaatccaacattcgtgaacatga

SEQ ID NO: 200663 - DNA, 120 bp, Artificial Sequence
  ENSG00000114126_85 (sequence is synthesized)
aagaacaggacatttttggaaaactatgatgaaagaaaaggaacaagatgaataaacaaaagttatgacccaagaggatgtaagataaaaaagaacaataaaataaagttgtaattatca

SEQ ID NO: 200664 - DNA, 120 bp, Artificial Sequence
  ENSG00000114126_86 (sequence is synthesized)
tatgtaggttagcaatcaatgttattttctgcctgtaggcttttcttaataattaagaatattatattctttgttcctaactttacagattataagcacaccacagagactaaccagttc

SEQ ID NO: 200665 - DNA, 120 bp, Artificial Sequence
  ENSG00000114126_87 (sequence is synthesized)
gaaactcgtggtgcttttgctctgctttcaagatgcattaagtctcctgctttgtgactgctttggagccagcagatactctgatatgtataattcaaattatgcaggtttcacgagcaa

SEQ ID NO: 200666 - DNA, 120 bp, Artificial Sequence
  ENSG00000114127_0 (sequence is synthesized)
atggtcggccgggcggtgtgttgtcatccgcggagcgacgaccggaggctgcggcggagccccggcggggcgtttggtttcggtttggccctgactgggattagtgttgacgatcgaaat

SEQ ID NO: 200667 - DNA, 120 bp, Artificial Sequence
  ENSG00000114127_1 (sequence is synthesized)
gggagtccccaagttttacagatggatctcagagcggtatccctgtctcagcgaagtggtgaaagagcatcagattcctgaatttgacaacttgtacctggatatgaatggaattataca

SEQ ID NO: 200668 - DNA, 120 bp, Artificial Sequence
  ENSG00000114127_2 (sequence is synthesized)
tcagtgctcccatcctaatgatgatgatgttcactttagaatttcagatgataaaatctttactgatatttttcactacctggaggtgttgtttcgcattattaaacccaggaaagtgtt

SEQ ID NO: 200669 - DNA, 120 bp, Artificial Sequence
  ENSG00000114127_3 (sequence is synthesized)
ctttatggctgtagatggtgtggctcctcgagcaaaaatgaaccagcagcgtgggaggcgttttaggtcagcaaaggaggcagaagacaaaattaaaaaggcaatagagaagggagaaac

SEQ ID NO: 200670 - DNA, 120 bp, Artificial Sequence
  ENSG00000114127_4 (sequence is synthesized)
tcttcctacagaggccagatttgattccaactgtatcacaccaggaactgaatttatggccaggttacatgaacatctgaagtattttgtaaatatgaaaatttccacagacaagtcatg

SEQ ID NO: 200671 - DNA, 120 bp, Artificial Sequence
  ENSG00000114127_5 (sequence is synthesized)
gcaaggagttaccatctacttctcaggccatgagactcctggagaaggagagcataaaatcatggaatttatcagatccgagaaagcaaagccagatcatgatccaaacaccagacactg

SEQ ID NO: 200672 - DNA, 120 bp, Artificial Sequence
  ENSG00000114127_6 (sequence is synthesized)
tctttatggtttagatgctgacttgattatgcttggattaacaagtcatgaggcacatttttctctcttaagagaagaagttcgatttggtggcaaaaaaacacaacgggtatgtgctcc

SEQ ID NO: 200673 - DNA, 120 bp, Artificial Sequence
  ENSG00000114127_7 (sequence is synthesized)
agaagaaactacatttcaccttctacacttgtctttaatgagagagtatattgactatgagttttcagtattaaaagaaaagatcacatttaaatatgatattgaaaggataatagatga

SEQ ID NO: 200674 - DNA, 120 bp, Artificial Sequence
  ENSG00000114127_8 (sequence is synthesized)
ttggattttgatggggtttcttgttggtaatgattttatccctcatctacctcatttacatattaatcatgatgcactgcctcttctttatggaacatatgttaccatcctgccagaact

SEQ ID NO: 200675 - DNA, 120 bp, Artificial Sequence
  ENSG00000114127_9 (sequence is synthesized)
tgggggttatattaatgaaagtgggcacctcaacttacctcgatttgagaaataccttgtgaaactatcagattttgatcgggagcacttcagtgaagtttttgtggacctaaaatggtt

SEQ ID NO: 200676 - DNA, 120 bp, Artificial Sequence
  ENSG00000114127_10 (sequence is synthesized)
tgaaagcaaagttggtaacaagtacctcaatgaagcagcaggtgtcgcagcagaagaagccaggaactacaaggaaaagaaaaagttaaagggccaggaaaattctctgtgttggactgc

SEQ ID NO: 200677 - DNA, 120 bp, Artificial Sequence
  ENSG00000114127_11 (sequence is synthesized)
tttagacaaaaatgaaggcgaaatgataacttctaaggataatttagaagatgagactgaagatgatgacctatttgaaactgagtttagacaatataaaagaacatattacatgacgaa

SEQ ID NO: 200678 - DNA, 120 bp, Artificial Sequence
  ENSG00000114127_12 (sequence is synthesized)
gatgggggttgacgtagtatctgatgactttctggctgatcaagctgcatgttatgttcaggcaatacagtggattttgcactattactatcatggagttcagtcctggagctggtatta

SEQ ID NO: 200679 - DNA, 120 bp, Artificial Sequence
  ENSG00000114127_13 (sequence is synthesized)
tccttatcattatgcacctttcctgtctgatatacacaacatcagtacactcaaaatccattttgaactaggaaaaccttttaagccatttgaacagcttcttgctgtacttccagcagc

SEQ ID NO: 200680 - DNA, 120 bp, Artificial Sequence
  ENSG00000114127_14 (sequence is synthesized)
cagcaaaaatttacttcctgcatgctaccagcatttgatgaccaatgaagactcaccaattatagaatattacccacctgattttaaaactgacctaaatgggaaacaacaggaatggga

SEQ ID NO: 200681 - DNA, 120 bp, Artificial Sequence
  ENSG00000114127_15 (sequence is synthesized)
agctgtggtgttaatcccttttattgatgagaagcgattattggaagccatggagacatgtaaccactccctcaaaaaggaagagaggaaaagaaaccaacatagtgagtgcctaatgtg

SEQ ID NO: 200682 - DNA, 120 bp, Artificial Sequence
  ENSG00000114127_16 (sequence is synthesized)
ctggtatgatagagacacagagtttatctatccttctccatggccagaaaagttccctgccatagaacgatgttgtacaaggtataaaataatatccttagatgcttggcgtgtagacat

SEQ ID NO: 200683 - DNA, 120 bp, Artificial Sequence
  ENSG00000114127_17 (sequence is synthesized)
aaacaaaaacaaaataaccagaattgaccagaaagcattatatttctgtggatttcctactctgaaacacatcagacacaaattttttttgaagaaaagtggtgttcaagtattccagca

SEQ ID NO: 200684 - DNA, 120 bp, Artificial Sequence
  ENSG00000114127_18 (sequence is synthesized)
aagcagtcgtggagaaaacatgatgttggaaatcttagtggatgcagaatcagatgaacttaccgtagaaaatgtagcttcatcagtgcttggaaaatctgtctttgttaattggcctca

SEQ ID NO: 200685 - DNA, 120 bp, Artificial Sequence
  ENSG00000114127_19 (sequence is synthesized)
ccttgaggaagctagagtcgtggctgtatcagatggagaaactaagttttacttggaagaacctccaggaacacagaagctttattcaggaagaactgccccaccatctaaagtggttca

SEQ ID NO: 200686 - DNA, 120 bp, Artificial Sequence
  ENSG00000114127_20 (sequence is synthesized)
tcttggagataaagaacaatctaactgggcaaaagaagtacaaggaatttcagaacactacctgagaagaaaaggaataataataaatgaaacatctgcagttgtgtatgctcagttact

SEQ ID NO: 200687 - DNA, 120 bp, Artificial Sequence
  ENSG00000114127_21 (sequence is synthesized)
cacaggtcgtaaatatcaaataaatcaaaatggtgaagttcgtctagagaaacagtggtcaaaacaagttgttccttttgtttatcaaactattgtcaaggacatccgagctttcgactc

SEQ ID NO: 200688 - DNA, 120 bp, Artificial Sequence
  ENSG00000114127_22 (sequence is synthesized)
ccgtttctccaatatcaaaacattggatgatttgtttcctctgagaagtatggtctttatgctgggaactccctattatggctgcactggagaagttcaggattcaggtgatgtgattac

SEQ ID NO: 200689 - DNA, 120 bp, Artificial Sequence
  ENSG00000114127_23 (sequence is synthesized)
agaaggtaggattcgtgtgattttcagcattccatgtgaacccaatcttgatgctttaatacagaaccagcataaatattctataaagtacaacccaggatatgtgttggccagtcgcct

SEQ ID NO: 200690 - DNA, 120 bp, Artificial Sequence
  ENSG00000114127_24 (sequence is synthesized)
tggagtgagtggataccttgtttcaaggtttacaggaagtatttttattggaagaggatctaggagaaaccctcatggagaccataaagcaaatgtgggtttaaatctcaaattcaacaa

SEQ ID NO: 200691 - DNA, 120 bp, Artificial Sequence
  ENSG00000114127_25 (sequence is synthesized)
gaaaaatgaggaggtacctggatatactaagaaagttggaagtgaatggatgtattcatctgcagcagaacaacttctggcagagtacttagagagagctccagaactatttagttatat

SEQ ID NO: 200692 - DNA, 120 bp, Artificial Sequence
  ENSG00000114127_26 (sequence is synthesized)
agccaaaaatagccaagaggatgtgttctatgaagatgacatttggcctggagaaaatgagaatggtgctgaaaaagttcaagaaattattacttggctaaaaggacatcctgtcagtac

SEQ ID NO: 200693 - DNA, 120 bp, Artificial Sequence
  ENSG00000114127_27 (sequence is synthesized)
tttatctcgttcttcttgtgatttacaaattctggatgcagctattgttgagaaaattgaggaagaagtcgaaaagtgcaagcaaagaaagaataataagaaggtgcgagtaacagtgaa

SEQ ID NO: 200694 - DNA, 120 bp, Artificial Sequence
  ENSG00000114127_28 (sequence is synthesized)
accccatttgctatacagacctttagaacagcaacatggagtcattcctgatcgggatgcagaattttgtctttttgaccgtgttgtaaatgtgagagaaaacttctcagttccagttgg

SEQ ID NO: 200695 - DNA, 120 bp, Artificial Sequence
  ENSG00000114127_29 (sequence is synthesized)
ccttcgaggcaccatcataggaataaaaggagctaatagagaagccgatgtactatttgaagtattatttgatgaagaatttcctggagggttaacaataagatgctcacctggtagagg

SEQ ID NO: 200696 - DNA, 120 bp, Artificial Sequence
  ENSG00000114127_30 (sequence is synthesized)
ttatcgactgccaacaagtgccttggtgaacctttctcatgggagtcgctctgaaactggaaatcagaagttgacagccatcgtaaaaccacaaccagctgtacatcaacatagctcaag

SEQ ID NO: 200697 - DNA, 120 bp, Artificial Sequence
  ENSG00000114127_31 (sequence is synthesized)
ttcatcagtttcctctgggcatttgggagccctcaaccattcccctcaatcactttttgttcctactcaagtacctactaaagatgatgatgaattctgcaacatttggcagtccttaca

SEQ ID NO: 200698 - DNA, 120 bp, Artificial Sequence
  ENSG00000114127_32 (sequence is synthesized)
gggatctggaaagatgcaatactttcagccaactatacaagagaagggtgcagttctacctcaagaaataagccaagtaaatcaacatcataaatctggctttaatgacaacagtgttaa

SEQ ID NO: 200699 - DNA, 120 bp, Artificial Sequence
  ENSG00000114127_33 (sequence is synthesized)
atatcagcaaagaaaacatgaccctcacagaaaatttaaagaagagtgtaagagtcctaaagctgagtgttggtcccaaaaaatgtccaataagcagcctaactctggaattgagaactt

SEQ ID NO: 200700 - DNA, 120 bp, Artificial Sequence
  ENSG00000114127_34 (sequence is synthesized)
tttagcatctttgaatatctccaaagaaaatgaagtacagtcatctcatcatggggagcctccaagtgaagagcatttgtcaccacagtcatttgccatgggaacacggatgcttaaaga

SEQ ID NO: 200701 - DNA, 120 bp, Artificial Sequence
  ENSG00000114127_35 (sequence is synthesized)
aattctaaaaattgatggctctaacactgtggaccataagaatgaaatcaaacagattgctaatgaaatccctgtttcctctaacagaagagatgaatatggattaccctctcagcctaa

SEQ ID NO: 200702 - DNA, 120 bp, Artificial Sequence
  ENSG00000114127_36 (sequence is synthesized)
acaaaataagaaattagcatcttatatgaacaagcctcacagtgctaatgagtaccataatgttcagtctatggacaatatgtgttggcctgcccccagccagatccctcctgtatccac

SEQ ID NO: 200703 - DNA, 120 bp, Artificial Sequence
  ENSG00000114127_37 (sequence is synthesized)
accagtaactgaactttctcgaatttgttcccttgttggaatgccacaacctgatttctcctttcttaggatgccacagacaatgaccgtttgccaagtaaaattatctaatggcttact

SEQ ID NO: 200704 - DNA, 120 bp, Artificial Sequence
  ENSG00000114127_38 (sequence is synthesized)
ggtacatgggccacagtgccactctgaaaatgaagccaaagagaaagctgcactttttgctttacaacagttgggctccttaggcatgaatttccctttgccttcacaagtatttgcaaa

SEQ ID NO: 200705 - DNA, 120 bp, Artificial Sequence
  ENSG00000114127_39 (sequence is synthesized)
ttatccttcagctgtaccacctggaaccattcctccagcctttcccccacctactggctgggatcactatggaagcaactatgcattgggggcagctaatataatgccttcgtcgtctca

SEQ ID NO: 200706 - DNA, 120 bp, Artificial Sequence
  ENSG00000114127_40 (sequence is synthesized)
tctctttggctcaatgccatggggaccatcggtgccagttcctgggaagcccttccatcatactttatattctgggaccatgcccatggctgggggaataccagggggtgtgcacaatca

SEQ ID NO: 200707 - DNA, 120 bp, Artificial Sequence
  ENSG00000114127_41 (sequence is synthesized)
gtttatacctctgcaggttactaaaaaaagggttgcaaacaaaaagaactttgagaataaggaagcccagagttctcaagccactccagttcagactagccagccagattcttccaacat

SEQ ID NO: 200708 - DNA, 120 bp, Artificial Sequence
  ENSG00000114127_42 (sequence is synthesized)
tgcatcttcttttcaagttgaaactgcctctcaaggccatagtatatctcaccataagtcaacaccaatctcttcttcaagaagaaaatcaagaaaactggctgttaattttggtgtttc

SEQ ID NO: 200709 - DNA, 120 bp, Artificial Sequence
  ENSG00000114127_43 (sequence is synthesized)
tttctaaaccttctgagtaaatttggctcttagaattaagttaatttcttctctttccatctacctttttataaatacatatctatgtctcataaaaattagaatgtactattttaaaat

SEQ ID NO: 200710 - DNA, 120 bp, Artificial Sequence
  ENSG00000114127_44 (sequence is synthesized)
tgtgtaaattgaaatttttttcatttttaagttatcaggcacttttcatgctgtttaaaagactgtgtatcaaattgtgcactttaagtatgtgcagtttgttgtatgtcaattatacct

SEQ ID NO: 200711 - DNA, 120 bp, Artificial Sequence
  ENSG00000114127_45 (sequence is synthesized)
caataaatctgtaataaaaaactaaattaaaccttgcattaaaataatatcacagtatcagtggactaaacattaaaatgtaccactctaatcattggcctcatgattgaagcatcctga

SEQ ID NO: 200712 - DNA, 120 bp, Artificial Sequence
  ENSG00000114127_46 (sequence is synthesized)
actatgaattagacatcagttagcaataataagcattttttacactatcattgaggaataattacatggagcatgaaatttgggcctccagtataacttactgaatgtggattttatttc

SEQ ID NO: 200713 - DNA, 120 bp, Artificial Sequence
  ENSG00000114127_47 (sequence is synthesized)
tctttttaatgatgtaagaaaattgtcaggagaatggctcttatttatgtgtgttttaacttatgctttgttgcctctgagggtctttagacctgctgtgaaaggatcacatttgttgtg

SEQ ID NO: 200714 - DNA, 120 bp, Artificial Sequence
  ENSG00000114127_48 (sequence is synthesized)
gtgctgccagttttgctttattctaaattttgtaccaaagcaactttagaataatcagaatatttcatctaactgcttagaactataaatagcattctaaatttgagtaaatacaatttt

SEQ ID NO: 200715 - DNA, 120 bp, Artificial Sequence
  ENSG00000114127_49 (sequence is synthesized)
ttaggttactcaagaaccagcattagtaatttctagtaaaattgtttcaaaatctacagggtacaatgattacaaattaatcttctaacaaaataaaatatgaaatattagtcatgttaa

SEQ ID NO: 200716 - DNA, 120 bp, Artificial Sequence
  ENSG00000114127_50 (sequence is synthesized)
ttaataaactgtattattttgtatagctttttatttgcttacctgacattttatgagagcttcatagttggtcggtatgtagtgcttcttgggactgaagaaattctaattgttgtttaa

SEQ ID NO: 200717 - DNA, 120 bp, Artificial Sequence
  ENSG00000114127_51 (sequence is synthesized)
gttccaaggtgtgctacaatataggaggcacagtcatcagtttgtgacatacattatttactgcctatttcattctgattctatatttttagctttatgctgaactgttcaatgatgctg

SEQ ID NO: 200718 - DNA, 120 bp, Artificial Sequence
  ENSG00000114127_52 (sequence is synthesized)
ggattctctctttgcatgtcatatgtgaatgtgtggttcaagctgtaactgttgaaattattttagaatttatgacgatttctcagcagggcctatgtttatatatatatatatatttat

SEQ ID NO: 200719 - DNA, 120 bp, Artificial Sequence
  ENSG00000114127_53 (sequence is synthesized)
tctttagtttttgtgatatgcttatatttttaaggaagtaagttatagcatacttttttaaaagtaggaaccacaatctttatatggagcagcttgttatatctgattttcatgtaactc

SEQ ID NO: 200720 - DNA, 120 bp, Artificial Sequence
  ENSG00000114127_54 (sequence is synthesized)
attggaaactctgccatgactcttaaagtagtcttacttgttttttaaaatgctggtattaaactaaatggactcctttcactaactgctgatttcagagtttaaatgttagcaggatat

SEQ ID NO: 200721 - DNA, 120 bp, Artificial Sequence
  ENSG00000114127_55 (sequence is synthesized)
ttgtgtattagcagtgccttcagtataagagagaaatattcattatctgtcatttatcatagtcgtataagtttccatgattttattttctgttattttcataagttcagatgtttatca

SEQ ID NO: 200722 - DNA, 120 bp, Artificial Sequence
  ENSG00000114127_56 (sequence is synthesized)
gttcccaacattgtttctttatctgtagtgggatcttgagtaatgaggctcaagtaaatcctcaatgtgtataattattgcctcataaactctctctttgtttttaaaggaaacatctat

SEQ ID NO: 200723 - DNA, 120 bp, Artificial Sequence
  ENSG00000114127_57 (sequence is synthesized)
tatggtaatacaaagaaaagttaaattgtgacagtaatgttatattaacctcttcctactttaaagtgtgaaatgtttcacctcagctgtacaaactccagcattgagaatttgcctcac

SEQ ID NO: 200724 - DNA, 120 bp, Artificial Sequence
  ENSG00000114127_58 (sequence is synthesized)
tcattactcctgtgtgacagttatataaatagcatgcagctcacatctgttttagagcatagaagaagcggcacctgccatcttctgaaaactccaaagggaaatttcagtagacatagt

SEQ ID NO: 200725 - DNA, 120 bp, Artificial Sequence
  ENSG00000114127_59 (sequence is synthesized)
gcactaaacccataaggatacttgaccaatatttgagcacagcaagctgacagttctatacagataggcagtgaaagagttttattttccagccaggcgcagtggctcaaatcccagcac

SEQ ID NO: 200726 - DNA, 88 bp, Artificial Sequence
  ENSG00000114127_60 (sequence is synthesized)
ccaggcgcagtggctcaaatcccagcacttccggagttccagacaagcctggccaacatgatgaagccctgtctctactaaaaataca

SEQ ID NO: 200727 - DNA, 120 bp, Artificial Sequence
  ENSG00000114127_61 (sequence is synthesized)
gtctcaaaaaaaagaaaaaagttttattatccttactttttttttaacattattattctaaaggtcaaaactgagaagagattaagataggagagagctccataatggctggatagtggt

SEQ ID NO: 200728 - DNA, 120 bp, Artificial Sequence
  ENSG00000114127_62 (sequence is synthesized)
caggcattctctattcttttccccctgtagacccattctaaatgtgggcctgaggtcaatgggagatgtgccctccctatggaggatgtaagaagcagaggccatttctgccccatgttg

SEQ ID NO: 200729 - DNA, 120 bp, Artificial Sequence
  ENSG00000114127_63 (sequence is synthesized)
aggaaacaatctgttgatagacctggaatttagagtatatctgaaaagcagttggacttcaagaaatttaaaattctctctttgagatggggtggactaagaccacccccaaagtttaaa

SEQ ID NO: 200730 - DNA, 120 bp, Artificial Sequence
  ENSG00000114127_64 (sequence is synthesized)
aatatgctcattcaacttgaatcttctgaggactttttgtgaaaatggtggactgtttagggcataggacagattccccaaattgctttatgcttccacataactagagcacttcaatct

SEQ ID NO: 200731 - DNA, 120 bp, Artificial Sequence
  ENSG00000114127_65 (sequence is synthesized)
atttaagcctttgtctcctaactgaaacattatttctaaatatttctattcaataagttttttcttttttgagcaacttaagtgaattttgaagattgctccttccagtctcgttccttt

SEQ ID NO: 200732 - DNA, 120 bp, Artificial Sequence
  ENSG00000114127_66 (sequence is synthesized)
tcacattttcctgcattacctaataattacctcagcgttagaatttgaatgtattaattgatttaaacatcatgtagactaaagtcttaaacatctaagactcagttgtagttgcagaaa

SEQ ID NO: 200733 - DNA, 120 bp, Artificial Sequence
  ENSG00000114127_67 (sequence is synthesized)
aaaattaaagtcacctctactgaaccttggtttcaatttaagatttttcttgcttttcaaaggggtaactaataaagattgaagggtttttttcccgattggtggaggaatgaagaacta

SEQ ID NO: 200734 - DNA, 120 bp, Artificial Sequence
  ENSG00000114127_68 (sequence is synthesized)
ttgatgcaagtttttttattgtttctttctatgatcaggtacctgctttcattttagactgctacttccaaactaagctagattcttggttttaatgagaggaggcagagagagggaggc

SEQ ID NO: 200735 - DNA, 120 bp, Artificial Sequence
  ENSG00000114127_69 (sequence is synthesized)
agatggaagaagaaaaacagttaaataagacatacccagtcactgcatttttggactataccgtatctttctagcacaaggaaatagataaactgtaaggtcttttttactcacttttta

SEQ ID NO: 200736 - DNA, 120 bp, Artificial Sequence
  ENSG00000114127_70 (sequence is synthesized)
tttatgtgttctatttgtgttagtcataactgtttatagtggttgtctaatttttacttttattatatgagatagagctgtgcagatcttcactcaagttagttctgtcacgcttcttcc

SEQ ID NO: 200737 - DNA, 120 bp, Artificial Sequence
  ENSG00000114127_71 (sequence is synthesized)
cattatttagagcacagttttttaaagcaactgtacaatttctcagccttatgagcttgctgtatttcttggtatcatgttgcttccaaattttgtttttactgtagaagacaattaatt

SEQ ID NO: 200738 - DNA, 120 bp, Artificial Sequence
  ENSG00000114127_72 (sequence is synthesized)
tattgtagagaagtggctgtgaaagtcgttctctgtctttaaaaatcaattgcagaagttcatttgtcatttttctagagataaattatagtactcaaactggcagtgctcagtatatac

SEQ ID NO: 200739 - DNA, 120 bp, Artificial Sequence
  ENSG00000114127_73 (sequence is synthesized)
attttgtaagctttgtcagtgaaaccatcagttttgcaggagcttcctttcctagtcaagataaagcttaaaattccagaaattaatgtcgttcggactgactttattcatatttccatc

SEQ ID NO: 200740 - DNA, 120 bp, Artificial Sequence
  ENSG00000114127_74 (sequence is synthesized)
aaacttctccaatacagtaagagatagtgttgaaccagcatcaagtctccagaaacatggcagagcagacaggccgttaagtttcacagacatcatagatccttttcttaaagaagaaaa

SEQ ID NO: 200741 - DNA, 120 bp, Artificial Sequence
  ENSG00000114127_75 (sequence is synthesized)
acatgtataaaatagttttagtagtccaaaatgtcaactatctgtagctgcttttgtgtgtgtgtcagtgaacaaataataatgccttgctcaatcaatgcattcagccatctcaagtgc

SEQ ID NO: 200742 - DNA, 120 bp, Artificial Sequence
  ENSG00000114127_76 (sequence is synthesized)
aatttgtgaaggagactatggtttccaaaagatacatttttttacaaagttaaacctgtaaaaagtctttttttttttccctccagccgtacaccaactgcacttggttgtttcagcagt

SEQ ID NO: 200743 - DNA, 120 bp, Artificial Sequence
  ENSG00000114127_77 (sequence is synthesized)
tggtatactattaaattgtccaggccaaataggtttctgtagctgttttagtaatttgaagccaaattctcatgctgtttctcattaaaaagaatgagaatttggtccatagttagcttt

SEQ ID NO: 200744 - DNA, 120 bp, Artificial Sequence
  ENSG00000114127_78 (sequence is synthesized)
aagttctctcttcctttctttcccttacagttaagggtttggtgggggatggggaggttgttttcgttttttggatttttttgtcttttggctttaagtatcatattttcttttgcctgt

SEQ ID NO: 200745 - DNA, 120 bp, Artificial Sequence
  ENSG00000114127_79 (sequence is synthesized)
atccaactgcttctttgagtattttcatctagtttaatgtgagtaatagatgctgtgctgtcattgaagtgttcaacattttgttcatttaaacaaaagtgtaattcatacatatataga

SEQ ID NO: 200746 - DNA, 120 bp, Artificial Sequence
  ENSG00000114127_80 (sequence is synthesized)
tacatatcttaattgatttctcaactattttataagtaactggaatttttcattagatcttatacagagaagtattttattaaaaattcaaaagggaagacttttatgtgctcattttgt

SEQ ID NO: 200747 - DNA, 120 bp, Artificial Sequence
  ENSG00000114127_81 (sequence is synthesized)
aatttttgattttaaatatctttacattgtctgccaattaaagtgttttaaacttgcattggaatggactccgaatgtatttttgtggtgttacgttatccgtagatttctagcatgaag

SEQ ID NO: 200748 - DNA, 120 bp, Artificial Sequence
  ENSG00000114127_82 (sequence is synthesized)
ttagcctcacgatgctgtgcaaaggattttaaaatatgagagtcactgaaagagtttaaacatctgttcatgttaaatgctctatggattttaattaaagacttgagaatgattttataa

SEQ ID NO: 200749 - DNA, 120 bp, Artificial Sequence
  ENSG00000114127_83 (sequence is synthesized)
aattggcaaaatctgagtcatatgaagacacttagcttcagggaagcctgagaactttctaacctacctggtgtcagaaggtcagcaaaggaggcagaagacaaaattaaaaaggcaata

SEQ ID NO: 200750 - DNA, 120 bp, Artificial Sequence
  ENSG00000114127_84 (sequence is synthesized)
ctaggagaaagtaagtttatgttagagaaatttacttaaagtggcagaaaaattaaatgataaagattaaatgcttaatatttcagtatttattttcttattaattgctctggattgtct

SEQ ID NO: 200751 - DNA, 120 bp, Artificial Sequence
  ENSG00000114127_85 (sequence is synthesized)
taaaattgtgcataaatttctctgatggtaatctttcatctgaatggcacatgttttaggtggttggaaaagacagttcttattttttagcagctaataaattgaaccttgaaaaaaggt

SEQ ID NO: 200752 - DNA, 77 bp, Artificial Sequence
  ENSG00000114127_86 (sequence is synthesized)
cgaaatgggagtccccaagttttacagatggatctcagagcggtatccctgtctcagcgaagtggtgaaagagcatc

SEQ ID NO: 200753 - DNA, 120 bp, Artificial Sequence
  ENSG00000114127_87 (sequence is synthesized)
tgagccaccgcgcccggccagagatgttgacttctaatttgcaaacatttccctacgttttgtcatttttaattgaattatatatggcgctttttaaccctatatatgtaaaacaataca

SEQ ID NO: 200754 - DNA, 120 bp, Artificial Sequence
  ENSG00000114127_88 (sequence is synthesized)
aatatgattttgatgaagtagtgggagaaaaaggattttttggtttcatgaattattgtgtatgtttcaactagtctggttttggagaagatggtattaattctgacttgtattatattc

SEQ ID NO: 200755 - DNA, 120 bp, Artificial Sequence
  ENSG00000114127_89 (sequence is synthesized)
ctgtgataaaaattgctgaagagaaaatgatccttatgtataaggatttttgttacaaagttgtttataatagtaaaaaaattagaaataatctaaatgtccaataagaaggttcatcat

SEQ ID NO: 200756 - DNA, 120 bp, Artificial Sequence
  ENSG00000114127_90 (sequence is synthesized)
aattggccactgcttcttcattacagtcaccatctctgtcacctcttccatctccggaatctgcagaactgctaaactggtacttgcagaaagttcataacaatttggaaggatgcttat

SEQ ID NO: 200757 - DNA, 120 bp, Artificial Sequence
  ENSG00000114127_91 (sequence is synthesized)
agtacattattaagtacaaattgtaaaggcaagacatgaaatcatacatacagtatgctctcattaaccttaaaaaaacctagatatagataaaagactgaaacactaaaaatgtaaaag

SEQ ID NO: 200758 - DNA, 120 bp, Artificial Sequence
  ENSG00000114127_92 (sequence is synthesized)
tgatggctataagatgataaaaatgctgttcttcattgtccagattttcactcctgaggaaatagttcttttataataaaaaagcaatatttttcatattaaaaaactacctcccagaaa

SEQ ID NO: 200759 - DNA, 120 bp, Artificial Sequence
  ENSG00000114127_93 (sequence is synthesized)
atctggaaagatgcaatactttcagccaactatacaagagaaggttagtattccttgttttgatggacaattaatttaaagaaaatatatttttatatttttcttttaagactacaatga

SEQ ID NO: 200760 - DNA, 120 bp, Artificial Sequence
  ENSG00000114127_94 (sequence is synthesized)
gaccaatgaagactcaccaattatagaatattacccacctgattttaaaactgacctaaatgggaaacaacaggaatgggaagctgtggtgttaatcccttttattgatgagcgattatt

SEQ ID NO: 200761 - DNA, 120 bp, Artificial Sequence
  ENSG00000114127_95 (sequence is synthesized)
taaatgtattttattttctatgctctatttattttggccttagggttccatttactgtattttcccacttatgtttgctcatgagacgatttggtcaccttggtcataaatactcctaca

SEQ ID NO: 200762 - DNA, 120 bp, Artificial Sequence
  ENSG00000114166_0 (sequence is synthesized)
gcgccgctgccgccgggggctcgggcgcctgcggtccggcgacggcagtggctgcagcgggcacggccgaaggaccgggaggcggtggctcggcccgaatcgccgtgaagaaagcgcaac

SEQ ID NO: 200763 - DNA, 120 bp, Artificial Sequence
  ENSG00000114166_1 (sequence is synthesized)
gtggctcggcccgaatcgccgtgaagaaagcgcaactacgctccgctccgcgggccaagaaactggagaaactcggagtgtactccgcctgcaaggccgaggagtcttgtaaatgtaatg

SEQ ID NO: 200764 - DNA, 120 bp, Artificial Sequence
  ENSG00000114166_2 (sequence is synthesized)
gctggaaaaaccctaacccctcacccactccccccagagccgacctgcagcaaataattgtcagtctaacagaatcctgtcggagttgtagccatgccctagctgctcatgtttcccacc

SEQ ID NO: 200765 - DNA, 120 bp, Artificial Sequence
  ENSG00000114166_3 (sequence is synthesized)
tggagaatgtgtcagaggaagaaatgaacagactcctgggaatagtattggatgtggaatatctctttacctgtgtccacaaggaagaagatgcagataccaaacaagtttatttctatc

SEQ ID NO: 200766 - DNA, 120 bp, Artificial Sequence
  ENSG00000114166_4 (sequence is synthesized)
tatttaagctcttgagaaagtctattttacaaagaggaaaacctgtggttgaaggctctttggaaaagaaacccccatttgaaaaacctagcattgaacagggtgtgaataactttgtgc

SEQ ID NO: 200767 - DNA, 120 bp, Artificial Sequence
  ENSG00000114166_5 (sequence is synthesized)
agtacaaatttagtcacctgccagcaaaagaaaggcaaacaatagttgagttggcaaaaatgttcctaaaccgcatcaactattggcatctggaggcaccatctcaacgaagactgcgat

SEQ ID NO: 200768 - DNA, 120 bp, Artificial Sequence
  ENSG00000114166_6 (sequence is synthesized)
ctcccaatgatgatatttctggatacaaagagaactacacaaggtggctgtgttactgcaacgtgccacagttctgcgacagtctacctcggtacgaaaccacacaggtgtttgggagaa

SEQ ID NO: 200769 - DNA, 120 bp, Artificial Sequence
  ENSG00000114166_7 (sequence is synthesized)
cattgcttcgctcggtcttcactgttatgaggcgacaactcctggaacaagcaagacaggaaaaagataaactgcctcttgaaaaacgaactctaatcctcactcatttcccaaaatttc

SEQ ID NO: 200770 - DNA, 120 bp, Artificial Sequence
  ENSG00000114166_8 (sequence is synthesized)
tgtccatgctagaagaagaagtatatagtcaaaactctcccatctgggatcaggattttctctcagcctcttccagaaccagccagctaggcatccaaacagttatcaatccacctcctg

SEQ ID NO: 200771 - DNA, 120 bp, Artificial Sequence
  ENSG00000114166_9 (sequence is synthesized)
tggctgggacaatttcatacaattcaacctcatcttcccttgagcagccaaacgcagggagcagcagtcctgcctgcaaagcctcttctggacttgaggcaaacccaggagaaaagagga

SEQ ID NO: 200772 - DNA, 120 bp, Artificial Sequence
  ENSG00000114166_10 (sequence is synthesized)
aaatgactgattctcatgttctggaggaggccaagaaaccccgagttatgggggatattccgatggaattaatcaacgaggttatgtctaccatcacggaccctgcagcaatgcttggac

SEQ ID NO: 200773 - DNA, 120 bp, Artificial Sequence
  ENSG00000114166_11 (sequence is synthesized)
cagagaccaattttctgtcagcacactcggccagggatgaggcggcaaggttggaagagcgcaggggtgtaattgaatttcacgtggttggcaattccctcaaccagaaaccaaacaaga

SEQ ID NO: 200774 - DNA, 120 bp, Artificial Sequence
  ENSG00000114166_12 (sequence is synthesized)
agatcctgatgtggctggttggcctacagaacgttttctcccaccagctgccccgaatgccaaaagaatacatcacacggctcgtctttgacccgaaacacaaaacccttgctttaatta

SEQ ID NO: 200775 - DNA, 120 bp, Artificial Sequence
  ENSG00000114166_13 (sequence is synthesized)
aagatggccgtgttattggtggtatctgtttccgtatgttcccatctcaaggattcacagagattgtcttctgtgctgtaacctcaaatgagcaagtcaagggctatggaacacacctga

SEQ ID NO: 200776 - DNA, 120 bp, Artificial Sequence
  ENSG00000114166_14 (sequence is synthesized)
tgaatcatttgaaagaatatcacataaagcatgacatcctgaacttcctcacatatgcagatgaatatgcaattggatactttaagaaacagggtttctccaaagaaattaaaataccta

SEQ ID NO: 200777 - DNA, 120 bp, Artificial Sequence
  ENSG00000114166_15 (sequence is synthesized)
aaaccaaatatgttggctatatcaaggattatgaaggagccactttaatgggatgtgagctaaatccacggatcccgtacacagaattttctgtcatcattaaaaagcagaaggagataa

SEQ ID NO: 200778 - DNA, 120 bp, Artificial Sequence
  ENSG00000114166_16 (sequence is synthesized)
ttaaaaaactgattgaaagaaaacaggcacaaattcgaaaagtttaccctggactttcatgttttaaagatggagttcgacagattcctatagaaagcattcctggaattagagagacag

SEQ ID NO: 200779 - DNA, 120 bp, Artificial Sequence
  ENSG00000114166_17 (sequence is synthesized)
agagccatcaaagcgcttggcccttcatggaacctgtgaagagaacagaagctccaggatattatgaagttataaggttccccatggatctgaaaaccatgagtgaacgcctcaagaata

SEQ ID NO: 200780 - DNA, 120 bp, Artificial Sequence
  ENSG00000114166_18 (sequence is synthesized)
ggtactacgtgtctaagaaattattcatggcagacttacagcgagtctttaccaattgcaaagagtacaacccccctgagagtgaatactacaaatgtgccaatatcctggagaaattct

SEQ ID NO: 200781 - DNA, 120 bp, Artificial Sequence
  ENSG00000114166_19 (sequence is synthesized)
tcttcagtaaaattaaggaagctggattaattgacaagtgattttttttcccctctgcttcttagaaactcaccaagcagtgtgcctaaagcaaggtggtttagttttttacaaagaatt

SEQ ID NO: 200782 - DNA, 120 bp, Artificial Sequence
  ENSG00000114166_20 (sequence is synthesized)
ggacatgatgtattgaagagacttgtaaatgtaataattagcacttttgaaaaaacaaaaaacctccttttagcttttcagatatgtatttaaattgaagtcataggacatttttatttt

SEQ ID NO: 200783 - DNA, 120 bp, Artificial Sequence
  ENSG00000114166_21 (sequence is synthesized)
atggaatagattttaatctatttactactattaaggtaaattttctatggcatgtccattagctatttcatgatagatgattaggggtttcctcaaaacctgtgtgtgaggaaattgcac

SEQ ID NO: 200784 - DNA, 120 bp, Artificial Sequence
  ENSG00000114166_22 (sequence is synthesized)
acagtagcaaaatttggggaaatccataacattttcagaccatgaatgaatgtttccatttttttctaatggaatgtgagagtttacttttattttattctgaaggactttaaggaaggg

SEQ ID NO: 200785 - DNA, 120 bp, Artificial Sequence
  ENSG00000114166_23 (sequence is synthesized)
atacatgattttaaaaaagcctgtaagaggtgaaatatgtgatgtttgaagtctctttatagactttttatatatattttttaaaacactcatctagatgaggtgctttgagcagttctg

SEQ ID NO: 200786 - DNA, 120 bp, Artificial Sequence
  ENSG00000114166_24 (sequence is synthesized)
aaaaatgcagttccaggaaagcaactgctttggttcctaaggaagaaattctaaataatgcaaacttttaaaataagcatctaggtttttgataattctgtctacttacaacaaacttgt

SEQ ID NO: 200787 - DNA, 120 bp, Artificial Sequence
  ENSG00000114166_25 (sequence is synthesized)
tagtacataaccactattttaataattattttctctacacaaatgtgtaatatcatatttgactttgcttatgcaggccataagttccaaaagataatttccctgcccacaaaggcataa

SEQ ID NO: 200788 - DNA, 120 bp, Artificial Sequence
  ENSG00000114166_26 (sequence is synthesized)
acttgaaaacacatgagattgaatcaacatgctttaataggaaaagatgtatggtctatatatgtatcaatctggtgaatcctcgttctaataaaggttctttttcttttctatgataca

SEQ ID NO: 200789 - DNA, 120 bp, Artificial Sequence
  ENSG00000114166_27 (sequence is synthesized)
cacagccacgctgataatatgcaaatgaacattttcctttatgtctctccagataatgtttattgtctgaggtaaattaaattcccaccagggtttgctgtcagtattttaacacccaca

SEQ ID NO: 200790 - DNA, 120 bp, Artificial Sequence
  ENSG00000114166_28 (sequence is synthesized)
ttagtatatgcgtccagggtcataaccccctaaaatccatcatgcaaccttattaatctgtcttgggattccagtttagtgcttggatttatttcctgattacactacatagaaaagtga

SEQ ID NO: 200791 - DNA, 120 bp, Artificial Sequence
  ENSG00000114166_29 (sequence is synthesized)
gacatctgccattcccaactctgggaaaaccaactaatatacaaccatataaatgaaggccatcttgatggtctcaacactaatttttatgatgcaaatttatacactgatttttgtaaa

SEQ ID NO: 200792 - DNA, 120 bp, Artificial Sequence
  ENSG00000114166_30 (sequence is synthesized)
ggacaaagttttaaaagcgtatttaacttgatgttttctatcagcataaataaaatggtcatgaatagtcattaaaaacagttgccagtgataatctgcatgaaggaaaaagaaccctgc

SEQ ID NO: 200793 - DNA, 120 bp, Artificial Sequence
  ENSG00000114166_31 (sequence is synthesized)
aaatggctattgagttggaagtattgtttttgatatgtaagagatattcagaatgctcacactgaaaatgcctcaactttttaaagtgtaagaaaccaccatgagtggtgtctagatttc

SEQ ID NO: 200794 - DNA, 120 bp, Artificial Sequence
  ENSG00000114166_32 (sequence is synthesized)
taatgaagaatcatgatacagtttggattaagtatcttggactggttttaaacagtgctttgtaccggatctgctgaagcatctgtccagctggtatcctgtgaaagtttgttattttct

SEQ ID NO: 200795 - DNA, 120 bp, Artificial Sequence
  ENSG00000114166_33 (sequence is synthesized)
agacattcttatagagtattgtctttaaaatcagattgtctcttctatattgaaagcatttttatgttttctaatttaaaaattaatattttcttatagatattgtgcaataaagctgaa

SEQ ID NO: 200796 - DNA, 120 bp, Artificial Sequence
  ENSG00000114166_34 (sequence is synthesized)
tgaagtagaatgtgtggtttttgcaaatgctttaacagctgataaaaattttacatttgtaaaattaatatattgtactggtacaaaatagttttaaattatattttaaaaagcttccaa

SEQ ID NO: 200797 - DNA, 120 bp, Artificial Sequence
  ENSG00000114166_35 (sequence is synthesized)
gttttgaccttttcagtccatggttttgattttctccttaatgcttcaggatttcagcaggcgtagaatcacaactcacagcctctctgtcttgtcacttttcatccaccgtgatctgag

SEQ ID NO: 200798 - DNA, 120 bp, Artificial Sequence
  ENSG00000114166_36 (sequence is synthesized)
aggatattatgaagttataaggttccccatgggtaataccattaacattttctaagtatagatttaaaactctggatggcggtgtgggggacaaatggttgctgaggttgatttgtactc

SEQ ID NO: 200799 - DNA, 120 bp, Artificial Sequence
  ENSG00000114166_37 (sequence is synthesized)
tgggtggctgtgttcattagagacattctgcagctgtcgtttagagcccacatgagcttaacgacactagacgcagaaaatccacggtaactgcagacagcactagatttgaaagctggc

SEQ ID NO: 200800 - DNA, 120 bp, Artificial Sequence
  ENSG00000114166_38 (sequence is synthesized)
actttagatataactttgcttatattctaactctttggtgcaaatagaaaaacatcagcttatcctcttgatatgctttgcgtctgtcgtaaataggtattcctttgaataattattcag

SEQ ID NO: 200801 - DNA, 120 bp, Artificial Sequence
  ENSG00000114166_39 (sequence is synthesized)
gataataatgaaagaagttagattaaagtacttgactgctgtactttcagagggagaaattctacttaccacaattcttgattttccatgcccttgatgggtactgttaatgtcactgta

SEQ ID NO: 200802 - DNA, 120 bp, Artificial Sequence
  ENSG00000114166_40 (sequence is synthesized)
tttttagtaatgccgtggtttgtgtttgaaacaatttccagaatgcagtaacttcgaaagctttattgccctgcccgtctctgtgttatctctagtcttttaagaaggcagcaaatgtta

SEQ ID NO: 200803 - DNA, 120 bp, Artificial Sequence
  ENSG00000114200_0 (sequence is synthesized)
agtgcagtccaatttacaggctggagcagcagctgcatcctgcatttccccgaagtattacatgattttcactccttgcaaactttgccatctttgttgcagagaatcggaaatcaatat

SEQ ID NO: 200804 - DNA, 120 bp, Artificial Sequence
  ENSG00000114200_1 (sequence is synthesized)
gcatagcaaagtcacaatcatatgcatcagatttctcttttggtttcttttgctctgcatgcttattgggaagtcacatactgaagatgacatcataattgcaacaaagaatggaaaagt

SEQ ID NO: 200805 - DNA, 120 bp, Artificial Sequence
  ENSG00000114200_2 (sequence is synthesized)
cagagggatgaacttgacagtttttggtggcacggtaacagcctttcttggaattccctatgcacagccacctcttggtagacttcgattcaaaaagccacagtctctgaccaagtggtc

SEQ ID NO: 200806 - DNA, 120 bp, Artificial Sequence
  ENSG00000114200_3 (sequence is synthesized)
tgatatttggaatgccacaaaatatgcaaattcttgctgtcagaacatagatcaaagttttccaggcttccatggatcagagatgtggaacccaaacactgacctcagtgaagactgttt

SEQ ID NO: 200807 - DNA, 120 bp, Artificial Sequence
  ENSG00000114200_4 (sequence is synthesized)
atatctaaatgtatggattccagcacctaaaccaaaaaatgccactgtattgatatggatttatggtggtggttttcaaactggaacatcatctttacatgtttatgatggcaagtttct

SEQ ID NO: 200808 - DNA, 120 bp, Artificial Sequence
  ENSG00000114200_5 (sequence is synthesized)
ggctcgggttgaaagagttattgtagtgtcaatgaactatagggtgggtgccctaggattcttagctttgccaggaaatcctgaggctccagggaacatgggtttatttgatcaacagtt

SEQ ID NO: 200809 - DNA, 120 bp, Artificial Sequence
  ENSG00000114200_6 (sequence is synthesized)
ggctcttcagtgggttcaaaaaaatatagcagcctttggtggaaatcctaaaagtgtaactctctttggagaaagtgcaggagcagcttcagttagcctgcatttgctttctcctggaag

SEQ ID NO: 200810 - DNA, 120 bp, Artificial Sequence
  ENSG00000114200_7 (sequence is synthesized)
ccattcattgttcaccagagccattctgcaaagtggatcctttaatgctccttgggcggtaacatctctttatgaagctaggaacagaacgttgaacttagctaaattgactggttgctc

SEQ ID NO: 200811 - DNA, 120 bp, Artificial Sequence
  ENSG00000114200_8 (sequence is synthesized)
tagagagaatgagactgaaataatcaagtgtcttagaaataaagatccccaagaaattcttctgaatgaagcatttgttgtcccctatgggactcctttgtcagtaaactttggtccgac

SEQ ID NO: 200812 - DNA, 120 bp, Artificial Sequence
  ENSG00000114200_9 (sequence is synthesized)
cgtggatggtgattttctcactgacatgccagacatattacttgaacttggacaatttaaaaaaacccagattttggtgggtgttaataaagatgaagggacagcttttttagtctatgg

SEQ ID NO: 200813 - DNA, 120 bp, Artificial Sequence
  ENSG00000114200_10 (sequence is synthesized)
ctggcttcagcaaagataacaatagtatcataactagaaaagaatttcaggaaggtttaaaaatattttttccaggagtgagtgagtttggaaaggaatccatcctttttcattacacag

SEQ ID NO: 200814 - DNA, 120 bp, Artificial Sequence
  ENSG00000114200_11 (sequence is synthesized)
actgggtagatgatcagagacctgaaaactaccgtgaggccttgggtgatgttgttggggattataatttcatatgccctgccttggagttcaccaagaagttctcagaatggggaaata

SEQ ID NO: 200815 - DNA, 120 bp, Artificial Sequence
  ENSG00000114200_12 (sequence is synthesized)
atgcctttttctactattttgaacaccgatcctccaaacttccgtggccagaatggatgggagtgatgcatggctatgaaattgaatttgtctttggtttacctctggaaagaagagata

SEQ ID NO: 200816 - DNA, 120 bp, Artificial Sequence
  ENSG00000114200_13 (sequence is synthesized)
attacacaaaagccgaggaaattttgagtagatccatagtgaaacggtgggcaaattttgcaaaatatgggaatccaaatgagactcagaacaatagcacaagctggcctgtcttcaaaa

SEQ ID NO: 200817 - DNA, 120 bp, Artificial Sequence
  ENSG00000114200_14 (sequence is synthesized)
gcactgaacaaaaatatctaaccttgaatacagagtcaacaagaataatgacgaaactacgtgctcaacaatgtcgattctggacatcattttttccaaaagtcttggaaatgacaggaa

SEQ ID NO: 200818 - DNA, 120 bp, Artificial Sequence
  ENSG00000114200_15 (sequence is synthesized)
atattgatgaagcagaatgggagtggaaagcaggattccatcgctggaacaattacatgatggactggaaaaatcaatttaacgattacactagcaagaaagaaagttgtgtgggtctct

SEQ ID NO: 200819 - DNA, 120 bp, Artificial Sequence
  ENSG00000114200_16 (sequence is synthesized)
aattaatagatttaccctttatagaacatattttcctttagatcaaggcaaaaatatcaggagcttttttacacacctactaaaaaagttattatgtagctgaaacaaaaatgccagaag

SEQ ID NO: 200820 - DNA, 120 bp, Artificial Sequence
  ENSG00000114200_17 (sequence is synthesized)
gataatattgattcctcacatctttaacttagtattttacctagcatttcaaaacccaaatggctagaacgtgtttaattaaatttcacaatataaagttctacagttaattatgtgcat

SEQ ID NO: 200821 - DNA, 120 bp, Artificial Sequence
  ENSG00000114200_18 (sequence is synthesized)
attaaaacaatggcctggttcaatttctttctttccttaataaatttaagtttttccccccaaaattatcagtgctctgcttttagtcacgtgtattttcattaccactcgtaaaaaggt

SEQ ID NO: 200822 - DNA, 120 bp, Artificial Sequence
  ENSG00000114200_19 (sequence is synthesized)
aggtatcttttttaaatgaattaaatattgaaacactgtacaccatagtttacaatattatgtttcctaattaaaataagaattgaatgtcaatatgagatattaaaataagcacagaaa

SEQ ID NO: 200823 - DNA, 120 bp, Artificial Sequence
  ENSG00000114200_20 (sequence is synthesized)
gcagtccaatttacaggctggagcagcagctgcatcctgcatttccccgaagtattacatgattttcactccttgcaaactttgccatctttgttgcagagaatcgggaatccaaatgag

SEQ ID NO: 200824 - DNA, 120 bp, Artificial Sequence
  ENSG00000114200_21 (sequence is synthesized)
aggaccatggaaagcttttaagaagagaagatacctgcactgaatctcaatgtgaaggcaaagtggagagaagccagataagcaggaaccagagatgaagtgtcttgtgcatcatgctaa

SEQ ID NO: 200825 - DNA, 120 bp, Artificial Sequence
  ENSG00000114200_22 (sequence is synthesized)
tttaaattatattctgagtaaagccatttagtaattttaaatgagaaactgatatgttctggttattgattcataaatgtataatcttttactatattcacgagttattcttttttacct

SEQ ID NO: 200826 - DNA, 120 bp, Artificial Sequence
  ENSG00000114200_23 (sequence is synthesized)
acctttgtcttcttagagtctagattgtaagaatattatatggcatcaacataataatttcatttctgaggtagggtctttcttccaaatagctgcttttgtttgctggttcattcgcat

SEQ ID NO: 200827 - DNA, 120 bp, Artificial Sequence
  ENSG00000114200_24 (sequence is synthesized)
accatactaaactacgttcttgaaacagaacctgtggttttgatttgatattcattgaagtactatgatgggaatccaaatgagactcagaacaatagcacaagctggcctgtcttcaaa

SEQ ID NO: 200828 - DNA, 120 bp, Artificial Sequence
  ENSG00000114204_0 (sequence is synthesized)
aggaattaatcaagcaatggtcaagataaatggagttggccttgatcgctcaggtgtttatgtacaagagttttccagcaagcgtattttagttgtaacattccagtgaataatcagaag

SEQ ID NO: 200829 - DNA, 120 bp, Artificial Sequence
  ENSG00000114204_1 (sequence is synthesized)
tcagtttgggagaagtcaaaatggacacaatcttcttgtggagtcttctattgctgttttttggaagtcaagcctcaagatgctcagctcaaaaaaataccgaatttgcagtggatcttt

SEQ ID NO: 200830 - DNA, 120 bp, Artificial Sequence
  ENSG00000114204_2 (sequence is synthesized)
atcaagaggtttccttatctcataaggacaacattatattttcaccccttggaataactttggttcttgagatggtacaactgggagccaaaggaaaagcacagcagcagataagacaaa

SEQ ID NO: 200831 - DNA, 120 bp, Artificial Sequence
  ENSG00000114204_3 (sequence is synthesized)
ctttaaaacaacaggaaacctcagctggggaagaattttttgtactgaagtcatttttctctgccatctcagagaaaaaacaagaatttacatttaatcttgccaatgccctctaccttc

SEQ ID NO: 200832 - DNA, 120 bp, Artificial Sequence
  ENSG00000114204_4 (sequence is synthesized)
aagaaggattcactgtgaaagaacagtatctccatggcaacaaggaattttttcagagtgctataaaactggtggattttcaagatgcaaaggcttgtgcagagatgataagtacctggg

SEQ ID NO: 200833 - DNA, 120 bp, Artificial Sequence
  ENSG00000114204_5 (sequence is synthesized)
tagaaagaaaaacagatggaaaaattaaagacatgttttcaggggaagaatttggccctctgactcggcttgtcctggtgaatgctatttatttcaaaggagattggaaacagaaattca

SEQ ID NO: 200834 - DNA, 120 bp, Artificial Sequence
  ENSG00000114204_6 (sequence is synthesized)
ctaccaagttttagaattgtcttacaaaggtgatgaatttagcttaattatcatacttcctgcagaaggtatggatatagaagaagtggaaaaactaattactgctcaacaaatcctaaa

SEQ ID NO: 200835 - DNA, 120 bp, Artificial Sequence
  ENSG00000114204_7 (sequence is synthesized)
atggctctctgagatgcaagaagaggaagtagaaataagcctccctagatttaaagtagaacaaaaagtagacttcaaagacgttttgtattctttgaacataaccgagatatttagtgg

SEQ ID NO: 200836 - DNA, 120 bp, Artificial Sequence
  ENSG00000114204_8 (sequence is synthesized)
tggctgcgacctttctggaataacagattcatctgaagtgtatgtttcccaagtgacgcaaaaagttttctttgagataaatgaagatggtagtgaagctgcaacatcaactggcataca

SEQ ID NO: 200837 - DNA, 120 bp, Artificial Sequence
  ENSG00000114204_9 (sequence is synthesized)
catccctgtgatcatgagtctggctcaaagccaatttatagcaaatcatccatttctgtttattatgaagcataatccaacagaatcaattctgtttatgggaagagtgacaaatcctga

SEQ ID NO: 200838 - DNA, 120 bp, Artificial Sequence
  ENSG00000114204_10 (sequence is synthesized)
cacccaggagataaaaggaagagatttagattcactgtgaatgaaaagcacagcctcagaataaaagatgatttctcaaaaatagctgattggcaaaatatcgtcatcttgacaatattt

SEQ ID NO: 200839 - DNA, 120 bp, Artificial Sequence
  ENSG00000114204_11 (sequence is synthesized)
gctctatatcttatgtcttttctgttttaaactgtgcctgtagtaatagatatctgtcttgatgaataagtaaaattaggtatgcatttgtttccattccttctgtatgttttagaaaat

SEQ ID NO: 200840 - DNA, 120 bp, Artificial Sequence
  ENSG00000114204_12 (sequence is synthesized)
ctatatgcatctaaaaccttgagcgtacgtaaaatattaccattcatatgttagaacaatcctgtctataatatcttaaataccaaattcttgtcttagatagcaaatttattattccct

SEQ ID NO: 200841 - DNA, 120 bp, Artificial Sequence
  ENSG00000114204_13 (sequence is synthesized)
ttttgtagctttgaaagctgtatttgatgagaaaaacctgtttcccaaggaaattctgcatcatgaacgaaaagccaagcaattatgccaagaaaaaagttgtgaagtgaagaaaaataa

SEQ ID NO: 200842 - DNA, 120 bp, Artificial Sequence
  ENSG00000114204_14 (sequence is synthesized)
tcaaatctcataataaaaatctcacacacattcactgcacaaatcctaaaagctctgagctcacagaataattttgaaagagtaagtaaaaaaaaaaattaatttgagctcagatgtgat

SEQ ID NO: 200843 - DNA, 120 bp, Artificial Sequence
  ENSG00000114204_15 (sequence is synthesized)
taccacaaacccgaagtgcaaatatacctaaataggaattaggaattacaaacattgtagaaataaatcatataatgcaaataaaaagtgaacagaaaattactgtttaaaagataaatt

SEQ ID NO: 200844 - DNA, 120 bp, Artificial Sequence
  ENSG00000114204_16 (sequence is synthesized)
ttttcaactgctttcactaaattgaatctggtatctggcttgcttcttcattgagcatacatataaagttagaattattctgtgagtgacctaatatttattcttcagtactttggtttt

SEQ ID NO: 200845 - DNA, 120 bp, Artificial Sequence
  ENSG00000114204_17 (sequence is synthesized)
aattcctctgtatttagaaaatggttatttttccacatgttaactccttacacaaaatgacttttcctgtctacaaaatgtattatgaatatactttctttactgatcttttaatgcaag

SEQ ID NO: 200846 - DNA, 120 bp, Artificial Sequence
  ENSG00000114204_18 (sequence is synthesized)
tgtgaagcttcttaatctctctgggcctcagattcctcactgtaaaaagaaaagttgaggttaggtaatttatttggaccttttggctgaaataatctataattctacgactacgtttgt

SEQ ID NO: 200847 - DNA, 120 bp, Artificial Sequence
  ENSG00000114204_19 (sequence is synthesized)
tttcatctttggatctcccatatgcacacaaaattggcttttagacttttactagcagaagagaacatgcactgaattttagaacattttctggaggtctggtacaatcaaatcaagagc

SEQ ID NO: 200848 - DNA, 120 bp, Artificial Sequence
  ENSG00000114209_0 (sequence is synthesized)
gggtccttccggcgtcgccggagtgaattgatccgggagttgaagagggctgcaaggtgggaagtgaagtcagtgcctcagttgctggtaaggtgtagctgttctgtcccagtccccgta

SEQ ID NO: 200849 - DNA, 120 bp, Artificial Sequence
  ENSG00000114209_1 (sequence is synthesized)
gctctgcaccgagcagaagaggtctagggtcacgcaggggccatggctgaggcacttgggcttggttctggcaggcggagcggacggggctgagagcggggccctacgggcggaagagga

SEQ ID NO: 200850 - DNA, 120 bp, Artificial Sequence
  ENSG00000114209_2 (sequence is synthesized)
gcactggaagaaggaagagacaaatgttggggtctacggattcagttccagtttaatgatgtggccctctaaggagataattttgccttaaacagaaagacttgaccctcttaggtgtca

SEQ ID NO: 200851 - DNA, 120 bp, Artificial Sequence
  ENSG00000114209_3 (sequence is synthesized)
tacctaagatcagtgtgttttttgtgtccaattcttttatcaccaaaaaagagaagaaatattgcagtgaatgaagattcctctgcattttagcactgctttttcaactgtagttggctt

SEQ ID NO: 200852 - DNA, 120 bp, Artificial Sequence
  ENSG00000114209_4 (sequence is synthesized)
ttgaatgaggatgacaatggaagagatgaagaatgaagctgagaccacatccatggtttctatgcccctctatgcagtcatgtatcctgtgtttaatgagctagaacgagtaaatctgtc

SEQ ID NO: 200853 - DNA, 120 bp, Artificial Sequence
  ENSG00000114209_5 (sequence is synthesized)
tgcagcccagacactgagagccgctttcatcaaggctgaaaaagaaaatccaggtctcacacaagacatcattatgaaaattttagagaaaaaaagcgtggaagttaacttcacggagtc

SEQ ID NO: 200854 - DNA, 120 bp, Artificial Sequence
  ENSG00000114209_6 (sequence is synthesized)
ccttcttcgtatggcagctgatgatgtagaagagtatatgattgaacgaccagagccagaattccaagacctaaacgaaaaggcacgagcacttaaacaaattctcagtaagatcccaga

SEQ ID NO: 200855 - DNA, 120 bp, Artificial Sequence
  ENSG00000114209_7 (sequence is synthesized)
tgagatcaatgacagagtgaggtttctgcagacaatcaaggatatagctagtgcaataaaagaacttcttgatacagtgaataatgtcttcaagaaatatcaataccagaaccgcagggc

SEQ ID NO: 200856 - DNA, 120 bp, Artificial Sequence
  ENSG00000114209_8 (sequence is synthesized)
gttcgtaagtgccaaccgactaattcatcaaaccaacttaatacttcagaccttcaaaactgtggcctgaaagttgtatatgttaagagatgtacttctcagtggcagtattgaactgcc

SEQ ID NO: 200857 - DNA, 120 bp, Artificial Sequence
  ENSG00000114209_9 (sequence is synthesized)
tttatctgtaaattttaaagtttgactgtataaattatcagtccctcctgaagggatctaatccaggatgttgaatgggattattgccatcttacaccatatttttgtaaaatgtagctt

SEQ ID NO: 200858 - DNA, 120 bp, Artificial Sequence
  ENSG00000114209_10 (sequence is synthesized)
aatcataatctcacactgaagattttgcatcacttttgctattatcattcttttaagaattataagccaaaagaatttacgccttaatgtgtcattatataacattccttaaaagaattg

SEQ ID NO: 200859 - DNA, 120 bp, Artificial Sequence
  ENSG00000114209_11 (sequence is synthesized)
taaatattggtgtttgtttctgacattttaacttgaaagcgatatgctgcaagataatgtatttaacaatatttggtggcaaatattcaataaatagtttacatctgttaaacatttctt

SEQ ID NO: 200860 - DNA, 120 bp, Artificial Sequence
  ENSG00000114209_12 (sequence is synthesized)
tatatatatatatatatatatatatgaacagaagaccaagacaacttggtgtaatgtctaaaaaacttctaatgggagcttatcagcagtttatcaaataataaagcaagaatttctatt

SEQ ID NO: 200861 - DNA, 120 bp, Artificial Sequence
  ENSG00000114209_13 (sequence is synthesized)
gtttatcaaataataaagcaagaatttctatttttgtccttaatcactttggacacagagtagtcaatggaaatatttttgttaattacttataaggtactgagtatttttatatgattt

SEQ ID NO: 200862 - DNA, 120 bp, Artificial Sequence
  ENSG00000114209_14 (sequence is synthesized)
ccaacctgttttaaacgacttatgagtaagagatagcattttctagtgtttttgcactataatgccactttttgaactcttgtgacaaatgtagatttgactcttaaaaattaagccttt

SEQ ID NO: 200863 - DNA, 120 bp, Artificial Sequence
  ENSG00000114209_15 (sequence is synthesized)
cgtatactgggccctcataagctttgcacaattttttcccaaaaaatagccacaattaatagtaatttgaagctatatcaacggttggattgaaattgtcatgagtgttaatattatata

SEQ ID NO: 200864 - DNA, 120 bp, Artificial Sequence
  ENSG00000114209_16 (sequence is synthesized)
cactcttcaactaggtacagttttatttcaccatagagaagttttaaggaaattatgtatcaagtgttcatgttaagtggtttcatttttcaattataaaataaagggaaaaaatcagaa

SEQ ID NO: 200865 - DNA, 120 bp, Artificial Sequence
  ENSG00000114209_17 (sequence is synthesized)
aggttggcccctggtgccccgggagaggggacagggcggatgtgcctggggtggggtcctttgaaggtgtggcttcggaccgagaggtgaggctgctgttttccccctgctttatcagtg

SEQ ID NO: 200866 - DNA, 120 bp, Artificial Sequence
  ENSG00000114209_18 (sequence is synthesized)
gcacgactccggctgggcaggattccggacaacgcctggttcctcttgggtccttccggcgtcgccggagtgaattgatccgggagttgaagagggctgcaaggtgggaagtgaagtcag

SEQ ID NO: 200867 - DNA, 120 bp, Artificial Sequence
  ENSG00000114209_19 (sequence is synthesized)
ggcggatgtgcctggggtggggtcctttgaaggtgtggcttcggaccgagagctttctcctctaaatcttggtctcttgtttggaagtgactaacagcattttggcatgagaaagcccta

SEQ ID NO: 200868 - DNA, 120 bp, Artificial Sequence
  ENSG00000114209_20 (sequence is synthesized)
ggcaaaaaggaaagaaaatcatcagcataatgattaaaattggcaggcatcctacaggaaacaaacatcaagtgtgattacagaatttactgggaaaaactgaaatctgaagattaactc

SEQ ID NO: 200869 - DNA, 120 bp, Artificial Sequence
  ENSG00000114209_21 (sequence is synthesized)
gaagtctcctctaggtgggggcgggaggggaagggcgaggttggcccctggtgccccgggagaggggacagggcggatgtgcctggggtggggtcctttgaaggtgtggcttcggaccga

SEQ ID NO: 200870 - DNA, 120 bp, Artificial Sequence
  ENSG00000114209_22 (sequence is synthesized)
gaggtgaggctgctgttttccccctgctttgtaagtaagagaaaagggaggaggaaggaaagggtgcttgggagtcggctcttgggggtgactcgggttatgccctttgagggaagagga

SEQ ID NO: 200871 - DNA, 120 bp, Artificial Sequence
  ENSG00000114209_23 (sequence is synthesized)
agagtgaggtttctgcagacaatcaagcacttgaacaccaaaagaaagaatttgtaaagtactccaaaagtttcagtgatactctgaaaacgtattttaaagatggcaagtaagtactgt

SEQ ID NO: 200872 - DNA, 120 bp, Artificial Sequence
  ENSG00000114209_24 (sequence is synthesized)
ttgtaaatgtaagtacatgtgatggttgccagtttattttctttaagggaaagcctttttagccatcttatgcctgttttactatattccataaagcttaaaacacttccaaaagataaa

SEQ ID NO: 200873 - DNA, 120 bp, Artificial Sequence
  ENSG00000114209_25 (sequence is synthesized)
ctagaacaaatgttatttcgttagcattcatcttttcatcactttgtgcttttgaaactgagtttttcagagtgttctctccttagctgtagattatatttttgagggtttttttttttt

SEQ ID NO: 200874 - DNA, 120 bp, Artificial Sequence
  ENSG00000114209_26 (sequence is synthesized)
gggacagggcggatgtgcctggggtggggtcctttgaaggtgtggcttcggaccgagaggtgaggctgctgttttccccctgctttctttctcctctaaatcttggtctcttgtttggaa

SEQ ID NO: 200875 - DNA, 120 bp, Artificial Sequence
  ENSG00000114209_27 (sequence is synthesized)
tttttaaccttgctatcttcctatgaattatacctttaatatcacttgatttagacaaggtggctttgtaaaattgagtagtttttgtttcaaaggaacttatattttgggtttcctgaa

SEQ ID NO: 200876 - DNA, 120 bp, Artificial Sequence
  ENSG00000114209_28 (sequence is synthesized)
aaaagattatttttaaaacatacaaactgaattttagggataaattgtgttaggttttggtcttggaaacaagttctgcagtcatttgtagtaccacgctttctcctctaaatcttggtc

SEQ ID NO: 200877 - DNA, 120 bp, Artificial Sequence
  ENSG00000114248_0 (sequence is synthesized)
agtcatgtaggggaggatattttgattgaacacaggcttgacagaatcttcttttcttcttagaaatcctagaaaacagaaagcaacaggaagatgtcttattgggaactacccccatca

SEQ ID NO: 200878 - DNA, 120 bp, Artificial Sequence
  ENSG00000114248_1 (sequence is synthesized)
acttcaccatgagtcaaacaaggaagaaaacttcctcagaaggagaaactaagccccagacttcaactgtcaacaaatttctcaggggctccaatgctgaaagcagaaaagaggacaatg

SEQ ID NO: 200879 - DNA, 120 bp, Artificial Sequence
  ENSG00000114248_2 (sequence is synthesized)
accttaaaacaagtgattcccaacccagcgactggatacagaagacagccacctcagagactgctaagcctctcagttcagaaatggaatggagatccagtatggagaaaaatgagcatt

SEQ ID NO: 200880 - DNA, 120 bp, Artificial Sequence
  ENSG00000114248_3 (sequence is synthesized)
tcctgcagaagctgggcaaaaaggctgtcaacaagtgtctagatttgaataactgtggattaacaacagcggacatgaaagaaatggttgccttgctgccttttctcccagacttggaag

SEQ ID NO: 200881 - DNA, 120 bp, Artificial Sequence
  ENSG00000114248_4 (sequence is synthesized)
aactggatatctcctggaatggttttgtaggtggaaccctcctttccatcactcagcaaatgcatctggtcagcaagttaaaaatcttgaggctgggtagctgcagactcaccactgacg

SEQ ID NO: 200882 - DNA, 120 bp, Artificial Sequence
  ENSG00000114248_5 (sequence is synthesized)
atgttcaagcactgggagaagcatttgagatgattcctgaacttgaagagctaaatttgtcttggaacagtaaagtgggaggaaatttgcctctgatccttcagaagttccaaaaaggga

SEQ ID NO: 200883 - DNA, 120 bp, Artificial Sequence
  ENSG00000114248_6 (sequence is synthesized)
gcaagatacaaatgattgagcttgtggattgctccctcacgtcagaagatgggacatttctgggtcaactgctacctatgctgcaaagtctcgaagtacttgatctttccattaacagag

SEQ ID NO: 200884 - DNA, 120 bp, Artificial Sequence
  ENSG00000114248_7 (sequence is synthesized)
acattgttggcagtctgaacagtattgctcagggattaaaaagcacctcaaatctgaaagtactgaagttacattcatgtggattatcacaaaagagtgtcaaaatattggatgctgctt

SEQ ID NO: 200885 - DNA, 120 bp, Artificial Sequence
  ENSG00000114248_8 (sequence is synthesized)
ttaggtatttgggtgagctgaggaaattagatctttcctgcaataaggatctaggtggaggttttgaagactcgccggctcagttggtcatgctaaagcatctacaagtcctagatcttc

SEQ ID NO: 200886 - DNA, 120 bp, Artificial Sequence
  ENSG00000114248_9 (sequence is synthesized)
accagtgctcactaacagcagatgacgtgatgtcactgacccaggtcattcctttactttcaaatcttcaagaattggatttatcagccaacaaaaagatgggcagttcttctgaaaact

SEQ ID NO: 200887 - DNA, 120 bp, Artificial Sequence
  ENSG00000114248_10 (sequence is synthesized)
acagctcttgctgaagcctctgttcacctctctgctctggaagtattcaacctttcttggaacaagtgtgttggtggcaacttgaagctgcttctggaaacactaaagctttccatgtct

SEQ ID NO: 200888 - DNA, 120 bp, Artificial Sequence
  ENSG00000114248_11 (sequence is synthesized)
cttcaagtgctgaggctgagcagctgttccctggtgacagaggatgtggctctcctggcatcggtcatacagacgggtcatctggccaaactgcaaaagctggacctgagctacaatgac

SEQ ID NO: 200889 - DNA, 120 bp, Artificial Sequence
  ENSG00000114248_12 (sequence is synthesized)
agcatctgtgatgcggggtggaccatgttctgccaaaacgtgcggttcctcaaagagctaatcgagctggatattagccttcgaccatcaaattttcgagattgtggacaatggtttaga

SEQ ID NO: 200890 - DNA, 120 bp, Artificial Sequence
  ENSG00000114248_13 (sequence is synthesized)
cacttgttatatgctgtgaccaagcttcctcagatcactgagataggaatgaaaagatggattctcccagcttcacaggaggaagaactagaatgctttgaccaagataaaaaaagaagc

SEQ ID NO: 200891 - DNA, 120 bp, Artificial Sequence
  ENSG00000114248_14 (sequence is synthesized)
attcactttgaccatggtgggtttcagtaaactgatttcccatgtcctactaagctacaaaccattctccaaaggaaaagaacatgaacgaattccagagtcatgaactgaatttcaact

SEQ ID NO: 200892 - DNA, 120 bp, Artificial Sequence
  ENSG00000114248_15 (sequence is synthesized)
ttccagagtcatgaactgaatttcaacttctgggccatttaatgggacttatattacaagagctttgtaaatatatatatatattacatatatatatgtaatatacatatatacacatat

SEQ ID NO: 200893 - DNA, 120 bp, Artificial Sequence
  ENSG00000114248_16 (sequence is synthesized)
atatgtaaatatatatataatatctaatatgagcatgccattattctctgtctatgaaacaaaaatggcatttttcaatggatttgttttggatatataattagttcatttgctgtttag

SEQ ID NO: 200894 - DNA, 120 bp, Artificial Sequence
  ENSG00000114248_17 (sequence is synthesized)
aagccttgccaaaagtgtttagattttggtactgcaactgctttcctcttgcccagaaatgttttgcctcttcttttcctacaagttaaatgttctaaatataaaggggtatgtgtgtgt

SEQ ID NO: 200895 - DNA, 120 bp, Artificial Sequence
  ENSG00000114248_18 (sequence is synthesized)
gtgtgtaattctaatgtgaaaggcactagctgtctaatagtttcatgtatcattactattactatatgtatcttaatgtagtctatgtaggtttttatcagaaagtgtacctttctatgg

SEQ ID NO: 200896 - DNA, 120 bp, Artificial Sequence
  ENSG00000114248_19 (sequence is synthesized)
tttattattttatattctggtgccttttatctcagatataaaccatgaacagtaatgatagtcactgacatataaatcttagtaaaaagtgattaaaaatctaaaactcagtatgaaaaa

SEQ ID NO: 200897 - DNA, 120 bp, Artificial Sequence
  ENSG00000114248_20 (sequence is synthesized)
catatcttgttagaataaattaaaaccttttattgtttaaaaaattgttaacatattgcctccaggcatttctttgaaatggaatttgcttcataaaactaatttaattcgttaatgaca

SEQ ID NO: 200898 - DNA, 120 bp, Artificial Sequence
  ENSG00000114248_21 (sequence is synthesized)
agaattcaagactttcatgaagattttaaaatgacaaaataatccctttttgagctttgcgtggagcattatgggttcctaccatcccctttacttatcatagcctgagcgtcataccta

SEQ ID NO: 200899 - DNA, 120 bp, Artificial Sequence
  ENSG00000114248_22 (sequence is synthesized)
ggaagacattcagagttattagcccaccagattcccttggtacaactaaataacatgaataccacatctcattttgctcctcagtgctggagaacctcaattgttcccactagtataacg

SEQ ID NO: 200900 - DNA, 120 bp, Artificial Sequence
  ENSG00000114248_23 (sequence is synthesized)
gaggactaagctttccttacctaggttcacagccactgacatgggtgaatggccctggaaaactaataattatttgataactgtaatgaattgcattgctttccttctgcttaattctga

SEQ ID NO: 200901 - DNA, 120 bp, Artificial Sequence
  ENSG00000114248_24 (sequence is synthesized)
aaagatggaaatgaaaatacatcctgctttgtactttacgctgttaaataattgaacattcttttatccgatcattgtaaattgctccaaagaaatggaattatagatcctttaagcaat

SEQ ID NO: 200902 - DNA, 120 bp, Artificial Sequence
  ENSG00000114251_0 (sequence is synthesized)
actaactcgcggctgcaggatcagcgtctggaagcagacgtttcggctacagacccagagaggaggagctggagatcaggaggcgtgagccgccaagagtttgcagaatctgtggtgtga

SEQ ID NO: 200903 - DNA, 120 bp, Artificial Sequence
  ENSG00000114251_1 (sequence is synthesized)
atgaactgggggcacctgggcgcacagatcgccccccttcccccgccccgggccacagttgagtagtggtacatttttttcaccctcttgtgaagaatttctttttattattatttgtcg

SEQ ID NO: 200904 - DNA, 120 bp, Artificial Sequence
  ENSG00000114251_2 (sequence is synthesized)
taaggtcttttgcacaatcacgcccacatttggggttggaaagccctaattaccgccgtcgctgatggacgttggaaacggagcgcctctccgtggaacagttgcctgcgcgccctcgcc

SEQ ID NO: 200905 - DNA, 120 bp, Artificial Sequence
  ENSG00000114251_3 (sequence is synthesized)
ggaccggcggctccctagttgcgccccgaccaggccctgcccttgctgccggctcgcgcgcgtccgcgccccctccattcctgggcgcatcccagctctgccccaactcgggagtccagg

SEQ ID NO: 200906 - DNA, 120 bp, Artificial Sequence
  ENSG00000114251_4 (sequence is synthesized)
cccgggcgccagtgcccgcttcagctccggttcactgcgcccgccggacgcgcgccggaggactccgcagccctgctcctgaccgtccccccaggcttaacccggtcgctccgctcggat

SEQ ID NO: 200907 - DNA, 120 bp, Artificial Sequence
  ENSG00000114251_5 (sequence is synthesized)
tcctcggctgcgctcgctcgggtggcgacttcctccccgcgccccctccccctcgccatgaagaagtccattggaatattaagcccaggagttgctttggggatggctggaagtgcaatg

SEQ ID NO: 200908 - DNA, 120 bp, Artificial Sequence
  ENSG00000114251_6 (sequence is synthesized)
tcttccaagttcttcctagtggctttggccatatttttctccttcgcccaggttgtaattgaagccaattcttggtggtcgctaggtatgaataaccctgttcagatgtcagaagtatat

SEQ ID NO: 200909 - DNA, 120 bp, Artificial Sequence
  ENSG00000114251_7 (sequence is synthesized)
attataggagcacagcctctctgcagccaactggcaggactttctcaaggacagaagaaactgtgccacttgtatcaggaccacatgcagtacatcggagaaggcgcgaagacaggcatc

SEQ ID NO: 200910 - DNA, 120 bp, Artificial Sequence
  ENSG00000114251_8 (sequence is synthesized)
aaagaatgccagtatcaattccgacatcgaaggtggaactgcagcactgtggataacacctctgtttttggcagggtgatgcagataggcagccgcgagacggccttcacatacgcggtg

SEQ ID NO: 200911 - DNA, 120 bp, Artificial Sequence
  ENSG00000114251_9 (sequence is synthesized)
ggtgagcgcagcaggggtggtgaacgccatgagccgggcgtgccgcgagggcgagctgtccacctgcggctgcagccgcgccgcgcgccccaaggacctgccgcgggactggctctgggg

SEQ ID NO: 200912 - DNA, 120 bp, Artificial Sequence
  ENSG00000114251_10 (sequence is synthesized)
tgcggcgacaacatcgactatggctaccgctttgccaaggagttcgtggacgcccgcgagcgggagcgcatccacgccaagggctcctacgagagtgctcgcatcctcatgaacctgcac

SEQ ID NO: 200913 - DNA, 120 bp, Artificial Sequence
  ENSG00000114251_11 (sequence is synthesized)
aacaacgaggccggccgcaggacggtgtacaacctggctgatgtggcctgcaagtgccatggggtgtccggctcatgtagcctgaagacatgctggctgcagctggcagacttccgcaag

SEQ ID NO: 200914 - DNA, 120 bp, Artificial Sequence
  ENSG00000114251_12 (sequence is synthesized)
gtgggtgatgccctgaaggagaagtacgacagcgcggcggccatgcggctcaacagccggggcaagttggtacaggtcaacagccgcttcaactcgcccaccacacaagacctggtctac

SEQ ID NO: 200915 - DNA, 120 bp, Artificial Sequence
  ENSG00000114251_13 (sequence is synthesized)
atcgaccccagccctgactactgcgtgcgcaatgagagcaccggctcgctgggcacgcagggccgcctgtgcaacaagacgtcggagggcatggatggctgcgagctcatgtgctgcggc

SEQ ID NO: 200916 - DNA, 120 bp, Artificial Sequence
  ENSG00000114251_14 (sequence is synthesized)
cgtggctacgaccagttcaagaccgtgcagacggagcgctgccactgcaagttccactggtgctgctacgtcaagtgcaagaagtgcacggagatcgtggaccagtttgtgtgcaagtag

SEQ ID NO: 200917 - DNA, 120 bp, Artificial Sequence
  ENSG00000114251_15 (sequence is synthesized)
tgggtgccacccagcactcagccccgctcccaggacccgcttatttatagaaagtacagtgattctggtttttggtttttagaaatattttttatttttccccaagaattgcaaccggaa

SEQ ID NO: 200918 - DNA, 120 bp, Artificial Sequence
  ENSG00000114251_16 (sequence is synthesized)
ccattttttttcctgttaccatctaagaactctgtggtttattattaatattataattattatttggcaataatgggggtgggaaccaagaaaaatatttattttgtggatctttgaaaa

SEQ ID NO: 200919 - DNA, 120 bp, Artificial Sequence
  ENSG00000114251_17 (sequence is synthesized)
ggtaatacaagacttcttttgatagtatagaatgaaggggaaataacacataccctaacttagctgtgtggacatggtacacatccagaaggtaaagaaatacattttctttttctcaaa

SEQ ID NO: 200920 - DNA, 120 bp, Artificial Sequence
  ENSG00000114251_18 (sequence is synthesized)
tatgccatcatatgggatgggtaggttccagttgaaagagggtggtagaaatctattcacaattcagcttctatgaccaaaatgagttgtaaattctctggtgcaagataaaaggtcttg

SEQ ID NO: 200921 - DNA, 120 bp, Artificial Sequence
  ENSG00000114251_19 (sequence is synthesized)
ggaaaacaaaacaaaacaaaacaaacctcccttccccagcagggctgctagcttgctttctgcattttcaaaatgataatttacaatggaaggacaagaatgtcatattctcaaggaaaa

SEQ ID NO: 200922 - DNA, 120 bp, Artificial Sequence
  ENSG00000114251_20 (sequence is synthesized)
aaggtatatcacatgtctcattctcctcaaatattccatttgcagacagaccgtcatattctaatagctcatgaaatttgggcagcagggaggaaagtccccagaaattaaaaaatttaa

SEQ ID NO: 200923 - DNA, 120 bp, Artificial Sequence
  ENSG00000114251_21 (sequence is synthesized)
aactcttatgtcaagatgttgatttgaagctgttataagaattaggattccagattgtaaaaagatccccaaatgattctggacactagatttttttgtttggggaggttggcttgaaca

SEQ ID NO: 200924 - DNA, 120 bp, Artificial Sequence
  ENSG00000114251_22 (sequence is synthesized)
taaatgaaaatatcctgttattttcttagggatacttggttagtaaattataatagtaaaaataatacatgaatcccattcacaggttctcagcccaagcaacaaggtaattgcgtgcca

SEQ ID NO: 200925 - DNA, 120 bp, Artificial Sequence
  ENSG00000114251_23 (sequence is synthesized)
ttcagcactgcaccagagcagacaacctatttgaggaaaaacagtgaaatccaccttcctcttcacactgagccctctctgattcctccgtgttgtgatgtgatgctggccacgtttcca

SEQ ID NO: 200926 - DNA, 120 bp, Artificial Sequence
  ENSG00000114251_24 (sequence is synthesized)
aacggcagctccactgggtcccctttggttgtaggacaggaaatgaaacattaggagctctgcttggaaaacagttcactacttagggatttttgtttcctaaaacttttattttgagga

SEQ ID NO: 200927 - DNA, 120 bp, Artificial Sequence
  ENSG00000114251_25 (sequence is synthesized)
ttgcagcgtatcactgttatgatcctgtgtttagattatccactcatgcttctcctattgtactgcaggtgtaccttaaaactgttcccagtgtacttgaacagttgcatttataagggg

SEQ ID NO: 200928 - DNA, 120 bp, Artificial Sequence
  ENSG00000114251_26 (sequence is synthesized)
ggaaatgtggtttaatggtgcctgatatctcaaagtcttttgtacataacatatatatatatatacatatatataaatataaatataaatatatctcattgcagccagtgatttagattt

SEQ ID NO: 200929 - DNA, 120 bp, Artificial Sequence
  ENSG00000114251_27 (sequence is synthesized)
acagtttactctggggttatttctctgtctagagcattgttgtccttcactgcagtccagttgggattattccaaaagttttttgagtcttgagcttgggctgtggccctgctgtgatca

SEQ ID NO: 200930 - DNA, 120 bp, Artificial Sequence
  ENSG00000114251_28 (sequence is synthesized)
taccttgagcacgacgaagcaaccttgtttctgaggaagcttgagttctgactcactgaaatgcgtgttgggttgaagatatcttttttcttttctgcctcacccctttgtctccaacct

SEQ ID NO: 200931 - DNA, 120 bp, Artificial Sequence
  ENSG00000114251_29 (sequence is synthesized)
ccatttctgttcactttgtggagagggcattacttgttcgttatagacatggacgttaagagatattcaaaactcagaagcatcagcaatgtttctcttttcttagttcattctgcagaa

SEQ ID NO: 200932 - DNA, 120 bp, Artificial Sequence
  ENSG00000114251_30 (sequence is synthesized)
tggaaacccatgcctattagaaatgacagtacttattaattgagtccctaaggaatattcagcccactacatagatagcttttttttttttttttttaataaggacacctctttccaaac

SEQ ID NO: 200933 - DNA, 120 bp, Artificial Sequence
  ENSG00000114251_31 (sequence is synthesized)
agtgccatcaaatatgttcttatctcagacttacgttgttttaaaagtttggaaagatacacatctttcataccccccttaggcaggttggctttcatatcacctcagccaactgtggct

SEQ ID NO: 200934 - DNA, 120 bp, Artificial Sequence
  ENSG00000114251_32 (sequence is synthesized)
cttaatttattgcataatgatattcacatcccctcagttgcagtgaattgtgagcaaaagatcttgaaagcaaaaagcactaattagtttaaaatgtcacttttttggtttttattatac

SEQ ID NO: 200935 - DNA, 120 bp, Artificial Sequence
  ENSG00000114251_33 (sequence is synthesized)
aaaaaccatgaagtactttttttatttgctaaatcagattgttcctttttagtgactcatgtttatgaagagagttgagtttaacaatcctagcttttaaaagaaactatttaatgtaaa

SEQ ID NO: 200936 - DNA, 120 bp, Artificial Sequence
  ENSG00000114251_34 (sequence is synthesized)
atattctacatgtcattcagatattatgtatatcttctagcctttattctgtacttttaatgtacatatttctgtcttgcgtgatttgtatatttcactggtttaaaaaacaaacatcga

SEQ ID NO: 200937 - DNA, 120 bp, Artificial Sequence
  ENSG00000114251_35 (sequence is synthesized)
aaggcttatgccaaatggaagatagaatataaaataaaacgttacttgtatattggtaagtggtttcaattgtccttcagataattcatgtggagatttttggagaaaccatgacggata

SEQ ID NO: 200938 - DNA, 120 bp, Artificial Sequence
  ENSG00000114251_36 (sequence is synthesized)
gtttaggatgactacatgtcaaagtaataaaagagtggtgaattttaccaaaaccaagctatttggaagcttcaaaaggtttctatatgtaatggaacaaaaggggaattctcttttcct

SEQ ID NO: 200939 - DNA, 120 bp, Artificial Sequence
  ENSG00000114251_37 (sequence is synthesized)
atatatgttccttacaaaaaaaaaaaaaaaagaaatcaagcagatggcttaaagctggttataggattgctcacattcttttagcattatgcatgtaacttaattgttttagagcgtgtt

SEQ ID NO: 200940 - DNA, 120 bp, Artificial Sequence
  ENSG00000114251_38 (sequence is synthesized)
gctgttgtaacatcccagagaagaatgaaaaggcacatgcttttatccgtgaccagatttttagtccaaaaaaatgtatttttttgtgtgtttaccactgcaactattgcacctctctat

SEQ ID NO: 200941 - DNA, 120 bp, Artificial Sequence
  ENSG00000114251_39 (sequence is synthesized)
ttgaatttactgtggaccatgtgtggtgtctctatgccctttgaaagcagtttttataaaaagaaagcccgggtctgcagagaatgaaaactggttggaaactaaaggttcattgtgtta

SEQ ID NO: 200942 - DNA, 120 bp, Artificial Sequence
  ENSG00000114251_40 (sequence is synthesized)
agtgcaattaatacaagttattgtgcttttcaaaaatgtacacggaaatctggacagtgctccacagattgatacattagcctttgctttttctctttccggataaccttgtaacatatt

SEQ ID NO: 200943 - DNA, 120 bp, Artificial Sequence
  ENSG00000114251_41 (sequence is synthesized)
gaaaccttttaaggatgccaagaatgcattattccacaaaaaaacagcagaccaacatatagagtgtttaaaatagcatttctgggcaaattcaaactcttgtggttctaggactcacat

SEQ ID NO: 200944 - DNA, 120 bp, Artificial Sequence
  ENSG00000114251_42 (sequence is synthesized)
ctgtttcagtttttcctcagttgtatattgaccagtgttctttattgcaaaaacatatacccgatttagcagtgtcagcgtattttttcttctcatcctggagcgtattcaagatcttcc

SEQ ID NO: 200945 - DNA, 120 bp, Artificial Sequence
  ENSG00000114251_43 (sequence is synthesized)
caatacaagaaaattaataaaaaatttatatataggcagcagcaaaagagccatgttcaaaatagtcattatgggctcaaatagaaagaagacttttaagttttaatccagtttatctgt

SEQ ID NO: 200946 - DNA, 120 bp, Artificial Sequence
  ENSG00000114251_44 (sequence is synthesized)
tgagttctgtgagctactgacctcctgagactggcactgtgtaagttttagttgcctaccctagctcttttctcgtacaattttgccaataccaagtttcaatttgtttttacaaaacat

SEQ ID NO: 200947 - DNA, 120 bp, Artificial Sequence
  ENSG00000114251_45 (sequence is synthesized)
tattcaagccactagaattatcaaatatgacgctatagcagagtaaatactctgaataagagaccggtactagctaactccaagagatcgttagcagcatcagtccacaaacacttagtg

SEQ ID NO: 200948 - DNA, 120 bp, Artificial Sequence
  ENSG00000114251_46 (sequence is synthesized)
gcccacaatatatagagagatagaaaaggtagttataacttgaagcatgtatttaatgcaaataggcacgaaggcacaggtctaaaatactacattgtcactgtaagctatacttttaaa

SEQ ID NO: 200949 - DNA, 120 bp, Artificial Sequence
  ENSG00000114251_47 (sequence is synthesized)
atatttattttttttaaagtattttctagtcttttctctctctgtggaatggtgaaagagagatgccgtgttttgaaagtaagatgatgaaatgaatttttaattcaagaaacattcaga

SEQ ID NO: 200950 - DNA, 120 bp, Artificial Sequence
  ENSG00000114251_48 (sequence is synthesized)
aacataggaattaaaacttagagaaatgatctaatttccctgttcacacaaactttacactttaatctgatgattggatattttattttagtgaaacatcatcttgttagctaactttaa

SEQ ID NO: 200951 - DNA, 120 bp, Artificial Sequence
  ENSG00000114251_49 (sequence is synthesized)
aaaatggatgtagaatgattaaaggttggtatgatttttttttaatgtatcagtttgaacctagaatattgaattaaaatgctgtctcagtattttaaaagcaaaaaaggaatggaggaa

SEQ ID NO: 200952 - DNA, 120 bp, Artificial Sequence
  ENSG00000114251_50 (sequence is synthesized)
aattgcatcttagaccatttttatatgcagtgtacaatttgctgggctagaaatgagataaagattatttatttttgttcatatcttgtacttttctattaaaatcattttatgaaatcc

SEQ ID NO: 200953 - DNA, 120 bp, Artificial Sequence
  ENSG00000114251_51 (sequence is synthesized)
actcgcctccgtgctcctctcgcccatggaattaattctggctccacttgttgctcggcccagaagtccattggaatattaagcccaggagttgctttggggatggctggaagtgcaatg

SEQ ID NO: 200954 - DNA, 120 bp, Artificial Sequence
  ENSG00000114251_52 (sequence is synthesized)
taactttttttcctagaagaaatccttagcatttacttcatgcttgatagaaagcatgaaggaggatgccttccagctcgggtggtggcttgggcatttttgtcattatagcaaatgatg

SEQ ID NO: 200955 - DNA, 120 bp, Artificial Sequence
  ENSG00000114251_53 (sequence is synthesized)
ttaattcctgtccctacacctgatgataagttttggattttaatcaaatcaggaggcaagtatcacagacaccttcatttttgcaaacacttaatttttctataaagcattttgtttaaa

SEQ ID NO: 200956 - DNA, 120 bp, Artificial Sequence
  ENSG00000114251_54 (sequence is synthesized)
tgaaatttctgcttgctgctgttgttgctgttgttgtgtgtaagagggttctgaagtgctggctgagaggctagacaaggtgtgacagctggaaagtggcagggcagggactggaactcc

SEQ ID NO: 200957 - DNA, 120 bp, Artificial Sequence
  ENSG00000114251_55 (sequence is synthesized)
agattccacagctggcactcttaaccactaaccaacaccgacttccactagaggaaagactgcagaacaggaaatagcactgtttgggctgtgtctatacaagcaaaggcaattggagag

SEQ ID NO: 200958 - DNA, 120 bp, Artificial Sequence
  ENSG00000114251_56 (sequence is synthesized)
tcctctacacgaactgccttggactctgggacactgggatgctagtttctccattcttcgggagcgccctttggcagcccctttcatagtcagctcatatcctgccacttcttggagctg

SEQ ID NO: 200959 - DNA, 120 bp, Artificial Sequence
  ENSG00000114251_57 (sequence is synthesized)
ctgcacgtaagctggagaatgcagacggcggaaaataactattacgctccagtgtgaggcactgtttgtggggtggggccctcggcgtgctggaggtagcggacacaaatccaccaaccc

SEQ ID NO: 200960 - DNA, 120 bp, Artificial Sequence
  ENSG00000114251_58 (sequence is synthesized)
ccagggctttgactcaacagaattgagacacgtttgtaatcgctggcgtgccccgcgcacaggatcccagcgaaatcagatttcctggtgaggttgcgtgggtggattaatttggaaaaa

SEQ ID NO: 200961 - DNA, 120 bp, Artificial Sequence
  ENSG00000114251_59 (sequence is synthesized)
gaaactgcctatatcttgccatcaaaaaactcacggaggagaagcgcagtcaatcaacagtaaacttaagagaccccggatgcttccgttgtttaaacttgtatgcttgaaaattatctg

SEQ ID NO: 200962 - DNA, 120 bp, Artificial Sequence
  ENSG00000114268_0 (sequence is synthesized)
gcagtccgactcatcccggccccgggatggcgtccccacgggaattgacacagaaccccctgaagaagatctggatgccatacagcaatgggcggcccgctctgcacgcttgccagcgcg

SEQ ID NO: 200963 - DNA, 120 bp, Artificial Sequence
  ENSG00000114268_1 (sequence is synthesized)
gtgtgtgcatgaccaactgcccaactctcattgtcatggtgggcctgcccgccaggggcaagacctacatctccaagaagctgactcgatacctgaactggattggtgtgcccactcggg

SEQ ID NO: 200964 - DNA, 120 bp, Artificial Sequence
  ENSG00000114268_2 (sequence is synthesized)
agttcaatgttggccagtatcgccgggacgtggtcaagacctacaaatcttttgaattttttctccccgacaatgaagagggcctgaaaatcaggaagcagtgtgccctggcagccctcc

SEQ ID NO: 200965 - DNA, 120 bp, Artificial Sequence
  ENSG00000114268_3 (sequence is synthesized)
gtgacgtccggcggttccttagtgaggaggggggacatgtggcggtttttgatgccacaaacaccacccgagaacggagagcgaccatctttaattttggagaacagaatggctacaaga

SEQ ID NO: 200966 - DNA, 120 bp, Artificial Sequence
  ENSG00000114268_4 (sequence is synthesized)
ccttttttgtcgagtccatctgtgtggatcctgaggtcatagctgccaacatcgtgcaagtgaaactgggcagccctgactatgtcaaccgcgacagtgatgaggctacggaggacttca

SEQ ID NO: 200967 - DNA, 120 bp, Artificial Sequence
  ENSG00000114268_5 (sequence is synthesized)
tgaggcgcattgagtgctatgagaactcctacgagtcgctagatgaggacctggatagggacctgtcctatatcaagatcatggatgtgggccagagctacgtggtgaaccgtgtggctg

SEQ ID NO: 200968 - DNA, 120 bp, Artificial Sequence
  ENSG00000114268_6 (sequence is synthesized)
accacatccagagccgcatcgtatattacctcatgaacatccacgtgaccccccgctccatctacctctgccggcacggggagagcgagctcaacctcaagggccggattggcggggacc

SEQ ID NO: 200969 - DNA, 120 bp, Artificial Sequence
  ENSG00000114268_7 (sequence is synthesized)
caggactgtcccctcggggcagggagtttgccaagagtctagcccagttcatcagtgaccaaaatatcaaggatctgaaggtctggacaagccagatgaagaggacaatccagacggctg

SEQ ID NO: 200970 - DNA, 120 bp, Artificial Sequence
  ENSG00000114268_8 (sequence is synthesized)
aggcactgggtgtgccctatgaacagtggaaggtcctcaacgagatcgatgcgggcgtctgtgaggaaatgacctacgaggaaattcaggataattatccactggagttcgccctgcggg

SEQ ID NO: 200971 - DNA, 120 bp, Artificial Sequence
  ENSG00000114268_9 (sequence is synthesized)
accaggacaagtaccggtaccggtaccctaaaggggagtcctacgaggacctggtccagagactggagcctgtcatcatggagctggagaggcaagagaatgtgctggtcatctgccacc

SEQ ID NO: 200972 - DNA, 120 bp, Artificial Sequence
  ENSG00000114268_10 (sequence is synthesized)
aggctgtgatgcgctgcctgctggcctacttcctcgacaaggcagcagaacagctgccctacctcaagtgtccgctgcacacagtcctgaagctgactcctgtggcatatggttgtaaag

SEQ ID NO: 200973 - DNA, 120 bp, Artificial Sequence
  ENSG00000114268_11 (sequence is synthesized)
tggagtccatattcctgaacgtggctgctgtgaacacgcaccgggacaggcctcagaacgtggacatctcaagacctccagaggaagcccttgtcacggtgcctgctcaccagtgaccat

SEQ ID NO: 200974 - DNA, 120 bp, Artificial Sequence
  ENSG00000114268_12 (sequence is synthesized)
gttcatccactgtgaccactaggcaggcactgctctctgcagagggggtcattccaggccctccagtgtgtgtgatagtcaccatgccatgcagggatattcttgaagccacacatggct

SEQ ID NO: 200975 - DNA, 120 bp, Artificial Sequence
  ENSG00000114268_13 (sequence is synthesized)
ggcggaacccagagcccccaccccagcccacctggctctttgttgacagtcggcgacaaggttgtgcgtggctcctgacctgctgctaagagtcacttgaccagactgcatctgcatggg

SEQ ID NO: 200976 - DNA, 120 bp, Artificial Sequence
  ENSG00000114268_14 (sequence is synthesized)
ccccagtttcttccggcgcagctcttaggtgttcactctcgccagctcagttggctttgtgaagtgtgaaaccctacaatgtgaaaggaaagtgcttgctgtgatgttcctactgtggcc

SEQ ID NO: 200977 - DNA, 120 bp, Artificial Sequence
  ENSG00000114268_15 (sequence is synthesized)
cagctgcccagcatggacctggtgactctccacagggcctctaccatcctctctgtggccacttcctgagccagaggccaggtcttcatggggccctgagcttctgctgcctctggtgag

SEQ ID NO: 200978 - DNA, 120 bp, Artificial Sequence
  ENSG00000114268_16 (sequence is synthesized)
agggagagcccttcccatccttacccaccaggaactagagccccaaccacagcagatgcttcctgggcagccactggccaggccgttgtatccatgtcacccttagttgtgggcattcat

SEQ ID NO: 200979 - DNA, 120 bp, Artificial Sequence
  ENSG00000114268_17 (sequence is synthesized)
gaaagcaatgcgcttgcttcagcacattgggatgcacagaaacgtgagggcaggggggcagttgtggtcgcccctccccagttgtgcatgtacccggctacttaggtatgcttaggggag

SEQ ID NO: 200980 - DNA, 120 bp, Artificial Sequence
  ENSG00000114268_18 (sequence is synthesized)
ctggtggccaggggtgccccttcaggcctgctctcacagtgaaaccacttcaagacagggcaggaagttaccttcctggtgcacacaccgaagtgctcgagggagaggctgccgccccct

SEQ ID NO: 200981 - DNA, 120 bp, Artificial Sequence
  ENSG00000114268_19 (sequence is synthesized)
ctccccttccctggctgtggacactggcagccaatggggaggcggcctctcccctgttgctgcccgtgtccacacaggaatgtacactggtggcagaaacatgcatttgccataaataat

SEQ ID NO: 200982 - DNA, 120 bp, Artificial Sequence
  ENSG00000114268_20 (sequence is synthesized)
tcagaaacacttgtatggtcctgtaaaacttctctggtgtttgttgacttctgcctgtgggtctgaggaagggagaaggcagaacccataggcagtccctgggcaagggaggattttccc

SEQ ID NO: 200983 - DNA, 120 bp, Artificial Sequence
  ENSG00000114268_21 (sequence is synthesized)
ggccgcagcacagccttccattcatgtgcacgtgagtctggtgaaaatggccttgtgaagtccagtgtctgtcatgcccctgagttcttttggtcccagagaggcagcctgggcagtctg

SEQ ID NO: 200984 - DNA, 120 bp, Artificial Sequence
  ENSG00000114268_22 (sequence is synthesized)
tttacagctggcaaacagactggctggcaagttgtggggctgggtcagaaagtgtctggacttgtaatcgggtgccctgctgtccacaggtggactctggggaagccaggcccctggatc

SEQ ID NO: 200985 - DNA, 120 bp, Artificial Sequence
  ENSG00000114268_23 (sequence is synthesized)
ccaagtcctttgtgtccggagcctttcctggcctgtgcctggagggtagcacatctttccagcctcccagggctttgcagcctgcagatgccacctgtccctgagagaagttagcgtccc

SEQ ID NO: 200986 - DNA, 120 bp, Artificial Sequence
  ENSG00000114268_24 (sequence is synthesized)
tggccctggccggtggtctctcatccttgtgtgctgctctgctaagagatgtccaaggcggagccggggcaagatccttccagactcatctgtcagagccccaagccctttagacccaga

SEQ ID NO: 200987 - DNA, 120 bp, Artificial Sequence
  ENSG00000114268_25 (sequence is synthesized)
gcccaaggaccatgcctttgggacattaggactgcagcctttgcttctgtgtattttggagttttggtgacttttgtcacctggacacactcatttgttagccatagtgggttcccttgg

SEQ ID NO: 200988 - DNA, 120 bp, Artificial Sequence
  ENSG00000114268_26 (sequence is synthesized)
tcagcaacagtgcatgtacctctggatgtcatctgaggtgagaccaccgaggccttttctctctgtgtacagaggggagttaggagttgctggactggatgcattacgaggactggggac

SEQ ID NO: 200989 - DNA, 120 bp, Artificial Sequence
  ENSG00000114268_27 (sequence is synthesized)
agggtagagggacatccagggatcagggcatgagtgggggcaaccccccggcctctgccctggcatggtctccgcatgggctgaggtgtagctgattggctgccacatttcggccatgct

SEQ ID NO: 200990 - DNA, 120 bp, Artificial Sequence
  ENSG00000114268_28 (sequence is synthesized)
ggctggcgtgcccatgttgcagatattttcccgagttccccagaatggatggtattgaatctcagccacatgcaacactgtgtccagcattctttgcaataaatactttttaaaaaataa

SEQ ID NO: 200991 - DNA, 120 bp, Artificial Sequence
  ENSG00000114268_29 (sequence is synthesized)
cctgccctccagggctcctttcaccgcctgcttatgcatgaggggcatggggctggcatggctcctgagtgtaatttgggatgagaggggctgtctccacttggggtttgctttccagag

SEQ ID NO: 200992 - DNA, 120 bp, Artificial Sequence
  ENSG00000114268_30 (sequence is synthesized)
ggaagggggttttcgtgggagagtctaggagagggcagcacctgctttagctctggactccttgaccccgcctccagccctctgaagcagggtttcagggcctggctgcttgtcagcatg

SEQ ID NO: 200993 - DNA, 120 bp, Artificial Sequence
  ENSG00000114268_31 (sequence is synthesized)
ccaggagtctcgcacaaaatagcaagtttacatcagcgcccagacttgaatctaagcccatccaccgctaaaaagtgtccatcattccaatattcctcaataggttcaagcaattcttct

SEQ ID NO: 200994 - DNA, 120 bp, Artificial Sequence
  ENSG00000114268_32 (sequence is synthesized)
aacaaccccaagctgtggacgctgatagcctactgtctgatcttcccagcagcttctgtggtgggcggtgcctcacttttccagatgctgggaccaaggccagaaagtgatgggggtgcc

SEQ ID NO: 200995 - DNA, 120 bp, Artificial Sequence
  ENSG00000114268_33 (sequence is synthesized)
ttgggtcactcagggtttgaatttgaagtccgtcctgcctgaatccatagtgtttgtggggagagtctgccagctgttccactctggctgtccccctaaggtagggatatttgggattaa

SEQ ID NO: 200996 - DNA, 120 bp, Artificial Sequence
  ENSG00000114268_34 (sequence is synthesized)
ttcaaatgaagagacctagactcagagaggttgggaagctagtccaaggtcaccctgcaacagaagctggggacaggctcattgctgcctttctgcaggcataccctctggctgccctag

SEQ ID NO: 200997 - DNA, 120 bp, Artificial Sequence
  ENSG00000114268_35 (sequence is synthesized)
aaaccctctctgctgtatccgaatcctggctctggctgggccacagggccatctcctattaatcagcccaaaatttcccaattagcaaaataaaaggaccagagtttttaaaatggaaaa

SEQ ID NO: 200998 - DNA, 120 bp, Artificial Sequence
  ENSG00000114268_36 (sequence is synthesized)
agtcgctagatgaggacctggatagacagtgtattgagagtgcggagataggccaacaggggccccagggacacatgagcagcggagaaagtcatgatgtgggacctgtcctatatcaag

SEQ ID NO: 200999 - DNA, 120 bp, Artificial Sequence
  ENSG00000114268_37 (sequence is synthesized)
aactcctggccaggccctgtcctccccacgtacccctgcatccccagcctcgacccagggacatgcagggctcacaggagacagggctcaggctgccggagctccaaccaaactctgtcc

SEQ ID NO: 201000 - DNA, 120 bp, Artificial Sequence
  ENSG00000114268_38 (sequence is synthesized)
cacttcacgcacggactgtcctgggcaaaggtgttcacctttccgagcctcggtttccttatctgtaaagcaaagcgacaccagcaagcctgtgagcattgtgtatatagcagacatgga

SEQ ID NO: 201001 - DNA, 120 bp, Artificial Sequence
  ENSG00000114268_39 (sequence is synthesized)
ggatgggaccagcaagcctgtgagcattgtgtatgtagcagacatggaggtcctgcagcaggaggtgctcaataaacacaaagcgactgaaggatgggatgtgcgagaatcccagtggtg

SEQ ID NO: 201002 - DNA, 120 bp, Artificial Sequence
  ENSG00000114268_40 (sequence is synthesized)
ggaggaagggtgcctcttggccttaaagctgagcttgggcaggaacttcagcagagatgtgctcaggatagagacagaaaagtatgccgtgtgggcctgtgtctgtgtcccgggacattg

SEQ ID NO: 201003 - DNA, 120 bp, Artificial Sequence
  ENSG00000114268_41 (sequence is synthesized)
gggttaccccactctggagctgcagggggcagtggccctggccagtttggttgcaggatggacagaggctcgttaggaggcagctccctgaccgacctggggccggggagcagcaggcgg

SEQ ID NO: 201004 - DNA, 120 bp, Artificial Sequence
  ENSG00000114268_42 (sequence is synthesized)
actctggggcgggacctgcgggaagatagacatgggctgtcgcggcttgaggaggggcggggcccaaggggcgggacctcgggtggcccgaggtggcccggctgctgggttggaagcggc

SEQ ID NO: 201005 - DNA, 120 bp, Artificial Sequence
  ENSG00000114268_43 (sequence is synthesized)
tttttttttttaatggcatttgtagaagatgatctatgctctgtgtgtgtgtgtgtatcccaaataacacaagtgaagttttccttcatagtttgcataacaacctacactcacaagtac

SEQ ID NO: 201006 - DNA, 120 bp, Artificial Sequence
  ENSG00000114268_44 (sequence is synthesized)
tatttccacagcacagaaaagaaaaaacacatagcatctctgtgtgtattggatgggtgatggataggtggacaagaccatcctggtagctttttacaagcaaggaaccaccaatgatca

SEQ ID NO: 201007 - DNA, 120 bp, Artificial Sequence
  ENSG00000114268_45 (sequence is synthesized)
gggactgggaagagtttgagctttgagaactggccaccacatggcttctaggctgggacactgggaggaagtccagtggtcagtgcagagggcaccctgggagccaaccagggtcaggcc

SEQ ID NO: 201008 - DNA, 120 bp, Artificial Sequence
  ENSG00000114268_46 (sequence is synthesized)
agccaggttcatggtgggcagaggctgagcagaacatgttcacacgtgtgtacagacatcccagcatacttcccacgcctgggacagaacagctggctcactttcggatatactgaggag

SEQ ID NO: 201009 - DNA, 120 bp, Artificial Sequence
  ENSG00000114270_0 (sequence is synthesized)
gcaagaccaggactcgggctggaggggcgctgggctcggacctgccaaggccacgggggagcaagggacagaggcgggggtcctagctgacggcttttactgcctaggatgacgctgcgg

SEQ ID NO: 201010 - DNA, 120 bp, Artificial Sequence
  ENSG00000114270_1 (sequence is synthesized)
cttctggtggccgcgctctgcgccgggatcctggcagaggcgccccgagtgcgagcccagcacagggagagagtgacctgcacgcgcctttacgccgctgacattgtgttcttactggat

SEQ ID NO: 201011 - DNA, 120 bp, Artificial Sequence
  ENSG00000114270_2 (sequence is synthesized)
ggctcctcatccattggccgcagcaatttccgcgaggtccgcagctttctcgaagggctggtgctgcctttctctggagcagccagtgcacagggtgtgcgctttgccacagtgcagtac

SEQ ID NO: 201012 - DNA, 120 bp, Artificial Sequence
  ENSG00000114270_3 (sequence is synthesized)
agcgatgacccacggacagagttcggcctggatgcacttggctctgggggtgatgtgatccgcgccatccgtgagcttagctacaaggggggcaacactcgcacaggggctgcaattctc

SEQ ID NO: 201013 - DNA, 120 bp, Artificial Sequence
  ENSG00000114270_4 (sequence is synthesized)
catgtggctgaccatgtcttcctgccccagctggcccgacctggtgtccccaaggtctgcatcctgatcacagacgggaagtcccaggacctggtggacacagctgcccaaaggctgaag

SEQ ID NO: 201014 - DNA, 120 bp, Artificial Sequence
  ENSG00000114270_5 (sequence is synthesized)
gggcagggggtcaagctatttgctgtggggatcaagaatgctgaccctgaggagctgaagcgagttgcctcacagcccaccagtgacttcttcttcttcgtcaatgacttcagcatcttg

SEQ ID NO: 201015 - DNA, 120 bp, Artificial Sequence
  ENSG00000114270_6 (sequence is synthesized)
aggacactactgcccctcgtttcccggagagtgtgcacgactgctggtggcgtgcctgtgacccgacctccggatgactcgacctctgctccacgagacctggtgctgtctgagccaagc

SEQ ID NO: 201016 - DNA, 120 bp, Artificial Sequence
  ENSG00000114270_7 (sequence is synthesized)
agccaatccttgagagtacagtggacagcggccagtggccctgtgactggctacaaggtccagtacactcctctgacggggctgggacagccactgccgagtgagcggcaggaggtgaac

SEQ ID NO: 201017 - DNA, 120 bp, Artificial Sequence
  ENSG00000114270_8 (sequence is synthesized)
gtcccagctggtgagaccagtgtgcggctgcggggtctccggccactgaccgagtaccaagtgactgtgattgccctctacgccaacagcatcggggaggctgtgagcgggacagctcgg

SEQ ID NO: 201018 - DNA, 120 bp, Artificial Sequence
  ENSG00000114270_9 (sequence is synthesized)
accactgccctagaagggccggaactgaccatccagaataccacagcccacagcctcctggtggcctggcggagtgtgccaggtgccactggctaccgtgtgacatggcgggtcctcagt

SEQ ID NO: 201019 - DNA, 120 bp, Artificial Sequence
  ENSG00000114270_10 (sequence is synthesized)
ggtgggcccacacagcagcaggagctgggccctgggcagggttcagtgttgctgcgtgacttggagcctggcacggactatgaggtgaccgtgagcaccctatttggccgcagtgtgggg

SEQ ID NO: 201020 - DNA, 120 bp, Artificial Sequence
  ENSG00000114270_11 (sequence is synthesized)
cccgccacttccctgatggctcgcactgacgcttctgttgagcagaccctgcgcccggtcatcctgggccccacatccatcctcctttcctggaacttggtgcctgaggcccgtggctac

SEQ ID NO: 201021 - DNA, 120 bp, Artificial Sequence
  ENSG00000114270_12 (sequence is synthesized)
cggttggaatggcggcgtgagactggcttggagccaccgcagaaggtggtactgccctctgatgtgacccgctaccagttggatgggctgcagccgggcactgagtaccgcctcacactc

SEQ ID NO: 201022 - DNA, 120 bp, Artificial Sequence
  ENSG00000114270_13 (sequence is synthesized)
tacactctgctggagggccacgaggtggccacccctgcaaccgtggttcccactggaccagagctgcctgtgagccctgtaacagacctgcaagccaccgagctgcccgggcagcgggtg

SEQ ID NO: 201023 - DNA, 120 bp, Artificial Sequence
  ENSG00000114270_14 (sequence is synthesized)
cgagtgtcctggagcccagtccctggtgccacccagtaccgcatcattgtgcgcagcacccagggggttgagcggaccctggtgcttcctgggagtcagacagcattcgacttggatgac

SEQ ID NO: 201024 - DNA, 120 bp, Artificial Sequence
  ENSG00000114270_15 (sequence is synthesized)
gttcaggctgggcttagctacactgtgcgggtgtctgctcgagtgggtccccgtgagggcagtgccagtgtcctcactgtccgccgggagccggaaactccacttgctgttccagggctg

SEQ ID NO: 201025 - DNA, 120 bp, Artificial Sequence
  ENSG00000114270_16 (sequence is synthesized)
cgggttgtggtgtcagatgcaacgcgagtgagggtggcctggggacccgtccctggagccagtggatttcggattagctggagcacaggcagtggtccggagtccagccagacactgccc

SEQ ID NO: 201026 - DNA, 120 bp, Artificial Sequence
  ENSG00000114270_17 (sequence is synthesized)
ccagactctactgccacagacatcacagggctgcagcctggaaccacctaccaggtggctgtgtcggtactgcgaggcagagaggagggccctgctgcagtcatcgtggctcgaacggac

SEQ ID NO: 201027 - DNA, 120 bp, Artificial Sequence
  ENSG00000114270_18 (sequence is synthesized)
ccactgggcccagtgaggacggtccatgtgactcaggccagcagctcatctgtcaccattacctggaccagggttcctggcgccacaggatacagggtttcctggcactcagcccacggc

SEQ ID NO: 201028 - DNA, 120 bp, Artificial Sequence
  ENSG00000114270_19 (sequence is synthesized)
ccagagaaatcccagttggtttctggggaggccacggtggctgagctggatggactggagccagatactgagtatacggtgcatgtgagggcccatgtggctggcgtggatgggccccct

SEQ ID NO: 201029 - DNA, 120 bp, Artificial Sequence
  ENSG00000114270_20 (sequence is synthesized)
gcctctgtggttgtgaggactgcccctgagcctgtgggtcgtgtgtcgaggctgcagatcctcaatgcttccagcgacgttctacggatcacctgggtaggggtcactggagccacagct

SEQ ID NO: 201030 - DNA, 120 bp, Artificial Sequence
  ENSG00000114270_21 (sequence is synthesized)
tacagactggcctggggccggagtgaaggcggccccatgaggcaccagatactcccaggaaacacagactctgcagagatccggggtctcgaaggtggagtcagctactcagtgcgagtg

SEQ ID NO: 201031 - DNA, 120 bp, Artificial Sequence
  ENSG00000114270_22 (sequence is synthesized)
actgcacttgtcggggaccgcgagggcacacctgtctccattgttgtcactacgccgcctgaggctccgccagccctggggacgcttcacgtggtgcagcgcggggagcactcgctgagg

SEQ ID NO: 201032 - DNA, 120 bp, Artificial Sequence
  ENSG00000114270_23 (sequence is synthesized)
ctgcgctgggagccggtgcccagagcgcagggcttccttctgcactggcaacctgagggtggccaggaacagtcccgggtcctggggcccgagctcagcagctatcacctggacgggctg

SEQ ID NO: 201033 - DNA, 120 bp, Artificial Sequence
  ENSG00000114270_24 (sequence is synthesized)
gagccagcgacacagtaccgcgtgaggctgagtgtcctagggccagctggagaagggccctctgcagaggtgactgcgcgcactgagtcacctcgtgttccaagcattgaactacgtgtg

SEQ ID NO: 201034 - DNA, 120 bp, Artificial Sequence
  ENSG00000114270_25 (sequence is synthesized)
gtggacacctcgatcgactcggtgactttggcctggactccagtgtccagggcatccagctacatcctatcctggcggccactcagaggccctggccaggaagtgcctgggtccccgcag

SEQ ID NO: 201035 - DNA, 120 bp, Artificial Sequence
  ENSG00000114270_26 (sequence is synthesized)
acacttccagggatctcaagctcccagcgggtgacagggctagagcctggcgtctcttacatcttctccctgacgcctgtcctggatggtgtgcggggtcctgaggcatctgtcacacag

SEQ ID NO: 201036 - DNA, 120 bp, Artificial Sequence
  ENSG00000114270_27 (sequence is synthesized)
acgccagtgtgcccccgtggcctggcggatgtggtgttcctaccacatgccactcaagacaatgctcaccgtgcggaggctacgaggagggtcctggagcgtctggtgttggcacttggg

SEQ ID NO: 201037 - DNA, 120 bp, Artificial Sequence
  ENSG00000114270_28 (sequence is synthesized)
cctcttgggccacaggcagttcaggttggcctgctgtcttacagtcatcggccctccccactgttcccactgaatggctcccatgaccttggcattatcttgcaaaggatccgtgacatg

SEQ ID NO: 201038 - DNA, 120 bp, Artificial Sequence
  ENSG00000114270_29 (sequence is synthesized)
ccctacatggacccaagtgggaacaacctgggcacagccgtggtcacagctcacagatacatgttggcaccagatgctcctgggcgccgccagcacgtaccaggggtgatggttctgcta

SEQ ID NO: 201039 - DNA, 120 bp, Artificial Sequence
  ENSG00000114270_30 (sequence is synthesized)
gtggatgaacccttgagaggtgacatattcagccccatccgtgaggcccaggcttctgggcttaatgtggtgatgttgggaatggctggagcggacccagagcagctgcgtcgcttggcg

SEQ ID NO: 201040 - DNA, 120 bp, Artificial Sequence
  ENSG00000114270_31 (sequence is synthesized)
ccgggtatggactctgtccagaccttcttcgccgtggatgatgggccaagcctggaccaggcagtcagtggtctggccacagccctgtgtcaggcatccttcactactcagccccggcca

SEQ ID NO: 201041 - DNA, 120 bp, Artificial Sequence
  ENSG00000114270_32 (sequence is synthesized)
gagccctgcccagtgtattgtccaaagggccagaagggggaacctggagagatgggcctgagaggacaagttgggcctcctggcgaccctggcctcccgggcaggaccggtgctcccggc

SEQ ID NO: 201042 - DNA, 120 bp, Artificial Sequence
  ENSG00000114270_33 (sequence is synthesized)
ccccaggggccccctggaagtgccactgccaagggcgagaggggcttccctggagcagatgggcgtccaggcagccctggccgcgccgggaatcctgggacccctggagcccctggccta

SEQ ID NO: 201043 - DNA, 120 bp, Artificial Sequence
  ENSG00000114270_34 (sequence is synthesized)
aagggctctccagggttgcctggccctcgtggggacccgggagagcgaggacctcgaggcccaaagggggagccgggggctcccggacaagtcatcggaggtgaaggacctgggcttcct

SEQ ID NO: 201044 - DNA, 120 bp, Artificial Sequence
  ENSG00000114270_35 (sequence is synthesized)
gggcggaaaggggaccctggaccatcgggcccccctggacctcgtggaccactgggggacccaggaccccgtggccccccagggcttcctggaacagccatgaagggtgacaaaggcgat

SEQ ID NO: 201045 - DNA, 120 bp, Artificial Sequence
  ENSG00000114270_36 (sequence is synthesized)
cgtggggagcggggtccccctggaccaggtgaaggtggcattgctcctggggagcctgggctgccgggtcttcccggaagccctggaccccaaggccccgttggcccccctggaaagaaa

SEQ ID NO: 201046 - DNA, 120 bp, Artificial Sequence
  ENSG00000114270_37 (sequence is synthesized)
ggagaaaaaggtgactctgaggatggagctccaggcctcccaggacaacctgggtctccgggtgagcagggcccacggggacctcctggagctattggccccaaaggtgaccggggcttt

SEQ ID NO: 201047 - DNA, 120 bp, Artificial Sequence
  ENSG00000114270_38 (sequence is synthesized)
cgtggacccccaggcccagcgggatcccgggggctgccaggggttgctggacgtcctggagccaagggtcctgaagggccaccaggacccactggccgccaaggagagaagggggagcct

SEQ ID NO: 201048 - DNA, 120 bp, Artificial Sequence
  ENSG00000114270_39 (sequence is synthesized)
ggtcgccctggggaccctgcagtggtgggacctgctgttgctggacccaaaggagaaaagggagatgtggggcccgctgggcccagaggagctaccggagtccaaggggaacggggccca

SEQ ID NO: 201049 - DNA, 120 bp, Artificial Sequence
  ENSG00000114270_40 (sequence is synthesized)
cccggcttggttcttcctggagaccctggccccaagggagaccctggagaccggggtcccattggccttactggcagagcaggacccccaggtgactcagggcctcctggagagaaggga

SEQ ID NO: 201050 - DNA, 120 bp, Artificial Sequence
  ENSG00000114270_41 (sequence is synthesized)
gaccctgggcggcctggccccccaggacctgttggcccccgaggacgagatggtgaagttggagagaaaggtgacgagggtcctccgggtgacccgggtttgcctggaaaagcaggcgag

SEQ ID NO: 201051 - DNA, 120 bp, Artificial Sequence
  ENSG00000114270_42 (sequence is synthesized)
cgtggccttcggggggcacctggagttcgggggcctgtgggtgaaaagggagaccagggagatcctggagaggatggacgaaatggcagccctggatcatctggacccaagggtgaccgt

SEQ ID NO: 201052 - DNA, 120 bp, Artificial Sequence
  ENSG00000114270_43 (sequence is synthesized)
ggggagccgggtcccccaggacccccgggacggctggtagacacaggacctggagccagagagaagggagagcctggggaccgcggacaagagggtcctcgagggcccaagggtgatcct

SEQ ID NO: 201053 - DNA, 120 bp, Artificial Sequence
  ENSG00000114270_44 (sequence is synthesized)
ggcctccctggagcccctggggaaaggggcattgaagggtttcggggacccccaggcccacagggggacccaggtgtccgaggcccagcaggagaaaagggtgaccggggtccccctggg

SEQ ID NO: 201054 - DNA, 120 bp, Artificial Sequence
  ENSG00000114270_45 (sequence is synthesized)
ctggatggccggagcggactggatgggaaaccaggagccgctgggccctctgggccgaatggtgctgcaggcaaagctggggacccagggagagacgggcttccaggcctccgtggagaa

SEQ ID NO: 201055 - DNA, 120 bp, Artificial Sequence
  ENSG00000114270_46 (sequence is synthesized)
cagggcctccctggcccctctggtccccctggattaccgggaaagccaggcgaggatggcaaacctggcctgaatggaaaaaacggagaacctggggaccctggagaagacgggaggaag

SEQ ID NO: 201056 - DNA, 120 bp, Artificial Sequence
  ENSG00000114270_47 (sequence is synthesized)
ggagagaaaggagattcaggcgcctctgggagagaaggtcgtgatggccccaagggtgagcgtggagctcctggtatccttggaccccaggggcctccaggcctcccagggccagtgggc

SEQ ID NO: 201057 - DNA, 120 bp, Artificial Sequence
  ENSG00000114270_48 (sequence is synthesized)
cctcctggccagggttttcctggtgtcccaggaggcacgggccccaagggtgaccgtggggagactggatccaaaggggagcagggcctccctggagagcgtggcctgcgaggagagcct

SEQ ID NO: 201058 - DNA, 120 bp, Artificial Sequence
  ENSG00000114270_49 (sequence is synthesized)
ggaagtgtgccgaatgtggatcggttgctggaaactgctggcatcaaggcatctgccctgcgggagatcgtggagacctgggatgagagctctggtagcttcctgcctgtgcccgaacgg

SEQ ID NO: 201059 - DNA, 120 bp, Artificial Sequence
  ENSG00000114270_50 (sequence is synthesized)
cgtcgaggccccaagggggactcaggcgaacagggccccccaggcaaggagggccccatcggctttcctggagaacgcgggctgaagggcgaccgtggagaccctggccctcaggggcca

SEQ ID NO: 201060 - DNA, 120 bp, Artificial Sequence
  ENSG00000114270_51 (sequence is synthesized)
cctggtctggcccttggggagaggggcccccccgggccttccggccttgccggggagcctggaaagcctggtattcccgggctcccaggcagggctgggggtgtgggagaggcaggaagg

SEQ ID NO: 201061 - DNA, 120 bp, Artificial Sequence
  ENSG00000114270_52 (sequence is synthesized)
ccaggagagaggggagaacggggagagaaaggagaacgtggagaacagggcagagatggccctcctggactccctggaacccctgggccccccggaccccctggccccaaggtgtctgtg

SEQ ID NO: 201062 - DNA, 120 bp, Artificial Sequence
  ENSG00000114270_53 (sequence is synthesized)
gatgagccaggtcctggactctctggagaacagggaccccctggactcaagggtgctaagggggagccgggcagcaatggtgaccaaggtcccaaaggagacaggggtgtgccaggcatc

SEQ ID NO: 201063 - DNA, 120 bp, Artificial Sequence
  ENSG00000114270_54 (sequence is synthesized)
aaaggagaccggggagagcctggaccgaggggtcaggacggcaacccgggtctaccaggagagcgtggtatggctgggcctgaagggaagccgggtctgcagggtccaagaggcccccct

SEQ ID NO: 201064 - DNA, 120 bp, Artificial Sequence
  ENSG00000114270_55 (sequence is synthesized)
ggcccagtgggtggtcatggagaccctggaccacctggtgccccgggtcttgctggccctgcaggaccccaaggaccttctggcctgaagggggagcctggagagacaggacctccagga

SEQ ID NO: 201065 - DNA, 120 bp, Artificial Sequence
  ENSG00000114270_56 (sequence is synthesized)
cggggcctgactggacctactggagctgtgggacttcctggaccccccggcccttcaggccttgtgggtccacaggggtctccaggtttgcctggacaagtgggggagacagggaagccg

SEQ ID NO: 201066 - DNA, 120 bp, Artificial Sequence
  ENSG00000114270_57 (sequence is synthesized)
ggagccccaggtcgagatggtgccagtggaaaagatggagacagagggagccctggtgtgccagggtcaccaggtctgcctggccctgtcggacctaaaggagaacctggccccacgggg

SEQ ID NO: 201067 - DNA, 120 bp, Artificial Sequence
  ENSG00000114270_58 (sequence is synthesized)
gcccctggacaggctgtggtcgggctccctggagcaaagggagagaagggagcccctggaggccttgctggagacctggtgggtgagccgggagccaaaggtgaccgaggactgccaggg

SEQ ID NO: 201068 - DNA, 120 bp, Artificial Sequence
  ENSG00000114270_59 (sequence is synthesized)
ccgcgaggcgagaagggtgaagctggccgtgcaggggagcccggagaccctggggaagatggtcagaaaggggctccaggacccaaaggtttcaagggtgacccaggagtcggggtcccg

SEQ ID NO: 201069 - DNA, 120 bp, Artificial Sequence
  ENSG00000114270_60 (sequence is synthesized)
ggctcccctgggcctcctggccctccaggtgtgaagggagatctgggcctccctggcctgcccggtgctcctggtgttgttgggttcccgggtcagacaggccctcgaggagagatgggt

SEQ ID NO: 201070 - DNA, 120 bp, Artificial Sequence
  ENSG00000114270_61 (sequence is synthesized)
cagccaggccctagtggagagcggggtctggcaggccccccagggagagaaggaatcccaggacccctggggccacctggaccaccggggtcagtgggaccacctggggcctctggactc

SEQ ID NO: 201071 - DNA, 120 bp, Artificial Sequence
  ENSG00000114270_62 (sequence is synthesized)
aaaggagacaagggagaccctggagtagggctgcctgggccccgaggcgagcgtggggagccaggcatccggggtgaagatggccgccccggccaggagggaccccgaggactcacgggg

SEQ ID NO: 201072 - DNA, 120 bp, Artificial Sequence
  ENSG00000114270_63 (sequence is synthesized)
ccccctggcagcaggggagagcgtggggagaagggtgatgttgggagtgcaggactaaagggtgacaagggagactcagctgtgatcctggggcctccaggcccacggggtgccaagggg

SEQ ID NO: 201073 - DNA, 120 bp, Artificial Sequence
  ENSG00000114270_64 (sequence is synthesized)
gacatgggtgaacgagggcctcggggcttggatggtgacaaaggacctcggggagacaatggggaccctggtgacaagggcagcaagggagagcctggtgacaagggctcagccgggttg

SEQ ID NO: 201074 - DNA, 120 bp, Artificial Sequence
  ENSG00000114270_65 (sequence is synthesized)
ccaggactgcgtggactcctgggaccccagggtcaacctggtgcagcagggatccctggtgacccgggatccccaggaaaggatggagtgcctggtatccgaggagaaaaaggagatgtt

SEQ ID NO: 201075 - DNA, 120 bp, Artificial Sequence
  ENSG00000114270_66 (sequence is synthesized)
ggcttcatgggtccccggggcctcaagggtgaacggggagtgaagggagcctgtggccttgatggagagaagggagacaagggagaagctggtcccccaggccgccccgggctggcagga

SEQ ID NO: 201076 - DNA, 120 bp, Artificial Sequence
  ENSG00000114270_67 (sequence is synthesized)
cacaaaggagagatgggggagcctggtgtgccgggccagtcgggggcccctggcaaggagggcctgatcggtcccaagggtgaccgaggctttgacgggcagccaggccccaagggtgac

SEQ ID NO: 201077 - DNA, 120 bp, Artificial Sequence
  ENSG00000114270_68 (sequence is synthesized)
cagggcgagaaaggggagcggggaaccccaggaattgggggcttcccaggccccagtggaaatgatggctctgctggtcccccagggccacctggcagtgttggtcccagaggccccgaa

SEQ ID NO: 201078 - DNA, 120 bp, Artificial Sequence
  ENSG00000114270_69 (sequence is synthesized)
ggacttcagggccagaagggtgagcgaggtccccccggagagagagtggtgggggctcctggggtccctggagctcctggcgagagaggggagcaggggcggccagggcctgccggtcct

SEQ ID NO: 201079 - DNA, 120 bp, Artificial Sequence
  ENSG00000114270_70 (sequence is synthesized)
cgaggcgagaagggagaagctgcactgacggaggatgacatccggggctttgtgcgccaagagatgagtcagcactgtgcctgccagggccagttcatcgcatctggatcacgacccctc

SEQ ID NO: 201080 - DNA, 120 bp, Artificial Sequence
  ENSG00000114270_71 (sequence is synthesized)
cctagttatgctgcagacactgccggctcccagctccatgctgtgcctgtgctccgcgtctctcatgcagaggaggaagagcgggtaccccctgaggatgatgagtactctgaatactcc

SEQ ID NO: 201081 - DNA, 120 bp, Artificial Sequence
  ENSG00000114270_72 (sequence is synthesized)
gagtattctgtggaggagtaccaggaccctgaagctccttgggatagtgatgacccctgttccctgccactggatgagggctcctgcactgcctacaccctgcgctggtaccatcgggct

SEQ ID NO: 201082 - DNA, 120 bp, Artificial Sequence
  ENSG00000114270_73 (sequence is synthesized)
gtgacaggcagcacagaggcctgtcacccttttgtctatggtggctgtggagggaatgccaaccgttttgggacccgtgaggcctgcgagcgccgctgcccaccccgggtggtccagagc

SEQ ID NO: 201083 - DNA, 120 bp, Artificial Sequence
  ENSG00000114270_74 (sequence is synthesized)
caggggacaggtactgcccaggactgaggcccagataatgagctgagattcagcatcccctggaggagtcggggtctcagcagaaccccactgtccctccccttggtgctagaggcttgt

SEQ ID NO: 201084 - DNA, 120 bp, Artificial Sequence
  ENSG00000114270_75 (sequence is synthesized)
gtgcacgtgagcgtgcgtgtgcacgtccgttatttcagtgacttggtcccgtgggtctagccttcccccctgtggacaaacccccattgtggctcctgccaccctggcagatgactcact

SEQ ID NO: 201085 - DNA, 120 bp, Artificial Sequence
  ENSG00000114270_76 (sequence is synthesized)
gtgggggggtggctgtgggcagtgagcggatgtgactggcgtctgacccgccccttgacccaagcctgtgatgacatggtgctgattctggggggcattaaagctgctgttttaaaaggc

SEQ ID NO: 201086 - DNA, 120 bp, Artificial Sequence
  ENSG00000114270_77 (sequence is synthesized)
ctctgtgctcatgttcctaccctctcaaatgctgtttgctgggttttcttagggtcagaaaggggctccaggacccaaaggtttcaaggtatgtgtacccagaagggtccctgctggggt

SEQ ID NO: 201087 - DNA, 120 bp, Artificial Sequence
  ENSG00000114270_78 (sequence is synthesized)
cctgctctacccgggagtggacgtgttggggttcccctctgagcgcccgtgtgtccgcactcacgtctgtggagccagatgtctgcactcgcgtgtgggctccctgtgcctgtgccatgc

SEQ ID NO: 201088 - DNA, 120 bp, Artificial Sequence
  ENSG00000114270_79 (sequence is synthesized)
gggcagggggctatagtggagttggagtcatggggatcacatctggttggctcacaggtgcttgggttacagaaggtttgggcattaggccagggagctcatgggagttcagggaggttc

SEQ ID NO: 201089 - DNA, 120 bp, Artificial Sequence
  ENSG00000114270_80 (sequence is synthesized)
cagagctgagggaggtcagggcagaaggtctctcatgcttcttctgttcccagggtgaccgaggctttgacgggcagccaggccccaagggtgaccagggcgagaaaggggagcgggtga

SEQ ID NO: 201090 - DNA, 120 bp, Artificial Sequence
  ENSG00000114270_81 (sequence is synthesized)
gttgaagccatggtcatggtgaattgaggggagcgtgcactttgggagagggtccatctctggggcctctgattactgactctgtcctatatctccccagggaaccccaggaattggggg

SEQ ID NO: 201091 - DNA, 120 bp, Artificial Sequence
  ENSG00000114270_82 (sequence is synthesized)
gccccagtggaaatgatggctctgctggtcccccagggccacctggcagtgttggtcccagaggccccgaaggacttcagggccagaaggtaaggggccccagctctgactcctgatccc

SEQ ID NO: 201092 - DNA, 120 bp, Artificial Sequence
  ENSG00000114270_83 (sequence is synthesized)
tgaaccttccctacccttccaacctcataaccatcttccagcctgcctgccccaacctctgaagctgtggcccccaacctgcctgactctgatccccactgcctctgaccctgctcactt

SEQ ID NO: 201093 - DNA, 120 bp, Artificial Sequence
  ENSG00000114270_84 (sequence is synthesized)
ggtccctgtgtctgacagggtgagcgaggtccccccggagagagagtggtgggggctcctggggtccctggagctcctggcgagagaggggagcaggggcggccagggcctgccggtcct

SEQ ID NO: 201094 - DNA, 120 bp, Artificial Sequence
  ENSG00000114270_85 (sequence is synthesized)
ctctctcttgtgccctggtcacccccttcagcctccactgacctcccatgaccctgcgtcccccactgattcccctcactgatccccggtgtcctgttggtctccagggagaccctggag

SEQ ID NO: 201095 - DNA, 120 bp, Artificial Sequence
  ENSG00000114270_86 (sequence is synthesized)
agggcacacgccaagcacgtagggtctgcatgcagggcacacgcatgggcactgtgtgcacacagtggaaatcagtgctgcccaccttgccccggggccagcagccactgctcccagcac

SEQ ID NO: 201096 - DNA, 120 bp, Artificial Sequence
  ENSG00000114270_87 (sequence is synthesized)
gcgaggcgagaagggtgaagctggccgtgcaggggagcccggagaccctggggaagatgtgagtccggggcctaggcaagggcgagcctggcctgaggagtgtgatggcgggcataaggg

SEQ ID NO: 201097 - DNA, 120 bp, Artificial Sequence
  ENSG00000114270_88 (sequence is synthesized)
gccactcttgggccggggcacatgtctgagcccctgagtcgggctgcatgtcccaacatccaggagcctgctctctggatcacagggagccacacactgtcggcttccacactctgagct

SEQ ID NO: 201098 - DNA, 120 bp, Artificial Sequence
  ENSG00000114270_89 (sequence is synthesized)
ctgggggccctgtcttggcttctgtgtgcccatccttggtctgtttctcaccacatctgggcacacgtgtgctctggtctgatctcccagatcccaggacacacctgagttcttgtgaac

SEQ ID NO: 201099 - DNA, 120 bp, Artificial Sequence
  ENSG00000114270_90 (sequence is synthesized)
gctgtcctgagataggccatggtcatgtctgagctcctgtgagccaattcttggtcgcatgtctgagttcccatgtgttcatggtcacatcagaactcccctgggaatattttcagcccg

SEQ ID NO: 201100 - DNA, 120 bp, Artificial Sequence
  ENSG00000114270_91 (sequence is synthesized)
tgtctgaactctgtgctcatgttcctaccctctcaaatgctgtttgctgggttttcttagggtcagaaaggggctccaggacccaaaggtttcaagggtgacccaggagtcggggtcccg

SEQ ID NO: 201101 - DNA, 120 bp, Artificial Sequence
  ENSG00000114279_0 (sequence is synthesized)
agtgctgctggccgggagttgctctcaccgcagctggaaacagctgcccccgccccgcgcccctacccagactccgggtaaccgctcccacttcgcgcctctcggaattccagaactcgg

SEQ ID NO: 201102 - DNA, 120 bp, Artificial Sequence
  ENSG00000114279_1 (sequence is synthesized)
gtggccggcccctggaaagccgcagccggcgcgatgcattctgtagacctcaccctgctgggacggacctcctaatcttcagaaccgcgggccgcagggagttaaattgctgccttcctc

SEQ ID NO: 201103 - DNA, 120 bp, Artificial Sequence
  ENSG00000114279_2 (sequence is synthesized)
tccttctctcgtgcggttggtggcttgttttctaaaggaacgttttattcactttttagtattttctaccgggggcgcgctacccgcctgggtccagactctgctttgtaaacgggtttt

SEQ ID NO: 201104 - DNA, 120 bp, Artificial Sequence
  ENSG00000114279_3 (sequence is synthesized)
ctatgtatgtatgtgtaggtatactttggacaccttacaacgcttgcgcctctccaacagaggcacgtcttgttattttgggcatcgttcttccccttccacttggtaccccgaacgcag

SEQ ID NO: 201105 - DNA, 120 bp, Artificial Sequence
  ENSG00000114279_4 (sequence is synthesized)
tgtgactaaactccccactgccccttggacgccgatcgccttggggtgcaagtttggggtgcaaacgtctacttcgcaagagggcctgggaccgccccgccccgccccccggccgccaga

SEQ ID NO: 201106 - DNA, 120 bp, Artificial Sequence
  ENSG00000114279_5 (sequence is synthesized)
ggttggggaagtttacatctggattttcacacattttgtcgccactgcccagactttgactaaccttgtgagcgccgggttttcgatactgcagcctcctcaaattttagcactgcctcc

SEQ ID NO: 201107 - DNA, 120 bp, Artificial Sequence
  ENSG00000114279_6 (sequence is synthesized)
ccgcgactgccctttccctggccgcccaggtcctgccctcgccccggcggagcgcaagccggagggcgcagtagaggctggggcctgaggccctcgctgagcagctatggctgcggcgat

SEQ ID NO: 201108 - DNA, 120 bp, Artificial Sequence
  ENSG00000114279_7 (sequence is synthesized)
agccagctccttgatccggcagaagcggcaggcgagggagtccaacagcgaccgagtgtcggcctccaagcgccgctccagccccagcaaagacgggcgctccctgtgcgagaggcacgt

SEQ ID NO: 201109 - DNA, 120 bp, Artificial Sequence
  ENSG00000114279_8 (sequence is synthesized)
cctcggggtgttcagcaaagtgcgcttctgcagcggccgcaagaggccggtgaggcggagaccagaaccccagctcaaagggattgtgacaaggttattcagccagcagggatacttcct

SEQ ID NO: 201110 - DNA, 120 bp, Artificial Sequence
  ENSG00000114279_9 (sequence is synthesized)
gcagatgcacccagatggtaccattgatgggaccaaggacgaaaacagcgactacactctcttcaatctaattcccgtgggcctgcgtgtagtggccatccaaggagtgaaggctagcct

SEQ ID NO: 201111 - DNA, 120 bp, Artificial Sequence
  ENSG00000114279_10 (sequence is synthesized)
ctatgtggccatgaatggtgaaggctatctctacagttcagatgttttcactccagaatgcaaattcaaggaatctgtgtttgaaaactactatgtgatctattcttccacactgtaccg

SEQ ID NO: 201112 - DNA, 120 bp, Artificial Sequence
  ENSG00000114279_11 (sequence is synthesized)
ccagcaagaatcaggccgagcttggtttctgggactcaataaagaaggtcaaattatgaaggggaacagagtgaagaaaaccaagccctcatcacattttgtaccgaaacctattgaagt

SEQ ID NO: 201113 - DNA, 120 bp, Artificial Sequence
  ENSG00000114279_12 (sequence is synthesized)
aaaagttctggaacaccaaccatgaatggaggcaaagttgtgaatcaagattcaacatagctgagaactctccccttcttccctctctcatcccttccccttcccttccttcccatttac

SEQ ID NO: 201114 - DNA, 120 bp, Artificial Sequence
  ENSG00000114279_13 (sequence is synthesized)
ccatttccttccagtaaatccacccaaggagaggaaaataaaatgacaacgcaagacctagtggctaagattctgcactcaaaatcttcctttgtgtaggacaagaaaattgaaccaaag

SEQ ID NO: 201115 - DNA, 120 bp, Artificial Sequence
  ENSG00000114279_14 (sequence is synthesized)
cttgcttgttgcaatgtggtagaaaattcacgtgcacaaagattagcacacttaaaagcaaaggaaaaaataaatcagaactccataaatattaaattaaactgtattgttattagtaga

SEQ ID NO: 201116 - DNA, 120 bp, Artificial Sequence
  ENSG00000114279_15 (sequence is synthesized)
aggctaattgtaatgaagacattaataaagatgaaataaacttattactttaaaggaaaggatttggagaattgaactcacaaactgatgttatatactcaatagcttaaactcatgata

SEQ ID NO: 201117 - DNA, 120 bp, Artificial Sequence
  ENSG00000114279_16 (sequence is synthesized)
atgctgcgatgtgtggttttgcttgattttgtattttatttgggcatctggaattgacacaccattacattctgtttgcaggattttttttgtaaccatgaaattgaacatttccaaatt

SEQ ID NO: 201118 - DNA, 120 bp, Artificial Sequence
  ENSG00000114279_17 (sequence is synthesized)
ataaactatgttaatacctataaaatatatagccaggaaccatttatcatcaagaaaagtgtaagaaattatttttgagatgtaatttaagattgttttatgtaaaaggaaaatcttgta

SEQ ID NO: 201119 - DNA, 120 bp, Artificial Sequence
  ENSG00000114279_18 (sequence is synthesized)
tggcatcgaatagccttaatgagtttaattctttcacaaaaatgatttcaaattatcctagagtataacatttttatcaaagatattatttccggagttcttctttctttcttttttttt

SEQ ID NO: 201120 - DNA, 120 bp, Artificial Sequence
  ENSG00000114279_19 (sequence is synthesized)
tttttttagtaatttagcaaaaacattactgttctaatgctgaagtgacttttgccagtgccatgtccaggtggtgaggtataagttacttgctcttagcatttggtctgatttttttgc

SEQ ID NO: 201121 - DNA, 120 bp, Artificial Sequence
  ENSG00000114279_20 (sequence is synthesized)
tttgtggacacctttgagagtatccacaaagcaatgtctcaggtgtggacacctgagagcatgttttagaaagctttgtaccctgtcttgtggcaggaaagaaagaacaggggttttaca

SEQ ID NO: 201122 - DNA, 120 bp, Artificial Sequence
  ENSG00000114279_21 (sequence is synthesized)
taaggaaataagtcctaggaaattagtcaacgcaaattgcatttgcgtttgtaccttaccacagtcttatattgttttttaaactctgccatgaaatttggagacatgactgtgaaattc

SEQ ID NO: 201123 - DNA, 120 bp, Artificial Sequence
  ENSG00000114279_22 (sequence is synthesized)
ctaacttactatcttacaaagccagtagctaatttgttgctctatgtatgatcctgttacaagtccagtttgcaattcatttgtttcctagaacacagaagggtaccagtaatacactaa

SEQ ID NO: 201124 - DNA, 120 bp, Artificial Sequence
  ENSG00000114279_23 (sequence is synthesized)
attttcaaggtgtgtagagaaataatatggaattagcagctatgactccaacagacaggattgtgtgagcagctgaaaggagcaaaaaagaactcagtgtaagagaaggcacatacatag

SEQ ID NO: 201125 - DNA, 120 bp, Artificial Sequence
  ENSG00000114279_24 (sequence is synthesized)
ttaagaatactaaagtatttttaaaaatcaaggaagaaataaatgttacacaatttgcattggaataaatagatctatttagtcctacaaatcaggagtggtgtagagacatccaaattt

SEQ ID NO: 201126 - DNA, 120 bp, Artificial Sequence
  ENSG00000114279_25 (sequence is synthesized)
gtgccagcgcccatgcaaatctgctgtgcatccagagagcaaagtgggatgatctgtcactacacctgcagcaccacgctcggaggacagctcctgcctgcagcttccagacccaggaag

SEQ ID NO: 201127 - DNA, 120 bp, Artificial Sequence
  ENSG00000114279_26 (sequence is synthesized)
cctgaggggaaggaaggaagtacgggcgaaatcatcagattggcttcccagatttgggaatctgaagcgggcccacatcttccggccaacttccattgaacttcccagcactcgaaaggg

SEQ ID NO: 201128 - DNA, 120 bp, Artificial Sequence
  ENSG00000114279_27 (sequence is synthesized)
atgtattgttccaaatatgactccctaaaatatatacactttgcagaagctctaggccctcacctcaaaccttgccattggttgccgtatttcaaggtcaatatagtttccctcacttta

SEQ ID NO: 201129 - DNA, 120 bp, Artificial Sequence
  ENSG00000114279_28 (sequence is synthesized)
cacaatcattattcttcaatagtggaccatatccttcaccaggtatcctatttctgttatctagaggttagcagaaaatgaaatgaaggaatttccctaagcagttgggaagaacaaatt

SEQ ID NO: 201130 - DNA, 120 bp, Artificial Sequence
  ENSG00000114279_29 (sequence is synthesized)
atgtaggcaaagattttgaagatacatttgcaagagatatttgtttaaccaaaatatttggaaagtaacaaataaagacatttaaattttctaaaaatggacttgctcttctaggaaaag

SEQ ID NO: 201131 - DNA, 120 bp, Artificial Sequence
  ENSG00000114279_30 (sequence is synthesized)
aatacccctggggcaaaaatataactctagctgtatttcttcttgtcactcttgattcaacttgattataaatacacctgtcactaccagaaccaaaaaaaaaaagaaaaaaatcccaag

SEQ ID NO: 201132 - DNA, 120 bp, Artificial Sequence
  ENSG00000114279_31 (sequence is synthesized)
cacaaagcttattttatttgaaaaaaataaaaaagaaacttcaacactatgggacactggctcttttagcatgaaatgacttgagcttttgtagtgatgatacacatacacactcatcag

SEQ ID NO: 201133 - DNA, 120 bp, Artificial Sequence
  ENSG00000114279_32 (sequence is synthesized)
tcagtaaaacgatggtttcataaataacacaattgatgcaaatcataaaaatcaattacaattatgatttcatgacaaaatatatttaattaagtttgttatgaaaaaaatagagatatg

SEQ ID NO: 201134 - DNA, 120 bp, Artificial Sequence
  ENSG00000114279_33 (sequence is synthesized)
actaacaaaattcctccattttcagtggctattcatcatttatcatctagactcacatttgtctccttcctgatagcagttaagaaaaaattctaaccacacaatttgtatattgttttt

SEQ ID NO: 201135 - DNA, 120 bp, Artificial Sequence
  ENSG00000114279_34 (sequence is synthesized)
ctccgtattatgttaagcaaatgttcactgcagtaaaatgttttggaaattagctttgtcttatttccagtttagttcagagaattaattggaaacctgatttcttttacacataaacct

SEQ ID NO: 201136 - DNA, 120 bp, Artificial Sequence
  ENSG00000114279_35 (sequence is synthesized)
gacaaaaaatgtagcttagagcaaagggtgaatgtttgcttaactcctgcttacttctcaagtacatgaaaactttaatagaatatgccagtattcactgagtttttaaaaatattacca

SEQ ID NO: 201137 - DNA, 120 bp, Artificial Sequence
  ENSG00000114279_36 (sequence is synthesized)
tgtgtaaacatataatatccaacttcatccaaaaatatggttgagtttaagtactttgtttttcaggcttatttcaagtataataattctttgattttcattgttctgatttctgggtct

SEQ ID NO: 201138 - DNA, 87 bp, Artificial Sequence
  ENSG00000114279_37 (sequence is synthesized)
cattgggatttttcccaggaaaaaatatggcttttagtaatgctttgcaattggctacgcagatataaattaagatatgtttattct

SEQ ID NO: 201139 - DNA, 120 bp, Artificial Sequence
  ENSG00000114279_38 (sequence is synthesized)
caattggctacgcagatataaattaagatatgtttattctgagttcttattggaataagtttcaaaatcaacgagcttaagaatgaaaacaaaacttttgagagtctcacaaaatagctt

SEQ ID NO: 201140 - DNA, 120 bp, Artificial Sequence
  ENSG00000114279_39 (sequence is synthesized)
tctggtcaatacaccttacttgatttttaagctcgcagaataaagtatagaaacaaatggagctgaagttccatttgctaattcagagacttttgtgcttccgcaaattggagggcagca

SEQ ID NO: 201141 - DNA, 120 bp, Artificial Sequence
  ENSG00000114279_40 (sequence is synthesized)
agccatcctattctcatagtaatcgttttggctttgaaatttacatacaatttaatagcacatttttagccattatggattggcgcaataaagagatatcaatgtaatgcaatgtgatgc

SEQ ID NO: 201142 - DNA, 120 bp, Artificial Sequence
  ENSG00000114279_41 (sequence is synthesized)
tttatgggcctcattctaattcagaaagcttgtttaaaagaactaagactcttctgtttaataaaatagcaacaatctaatatctagattggtagtcctgcggtgccactagtgggagat

SEQ ID NO: 201143 - DNA, 120 bp, Artificial Sequence
  ENSG00000114279_42 (sequence is synthesized)
gagagtattaagacaagagtaaggacaaggaaagacttaaaggttgcatattgaaaagtttggaattcctaatttgggagcactgatttcttggtgaagaagtaagtatgactacgttgc

SEQ ID NO: 201144 - DNA, 120 bp, Artificial Sequence
  ENSG00000114279_43 (sequence is synthesized)
cagtaattttttaaaaacatagacccagaaatagcaaatcgatttcaccctcataccttagtctacaaggccttgctcttgagaaggttttccatgatattgcttaatttcatctgcaca

SEQ ID NO: 201145 - DNA, 120 bp, Artificial Sequence
  ENSG00000114279_44 (sequence is synthesized)
agatgagacacaaacataaaaattccctgctcattttaataccataaaaggctgaggttatttctctgtcataaaattgtaaatagcattttttaagtcaaaattacatttaaaacagtg

SEQ ID NO: 201146 - DNA, 120 bp, Artificial Sequence
  ENSG00000114279_45 (sequence is synthesized)
agtggattgttctacaaatatatatgtgtatatatacatatgcttctgaaataaggatatattatatgagtttttatttgatttgtggtctttagtcataggtaatcaaaaataaagaga

SEQ ID NO: 201147 - DNA, 120 bp, Artificial Sequence
  ENSG00000114279_46 (sequence is synthesized)
aatgcaaaactttatacattaatgtacatttctaatgatggtacaaattgccactttataataaaaaagaaacaggtgggaataataatcaaagcacgtgttccttcagtactttggtga

SEQ ID NO: 201148 - DNA, 120 bp, Artificial Sequence
  ENSG00000114279_47 (sequence is synthesized)
tttttaatcccccttgtgatgcacaggaaattattttttagttacaaaaagttatcttagaaatctatacttcccaatacagatttcatgttaagtcatatcaaattgagaatttgtggt

SEQ ID NO: 201149 - DNA, 120 bp, Artificial Sequence
  ENSG00000114279_48 (sequence is synthesized)
gaaagaataggaaaaggatgctagatgctgatctttctttttcaggatttttcctggagcccaagttaaaaattcaatacttaaatctaagttaagtgaaaattaataatgttcagaatg

SEQ ID NO: 201150 - DNA, 120 bp, Artificial Sequence
  ENSG00000114279_49 (sequence is synthesized)
atgtattgagctttagtaacagacggaagcaaaaaaaaataagaatatttaacattatgataatagccttaaaataatgtaataaaaattgcatcattaaatgttctattagttggaaag

SEQ ID NO: 201151 - DNA, 120 bp, Artificial Sequence
  ENSG00000114279_50 (sequence is synthesized)
aatgagctgatgtttctttgtctttgctccaagtacaatttaaagacagtgacattcattttacttaaaattgttcaaaaagtccaaaacatactcccatggctagaattggtattagct

SEQ ID NO: 201152 - DNA, 120 bp, Artificial Sequence
  ENSG00000114279_51 (sequence is synthesized)
ccaatacaaggttaaatgttacaatcttaagaaattattgacactgaaatgtttagtaaacatgttgtatgagaaactaaacaaattaatgtttcatttttccattaaagcacagattat

SEQ ID NO: 201153 - DNA, 120 bp, Artificial Sequence
  ENSG00000114279_52 (sequence is synthesized)
aagagtaaatgagtgaggagagcaccttctcatgtcaggaagcctatggagttagatcacctggatttgctcatttcctggacaaaaactgcccttttaatcctcaatttcctattaagg

SEQ ID NO: 201154 - DNA, 120 bp, Artificial Sequence
  ENSG00000114279_53 (sequence is synthesized)
actggttcaacattatcatttcccagggagagtcttcaacttgaagtgatcactcaatcactaaaagcctccaacttgaagtgattgcaaaaccactacagctgcacctttcttatgcat

SEQ ID NO: 201155 - DNA, 120 bp, Artificial Sequence
  ENSG00000114279_54 (sequence is synthesized)
cacgctcggaggacagctcctgcctgcagcttccagacccaggtaaaaaaaaaaaaaaaaaaatctgagcgggcactgtgcatgcatttcagtatcagatgcgcgtcgcaacgtatcccc

SEQ ID NO: 201156 - DNA, 120 bp, Artificial Sequence
  ENSG00000114279_55 (sequence is synthesized)
agttctgcaggttttacaggaagcatggtgctggcatctccttggtttctagggaagcctcaggaagcttacaatcatgacaaggcaaaggaggagcaggatgttttcactccagaatgc

SEQ ID NO: 201157 - DNA, 120 bp, Artificial Sequence
  ENSG00000114279_56 (sequence is synthesized)
ctcggcgaggggactgcagtgcttggggagcgagcatcatactaggtcgatagaggaggagatgctatgtccattgcagcactggggaagtgtggcaggaaggcgacttctttttaactc

SEQ ID NO: 201158 - DNA, 120 bp, Artificial Sequence
  ENSG00000114279_57 (sequence is synthesized)
ccacagcttggaagacagtgtttaatactccatcagttgcgtagtgaactgtgatgagttttttggggggaggtggggagagtccccccaaaatggaggaggaggaggaggtatgtgtta

SEQ ID NO: 201159 - DNA, 120 bp, Artificial Sequence
  ENSG00000114302_0 (sequence is synthesized)
gcccgtccagctcgcctgcccgtcggtccccgcggcggcggcggctgcccagtgacagcggcggcggtgccaggtcggccgtggtagcgtagggttgcgcggcccggaaacgcagagccg

SEQ ID NO: 201160 - DNA, 120 bp, Artificial Sequence
  ENSG00000114302_1 (sequence is synthesized)
ggcccggaaacgcagagccggccaaagagcggcgcgacgtgagccggggccgtgcgcgaagagacctcgcgggcgcggagcgaaaggccggcgtgagtgagcgcggagacagtggccgcc

SEQ ID NO: 201161 - DNA, 120 bp, Artificial Sequence
  ENSG00000114302_2 (sequence is synthesized)
ggcggcccaacccgtctatcccttcggccgccgccggcatgagccacatccagatcccgccggggctcacggagctgctgcagggctacacggtggaggtgctgcgacagcagccgcctg

SEQ ID NO: 201162 - DNA, 120 bp, Artificial Sequence
  ENSG00000114302_3 (sequence is synthesized)
acctcgtcgaattcgcagtggagtacttcacccgcctgcgcgaggcccgcgccccagcctcagtcctgcccgccgccaccccacgccagagcctgggccaccccccgccagaacccggcc

SEQ ID NO: 201163 - DNA, 120 bp, Artificial Sequence
  ENSG00000114302_4 (sequence is synthesized)
cggaccgtgtcgccgacgccaaaggggacagcgagtcggaggaggacgaggacttggaagttccagttcctagcagatttaatagacgagtatcagtctgtgctgagacctataaccctg

SEQ ID NO: 201164 - DNA, 120 bp, Artificial Sequence
  ENSG00000114302_5 (sequence is synthesized)
atgaggaagaggaagatacagatccaagggtgattcatcctaaaactgatgaacagagatgcagacttcaggaagcttgcaaagatattctccttttcaaaaatcttgatcaggaacagc

SEQ ID NO: 201165 - DNA, 120 bp, Artificial Sequence
  ENSG00000114302_6 (sequence is synthesized)
tttctcaagttctcgatgccatgtttgaaaggatagtcaaagctgatgagcatgtcattgaccaaggagatgatggagacaacttttatgtcatagaacggggaacttatgacattttag

SEQ ID NO: 201166 - DNA, 120 bp, Artificial Sequence
  ENSG00000114302_7 (sequence is synthesized)
taacaaaagataatcaaacccgctctgttggtcaatatgacaaccgtggcagttttggagaactagctctgatgtacaacaccccgagagctgctaccattgttgctacctcagaaggct

SEQ ID NO: 201167 - DNA, 120 bp, Artificial Sequence
  ENSG00000114302_8 (sequence is synthesized)
ccctttggggactggaccgggtgacttttagaagaatcatagtgaaaaataatgcaaagaagaggaagatgtttgaatcatttattgagtctgtgcccctccttaaatcactagaggtgt

SEQ ID NO: 201168 - DNA, 120 bp, Artificial Sequence
  ENSG00000114302_9 (sequence is synthesized)
cagaacgaatgaagattgtggatgtaataggagagaagatctataaggatggagaacgcataatcactcagggtgaaaaggctgatagcttttacatcatagagtctggcgaagtgagca

SEQ ID NO: 201169 - DNA, 120 bp, Artificial Sequence
  ENSG00000114302_10 (sequence is synthesized)
tcttgattagaagcaggactaaatcaaacaaggatggtgggaaccaggaggtcgagattgcccgctgccataaggggcagtactttggagagcttgccctggtcaccaacaaacccagag

SEQ ID NO: 201170 - DNA, 120 bp, Artificial Sequence
  ENSG00000114302_11 (sequence is synthesized)
ctgcctcagcttatgcagttggagatgtcaaatgcttagttatggatgtacaagcattcgagaggcttctggggccctgcatggacatcatgaagaggaacatctcacactatgaggaac

SEQ ID NO: 201171 - DNA, 120 bp, Artificial Sequence
  ENSG00000114302_12 (sequence is synthesized)
agctggtgaagatgtttggctccagcgtggatctgggcaacctcgggcagtaggtgtgccacaccccagagccttcttagtgtgacaccaaaaccttctggtcagccacagaacacatac

SEQ ID NO: 201172 - DNA, 120 bp, Artificial Sequence
  ENSG00000114302_13 (sequence is synthesized)
agaaaacagacatgacagaactgttcctgccgttgccgccactgctgccattgctgtggttatgggcatttagaaaacttgaaagtcagcactaaaggatgggcagaggttcaacccaca

SEQ ID NO: 201173 - DNA, 120 bp, Artificial Sequence
  ENSG00000114302_14 (sequence is synthesized)
cctccactttgcttctgaaggcccattcattagaccacttgtaaagattactccaacccagtttttatatctttggttcaaaacggcatgtctctccaacaatttaagtgcctgatacaa

SEQ ID NO: 201174 - DNA, 120 bp, Artificial Sequence
  ENSG00000114302_15 (sequence is synthesized)
agtccaaagtataaacatgctcctttcctctcttgctgctactcttgcttttggaagttaccacagggtctgcagaaacctgttgtataactgtagacactctctaatggttctcaaagg

SEQ ID NO: 201175 - DNA, 120 bp, Artificial Sequence
  ENSG00000114302_16 (sequence is synthesized)
aggaaatgtagccttcagtctcctcatttgtcctttgaggaagtccacatttgttcacagttgcagcctttggttttacagtgggaaatggtggtggatgatatggacatatgtagccca

SEQ ID NO: 201176 - DNA, 120 bp, Artificial Sequence
  ENSG00000114302_17 (sequence is synthesized)
gtggcattgtactttctgctgacagctgcacacattacagctgtctccaaacccacagtgatgcttagggaaagaccctgctcaggacccagcaggtcagcaccccagagcagactgata

SEQ ID NO: 201177 - DNA, 120 bp, Artificial Sequence
  ENSG00000114302_18 (sequence is synthesized)
ggtccgtgggacccatgttagagcagaaaatttgggctcagcacattttactgttagtagagagccaggaaacgttttctgggttggggattttgtgggattttttaatttttttagtag

SEQ ID NO: 201178 - DNA, 120 bp, Artificial Sequence
  ENSG00000114302_19 (sequence is synthesized)
gttttgtttaacctctgtgcagtttgtatgaatgaattgctatacatttataaggagccagggtctggagggttgctatcactttgtccagcccaaataccttcctgggcaactcctacc

SEQ ID NO: 201179 - DNA, 120 bp, Artificial Sequence
  ENSG00000114302_20 (sequence is synthesized)
atttgtttgcagttgcctctactagctgatggcagtatgctggaaagaggttgtactataaagagagttctttccttctactccagagttgttgtgtagctttgccattgaaccgatcaa

SEQ ID NO: 201180 - DNA, 120 bp, Artificial Sequence
  ENSG00000114302_21 (sequence is synthesized)
tttttaaactctttaaagaagcagcagctatttttttgaaattaaagaaaattctcaggccaggctcaatggctcatgcctataattgtagtgctttgggaggctgagctgggaggatcg

SEQ ID NO: 201181 - DNA, 120 bp, Artificial Sequence
  ENSG00000114302_22 (sequence is synthesized)
gctttgggaggctgagctgggaggatcgcttaagaccagcctaggcaacagagtgagatcctgtctctacaaaaacaaaaattttttttttgttttctttttgagacggagtttcgctct

SEQ ID NO: 201182 - DNA, 89 bp, Artificial Sequence
  ENSG00000114302_23 (sequence is synthesized)
ttacagatgtgagccactgcacctggcaaaaaaaaaatttttttttaatttgtcaggtgtggtgatgcatgcatgtagtcccaaatact

SEQ ID NO: 201183 - DNA, 89 bp, Artificial Sequence
  ENSG00000114302_24 (sequence is synthesized)
gtctcttctttaggtaatttcacttggacatattcatgtatatggagtttgtcagctgactcaggcatttaccctaaagatcaaatctg

SEQ ID NO: 201184 - DNA, 120 bp, Artificial Sequence
  ENSG00000114302_25 (sequence is synthesized)
atattcatgtatatggagtttgtcagctgactcaggcatttaccctaaagatcaaatctgttttcaaaaattggcattggccaggcacggtgacccacacctgtaatcccagcactttgg

SEQ ID NO: 201185 - DNA, 76 bp, Artificial Sequence
  ENSG00000114302_26 (sequence is synthesized)
tgcaccattgtattccaccctggcatcatttacaatttcatagaattactgtgaaggcctttctagttgagatgtt

SEQ ID NO: 201186 - DNA, 120 bp, Artificial Sequence
  ENSG00000114302_27 (sequence is synthesized)
ttcatagaattactgtgaaggcctttctagttgagatgttggggtatttgggattctaattgttaaccccagaagaaggtaatttagcttgtatttatttaaaacccatttagcctttta

SEQ ID NO: 201187 - DNA, 120 bp, Artificial Sequence
  ENSG00000114302_28 (sequence is synthesized)
cttatatctggtagaattccagtgatcatcctaataaggtatatttcagaataatttttttttccttcagaataacttagaatcagatgctataagggctcctaggagcagtgtgaaatt

SEQ ID NO: 201188 - DNA, 120 bp, Artificial Sequence
  ENSG00000114302_29 (sequence is synthesized)
tccgtaaagataaatttgaatgttgtaaccaagtttatattaaaccaagaggccatttccaatatgattttttgtttctttttaacttgttaagtccctaagagattacatgctagggct

SEQ ID NO: 201189 - DNA, 120 bp, Artificial Sequence
  ENSG00000114302_30 (sequence is synthesized)
tgagtcatttctattgtagataatgatggcccacacagtcaccttcaactatccacataagctaggctttccgcttttgccacggacagtgtgaccaagatatttccagagtaaataacc

SEQ ID NO: 201190 - DNA, 120 bp, Artificial Sequence
  ENSG00000114302_31 (sequence is synthesized)
caccacaaccttggtaattcctcttttcttcttaagctccaggaagcgaaagcagaaggactcttttcagactgccctctgtagcctacattgcagctttccaaaacaggcagctagcac

SEQ ID NO: 201191 - DNA, 120 bp, Artificial Sequence
  ENSG00000114302_32 (sequence is synthesized)
tgggaaagcccatgtggtgaccccatatttttctgaggttcttcttttccatggtgttactttattatcagaaagtaaattcagaaaacaggtcttgcccttagcagacaagaaccacac

SEQ ID NO: 201192 - DNA, 120 bp, Artificial Sequence
  ENSG00000114302_33 (sequence is synthesized)
cagtttcttgtaaaggtaacggatacattgggattcaggagtgacacagaggtccagccccagaacttgtaaggattttgtttgaacactgagcagatgcctcctccctgccacccatca

SEQ ID NO: 201193 - DNA, 120 bp, Artificial Sequence
  ENSG00000114302_34 (sequence is synthesized)
cactagttagggctggccatgaattctatgccagagtcactcctgcagtctgctagggatgggccttcttatcccactctcgcacacatcccagtctagtctttgccttcacagagtcct

SEQ ID NO: 201194 - DNA, 120 bp, Artificial Sequence
  ENSG00000114302_35 (sequence is synthesized)
gccttcacagagtcctccttgacacccctgacttaatgatagttgctgttttggagtagaattgatcaggtttaagtcatcctgctcaggttgggcatagtggctcatgcctgtaatctc

SEQ ID NO: 201195 - DNA, 83 bp, Artificial Sequence
  ENSG00000114302_36 (sequence is synthesized)
tgggaggattgcttgagcccaggagttccaaaccatcctgggcaacagagggagaccctgtctctactagctggacctggtgg

SEQ ID NO: 201196 - DNA, 120 bp, Artificial Sequence
  ENSG00000114302_37 (sequence is synthesized)
aaaaaaaaaagttaaaaaaacaattagctggacctggtggtgcacactcagtaggctgaggtgaaaggattcctttaacctgggagactgaagctgcagtgagccatgatcgtgccactg

SEQ ID NO: 201197 - DNA, 120 bp, Artificial Sequence
  ENSG00000114302_38 (sequence is synthesized)
aaaaaaaaaaaaaaaaagtcatcctcctccaactactgattgacatatggatcatcagttcagaccctcactgcatacaggatccctagagggttctatttaatagcttgaggaagggag

SEQ ID NO: 201198 - DNA, 120 bp, Artificial Sequence
  ENSG00000114302_39 (sequence is synthesized)
actttaaaaggacgtgtgtgagtgaaataggatatagccattaccacggtgccaggacctgacagcgttccaattctttttgcagcatggggaatcaaaggtggcatgccaagttcaact

SEQ ID NO: 201199 - DNA, 120 bp, Artificial Sequence
  ENSG00000114302_40 (sequence is synthesized)
cagggctgaggtatccacattgtccacatcaggcaagccctgcactgacggttgagcctcatggagaggagcatgtgttggaaagagatccctttgttaactgttttgtggtgttctctt

SEQ ID NO: 201200 - DNA, 120 bp, Artificial Sequence
  ENSG00000114302_41 (sequence is synthesized)
caatgaattagagctcatgccccttttctggctttgctgttgattttggatggtagagaatattcctgagagccttccttttggcccccagcttatgccacccactctcttctcttggtt

SEQ ID NO: 201201 - DNA, 120 bp, Artificial Sequence
  ENSG00000114302_42 (sequence is synthesized)
gaattctctgaaggaaaggttcatgtgctattgtcctgttagtcaatagtcttcatatataattgtgttacatatattgctgtagactctcagaaatcagggtagagcttttcctttgag

SEQ ID NO: 201202 - DNA, 120 bp, Artificial Sequence
  ENSG00000114302_43 (sequence is synthesized)
cagtttaatgagtgaattcagcagcaaagtcgcaagaaatggttctccagccaggagaggttatgtttatcctctgattgcccgttttctctgcacacagtgatatcgtattcagtgaga

SEQ ID NO: 201203 - DNA, 120 bp, Artificial Sequence
  ENSG00000114302_44 (sequence is synthesized)
ggtgctgttggcacccagcagcaccctgggcacacagcatttcatgtcatgtcacagtgtacaagctaccctctaattcagaaagaagagcattttgcacagagaaaaataaaaagatcc

SEQ ID NO: 201204 - DNA, 120 bp, Artificial Sequence
  ENSG00000114302_45 (sequence is synthesized)
atgaatgtcatcttttatcttttattttcagttggctgatgttggaatttttgttcttgtcatgaacttgtaaaccaatcttgccaagatacaagttgttttggtttttcactacaatga

SEQ ID NO: 201205 - DNA, 120 bp, Artificial Sequence
  ENSG00000114302_46 (sequence is synthesized)
cctcttgttcctcctgtcttgactgctgacgttcctcaatgattctattgtctattttatgggaagcagccttcccataggtttccttttacacactgcagggctatctttatactttaa

SEQ ID NO: 201206 - DNA, 120 bp, Artificial Sequence
  ENSG00000114302_47 (sequence is synthesized)
aaaaaaaaaaaaaaaaggacaagaactgtcactaacctcatggaggggtttgcgtaaaaccatttagcccaccttgagcaaagggtagattccgtgttgtttttttaagctcactgtaat

SEQ ID NO: 201207 - DNA, 120 bp, Artificial Sequence
  ENSG00000114302_48 (sequence is synthesized)
actgtaataaaataaatctaattcagcattattgtgctacctcaaaggtaaaaaatgttttaaggtcttcttttggtcctgagttctatatacagtgtttgaaatgtccttcatttggaa

SEQ ID NO: 201208 - DNA, 120 bp, Artificial Sequence
  ENSG00000114302_49 (sequence is synthesized)
ttattttttaaattcttggagtgaattttattttaatctgttttaatcttgtattttaatctcagaagaataagtgattgaaacgtgatcaattcttgctctgtggtgttaaacatataa

SEQ ID NO: 201209 - DNA, 120 bp, Artificial Sequence
  ENSG00000114302_50 (sequence is synthesized)
tgaacagtcattaagaattaagtcactgtttgccataaacaaggttgatgttctttttgttgttgttaaggaaaccctagggctcggctttactcttgattaataaaggctgacaaatca

SEQ ID NO: 201210 - DNA, 120 bp, Artificial Sequence
  ENSG00000114302_51 (sequence is synthesized)
aggggacagcgagtcggaggaggacgaggacttggaagtctgtgctgagacctataaccctgatgaggaagaggaagatacagatccaagggtgattcatcctaaaactgatgaacagag

SEQ ID NO: 201211 - DNA, 120 bp, Artificial Sequence
  ENSG00000114302_52 (sequence is synthesized)
gagacacctgcctgtaccaaagggccaactgtgggagcatatgaaatctaggacccaagcaactggtagatggaaatcttgggactcactagggcccaataaactggtagctgaaccctc

SEQ ID NO: 201212 - DNA, 120 bp, Artificial Sequence
  ENSG00000114315_0 (sequence is synthesized)
acacaggatccggagctggtgctgataacagcggaatcccccgtctacctctctccttggtcctggaacagcgctactgatcaccaagtagccacaaaatataataaaccctcagcactt

SEQ ID NO: 201213 - DNA, 120 bp, Artificial Sequence
  ENSG00000114315_1 (sequence is synthesized)
gctcagtagttttgtgaaagtctcaagtaaaagagacacaaacaaaaaattctttttcgtgaagaactccaaaaataaaattctctagagataaaaaaaaaaaaaaaaggaaaatgccag

SEQ ID NO: 201214 - DNA, 120 bp, Artificial Sequence
  ENSG00000114315_2 (sequence is synthesized)
ctgatataatggagaaaaattcctcgtccccggtggctgctaccccagccagtgtcaacacgacaccggataaaccaaagacagcatctgagcacagaaagtcatcaaagcctattatgg

SEQ ID NO: 201215 - DNA, 120 bp, Artificial Sequence
  ENSG00000114315_3 (sequence is synthesized)
agaaaagacgaagagcaagaataaatgaaagtctgagccagctgaaaacactgattttggatgctctgaagaaagatagctcgcggcattccaagctggagaaggcggacattctggaaa

SEQ ID NO: 201216 - DNA, 120 bp, Artificial Sequence
  ENSG00000114315_4 (sequence is synthesized)
tgacagtgaagcacctccggaacctgcagcgggcgcagatgacggctgcgctgagcacagacccaagtgtgctggggaagtaccgagccggcttcagcgagtgcatgaacgaggtgaccc

SEQ ID NO: 201217 - DNA, 120 bp, Artificial Sequence
  ENSG00000114315_5 (sequence is synthesized)
gcttcctgtccacgtgcgagggcgttaataccgaggtgcgcactcggctgctcggccacctggccaactgcatgacccagatcaatgccatgacctaccccgggcagccgcaccccgcct

SEQ ID NO: 201218 - DNA, 80 bp, Artificial Sequence
  ENSG00000114315_6 (sequence is synthesized)
catccccgggggcgcggcgccccctcccggcggcgccccctgcaagctgggcagccaggctggagaggcggctaaggtgt

SEQ ID NO: 201219 - DNA, 120 bp, Artificial Sequence
  ENSG00000114315_7 (sequence is synthesized)
aggctggagaggcggctaaggtgtttggaggcttccaggtggtaccggctcccgatggccagtttgctttcctcattcccaacggggccttcgcgcacagcggccctgtcatccccgtct

SEQ ID NO: 201220 - DNA, 120 bp, Artificial Sequence
  ENSG00000114315_8 (sequence is synthesized)
acaccagcaacagcggcacctccgtgggccccaacgcagtgtcaccttccagcggcccctcgcttacggcggactccatgtggaggccgtggcggaactgagggggctcaggccacccct

SEQ ID NO: 201221 - DNA, 120 bp, Artificial Sequence
  ENSG00000114315_9 (sequence is synthesized)
cctcctaaactccccaacccacctctcttccctccggactctaaacaggaacttgaatactgggagagaagaggacttttttgattaagtggttactttgtgtttttttaatttctaaga

SEQ ID NO: 201222 - DNA, 120 bp, Artificial Sequence
  ENSG00000114315_10 (sequence is synthesized)
agttactttttgtagagagagctgtattaagtgactgaccatgcactatatttgtatatattttatatgttcatattggattgcgcctttgtattataaaagctcagatgacatttcgtt

SEQ ID NO: 201223 - DNA, 120 bp, Artificial Sequence
  ENSG00000114315_11 (sequence is synthesized)
ttttacacgagatttcttttttatgtgatgccaaagatgtttgaaaatgctcttaaaatatcttcctttggggaagtttatttgagaaaatataataaaagaaaaaagtaaaggctttta

SEQ ID NO: 201224 - DNA, 120 bp, Artificial Sequence
  ENSG00000114315_12 (sequence is synthesized)
tgtcttcgaactgattcttccagaatatgtaaaaaggcttttggtggaatttgaattacatgtaattggtaattcaggaattgactcttttgttattaaaagaacatttgtaaaaatcca

SEQ ID NO: 201225 - DNA, 120 bp, Artificial Sequence
  ENSG00000114315_13 (sequence is synthesized)
actcgctggtactgcgttctcccaggcgggagggcccggccttattcgctggggtccagagataatgcttgcgctccgtggccgggaggagggacccccagcactctgaagcagctgaca

SEQ ID NO: 201226 - DNA, 120 bp, Artificial Sequence
  ENSG00000114315_14 (sequence is synthesized)
cggggctcactttcctttcttgcctactctatgcagagctcgcggcattccaagctggagaaggcggacattctggaaatgacagtgaagcacctccggaacctgcagcgggcgcagatg

SEQ ID NO: 201227 - DNA, 120 bp, Artificial Sequence
  ENSG00000114315_15 (sequence is synthesized)
acgggtgagggcggctcgccgcgtccccctgtgcgggcgtcccgctcgcctcgcggtgatttcttccagacttccgcccgtggttgtgagaggcattcagctacattttactgccttggc

SEQ ID NO: 201228 - DNA, 120 bp, Artificial Sequence
  ENSG00000114315_16 (sequence is synthesized)
tcactcttgcgttcccacggtctggggcttatttatagccacaactccaagttgttactgttccggaaagggagggaaagaggttgcagccgcgagggtggcgggcgccgggtaggggcg

SEQ ID NO: 201229 - DNA, 120 bp, Artificial Sequence
  ENSG00000114316_0 (sequence is synthesized)
gggccggctgggccggggccgcggaggagatggcggaaggtggaggctgccgtgagcgaccggatgcggagactcagaagtccgagcttggacccttaatgaggaccacactccaacgcg

SEQ ID NO: 201230 - DNA, 120 bp, Artificial Sequence
  ENSG00000114316_1 (sequence is synthesized)
gggcgcagtggtatcttattgacagccggtggttcaagcagtggaagaagtatgtgggctttgacagctgggacatgtacaatgtgggtgaacataacctatttcctggcccaatagaca

SEQ ID NO: 201231 - DNA, 120 bp, Artificial Sequence
  ENSG00000114316_2 (sequence is synthesized)
actctgggctattttcagatcctgagagtcagaccttgaaagaacacttaattgatgaattggactatgtattggtccctaccgaggcgtggaataaactactaaactggtacggctgtg

SEQ ID NO: 201232 - DNA, 120 bp, Artificial Sequence
  ENSG00000114316_3 (sequence is synthesized)
tagaaggccagcaacccatcgtcagaaaagttgtggagcatggcctgtttgtcaagcactgcaaagtcgaggtgtatttgctggaactgaagctctgtgagaacagtgaccccaccaatg

SEQ ID NO: 201233 - DNA, 120 bp, Artificial Sequence
  ENSG00000114316_4 (sequence is synthesized)
tgctgagttgccatttcagcaaggcagacaccattgcaaccatcgagaaagagatgcggaagctattcaacatccctgcggagcgtgaaacacggctctggaacaaatacatgagcaaca

SEQ ID NO: 201234 - DNA, 120 bp, Artificial Sequence
  ENSG00000114316_5 (sequence is synthesized)
cctacgagcagttgagcaagctagacaacactgtccaggatgctgggctataccagggtcaggtgctagtaattgagcctcaaaatgaagatggcacatggcccaggcagaccttgcagt

SEQ ID NO: 201235 - DNA, 120 bp, Artificial Sequence
  ENSG00000114316_6 (sequence is synthesized)
caaaatcaagcactgcgcctagcagaaattttactacctctccaaaatcatcagcaagtccctattcctcagtgtctgcctctctcattgcaaatggtgatagcactagcacctgtggga

SEQ ID NO: 201236 - DNA, 120 bp, Artificial Sequence
  ENSG00000114316_7 (sequence is synthesized)
tgcacagttccggtgtcagcaggggtggatctggcttttctgcttcgtataattgtcaggagccaccatcctctcatatacaacctgggctctgtggacttggaaacctgggaaacacct

SEQ ID NO: 201237 - DNA, 120 bp, Artificial Sequence
  ENSG00000114316_8 (sequence is synthesized)
gcttcatgaactccgctttgcagtgtttgagcaacactgcaccactgactgactactttctcaaagatgagtatgaagccgaaatcaacagagacaaccctctggggatgaaaggggaaa

SEQ ID NO: 201238 - DNA, 120 bp, Artificial Sequence
  ENSG00000114316_9 (sequence is synthesized)
ttgcagaagcctatgctgaactcattaagcagatgtggtctggaagggacgcccatgtggcacctcgcatgttcaaaactcaagtaggacgttttgctcctcaattttctggctaccagc

SEQ ID NO: 201239 - DNA, 120 bp, Artificial Sequence
  ENSG00000114316_10 (sequence is synthesized)
aacaagattctcaggagctgctggcctttcttctagatggattgcatgaagatctgaaccgggtaaagaaaaagccctacttggagctgaaggatgccaatgggcggccagatgcggtgg

SEQ ID NO: 201240 - DNA, 120 bp, Artificial Sequence
  ENSG00000114316_11 (sequence is synthesized)
tggcaaaggaagcctgggagaatcacaggttgaggaatgattctgtgattgtggatactttccatggcctcttcaaatctactttggtttgcccagaatgtgctaaggtttctgtgacct

SEQ ID NO: 201241 - DNA, 120 bp, Artificial Sequence
  ENSG00000114316_12 (sequence is synthesized)
ttgacccattttgctatctaacgctgccactgcccttgaagaaagatcgagttatggaggttttcctggttcctgctgaccctcactgcagacctactcagtaccgtgtgactgtgccgc

SEQ ID NO: 201242 - DNA, 120 bp, Artificial Sequence
  ENSG00000114316_13 (sequence is synthesized)
tgatgggggctgtgtccgacctgtgcgaggctctctccaggctgtctggcattgctgcagaaaatatggtggtcgcagatgtgtataatcaccgattccacaaaattttccaaatggatg

SEQ ID NO: 201243 - DNA, 120 bp, Artificial Sequence
  ENSG00000114316_14 (sequence is synthesized)
aaggtttaaaccacatcatgcctcgggatgacattttcgtgtacgaggtctgcagcacttccgtggatggctcggaatgtgtcacgcttccagtctacttcagggagaggaagtccaggc

SEQ ID NO: 201244 - DNA, 120 bp, Artificial Sequence
  ENSG00000114316_15 (sequence is synthesized)
catcaagcacttcctccgcatcagcgctatatgggcagccactattgctttctgtccccaagcacaagttaacccttgagtctttgtaccaggctgtttgtgatcgtatcagccgctatg

SEQ ID NO: 201245 - DNA, 120 bp, Artificial Sequence
  ENSG00000114316_16 (sequence is synthesized)
gaagaaggcaaagagcagctttcagaaacagaaggcagtggggaagatgagccaggaaatgaccccagtgagaccacccaaaagaagatcaaaggccagccctgcccaaaaaggcttttt

SEQ ID NO: 201246 - DNA, 120 bp, Artificial Sequence
  ENSG00000114316_17 (sequence is synthesized)
accttcagtcttgtgaactcctatggaacagctgacataaattcacttgcagctgatggaaaactacttaaactcaactctcgatctacactggccatggattgggacagtgaaactcgg

SEQ ID NO: 201247 - DNA, 120 bp, Artificial Sequence
  ENSG00000114316_18 (sequence is synthesized)
agactttactatgatgagcaagaatctgaggcctacgagaagcatgtgagcatgttgcagcctcagaagaagaagaagaccacagtggccctgagagactgcatcgagctcttcaccacc

SEQ ID NO: 201248 - DNA, 120 bp, Artificial Sequence
  ENSG00000114316_19 (sequence is synthesized)
atggagacccttggggagcatgacccctggtactgtcccaactgtaagaagcatcaacaggccacaaaaaagtttgacctatggtccttgcccaagatcctggtggtccacctcaaacgt

SEQ ID NO: 201249 - DNA, 120 bp, Artificial Sequence
  ENSG00000114316_20 (sequence is synthesized)
ttctcctacaacagatactggagggataagctcgacacagtcgtagaattcccaatcagagggctgaacatgtccgagtttgtctgtaacctgtcagcaaggccttatgtgtacgacctc

SEQ ID NO: 201250 - DNA, 120 bp, Artificial Sequence
  ENSG00000114316_21 (sequence is synthesized)
attgccgtgtccaatcattatggagccatgggggttggccactacactgcatatgcgaagaacaaactgaatggtaaatggtattactttgatgatagcaacgtgtccctggcctctgag

SEQ ID NO: 201251 - DNA, 120 bp, Artificial Sequence
  ENSG00000114316_22 (sequence is synthesized)
gatcagatagtgactaaagcagcttatgtgctattttaccaacgtcgagatgatgaattttataagacaccttcacttagcagttctggttcctctgatggagggacacgaccaagcagc

SEQ ID NO: 201252 - DNA, 120 bp, Artificial Sequence
  ENSG00000114316_23 (sequence is synthesized)
tctcagcagggctttggggatgatgaggcttgcagcatggacaccaactaatgctgactccacgatcctgccaccctgtagcgccagtgtaatcccccaggagaacatctttgacactct

SEQ ID NO: 201253 - DNA, 120 bp, Artificial Sequence
  ENSG00000114316_24 (sequence is synthesized)
gcagactgctagtgttctgtctaaaaaccagacaaggaaatacccttcttttatgagcagaaggaaacaaaaaaaaaaaaagaagaccgtttacctagaagaagctatgtcaagaggctg

SEQ ID NO: 201254 - DNA, 120 bp, Artificial Sequence
  ENSG00000114316_25 (sequence is synthesized)
aattatttttatttttaaacaggtggtgagaaatttctgtgaaacctgtgaagctgaaaagggggtgggatgggggtactcaatggagtatgtctgatggatcccgaagaatggagagga

SEQ ID NO: 201255 - DNA, 120 bp, Artificial Sequence
  ENSG00000114316_26 (sequence is synthesized)
acacaggcgctgagtatggagcagcctggagacccaccccacctgcagggctgccctgagcgcctggatttctggttctgatgccaatactagtcaccccaagtagtctgctcacagtaa

SEQ ID NO: 201256 - DNA, 120 bp, Artificial Sequence
  ENSG00000114316_27 (sequence is synthesized)
cccaaacctcaagtaaactcccctttccctcgctatgtgcactgatatgggtttataattttctgaaagttacccactgaagcccatttctccgttgagtcatcttgtaatttccagctt

SEQ ID NO: 201257 - DNA, 120 bp, Artificial Sequence
  ENSG00000114316_28 (sequence is synthesized)
tctccccgctaaggaagatatctagtgttggggatcctggcccctcaacctcctgtggaacccagcagttctgttatatcccctgctaccctagatgaattaagacggttaaatactgtg

SEQ ID NO: 201258 - DNA, 120 bp, Artificial Sequence
  ENSG00000114316_29 (sequence is synthesized)
tggaacttttattagataacacactttttattagataacgcttaaaggaagtcagtacataaaactgcccggtgctgtgtcccgtctagttgtttccatgttggcttgagaacagaaatc

SEQ ID NO: 201259 - DNA, 120 bp, Artificial Sequence
  ENSG00000114316_30 (sequence is synthesized)
tttgtgggagttagccgggaaagggctccagttcatggcgatttagggtagtaatacattttggtgttacccagatgctttctagaacgggttctttcctcatccctgccaagactcttc

SEQ ID NO: 201260 - DNA, 120 bp, Artificial Sequence
  ENSG00000114316_31 (sequence is synthesized)
ccggggcccccattcgaaagccccgtccccactcccaccgcggggccagccgctgcgtgtgggcaaggccttaaggaaccggacgtatgggtccgggattttttgtctgaccttcaacct

SEQ ID NO: 201261 - DNA, 120 bp, Artificial Sequence
  ENSG00000114316_32 (sequence is synthesized)
aatccgtgggggtttggggcctgcgcggggcacgcgcatgcgatgaccgttggatgggtcggcgtcactgcgctgcgggtgaggacaaggacgtggctgccgactcgccaaagggggggt

SEQ ID NO: 201262 - DNA, 61 bp, Artificial Sequence
  ENSG00000114316_33 (sequence is synthesized)
ctgctatgtgaaacagcctttacctgatgagtttggcagctcacccttggagccaggggcc

SEQ ID NO: 201263 - DNA, 120 bp, Artificial Sequence
  ENSG00000114316_34 (sequence is synthesized)
agctcagtatgaagagctgacggaattctgcggtgggccaggtggctctggcgtcgactgtttaaggcgactgttaatgactacaacacaccattgagtcttggtcccaaggcgctggtg

SEQ ID NO: 201264 - DNA, 63 bp, Artificial Sequence
  ENSG00000114316_35 (sequence is synthesized)
atgatttgtaaatcaaaccaggatgcttgaagatgaaccttgtggggttttttttgttgtttt

SEQ ID NO: 201265 - DNA, 82 bp, Artificial Sequence
  ENSG00000114316_36 (sequence is synthesized)
tcctgcctgccatgcctggctaatttctttattttctttttttttgagacagagtttcgttctttttgcccaggctggagtg

SEQ ID NO: 201266 - DNA, 120 bp, Artificial Sequence
  ENSG00000114316_37 (sequence is synthesized)
tgagatggagtctcactctgtcaccaagctggagtgcggtggtgcagtctcggcttactcccgggttcaagtgatgcttctgccccagcctcccgagtggctgggatgacaggcgcccgc

SEQ ID NO: 201267 - DNA, 80 bp, Artificial Sequence
  ENSG00000114316_38 (sequence is synthesized)
gcttactcccgggttcaagtgatgcttctgccccagcctcccgagtggctgggatgacaggcgcccgccaccatgttgtg

SEQ ID NO: 201268 - DNA, 120 bp, Artificial Sequence
  ENSG00000114316_39 (sequence is synthesized)
ggtcagccttgtggtttttcacactgaaagggtatgtggtggtgtggactgatgtgacaggaagaccagttaatttgtggactctcacttaaataaagtttaccttgaagtagtatgaat

SEQ ID NO: 201269 - DNA, 120 bp, Artificial Sequence
  ENSG00000114316_40 (sequence is synthesized)
acaggctttttgtaatttattttaacttaatatgaagaatatttattccttgagaagcaacctaaggcattaaatagggcttgctctttgcaaaaagtcagtagcattgtttctgcttct

SEQ ID NO: 201270 - DNA, 87 bp, Artificial Sequence
  ENSG00000114316_41 (sequence is synthesized)
atatttgaaacaatggaggaggattcactttcttctttggctgagcgcagtggctcatgtaagggttgcttgagtccaggagtttga

SEQ ID NO: 201271 - DNA, 120 bp, Artificial Sequence
  ENSG00000114316_42 (sequence is synthesized)
aggcgtgagccaccacacctggccggttgtttatatttaattgtctttttttcactaatgaggaccaccttgtaaattctgggcattttcagagttttctcttccatgtgaattgctcca

SEQ ID NO: 201272 - DNA, 120 bp, Artificial Sequence
  ENSG00000114316_43 (sequence is synthesized)
tccagctaacttaatattagtttctcaagggtttgtgtagacctggctttgtctctttccatctgtttctctctttccctttaacgtcacttgcctgaggtctataaggccctttaaggt

SEQ ID NO: 201273 - DNA, 120 bp, Artificial Sequence
  ENSG00000114316_44 (sequence is synthesized)
ggggccccaggagatgttgacccagcagggcatggcgctgcagaactacgacaacaagctggtcaaatgcatagaggagctatgccagaagcaggaggagctgtgctggcagatccagca

SEQ ID NO: 201274 - DNA, 120 bp, Artificial Sequence
  ENSG00000114316_45 (sequence is synthesized)
ggaggaggacaagaaacagcggctgcagaatgaggtgaggcagctgacagagaagctggcctgcgtcaacgagaagctggcccgcgtcaacgagaacctggcacgcaagattgcctcttg

SEQ ID NO: 201275 - DNA, 120 bp, Artificial Sequence
  ENSG00000114316_46 (sequence is synthesized)
cagtaagttctaccagaccatcgcggagacggaggccacctacctcaagatgctggagagctcccagactttgctcagtgtcctgaagagggaagctgggaacctgaccaaggctacagc

SEQ ID NO: 201276 - DNA, 120 bp, Artificial Sequence
  ENSG00000114316_47 (sequence is synthesized)
ttatgggttccctggttttggattattgcacatagccatcctgaagattggcactgaatagctctgttttttctattagtttcccaaaattatagtttaaaatcttggtccctgacagct

SEQ ID NO: 201277 - DNA, 120 bp, Artificial Sequence
  ENSG00000114316_48 (sequence is synthesized)
ccatttttagccttttgatcctttttgagaaggaacagattagaaaagaaggtgagttgttttttggttgttaagacacacactgtaaacttttttaatttcaggggttttgttttgggg

SEQ ID NO: 201278 - DNA, 120 bp, Artificial Sequence
  ENSG00000114316_49 (sequence is synthesized)
atttttgtgtttatttagtgcaagcctaataagctagccagattaattctctggagaccgctagagtattttctttgttgacttggcagacactgcatatgcgaagaacaaactgaatgg

SEQ ID NO: 201279 - DNA, 120 bp, Artificial Sequence
  ENSG00000114316_50 (sequence is synthesized)
ggacagctgaccagaccatgggcagggcctgcctctgtgcgcccctcaactcagccccagcaagtctgtccacagagcgtcttcttcatggcagcagctgccttctttcactgtctcagg

SEQ ID NO: 201280 - DNA, 120 bp, Artificial Sequence
  ENSG00000114316_51 (sequence is synthesized)
tgctaagaggggcagctgccaacctccactggcatcagtgacaagcccggggcacagcctgtgggtcctggctttgtgctcacacaggctatggggagggtgggctctaggtcagctctg

SEQ ID NO: 201281 - DNA, 120 bp, Artificial Sequence
  ENSG00000114316_52 (sequence is synthesized)
caaggggcctgtctctgcggcacccacactcctgggctgccagggaggtcctggttgtagtctgagcaccatggaggtcccctcagccagcagaggcccagggcagggggcaggggttct

SEQ ID NO: 201282 - DNA, 120 bp, Artificial Sequence
  ENSG00000114331_0 (sequence is synthesized)
ctgactagtcgtcgccgtcttcgcggctgctatgaccagcgggcgaggcgcccttcgcagctccgcgcaacgctagtcgcggccgtgcgcccgccgtagccgtctgcgtcccagcgcggc

SEQ ID NO: 201283 - DNA, 120 bp, Artificial Sequence
  ENSG00000114331_1 (sequence is synthesized)
cgctcccgcggccccctcggctttgccagcgccgcctgcgaggcggaggcaggatgaagatgactgtggatttcgaggagtgtctgaaggactcgccccgcttcagggcagctttggaag

SEQ ID NO: 201284 - DNA, 120 bp, Artificial Sequence
  ENSG00000114331_2 (sequence is synthesized)
aagtagaaggtgatgtggcagaattggaactaaaacttgataagcttgtgaaactttgtattgcaatgattgatactggaaaagccttttgtgttgcaaataaacagttcatgaatggga

SEQ ID NO: 201285 - DNA, 120 bp, Artificial Sequence
  ENSG00000114331_3 (sequence is synthesized)
ttcgagacctggctcagtattctagtaatgatgctgtcgttgagacaagtttgaccaagttttctgacagtcttcaagaaatgataaattttcacacaatcctgtttgaccaaactcaga

SEQ ID NO: 201286 - DNA, 120 bp, Artificial Sequence
  ENSG00000114331_4 (sequence is synthesized)
gatcaattaaggcacagcttcagaactttgttaaagaagatcttagaaaattcaaagatgccaagaagcaattcgaaaaagtcagtgaagaaaaagaaaatgcgttagtaaaaaatgccc

SEQ ID NO: 201287 - DNA, 120 bp, Artificial Sequence
  ENSG00000114331_5 (sequence is synthesized)
aagtacaaagaaacaaacaacatgaagttgaagaagccaccaacattctgacagcaacaagaaaatgtttccgacacatagccctcgattatgtgcttcagattaatgttcttcaatcaa

SEQ ID NO: 201288 - DNA, 120 bp, Artificial Sequence
  ENSG00000114331_6 (sequence is synthesized)
aaaggagatcagaaatcctaaaatcaatgttgtcatttatgtatgcccatttggccttctttcatcaaggatatgatctgtttagtgaacttggaccctacatgaaggatcttggtgcac

SEQ ID NO: 201289 - DNA, 120 bp, Artificial Sequence
  ENSG00000114331_7 (sequence is synthesized)
agttggatcgactggttgtggatgcagcaaaggagaaaagagaaatggagcaaaaacattccaccattcaacaaaaggatttctccagtgatgattctaagttagaatataacgtagatg

SEQ ID NO: 201290 - DNA, 120 bp, Artificial Sequence
  ENSG00000114331_8 (sequence is synthesized)
ctgcaaatggcatagttatggaaggatatctgttcaaacgagccagcaatgccttcaaaacttggaacaggcgctggttttcaatacagaataatcagttggtttaccagaaaaaattta

SEQ ID NO: 201291 - DNA, 120 bp, Artificial Sequence
  ENSG00000114331_9 (sequence is synthesized)
aggataatccgactgtggtagttgaagacctcaggctttgcacagtgaaacattgtgaagacatagagcgacgattctgctttgaggtggtctcgccaacaaaaagttgcatgctccagg

SEQ ID NO: 201292 - DNA, 120 bp, Artificial Sequence
  ENSG00000114331_10 (sequence is synthesized)
cagattccgaaaagctgcgccaggcatggattaaggctgttcagaccagtattgctactgcttatagagagaagggtgatgaatcagagaagctggataagaaatcatctccatccacag

SEQ ID NO: 201293 - DNA, 120 bp, Artificial Sequence
  ENSG00000114331_11 (sequence is synthesized)
gaagcctagattctggaaatgagtccaaagagaaattattgaaaggagaaagtgcgcttcagcgggtccagtgtatccctggcaatgccagctgttgtgactgtggcctggcagatccac

SEQ ID NO: 201294 - DNA, 120 bp, Artificial Sequence
  ENSG00000114331_12 (sequence is synthesized)
ggtgggccagcatcaacctgggcatcaccttgtgtatcgagtgctccggaattcaccggagccttggggttcatttttcaaaagtacgatctttaactttagacacctgggagccagaac

SEQ ID NO: 201295 - DNA, 120 bp, Artificial Sequence
  ENSG00000114331_13 (sequence is synthesized)
ttttaaagcttatgtgtgagttggggaatgatgttataaatcgagtttatgaagctaatgtggaaaaaatgggaataaagaaaccccaaccaggacaaagacaggagaaggaggcatata

SEQ ID NO: 201296 - DNA, 120 bp, Artificial Sequence
  ENSG00000114331_14 (sequence is synthesized)
tcagagcaaaatatgtggagaggaaatttgtggataaatattctatatcattatcacctcctgagcagcaaaaaaagtttgtctctaaaagttctgaagaaaagaggctgagcatttcta

SEQ ID NO: 201297 - DNA, 120 bp, Artificial Sequence
  ENSG00000114331_15 (sequence is synthesized)
aatttgggccaggggaccaagtcagagcatctgcccaaagttcagtcagaagtaatgacagtggaattcagcagagctctgatgatggaagagaatctttaccctccacggtgtcagcca

SEQ ID NO: 201298 - DNA, 120 bp, Artificial Sequence
  ENSG00000114331_16 (sequence is synthesized)
atagtttatatgagcctgaaggagaaaggcaagattcttctatgtttcttgactcgaaacatcttaatccaggacttcagctttatagggcgtcatatgaaaaaaaccttcctaaaatgg

SEQ ID NO: 201299 - DNA, 120 bp, Artificial Sequence
  ENSG00000114331_17 (sequence is synthesized)
ctgaggctttggctcatggtgcagacgtgaactgggccaattcagaggaaaacaaagcgacaccacttattcaggctgtattagggggctctttggtgacgtgtgagttcctcctacaga

SEQ ID NO: 201300 - DNA, 120 bp, Artificial Sequence
  ENSG00000114331_18 (sequence is synthesized)
atggtgctaatgtcaaccaaagagatgtccaagggcggggaccattgcaccatgccaccgtcttagggcacacagggcaggtatgtttattcctaaaacgaggtgccaatcaacatgcca

SEQ ID NO: 201301 - DNA, 120 bp, Artificial Sequence
  ENSG00000114331_19 (sequence is synthesized)
ctgatgaagaagggaaagaccctttgagcatagctgtggaagcagccaatgctgatatagtcaccttgttacgtttagcaagaatgaatgaagagatgcgggaatcagaaggactttatg

SEQ ID NO: 201302 - DNA, 120 bp, Artificial Sequence
  ENSG00000114331_20 (sequence is synthesized)
gacagccaggtgatgaaacttatcaggacatatttcgtgatttttcccaaatggcatccaataatccagagaaactaaatcgtttccagcaagattcacagaaattctgaatttttttaa

SEQ ID NO: 201303 - DNA, 120 bp, Artificial Sequence
  ENSG00000114331_21 (sequence is synthesized)
aaatgggaaaatatgaaatctggtgaccccctaatgtatacagctaaaaaatcacaatttttttactgctttaattctacttaattttggtagatattgaatggcttggaaaagaggtac

SEQ ID NO: 201304 - DNA, 120 bp, Artificial Sequence
  ENSG00000114331_22 (sequence is synthesized)
ccattcatatatttataaattaaaacatagttatctagtagtaggagaggaacctagtttaggacctcttttattaaaaaagcctatttaaagggctatttctgtagacagaagttcagt

SEQ ID NO: 201305 - DNA, 120 bp, Artificial Sequence
  ENSG00000114331_23 (sequence is synthesized)
ctagatttaggccatctctaggttacaagatgataggaggttagacaaaagtgattcttttgccaatgggtggtggcattgatttttttcctccatgcatcttgcccaggatcactcagt

SEQ ID NO: 201306 - DNA, 120 bp, Artificial Sequence
  ENSG00000114331_24 (sequence is synthesized)
caagcatgtcttcatcaagtggaagccaactgtcctgcctgcctcaagaatatgtgttttctttagcttccctgaggctttttggtggttcagaaataggtgtgtgtgttgatgtgtttt

SEQ ID NO: 201307 - DNA, 120 bp, Artificial Sequence
  ENSG00000114331_25 (sequence is synthesized)
tggtaacctagctttcatacacataatatatgatttattagaactagagaatgtgttttccccgtttgttcataaatgcggtcggttatacttcttaggtgacaggttattgtccagtac

SEQ ID NO: 201308 - DNA, 120 bp, Artificial Sequence
  ENSG00000114331_26 (sequence is synthesized)
tttaatgtatgtatgtataatggctgtacaggtagaccataattcagtcctttagatttattttatgcagcaaaaagaagctcttttttttttttaatcacaaaaaaaaaccccagttca

SEQ ID NO: 201309 - DNA, 120 bp, Artificial Sequence
  ENSG00000114331_27 (sequence is synthesized)
aaatgtgtagttcttcattgttgggttgattccccaaaaccttgacagatgtatcgatggaataaaagtatgttttaaaggttacttgaatgtcacaaaattatgccttcatcaaaactt

SEQ ID NO: 201310 - DNA, 120 bp, Artificial Sequence
  ENSG00000114331_28 (sequence is synthesized)
taaaggaaaaatcaatttataaaatcatgtaggccatttttatatttgaaatttgtccttttaaagatagttttgctgttgctcctagtgaaagaaaaatctctgtacaaaggagaaaaa

SEQ ID NO: 201311 - DNA, 120 bp, Artificial Sequence
  ENSG00000114331_29 (sequence is synthesized)
agttaatactaaaatatatagcaataaattgctgtttattttttctacatctattttgtgtacttgtacacagtgtacattcttttaaattatatcgtgtatatagctttagtattcggt

SEQ ID NO: 201312 - DNA, 120 bp, Artificial Sequence
  ENSG00000114331_30 (sequence is synthesized)
cggttacatgattcacagacccctgaattccaaaatattatggataaacattaccatttatatgctacaaattagtctgattccatctttgaaaatgtcttaaagtataaaataattaat

SEQ ID NO: 201313 - DNA, 67 bp, Artificial Sequence
  ENSG00000114331_31 (sequence is synthesized)
gctgggactacaggcacccgccaccattccgagctaatttctatatttttagtaaagacgcctgctt

SEQ ID NO: 201314 - DNA, 89 bp, Artificial Sequence
  ENSG00000114331_32 (sequence is synthesized)
gccttttgattccttcccattgttgtcaacaattaagtctattcttcttttagaaattatatgtaaatgatattattgatactctttct

SEQ ID NO: 201315 - DNA, 120 bp, Artificial Sequence
  ENSG00000114331_33 (sequence is synthesized)
tgtaaatgatattattgatactctttctaaataagaggttttaaaatatataaaaactttatgatccaattatagataaattttctaacatttcccagtcactagggttttataagttga

SEQ ID NO: 201316 - DNA, 120 bp, Artificial Sequence
  ENSG00000114331_34 (sequence is synthesized)
tttataagttgattaaacatcaaatcagaatctagccaagcaggaattatattgaaataagttcacattacagaaaaggttccataatttggccaaactgcatgcatgtaatgcttattt

SEQ ID NO: 201317 - DNA, 120 bp, Artificial Sequence
  ENSG00000114331_35 (sequence is synthesized)
agtaatggtcactgtatgttagataaggataaaaatatatttgtgaattacttctgaggaaatgctaacttccacagcattgtatttaattataacaataacaggaacattaaatcttta

SEQ ID NO: 201318 - DNA, 120 bp, Artificial Sequence
  ENSG00000114331_36 (sequence is synthesized)
tctttgctgtttcacctcaaagtcatagatcatctggctttttaggcaccttcactaaaggcaaaaatctgatttgtagtttttattagcatgtaccttgaaattatttgaccaagaagc

SEQ ID NO: 201319 - DNA, 120 bp, Artificial Sequence
  ENSG00000114331_37 (sequence is synthesized)
tcaaagaaaagaagtacgttaaagaaaaagaaaaaacctcacttttcctttatagtgtcccttcctgttttaattcctaaagatcctgacttttatctgaggaagtctaggtagttttcc

SEQ ID NO: 201320 - DNA, 120 bp, Artificial Sequence
  ENSG00000114331_38 (sequence is synthesized)
ttttggatctggccattggtgcgtgtttcattcagatcacctctggaatctctgtggttgtgaaggcaattccttatgagactcttgcctcctgtggcttacgtgatgaattgttaatat

SEQ ID NO: 201321 - DNA, 120 bp, Artificial Sequence
  ENSG00000114331_39 (sequence is synthesized)
ggcagtaattaattagtatctacttaaatttagtggtcagaaatgtatttgaagtgccttaaagatgatcatggttcagaatatcttcagagaaagcaaaatctttaatattgcagggag

SEQ ID NO: 201322 - DNA, 120 bp, Artificial Sequence
  ENSG00000114331_40 (sequence is synthesized)
cctagcaatacaagtacacatttctgtggcttgatttcttgaatatgctgagacccaatttggactacatttggcagaaatgatggagtaaacagcaaggctttaaattaaattaatagt

SEQ ID NO: 201323 - DNA, 120 bp, Artificial Sequence
  ENSG00000114331_41 (sequence is synthesized)
tacaaggtaggttggctcttaggtgaatttagccatgtcaactaatagcttttatatggtatgtaacaaatctgaattatgttatgctgtgaattattcagtgcattataagaaatctta

SEQ ID NO: 201324 - DNA, 120 bp, Artificial Sequence
  ENSG00000114331_42 (sequence is synthesized)
gttaatcatgcttttgggcttcattagtcaatgtgattggccttttattttctttccataacttatctgctattattagtttcttattccttattattaatctgttagctcattatcatt

SEQ ID NO: 201325 - DNA, 120 bp, Artificial Sequence
  ENSG00000114331_43 (sequence is synthesized)
agcttactaacttgaaagttagattaatatcaaaataagaatagcagcactatgaagagttaataaaatgcaatttcatgttagagctagaataaaagtaattgagcagtcatttgcaaa

SEQ ID NO: 201326 - DNA, 120 bp, Artificial Sequence
  ENSG00000114331_44 (sequence is synthesized)
tgcttcattataacatttatgtgcttaagatttctaaggttttaaaaagttacctttaatacaatccttagaaactcagaaatttcctgatattcattagattatggtgtttgcctaatt

SEQ ID NO: 201327 - DNA, 120 bp, Artificial Sequence
  ENSG00000114331_45 (sequence is synthesized)
tataccggttttcactgtatattttaatgaactttgattggttacttttccagacatacagatttaatttggaatatgaactttggttcttcatgagtgcattttgaaaaagaaaaaaag

SEQ ID NO: 201328 - DNA, 120 bp, Artificial Sequence
  ENSG00000114331_46 (sequence is synthesized)
tacacattcagaatctggccaatttaagtttgtattttaaaaatattttatgcatgttaagtatggtcgcagtaaatgaaattgtgtttaagactaaatttactaccgttttgaacagac

SEQ ID NO: 201329 - DNA, 120 bp, Artificial Sequence
  ENSG00000114331_47 (sequence is synthesized)
attcccagatcattcttatattgtcagataacacttgtgtataatatcactttggatcatggacatgagctggaaaaatgatgtatttttgtagattgtatgtccagaatgactttagaa

SEQ ID NO: 201330 - DNA, 120 bp, Artificial Sequence
  ENSG00000114331_48 (sequence is synthesized)
ccgcatgatacggtggaaggagcactggactagtcgtcactaccctttttggattcagggctcctcacaattaaaatgagtgtaatgaaacaaggtgaaaatatagaagcatccctttgt

SEQ ID NO: 201331 - DNA, 120 bp, Artificial Sequence
  ENSG00000114331_49 (sequence is synthesized)
atactgttttgctacttacagtgtacttggcattgctttatctcactggattctcatggtaggatttctgagatcttaatctaagctccaaagttgtctacttttttgatcctagggtgc

SEQ ID NO: 201332 - DNA, 120 bp, Artificial Sequence
  ENSG00000114331_50 (sequence is synthesized)
tccttttgttttacagagcagggtcacttgatttgctagctggtggcagaattggcaccattacccaggtctgactgaccaccagtcagaggcactttatttgtatcatgaaatgatttg

SEQ ID NO: 201333 - DNA, 120 bp, Artificial Sequence
  ENSG00000114331_51 (sequence is synthesized)
aaatcattgtaaagcagcgaagtctgataatgaatgccagctttccttgtgctttgataacaaagactccaaatattctggagaacctggataaaagtttgaagggctagattgggattt

SEQ ID NO: 201334 - DNA, 120 bp, Artificial Sequence
  ENSG00000114331_52 (sequence is synthesized)
gaagacaaaattgtaggaaatcttacatttttgcaataacaaacattaatgaaagcaaaacattataaaagtaattttaattcaccacatacttatcaatttcttgatgcttccaaatga

SEQ ID NO: 201335 - DNA, 120 bp, Artificial Sequence
  ENSG00000114331_53 (sequence is synthesized)
catctacagatatggttttgtggacatctttttctgtttacataaatttatccacttaaaatgtgataatgtggagacaaagcaagatttgattacataaacttttctctgcattggtct

SEQ ID NO: 201336 - DNA, 120 bp, Artificial Sequence
  ENSG00000114331_54 (sequence is synthesized)
tttcactatcttatttgctaacttttcttatttttcttcaacctccccaccctccattttttggatattaaacagggaaagcttgctacattataaagattgttggcaccatttatttta

SEQ ID NO: 201337 - DNA, 120 bp, Artificial Sequence
  ENSG00000114331_55 (sequence is synthesized)
cacaaaggctaaaggttaacttttggaaatgatgagctacttttatatatgtgtttactcatgctttgtgatatttctggatcattccagtcataaagacttattacatgtactatttct

SEQ ID NO: 201338 - DNA, 120 bp, Artificial Sequence
  ENSG00000114331_56 (sequence is synthesized)
tgctacctgtgaaaaggtatattttaaagaatgtataaccaacagtccatttactttttattagtatgtagaggatttgtatctaattcatgaatgtagttttacagtagtttgtcattg

SEQ ID NO: 201339 - DNA, 120 bp, Artificial Sequence
  ENSG00000114331_57 (sequence is synthesized)
taaatggagcaaagtacattatcttctaaaatgtacattatgtaagaattgtaaatatacttaagtaatttgtatgccaaaaaattacaataagtcaataaagatctcacctctggctta

SEQ ID NO: 201340 - DNA, 120 bp, Artificial Sequence
  ENSG00000114331_58 (sequence is synthesized)
gcggccgctcccgcggccccctcggctttgccagcgccgcctgcgaggcggaggcaggatgaagatgactgtggatttcgaggagtgtctgaaggactcgccccgcttcagatgccgtga

SEQ ID NO: 201341 - DNA, 120 bp, Artificial Sequence
  ENSG00000114331_59 (sequence is synthesized)
gagcaggggcttgttttaccgcttgctgtttcctaagtctctagtacagtgcgtgacatccattctggagctgggaagtccaagataaagatgccagcagattagtgtctggtgagggcc

SEQ ID NO: 201342 - DNA, 120 bp, Artificial Sequence
  ENSG00000114331_60 (sequence is synthesized)
tttataagagcactaatccattcatgaaggcggagccctcatgtcttcatcacttccccaaaggccccacctcttcatactgtgacaatggagatcaagtttcaacatgaattttggaga

SEQ ID NO: 201343 - DNA, 120 bp, Artificial Sequence
  ENSG00000114331_61 (sequence is synthesized)
actatagagtttttataacccacttgtaaattgtgagttgttagctttgtactgtacttaactgaatccttgggtggctaatcccgggcctttaaacattcgtaactcttcctatgacag

SEQ ID NO: 201344 - DNA, 120 bp, Artificial Sequence
  ENSG00000114331_62 (sequence is synthesized)
tacacattgacttgctctatttcactctggctgctgacttctttatttgctgtacggatgtcttccatatacattccagtgaaatgaatggaatggtaaaaatattcttcatatacttac

SEQ ID NO: 201345 - DNA, 120 bp, Artificial Sequence
  ENSG00000114331_63 (sequence is synthesized)
agcagcaaaatagttgttttctttttggaattctttttagctgtcaagtgaatataacaaaattgttttctttttgttattcagggaatttctataaattacgttcagggaaaaaaaaaa

SEQ ID NO: 201346 - DNA, 120 bp, Artificial Sequence
  ENSG00000114331_64 (sequence is synthesized)
acagttgctgtgctctttccccgtgtgcagcgcagattcttcctctgtgccctgtggttgctacgagcgcatgggggagggctggggtcagcaattcaagactgtcttttctatcctctt

SEQ ID NO: 201347 - DNA, 120 bp, Artificial Sequence
  ENSG00000114331_65 (sequence is synthesized)
taggagggccgtgaagattgcctgtgtgttcctcttccagcagcctctgcccaggagggcccggatcacagtcggatgctcccagtggatctgtcacagagttgacatgggggcactccg

SEQ ID NO: 201348 - DNA, 120 bp, Artificial Sequence
  ENSG00000114331_66 (sequence is synthesized)
attcacatgggttgcccttctttctatgtgagaggcggtcgtcctgaggccgtccaggacacaggttctttctgttttgaggatagtaggaaagtcttgagttgttttggacaatggagt

SEQ ID NO: 201349 - DNA, 120 bp, Artificial Sequence
  ENSG00000114331_67 (sequence is synthesized)
agcatctgctatatacatgataaggtttataattgctcttctttttgatcttcatttgtgtttcttatgtggcactggacttctttttgtctccttcatgttacagttgtttgtgtgtct

SEQ ID NO: 201350 - DNA, 120 bp, Artificial Sequence
  ENSG00000114331_68 (sequence is synthesized)
catctgttgatacactgtgaggtccataaaggtagactctatactgttatgtttttgttttcttttatcctcatatgttgctttacatgcactagatgcccagtaccatttggtgaataa

SEQ ID NO: 201351 - DNA, 120 bp, Artificial Sequence
  ENSG00000114331_69 (sequence is synthesized)
ctaaaaatgtttggtataaaaacctgtgagaatatttcagaatttgttttgaaagttatcaacataaaaaactgttacacttaggtttttaattttttcttacttgttttgctttaaaat

SEQ ID NO: 201352 - DNA, 120 bp, Artificial Sequence
  ENSG00000114331_70 (sequence is synthesized)
ttttttcccagcctctttcaacatatttacatttttctctataatttttggcattatttggacttcaaaaatatttgagattgaggatttatatgaatagtatcatttggagaatttttc

SEQ ID NO: 201353 - DNA, 120 bp, Artificial Sequence
  ENSG00000114331_71 (sequence is synthesized)
ccttaaagttgatggtgggtcagtcttttggtttgttcttccgtatgcagttacaaaaccagtgggatgaaatttggggatcacttttttccttgagcctcttcacccacttgacaatga

SEQ ID NO: 201354 - DNA, 120 bp, Artificial Sequence
  ENSG00000114331_72 (sequence is synthesized)
tcacttttttccttgagcctcttcacccacttgacaatgaatttttttttttttttgcggtggggagccctatttttggtcttaaagctaacgaaggccgggtgtggtggctcatgcctg

SEQ ID NO: 201355 - DNA, 120 bp, Artificial Sequence
  ENSG00000114331_73 (sequence is synthesized)
tttttttttttttaaatattcagtgatgggttatttgtttttaagagataatttgtttcattggcaccttaatttcttcgttaacatactttgccctaaagatacatgaaataaaacctt

SEQ ID NO: 201356 - DNA, 120 bp, Artificial Sequence
  ENSG00000114331_74 (sequence is synthesized)
ctttcaacaaattatatatatttttggctagaaaattattaaatagcaaagtggaaaaaatataaagcttatagggtgtttttggcattaacttagtgtctgagaaaacaatatgttatt

SEQ ID NO: 201357 - DNA, 120 bp, Artificial Sequence
  ENSG00000114331_75 (sequence is synthesized)
cagagcatctgcccaaagttcagtgattgctgtaaatagcgacgaggccaggcgggagtctctgttttgtcctgatgagctagattcactcttctcctactttgatacttcttcaaaact

SEQ ID NO: 201358 - DNA, 120 bp, Artificial Sequence
  ENSG00000114331_76 (sequence is synthesized)
ttatacaatggcttgggtgttggtttatgcaaggtatcattgtattggaacaaatcttttgagttgttctaataattgtgcagataaattcctcttttgtttttgaagagcaaaatgttc

SEQ ID NO: 201359 - DNA, 120 bp, Artificial Sequence
  ENSG00000114331_77 (sequence is synthesized)
tctttgaaagctatgcttcttgaaccagtttataaaaatttgaatctcttaggaacttaactaagctaaaagtggcctttagttagaattcaaaacactattcataattacatttaggat

SEQ ID NO: 201360 - DNA, 120 bp, Artificial Sequence
  ENSG00000114331_78 (sequence is synthesized)
accaccaactccctgtaaaagtgtgtgtccgtgtgtgtgttgtggggcagagggtgtggatgcaccttagtgtcaacatgcgtgtttggtcttacagactttccaactgcagtcactgca

SEQ ID NO: 201361 - DNA, 120 bp, Artificial Sequence
  ENSG00000114331_79 (sequence is synthesized)
aggcagcctttcctctctgtcacgagatgctaaaacttcacttgcattgcctgttaaattgtctaagcctagctaaacttactttgaaaatatttttaaaaatgagaactcaaatattaa

SEQ ID NO: 201362 - DNA, 120 bp, Artificial Sequence
  ENSG00000114331_80 (sequence is synthesized)
gtctatagctattttcttaagctcaaatcacttttataatccctgaactaatagccattgtcgttttttttaatgttaaaaacctgttcccttctacatattctaagaaaaactgaattt

SEQ ID NO: 201363 - DNA, 120 bp, Artificial Sequence
  ENSG00000114331_81 (sequence is synthesized)
ctgtgtctttaaaatagttaactttaaacaatgccataatatttcacctttctaggtaatgtgtatattctaaggaataaaactgcttaaaatgcaaggggagatgggaattataaacct

SEQ ID NO: 201364 - DNA, 120 bp, Artificial Sequence
  ENSG00000114331_82 (sequence is synthesized)
ttatcaagggaaatatttatttaaagaaggtctcatttactccacctcatttagaatgacttttcccccccgtgtgttaataaacgtatttctttacattgctttaaaacacttgcatct

SEQ ID NO: 201365 - DNA, 120 bp, Artificial Sequence
  ENSG00000114331_83 (sequence is synthesized)
gggacgccgacttctgcttcgcggtgcccccggccagagcgactctccggagggcgcccgcggtggatgcgtgcgggaatcgcggggggaagcgctgtgatcaaccgcattccgtggacc

SEQ ID NO: 201366 - DNA, 120 bp, Artificial Sequence
  ENSG00000114331_84 (sequence is synthesized)
ctggattaccagatcctgtttgaccaaactcagagatcaattaaggcacagcttcagaactttgttaaagaagatcttagaaaattcaaagatgccaagaagcaattcgaaaaagtcagt

SEQ ID NO: 201367 - DNA, 120 bp, Artificial Sequence
  ENSG00000114346_0 (sequence is synthesized)
tctggagactcctgcctatgggaaagaggttgacatcacgcgccaatcggcatggctcttagagagagcagcttagtttttgaatcggttgtggcggccgccggcgaggaatggcggtat

SEQ ID NO: 201368 - DNA, 120 bp, Artificial Sequence
  ENSG00000114346_1 (sequence is synthesized)
ttgtgagaggagtcggcgtttgaagaggtggaactcctagggcttttttgagagtgctgatttagaagaatacaaatcatggctgaaaatagtgtattaacatccactactgggaggact

SEQ ID NO: 201369 - DNA, 120 bp, Artificial Sequence
  ENSG00000114346_2 (sequence is synthesized)
agcttggcagactcttccatttttgattctaaagttactgagatttccaaggaaaacttacttattggatctacttcatatgtagaagaagagatgcctcagattgaaacaagagtgata

SEQ ID NO: 201370 - DNA, 120 bp, Artificial Sequence
  ENSG00000114346_3 (sequence is synthesized)
ttggttcaagaagctggaaaacaagaagaacttataaaagccttaaaggacattaaagtgggctttgtaaagatggagtcagtggaagaatttgaaggtttggattctccggaatttgaa

SEQ ID NO: 201371 - DNA, 120 bp, Artificial Sequence
  ENSG00000114346_4 (sequence is synthesized)
aatgtatttgtagtcacggactttcaggattctgtctttaatgacctctacaaggctgattgtagagttattggaccaccagttgtattaaattgttcacaaaaaggagagcctttgcca

SEQ ID NO: 201372 - DNA, 120 bp, Artificial Sequence
  ENSG00000114346_5 (sequence is synthesized)
ttttcatgtcgcccgttgtattgtacaagtatgatgaatctagtactatgctttactggatttaggaaaaaagaagaactagtcaggttggtgacattggtccatcacatgggtggagtt

SEQ ID NO: 201373 - DNA, 120 bp, Artificial Sequence
  ENSG00000114346_6 (sequence is synthesized)
attcgaaaagactttaattcaaaagttacacatttggtggcaaattgtacacaaggagaaaaattcagggttgctgtgagtctaggtactccaattatgaagccagaatggatttataaa

SEQ ID NO: 201374 - DNA, 120 bp, Artificial Sequence
  ENSG00000114346_7 (sequence is synthesized)
gcttgggaaaggcggaatgaacaggatttctatgcagcagttgatgactttagaaatgaatttaaagttcctccatttcaagattgtattttaagtttcctgggattttcagatgaagag

SEQ ID NO: 201375 - DNA, 120 bp, Artificial Sequence
  ENSG00000114346_8 (sequence is synthesized)
aaaaccaatatggaagaaatgactgaaatgcaaggaggtaaatatttaccgcttggagatgaaagatgcactcaccttgtagttgaagagaatatagtaaaagatcttccctttgaacct

SEQ ID NO: 201376 - DNA, 120 bp, Artificial Sequence
  ENSG00000114346_9 (sequence is synthesized)
tcaaagaaactttatgttgtcaagcaagagtggttctggggaagcattcaaatggatgcccgagctggagaaactatgtatttatatgaaaaggcaaatactcctgagctcaagaaatca

SEQ ID NO: 201377 - DNA, 120 bp, Artificial Sequence
  ENSG00000114346_10 (sequence is synthesized)
gtgtcaatgctttctctaaatacccctaacagcaatcgcaaacgacgtcgtttaaaagaaacacttgctcagctttcaagagagacagacgtgtcaccatttccaccccgtaagcgccca

SEQ ID NO: 201378 - DNA, 120 bp, Artificial Sequence
  ENSG00000114346_11 (sequence is synthesized)
tcagctgagcattccctttccatagggtcactcctagatatctccaacacaccagagtctagcattaactatggagacaccccaaagtcttgtactaagtcttctaaaagctccactcca

SEQ ID NO: 201379 - DNA, 120 bp, Artificial Sequence
  ENSG00000114346_12 (sequence is synthesized)
gttccttcaaagcagtcagcaaggtggcaagttgcaaaagagctttatcaaactgaaagtaattatgttaatatattggcaacaattattcagttatttcaagtaccattggaagaggaa

SEQ ID NO: 201380 - DNA, 120 bp, Artificial Sequence
  ENSG00000114346_13 (sequence is synthesized)
ggacaacgtggtggacctatccttgcaccagaggagattaagactatttttggtagcatcccagatatctttgatgtacacactaagataaaggatgatcttgaagaccttatagttaat

SEQ ID NO: 201381 - DNA, 120 bp, Artificial Sequence
  ENSG00000114346_14 (sequence is synthesized)
tgggatgagagcaaaagcattggtgacatttttctgaaatattcaaaagatttggtaaaaacctaccctccctttgtaaacttctttgaaatgagcaaggaaacaattattaaatgtgaa

SEQ ID NO: 201382 - DNA, 120 bp, Artificial Sequence
  ENSG00000114346_15 (sequence is synthesized)
aaacagaaaccaagatttcatgcttttctcaagataaaccaagcaaaaccagaatgtggacggcagagccttgttgaacttcttatccgaccagtacagaggttacccagtgttgcatta

SEQ ID NO: 201383 - DNA, 120 bp, Artificial Sequence
  ENSG00000114346_16 (sequence is synthesized)
cttttaaatgatcttaagaagcatacagctgatgaaaatccagacaaaagcactttagaaaaagctattggatcactgaaggaagtaatgacgcatattaatgaggataagagaaaaaca

SEQ ID NO: 201384 - DNA, 120 bp, Artificial Sequence
  ENSG00000114346_17 (sequence is synthesized)
aaaagcaaatttttgatgttgtttatgaagtagatggatgcccagctaatcttttatcttctcaccgaagcttagtacagcgggttgaaacaatttctctaggtgagcacccctgtgaca

SEQ ID NO: 201385 - DNA, 120 bp, Artificial Sequence
  ENSG00000114346_18 (sequence is synthesized)
gaggagaacaagtaactctcttcctcttcaatgattgcctagagatagcaagaaaacggcacaaggttattggcacttttaggagtcctcatggccaaacccgacccccagcttctctta

SEQ ID NO: 201386 - DNA, 120 bp, Artificial Sequence
  ENSG00000114346_19 (sequence is synthesized)
agcatattcacctaatgcctctttctcagattaagaaggtattggacataagagagacagaagattgccataatgcttttgccttgcttgtgaggccaccaacagagcaggcaaatgtgc

SEQ ID NO: 201387 - DNA, 120 bp, Artificial Sequence
  ENSG00000114346_20 (sequence is synthesized)
tactcagtttccagatgacatcagatgaacttccaaaagaaaactggctaaagatgctgtgtcgacatgtagctaacaccatttgtaaagcagatgctgagaatcttatttatactgctg

SEQ ID NO: 201388 - DNA, 120 bp, Artificial Sequence
  ENSG00000114346_21 (sequence is synthesized)
atccagaatcctttgaagtaaatacaaaagatatggacagtacattgagtagagcatcaagagcaataaaaaagacttcaaaaaaggttacaagagcattctctttctccaaaactccaa

SEQ ID NO: 201389 - DNA, 120 bp, Artificial Sequence
  ENSG00000114346_22 (sequence is synthesized)
aaagagctcttcgaagggctcttatgacatcccacggctcagtggagggaagaagtccttccagcaatgataagcatgtaatgagtcgtctttctagcacatcatcattagcaggtatcc

SEQ ID NO: 201390 - DNA, 120 bp, Artificial Sequence
  ENSG00000114346_23 (sequence is synthesized)
cttctccctcccttgtcagccttccttccttctttgaaaggagaagtcatacgttaagtagatctacaactcatttgatatgaagcgttaccaaaatcttaaattatagaaatgtataga

SEQ ID NO: 201391 - DNA, 120 bp, Artificial Sequence
  ENSG00000114346_24 (sequence is synthesized)
cacctcatactcaaataagaaactgacttaaatggtacttgtaattagcacttggtgaaagctggaaggaagataaataacactaaactatgctatttgatttttcttcttgaaagagta

SEQ ID NO: 201392 - DNA, 120 bp, Artificial Sequence
  ENSG00000114346_25 (sequence is synthesized)
aggtttacctgttacattttcaagttaattcatgtaaaaaatgatagtgattttgatgtaatttatctcttgtttgaatctgtcattcaaaggccaataatttaagttgctatcagctga

SEQ ID NO: 201393 - DNA, 120 bp, Artificial Sequence
  ENSG00000114346_26 (sequence is synthesized)
tattagtagctttgcaaccctgatagagtaaataaattttatgggcgggtgccaaatactgctgtgaatctatttgtatagtatccatgaatgaatttatggaaatagatatttgtgcag

SEQ ID NO: 201394 - DNA, 120 bp, Artificial Sequence
  ENSG00000114346_27 (sequence is synthesized)
ctcaatttatgcagagattaaatgacatcataatactggatgaaaacttgcatagaattctgattaaatagtgggtctgtttcacatgtgcagtttgaagtatttaaataaccactcctt

SEQ ID NO: 201395 - DNA, 120 bp, Artificial Sequence
  ENSG00000114346_28 (sequence is synthesized)
tcacagtttattttcttctcaagcgttttcaagatctagcatgtggattttaaaagatttgccctcattaacaagaataacatttaaaggagattgtttcaaaatatttttgcaaattga

SEQ ID NO: 201396 - DNA, 120 bp, Artificial Sequence
  ENSG00000114346_29 (sequence is synthesized)
gataaggacagaaagattgagaaacattgtatattttgcaaaaacaagatgtttgtagctgtttcagagagagtacggtatatttatggtaattttatccactagcaaatcttgatttag

SEQ ID NO: 201397 - DNA, 120 bp, Artificial Sequence
  ENSG00000114346_30 (sequence is synthesized)
tttgatagtgtgtggaattttattttgaaggataagaccatgggaaaattgtggtaaagactgtttgtacccttcatgaaataattctgaagttgccatcagttttactaatcttctgtg

SEQ ID NO: 201398 - DNA, 120 bp, Artificial Sequence
  ENSG00000114346_31 (sequence is synthesized)
aaatgcatagatatgcgcatgttcaactttttattgtggtcttataattaaatgtaaaattgaaaattcatttgctgtttcaaagtgtgatatctttcacaatagcctttttatagtcag

SEQ ID NO: 201399 - DNA, 120 bp, Artificial Sequence
  ENSG00000114346_32 (sequence is synthesized)
taattcagaataatcaagttcatatggataaatgcatttttatttcctatttctttagggagtgctacaaatgtttgtcacttaaatttcaagtttctgttttaatagttaactgactat

SEQ ID NO: 201400 - DNA, 120 bp, Artificial Sequence
  ENSG00000114346_33 (sequence is synthesized)
agattgttttctatgccatgtatgtgccacttctgagagtagtaaatgactctttgctacattttaaaagcaattgtattagtaagaactttgtaaataaatacctaaaacccaagtgta

SEQ ID NO: 201401 - DNA, 120 bp, Artificial Sequence
  ENSG00000114346_34 (sequence is synthesized)
ggaatggcggtatttgtgagaggagtcggcgtttgaagaggtggaactcctagggcttttttgagagtgacggagtctacctcttgttacctagactggagtgcagtggcacgatctcgg

SEQ ID NO: 201402 - DNA, 76 bp, Artificial Sequence
  ENSG00000114346_35 (sequence is synthesized)
tccggcctttcaaatggtatttttgattttcctcttccagtccttaaagcagctgatttagaagaatacaaatcat

SEQ ID NO: 201403 - DNA, 120 bp, Artificial Sequence
  ENSG00000114346_36 (sequence is synthesized)
aagaagaacttataaaagccttaaagactattaaaataatggaagtccctgttataaagataaaagaaagttgtcctggaaaatcggatgaaaaattaataaaaagtgttattaatatgg

SEQ ID NO: 201404 - DNA, 120 bp, Artificial Sequence
  ENSG00000114346_37 (sequence is synthesized)
ttgcatacatctgtcattttccaaggagtgacacttaatgtttatggttattctggaaccctagattgccataatgcttttgccttgcttgtgaggccaccaacagagcaggcaaatgtg

SEQ ID NO: 201405 - DNA, 120 bp, Artificial Sequence
  ENSG00000114346_38 (sequence is synthesized)
tactggtgggcgctctcagtactcctggtttcaatctgtacgtcattctgctttccgagctagtttttcagagatactagaaggaaatactgatttttcaaatttcaaaaaagttctttc

SEQ ID NO: 201406 - DNA, 120 bp, Artificial Sequence
  ENSG00000114346_39 (sequence is synthesized)
aggtatgccggtcggatacattcttggttatataaaaatagtttatattcattgtaggtttaatttactccattttggcttttttaaattggtaaattatctttaaatatagttggtcag

SEQ ID NO: 201407 - DNA, 120 bp, Artificial Sequence
  ENSG00000114346_40 (sequence is synthesized)
actgctaaagtaattgttcttgcacctctatcccatctccatctctaggaacagaactgactttttgttttctcaaatgaaagtactatctcaacctataggataccctcatctgttaaa

SEQ ID NO: 201408 - DNA, 120 bp, Artificial Sequence
  ENSG00000114346_41 (sequence is synthesized)
gtgaaaattagattatagctttctcgaagccacctgtagcaactattgtaaacattttcatctttcaaatgaaaataaatgaattttatagaaaattttagaaaattaatttatttatgg

SEQ ID NO: 201409 - DNA, 120 bp, Artificial Sequence
  ENSG00000114346_42 (sequence is synthesized)
ttatgtcacttttaatagacagcatatgtaagaagcagctaaaataccttcaagacattaatgtcatcttctcaattgcttgtttctgttctaacagattacccattctgtttccacaag

SEQ ID NO: 201410 - DNA, 120 bp, Artificial Sequence
  ENSG00000114346_43 (sequence is synthesized)
aattccggagcgccccagctcaggcttcccggatccgggaactccctcgccgcaccccacccccagcagccgggccctgacgcggagtgggagaccgaagcccccagtattgctgggcat

SEQ ID NO: 201411 - DNA, 120 bp, Artificial Sequence
  ENSG00000114349_0 (sequence is synthesized)
agttgattgcaggtcctcctggggccagaagggtgcctgggaggccaggttctggggatcccctccatccagaagaaccacctgctcactctgtcccttcgcctgctgctgggaccatgg

SEQ ID NO: 201412 - DNA, 120 bp, Artificial Sequence
  ENSG00000114349_1 (sequence is synthesized)
gggctggggccagtgctgaggagaagcactccagggagctggaaaagaagctgaaagaggacgctgagaaggatgctcgaaccgtgaagctgctgcttctgggtgccggtgagtccggga

SEQ ID NO: 201413 - DNA, 120 bp, Artificial Sequence
  ENSG00000114349_2 (sequence is synthesized)
agagcaccatcgtcaagcagatgaagattatccaccaggacgggtactcgctggaagagtgcctcgagtttatcgccatcatctacggcaacacgttgcagtccatcctggccatcgtac

SEQ ID NO: 201414 - DNA, 120 bp, Artificial Sequence
  ENSG00000114349_3 (sequence is synthesized)
gcgccatgaccacactcaacatccagtacggagactctgcacgccaggacgacgcccggaagctgatgcacatggcagacactatcgaggagggcacgatgcccaaggagatgtcggaca

SEQ ID NO: 201415 - DNA, 120 bp, Artificial Sequence
  ENSG00000114349_4 (sequence is synthesized)
tcatccagcggctgtggaaggactccggtatccaggcctgttttgagcgcgcctcggagtaccagctcaacgactcggcgggctactacctctccgacctggagcgcctggtaaccccgg

SEQ ID NO: 201416 - DNA, 120 bp, Artificial Sequence
  ENSG00000114349_5 (sequence is synthesized)
gctacgtgcccaccgagcaggacgtgctgcgctcgcgagtcaagaccactggcatcatcgagacgcagttctccttcaaggatctcaacttccggatgttcgatgtgggcgggcagcgct

SEQ ID NO: 201417 - DNA, 120 bp, Artificial Sequence
  ENSG00000114349_6 (sequence is synthesized)
cggagcgcaagaagtggatccactgcttcgagggcgtgacctgcatcatcttcatcgcggcgctgagcgcctacgacatggtgctagtggaggacgacgaagtgaaccgcatgcacgaga

SEQ ID NO: 201418 - DNA, 120 bp, Artificial Sequence
  ENSG00000114349_7 (sequence is synthesized)
gcctgcacctgttcaacagcatctgcaaccaccgctacttcgccacgacgtccatcgtgctcttccttaacaagaaggacgtcttcttcgagaagatcaagaaggcgcacctcagcatct

SEQ ID NO: 201419 - DNA, 120 bp, Artificial Sequence
  ENSG00000114349_8 (sequence is synthesized)
gtttcccggactacgatggacccaacacctacgaggacgccggcaactacatcaaggtgcagttcctcgagctcaacatgcggcgcgacgtgaaggagatctattcccacatgacgtgcg

SEQ ID NO: 201420 - DNA, 120 bp, Artificial Sequence
  ENSG00000114349_9 (sequence is synthesized)
ccaccgacacgcagaacgtcaaatttgtcttcgacgctgtcaccgacatcatcatcaaggagaacctcaaagactgtggcctcttctgaggtgcctgaattcatgcgtgtcagtcaccct

SEQ ID NO: 201421 - DNA, 120 bp, Artificial Sequence
  ENSG00000114349_10 (sequence is synthesized)
gagacctggtagccctagctgccttgcagccccaaaccccaggaccctatcagccccctgggactccctggccccaacctgccacctcaccaaagctctgagccctgctagccttgaggc

SEQ ID NO: 201422 - DNA, 120 bp, Artificial Sequence
  ENSG00000114349_11 (sequence is synthesized)
gcggaccctcccccatacctcccacagtatcccagcgcctcatgcccccaaccccaagccctgcccttcaccgcccggctgcactggcctctaggactcacagcagccagccccagctag

SEQ ID NO: 201423 - DNA, 120 bp, Artificial Sequence
  ENSG00000114349_12 (sequence is synthesized)
gaacgggcaggacttggggcagctgaagctcacggtgactcagcagtgcccaactgaccaatctcccgcagctctcctgcccctgggggcccacgactcacctggtgggcctgggctcag

SEQ ID NO: 201424 - DNA, 120 bp, Artificial Sequence
  ENSG00000114349_13 (sequence is synthesized)
caaacagccctccctcccagtatttcatcaaggacagggaatatccctcccacacacaggccagctgctcaccctgccacctccatgtgacaagtttgacacctgtctacccagagccag

SEQ ID NO: 201425 - DNA, 120 bp, Artificial Sequence
  ENSG00000114349_14 (sequence is synthesized)
agtgagacacagcaggacccttccccaaatactaggctcagagcaacctccagccttctccagcaggatctgctccctgtgtccttggacagcagatccacacaccacttccccacccac

SEQ ID NO: 201426 - DNA, 120 bp, Artificial Sequence
  ENSG00000114349_15 (sequence is synthesized)
acacagtaccctgggctggttggacaacaggatggtgtgttaaggggttaagggagggtactgttgacaccagctatggccaatagctgggctgtcctgaggggtggctggggacagagt

SEQ ID NO: 201427 - DNA, 120 bp, Artificial Sequence
  ENSG00000114349_16 (sequence is synthesized)
ccagctcccttggatcagcccagaggattcaggataggacaaaggccctggctgtgcccaaaagggtctacctcaggtggggttacaagcaaacctgggtgaccctcttgtccctaccag

SEQ ID NO: 201428 - DNA, 120 bp, Artificial Sequence
  ENSG00000114349_17 (sequence is synthesized)
cagcttctcttgccccttccattcagggttccctggcaggggaagctgagagccatggctgaactatcagggacaaaggcccatgtccccacatccctgctccctccttcctcatccagc

SEQ ID NO: 201429 - DNA, 120 bp, Artificial Sequence
  ENSG00000114349_18 (sequence is synthesized)
accaaatctttgcttatgtccacaggccagggcctgtgctgcagtcggggacaaggagcttccgtctggcaaggccggggcacaatttgcactcccctcagctagacgcacagactcagc

SEQ ID NO: 201430 - DNA, 120 bp, Artificial Sequence
  ENSG00000114349_19 (sequence is synthesized)
aataaacctttgcatcaggctccagctgtcctttcttggtggaggacttaattatcacaagtcatgggcatttattaagtgcccagtgctgggttgggcatgaagtgggaagatggcccc

SEQ ID NO: 201431 - DNA, 120 bp, Artificial Sequence
  ENSG00000114349_20 (sequence is synthesized)
tcccaggaagaagtacctggcctgacaaggtggggcactcttgggggtatgggaccaactcatggcttttcacgggagttgaggagagaggagctgtggaaaatattcactgggacagtc

SEQ ID NO: 201432 - DNA, 120 bp, Artificial Sequence
  ENSG00000114349_21 (sequence is synthesized)
ttggatcaagagggagttttgaggtggaggctcattctggcagggaccgtagtgtctaccagccccagaaacatgggcttatggccacaggagttcagtggagcaagagcaggggaggag

SEQ ID NO: 201433 - DNA, 120 bp, Artificial Sequence
  ENSG00000114349_22 (sequence is synthesized)
agacgtggacaggtgcccaaagccagtcggagggcctgggctttctcagaaggtgatggagagtcttggaagccctcgaggcaggaacataattgcagggctgggattagggtgagggaa

SEQ ID NO: 201434 - DNA, 120 bp, Artificial Sequence
  ENSG00000114349_23 (sequence is synthesized)
gtgaggcacactcaccttgggtgcaacatttaaggcgatgccaaaaaatttagtaaccaaggtaaataatattaggataatatttttaaaaatcaaatgaatgcaaaaccccacaatgaa

SEQ ID NO: 201435 - DNA, 120 bp, Artificial Sequence
  ENSG00000114349_24 (sequence is synthesized)
tgaaatatcaaaatccaacagaggatcaaacagaggcatgctaagatatattggggcttgaagcaaagggaaaactatttgttgctatatgtttgtagggattttttgccagttttaaaa

SEQ ID NO: 201436 - DNA, 120 bp, Artificial Sequence
  ENSG00000114349_25 (sequence is synthesized)
atacatgtatcataaagtttactatctcagccacttgccggtgtatagtttggtggtgttaagtacattcataatgttgtacaaccaccgcaactgttcatctccagaactcctttcctc

SEQ ID NO: 201437 - DNA, 120 bp, Artificial Sequence
  ENSG00000114349_26 (sequence is synthesized)
ttgtaaaactgtaactctgtacccatgaaaaaataaccccccattcctgccttcccccggctcctggcatccaccattctactttccatctctatgaatgtgactgctctaagtgcctca

SEQ ID NO: 201438 - DNA, 120 bp, Artificial Sequence
  ENSG00000114349_27 (sequence is synthesized)
gatgtgtgggtccatgaagtctttgtctttttgcaactggcttatttcacttagcatcatgtcttcaaggtttattcatgtgtagcatatggcagaatctccttcctttttaaggttgaa

SEQ ID NO: 201439 - DNA, 120 bp, Artificial Sequence
  ENSG00000114349_28 (sequence is synthesized)
cagaatctccttcctttttaaggttgaataatattccattgtatatattccacactttgtttatttattcatctattgatgaatggttacatctgccttttggctattgtgaataatgct

SEQ ID NO: 201440 - DNA, 120 bp, Artificial Sequence
  ENSG00000114349_29 (sequence is synthesized)
tctgaggccagggcctgtgctgcagtcggggacaaggagcttccgtctggcaaggccggggcacaatttgcactcccctcagctagacgcacagactcagcaataaacctttgcatcagg

SEQ ID NO: 201441 - DNA, 120 bp, Artificial Sequence
  ENSG00000114349_30 (sequence is synthesized)
cctggagacacctgcaccccttcaggtgaaatgcaaggggtttacccgcctcaaataacccagtgcttgcggtaccagaggctcccacgaggtggcgatgacgctccgggatttcttcat

SEQ ID NO: 201442 - DNA, 120 bp, Artificial Sequence
  ENSG00000114349_31 (sequence is synthesized)
gttggcttcctttcttcactttcctggcatttgcaaaccttgtgacttcaggatgtcaggacttaatttggatgggggggtgccggtgagtccgggaagagcaccatcgtcaagcagatg

SEQ ID NO: 201443 - DNA, 120 bp, Artificial Sequence
  ENSG00000114349_32 (sequence is synthesized)
ttccggttcaggcccccgcggccccgcaggatgttcgatgtgggcgggcagcgctcggagcgcaagaagtggatccactgcttcgagggcgtgacctgcatcatcttcatcgcggcgctg

SEQ ID NO: 201444 - DNA, 80 bp, Artificial Sequence
  ENSG00000114353_0 (sequence is synthesized)
agtcgctcggaactgccgacccgagtgcttcccgcagagggctggtggtgggagcggagtgggtcgggcggggccgagcc

SEQ ID NO: 201445 - DNA, 120 bp, Artificial Sequence
  ENSG00000114353_1 (sequence is synthesized)
gcggacggcgggatgggctgcaccgtgagcgccgaggacaaggcggcggccgagcgctctaagatgatcgacaagaacctgcgggaggacggagagaaggcggcgcgggaggtgaagttg

SEQ ID NO: 201446 - DNA, 120 bp, Artificial Sequence
  ENSG00000114353_2 (sequence is synthesized)
ctgctgttgggtgctggggagtcagggaagagcaccatcgtcaagcagatgaagatcatccacgaggatggctactccgaggaggaatgccggcagtaccgggcggttgtctacagcaac

SEQ ID NO: 201447 - DNA, 120 bp, Artificial Sequence
  ENSG00000114353_3 (sequence is synthesized)
accatccagtccatcatggccattgtcaaagccatgggcaacctgcagatcgactttgccgacccctccagagcggacgacgccaggcagctatttgcactgtcctgcaccgccgaggag

SEQ ID NO: 201448 - DNA, 120 bp, Artificial Sequence
  ENSG00000114353_4 (sequence is synthesized)
caaggcgtgctccctgatgacctgtccggcgtcatccggaggctctgggctgaccatggtgtgcaggcctgctttggccgctcaagggaataccagctcaacgactcagctgcctactac

SEQ ID NO: 201449 - DNA, 120 bp, Artificial Sequence
  ENSG00000114353_5 (sequence is synthesized)
ctgaacgacctggagcgtattgcacagagtgactacatccccacacagcaagatgtgctacggacccgcgtaaagaccacggggatcgtggagacacacttcaccttcaaggacctacac

SEQ ID NO: 201450 - DNA, 120 bp, Artificial Sequence
  ENSG00000114353_6 (sequence is synthesized)
ttcaagatgtttgatgtgggtggtcagcggtctgagcggaagaagtggatccactgctttgagggcgtcacagccatcatcttctgcgtagccttgagcgcctatgacttggtgctagct

SEQ ID NO: 201451 - DNA, 120 bp, Artificial Sequence
  ENSG00000114353_7 (sequence is synthesized)
gaggacgaggagatgaaccgcatgcatgagagcatgaagctattcgatagcatctgcaacaacaagtggttcacagacacgtccatcatcctcttcctcaacaagaaggacctgtttgag

SEQ ID NO: 201452 - DNA, 120 bp, Artificial Sequence
  ENSG00000114353_8 (sequence is synthesized)
gagaagatcacacacagtcccctgaccatctgcttccctgagtacacaggggccaacaaatatgatgaggcagccagctacatccagagtaagtttgaggacctgaataagcgcaaagac

SEQ ID NO: 201453 - DNA, 120 bp, Artificial Sequence
  ENSG00000114353_9 (sequence is synthesized)
gtttgacgccgtcaccgatgtcatcatcaagaacaacctgaaggactgcggcctcttctgaggggcagcggggcctggcgggatgggccaccgccgactttgtaccccccaacccctgag

SEQ ID NO: 201454 - DNA, 120 bp, Artificial Sequence
  ENSG00000114353_10 (sequence is synthesized)
gaagatgggggcaagaagatcacgctccccgcctgttcccccgccgcttttctcctctttcctctctttgttctcagctccccctgtcccctcagctccagacgtaggggaggggttgcc

SEQ ID NO: 201455 - DNA, 120 bp, Artificial Sequence
  ENSG00000114353_11 (sequence is synthesized)
acaggcctccctgtttgaagcctgcccttgtctgagatgctggtaatggccatggtacccccttctgggcatctgttctggtttttaaccattgtcttgttctgtgatgaggggaggggg

SEQ ID NO: 201456 - DNA, 120 bp, Artificial Sequence
  ENSG00000114353_12 (sequence is synthesized)
gcacatgctgagtctcccaaggctgcgtctggaggggcccctgcttctccagcctggacccccagctttgcccaacaccagcccctgccccagcccaagtccaaatgtttacagggagcc

SEQ ID NO: 201457 - DNA, 120 bp, Artificial Sequence
  ENSG00000114353_13 (sequence is synthesized)
tcctgcccagtcccccaaccccagccgctcggaggccccaaaggaaaaagcacaagaagcgtgagacgccaccattcctggaaaccacagtccacctgctcattctcgtagctttttaaa

SEQ ID NO: 201458 - DNA, 120 bp, Artificial Sequence
  ENSG00000114353_14 (sequence is synthesized)
aaaatgaaagtaaaggaaaaaaaaaaaactgcaaatctagaaaactttttagagaaaaactatttaaaactgtcagatcctgaccagcaagcccccccccagccccccttccaagtgact

SEQ ID NO: 201459 - DNA, 120 bp, Artificial Sequence
  ENSG00000114353_15 (sequence is synthesized)
ccgtgccttgagtgtgtctgcgtgtttacacccgtccctctgctggccgcccccgtgcgagcggcacccctgccctgccctccacagaattgggttccaagggctgttccagacaactgc

SEQ ID NO: 201460 - DNA, 120 bp, Artificial Sequence
  ENSG00000114353_16 (sequence is synthesized)
caacgtcactgagggccctgccccagcggccctggccccaggctctattaacctaaaatgtagctccctagcgctaacctaggaaccgccgctgcctgctggggggccacgcccctcatg

SEQ ID NO: 201461 - DNA, 120 bp, Artificial Sequence
  ENSG00000114353_17 (sequence is synthesized)
cccttgtcccaggcccggggccttcagcgttgaacacttccttgcttttttcacatgttttatggaattgttcacctggtttgaaataataaaatgtagaaagaaaaaaaataccgagaa

SEQ ID NO: 201462 - DNA, 120 bp, Artificial Sequence
  ENSG00000114353_18 (sequence is synthesized)
gcggtgctgggcctggtgggcatggggtcaagtcatgcctcctctggtgctcgtgaggccctggctaggcagctgccctctgcccccaaaatgaactctcctgaaaggactcctggattc

SEQ ID NO: 201463 - DNA, 120 bp, Artificial Sequence
  ENSG00000114353_19 (sequence is synthesized)
agagtgctgggatgacaggcgtgagcctctgagagcaaattttacccagttcctctctatcctcccgatgactctgaaatcaaactcagcaagtcatccgagcccccacggcgcagcggc

SEQ ID NO: 201464 - DNA, 120 bp, Artificial Sequence
  ENSG00000114353_20 (sequence is synthesized)
cccacggcgcagcggccctaggctggcatgggcgatgcggagctactccgccctcaggaagcaggcgaggtgcccagcgggagaatcacccacatcaccgtctaatctctgctgtgaagt

SEQ ID NO: 201465 - DNA, 120 bp, Artificial Sequence
  ENSG00000114353_21 (sequence is synthesized)
ggaagcgcgagaaggagggagcgtctcatgacggagggtgtgaagacgctaggctggacgaagcagaaaggcgggtgtcactggggacgttctgagggcccctggttgctaaggctcagt

SEQ ID NO: 201466 - DNA, 120 bp, Artificial Sequence
  ENSG00000114353_22 (sequence is synthesized)
cctcaccacctagtgaaccagcagtcaggatccacgccacctctgccagctgctcacagcctctgctgctcctgcctgatgtggctgcagcctgcctgctgtccaagctcctggcccaga

SEQ ID NO: 201467 - DNA, 120 bp, Artificial Sequence
  ENSG00000114353_23 (sequence is synthesized)
accaggggtgaagtgggcaagtgtggatgattccagaaggtagctgccctactctgggcaggcctctgtcctcagtcagccaacctgagaaatggggtagaaagcctcccccaggctccc

SEQ ID NO: 201468 - DNA, 120 bp, Artificial Sequence
  ENSG00000114353_24 (sequence is synthesized)
cagtatgggcgtgtgtgggtgtgggtgtgtgagatacgccgcaggtctcccagattcatgagtcagtacgcgtgtgtgttacactgtaggtctcctagattctagccttctagcctccat

SEQ ID NO: 201469 - DNA, 120 bp, Artificial Sequence
  ENSG00000114353_25 (sequence is synthesized)
ctgctcagggcagacctgagcgcagtgagcagagggcggggcattgggccatgtccagaaagctgaagtgtgacgctgtgctcctgcttaggcccctggttgctaaggctcagtgtgggg

SEQ ID NO: 201470 - DNA, 120 bp, Artificial Sequence
  ENSG00000114353_26 (sequence is synthesized)
agaagaagggctgctaccctgttggatggagtatgcagggcatcttcctgccagctctgcccagggcaccatattggcatgcaccagctgcacaggttggcgagcctatgtatgtgagaa

SEQ ID NO: 201471 - DNA, 120 bp, Artificial Sequence
  ENSG00000114353_27 (sequence is synthesized)
cagggtggctccttcatggctggccaagtctccagccaagaccccccaggacagtggggagccatggtgggcagcagagcttgtgggaggcaaaggcctgcagagagtctgccatggggc

SEQ ID NO: 201472 - DNA, 120 bp, Artificial Sequence
  ENSG00000114353_28 (sequence is synthesized)
acaggtgctctaggttaccttgaccactgtggccctgccagctgcattcctggtagctcaactgcccaccaggcccagctgcctccatctcacggtgcagctggtgggaaggttagttct

SEQ ID NO: 201473 - DNA, 120 bp, Artificial Sequence
  ENSG00000114353_29 (sequence is synthesized)
gcctcctgggctacaggtgtctgggcatttgttctgtgcctgtggagcccctctgggcctgccccctgaccacctgtgccctctgttccaggtgctggggagtcagggaagagcaccatc

SEQ ID NO: 201474 - DNA, 120 bp, Artificial Sequence
  ENSG00000114353_30 (sequence is synthesized)
gtcaagcagatgaagtaagtgctgtattccagaggcagtgctcaaactccagcttcccctcttcaccctctgggcctgcactgcccccgactacaggcccagccagtcttagccaggccc

SEQ ID NO: 201475 - DNA, 120 bp, Artificial Sequence
  ENSG00000114353_31 (sequence is synthesized)
agaatcttctgagaagcagaaggaccctcaggtcccagtgggtcaggggcagttttcccttctctgaagcaggtcccagtagccccaggcagccgtgggaactcccagtgcccaggggac

SEQ ID NO: 201476 - DNA, 120 bp, Artificial Sequence
  ENSG00000114353_32 (sequence is synthesized)
ctgaggggcagcggggcctggcgggatggtgagccagaggggctgtggcagggtgctggggaagaactaagcgggcctggagccccagcagggggttctgggggtgggtaggggggtgaa

SEQ ID NO: 201477 - DNA, 120 bp, Artificial Sequence
  ENSG00000114353_33 (sequence is synthesized)
cctggagggggaggggcaataggtgaccaggggacaagggaggagaaggcccagggtgtgaatcaggaggtcaagtgagtgaggtgcagggcatggaggaggtcatacaagcaggcctgg

SEQ ID NO: 201478 - DNA, 120 bp, Artificial Sequence
  ENSG00000114353_34 (sequence is synthesized)
cccagtggtccagacagaagggcctggccttgccctgggacagaaccagaggccatcctgatgttccctggagaaatctcacctcctcacccaccaggccattggcccagcctgccggaa

SEQ ID NO: 201479 - DNA, 120 bp, Artificial Sequence
  ENSG00000114353_35 (sequence is synthesized)
gctgcatgccagcggagcccagccctgctgcccactaccaccagctccatgtgcacctccagctcttgccctctgacttgtctgagcgtcccgggcttaggctggccccactggccctgg

SEQ ID NO: 201480 - DNA, 120 bp, Artificial Sequence
  ENSG00000114353_36 (sequence is synthesized)
agctgactcagctgcaaagcaagggattggagtccaggatggctgcctgccgaagaatgcctcccggtagattggggaaggatggatatgagaagccacccagctaaaggagacagccta

SEQ ID NO: 201481 - DNA, 120 bp, Artificial Sequence
  ENSG00000114353_37 (sequence is synthesized)
attaaattaaattccaggaagcagtgctaatgacagccctaacgagtcacgggagaggctaccagccccagcctttggaaagcatggcaaggaggactaggcaataacatgaacaaagca

SEQ ID NO: 201482 - DNA, 120 bp, Artificial Sequence
  ENSG00000114353_38 (sequence is synthesized)
gtagctcctgggaatagaattgattatcatttcccaggccccccaaggaccctgggcttcccaggggaggtggcctttggagactgcctatgcaacaggcacagtggcaggttgtaccat

SEQ ID NO: 201483 - DNA, 120 bp, Artificial Sequence
  ENSG00000114353_39 (sequence is synthesized)
gaactcttcaaggacaaagaaaaggagggaggttaagtttaggccttggccccaaagccctgagagctcctgagttccctgcagggcttgggtagctcctccccagtcatacaggaacac

SEQ ID NO: 201484 - DNA, 120 bp, Artificial Sequence
  ENSG00000114353_40 (sequence is synthesized)
cctgaatgccagaaccagttgggtttgtagggctaggtgtggatcactggcttggagatgttggtgcccctacctcagcatcccctggagactttggaaccccctgtgtggcttgttcct

SEQ ID NO: 201485 - DNA, 120 bp, Artificial Sequence
  ENSG00000114353_41 (sequence is synthesized)
ccatgatgcctcatggcagtcccctctcacaccagtcttctcttgctctcgctattctggcccggctggactcctctctggtttgggagcatccagctccttcccaacccagggcccttg

SEQ ID NO: 201486 - DNA, 120 bp, Artificial Sequence
  ENSG00000114353_42 (sequence is synthesized)
cacttgctgctgcctctgtcgtcactctcttctggcttgttacaagactggtccttccacatgattcaaagatcccctcctcagactatcttctcctgcacatacctcccagtggctcta

SEQ ID NO: 201487 - DNA, 120 bp, Artificial Sequence
  ENSG00000114353_43 (sequence is synthesized)
gtgtcaccctgttgatttcctctgaaatggtgaagttcatttccctgtttgtttggtgtgtgttcctcaaggacagggcccagctgcctcttttaccatagggttctcagcacattggca

SEQ ID NO: 201488 - DNA, 120 bp, Artificial Sequence
  ENSG00000114353_44 (sequence is synthesized)
ggcaatatgttcagggaacagtggttgaacagatgaccccttcctctggatcctcccgcactgccccccagccgccacccctgtgtcaggttgggcccccttgcctaatccagaagctta

SEQ ID NO: 201489 - DNA, 120 bp, Artificial Sequence
  ENSG00000114353_45 (sequence is synthesized)
tggggaaggggtgctggggcctgaattctccaggtcaaagccaatgatctgtgaagagggtggatgaccagaaagggggactttgggatccaggacccccaggcttttgagttttcctcc

SEQ ID NO: 201490 - DNA, 120 bp, Artificial Sequence
  ENSG00000114353_46 (sequence is synthesized)
tggacgaagagaggcctgggaagaggggtctgcaagggagcagggagggagggcaggatggctgactccagtttcagaacttccactgggctaagaagcaggaaggggaaagcgcaggag

SEQ ID NO: 201491 - DNA, 120 bp, Artificial Sequence
  ENSG00000114353_47 (sequence is synthesized)
ttgaaccaggaagtagaacctgccccagggcagtaaggcgggagcaagctgtagccacgaggtctacaagcagtagctgcaaggctgtgattgagttggtcacaggtccttggccaggga

SEQ ID NO: 201492 - DNA, 120 bp, Artificial Sequence
  ENSG00000114353_48 (sequence is synthesized)
ctccctgtcatctgggagccgtggaggtagggtggtcaggatcctgaactctgggcatccctgtggggtcctacctagtcctggactctgggcagggacaggcacacccaccccgaaact

SEQ ID NO: 201493 - DNA, 120 bp, Artificial Sequence
  ENSG00000114353_49 (sequence is synthesized)
gcctttggggaagtgctagcagcttccccttcctagagcctgcaggcaagcatgtcacagcccactgagagggtcttcattcctcaacctgctcagggctactgctcgataggaactcag

SEQ ID NO: 201494 - DNA, 120 bp, Artificial Sequence
  ENSG00000114353_50 (sequence is synthesized)
gccaagctggacctgctgtgctgcctgtggtgagccccaagactattctggcagtaggggtgaaccagcagctgccacttctccattccagctgaggggccaccctcaactctgctgatg

SEQ ID NO: 201495 - DNA, 120 bp, Artificial Sequence
  ENSG00000114353_51 (sequence is synthesized)
tgtgagtgcggcagcggcagtgagtgggtgtcgacgcggcggaatgcccgtcgctgctgctgctgctgcccgacgggcctggggagggcacttccggtaccgctgcctcccagtgcccag

SEQ ID NO: 201496 - DNA, 120 bp, Artificial Sequence
  ENSG00000114353_52 (sequence is synthesized)
ccaggagtctctagacagcctctccccaggcgattgcagttactgtggtggccgaggaaatgcaagactggaccatagagctgggggaacgcagggcttctggctagttttgtgtcccga

SEQ ID NO: 201497 - DNA, 120 bp, Artificial Sequence
  ENSG00000114353_53 (sequence is synthesized)
agtagctctgactcctgtcccaggttatgctgagtcccagcagggaaccaccacagctctgaatcagcctgttagccgctgtccattgctcttcatctgctctttatctgaaaatcttca

SEQ ID NO: 201498 - DNA, 120 bp, Artificial Sequence
  ENSG00000114353_54 (sequence is synthesized)
acacgttgcccagccgtgtggctgggatggtcggtacccatggccgtgcggtcgagccttgatgctccaggacagtcctggaaggcttcctggcagatccgtgggaagaaagccgacaga

SEQ ID NO: 201499 - DNA, 120 bp, Artificial Sequence
  ENSG00000114353_55 (sequence is synthesized)
agggcgggaggcgggaggggaaaggtcccccgggatgggtagggcctcaacgctgggcatcggcgcaggtgtgtactgcagggagccagccagaccccccacggactgcctgaccttggg

SEQ ID NO: 201500 - DNA, 120 bp, Artificial Sequence
  ENSG00000114353_56 (sequence is synthesized)
cctgaccttgggggaagcccggagtagaggaagaggccggacccccagacccgccattgactatgtccgccattgactatgtgttctgagagaaatttttttttttttttttgagactga

SEQ ID NO: 201501 - DNA, 120 bp, Artificial Sequence
  ENSG00000114354_0 (sequence is synthesized)
gttcttcccccacctgccacgtacagagcccaagttctcgctaggcttgttgggtcagcgcgattggccggggcccgcgcgagcctgcgagcgaggtgcggcggtcgcgaagggcaaccg

SEQ ID NO: 201502 - DNA, 120 bp, Artificial Sequence
  ENSG00000114354_1 (sequence is synthesized)
agggggccgtgaccaccgcctccccgcgacgccccagtccagtggcctcgcgtccgcccattcagcggagacctgcggagaggcggcggccgcggcctccgcaagccgtctttctctaga

SEQ ID NO: 201503 - DNA, 120 bp, Artificial Sequence
  ENSG00000114354_2 (sequence is synthesized)
gttgtatatatagaacatcctggagtccaccatgaacggacagttggatctaagtgggaagctaatcatcaaagctcaacttggggaggatattcggcgaattcctattcataatgaaga

SEQ ID NO: 201504 - DNA, 120 bp, Artificial Sequence
  ENSG00000114354_3 (sequence is synthesized)
tattacttatgatgaattagtgctaatgatgcaacgagttttcagaggaaaacttctgagtaatgatgaagtaacaataaagtataaagatgaagatggagatcttataacaatttttga

SEQ ID NO: 201505 - DNA, 120 bp, Artificial Sequence
  ENSG00000114354_4 (sequence is synthesized)
tagttctgacctttcctttgcaattcagtgcagtaggatactgaaactgacattatttgttaatggccagccaagaccccttgaatcaagtcaggtgaaatatctccgtcgagaactgat

SEQ ID NO: 201506 - DNA, 120 bp, Artificial Sequence
  ENSG00000114354_5 (sequence is synthesized)
agaacttcgaaataaagtgaatcgtttattggatagcttggaaccacctggagaaccaggaccttccaccaatattcctgaaaatgatactgtggatggtagggaagaaaagtctgcttc

SEQ ID NO: 201507 - DNA, 120 bp, Artificial Sequence
  ENSG00000114354_6 (sequence is synthesized)
tgattcttctggaaaacagtctactcaggttatggcagcaagtatgtctgcttttgatcctttaaaaaaccaagatgaaatcaataaaaatgttatgtcagcgtttggcttaacagatga

SEQ ID NO: 201508 - DNA, 120 bp, Artificial Sequence
  ENSG00000114354_7 (sequence is synthesized)
agccaccatatacaggagctcagactcaagcaggtcagattgaaggtcagatgtaccaacagtaccagcaacaggccggctatggtgcacagcagccgcaggctccacctcagcagcctc

SEQ ID NO: 201509 - DNA, 120 bp, Artificial Sequence
  ENSG00000114354_8 (sequence is synthesized)
aacagtatggtattcagtattcagcaagctatagtcagcagactggacctcaacaacctcagcagttccagggatatggccagcaaccaacttcccaggcaccagctcctgccttttctg

SEQ ID NO: 201510 - DNA, 120 bp, Artificial Sequence
  ENSG00000114354_9 (sequence is synthesized)
gtcagcctcaacaactgcctgctcagccgccacagcagtaccaggcgagcaattatcctgcacaaacttacactgcccaaacttctcagcctactaattatactgtggctcctgcctctc

SEQ ID NO: 201511 - DNA, 120 bp, Artificial Sequence
  ENSG00000114354_10 (sequence is synthesized)
aacctggaatggctccaagccaacctggggcctatcaaccaagaccaggttttacttcacttcctggaagtaccatgacccctcctccaagtgggcctaatccttatgcgcgtaaccgtc

SEQ ID NO: 201512 - DNA, 120 bp, Artificial Sequence
  ENSG00000114354_11 (sequence is synthesized)
ctccctttggtcagggctatacccaacctggacctggttatcgataaggaggctcctctacaccaattaatgtagctgctagctattggcctcccaaaagactccagtactattttaatt

SEQ ID NO: 201513 - DNA, 120 bp, Artificial Sequence
  ENSG00000114354_12 (sequence is synthesized)
tgtattgaagaagttcagaaatttaaaagcagagcattttttatgatatcattgttggtgttaattgaaagtataatttgctggaacacaaagaccaaaatgaaagttttttcctccctg

SEQ ID NO: 201514 - DNA, 120 bp, Artificial Sequence
  ENSG00000114354_13 (sequence is synthesized)
cttaaaaatgtagcagcttcttagttactttggaacactactcttacatgtataaagtgattgacttgactttctagcttcccttgtccggaggatattaaaatgctagggtgaggttta

SEQ ID NO: 201515 - DNA, 120 bp, Artificial Sequence
  ENSG00000114354_14 (sequence is synthesized)
gccatcttacttggctttttactattaacatgatgtactaaagtagagccctttgagaatacaagatattatgtataaaatgtaacactgatgataggttaataaagatgattgaatcca

SEQ ID NO: 201516 - DNA, 120 bp, Artificial Sequence
  ENSG00000114354_15 (sequence is synthesized)
aacccctggctgcggtggccaggaggcgcgcctggggggctccgggaggggagtgcgccagctaatgccttggtgcagcctgcctccaagcgtttggattgagaggagaggggctttggg

SEQ ID NO: 201517 - DNA, 120 bp, Artificial Sequence
  ENSG00000114354_16 (sequence is synthesized)
aggtttggggcggccggcgcccaatacccgaaggagctcggaagggtgtggagtggcgcctacgggaataagttgattggggtcatagaatcggagcctagttccttggctaagtcagcg

SEQ ID NO: 201518 - DNA, 120 bp, Artificial Sequence
  ENSG00000114354_17 (sequence is synthesized)
ttcctaaatcccgtcatccagtgagaaagcagggactcttcggcctaggcagccgggacccagccagccctgcgcctcgcgccgtcgcgcatgcgtcctgggtatgtccacgcgcaataa

SEQ ID NO: 201519 - DNA, 120 bp, Artificial Sequence
  ENSG00000114354_18 (sequence is synthesized)
aaatctatcccatcagctcagtagcaaagtggggaccaaccctgacaggttgctattccattgcagggtgcattgcaaccacacacacacccatagtcgttcagactgagatcatttaga

SEQ ID NO: 201520 - DNA, 120 bp, Artificial Sequence
  ENSG00000114354_19 (sequence is synthesized)
catgctaagtaacctaacatacacatctttgggatgtgggaggaaattgaagtgcccagagaaaacccacacagacttggggagaatgtgcagactctacacagaacagtaaccccaact

SEQ ID NO: 201521 - DNA, 120 bp, Artificial Sequence
  ENSG00000114354_20 (sequence is synthesized)
gggaataatttttttttccttctcagtgttttaacgaaacaatgtcgaacaaaagatgttatttgaggatctgctgtgtaaaaggaatcttgtgtagagatataataaacctctgaaatt

SEQ ID NO: 201522 - DNA, 120 bp, Artificial Sequence
  ENSG00000114354_21 (sequence is synthesized)
tttaactctagggatgtttttcaaaatcaatttatagcagtttatgaaaacatgcaaaaaaaaaaagctttatgaagagttgtaccctataaatttttattgaggggaataactgtggtt

SEQ ID NO: 201523 - DNA, 120 bp, Artificial Sequence
  ENSG00000114354_22 (sequence is synthesized)
ttgaccaggagttccttactcattgatgaccacagtctactactacgtggaaccttaatctcagccttttttgatgatgcccaagttaatatttatattgttttgttcatgggataatat

SEQ ID NO: 201524 - DNA, 120 bp, Artificial Sequence
  ENSG00000114354_23 (sequence is synthesized)
atgcaaaatgactttataaactaaagctttggagttatgcctgagttccagtgatggttcttagctcttcatggttctgttcttagctattgactgcaggtaagttgcttaatttttctg

SEQ ID NO: 201525 - DNA, 120 bp, Artificial Sequence
  ENSG00000114354_24 (sequence is synthesized)
tatctgagataaggaatactaatatggttgaatttttttaaatgtgtttattgcctgtttgcttatttttttattgtggagttaagccttctaattttcaagaattaagagttcattgtt

SEQ ID NO: 201526 - DNA, 120 bp, Artificial Sequence
  ENSG00000114354_25 (sequence is synthesized)
atgtgctatacgtatttattccccttgattatatttctgtacctacttacctttttattttagattctggtcacttctattccgaaagttagttatgaagtacaatccaggattaaggtg

SEQ ID NO: 201527 - DNA, 120 bp, Artificial Sequence
  ENSG00000114354_26 (sequence is synthesized)
gcatctaaatttggttaatttctgtgctaccttttatgctattagtctaaatcattaagaaagcatttaagaaacttttgtaagcgtttctttttttttcttgtcatatttgggaatagg

SEQ ID NO: 201528 - DNA, 120 bp, Artificial Sequence
  ENSG00000114354_27 (sequence is synthesized)
ataaatagcttaaaatagttgagctgatttttatttgtattctttttttattataaagaaacatttgctaggaaataagctggatataaacatagttgtatctcctttagtgctacccag

SEQ ID NO: 201529 - DNA, 120 bp, Artificial Sequence
  ENSG00000114354_28 (sequence is synthesized)
cactaaaaacttagacacgtatagggctgagcagctggtataatagagtgggctccgtctcattttctaagcctgtgagtcctagctgcctactgcagctcgatttgagtgggagttgat

SEQ ID NO: 201530 - DNA, 120 bp, Artificial Sequence
  ENSG00000114354_29 (sequence is synthesized)
ataatgtctttttttttttctcacttcagcagtaagtatctggtttgctcatagtcttttgattaataggtagtttgaatatttttcaaagaatcagccaacatgtgattattttaaaga

SEQ ID NO: 201531 - DNA, 120 bp, Artificial Sequence
  ENSG00000114354_30 (sequence is synthesized)
tttaaataccagatagatattaaaatgcaaggttattgctactagatattacatctagctaaatcaaccattgtgaaataattgagaagtagagataataaagacataaaccaataaatc

SEQ ID NO: 201532 - DNA, 120 bp, Artificial Sequence
  ENSG00000114354_31 (sequence is synthesized)
ttgtgaggacagaaaaataaaaagtaaaaagaaaaatcataggtaataagtgtctaaagggtttcttcataggaacagtggttgttgaccccaaataggacaaataggactcccatgttc

SEQ ID NO: 201533 - DNA, 120 bp, Artificial Sequence
  ENSG00000114354_32 (sequence is synthesized)
aagaacacatcaccgttgttaaaaaggtctgccattattaaatagtgcaatgaagaaccatttagactttattagagtccacgttattggcaaaagatgttggatattcatagaaaatca

SEQ ID NO: 201534 - DNA, 120 bp, Artificial Sequence
  ENSG00000114354_33 (sequence is synthesized)
aacttgacaaattccaaaagtgtctttcagctctggaacaaaagatgtcatatagttccttgctaccaaagagtttgttcatatggtaatagaggcccatacctttagagggcaaataca

SEQ ID NO: 201535 - DNA, 120 bp, Artificial Sequence
  ENSG00000114354_34 (sequence is synthesized)
gtgctttaggaaggacttagatgatataaatggtatttgtcccttttctcatttttatttactgattttcaactcacttggcttttaatgaacattagcgttacttatctgttggcagct

SEQ ID NO: 201536 - DNA, 120 bp, Artificial Sequence
  ENSG00000114354_35 (sequence is synthesized)
gggttggaaaacatttgtttttctagactttatgaaatggtagccactggtgttgcacttaatgtttattgccagttagttctctgcagttaatccacagcagaggaatcacacttctaa

SEQ ID NO: 201537 - DNA, 120 bp, Artificial Sequence
  ENSG00000114354_36 (sequence is synthesized)
aatggttcattctcttcttcatagacatttaaagttgaacaaatactttcttgtatattgttactctgtttggatggagagggaatgtatatgtatcttaaaaatatttctctttgccac

SEQ ID NO: 201538 - DNA, 120 bp, Artificial Sequence
  ENSG00000114354_37 (sequence is synthesized)
ccgcaagccgatgactgcaagagcaaacgacagctttaggaaagaagcactggttcctggccacaagatgtttacagtcaataggaaacacaaaaagtgaatttgcagtctttctctaga

SEQ ID NO: 201539 - DNA, 120 bp, Artificial Sequence
  ENSG00000114354_38 (sequence is synthesized)
gagggggccgtgaccaccgcctccccgcgacgccccagtccagtggcctcgcgtccgcccattcagcggagacctgcggagaggcggcggccgcggcctccgcaagccggtatggccact

SEQ ID NO: 201540 - DNA, 120 bp, Artificial Sequence
  ENSG00000114374_0 (sequence is synthesized)
tgaataattgaactttgtttatttctccatatttttgcagtggtaattccattataaaacctaatgaaacaatgtttttatagatggtgtggaaagacttttctgggctcagaggtgaaa

SEQ ID NO: 201541 - DNA, 120 bp, Artificial Sequence
  ENSG00000114374_1 (sequence is synthesized)
ctgacccttgtgtatcagcagcatttctgactgactgagagagtgtagtgattaacagagttgtgatgttagttaagaaacttagatttgccattgtagcttttctaccaattagcagat

SEQ ID NO: 201542 - DNA, 120 bp, Artificial Sequence
  ENSG00000114374_2 (sequence is synthesized)
tgtttaactcactgaaattgtaaagtggtagacgtggacttagtcattactgggcagcttatgaattgtattcatttactcatgatgtaaaaatggttagtctccacttttaaggctcta

SEQ ID NO: 201543 - DNA, 120 bp, Artificial Sequence
  ENSG00000114374_3 (sequence is synthesized)
gttctagtggctaaataggtacttatttatacagtatgataactgctgtattaaaatacatgtctcaaatgtggaatagtagaagaggtgaagaaaatcatagtttgaggtagaatactg

SEQ ID NO: 201544 - DNA, 120 bp, Artificial Sequence
  ENSG00000114374_4 (sequence is synthesized)
tttgctggtcttaaaaactgtggtattttggtgattccataaattaggtcagatacttccactggagggaaacagtttaaaggatatatgtgatactattaatagaatgaggaagacaca

SEQ ID NO: 201545 - DNA, 120 bp, Artificial Sequence
  ENSG00000114374_5 (sequence is synthesized)
ccagatatttaggagggaattagcgagcttgaaactaagagctggtttgaatgagactgggtcataagtgatttcaagtaccagattaaggcactgagattttatttttaagcactgaag

SEQ ID NO: 201546 - DNA, 120 bp, Artificial Sequence
  ENSG00000114374_6 (sequence is synthesized)
tcagattttttccttttaaaagaaaggattcatgatgaaatctgctttttgttttgcagagagcttggagataattctggtggctgtgtggagtatgtgttggaggtattaaattttcac

SEQ ID NO: 201547 - DNA, 120 bp, Artificial Sequence
  ENSG00000114374_7 (sequence is synthesized)
agtatatataaggcagcaattgataggcctttcacagattcttctgataactacataaagagacaaaaaaaagaaaaaagagcaaagatctgtgctgtgtcaagtatgacagccatcact

SEQ ID NO: 201548 - DNA, 120 bp, Artificial Sequence
  ENSG00000114374_8 (sequence is synthesized)
catggctctccagtaggagggaacgacagccagggccaggttcttgatggccagtctcagcatctcttccaacagaaccagacttcatcacctgattcttccaatgagaattccgtagca

SEQ ID NO: 201549 - DNA, 120 bp, Artificial Sequence
  ENSG00000114374_9 (sequence is synthesized)
actcctcctccagaggaacaagggcaaggtgatgccccaccacagcatgaagatgaagagcctgcatttccacatactgagctggcaaacctggatgacatgatcaacaggcctcgatgg

SEQ ID NO: 201550 - DNA, 120 bp, Artificial Sequence
  ENSG00000114374_10 (sequence is synthesized)
gtggttcctgttttgccaaaaggggaattagaagtgcttttagaagctgctattgatcttagtgtaaaaggccttgatgttaaaagtgaagcatgccaacgtttttttcgagatggacta

SEQ ID NO: 201551 - DNA, 120 bp, Artificial Sequence
  ENSG00000114374_11 (sequence is synthesized)
acaatatctttcactaaaattcttatggatgaggctgtgagtggctggaagtttgaaattcatagatgtattattaacaatactcatcgcctagtggagctttgtgtggccaagttgtcc

SEQ ID NO: 201552 - DNA, 120 bp, Artificial Sequence
  ENSG00000114374_12 (sequence is synthesized)
caagattggtttccacttctagaacttctcgccatggccttaaatcctcactgcaagtttcatatctacaatggtacacgtccgtgtgaattaatttcctcaaatgctcagttgcctgaa

SEQ ID NO: 201553 - DNA, 120 bp, Artificial Sequence
  ENSG00000114374_13 (sequence is synthesized)
gatgaattatttgctcgttcttcagatcctcgatcaccaaaaggttggctagtggatctcatcaataaatttggcacattaaatgggttccagattttgcatgatcgtttttttaatgga

SEQ ID NO: 201554 - DNA, 120 bp, Artificial Sequence
  ENSG00000114374_14 (sequence is synthesized)
tcagcattaaatattcaaataattgcagctcttattaaaccatttggacaatgctatgagtttctcagtcaacatacactgaaaaagtacttcattccagttatagaaatagttccacat

SEQ ID NO: 201555 - DNA, 120 bp, Artificial Sequence
  ENSG00000114374_15 (sequence is synthesized)
ttattggaaaacttaactgatgaagaactgaaaaaggaggcaaagaatgaagccaaaaatgatgccctttcaatgattattaaatctttgaagaacttagcttcaagaatttcaggacaa

SEQ ID NO: 201556 - DNA, 120 bp, Artificial Sequence
  ENSG00000114374_16 (sequence is synthesized)
gatgagactataaaaaatttggaaatttttaggttaaagatgatactcagattgttgcaaatttcctcttttaatggaaagatgaatgcactgaatgaaataaataaggttatatctagt

SEQ ID NO: 201557 - DNA, 120 bp, Artificial Sequence
  ENSG00000114374_17 (sequence is synthesized)
gtatcatattatactcatcggcatagtaatcctgaggaggaagaatggctgacagctgagcgaatggcagaatggatacagcaaaataatatcttatccatagtcttgcaagacagtctt

SEQ ID NO: 201558 - DNA, 120 bp, Artificial Sequence
  ENSG00000114374_18 (sequence is synthesized)
catcaaccacaatatgtagaaaagctagagaaaattcttcgttttgtgattaaagaaaaggctcttacattacaggaccttgataatatctgggcagcacaggcaggaaaacatgaagcc

SEQ ID NO: 201559 - DNA, 120 bp, Artificial Sequence
  ENSG00000114374_19 (sequence is synthesized)
attgtgaagaatgtacatgatctgctagcaaagttggcttgggatttttctcctggacaacttgatcatctttttgattgctttaaggcaagttggacaaatgcaagtaaaaagcaacgt

SEQ ID NO: 201560 - DNA, 120 bp, Artificial Sequence
  ENSG00000114374_20 (sequence is synthesized)
gaaaagctccttgagttgatacgccgtcttgcagaagatgataaagatggtgtgatggcacacaaagtgttgaaccttctttggaacctggctcagagtgatgatgtgcctgtagacatc

SEQ ID NO: 201561 - DNA, 120 bp, Artificial Sequence
  ENSG00000114374_21 (sequence is synthesized)
atggaccttgctcttagtgcccacataaaaatactagattatagttgttcccaggatcgagatgcacagaagatccagtggatagatcactttatagaagaacttcgcacaaatgacaag

SEQ ID NO: 201562 - DNA, 120 bp, Artificial Sequence
  ENSG00000114374_22 (sequence is synthesized)
tgggtaattcctgctctgaaacaaataagagaaatttgtagtttgtttggtgaagcatctcaaaatttgagtcaaactcagcgaagtccccacatattttatcgccatgatttaatcaac

SEQ ID NO: 201563 - DNA, 120 bp, Artificial Sequence
  ENSG00000114374_23 (sequence is synthesized)
cagcttcaacaaaatcatgctttagttactttggtagcagaaaaccttgcaacctacatgaatagcatcagattgtatgctggagatcatgaagactatgatccacaaacagtgaggctt

SEQ ID NO: 201564 - DNA, 120 bp, Artificial Sequence
  ENSG00000114374_24 (sequence is synthesized)
ggaagtcgatacagtcatgttcaagaagttcaagaacgactaaacttccttagatttttactgaaggatggccaactgtggctctgtgctcctcaggcaaaacaaatatggaagtgctta

SEQ ID NO: 201565 - DNA, 120 bp, Artificial Sequence
  ENSG00000114374_25 (sequence is synthesized)
gcagaaaatgcagtttatctttgtgatcgtgaagcctgttttaagtggtattccaagttaatgggggatgaaccagacttggatcctgatattaataaggacttctttgaaagtaatgta

SEQ ID NO: 201566 - DNA, 120 bp, Artificial Sequence
  ENSG00000114374_26 (sequence is synthesized)
cttcagcttgatccttcccttttaactgaaaatggaatgaaatgctttgaaagatttttcaaagctgtcaattgtcgagaaaggaaactaatagcaaaaagaagatcctatatgatggat

SEQ ID NO: 201567 - DNA, 120 bp, Artificial Sequence
  ENSG00000114374_27 (sequence is synthesized)
gatttggaattaattggactagactacctttggagggttgtgattcagagtagtgacgagattgctaacagagctatagatcttcttaaagagatatacacaaaccttggcccaagatta

SEQ ID NO: 201568 - DNA, 120 bp, Artificial Sequence
  ENSG00000114374_28 (sequence is synthesized)
aaagccaatcaggtggttatccatgaagacttcattcagtcttgctttgatcgtttaaaagcatcatatgatacactgtgtgtttttgatggtgacaaaaacagcattaattgtgcaaga

SEQ ID NO: 201569 - DNA, 120 bp, Artificial Sequence
  ENSG00000114374_29 (sequence is synthesized)
caagaagccattcgaatggttagagtattaactgttataaaagagtacattaatgaatgtgacagtgattatcacaaggaaagaatgattctacctatgtcgagagcatttcgtggcaaa

SEQ ID NO: 201570 - DNA, 120 bp, Artificial Sequence
  ENSG00000114374_30 (sequence is synthesized)
cacctctctcttatagttcggtttccaaaccagggcagacaggttgatgagttggatatatggtctcatacgaatgacacaattggttcagtacggcgatgtattgttaatcgtattaaa

SEQ ID NO: 201571 - DNA, 120 bp, Artificial Sequence
  ENSG00000114374_31 (sequence is synthesized)
gccaatgtagcccacaaaaaaattgaactttttgtgggtggtgagctgatagattctgaagatgacagaaagctaattggacaattaaacttaaaagataaatctctaattacagccaaa

SEQ ID NO: 201572 - DNA, 120 bp, Artificial Sequence
  ENSG00000114374_32 (sequence is synthesized)
cttacacaaataaatttcaatatgccatcaagtcctgatagctcttccgattcctcaactgcatctcctggaaaccaccgtaatcattacaatgatggtcccaatctagaggtggaaagt

SEQ ID NO: 201573 - DNA, 120 bp, Artificial Sequence
  ENSG00000114374_33 (sequence is synthesized)
tgtttgcctggggtgataatgtcagtgcatcccagatacatctctttcctttggcaagttgcagacttaggtagcaacctgaatatgccacctcttagagatggagcaagagtacttatg

SEQ ID NO: 201574 - DNA, 120 bp, Artificial Sequence
  ENSG00000114374_34 (sequence is synthesized)
aaacttatgccaccagatagaacagctgtagaaaaattacgagctgtttgtttggaccatgcaaaacttggagaaggcaaacttagtccaccccttgactctcttttctttggtccttct

SEQ ID NO: 201575 - DNA, 120 bp, Artificial Sequence
  ENSG00000114374_35 (sequence is synthesized)
gcctcccaagttctatacctaacagaggtagtttatgccttgttaatgcctgctggtgtgcctctaactgatgggtcctctgactttcaagttcacttcttgaaaagtggtggcttacct

SEQ ID NO: 201576 - DNA, 120 bp, Artificial Sequence
  ENSG00000114374_36 (sequence is synthesized)
cttgtactgagtatgctaataagaaataacttcttgccaaatacagatatggaaactcgaaggggtgcttatttaaatgctcttaaaatagccaaactgttgttaactgcgattggctat

SEQ ID NO: 201577 - DNA, 120 bp, Artificial Sequence
  ENSG00000114374_37 (sequence is synthesized)
ggccatgttcgagctgtagcagaagcttgtcagccagttgtagatggtacagaccccataacacagattaaccaagttactcatgatcaagcagtggtgctacaaagtgcccttcagagc

SEQ ID NO: 201578 - DNA, 120 bp, Artificial Sequence
  ENSG00000114374_38 (sequence is synthesized)
attcctaatccctcatccgagtgcgtacttagaaatgagtccatacttcttgctcaggaaatatctaatgaggcttcaagatatatgcctgatatttgtgtaattagggctatacagaaa

SEQ ID NO: 201579 - DNA, 120 bp, Artificial Sequence
  ENSG00000114374_39 (sequence is synthesized)
attatctgggcatcagcatgtggggcattaggactagtttttagcccaaatgaagaaataactaaaatttatcagatgaccaccaatggaagcaataagctggaggtggaagatgaacaa

SEQ ID NO: 201580 - DNA, 120 bp, Artificial Sequence
  ENSG00000114374_40 (sequence is synthesized)
gtttgctgtgaagcactggaagtgatgaccttatgttttgctttacttccaacagcgttggatgcacttagtaaagaaaaagcctggcagaccttcatcattgacttattattgcactgt

SEQ ID NO: 201581 - DNA, 120 bp, Artificial Sequence
  ENSG00000114374_41 (sequence is synthesized)
ctctgcttttcttcattactttactctttaccatactggggagcacagcaagagagaagggtaaatattcaggtgattatttcacacttttacggcaccttctcaattatgcttacaatg

SEQ ID NO: 201582 - DNA, 120 bp, Artificial Sequence
  ENSG00000114374_42 (sequence is synthesized)
gcaatattaacatacccaatgctgaagttcttcttgtcagtgaaattgattggctcaaaaggattagggataatgttaaaaacacaggtgaaacaggtgtcgaagagccaatactggaag

SEQ ID NO: 201583 - DNA, 120 bp, Artificial Sequence
  ENSG00000114374_43 (sequence is synthesized)
gccaccttggggtaacaaaagagttattggcctttcaaacttctgagaaaaagtatcactttggttgtgaaaaaggaggtgctaatctcattaaagaattaattgatgatttcatctttc

SEQ ID NO: 201584 - DNA, 120 bp, Artificial Sequence
  ENSG00000114374_44 (sequence is synthesized)
ccgcatccaaagtttacctgcagtatttaagaagtggagaactaccagctgagcaggctattccagtctgtagttcacccgttaccatcaatgccggttttgagctacttgtagcattag

SEQ ID NO: 201585 - DNA, 120 bp, Artificial Sequence
  ENSG00000114374_45 (sequence is synthesized)
ctattggctgtgtgaggaatctcaaacagatagtagactgtttgactgaaatgtattacatgggcacagcaattactacttgtgaagcacttactgagtgggaatatctgccccctgttg

SEQ ID NO: 201586 - DNA, 120 bp, Artificial Sequence
  ENSG00000114374_46 (sequence is synthesized)
gaccccgcccaccaaaaggatttgtgggactcaaaaatgctggtgctacgtgttacatgaactctgtgatccagcagctatacatgattccttctatcaggaacagtattcttgcaattg

SEQ ID NO: 201587 - DNA, 120 bp, Artificial Sequence
  ENSG00000114374_47 (sequence is synthesized)
aaggcacaggtagtgatttacacgatgatatgttcggggatgagaagcaggacagtgagagtaatgttgatccccgagatgatgtatttggatatcctcatcaatttgaagacaagccag

SEQ ID NO: 201588 - DNA, 120 bp, Artificial Sequence
  ENSG00000114374_48 (sequence is synthesized)
cattaagtaagacagaagataggaaagagtataatattggtgtcctaagacaccttcaggtcatctttggtcatttagctgcttcccaactacaatactatgtacccagaggattttgga

SEQ ID NO: 201589 - DNA, 120 bp, Artificial Sequence
  ENSG00000114374_49 (sequence is synthesized)
aacagttcaggctttggggtgaacctgttaatctccgtgaacaacatgatgccttagagttttttaattctttggtggatagtttagatgaagctttaaaagctttaggacacccggcta

SEQ ID NO: 201590 - DNA, 120 bp, Artificial Sequence
  ENSG00000114374_50 (sequence is synthesized)
tactaagtaaagtcctaggaggctcctttgctgatcagaagatctgccaaggctgcccacataggtatgaatgtgaagaatcttttacaactttgaatgtggatattagaaatcatcaaa

SEQ ID NO: 201591 - DNA, 120 bp, Artificial Sequence
  ENSG00000114374_51 (sequence is synthesized)
atcttcttgactctttggaacagtatatcaaaggagatttattggaaggtgcaaatgcatatcattgtgaaaaatgtgataaaaaggttgacacagtaaagcgcctgctaattaaaaaat

SEQ ID NO: 201592 - DNA, 120 bp, Artificial Sequence
  ENSG00000114374_52 (sequence is synthesized)
tgcctcgggttcttgctatccaactcaaacgatttgactatgactgggaaagagaatgtgcaattaaattcaatgattattttgaatttcctcgagagctggatatgggaccttacacag

SEQ ID NO: 201593 - DNA, 120 bp, Artificial Sequence
  ENSG00000114374_53 (sequence is synthesized)
tagcaggtgttgcaaacctggaaagggataatgtaaactcagaaaatgagttgattgaacagaaagagcagtctgacaatgaaactgcaggaggcacaaagtacagacttgtaggagtgc

SEQ ID NO: 201594 - DNA, 120 bp, Artificial Sequence
  ENSG00000114374_54 (sequence is synthesized)
ttgtacacagtggtcaagcaagcggtgggcattattattcttacatcattcaaaggaatggtaaagatgatcagacagatcactggtataaatttgatgatggagatgtaacagaatgca

SEQ ID NO: 201595 - DNA, 120 bp, Artificial Sequence
  ENSG00000114374_55 (sequence is synthesized)
aaatggatgatgatgaagaaatgaaaaatcagtgttttggtggagagtacatgggagaagtatttgatcacatgatgaagcgcatgtcatataggcgacagaagaggtggtggaatgctt

SEQ ID NO: 201596 - DNA, 120 bp, Artificial Sequence
  ENSG00000114374_56 (sequence is synthesized)
acatacttttttatgaacaaatggatatgatagatgaagatgatgagatgataagatacatatcagagctaactattgcaagaccccatcagatcattatgtcaccagccattgagagaa

SEQ ID NO: 201597 - DNA, 120 bp, Artificial Sequence
  ENSG00000114374_57 (sequence is synthesized)
gtgtacggaaacaaaatgtgaaatttatgcataaccgattgcaatatagtttagagtattttcagtttgtgaaaaaactgcttacatgtaatggtgtttatttaaaccctgctccagggc

SEQ ID NO: 201598 - DNA, 120 bp, Artificial Sequence
  ENSG00000114374_58 (sequence is synthesized)
aggattatttgttgcctgaagcagaagaaattactatgattagtattcagcttgctgctagattcctctttaccactggatttcacaccaagaaaatagttcgtggtcctgccagtgact

SEQ ID NO: 201599 - DNA, 120 bp, Artificial Sequence
  ENSG00000114374_59 (sequence is synthesized)
ggtatgatgcactgtgcgttcttctccgtcacagcaaaaatgtacgtttttggtttactcataatgtcctttttaatgtatcaaatcgcttctctgaataccttctggagtgccctagtg

SEQ ID NO: 201600 - DNA, 120 bp, Artificial Sequence
  ENSG00000114374_60 (sequence is synthesized)
cagaagtgaggggtgcatttgcaaaacttatagtgtttattgcacacttttccttgcaagatgggtcttgtccttctccttttgcatctccaggaccttctagtcaggcatgtgataact

SEQ ID NO: 201601 - DNA, 120 bp, Artificial Sequence
  ENSG00000114374_61 (sequence is synthesized)
tgagcttgagtgaccacttactaagagccacactaaatctcttgagaagggaagtttcagagcatggacatcatttacagcaatattttaatttgtttgtaatgtatgccaatttaggtg

SEQ ID NO: 201602 - DNA, 120 bp, Artificial Sequence
  ENSG00000114374_62 (sequence is synthesized)
tggcagaaaaaacacagcttctgaaattgaatgtacctgctacctttatgcttgtgtctttagacgaaggaccaggtcctccaatcaaatatcagtatgctgaattaggcaagttatatt

SEQ ID NO: 201603 - DNA, 120 bp, Artificial Sequence
  ENSG00000114374_63 (sequence is synthesized)
cagtagtgtctcagctgattcgttgttgcaatgtgtcatcaacaatgcagtcttcaatcaatggtaatccccctctccccaatcctttcggtgaccttaatttatcacagcctataatgc

SEQ ID NO: 201604 - DNA, 120 bp, Artificial Sequence
  ENSG00000114374_64 (sequence is synthesized)
caattcagcagaatgtgttagacattttatttgtgagaacaagttatgtgaagaaaattattgaagactgcagtaactcagaggataccatcaaattacttcgcttttgctcttgggaga

SEQ ID NO: 201605 - DNA, 120 bp, Artificial Sequence
  ENSG00000114374_65 (sequence is synthesized)
atcctcagttctcatctactgtcctcagcgaacttctctggcaggttgcatattcatatacctatgaacttcggccatatttagatctacttttccaaattttactgattgaggactcct

SEQ ID NO: 201606 - DNA, 120 bp, Artificial Sequence
  ENSG00000114374_66 (sequence is synthesized)
ggcagactcacagaattcataatgcacttaaaggaattccagatgacagagatgggctgttcgatacaatacagcgctcgaagaatcactatcaaaaacgagcatatcagtgcataaaat

SEQ ID NO: 201607 - DNA, 120 bp, Artificial Sequence
  ENSG00000114374_67 (sequence is synthesized)
gtatggtagctctatttagcagttgtcctgttgcttaccagatcttacagggtaacggagatcttaaaagaaaatggacctgggcagtggaatggctaggagatgaacttgaaagaagac

SEQ ID NO: 201608 - DNA, 120 bp, Artificial Sequence
  ENSG00000114374_68 (sequence is synthesized)
catatactggcaatcctcagtatagttacaacaattggtctcctccagtacaaagcaatgaaacagcaaatggttatttcttagaaagatcacatagtgctaggatgacacttgcaaaag

SEQ ID NO: 201609 - DNA, 120 bp, Artificial Sequence
  ENSG00000114374_69 (sequence is synthesized)
cttgtgaactctgtccagaagaggagccagatgaccaggatgccccagatgagcatgagccctctccatcagaagatgccccattatatcctcattcacctgcctctcagtatcaacaga

SEQ ID NO: 201610 - DNA, 120 bp, Artificial Sequence
  ENSG00000114374_70 (sequence is synthesized)
ataatcatgtacatggacagccatatacaggaccagcagcacatcacttgaacaaccctcagaaaacaggccaacgaacacaagaaaattatgaaggcaatgaagaagtatcctcacctc

SEQ ID NO: 201611 - DNA, 120 bp, Artificial Sequence
  ENSG00000114374_71 (sequence is synthesized)
agatgaaggatcagtgaaaagcaataattaactgcttcctttatgactatgcactaaggtcttatagtccaaactttctctgtgtctggctagtattgaaaactagataaactgctccaa

SEQ ID NO: 201612 - DNA, 120 bp, Artificial Sequence
  ENSG00000114374_72 (sequence is synthesized)
accaacatggagtaaagagcatattcactggtttatttgcagtaatttgcaatttgtcagtgtataagacacatgcagggtgaagtgtacagagttttgtaacaaatgactggtcctaat

SEQ ID NO: 201613 - DNA, 120 bp, Artificial Sequence
  ENSG00000114374_73 (sequence is synthesized)
ctgtaaatgagaaaggtatatatactatgttaatgtctgactgttaattcttaagcaagaaactttttttgatgaaaacaagtcagatctacacagtcacacaattattttttgttgtgt

SEQ ID NO: 201614 - DNA, 120 bp, Artificial Sequence
  ENSG00000114374_74 (sequence is synthesized)
tcactacattgtgcaattgatattgcctgctttgagcagtttggtcaacttaccaacttccccccaaaaaagggaacataaaagagcccatctttgtcagtttacaccaatagtttcttg

SEQ ID NO: 201615 - DNA, 120 bp, Artificial Sequence
  ENSG00000114374_75 (sequence is synthesized)
ttaatccttctttcctggatatataaggctggtggtaacttttgaattatatggttgatgtggaaaattggcagtgtaacatttctagatacttttcattacctttttattctggtatat

SEQ ID NO: 201616 - DNA, 120 bp, Artificial Sequence
  ENSG00000114374_76 (sequence is synthesized)
aggctaaccactttaaagctattcttatgctgtaacagttagcatggcttcacactgtttgtgtagccaagaggacagaattacatgaatgacagtgcccagagtgacagctgtatattg

SEQ ID NO: 201617 - DNA, 120 bp, Artificial Sequence
  ENSG00000114374_77 (sequence is synthesized)
ctcagagcttttatttcttatacctagaataaatataaaatgggggaaaaatgtgacagacaagcagtttttcattgcacacatattcttcacatttaatgtttgatagttcaatttctt

SEQ ID NO: 201618 - DNA, 120 bp, Artificial Sequence
  ENSG00000114374_78 (sequence is synthesized)
gagctgaagaatatcaaagtatcgataatacgaattttaaaatattaaaaccaatacacaaaattttcctatgtcagaatgtggtggagcataatagattgtatttggtgtgcttgcgat

SEQ ID NO: 201619 - DNA, 120 bp, Artificial Sequence
  ENSG00000114374_79 (sequence is synthesized)
tttttttttccatagaatttattaagtgaagtttctaaaactttgcttctcctgatcccggtgaagtgtacatcataagaatccatagtactttgaagtaccattgcaccaagatgtctg

SEQ ID NO: 201620 - DNA, 120 bp, Artificial Sequence
  ENSG00000114374_80 (sequence is synthesized)
actgaattcatagtcacacttttatttgaaagaaagaattgttgtagttttttttcattattctaaaactcttgttgttagatacaagatttaattaagatctaagctcctgcttattta

SEQ ID NO: 201621 - DNA, 120 bp, Artificial Sequence
  ENSG00000114374_81 (sequence is synthesized)
atgtaattctaaggtaccattttagaaaaaacatttgttttaagattccaagaaacctgtgagttaatactatatttaaaagagaattggtaaattttgaatgtgtgtaatattttggaa

SEQ ID NO: 201622 - DNA, 120 bp, Artificial Sequence
  ENSG00000114374_82 (sequence is synthesized)
cctgtttaaaaaccaaatatacctgcaaatagatacagcctatcctatactatttaaatgtttggctgttttgttttatagaaattattttgctgaattcacaaataaaatttaagaaga

SEQ ID NO: 201623 - DNA, 120 bp, Artificial Sequence
  ENSG00000114374_83 (sequence is synthesized)
cgccatattgaagaggacgggtctaatagatcgctggagacacaatttaactgaaccccgcccgttgtggactgactttgatgctctgagtccctccctccttcacgccgctagcaggcc

SEQ ID NO: 201624 - DNA, 120 bp, Artificial Sequence
  ENSG00000114374_84 (sequence is synthesized)
ctgatgtagattgcctttgtcttacttgggacgtttacctgagcgcttggtgctggtgtcgggaccgggagataggagtgtctcaggagagacctggccgaaaaccgcgagaaagaaaag

SEQ ID NO: 201625 - DNA, 120 bp, Artificial Sequence
  ENSG00000114374_85 (sequence is synthesized)
tgaagcctagtgaaactgcctttgcagtgactcaagaaaaactcatcacctggagtccgtgtaagctcggcgacagccctagcagcgaggccaaaacagtttgggaagaaagaaaaccta

SEQ ID NO: 201626 - DNA, 120 bp, Artificial Sequence
  ENSG00000114374_86 (sequence is synthesized)
aaaacagtttgggaagaaagaaaacctaaagtatttgccgttggtgattcaagggaatcaaacttgacgtatggagccaagaaagcccttggaaaaactggcctcatattttgtgtacac

SEQ ID NO: 201627 - DNA, 120 bp, Artificial Sequence
  ENSG00000114374_87 (sequence is synthesized)
tgtagtgtctcaagtcttactattttaatagcctgaacattttagtcctagctgaacactttgcagctcattgtacttaatgcaggcatttcttatggattttaaatattggaaggtaat

SEQ ID NO: 201628 - DNA, 120 bp, Artificial Sequence
  ENSG00000114374_88 (sequence is synthesized)
gacaatatgaatacagtttcagattaatgatgctttatgaacccttcctgtgtttctagcctagacaaataggtaggtattttgttttgaatgtttacaaacatttctctttgataagaa

SEQ ID NO: 201629 - DNA, 120 bp, Artificial Sequence
  ENSG00000114374_89 (sequence is synthesized)
ctttataccagagttctggagaacttttctcacttgtggaatgtccatttgctacagcagagaccttattgcagaaggttgtattgcttctttctctgttttgtttagcggttgctgatt

SEQ ID NO: 201630 - DNA, 120 bp, Artificial Sequence
  ENSG00000114374_90 (sequence is synthesized)
gagccacctaagccactgtgccctgtttggcacaagagccgtgtgccgtcccagagcgccctgcgctgtttggcagcagtgcgcgctgtgtgaagtctttgagccccctgcgttcttttc

SEQ ID NO: 201631 - DNA, 120 bp, Artificial Sequence
  ENSG00000114374_91 (sequence is synthesized)
caggagtgagctgggctggagtcctcactcctggcatgacaccaagttcaccaacaaccaccctgaactaacggcctcacggttcccctccgccagctgctgcccttcctggcctggctg

SEQ ID NO: 201632 - DNA, 120 bp, Artificial Sequence
  ENSG00000114374_92 (sequence is synthesized)
tcaccactggaggtagacaactgttcctgtccgacgccaggtttgttcaggcttctgcagtctcccaagttttcaggcttgtccgacacttcttgactgaagaatgataatgtttttgga

SEQ ID NO: 201633 - DNA, 120 bp, Artificial Sequence
  ENSG00000114374_93 (sequence is synthesized)
tgcttccgtcaaactgcgaaggcaggcagaggaccccggcaagcacatagaagagcttccctctgcagtctgggccaaagaggaatagtccatgccgacgtggatgaaatttggattcag

SEQ ID NO: 201634 - DNA, 81 bp, Artificial Sequence
  ENSG00000114374_94 (sequence is synthesized)
aggaatagtccatgccgacgtggatgaaatttggattcagagttactgaagaagtgtctggaggtgggcctcagagtcttg

SEQ ID NO: 201635 - DNA, 120 bp, Artificial Sequence
  ENSG00000114374_95 (sequence is synthesized)
agttttgagatctctgctgtatttgtatacaagtattttggaagagagcttggagataattctggtggctgtgtggagtatgtgttggaggtggagtctcactctgtcgcccagactaga

SEQ ID NO: 201636 - DNA, 90 bp, Artificial Sequence
  ENSG00000114374_96 (sequence is synthesized)
tgtgttggaggtggagtctcactctgtcgcccagactagagtgcagttgtgtgatctcagctcactgcaagctctgtctcccatgagcag

SEQ ID NO: 201637 - DNA, 120 bp, Artificial Sequence
  ENSG00000114374_97 (sequence is synthesized)
acccagcctcaagttttaatttttatggaaacaaacctagttctcaatcagtgacacatcagattaagcttggagattttaaagaagtgctgattattaggtctcagatgttttgctgtt

SEQ ID NO: 201638 - DNA, 120 bp, Artificial Sequence
  ENSG00000114374_98 (sequence is synthesized)
tggtctaggctggaacttggacattagcagtcctctagaagtacttcaggaaatgctaatttgcaatttagtatgaaaaccactggactaatgaatatggaatgtaaaggatttggtggc

SEQ ID NO: 201639 - DNA, 120 bp, Artificial Sequence
  ENSG00000114374_99 (sequence is synthesized)
gttttcccatactcctatcagattgcagtgaaccctaaccagtaaatttctgtgtcctctagtcctgttaagattctttgaatatactgttgattctcctgaaggactattaaaaaggac

SEQ ID NO: 201640 - DNA, 120 bp, Artificial Sequence
  ENSG00000114374_100 (sequence is synthesized)
cttgggaaaaaagacttgtcaaagtggaaacgtgagctcacttgacagatttgatggttttggagaaatatggtataatttaaaccctttccaaagaagttacccgaaagttttaaattt

SEQ ID NO: 201641 - DNA, 120 bp, Artificial Sequence
  ENSG00000114374_101 (sequence is synthesized)
tatatttaaatcacttaaaaaattatcttaaaagccatttataacgctctgatacaatgatgtgttgactgtgcattgtcttgaattctttgtaaaaatctaatactagtttccttatgt

SEQ ID NO: 201642 - DNA, 120 bp, Artificial Sequence
  ENSG00000114374_102 (sequence is synthesized)
ttaggtattaaattttcacagtatatataaggcagcaattgataggcctttcacagattcttctgtaagttaaaaatgacaaccaagaagcttacttatttttctggaatgttatataat

SEQ ID NO: 201643 - DNA, 120 bp, Artificial Sequence
  ENSG00000114374_103 (sequence is synthesized)
atatggcatgtttcctggcataactgcttgtacaatagtgtgaatttcttaagggaagtaaaactgtaaatacacatttagctttttatttctctcatttttataatcctctgttattaa

SEQ ID NO: 201644 - DNA, 120 bp, Artificial Sequence
  ENSG00000114374_104 (sequence is synthesized)
ctgagaccagagagactcatttgtttcaaaatagtttctccaaaagattttataaaagaaaaggctggggggagtgggatatgaaaggaaaatgaatcttggggcccccaaatcactaag

SEQ ID NO: 201645 - DNA, 120 bp, Artificial Sequence
  ENSG00000114374_105 (sequence is synthesized)
ctcaagggataagtcaagttagaaactgttcagggccaacttaccttgcattctattcaaattcacccctctgctcacttagatgcatatctgattgtaatcagaaactcaaaagaatgc

SEQ ID NO: 201646 - DNA, 120 bp, Artificial Sequence
  ENSG00000114374_106 (sequence is synthesized)
agcagtttgtctctcacctatctatgacctggaagcccccttccccgtttgagtcttcctgcctttgcttcactttatccctgcctttctagactgaaccaacatacttcttagatatat

SEQ ID NO: 201647 - DNA, 76 bp, Artificial Sequence
  ENSG00000114374_107 (sequence is synthesized)
ggccccaaccaccttgggcacatgtcgttaggacttcctgagactgtgtcacaagtttgtgtccacaactttgaca

SEQ ID NO: 201648 - DNA, 120 bp, Artificial Sequence
  ENSG00000114374_108 (sequence is synthesized)
cttgcaaaagcttgtgaactctgtccagaagaggtaaaaaaaaaaaaggctaccaatggacagcagatggaaatgggaaaaagaaaagtatttttttaatgtgtaggcccatgtttatta

SEQ ID NO: 201649 - DNA, 120 bp, Artificial Sequence
  ENSG00000114374_109 (sequence is synthesized)
atattgtgcttaaaaaaatcatgtgcagttttgtttgctttagtggttagcttgatttgtttgatcttaagttaacaaaggagtttccttttggaaaaaatttctgtgaaattgtctaaa

SEQ ID NO: 201650 - DNA, 120 bp, Artificial Sequence
  ENSG00000114374_110 (sequence is synthesized)
aatcacatacctgagagaattcagatattcttttgtttgttttttgtctttgtttgcttttgctttttctttttttttttgagtctcaccctattgcccaggctgctgcagcagcgtgat

SEQ ID NO: 201651 - DNA, 120 bp, Artificial Sequence
  ENSG00000114374_111 (sequence is synthesized)
ccatgttggccaggctggtctcaaatcttgaccttaagtgatccacctgcctggcctcccaaagtgctgagattataagcatgagccactgcacccggcctgttttcttatattttaaat

SEQ ID NO: 201652 - DNA, 120 bp, Artificial Sequence
  ENSG00000114374_112 (sequence is synthesized)
tatattttaaattatttgcagtaaatgcaaagatgttaaagaggccagctttgtgcattttttaaaagtttattctaaatgaaggaaattaaatataaatttgaagttacttttataatc

SEQ ID NO: 201653 - DNA, 120 bp, Artificial Sequence
  ENSG00000114374_113 (sequence is synthesized)
tatttatatacataagccactttcatacctgcctactgttgtatagacttcagagtaatgtggcctgtatcgattttccaggagtattcttttgtgtgttgttttttctcaattcctcct

SEQ ID NO: 201654 - DNA, 120 bp, Artificial Sequence
  ENSG00000114374_114 (sequence is synthesized)
aattaactgagacctgtcctaaatttttagggttccatcagatatgcatttctctcacctgagcatcagagggatgatttcgagttctctgtgttttttgtccacaggaatttccttgtg

SEQ ID NO: 201655 - DNA, 120 bp, Artificial Sequence
  ENSG00000114374_115 (sequence is synthesized)
ggcaaattctgagggagggatgtagcttttttatgtttggagctattttatttagaaataaaatgggaggcaggtttgcctgagtcagttgcctgcttgacttcctttggcttagtcatt

SEQ ID NO: 201656 - DNA, 120 bp, Artificial Sequence
  ENSG00000114374_116 (sequence is synthesized)
ttggagtcctgagatttattttcttttcacatacctgttttatttatgatggtttatggtcattgaaccttgtaacattgattacatttcttttcactggtcttttttcttaagtagata

SEQ ID NO: 201657 - DNA, 120 bp, Artificial Sequence
  ENSG00000114374_117 (sequence is synthesized)
aacttatttttaacttgggcacaagagagcataaaaattatatgaggtacatagcctgcttaaatagaatatttaaaatacgttttgtccacagagctggaattctttgtaaatgaaaac

SEQ ID NO: 201658 - DNA, 120 bp, Artificial Sequence
  ENSG00000114374_118 (sequence is synthesized)
caaattttacttaatttttagagataggatcttggctttgtcgcctaggctagagtgctgtgggggcaatcatagcccactgcaacctcgaattcctggcttaagtgatcctcccatctc

SEQ ID NO: 201659 - DNA, 120 bp, Artificial Sequence
  ENSG00000114374_119 (sequence is synthesized)
agcctcctgggtgcttggacaacagacatgacaccttacctggctagttaaaaaaaattttttttgtagagatgggctttgcctgtgtggcccaggctgctcttgaactcctaggttcaa

SEQ ID NO: 201660 - DNA, 120 bp, Artificial Sequence
  ENSG00000114374_120 (sequence is synthesized)
gtgatcctccagcttgggccttccgaagtgctgggattacattgcttccagctttagttttttaaatgtttaacttgtttaacttatttaacttgctgtttattatttaatggagagctt

SEQ ID NO: 201661 - DNA, 120 bp, Artificial Sequence
  ENSG00000114374_121 (sequence is synthesized)
ttagtgtttgtcttttgaggtgggatcttgccatgcccagactagccttgaagtcctacagtcaagtgatctttgcatctcagtctcccaagaagtagtggtagagaatttttatgttac

SEQ ID NO: 201662 - DNA, 120 bp, Artificial Sequence
  ENSG00000114374_122 (sequence is synthesized)
attcctttctctgtgtatatgtttgtgggaggacatatgtccctttgtatgtttgggcatatatattttttgtgtgaaagttatgcatgttattgttgatcaatacaagaggtttagagg

SEQ ID NO: 201663 - DNA, 120 bp, Artificial Sequence
  ENSG00000114374_123 (sequence is synthesized)
ccagagaagagaaataaaatgggaaaaactacaaacattctacctcccatgataccatgctataatggcaatcataatatttatgtattttttacttttttgtgttcatttttaaaaatt

SEQ ID NO: 201664 - DNA, 120 bp, Artificial Sequence
  ENSG00000114374_124 (sequence is synthesized)
agataaaaatagtttaagctagaggcttctctctttcatctttttttttctaatttaagttttccctaagtaggaattttggtaatacttcattatattgatgtatcaagatttctttag

SEQ ID NO: 201665 - DNA, 120 bp, Artificial Sequence
  ENSG00000114374_125 (sequence is synthesized)
tcctttgttgtctttaggttgtctacaatattttttgtcattgtgaatatgctgtcatgaacattttgatgctgattattaccagattagtgtgttgtgtcaaagttttcatcagttgga

SEQ ID NO: 201666 - DNA, 120 bp, Artificial Sequence
  ENSG00000114374_126 (sequence is synthesized)
ttatttttcagtttagtaagtgatgcaagccaaaactaaaactctaaggcaccttctccccacccaaccagtcatctgagtagacttcctcctcagccagggcagtcatagcccactgca

SEQ ID NO: 201667 - DNA, 120 bp, Artificial Sequence
  ENSG00000114374_127 (sequence is synthesized)
ccagggcagtcatagcccactgcaaccagccagcccctttccattccagtatccctttccctttaataaaatttaaggccaaacatggtggttcaatgcctgtaatgccagcactttggg

SEQ ID NO: 201668 - DNA, 88 bp, Artificial Sequence
  ENSG00000114374_128 (sequence is synthesized)
ctgggaaacatggtgaaacaatgtggtggcatgtggctgtggtctcagctactcgggaggctgctgaggcaggagaatcgcttgaacc

SEQ ID NO: 201669 - DNA, 79 bp, Artificial Sequence
  ENSG00000114374_129 (sequence is synthesized)
tgagcagagatcatgccactacactttaggatttgtgagatgaatttgttttgaaaatattagcttgttttcagttgtg

SEQ ID NO: 201670 - DNA, 120 bp, Artificial Sequence
  ENSG00000114374_130 (sequence is synthesized)
atgaatttgttttgaaaatattagcttgttttcagttgtgatacatttgaagttggtacagagtccattttcttttatgtgttaatgtattgacaatatagttgtgttgacaacttcttt

SEQ ID NO: 201671 - DNA, 120 bp, Artificial Sequence
  ENSG00000114374_131 (sequence is synthesized)
tcttatttccagttcagtctttacagaagctgacgagagatttccttgtattttatggtggtatgattggccttagagcacttcagttttgagatctctgctgtatttgtatacaagtat

SEQ ID NO: 201672 - DNA, 120 bp, Artificial Sequence
  ENSG00000114374_132 (sequence is synthesized)
tttggaaggtcagttgataggatgaatgaaaaacaaaaattggaagtaatggtactagtaataagtggggattttcatgtaggtaaaggaactgataagtcatagggaatccgtgagttc

SEQ ID NO: 201673 - DNA, 120 bp, Artificial Sequence
  ENSG00000114374_133 (sequence is synthesized)
ttaatcttactgagtttagttgtgttctttgattattttggatagctttgtttaacggtgaatgaaatgattaaaatggaaaaattaagtgcagaaaatatgtttaacattatataggat

SEQ ID NO: 201674 - DNA, 120 bp, Artificial Sequence
  ENSG00000114374_134 (sequence is synthesized)
gtcttgttttaggcatttattgctagataacatatgtccattcttgtattgctataaagaaatattggatactggctaatttataaataaaagagatttattggctcatgattctgcagg

SEQ ID NO: 201675 - DNA, 120 bp, Artificial Sequence
  ENSG00000114374_135 (sequence is synthesized)
ctgtacaggaaatatgattctggaatccgcttggcttctggaaaggcctcaggaaacttagaatgatgacacaaggcagaggggaagcaggcacatcttacatggcaggagcagggagca

SEQ ID NO: 201676 - DNA, 120 bp, Artificial Sequence
  ENSG00000114374_136 (sequence is synthesized)
agggagcaagaaagagtgaagcgggaggtgctacacacttttaataatccagatctgagtcaggcatagcagcttatgcctataatcccagcacttttgggaggccaaggcaggcagatc

SEQ ID NO: 201677 - DNA, 85 bp, Artificial Sequence
  ENSG00000114374_137 (sequence is synthesized)
cagagtaagactctgccttaaaagtaaaataaaattaaattaaaattaaaaaccagatcttgcaagaactcactgtcagaagaac

SEQ ID NO: 201678 - DNA, 120 bp, Artificial Sequence
  ENSG00000114374_138 (sequence is synthesized)
ttaaaaaccagatcttgcaagaactcactgtcagaagaacagcaccaagggtatggtgctgaaccattcatgaaggagccatcctcaagatccagtcatctcataccaggtccacctcca

SEQ ID NO: 201679 - DNA, 120 bp, Artificial Sequence
  ENSG00000114374_139 (sequence is synthesized)
tctaatattgggaattacaattcatcatgagggttggtggagacatggatccaagccatgtcacatattatcctgactgtagtggtttaagataacaatttttatctcacaatttatttt

SEQ ID NO: 201680 - DNA, 120 bp, Artificial Sequence
  ENSG00000114374_140 (sequence is synthesized)
gaatacaggcatgatttagctgtgtcctttggttcagtatctcttcaaagctgtaatcaggtttttcatgtgtttgtcatcaactgaaagattgactgagtatggttctgagatctctca

SEQ ID NO: 201681 - DNA, 120 bp, Artificial Sequence
  ENSG00000114374_141 (sequence is synthesized)
ggtgattattggcagaattaagttccttttcgattcttggtcttatttcttcacccatctactatagtgcattcttgccatgcagccctttttatggagcaagtcacaatacagcagctt

SEQ ID NO: 201682 - DNA, 120 bp, Artificial Sequence
  ENSG00000114374_142 (sequence is synthesized)
gcttcattagggcaagcaagcaagacaagctgcagcaaatgcaagtaacatggaagtctttataatctaatcatggaattgacatagttaaaaacaaatcattaggtaggctccaaattg

SEQ ID NO: 201683 - DNA, 120 bp, Artificial Sequence
  ENSG00000114374_143 (sequence is synthesized)
atcagaacatggttattggacaaaaccatgactgtcaggaggctgcatcatggggagccattttacaagcagcaccatgggtgttatgggggattttattacatttgttctgctcttaag

SEQ ID NO: 201684 - DNA, 120 bp, Artificial Sequence
  ENSG00000114374_144 (sequence is synthesized)
agttgaaagtctttaaaaatgtgtaagtctgtcgtttgttcttgacttctgtcatgttttcaagaatgcattatgcaatgatgtagaatactgtttgtaaagtagttgtctagactctag

SEQ ID NO: 201685 - DNA, 120 bp, Artificial Sequence
  ENSG00000114374_145 (sequence is synthesized)
gactctagtgaaaataattacagataatctcagttcatcaacgaatcggtatattaatgtcatatttaacagttataggaataaactaagcataataataaatgatgatttgaatgttat

SEQ ID NO: 201686 - DNA, 120 bp, Artificial Sequence
  ENSG00000114378_0 (sequence is synthesized)
ttcctccaggagtctctggtgcagctggggtggaatctggccaggccctgcttaggcccccatcctggggtcaggaaatttggaggataaggcccttcagccccaaggtcagcagggacg

SEQ ID NO: 201687 - DNA, 120 bp, Artificial Sequence
  ENSG00000114378_1 (sequence is synthesized)
agcgggcagactggcgggtgtacaggagggctgggttgacctgtccttggtcactgaggccattggatcttcctccagtggctgccaggatttctggtggaagagacaggaaggcctccc

SEQ ID NO: 201688 - DNA, 120 bp, Artificial Sequence
  ENSG00000114378_2 (sequence is synthesized)
ccccttggtcgggtcagcctgggggctgagggcctggctgtcagccactcttcccagaacatatgtcatggcctcagtggctcatggggaagcaggggtgggcgagcttaggctagagca

SEQ ID NO: 201689 - DNA, 120 bp, Artificial Sequence
  ENSG00000114378_3 (sequence is synthesized)
agtcctgtgggagatggcagaggcctggtctgagaggcaactcggatgtgccctccagtggccatgctcccctccatgcgtctcccctgccctcctggagccctgcaggtcaatgtttaa

SEQ ID NO: 201690 - DNA, 120 bp, Artificial Sequence
  ENSG00000114378_4 (sequence is synthesized)
cagaaaccagagcagcggtggattaatgcgcaagggctcagccccccagccctgagcagtgggggaatcggagactttgcaacctgttctcagctctgcctcccctggccaggttgtcct

SEQ ID NO: 201691 - DNA, 120 bp, Artificial Sequence
  ENSG00000114378_5 (sequence is synthesized)
cgaccagtcccgtgccatggcagcccacctgcttcccatctgcgccctcttcctgaccttactcgatatggcccaaggctttaggggccccttgctacccaaccggcccttcaccaccgt

SEQ ID NO: 201692 - DNA, 120 bp, Artificial Sequence
  ENSG00000114378_6 (sequence is synthesized)
ctggaatgcaaacacccagtggtgcctggagaggcacggtgtggacgtggatgtcagtgtcttcgatgtggtagccaacccagggcagaccttccgcggccctgacatgacaattttcta

SEQ ID NO: 201693 - DNA, 120 bp, Artificial Sequence
  ENSG00000114378_7 (sequence is synthesized)
tagctcccagctgggcacctacccctactacacgcccactggggagcctgtgtttggtggtctgccccagaatgccagcctgattgcccacctggcccgcacattccaggacatcctggc

SEQ ID NO: 201694 - DNA, 120 bp, Artificial Sequence
  ENSG00000114378_8 (sequence is synthesized)
tgccatacctgctcctgacttctcagggctggcagtcatcgactgggaggcatggcgcccacgctgggccttcaactgggacaccaaggacatttaccggcagcgctcacgggcactggt

SEQ ID NO: 201695 - DNA, 120 bp, Artificial Sequence
  ENSG00000114378_9 (sequence is synthesized)
acaggcacagcaccctgattggccagctcctcaggtggaggcagtagcccaggaccagttccagggagctgcacgggcctggatggcaggcaccctccagctggggcgggcactgcgtcc

SEQ ID NO: 201696 - DNA, 120 bp, Artificial Sequence
  ENSG00000114378_10 (sequence is synthesized)
gctgtggggccagagccgtgccctctatcccagcatctacatgcccgcagtgctggagggcacagggaagtcacagatgtatgtgcaacaccgtgtggccgaggcattccgtgtggctgt

SEQ ID NO: 201697 - DNA, 120 bp, Artificial Sequence
  ENSG00000114378_11 (sequence is synthesized)
ggctgctggtgaccccaatctgccggtgctgccctatgtccagatcttctatgacacgacaaaccactttctgcccctggatgagctggagcacagcctgggggagagtgcggcccaggg

SEQ ID NO: 201698 - DNA, 120 bp, Artificial Sequence
  ENSG00000114378_12 (sequence is synthesized)
ggcagctggagtggtgctctgggtgagctgggaaaatacaagaaccaaggaatcatgtcaggccatcaaggagtatatggacactacactggggcccttcatcctgaacgtgaccagtgg

SEQ ID NO: 201699 - DNA, 120 bp, Artificial Sequence
  ENSG00000114378_13 (sequence is synthesized)
ggcccttctctgcagtcaagccctgtgctccggccatggccgctgtgtccgccgcaccagccaccccaaagccctcctcctccttaaccctgccagtttctccatccagctcacgcctgg

SEQ ID NO: 201700 - DNA, 120 bp, Artificial Sequence
  ENSG00000114378_14 (sequence is synthesized)
tggtgggcccctgagcctgcggggtgccctctcacttgaagatcaggcacagatggctgtggagttcaaatgtcgatgctaccctggctggcaggcaccgtggtgtgagcggaagagcat

SEQ ID NO: 201701 - DNA, 120 bp, Artificial Sequence
  ENSG00000114378_15 (sequence is synthesized)
gtggtgattggccacacactgagttgcacatattgagaacctaatgcactctgggtctggccagggcttcctcaaatacatgcacagtcatacaagtcatggtcacagtaaagagtacac

SEQ ID NO: 201702 - DNA, 120 bp, Artificial Sequence
  ENSG00000114378_16 (sequence is synthesized)
tcagccactgtcacaggcatattccctgcacacacatgcatacttacagactggaatagtggcataaggagttagaaccacagcagacaccattcattccatgtccatatgcatctactt

SEQ ID NO: 201703 - DNA, 120 bp, Artificial Sequence
  ENSG00000114378_17 (sequence is synthesized)
ggcaaggtcatagacaattcctccagagacactgagccagtctttgaactgcagcaatcacaaaggctgacattcactgagtgcctactctttgccaatccccgtgctaagcgttttatg

SEQ ID NO: 201704 - DNA, 120 bp, Artificial Sequence
  ENSG00000114378_18 (sequence is synthesized)
tggacttattcattcctcacaatgaggctatgaggaaactgagtcactcacattgagagtaagcacgttgcccaaggttgcacagcaagaaaagggagaagttgagattcaaacccaggc

SEQ ID NO: 201705 - DNA, 120 bp, Artificial Sequence
  ENSG00000114378_19 (sequence is synthesized)
tgtctagctccgggggtacagcccttgcactcctactgagtttgtggtaaccagccctgcacgacccctgaatctgctgagaggcaccagtccagcaaataaagcagtcatgatttactt

SEQ ID NO: 201706 - DNA, 68 bp, Artificial Sequence
  ENSG00000114378_20 (sequence is synthesized)
tgtgaggagcgtctcttgtctgagaagctagtcttgaattcctgacctcaggtgatcctcccgcgttg

SEQ ID NO: 201707 - DNA, 70 bp, Artificial Sequence
  ENSG00000114378_21 (sequence is synthesized)
gaggagcccctccgcccagcagccgccctgtctgagaagctagtcttgaattcctgacctcaggtgatcc

SEQ ID NO: 201708 - DNA, 120 bp, Artificial Sequence
  ENSG00000114378_22 (sequence is synthesized)
gaaaagatccacgaaagtaaagtgcctagggcccatcaatgtcagatgcagccacgtggacaaagaacactccctgagcacaagacacgaaagaacccggtctccagtgtcacaaacagg

SEQ ID NO: 201709 - DNA, 78 bp, Artificial Sequence
  ENSG00000114378_23 (sequence is synthesized)
gatctgtccgcacctggcatgcctggccatattttaaaatattttttttaaggaggaaaagatccacgaaagtaaagt

SEQ ID NO: 201710 - DNA, 120 bp, Artificial Sequence
  ENSG00000114378_24 (sequence is synthesized)
ccttcctccaggagtctctggtgcagctggggtggaatctggccaggccctgcttaggcccccatcctggggtcaggaaatttggaggataaggcccttcagccccaaggtcaatgttta

SEQ ID NO: 201711 - DNA, 120 bp, Artificial Sequence
  ENSG00000114378_25 (sequence is synthesized)
cttcctccaggagtctctggtgcagctggggtggaatctggccaggccctgcttaggcccccatcctggggtcaggaaatttggaggataaggcccttcagccccaagtgctggagggca

SEQ ID NO: 201712 - DNA, 120 bp, Artificial Sequence
  ENSG00000114383_0 (sequence is synthesized)
agccgagcctgcggaaggcggcggcggcggcacctgcgatcagcggctggggcaggttatggtagtgcggactgcggtgtgagcagagcggccacggggcccgccatgcgccggcggccc

SEQ ID NO: 201713 - DNA, 120 bp, Artificial Sequence
  ENSG00000114383_1 (sequence is synthesized)
tgacatgggcgccagcgggtccaaagctcggggcctgtggcccttcgcctcggcggccggaggcggcggctcagaggcagcaggagctgagcaagctttggtgcggcctcggggccgagc

SEQ ID NO: 201714 - DNA, 120 bp, Artificial Sequence
  ENSG00000114383_2 (sequence is synthesized)
tgtgccccccttcgtattcacgcgccgcggctctatgttctatgatgaggatggggatctggctcacgagttctatgaggagacaatcgtcaccaagaacgggcagaagcgggccaagct

SEQ ID NO: 201715 - DNA, 120 bp, Artificial Sequence
  ENSG00000114383_3 (sequence is synthesized)
gaggcgagtgcataagaatctgattcctcagggcatcgtgaagctggatcacccccgcatccacgtggatttccctgtgatcctctatgaggtgtgaccctgggaggtggcagacagaag

SEQ ID NO: 201716 - DNA, 120 bp, Artificial Sequence
  ENSG00000114383_4 (sequence is synthesized)
caccccctgccccggcaagaaactcccaggctcaatcaaggtgtggcttccattgaggagcccaggctggggccacaaccctgaataaactctgttggcccataaccttcagctgtgagc

SEQ ID NO: 201717 - DNA, 120 bp, Artificial Sequence
  ENSG00000114383_5 (sequence is synthesized)
gggtcggtcccacagtattggttgggtgttggtttgtgtgtggacaagaggtggttggtgggtggtgaaggctaatggcagagttagcaccccactctcccaagccacccctgcaagcag

SEQ ID NO: 201718 - DNA, 120 bp, Artificial Sequence
  ENSG00000114383_6 (sequence is synthesized)
acaagcaaggtatgctttcttccagcccctaggctgtgggcactgtatacaagtaggaacttcctttccttcacttcccttttaacccctagtcagagcatttcagccgtttgctacctc

SEQ ID NO: 201719 - DNA, 120 bp, Artificial Sequence
  ENSG00000114383_7 (sequence is synthesized)
gattcctcctgtgttggacagaggctgggggcagtgccagcctgattcttccgacctacctgccatttgttcccgccttcagatggatggacagtttgctggctattgataggagtgggg

SEQ ID NO: 201720 - DNA, 120 bp, Artificial Sequence
  ENSG00000114383_8 (sequence is synthesized)
actgggtgggggcttctccctctacccagggctgggctgatccccctactgcaactaactgttgccccccaaccccgaacccccagttgaggagttgagagagtgcaggctggggtcagg

SEQ ID NO: 201721 - DNA, 120 bp, Artificial Sequence
  ENSG00000114383_9 (sequence is synthesized)
acaggctgcggatgcttgtgcctatggggagttactccaacccacctattctgtctaatctccatggctttgcaccaaatcctccacccctccaattgggaggggactgttcaccacctt

SEQ ID NO: 201722 - DNA, 120 bp, Artificial Sequence
  ENSG00000114383_10 (sequence is synthesized)
gtggtaagggacaacaccctaaggctggtgccagtagttatgagtagcctaccaccccctcccttacagtaacccccaccccttcaggatcagtcaagggaaagcactagaacccctggg

SEQ ID NO: 201723 - DNA, 120 bp, Artificial Sequence
  ENSG00000114383_11 (sequence is synthesized)
tagggaaagaaaggagggaaaaaccataaaaggaatacttataatgtgaaggtttgtaaatagtccatgatgatgtcgtggcagagtctgatttctatatagaggtgactttttttttaa

SEQ ID NO: 201724 - DNA, 120 bp, Artificial Sequence
  ENSG00000114383_12 (sequence is synthesized)
gtactgtgcaagctctgtgcttctataatgtgggaaatggcttggggaggatggcccctagcttaggaagactgttgtgttatttgttcaatttcaataaaatgatttgtagatcctgca

SEQ ID NO: 201725 - DNA, 120 bp, Artificial Sequence
  ENSG00000114383_13 (sequence is synthesized)
tcacgcgccgcgggcttctgctatttcagtctttgacactgggccagcagcatcttctggagtgagaccaacatgcccaggccaccaccctgcccactctagaagtcctgggtgaaggca

SEQ ID NO: 201726 - DNA, 120 bp, Artificial Sequence
  ENSG00000114383_14 (sequence is synthesized)
cctttgtggtagcgtgggacgtgcccacacaggactgtggcccacgcctcaaggtgccactggacctgaatgcctttgatgtgcaggcctcacctaatgagggttttgtgaaccagaata

SEQ ID NO: 201727 - DNA, 120 bp, Artificial Sequence
  ENSG00000114383_15 (sequence is synthesized)
ttaccatcttctaccgcgaccgtctaggcctgtatccacgcttcgattctgccggaaggtctgtgcatggtggtgtgccacagaatgtcagcctttgggcacaccggaagatgctgcaga

SEQ ID NO: 201728 - DNA, 120 bp, Artificial Sequence
  ENSG00000114383_16 (sequence is synthesized)
aacgtgtggagcactacattcggacacaggagtctgcggggctggcggtcatcgactgggaggactggcgacctgtgtgggtgcgcaactggcaggacaaagatgtgtatcgccggttat

SEQ ID NO: 201729 - DNA, 120 bp, Artificial Sequence
  ENSG00000114388_0 (sequence is synthesized)
attggcaagcttgcgtgccccagcgacacaggcctcgaggctgtctctgacaagtgttcacaggaggtggggacgcctctgcgcgaggaacgaggagctacgggcctgggcccggttatt

SEQ ID NO: 201730 - DNA, 120 bp, Artificial Sequence
  ENSG00000114388_1 (sequence is synthesized)
gccatgggcagcggctgccgcatcgaatgcatattcttcagcgagttccaccccacgctgggacccaagatcacctatcaggtccctgaagacttcatctcccgagagctgtttgacaca

SEQ ID NO: 201731 - DNA, 120 bp, Artificial Sequence
  ENSG00000114388_2 (sequence is synthesized)
gtccaagtgtacatcatcaccaagccagagctgcagaacaagcttatcactgtcacagctatggaaaagaagctgatcggctgtcctgtgtgcatcgaacacaagaagtacagccgcaat

SEQ ID NO: 201732 - DNA, 120 bp, Artificial Sequence
  ENSG00000114388_3 (sequence is synthesized)
gctctcctcttcaacctgggcttcgtgtgtgatgcccaggccaagacctgcgccctcgagcccattgttaaaaagctggctggctatctgaccacactagagctagagagcagcttcgtg

SEQ ID NO: 201733 - DNA, 120 bp, Artificial Sequence
  ENSG00000114388_4 (sequence is synthesized)
tccatggaggagagcaagcagaagttggtgcccatcatgaccatcttgctggaggagctaaatgcctcaggccggtgcactctgcccattgatgagtccaacaccatccacttgaaggtg

SEQ ID NO: 201734 - DNA, 120 bp, Artificial Sequence
  ENSG00000114388_5 (sequence is synthesized)
attgagcagcggccagaccctccggtggcccaggagtatgatgtacctgtctttaccaaagacaaggaggatttcttcaactcacagtgggacctcactacacaacaaatcctgccctac

SEQ ID NO: 201735 - DNA, 120 bp, Artificial Sequence
  ENSG00000114388_6 (sequence is synthesized)
acactggtgtccatcctccagtactccaatgtatactgcccaacgcccaaggtccaggacctggtagatgacaagtccctgcaagaggcatgtctatcctacgtgaccaagcaagggcac

SEQ ID NO: 201736 - DNA, 120 bp, Artificial Sequence
  ENSG00000114388_7 (sequence is synthesized)
aagagggccagtctccgggatgtgttccagctatactgcagcctgagccctggcactaccgtgcgagacctcattggccgccacccccagcagctgcagcatgttgatgaacggaagctg

SEQ ID NO: 201737 - DNA, 120 bp, Artificial Sequence
  ENSG00000114388_8 (sequence is synthesized)
atccagttcgggcttatgaagaacctcatcaggcgactacagaagtatcctgtgcgggtgactcgggaagagcagagccaccctgcccggctttatacaggctgccacagctatgacgag

SEQ ID NO: 201738 - DNA, 120 bp, Artificial Sequence
  ENSG00000114388_9 (sequence is synthesized)
atctgctgcaagacaggcatgagctaccatgagctggatgagcggcttgaaaatgaccccaacatcatcatctgctggaagtgaggctggtagtgactggatggacacattgctgtgggt

SEQ ID NO: 201739 - DNA, 120 bp, Artificial Sequence
  ENSG00000114388_10 (sequence is synthesized)
agtccctcctactaggaggcttgtcatactgtctagaggttgactcttagttctgtaaataaagacatccatttcaaacagcctttattgagtgctgtttctgggccagccgtgggagac

SEQ ID NO: 201740 - DNA, 120 bp, Artificial Sequence
  ENSG00000114388_11 (sequence is synthesized)
tgggagacccagcagtgaatgaaatagccacgagccgtgggctagatcgccatctggtgggcaggaccgacaatcgacaaataaaagtgccggttaattacaaaaaaaaaaaaaaaaaaa

SEQ ID NO: 201741 - DNA, 120 bp, Artificial Sequence
  ENSG00000114388_12 (sequence is synthesized)
gaaagattagccctacccagaggcacctgcttgccccaagggatgctgggaggcctggatggtaattgaggacctcttggaagaagtggcactgaggatatggatggggccccctgcaga

SEQ ID NO: 201742 - DNA, 120 bp, Artificial Sequence
  ENSG00000114388_13 (sequence is synthesized)
cctcactacacaacaaatcctgccctacattgatgggttccgccacatccagaagatttcagcagaggcagatgtggagctcaacctggtgcgcattgctatccagaacctgctgtgagt

SEQ ID NO: 201743 - DNA, 120 bp, Artificial Sequence
  ENSG00000114388_14 (sequence is synthesized)
ggttgggaaggcatggtcctcagaagctgagcacagctctctctctcaggtactacggcgttgtgacactggtgtccatcctccaggtaggtgagttgggtttggttaagtggagagtgg

SEQ ID NO: 201744 - DNA, 120 bp, Artificial Sequence
  ENSG00000114388_15 (sequence is synthesized)
atcatgtggctggaccagaccagggctgtgtcagcttcccaagcccctcactcaggcccctatgccttctgctaccctctagtactccaatgtatactgcccaacgcccaaggtccagga

SEQ ID NO: 201745 - DNA, 120 bp, Artificial Sequence
  ENSG00000114388_16 (sequence is synthesized)
cctggtagatgacaagtccctgcaagaggcatgtctatcctacgtgaccaagcaaggtagtggtgggttctgggggaagccatcttggggagggcagggccacatgatgagctgatccct

SEQ ID NO: 201746 - DNA, 120 bp, Artificial Sequence
  ENSG00000114388_17 (sequence is synthesized)
ggaagctagaccctttatgtctctcaggagccctggatcatggggcactgccaatccaagcaggcttcctggagatgatgggctacagagacaaaattgaagggagactacaggaaaggg

SEQ ID NO: 201747 - DNA, 120 bp, Artificial Sequence
  ENSG00000114388_18 (sequence is synthesized)
gagggacgttctcgagagctcaactggctgcctgaaggcagtagtttcccgtgctgcacgcaggcatgctgcttcattcgcagacaactgtgaggctagaggatagtcagacccaggccc

SEQ ID NO: 201748 - DNA, 120 bp, Artificial Sequence
  ENSG00000114388_19 (sequence is synthesized)
ccggctcccaatgtggcagggaagacatacgtcacattggcagtgtttgtaggatatcgggctgtagggatccggttggggggttccaggtcccacagaaggtgagttgggtgacccatg

SEQ ID NO: 201749 - DNA, 120 bp, Artificial Sequence
  ENSG00000114388_20 (sequence is synthesized)
agtatccctgaactgagtgaagagtaaatgatgcataggaagtttaggtaaggcaggagaaagtgttccaggtagagggaacagcatatgcagaagccaggaaggaggtgagatcatagc

SEQ ID NO: 201750 - DNA, 120 bp, Artificial Sequence
  ENSG00000114388_21 (sequence is synthesized)
gtatgtttggaaacagaaagaagtaataggcctgagtggatgggagagaggggaacgctggagaagaggacttgggcttggggggcatgaggaggtcaccatttgtactacacccagtac

SEQ ID NO: 201751 - DNA, 120 bp, Artificial Sequence
  ENSG00000114388_22 (sequence is synthesized)
gtctccaaagtcccccaaacctgggaccctgcaaaccagctcaggactcagggcagccaaccagccaggggtcctgggatgtgcccaccatgctttccatgctctgtctagctagagagc

SEQ ID NO: 201752 - DNA, 120 bp, Artificial Sequence
  ENSG00000114388_23 (sequence is synthesized)
gacagcagaggggtagaggagagatgggaaagtgaacccagctagtcagggagaagggcaagactcatgaacacattggtgggcaggaaatagccatgggctgaggtgcccatgtccagg

SEQ ID NO: 201753 - DNA, 120 bp, Artificial Sequence
  ENSG00000114388_24 (sequence is synthesized)
atcacctatcaggtccctgaagacttcatctcccgagagctgtttgacacagtccaagtgtacatcatcaccaagccagagctgcagaacaagcttatcactgtcacagctatggaaaag

SEQ ID NO: 201754 - DNA, 120 bp, Artificial Sequence
  ENSG00000114391_0 (sequence is synthesized)
ctttcttttcgccatcttttgtctttccgtggagctgtcgccatgaaggtcgagctgtgcagttttagcgggtacaagatctaccccggacacgggaggcgctacgccaggaccgacggg

SEQ ID NO: 201755 - DNA, 120 bp, Artificial Sequence
  ENSG00000114391_1 (sequence is synthesized)
aaggttttccagtttcttaatgcgaaatgcgagtcggctttcctttccaagaggaatcctcggcagataaactggactgtcctctacagaaggaagcacaaaaagggacagtcggaagaa

SEQ ID NO: 201756 - DNA, 120 bp, Artificial Sequence
  ENSG00000114391_2 (sequence is synthesized)
gaggaatcagaaacctgaagttagaaaggctcaacgagaacaagctatcagggctgctaaggaagcaaaaaaggctaagcaagcatctaaaaagactgcaatggctgctgctaaggcacc

SEQ ID NO: 201757 - DNA, 120 bp, Artificial Sequence
  ENSG00000114391_3 (sequence is synthesized)
tacaaaggcagcacctaagcaaaagattgtgaagcctgtgaaagtttcagctccccgagttggtggaaaacgctaaactggcagattagatttttaaataaagattggattataactcta

SEQ ID NO: 201758 - DNA, 120 bp, Artificial Sequence
  ENSG00000114391_4 (sequence is synthesized)
ctattcggatggattttaggtttgggtcttcagtaattaaagttaccatatagattaatatatgttaagctgatttggtggttaatgaaaattattgacaaattctttggatttagccta

SEQ ID NO: 201759 - DNA, 120 bp, Artificial Sequence
  ENSG00000114391_5 (sequence is synthesized)
caaataaatggaggtagggaaggaaggaatatggtcattgtacttgtccagtacagtctaactctaataataagttgtaccactaaggagtaaagtgcttttgccttaagttacttttac

SEQ ID NO: 201760 - DNA, 79 bp, Artificial Sequence
  ENSG00000114391_6 (sequence is synthesized)
ttctttactttcttgaacaatacaacaggaaaatggggtgcagtggcgtgatctgatctcagctcactgcaacctctgc

SEQ ID NO: 201761 - DNA, 120 bp, Artificial Sequence
  ENSG00000114391_7 (sequence is synthesized)
cgagtagctgggagtacaggtgcgcgccatcacgcccggctgattttttgtttgtttgtttgtttgtttaagtagagacagggtttcaccatgtcggacaggctggtcttgaactcttga

SEQ ID NO: 201762 - DNA, 120 bp, Artificial Sequence
  ENSG00000114391_8 (sequence is synthesized)
actgagcccggctggaaaatttattttcagtctaaattgtgataaatgaaagtttcacagttttaaggtattgaatgcaaggctcaattggaaatgatgtttgtaaccaattacttggcc

SEQ ID NO: 201763 - DNA, 120 bp, Artificial Sequence
  ENSG00000114391_9 (sequence is synthesized)
aatggttcaggtctccagagaggtggtcctctccataagccaaagcatgtgttactgttaggaactgggaaaaataaaggttggcctttttgtttgtttgtttgtttgtttttttccccc

SEQ ID NO: 201764 - DNA, 120 bp, Artificial Sequence
  ENSG00000114391_10 (sequence is synthesized)
tttgtttgtttgtttgtttgtttttttcccccttcaacacagggcctcactctgtagcccagctggagtgcagtggcacaatcacggcttgctgcagcctcaacctcctgggctcaagtg

SEQ ID NO: 201765 - DNA, 120 bp, Artificial Sequence
  ENSG00000114391_11 (sequence is synthesized)
agtgatcctcctgactcaggcccctaagtagctgggactacaggcaagcactaccaaacccagctaataggtattttagttgagatggtttcgccatgttgcccaggctggcctcaaact

SEQ ID NO: 201766 - DNA, 120 bp, Artificial Sequence
  ENSG00000114391_12 (sequence is synthesized)
aagtgttgggatgagcccctgcaccatgcctggttttgaaagttactatggttatctacattgataacattgagaaaagctgagtaaacactgtactgttactgagatcttttctgtgag

SEQ ID NO: 201767 - DNA, 120 bp, Artificial Sequence
  ENSG00000114391_13 (sequence is synthesized)
tttctgttaggatgcatttcaggatcctacactgcacttggttgtgtctcatttcatccagtctgtgagggtatcttagtctttgtctttcattgtaaagatgggctttaaatatttaag

SEQ ID NO: 201768 - DNA, 120 bp, Artificial Sequence
  ENSG00000114391_14 (sequence is synthesized)
ggtagtcacattaaaagattggcattaggaatgcagttaaattactaagaaagtgatctaagctacataaacaatctggatgtgagagatgggtaataatagggtaacaaaagttttgtg

SEQ ID NO: 201769 - DNA, 120 bp, Artificial Sequence
  ENSG00000114391_15 (sequence is synthesized)
gagtaatattgtgttatctttttacaggcacctacaaaggcagcacctaagcaaaagattgtgaagcctgtgaaagtttcagctccccgagttggtggaaaacgctaaactggcagatta

SEQ ID NO: 201770 - DNA, 120 bp, Artificial Sequence
  ENSG00000114391_16 (sequence is synthesized)
tttcgccatcttttgtctttccgtggagctgtcgccatgaagtaagcacgacccgtggttcccaatccgcttacatcctcgggcagaactcctctctgtcgtccctggcatggctgtaga

SEQ ID NO: 201771 - DNA, 120 bp, Artificial Sequence
  ENSG00000114391_17 (sequence is synthesized)
taaaaagccgcgtcggcttcacctaccttcttgtactccgaggaggaaaggctggtttaattcggtttaggcgggtttattccccacatcaccactggcctctggaagtcttcgtggacg

SEQ ID NO: 201772 - DNA, 120 bp, Artificial Sequence
  ENSG00000114391_18 (sequence is synthesized)
gtaactgatgtcccggtgtaagggaaataactgaggtacggaggtaccctttggaatcctgggacggacaagagcagaatgcttcccagaaggacgcaccaccctgtcctttgctatgag

SEQ ID NO: 201773 - DNA, 120 bp, Artificial Sequence
  ENSG00000114391_19 (sequence is synthesized)
cctagatttcctgctctcgagaaaagactaaacgcaaggaccttcatagtgtgacacagttacctgccagttatgtgacagccttttggtccttgtgggcctcagttttgtaaaatgata

SEQ ID NO: 201774 - DNA, 120 bp, Artificial Sequence
  ENSG00000114395_0 (sequence is synthesized)
ggaagtcctgggtgggtagacgtcgcacccggaagtaaagcggctccgtgacggagcggcggtgcgcgcggcagggcccggagtatcccgctttctttggaggaaaccaccgcatcagat

SEQ ID NO: 201775 - DNA, 120 bp, Artificial Sequence
  ENSG00000114395_1 (sequence is synthesized)
ctgcgctgcggcagaggcagccttttctccagtgaggagtgaacagtgggcacctgagatcctggcccacgctactatgctttcaggctacaaccactagcacggctgacgatggccctt

SEQ ID NO: 201776 - DNA, 120 bp, Artificial Sequence
  ENSG00000114395_2 (sequence is synthesized)
tctgcggagaccgagtcacacatctaccgagctctgcgtactgcttctggcgctgccgcccaccttgtggccctgggctttaccatctttgtggctgtgcttgccaggcctggctccagc

SEQ ID NO: 201777 - DNA, 120 bp, Artificial Sequence
  ENSG00000114395_3 (sequence is synthesized)
ctgttctcctggcacccggtgcttatgtctttggctttctccttcctgatgaccgaggcactactggtgttttctcctgagagttcgctgctgcactccctctcacggaaaggccgagca

SEQ ID NO: 201778 - DNA, 120 bp, Artificial Sequence
  ENSG00000114395_4 (sequence is synthesized)
cgctgccactgggtgctgcagctgctggccctgctgtgtgcactgctgggcctcggccttgtcatcctccacaaagagcagcttggcaaagcccacctggttacgcggcatgggcaggca

SEQ ID NO: 201779 - DNA, 120 bp, Artificial Sequence
  ENSG00000114395_5 (sequence is synthesized)
ggctgcagtgctcaggtggggtggggctgctctaccccaagctgctgccccgatggcccctggcgaagctcaagctataccatgctacttctgggctggtgggctacctgctgggtagtg

SEQ ID NO: 201780 - DNA, 120 bp, Artificial Sequence
  ENSG00000114395_6 (sequence is synthesized)
ccagcctcttgctgggcatgtgctcactctggttcactgcctctgtcactggtgcagcctggtacctggctgtattatgccctgtcctcaccagcttggtcattatgaaccaggtgagca

SEQ ID NO: 201781 - DNA, 120 bp, Artificial Sequence
  ENSG00000114395_7 (sequence is synthesized)
atgcctacctataccgcaagaggatccaaccatgagctcttcccagcctaggggaagcctggatttgcccctccatgtaggagctgggcctagggacctgttgaactctctcagctgagt

SEQ ID NO: 201782 - DNA, 120 bp, Artificial Sequence
  ENSG00000114395_8 (sequence is synthesized)
caggggacacctcaggcactgggacagttgggcatttggaggcccgtgtgtgaattcctgctcctcatgctggagtgcctcccatttccttcccctttctctgtcatcccagaggaacat

SEQ ID NO: 201783 - DNA, 120 bp, Artificial Sequence
  ENSG00000114395_9 (sequence is synthesized)
aggcatcatgtgtctggatgaagctggggctgcaagactgcctctcctgcaaggcagctcatacttgtactgtatgttcagaaattttaggagagaaaaaagtaaaaaatttgtaaaaaa

SEQ ID NO: 201784 - DNA, 120 bp, Artificial Sequence
  ENSG00000114395_10 (sequence is synthesized)
gaggcaggcaagtccctagcgtggaggggcagcatgctggcagcacttggggaggcggtgcgctaagggattcacgctgtaactgggaccgcagcagggaactacaatttccatagtgct

SEQ ID NO: 201785 - DNA, 120 bp, Artificial Sequence
  ENSG00000114395_11 (sequence is synthesized)
ccgcgccctcccagctggctctactgccggcgacggcgtggtacacgctgggatttgtagtcttacatggctttgcgcctcctacctggaaggcgggccagcgattggtaccagttcaga

SEQ ID NO: 201786 - DNA, 120 bp, Artificial Sequence
  ENSG00000114395_12 (sequence is synthesized)
catgggtacacgttgacaggccgccggccgtcgactggcatgttgtgaccattcctggtgctggtcttggtactgttctttcctaccataacttattggaagagggtggcattcctgcct

SEQ ID NO: 201787 - DNA, 120 bp, Artificial Sequence
  ENSG00000114395_13 (sequence is synthesized)
cagaggcgtccccacctcctgtgaacacttgtcagagacagcctcgaggcctgtgtcgctggggcacgcaagcttgccaatccctctgcccaatggcgcctgcgcagcgcgactcagagg

SEQ ID NO: 201788 - DNA, 120 bp, Artificial Sequence
  ENSG00000114395_14 (sequence is synthesized)
ctcggcgtcttgagggtctgtgcctggcaggctgatggtgatggaggatggggcacccacatcgtagcgcttcaccgtcttctggcatatctttaccttcaccaggaggctgtgcaccaa

SEQ ID NO: 201789 - DNA, 120 bp, Artificial Sequence
  ENSG00000114395_15 (sequence is synthesized)
gttcgccagcaaacccaccacaggctgcaggatctcagggaagaaagtggcgaaagcaaagtggtcagccatgtcccctcggccccggctatggcgctggtagaagcgaagatataccca

SEQ ID NO: 201790 - DNA, 120 bp, Artificial Sequence
  ENSG00000114405_0 (sequence is synthesized)
ggtgccttcccggaagggctcagaggcgggctcgctttgattaaagatgacttccttgtttgctcaagaaattcgcctttctaaaagacatgaagaaatagtatcacaaagattaatgtt

SEQ ID NO: 201791 - DNA, 120 bp, Artificial Sequence
  ENSG00000114405_1 (sequence is synthesized)
acttcaacaaatggagaataaattgggtgatcaacacacagaaaaggcatctcaactccaaactgttgagactgcttttaaaaggaaccttagtcttttaaaggatatagaagcagcaga

SEQ ID NO: 201792 - DNA, 120 bp, Artificial Sequence
  ENSG00000114405_2 (sequence is synthesized)
tcccaaatgggaacagtttcttttaggaagagcaccatatccttttgctgttgaaaatcaaaatgaagcagaaaataccattcaaaatgaggcacagcgataacttcttcacatgctatt

SEQ ID NO: 201793 - DNA, 120 bp, Artificial Sequence
  ENSG00000114405_3 (sequence is synthesized)
tcaaaaagcctgtttaataaagctgaatgttaaggtgtatgtaggttattgcaggaactttaggaattaaatatgttcatattcttcgattatctcctaagtgacagtgaagatatgaga

SEQ ID NO: 201794 - DNA, 120 bp, Artificial Sequence
  ENSG00000114405_4 (sequence is synthesized)
atttactggcaagtcacatgttatcacctactactatttcaaggtcatgaatttgctttctaccaaacccatagatgtgttaaacacgaatattaaaaggtggactctttattaattaaa

SEQ ID NO: 201795 - DNA, 120 bp, Artificial Sequence
  ENSG00000114405_5 (sequence is synthesized)
gtgaccacgccctggcctgcgctaaggccccggcgtcggcgcagtagctggtgccttcccggaagggctcagaggcgggctcgggcaagcactttaaccttttaagcccaaccagatgag

SEQ ID NO: 201796 - DNA, 120 bp, Artificial Sequence
  ENSG00000114405_6 (sequence is synthesized)
agaggcgggctcggtgagtggagtcggacagtgggtgggtgccctgactgcctgacggccgcgcagggccttgcaggaccgctggggaggatgttgttaacgtaaagagccaggctgatg

SEQ ID NO: 201797 - DNA, 120 bp, Artificial Sequence
  ENSG00000114405_7 (sequence is synthesized)
aggaaggttcatgagtcctttgggtataagcgggagttggggcggccggagggcagatgactctgagaagggcaagcactttaaccttttaagcccaaccagatgagttgcctgcagttt

SEQ ID NO: 201798 - DNA, 120 bp, Artificial Sequence
  ENSG00000114405_8 (sequence is synthesized)
attgtcagtgttgtgagtgtgttgctttaaaaaaaaaaaaatttacaatcattctcctctaagcaggtatcttggttctggttttaagttaagttttttagaatccttactttttaggga

SEQ ID NO: 201799 - DNA, 120 bp, Artificial Sequence
  ENSG00000114405_9 (sequence is synthesized)
caaggtataggatcaacatggttcttttttttttttaaaccattattgtttcttttaacaaattaaaagacaatgacacctaaactgctctagcaaaataacttatgagaaaataaattc

SEQ ID NO: 201800 - DNA, 120 bp, Artificial Sequence
  ENSG00000114405_10 (sequence is synthesized)
ataggattttgtccctcacagatagccaaagctctgcaagttctggagacagaaagaactgaactataaagcagtcaataagtagccagtttcaggaagactcagacttggttttgaaaa

SEQ ID NO: 201801 - DNA, 120 bp, Artificial Sequence
  ENSG00000114405_11 (sequence is synthesized)
aggatgccttttagagctgggaaaggttattggattttgacttggttatttaaagattgccaaccttgtgaatgcaaataaccccactcttgtcttttcatctttaaacttccccttccc

SEQ ID NO: 201802 - DNA, 120 bp, Artificial Sequence
  ENSG00000114405_12 (sequence is synthesized)
gcttccttctaatttcattattcctgaaaaaactgtcagtcagaaagcgttgggtcacaaccctaaacagctttgagattcctcagtccaccactgcttgagcacttaaaaaaaaaaaag

SEQ ID NO: 201803 - DNA, 120 bp, Artificial Sequence
  ENSG00000114405_13 (sequence is synthesized)
aaaaaaaaaatatgtatatataactttccagctatagaggcagcctctgctagtaaagggtacctatgctatattacaatgaaatgttttaaatttcaaactggtttatgtttttaaaag

SEQ ID NO: 201804 - DNA, 120 bp, Artificial Sequence
  ENSG00000114405_14 (sequence is synthesized)
ttgaaacgtccgttgtgccgataagttcctttaaactaccatcttggaaatatcctgttgagtgggtgttggtgtgggtaacaataatgttgttttcataatatgtgctggcagattagc

SEQ ID NO: 201805 - DNA, 120 bp, Artificial Sequence
  ENSG00000114405_15 (sequence is synthesized)
acacttctctacagtgttaacagttgtaattaaggaataaacagcacagggtgtcagtccgatgacaatttcatctatagtgtcacaatacaaaatgtcacaaaatattagaactgttat

SEQ ID NO: 201806 - DNA, 120 bp, Artificial Sequence
  ENSG00000114405_16 (sequence is synthesized)
ataactataaaaagtatcagcttaaaagctaaaagcctttgaaaaaagaagacagaggaaggaagaaaaaagaaaactggcatagcaaccagaacaattttataccttctcaagaatgtt

SEQ ID NO: 201807 - DNA, 120 bp, Artificial Sequence
  ENSG00000114405_17 (sequence is synthesized)
ctgtcatgaaaataaattgataatttttttctgttacattacagtttggtttctagccatccagttgatttagcaggagaatgcaggtttttttagcagctttgaattggtaaacagatt

SEQ ID NO: 201808 - DNA, 120 bp, Artificial Sequence
  ENSG00000114405_18 (sequence is synthesized)
tagatgtagtagaaaggaacatgaggaagttgtttttttttttaacatccaatctttcccagcatatgcacataagaaggtgaatgaagcaatgtgaaacttacttctctttagtcaagt

SEQ ID NO: 201809 - DNA, 120 bp, Artificial Sequence
  ENSG00000114405_19 (sequence is synthesized)
gaaaaaaaggctaaacatttgttagatggtaaaatattgtgtcaagcgagtaggcaaattccaaaattacacagtggttgatacattaacatcctcaaatatttgagcatgcacttcctt

SEQ ID NO: 201810 - DNA, 120 bp, Artificial Sequence
  ENSG00000114405_20 (sequence is synthesized)
tgagatctgtaaattaaatcaccagtgggttagataaaaatacaaaacaaatggcaatctaaccatctcagaaaaggttcaggtttttttctccctaaaactgagaacttgctaaataat

SEQ ID NO: 201811 - DNA, 120 bp, Artificial Sequence
  ENSG00000114405_21 (sequence is synthesized)
ttttgaaaagcataaacgtaatacaccctgggttacgatcgagggcagaagggaaggcatttccaaggctcctgctgtagtgtttttcccatttttgttaatacctcaaaaactcccaga

SEQ ID NO: 201812 - DNA, 120 bp, Artificial Sequence
  ENSG00000114405_22 (sequence is synthesized)
gatgactttattcctggcccctgcagagctcccctccccacccccaccttgtagactgtaacagattgcaccacatggtgtctgtttaaaaaaaaaaaaaaaattcccatagggacctgg

SEQ ID NO: 201813 - DNA, 120 bp, Artificial Sequence
  ENSG00000114405_23 (sequence is synthesized)
atatcccattaatgggctttatgttcctcatggcaaattagctttacacaggaatttccaaacattgttttctgttaagaagggaggaataccatatataatgtatattttttctacaat

SEQ ID NO: 201814 - DNA, 120 bp, Artificial Sequence
  ENSG00000114405_24 (sequence is synthesized)
tagtaggaatcagacaaggaaaaggaaatgtcatctattcatacctttctctccaaattcagtgttctttccatatgctccattgtactccaccactcttctccatgaaaactatgaatt

SEQ ID NO: 201815 - DNA, 120 bp, Artificial Sequence
  ENSG00000114405_25 (sequence is synthesized)
tatggtttttttttagaaaaatggagttttcaaaatgaaagtcaaataattttttccaaagccgtttgtggactgttgcaaatgcataaatattcaaagctcattttctgcagaaacact

SEQ ID NO: 201816 - DNA, 120 bp, Artificial Sequence
  ENSG00000114405_26 (sequence is synthesized)
tctggtatatgaaattattaaactgtagaatgctaaagatcagaagaagctacagtttttctttaaacttgaaaaaaaattaagaagtattaaggaaaaagcttaatactctggaaacca

SEQ ID NO: 201817 - DNA, 120 bp, Artificial Sequence
  ENSG00000114405_27 (sequence is synthesized)
gacatctggtctttctcatgcgtagggagcagtgtgaatgaaagtgaagtcaaacggacagtttttttctgcattatgcacaaggtgttttaaattgtcagcttaaggtttagatgaaga

SEQ ID NO: 201818 - DNA, 120 bp, Artificial Sequence
  ENSG00000114405_28 (sequence is synthesized)
taatctttaactttgtttacaatttttgctattttgcattatccccctttttccataaaaaataaagtgaatatgtgtgcatatttattttgaatcaaaattaaacttattttgagatta

SEQ ID NO: 201819 - DNA, 120 bp, Artificial Sequence
  ENSG00000114405_29 (sequence is synthesized)
cggaagggctcagaggcgggctcgtgctgatagtgggcctcacagaaaagttaccatgaaccgactttccgggattcccttggcgctgcattaattggcctcgttgcaaaaggaaaccga

SEQ ID NO: 201820 - DNA, 120 bp, Artificial Sequence
  ENSG00000114405_30 (sequence is synthesized)
tacttcaataaacatttattgagcatctattatatcacaaacacagtgcttgctgctagagatgctgcctcttctctttttttgcattctttgagtcattgcatatgcaatttttaaaat

SEQ ID NO: 201821 - DNA, 120 bp, Artificial Sequence
  ENSG00000114405_31 (sequence is synthesized)
cctactttcctcgtatgtttttaaactttggaaagaattttagtggctctaccatagaagtcattatgaaagtaaaataaatgagacttagccgggcacagtggctcatgtctataatct

SEQ ID NO: 201822 - DNA, 120 bp, Artificial Sequence
  ENSG00000114405_32 (sequence is synthesized)
ttagtcttttaaaggtaagtttccatgacttgaatatagagatttatcccaccttctcaaaaatcttttaggtaagtttcataaaattgatttatataacttattggttctcagtaataa

SEQ ID NO: 201823 - DNA, 120 bp, Artificial Sequence
  ENSG00000114405_33 (sequence is synthesized)
gtagaattactaaagcagcatcttttttaaaagcccatgtcagttagataagtagcatatgtatcctcatttttttaaattaaaaaaattgaactttgcttaagctaaatgtttgcaatc

SEQ ID NO: 201824 - DNA, 120 bp, Artificial Sequence
  ENSG00000114405_34 (sequence is synthesized)
aactagaaaatcaatgactacagaaggaattgtaaggtcacccttttgcaagaagtaagaaacagaagatgtacctttccatctttcatcttcttttatttgaaaggaaatcctgaaagg

SEQ ID NO: 201825 - DNA, 120 bp, Artificial Sequence
  ENSG00000114405_35 (sequence is synthesized)
ccataaagtacctataagatattgagagccaactcacaactatcaaacatcataaaaacaagaacaatttgattttgtctgactaggtaaacacacagaattcatatctatgataacaga

SEQ ID NO: 201826 - DNA, 120 bp, Artificial Sequence
  ENSG00000114416_0 (sequence is synthesized)
cctttgcggttccaacatggcggagctgacggtggaggttcgcggctctaacggggctttctacaagggatttatcaaagatgttcatgaagactcccttacagttgtttttgaaaataa

SEQ ID NO: 201827 - DNA, 120 bp, Artificial Sequence
  ENSG00000114416_1 (sequence is synthesized)
ttggcaaccagaacgccaggttccatttaatgaagttagattaccaccaccacctgatataaaaaaagaaattagtgaaggagatgaagtagaggtatattcaagagcaaatgaccaaga

SEQ ID NO: 201828 - DNA, 120 bp, Artificial Sequence
  ENSG00000114416_2 (sequence is synthesized)
gccatgtgggtggtggttggctaaagttcggatgatgaaaggagaattttatgtcattgaatatgctgcttgtgacgctacttacaatgaaatagtcacatttgaacgacttcggcctgt

SEQ ID NO: 201829 - DNA, 120 bp, Artificial Sequence
  ENSG00000114416_3 (sequence is synthesized)
caatcaaaataaaactgtcaaaaaaaataccttctttaaatgcacagtggatgttcctgaggatttgagagaggcgtgtgctaatgaaaatgcacataaagattttaagaaagcagtagg

SEQ ID NO: 201830 - DNA, 120 bp, Artificial Sequence
  ENSG00000114416_4 (sequence is synthesized)
agcatgcagaattttttaccatccagaaacaacacagctaatgatactgtctgccagtgaagcaactgtgaagagagtaaacatcttaagtgacatgcatttgcgaagtattcgtacgaa

SEQ ID NO: 201831 - DNA, 120 bp, Artificial Sequence
  ENSG00000114416_5 (sequence is synthesized)
gttgatgcttatgtccagaaatgaagaggccactaagcatttagaatgcacaaaacaacttgcagcagcttttcatgaggaatttgttgtgagagaagatttaatgggcctggcaatagg

SEQ ID NO: 201832 - DNA, 120 bp, Artificial Sequence
  ENSG00000114416_6 (sequence is synthesized)
aacacatggtagtaacatccagcaagctaggaaggttcctggagttaccgccattgagctagatgaagatactggaacattcagaatctacggagagagtgctgatgctgtaaaaaaggc

SEQ ID NO: 201833 - DNA, 120 bp, Artificial Sequence
  ENSG00000114416_7 (sequence is synthesized)
tagaggtttcttggaatttgtggaggattttattcaggttcctaggaatctcgttggaaaagtaattggaaaaaatggcaaagttattcaagaaatagtggacaaatctggtgtggttcg

SEQ ID NO: 201834 - DNA, 120 bp, Artificial Sequence
  ENSG00000114416_8 (sequence is synthesized)
agtgagaattgaaggggacaatgaaaataaattacccagagaagacggtatggttccatttgtatttgttggcactaaagaaagcattggaaatgtgcaggttcttctagagtatcatat

SEQ ID NO: 201835 - DNA, 120 bp, Artificial Sequence
  ENSG00000114416_9 (sequence is synthesized)
tgcctatctaaaggaagtagaacagctaagaatggaacgcctacagattgatgaacagctgcgacagattggttctaggtcttatagcggaagaggcagaggtcgtcggggacctaatta

SEQ ID NO: 201836 - DNA, 120 bp, Artificial Sequence
  ENSG00000114416_10 (sequence is synthesized)
cacctccggttatggtacaaattctgagctgtctaacccctctgaaacggaatctgagcgtaaagacgagctgagtgattggtcattggcaggagaagatgatcgagacagccgacatca

SEQ ID NO: 201837 - DNA, 120 bp, Artificial Sequence
  ENSG00000114416_11 (sequence is synthesized)
gcgtgacagcaggagacgcccaggaggaagaggcagaagtgtttcagggggtcgaggtcgtggtggaccacgtggtggcaaatcctccatcagttctgtgctcaaagatccagacagcaa

SEQ ID NO: 201838 - DNA, 120 bp, Artificial Sequence
  ENSG00000114416_12 (sequence is synthesized)
tccatacagcttacttgataatacagaatcagatcagactgcagacactgatgccagcgaatctcatcacagtactaaccgtcgtaggcggtctcgtagacgaaggactgatgaagatgc

SEQ ID NO: 201839 - DNA, 120 bp, Artificial Sequence
  ENSG00000114416_13 (sequence is synthesized)
tgttctgatggatggaatgactgaatctgatacagcttcagttaatgaaaatgggctagtcacagttgcagattatatttctagagctgagtctcagagcagacaaagaaacctcccaag

SEQ ID NO: 201840 - DNA, 120 bp, Artificial Sequence
  ENSG00000114416_14 (sequence is synthesized)
ggaaactttggctaaaaacaagaaagaaatggcaaaagatgtgattgaagagcatggtccttcagaaaaggcaataaacggcccaactagtgcttctggcgatgacatttctaagctaca

SEQ ID NO: 201841 - DNA, 120 bp, Artificial Sequence
  ENSG00000114416_15 (sequence is synthesized)
gcgtactccaggagaagaaaagattaataccttaaaagaagaaaacactcaagaagcagcagtcctgaatggtgtttcataaactgaagaagttcctagtttacagttcttttacattac

SEQ ID NO: 201842 - DNA, 120 bp, Artificial Sequence
  ENSG00000114416_16 (sequence is synthesized)
atttacaatagtgcttgtacaagcttgccaaagatagaatatggatcgccagtctttacatcgcactttcagttcctccatttggaattcaaaaaggggagggatcctgaagaaatcata

SEQ ID NO: 201843 - DNA, 120 bp, Artificial Sequence
  ENSG00000114416_17 (sequence is synthesized)
tgttaaacatactttgacacctactgtgttataaaatatatcatcagatgtgccttgagaatagtatatgtaacattaaaaaaaagttgctggctataggaaatgttattttgttttcaa

SEQ ID NO: 201844 - DNA, 120 bp, Artificial Sequence
  ENSG00000114416_18 (sequence is synthesized)
aatatggcagagatggggggtggtgggtggggtgggatccctaacgtaatattctttatgaaagcattagctgcttttgttacatttttaatatgcaaccacttcttcacctgaggaaaa

SEQ ID NO: 201845 - DNA, 120 bp, Artificial Sequence
  ENSG00000114416_19 (sequence is synthesized)
ctagaatgaaatgcagtctaaaatattttgcactgaattgtaatttcttcattagtttagtctggaaactggtctgttttaatgtgttttttaaatgctgtatgtagaggaaaatctgca

SEQ ID NO: 201846 - DNA, 120 bp, Artificial Sequence
  ENSG00000114416_20 (sequence is synthesized)
gaccactggaatacatttgttaaactctcatctgcagggacactgggcgatacttggcagtgactgttctaccttgaggctttgtttggtttatttattaaagtgtacagtatttaaaaa

SEQ ID NO: 201847 - DNA, 120 bp, Artificial Sequence
  ENSG00000114416_21 (sequence is synthesized)
tcaaacatagctttagttaaaacactaagctgaattagtcatgtccattcagacataacctgaactactgaaaagatcaatttccagaaggtttattctgtataaactacatgttagtct

SEQ ID NO: 201848 - DNA, 120 bp, Artificial Sequence
  ENSG00000114416_22 (sequence is synthesized)
tttttttccttttttttttttttatttcggttgtttgatgtgcaatatgtttttgtatgcaggtagtaaataaactttgatcttccatttgctgaatttttttaactttctactttttac

SEQ ID NO: 201849 - DNA, 120 bp, Artificial Sequence
  ENSG00000114416_23 (sequence is synthesized)
actttctactttttacaccaattgttgcaaaatagttggagctattaataggcttaggatagtatactttgctttttaaaaagcatttatacttgctcataaatagcattaaaatgtcag

SEQ ID NO: 201850 - DNA, 120 bp, Artificial Sequence
  ENSG00000114416_24 (sequence is synthesized)
ttggccatttaatcattttgtaatgaatcatctgaaatctttacacaagtttaggctgttagatgcataggtaattaataatacatgtgataattagcaaaaaaacctaacaaaattcta

SEQ ID NO: 201851 - DNA, 120 bp, Artificial Sequence
  ENSG00000114416_25 (sequence is synthesized)
atcaaaggcaactttggaagacaatgggggatagaagggatgacaagcaatttttaaataataggccaatgatttgctttattcattctcaacttattttgaaggctctcatatcagtga

SEQ ID NO: 201852 - DNA, 120 bp, Artificial Sequence
  ENSG00000114416_26 (sequence is synthesized)
ccaaaaatcagttattaaactttatgtatatattttagccagagcttaatttttatgaagataaagacatgaagtttaacaatggacaacagttagtacagctaattgtgaggtcaagta

SEQ ID NO: 201853 - DNA, 120 bp, Artificial Sequence
  ENSG00000114416_27 (sequence is synthesized)
attgttagacataggggaaggctttgttccacaatattatatggaccactgaacaagaatgacagccctttgttatcacttggcatatgaaaagtgttgtgtgcatagtttgtgttaatt

SEQ ID NO: 201854 - DNA, 120 bp, Artificial Sequence
  ENSG00000114416_28 (sequence is synthesized)
ttttatgtgcataaaaatgtgattttaatttatatgctctgaaggataattcagggtatagttaaaaatgtacaatgtgccagttcagtatatataaccctagccctcaaattattctga

SEQ ID NO: 201855 - DNA, 120 bp, Artificial Sequence
  ENSG00000114416_29 (sequence is synthesized)
ttaaggttaaaatgtgctggtattacgtgctttttcctgaggccttctgattggttcttggtaacagaattttaaagtaaggtgtgagtagtgcaactcctgtcctttatatataaagat

SEQ ID NO: 201856 - DNA, 120 bp, Artificial Sequence
  ENSG00000114416_30 (sequence is synthesized)
atcaagtaatttcatgtcctgatatttaaaaaaattacccacaaatgtgtttttttaaatcgatcaaagctagcaacaggttaaattgtctcagttctcttacataattgggttaaaaat

SEQ ID NO: 201857 - DNA, 120 bp, Artificial Sequence
  ENSG00000114416_31 (sequence is synthesized)
tataaggtattagaagaattttaattaatgccaaattggtaaatatggtgtaaaaaaaaaaaaaaagacttttcattttctcccacatagaatagtcagatatattaaacatcccttttc

SEQ ID NO: 201858 - DNA, 120 bp, Artificial Sequence
  ENSG00000114416_32 (sequence is synthesized)
cataaagatggtttcaatgggaatggaagaaacaaaatcttaaaagagtgagtatagctgaaccaattcttcattctagcaataaccacactaagttcattactttacaaatgactaaac

SEQ ID NO: 201859 - DNA, 120 bp, Artificial Sequence
  ENSG00000114416_33 (sequence is synthesized)
ccaatgtcttgtcctttaaaaaatataggtagtgcagaattgtgataaatacgcatttgtttttttagagagccccactccccaaagggtagccattaattcaggtagccttttaaatgt

SEQ ID NO: 201860 - DNA, 120 bp, Artificial Sequence
  ENSG00000114416_34 (sequence is synthesized)
acttgccactatacactaaacagacacttaagcaaaagatgtattctggagcctggcacagtagcttatgtctttggttctagctactcaggagcctgaggtgggagcatcatttgaact

SEQ ID NO: 201861 - DNA, 120 bp, Artificial Sequence
  ENSG00000114416_35 (sequence is synthesized)
cagttctgggccactgagaccctctttaaagagaaggaaaaaaaggtattctggaagatcttgtgcagttgcaacaatgtttcagcatatatatgtgaattcatatatgacacctgaacg

SEQ ID NO: 201862 - DNA, 120 bp, Artificial Sequence
  ENSG00000114416_36 (sequence is synthesized)
gaatcatgaagtaacagctgagattatatggtggcaaaaatgacctgcttttcctgaagctttgggaggcctaggattcttgctttaggcatcacctttgttaagccttaaagggggcta

SEQ ID NO: 201863 - DNA, 120 bp, Artificial Sequence
  ENSG00000114416_37 (sequence is synthesized)
caacttgtgcaaaatggtgtctctggtaacacttcagaaataattggcaaaagtgtaataggaatacacaaatctttattttgaaataatcttgtattttaatgtggaattagaagcagc

SEQ ID NO: 201864 - DNA, 120 bp, Artificial Sequence
  ENSG00000114416_38 (sequence is synthesized)
acatcaaactggtgagttcacagaaacttacctgagatgatgctgggttccattgctgttgtgctaagtcacgtatttttgtagctgctgttagctgtgtctagcgttttgtaacctaag

SEQ ID NO: 201865 - DNA, 120 bp, Artificial Sequence
  ENSG00000114416_39 (sequence is synthesized)
gagggtcttatagaagttggtatgttaactaaatcttggactgggaaacagcaccatttgtatcctctgcaaacagatttacgcttttgaggctcaaaccaactagtgttctcatgggct

SEQ ID NO: 201866 - DNA, 120 bp, Artificial Sequence
  ENSG00000114416_40 (sequence is synthesized)
gttgcctaaggacagataaacatggaaaacaggctatgtccagggacagatgattggtggttaagaattacagtaaaggaaaattacacctggattttcttctgtaaagtttcaaggaac

SEQ ID NO: 201867 - DNA, 120 bp, Artificial Sequence
  ENSG00000114416_41 (sequence is synthesized)
ttggatttgaactgtgaatctactgttttggcaaaaaatctcaaagaaaaggatgtttgttactgtctcagtcttcctgtctttgctacacgatttggatcccttacgctttttcgttaa

SEQ ID NO: 201868 - DNA, 120 bp, Artificial Sequence
  ENSG00000114416_42 (sequence is synthesized)
gaatatctgtctgctatagtgaatttgctagccccttatttttttttttaattttagttctttattagaacgtgtacttgaatggactgtagttgctcataacccatgttaatctctgat

SEQ ID NO: 201869 - DNA, 120 bp, Artificial Sequence
  ENSG00000114416_43 (sequence is synthesized)
agtatttgggttttatttcaggagcttttgcaataaagcagtaactgcaatctgctaaagtcagactgttagcaagtggtgttaaaactgatttaagtccattacactgaacagtaggaa

SEQ ID NO: 201870 - DNA, 120 bp, Artificial Sequence
  ENSG00000114416_44 (sequence is synthesized)
attaccacttttgtaaggctcaaaaatgatcaactattaacagtttcttatggttcagtctaattacaaatttttaaaaagtttatcagtgtatcatttcagattcatctgtatcttctg

SEQ ID NO: 201871 - DNA, 120 bp, Artificial Sequence
  ENSG00000114416_45 (sequence is synthesized)
taatattatttccagtactgaggtaaggtacacaaaaattcccctggaaaaactatattctagttttgtaagatgatttcccacagtccatttgcttatttcttcctttgataattcaaa

SEQ ID NO: 201872 - DNA, 120 bp, Artificial Sequence
  ENSG00000114416_46 (sequence is synthesized)
aagatgctttaggtaatggtacagaattagaagctgctattttagctctattaactttttctctatggtttcaattttatccaaccagagagggctggcctagttggtatctttaaggcc

SEQ ID NO: 201873 - DNA, 120 bp, Artificial Sequence
  ENSG00000114416_47 (sequence is synthesized)
cttccagtagtaatttgagtctagtcacatgtcagaccctgagcaacacctaaccaaatgcccaagtattctcataaggagtatgctgaatttaagtggtgtttgttttacatatgtatc

SEQ ID NO: 201874 - DNA, 120 bp, Artificial Sequence
  ENSG00000114416_48 (sequence is synthesized)
catcccagacattttcaactatgctgaatgcaatctataagatattccaaacaaggacaaagtaatttttcacaagtcttacagccccactattaagtatgctactaattagcttcttga

SEQ ID NO: 201875 - DNA, 120 bp, Artificial Sequence
  ENSG00000114416_49 (sequence is synthesized)
atttctttgtatttcagtgattgggatgttctttttttttgggaaagtttttttacccctttgtaccctcttaattggattaactgtaaaatgtacatattaattttctagttttagaga

SEQ ID NO: 201876 - DNA, 120 bp, Artificial Sequence
  ENSG00000114416_50 (sequence is synthesized)
ccattttcattaaaaatattttccaatagtttttctagataaacaatttatacttaattgttgcttggttgcttacatttcaacctctaggcttcctttttcagctaacttggctgtctt

SEQ ID NO: 201877 - DNA, 120 bp, Artificial Sequence
  ENSG00000114416_51 (sequence is synthesized)
caggttgtaaagaaaaatgtaaacatatatttgaaatttcattaactgaaactgctgtaaggtgttagcaaatgttaaccataacagattatcccatatcattggactgttctattattg

SEQ ID NO: 201878 - DNA, 120 bp, Artificial Sequence
  ENSG00000114416_52 (sequence is synthesized)
ggtcaggaataataggtgacacaggatagaagctcttcctatatatatcttgttgctaaggcagtagttggctctaagctgataaacagcacactgtacagcagtccaaaaactaaaacc

SEQ ID NO: 201879 - DNA, 120 bp, Artificial Sequence
  ENSG00000114416_53 (sequence is synthesized)
agagcttaggtcattcaagttaactggtactcaaggttactcattccaggatactttacataaccaaaaacctaggagagcattctacattgtaattttttttttactttgtttacataa

SEQ ID NO: 201880 - DNA, 120 bp, Artificial Sequence
  ENSG00000114416_54 (sequence is synthesized)
aatttacagggttttgtttttttaagcttagtctgttctttgacattgttgattcatgttctaaattttcatcagatttaacatgtttggaggttcttgtgcactcaatgtgaacctact

SEQ ID NO: 201881 - DNA, 120 bp, Artificial Sequence
  ENSG00000114416_55 (sequence is synthesized)
acaagcttctgaactgcaaaaccttttttttaggtcactgtcaacagaaagatgccttatagaatttctcatgattgaaacagaactctgcattctaacctaaaacccctctaacccttt

SEQ ID NO: 201882 - DNA, 120 bp, Artificial Sequence
  ENSG00000114416_56 (sequence is synthesized)
aaatgaagcattatgcctgcgtgaaattttatttttagacatttctgatactaggttttctttacgggggggcatacatattcagtatactgaatttatacagctttcagtgtggcaata

SEQ ID NO: 201883 - DNA, 120 bp, Artificial Sequence
  ENSG00000114416_57 (sequence is synthesized)
tattaagaagctagttccctaatttttctcagttctcattggttttccatttaaatgtttccgtaagtactctcatcatttggaaaatacttgatggcaggagaacttgcttaaaactaa

SEQ ID NO: 201884 - DNA, 120 bp, Artificial Sequence
  ENSG00000114416_58 (sequence is synthesized)
aggtggagaaagagttaacttccaggacaacccattatagctcacttcttaccaacaaagcagtttttatacagcaccttaggactcatttctaatgtcaacccagatggccagtaaagg

SEQ ID NO: 201885 - DNA, 120 bp, Artificial Sequence
  ENSG00000114416_59 (sequence is synthesized)
caagggaagaggctaagtgactcacaaaaatctctgatattgaggtctaatgtgaaggctatagataggaattccccacaaacttctaatgaggactaatatgaacagcaaattggagaa

SEQ ID NO: 201886 - DNA, 120 bp, Artificial Sequence
  ENSG00000114416_60 (sequence is synthesized)
gacaccaaggacctaattttagtttcactagccgtgggaccttagaaaaaagaccatttgctctggacttttgtttcccaagccataaaatgtggaagaatcttcacaatttcaagttgg

SEQ ID NO: 201887 - DNA, 120 bp, Artificial Sequence
  ENSG00000114416_61 (sequence is synthesized)
tcatgtatatttcccttttacagagaaagctgaagcctcgaggctcagatttacctggcttctgtttacctggcttctgcagaagtttaacttgtaacctacctctcattcccaaagtgt

SEQ ID NO: 201888 - DNA, 120 bp, Artificial Sequence
  ENSG00000114416_62 (sequence is synthesized)
gtttaatcatgccgccttctttaaaatatatctggaagcaccaatgagtaaagacaaaggccccaagctagatctgtagagataagtactagactcacatctcagtactatcaaggaaaa

SEQ ID NO: 201889 - DNA, 120 bp, Artificial Sequence
  ENSG00000114416_63 (sequence is synthesized)
catgcttaggttatcagaattgtgaaggccatagtacaaaaagttaagagaacggaactcaggatctgagaaagatcagccattctcagcatgttgccttggctgcttaaccttactaaa

SEQ ID NO: 201890 - DNA, 120 bp, Artificial Sequence
  ENSG00000114416_64 (sequence is synthesized)
cttccatttcctcacatgtaaaatgtacatcataataactagtctactgagataagggaagaatacttagcacagtgctagtacactgtaagtactcaaatgttacagatccaagtattt

SEQ ID NO: 201891 - DNA, 120 bp, Artificial Sequence
  ENSG00000114416_65 (sequence is synthesized)
tgtaagaaaataccagcaaaagataaaagtttttttatggatcgtatttgtatcaatcacctacatgatctagagccctcacatggataacatttaaatgttcagtttgcctaatagcct

SEQ ID NO: 201892 - DNA, 120 bp, Artificial Sequence
  ENSG00000114416_66 (sequence is synthesized)
tcaatgaaacacggattcttctacttaaaaaaggtaagcctggagaaaataaaactgattactatgcaagaaaaaaatgtgctctgctgtgctccttggtatttttaagtggtttccatt

SEQ ID NO: 201893 - DNA, 120 bp, Artificial Sequence
  ENSG00000114416_67 (sequence is synthesized)
gtcttaacacctgtcttaaaacgggtatgttgtttgcactgaaccctcaaaagtatttatacctattaagttaaatttccctttttagagttaatgcttcattgcctgtcggcatattat

SEQ ID NO: 201894 - DNA, 120 bp, Artificial Sequence
  ENSG00000114416_68 (sequence is synthesized)
cactatctgtctttgaaaaattttcttttaagtctcaactatttcttcataaagctcttgttcagagaaacattttttgatttgtccaatggactgaaataaaaggttagtaaaccaaaa

SEQ ID NO: 201895 - DNA, 120 bp, Artificial Sequence
  ENSG00000114416_69 (sequence is synthesized)
tcacaatactaaataactgccttgctgaactaatacctgaggtgttccagggatgtacatttacttttgctaattcccaggtagatgacaccgggtgaaaaatgaggttcagagaggtta

SEQ ID NO: 201896 - DNA, 120 bp, Artificial Sequence
  ENSG00000114416_70 (sequence is synthesized)
ctcacatctgcctaattccaaaccttgtgttcttttagtactccctattatctttgaactaatacaaccttttagagttacgaagtgctttaatatctatgcttttataatgtttttgtg

SEQ ID NO: 201897 - DNA, 120 bp, Artificial Sequence
  ENSG00000114416_71 (sequence is synthesized)
tcttgcagggatttatcaaagatgttcatgaagactcccttacagttgtttttgaaaataattggcaaccagaacgccaggttccatttaatgaagttagattaccaccaccacctgata

SEQ ID NO: 201898 - DNA, 120 bp, Artificial Sequence
  ENSG00000114416_72 (sequence is synthesized)
cttgctttgtgactagtttctaaggaagtacctcagtgcttggtttttgtaaatcttatttcaactgttagttttatttctaaaagcctacctgagaaatagttgatcagacatttccat

SEQ ID NO: 201899 - DNA, 120 bp, Artificial Sequence
  ENSG00000114416_73 (sequence is synthesized)
tagcattaatttctgtttgtgttctgtattggcaaacaccaaagctgctctccagaggtacacctcaagcatgtaaggaccgccaaggttcatgcttgtaagaacctataatctagttta

SEQ ID NO: 201900 - DNA, 120 bp, Artificial Sequence
  ENSG00000114416_74 (sequence is synthesized)
gaactggagagaatgaaccctggacctggccactcttctctggcggaagcaggttccgtgcgggccctacagcagcatccaagcccctgtcctctcggcacctgagttcttgtttggcat

SEQ ID NO: 201901 - DNA, 120 bp, Artificial Sequence
  ENSG00000114416_75 (sequence is synthesized)
tttagcgtagaagcaatttaattttaattagtttttttccaatttagaagataatacatggtcactgaggtaattttggaactcagcaaaaactagaagttgccttgagatgagagctgt

SEQ ID NO: 201902 - DNA, 120 bp, Artificial Sequence
  ENSG00000114416_76 (sequence is synthesized)
atgaaaatgatataagcatattttaaaagtctagattttgagaattccttacatgtgagcactgttgtcagtcccagttagtaaccttaggcgtgctgaaagagaagtaagtttcagacc

SEQ ID NO: 201903 - DNA, 120 bp, Artificial Sequence
  ENSG00000114416_77 (sequence is synthesized)
aagggtgaaatttcttggtagtctgtagggcgagttaattgatagtaaaaagatgggagcttcacttgatggttgtaatttagtagcaagttacaaataattggggctgacactgaaaga

SEQ ID NO: 201904 - DNA, 120 bp, Artificial Sequence
  ENSG00000114416_78 (sequence is synthesized)
tggaatgactgaatctgatacagcttcagttaatgaaaatgggctagatgatagtgaaaaaaaaccccagcgacgcaatcgtagccgcaggcgtcgcttcaggggtcaggcagaagatag

SEQ ID NO: 201905 - DNA, 120 bp, Artificial Sequence
  ENSG00000114416_79 (sequence is synthesized)
acagccaggtaacttgagtggacctgtggacaccatcaggtcacaagcatgaaaaaaatgtctatgtctgctttctaaatatattatacttacatgtacacatgtgtgcatatacattca

SEQ ID NO: 201906 - DNA, 120 bp, Artificial Sequence
  ENSG00000114416_80 (sequence is synthesized)
tcacagtgtgttagtaacttgtctaattgaactaatgttgtgtcctaattgtttacatggaaatactgttgagaagaccattttgttcacttggcagtttcttcacacttgagatggggc

SEQ ID NO: 201907 - DNA, 120 bp, Artificial Sequence
  ENSG00000114416_81 (sequence is synthesized)
ctgccatccgagggactgtgttgtagattgtgatcaaggttgattggcaaaactgggcagcttttgcatggtgcctgcttactatatctgaattcagcacctcatttttgtgggagttgt

SEQ ID NO: 201908 - DNA, 120 bp, Artificial Sequence
  ENSG00000114416_82 (sequence is synthesized)
aatacccacaattaaaaaaaaagtataaaagagaaaaatatttgaaggtgtctttaacctaatgcgaggaatgcatgttgtttttgtttgtttattgtagtgtgatgccttttcccttac

SEQ ID NO: 201909 - DNA, 120 bp, Artificial Sequence
  ENSG00000114416_83 (sequence is synthesized)
ttacacctactaactattcaaattaataatacttacttagttttagaatgtttattttatgtagtcattaatttttagtaacttcaaagaaacttgtttgctgtgtctattattttgaac

SEQ ID NO: 201910 - DNA, 120 bp, Artificial Sequence
  ENSG00000114416_84 (sequence is synthesized)
gaagtctacccaaggatccccagcgaaagggagccatagtccgaggctctggctgcctgcctgtttggagctttgatggcctcgagggatttatcaaagatgttcatgaagactccctta

SEQ ID NO: 201911 - DNA, 120 bp, Artificial Sequence
  ENSG00000114416_85 (sequence is synthesized)
gatgcagggtgcgcagggatcccacctggagagtcggggcggcacgttgagaccccaggggtgaagggcgggggatcccaatcccagccctgttttcccctcccctttccccgcctcctt

SEQ ID NO: 201912 - DNA, 120 bp, Artificial Sequence
  ENSG00000114416_86 (sequence is synthesized)
taagttaataaacattatttagttacatatagcgacttaattgaaaactagtcttgtagtctgataaccttattccagttatgtgtagatttatttagatagcaatacttcttttctttt

SEQ ID NO: 201913 - DNA, 120 bp, Artificial Sequence
  ENSG00000114416_87 (sequence is synthesized)
tttggtgataacattttgtgtaacttgttattgtcatatgttaaaaagtaaagatgtttcttctgtacaggatgactcactaataaggcccagggtttttataagtttgtcattacagtt

SEQ ID NO: 201914 - DNA, 120 bp, Artificial Sequence
  ENSG00000114416_88 (sequence is synthesized)
catggcggagctgacggtggaggttcgcggctctaacggggctttctacaagtcaattcacaatgaatcaaatgtccccattttggaactctgaagtatttataattgatctctatacat

SEQ ID NO: 201915 - DNA, 120 bp, Artificial Sequence
  ENSG00000114416_89 (sequence is synthesized)
atctacaatctactgcttgtttctacttagactttgactccattactcattttgcctcacaaagtgagttggtactttgacaaaggttggaaaggacactagccacctgtgtgtgcactg

SEQ ID NO: 201916 - DNA, 120 bp, Artificial Sequence
  ENSG00000114416_90 (sequence is synthesized)
aaatcatgtacgcttgaacatttggaattttatgtccagccataatccacttgcatatgcactttgtggaaactgtggtcttcagaactctggaagaatgagaatggcggagtggaaaag

SEQ ID NO: 201917 - DNA, 120 bp, Artificial Sequence
  ENSG00000114416_91 (sequence is synthesized)
aaggtaggatctacaagacacaaactgaagagaaaagcgaagttcagaacaaattgtagcaaatgtttaacaatttaaaggagatttgtatattattaaaattacattttttcctgtgaa

SEQ ID NO: 201918 - DNA, 120 bp, Artificial Sequence
  ENSG00000114416_92 (sequence is synthesized)
actgatgaagatgctgttctgatggatggaatgactgaatctgatacagcttcagttaatgaaaatgggctaggtatgtaagcacttagggaagagaaatatatatatatatatatatat

SEQ ID NO: 201919 - DNA, 120 bp, Artificial Sequence
  ENSG00000114416_93 (sequence is synthesized)
aattgtaaactattgttagtatatgaagcttttttcaaagaaatatgcaattcacaaattgactttttcttagtgtttactttgaacaaggtagatagctttttgtctatcttaaatgtt

SEQ ID NO: 201920 - DNA, 120 bp, Artificial Sequence
  ENSG00000114416_94 (sequence is synthesized)
tagttctcagatttgttatagccaaattatttgaaacttggagggttaaagtgccctttgatgccattaaatcagtacaaatattcagctggcaaggtacttagtgcttttattgtcccc

SEQ ID NO: 201921 - DNA, 120 bp, Artificial Sequence
  ENSG00000114416_95 (sequence is synthesized)
tatttgtaaacagtttaattttacaaaagttaattcatctcccagggccacccatttttggaagtttctcttgctactcattgtcttagagaaagtagtggaccatatagcagtatcagg

SEQ ID NO: 201922 - DNA, 120 bp, Artificial Sequence
  ENSG00000114416_96 (sequence is synthesized)
gtgtagtgttttgagtccggcttccatttagcgtagaagcaatttaattttaattagtttttttccaatttagaagataatacatggtcactgagggatttatcaaagatgttcatgaag

SEQ ID NO: 201923 - DNA, 120 bp, Artificial Sequence
  ENSG00000114423_0 (sequence is synthesized)
gtccagcgagcggtctcctcctcctgctagtgctgctgcggcgtcccgcggcctccccgagtcgggcgggaggggagagcgggtgtggatttgtcttgacggtaattgttgcgtttccac

SEQ ID NO: 201924 - DNA, 120 bp, Artificial Sequence
  ENSG00000114423_1 (sequence is synthesized)
gtctcggaggcctgcgcgctgggttgctccttcttcgggagcgagctgttctcagcgatcccactcccagccggggctccccacacacactgggctgcgtgcgtgtggagtgggacccgc

SEQ ID NO: 201925 - DNA, 120 bp, Artificial Sequence
  ENSG00000114423_2 (sequence is synthesized)
gcacacgcgtgtctctggacagctacggcgccgaaagaactaaaattccagatggcaaactcaatgaatggcagaaaccctggtggtcgaggaggaaatccccgaaaaggtcgaattttg

SEQ ID NO: 201926 - DNA, 120 bp, Artificial Sequence
  ENSG00000114423_3 (sequence is synthesized)
ggtattattgatgctattcaggatgcagttggaccccctaagcaagctgccgcagatcgcaggaccgtggagaagacttggaagctcatggacaaagtggtaagactgtgccaaaatccc

SEQ ID NO: 201927 - DNA, 120 bp, Artificial Sequence
  ENSG00000114423_4 (sequence is synthesized)
aaacttcagttgaaaaatagcccaccatatatacttgatattttgcctgatacatatcagcatttacgacttatattgagtaaatatgatgacaaccagaaacttgcccaactcagtgag

SEQ ID NO: 201928 - DNA, 120 bp, Artificial Sequence
  ENSG00000114423_5 (sequence is synthesized)
aatgagtactttaaaatctacattgatagccttatgaaaaagtcaaaacgggcaataagactctttaaagaaggcaaggagagaatgtatgaagaacagtcacaggacagacgaaatctc

SEQ ID NO: 201929 - DNA, 120 bp, Artificial Sequence
  ENSG00000114423_6 (sequence is synthesized)
acaaaactgtcccttatcttcagtcacatgctggcagaaatcaaagcaatctttcccaatggtcaattccagggagataactttcgtatcacaaaagcagatgctgctgaattctggaga

SEQ ID NO: 201930 - DNA, 120 bp, Artificial Sequence
  ENSG00000114423_7 (sequence is synthesized)
aagttttttggagacaaaactatcgtaccatggaaagtattcagacagtgccttcatgaggtccaccagattagctctggcctggaagcaatggctctaaaatcaacaattgatttaact

SEQ ID NO: 201931 - DNA, 120 bp, Artificial Sequence
  ENSG00000114423_8 (sequence is synthesized)
tgcaatgattacatttcagtttttgaatttgatatttttaccaggctgtttcagccttggggctctattttgcggaattggaatttcttagctgtgacacatccaggttacatggcattt

SEQ ID NO: 201932 - DNA, 120 bp, Artificial Sequence
  ENSG00000114423_9 (sequence is synthesized)
ctcacatatgatgaagttaaagcacgactacagaaatatagcaccaaacccggaagctatattttccggttaagttgcactcgattgggacagtgggccattggctatgtgactggggat

SEQ ID NO: 201933 - DNA, 120 bp, Artificial Sequence
  ENSG00000114423_10 (sequence is synthesized)
gggaatatcttacagaccatacctcataacaagcccttatttcaagccctgattgatggcagcagggaaggattttatctttatcctgatgggaggagttataatcctgatttaactgga

SEQ ID NO: 201934 - DNA, 120 bp, Artificial Sequence
  ENSG00000114423_11 (sequence is synthesized)
ttatgtgaacctacacctcatgaccatataaaagttacacaggaacaatatgaattatattgtgaaatgggctccacttttcagctctgtaagatttgtgcagagaatgacaaagatgtc

SEQ ID NO: 201935 - DNA, 120 bp, Artificial Sequence
  ENSG00000114423_12 (sequence is synthesized)
aagattgagccttgtgggcatttgatgtgcacctcttgccttacggcatggcaggagtcggatggtcagggctgccctttctgtcgttgtgaaataaaaggaactgagcccataatcgtg

SEQ ID NO: 201936 - DNA, 120 bp, Artificial Sequence
  ENSG00000114423_13 (sequence is synthesized)
gacccctttgatccaagagatgaaggctccaggtgttgcagcatcattgacccctttggcatgccgatgctagacttggacgacgatgatgatcgtgaggagtccttgatgatgaatcgg

SEQ ID NO: 201937 - DNA, 120 bp, Artificial Sequence
  ENSG00000114423_14 (sequence is synthesized)
ttggcaaacgtccgaaagtgcactgacaggcagaactcaccagtcacatcaccaggatcctctccccttgcccagagaagaaagccacagcctgacccactccagatcccacatctaagc

SEQ ID NO: 201938 - DNA, 120 bp, Artificial Sequence
  ENSG00000114423_15 (sequence is synthesized)
ctgccacccgtgcctcctcgcctggatctaattcagaaaggcatagttagatctccctgtggcagcccaacgggttcaccaaagtcttctccttgcatggtgagaaaacaagataaacca

SEQ ID NO: 201939 - DNA, 120 bp, Artificial Sequence
  ENSG00000114423_16 (sequence is synthesized)
ctcccagcaccacctcctcccttaagagatcctcctccaccgccacctgaaagacctccaccaatcccaccagacaatagactgagtagacacatccatcatgtggaaagcgtgccttcc

SEQ ID NO: 201940 - DNA, 120 bp, Artificial Sequence
  ENSG00000114423_17 (sequence is synthesized)
agagacccgccaatgcctcttgaagcatggtgccctcgggatgtgtttgggactaatcagcttgtgggatgtcgactcctaggggagggctctccaaaacctggaatcacagcgagttca

SEQ ID NO: 201941 - DNA, 120 bp, Artificial Sequence
  ENSG00000114423_18 (sequence is synthesized)
aatgtcaatggaaggcacagtagagtgggctctgacccagtgcttatgcggaaacacagacgccatgatttgcctttagaaggagctaaggtcttttccaatggtcaccttggaagtgaa

SEQ ID NO: 201942 - DNA, 120 bp, Artificial Sequence
  ENSG00000114423_19 (sequence is synthesized)
gaatatgatgttcctccccggctttctcctcctcctccagttaccaccctcctccctagcataaagtgtactggtccgttagcaaattctctttcagagaaaacaagagacccagtagag

SEQ ID NO: 201943 - DNA, 120 bp, Artificial Sequence
  ENSG00000114423_20 (sequence is synthesized)
gaagatgatgatgaatacaagattccttcatcccaccctgtttccctgaattcacaaccatctcattgtcataatgtaaaacctcctgttcggtcttgtgataatggtcactgtatgctg

SEQ ID NO: 201944 - DNA, 120 bp, Artificial Sequence
  ENSG00000114423_21 (sequence is synthesized)
aatggaacacatggtccatcttcagagaagaaatcaaacatccctgacttaagcatatatttaaagggagatgtttttgattcagcctctgatcccgtgccattaccacctgccaggcct

SEQ ID NO: 201945 - DNA, 120 bp, Artificial Sequence
  ENSG00000114423_22 (sequence is synthesized)
ccaactcgggacaatccaaagcatggttcttcactcaacaggacgccctctgattatgatcttctcatccctccattaggtgaagatgcttttgatgccctccctccatctctcccacct

SEQ ID NO: 201946 - DNA, 120 bp, Artificial Sequence
  ENSG00000114423_23 (sequence is synthesized)
cccccacctcctgcaaggcatagtctcattgaacattcaaaacctcctggctccagtagccggccatcctcaggacaggatctttttcttcttccttcagatccctttgttgatctagca

SEQ ID NO: 201947 - DNA, 120 bp, Artificial Sequence
  ENSG00000114423_24 (sequence is synthesized)
agtggccaagttcctttgcctcctgctagaaggttaccaggtgaaaatgtcaaaactaacagaacatcacaggactatgatcagcttccttcatgttcagatggttcacaggcaccagcc

SEQ ID NO: 201948 - DNA, 120 bp, Artificial Sequence
  ENSG00000114423_25 (sequence is synthesized)
agaccccctaaaccacgaccgcgcaggactgcaccagaaattcaccacagaaaaccccatgggcctgaggcggcattggaaaatgtcgatgcaaaaattgcaaaactcatgggagagggt

SEQ ID NO: 201949 - DNA, 120 bp, Artificial Sequence
  ENSG00000114423_26 (sequence is synthesized)
tatgcctttgaagaggtgaagagagccttagagatagcccagaataatgtcgaagttgcccggagcatcctccgagaatttgccttccctcctccagtatccccacgtctaaatctatag

SEQ ID NO: 201950 - DNA, 120 bp, Artificial Sequence
  ENSG00000114423_27 (sequence is synthesized)
cagccagaactgtagacaccaaaatggaaagcaatcgatgtattccaagagtgtggaaataaagagaactgagatggaattcaagagagaagtgtctcctcctcgtgtagcagcttgaga

SEQ ID NO: 201951 - DNA, 120 bp, Artificial Sequence
  ENSG00000114423_28 (sequence is synthesized)
agaccgatgcttgctcaggatgtcgacagctgtggcttccttgtttttgctagccatatttttaaatcagggttgaactgacaaaaataatttaaagacgtttacttcccttgaactttg

SEQ ID NO: 201952 - DNA, 120 bp, Artificial Sequence
  ENSG00000114423_29 (sequence is synthesized)
aacctgtgaaatgctttaccttgtttacagtttggcaaagttgcagtttgttcttgtttttagtttagttttgttttggtgttttgatacctgtactgtgttcttcacagaccctttgta

SEQ ID NO: 201953 - DNA, 120 bp, Artificial Sequence
  ENSG00000114423_30 (sequence is synthesized)
gcgtggtcaggtctgctgtaacatttcccaccaactctcttgctgtccacatcaacagctaaatcatttattcatatggatctctaccatccccatgccttgcccaggtccagttccatt

SEQ ID NO: 201954 - DNA, 120 bp, Artificial Sequence
  ENSG00000114423_31 (sequence is synthesized)
tctctcattcacaagatgctttgaaggttctgattttcaactgatcaaactaatgcaaaaaaaaaaaagtatgtattcttcactactgagtttcttctttggaaaccatcactattgaga

SEQ ID NO: 201955 - DNA, 120 bp, Artificial Sequence
  ENSG00000114423_32 (sequence is synthesized)
gatgggaaaaacctgaatgtataaagcatttatttgtcaataaactgccttttgtaaggggttttcacataacatagaggagcttcccttttttgtttaagttttgtaacctttaatcct

SEQ ID NO: 201956 - DNA, 120 bp, Artificial Sequence
  ENSG00000114423_33 (sequence is synthesized)
ccatattctcatgtctgtcatcccaggggtgtcacaactgtaaaaatctacaatattagaaagcagctactacagatgtggaagagagaacacttgtataagacaatgctgtactgaagt

SEQ ID NO: 201957 - DNA, 120 bp, Artificial Sequence
  ENSG00000114423_34 (sequence is synthesized)
tatataacaaggtcccctgatacttatgcctgcattactttgagggatgctgaatgagaggaccatctccctgaaatatattaataattttcagataaaattatgaacataacatacctt

SEQ ID NO: 201958 - DNA, 120 bp, Artificial Sequence
  ENSG00000114423_35 (sequence is synthesized)
ttctcaagtggaattagagttcatttcccatttaagtgattacactctatctcctaagagctgtgggaaccagttcatattgcagtggaaacattaactcttcgttgcactgttgagtgt

SEQ ID NO: 201959 - DNA, 120 bp, Artificial Sequence
  ENSG00000114423_36 (sequence is synthesized)
caaggctactgtggcaatgttttttgcaaagttctcagtaattttctctctgcaatcaaattagagttcatatttaatttgcagattctctcattcattgctccacactgctttatcaaa

SEQ ID NO: 201960 - DNA, 120 bp, Artificial Sequence
  ENSG00000114423_37 (sequence is synthesized)
tcaggtgaaagaaattaatgtagttttgcctattttacaaaatggtggttggttctttaaacaccatgttattactcttaataaatctacaaatatttattgagcatctatgatatgctt

SEQ ID NO: 201961 - DNA, 120 bp, Artificial Sequence
  ENSG00000114423_38 (sequence is synthesized)
ggtgctgttaggcactgtgtttttaaagcacaaactctcaaaagctgattccagcgtaatgttttatttttgtttttctgtgttttttatgacaaagtctgtctgatagacaaagcctgg

SEQ ID NO: 201962 - DNA, 120 bp, Artificial Sequence
  ENSG00000114423_39 (sequence is synthesized)
aaggtttcccccagggctttagaatttagaattagctggttttcatttcaaatgggaaattaatggagaaatgagataaaatcatctctgtgtaaatgcttgaacccacagaaagttttc

SEQ ID NO: 201963 - DNA, 120 bp, Artificial Sequence
  ENSG00000114423_40 (sequence is synthesized)
taaatatggactaattgtgggtttgtgcatatttctgtgtctcctcttttcacttcacacccaccatgatataaaaagatgcatcagagagtgagcctgccttcaggacctgaaaggaca

SEQ ID NO: 201964 - DNA, 120 bp, Artificial Sequence
  ENSG00000114423_41 (sequence is synthesized)
tgactgaacatctagtagatctggtggaaattaatgttatacaaaagacacgtagactaagttgaccctgggagaggagttaatacattcctttgcaaagtgacatgtgccctttttttg

SEQ ID NO: 201965 - DNA, 120 bp, Artificial Sequence
  ENSG00000114423_42 (sequence is synthesized)
acagtctggctttcatggtatgagatgaggactcacaggccttgggtaatttctgcttttgtatgaattttttcagatggttctgagctggttatgtccctggaggggaatttttcattt

SEQ ID NO: 201966 - DNA, 120 bp, Artificial Sequence
  ENSG00000114423_43 (sequence is synthesized)
gccttagatgttcttcccatgagtaggtacatgagtgaagtttcttacacttttaaaattgcattggcaaattttcttttgctttatgaacccctgttttgtcattatgatttttcactt

SEQ ID NO: 201967 - DNA, 120 bp, Artificial Sequence
  ENSG00000114423_44 (sequence is synthesized)
gttttaacagtttcagatgtcaccttggaatagcactgtttattttggcctttttatgattgctgatgataggtacagtctaaaggccaaaagttgccacttcattgtgataacattgtt

SEQ ID NO: 201968 - DNA, 120 bp, Artificial Sequence
  ENSG00000114423_45 (sequence is synthesized)
gcaacattcctaatatattagagaatgatgtaaaataagaatgttagagaacatagcacattctcattcagtttataaacaatatttgaaaatttccagtgagaattaaaaaaggactag

SEQ ID NO: 201969 - DNA, 120 bp, Artificial Sequence
  ENSG00000114423_46 (sequence is synthesized)
tgatgatatagcaaacctggacctgaaatttgggggtggggggtggggggatatctgttttgcagagaaaatttaccagcctccagcaaaatctctgcatcttgtactcaatagcaacca

SEQ ID NO: 201970 - DNA, 120 bp, Artificial Sequence
  ENSG00000114423_47 (sequence is synthesized)
ttagtattgtcatttaaaaagaatgaatcaaaaattcatacgtaatggaatgaaaagaggaaaactttctattaaacactgtcaagaaagacccattgctatctatcacctatgaaatta

SEQ ID NO: 201971 - DNA, 120 bp, Artificial Sequence
  ENSG00000114423_48 (sequence is synthesized)
aacctaaaaaaatttttttttattgtaaaagcgactgctcgttgatgtctggaagtgatccagactttgtttcactgtgatccaaaaagttagacattccttccatttctcaagatttgg

SEQ ID NO: 201972 - DNA, 120 bp, Artificial Sequence
  ENSG00000114423_49 (sequence is synthesized)
taacaatttttttttaagtcagcatttcatataatacataaaattaagacaaattaacttactgatatgtggccaatatcaacccttctcacccaacccaaacatgttctggagatagaa

SEQ ID NO: 201973 - DNA, 120 bp, Artificial Sequence
  ENSG00000114423_50 (sequence is synthesized)
ggacttatcctcaattatattccagtaaatttatctccataatctgttttatcccctaatgtatgatatatctcaccaaatttttctagaattgaataaaagcagtttttgcttaacttg

SEQ ID NO: 201974 - DNA, 120 bp, Artificial Sequence
  ENSG00000114423_51 (sequence is synthesized)
aatttccttccacaaatacaaccttcagctcttccctctctgtttcccttttgcccacattgcaaatagtcttcataatagaaccctcactgcaacttaaaagggtcccatttcttaact

SEQ ID NO: 201975 - DNA, 120 bp, Artificial Sequence
  ENSG00000114423_52 (sequence is synthesized)
cagcatttcatataccaagaacacttgcaaagatttcttcataatgtgattttttaatttttcagttccagaagcatttcctacagttcgaacgttattttttctctcagattttcaact

SEQ ID NO: 201976 - DNA, 120 bp, Artificial Sequence
  ENSG00000114423_53 (sequence is synthesized)
tgaagctttgatttgcactgaattaacttggataaaattttagtttctctcttcagctaacagatttggaagcaaattacagtatacttgaataattcaggtactacctgttgacctgga

SEQ ID NO: 201977 - DNA, 120 bp, Artificial Sequence
  ENSG00000114423_54 (sequence is synthesized)
attttagtgattctgggaaagttttccagacaaagacaccaatagagtgaagggttttttccccaattactattttattgttttttaaaatgcctttttaaaacttgtgtgatgtggcaa

SEQ ID NO: 201978 - DNA, 120 bp, Artificial Sequence
  ENSG00000114423_55 (sequence is synthesized)
gcaaaatagtcatatgttcaattaatttatattttattcattccttttcaattctggttattatgtaacctcaagtactttatctgttcttttaaagtattttataaaatgaacgttaac

SEQ ID NO: 201979 - DNA, 120 bp, Artificial Sequence
  ENSG00000114423_56 (sequence is synthesized)
cctttaaaaaagttttgaacaacccacccctccttcttttaatttcagaattttcagaattcagagttcagtataacacagactcactgggttgtgaatttgcctgaaatttgaatgggt

SEQ ID NO: 201980 - DNA, 120 bp, Artificial Sequence
  ENSG00000114423_57 (sequence is synthesized)
tctccaggtgccggtgactcccaagttcacgagaccattactccatgtagatgattaaggtagtagtgtagtagttgggcatcagtcaggttttaagcaagttgttttgtccatactaaa

SEQ ID NO: 201981 - DNA, 120 bp, Artificial Sequence
  ENSG00000114423_58 (sequence is synthesized)
tgtagtctaaaaacacatgagagctttgtgctctagtagttttgaagtgatgacttgaagtgttgagattttctttaagtataataattcttaataaatatgaacttgcttttcttgcag

SEQ ID NO: 201982 - DNA, 120 bp, Artificial Sequence
  ENSG00000114423_59 (sequence is synthesized)
catgagcaccagttccacttacgctaattaaattatgcaaaattaaatagttgtatgtagagaactgataataaattctgttttattctaatcattacaactgtaacacattcaaaaaaa

SEQ ID NO: 201983 - DNA, 120 bp, Artificial Sequence
  ENSG00000114423_60 (sequence is synthesized)
tataatttcctttgtgatgtacatcttaatggtcagaatttaaaggcaaaatttcatgccattgtactgaaaatacattaaggttttgtgttatcctctaggagatgtttttgattcagc

SEQ ID NO: 201984 - DNA, 120 bp, Artificial Sequence
  ENSG00000114423_61 (sequence is synthesized)
gttcaagtttgaaatatactgggctggggtattctcaaaaaagtgcaaccaggatgataaagtaaactagagtggattaaaggaactgagaattggctcagagaagagaagaccttggat

SEQ ID NO: 201985 - DNA, 120 bp, Artificial Sequence
  ENSG00000114423_62 (sequence is synthesized)
gtagacgagagttgtcttcagttacagtatttgggaaagaaggattatattttttccatgtcacttcagaaggtaggagtaagatcaatgggaaatgttaagaatgaaaattgcattcat

SEQ ID NO: 201986 - DNA, 120 bp, Artificial Sequence
  ENSG00000114423_63 (sequence is synthesized)
cctacaaagaagtttcctaaatcattacgaattgttctaccttgagtgtagtgagttatctgacactggaggatttaaaccaatggtagatcattacatagtagagatatgaacatgagc

SEQ ID NO: 201987 - DNA, 120 bp, Artificial Sequence
  ENSG00000114423_64 (sequence is synthesized)
taaagcatgagggcagcaaagaggggagaactttgtttcacctaaatggctcttcaaaccttttttagcattagtttctgctttgatatactctattaaaatttgggggataattgataa

SEQ ID NO: 201988 - DNA, 120 bp, Artificial Sequence
  ENSG00000114423_65 (sequence is synthesized)
atcttccaggtggtttatggatggccagggaggaaatttgccattgttttaattatttaattttatttgcctctgtttttacacttggtaaaaatttggaagtgtttcagatagtgaaga

SEQ ID NO: 201989 - DNA, 75 bp, Artificial Sequence
  ENSG00000114423_66 (sequence is synthesized)
acacttggtaaaaatttggaagtgtttcagatagtgaagaaaaaaaagaattaagaaaaacattccaggccaggt

SEQ ID NO: 201990 - DNA, 90 bp, Artificial Sequence
  ENSG00000114423_67 (sequence is synthesized)
tgacaccagcctggccaacatggtgaaactccagctctacaaaaatacaaaaattagccgggtgttggtggctcaaggcaagagaatggc

SEQ ID NO: 201991 - DNA, 120 bp, Artificial Sequence
  ENSG00000114423_68 (sequence is synthesized)
gaggttgcagtgagtcaagattgaaccactccactccagcctgggtgacagaacaagacgctctctcaaaaaaaaaaaaaaaaaaatccatacttcctcctcctaatcattgataggtat

SEQ ID NO: 201992 - DNA, 120 bp, Artificial Sequence
  ENSG00000114423_69 (sequence is synthesized)
tttttttgttgtttttttgtttagttttgttttgttttttgcctacgagtatgtaagttcacatttatgtaaaatttatttctcatagtatatgctatttataaccattttccagttaat

SEQ ID NO: 201993 - DNA, 120 bp, Artificial Sequence
  ENSG00000114423_70 (sequence is synthesized)
cagttaatatgtcatgagcaatgtatatagttgttaaatatttgtacacaatataatttttattgatgtatatttcctcatttcttttttaagtagcaaaccatttcctcccagtcttcc

SEQ ID NO: 201994 - DNA, 120 bp, Artificial Sequence
  ENSG00000114423_71 (sequence is synthesized)
cttagttttttataatctctcaaataagtactaaattttcagttttgcagtgctgtactataaatcacaggcagtagtactttgctttttacaacagattagtctctgtatgtgtatcca

SEQ ID NO: 201995 - DNA, 120 bp, Artificial Sequence
  ENSG00000114423_72 (sequence is synthesized)
tttatttctcaaacacttatataagtgataaattggctgtgatcatttcagtttgttttaatcctgtggatataatatttttctttagtttttgaagaatttattttagaaaagctttat

SEQ ID NO: 201996 - DNA, 120 bp, Artificial Sequence
  ENSG00000114423_73 (sequence is synthesized)
tactttacaaagttttcttatcaggggacaattggtaattattatactctgtgtagcaattgtgttatatctaatctctttccctttaaagcctgaatgcttccaactttataatttgct

SEQ ID NO: 201997 - DNA, 120 bp, Artificial Sequence
  ENSG00000114423_74 (sequence is synthesized)
ttagagagcccagtttaccctatggctgacaaatagcaaacttaggatatgatgcaagatagaacatgataatgattcaaaacagaaccataagcaggtatttttgctatttataataat

SEQ ID NO: 201998 - DNA, 120 bp, Artificial Sequence
  ENSG00000114423_75 (sequence is synthesized)
attttgagtgtatctagtaccttttaaataatatagtttaatggaagaatatagtacagtggtatattttatagtctatgtatggctctgaagtgtatccagagtttactttttaacctt

SEQ ID NO: 201999 - DNA, 120 bp, Artificial Sequence
  ENSG00000114423_76 (sequence is synthesized)
aaataaatagatgattagaaatagcattaagtgtatttgacaaacctataaatttcccgtaaagaaataagcaagtgtatgtattgtaaaagacagtctttcctctgacttaatgttgta

SEQ ID NO: 202000 - DNA, 120 bp, Artificial Sequence
  ENSG00000114423_77 (sequence is synthesized)
tcaggggcatttagagtctacaagaacctaaagtaaattttatgaaatatctagtgcaaaatctttgggaaatttcaaaatttatgctgaaatcaccatatttgtttcctttggtttctc

SEQ ID NO: 202001 - DNA, 120 bp, Artificial Sequence
  ENSG00000114423_78 (sequence is synthesized)
taacaaaccaaaagatcaacattgtctcatgcgatttatcttctcattccttcctaaaaatatttctggaaaattaatggagctggaccaccaattcttcaaatattgaaaactcaaaat

SEQ ID NO: 202002 - DNA, 120 bp, Artificial Sequence
  ENSG00000114423_79 (sequence is synthesized)
ctaagagttattttaatcttgaaattaatgaaaacaagttaaagagccttgtctaagtcaaaaagtcctcagcaaagctggtgataattattatactccaaaaaaggtgaaaagataatg

SEQ ID NO: 202003 - DNA, 120 bp, Artificial Sequence
  ENSG00000114423_80 (sequence is synthesized)
aaaaatagtcaatatttaagcctatgttttcatcgtaagtaatcaaatacttacatattattaatgtctaagggagtggaagttaaaacaatgaaattcaatcgggtcttctttaatatt

SEQ ID NO: 202004 - DNA, 120 bp, Artificial Sequence
  ENSG00000114423_81 (sequence is synthesized)
tacaatttttgctttacattagcaattcaggtttcactgattttaaaattgtgaacaatctgaatttgtgtggatttatttgtggtagttaaaagtaaatattaagtgcaagctatttgc

SEQ ID NO: 202005 - DNA, 120 bp, Artificial Sequence
  ENSG00000114423_82 (sequence is synthesized)
caagagtgttctaggtgctatgtttgatttaggaggtataattcaaacatgagaagtaggaaaagatccctcagatccctgtcctcagaagaattgacggtactttcagagatatcgaca

SEQ ID NO: 202006 - DNA, 120 bp, Artificial Sequence
  ENSG00000114423_83 (sequence is synthesized)
acataaaagtactatgagaggaaagcagcggtgcctgaggtgggagtgatagctagataaattattagtgaaccaaggttttcagatgtaatgtttgtctactcaaaaagggaatcaatt

SEQ ID NO: 202007 - DNA, 120 bp, Artificial Sequence
  ENSG00000114423_84 (sequence is synthesized)
ctctaagaatttaaacccatataatactatgaatgttaaaccagttgggtttatggtattaatgatttaatacagcaacactgacaaaatctctttttctccctttagttccagttagta

SEQ ID NO: 202008 - DNA, 120 bp, Artificial Sequence
  ENSG00000114423_85 (sequence is synthesized)
aatatcatattttttactatttcagatgccccgtctctgactgccaaggtggtaaattatcacattttactgtatattcaaatgttaattactaaatggcataattttaacaattaaatt

SEQ ID NO: 202009 - DNA, 120 bp, Artificial Sequence
  ENSG00000114423_86 (sequence is synthesized)
tactattttgtgagccaactaacaacaatgatgttaagcataggatgcccaatataataataagcaccttgtatgtacagaagattttacatgcacaaattcatttaatccacacaaatc

SEQ ID NO: 202010 - DNA, 120 bp, Artificial Sequence
  ENSG00000114423_87 (sequence is synthesized)
cgaagtttcaggtctgttttacaaattttgtatgcccaatgcttagagagatcaagtaatttgataatactcttatagggaggatccaaacccatggttttatgtatatttgtttgtttg

SEQ ID NO: 202011 - DNA, 120 bp, Artificial Sequence
  ENSG00000114423_88 (sequence is synthesized)
ttttttgcttttactttagaacagtttctatacattgtacaggttggattgggacagaaaataaaatttagaagctgtttttattgtcaacaatcttataattaaatatatctgcaaaat

SEQ ID NO: 202012 - DNA, 120 bp, Artificial Sequence
  ENSG00000114423_89 (sequence is synthesized)
ataaatataaaacaagtagtctttattatctggaaataaatgtgaagagcatatttaagcaagtgatgaataaattagaaaatatgcaggcagtaaaaaatggttaatatcagtcatgaa

SEQ ID NO: 202013 - DNA, 120 bp, Artificial Sequence
  ENSG00000114423_90 (sequence is synthesized)
tttaattttctaatttatttttgaaagccataatcttcataaaataattctagaatttttttcttcagccaatcaacagagatcatccttttaatttgaaacttgtttttatttttaaga

SEQ ID NO: 202014 - DNA, 120 bp, Artificial Sequence
  ENSG00000114423_91 (sequence is synthesized)
gctgtcctgggtagaagggtttggcagccctagggagatgaatttctccagcgttggacccgcccagagcggagaagcaacacccttccagccactactctgttgctatgaaacaaaaga

SEQ ID NO: 202015 - DNA, 120 bp, Artificial Sequence
  ENSG00000114423_92 (sequence is synthesized)
aagcgaagcaggaagtcccgcctttcagccccagatggctttggctcccggtcccgacgctcacgcccacctgccaccccttattgaactaaaattccagatggcaaactcaatgaatgg

SEQ ID NO: 202016 - DNA, 120 bp, Artificial Sequence
  ENSG00000114423_93 (sequence is synthesized)
caggttctattgaattcttccacagagataagttaattttacatagtgtttaggatatcaacaatttttgtggcccttgtaattcttggttatagtttaaaaaaagagagactgtgttac

SEQ ID NO: 202017 - DNA, 120 bp, Artificial Sequence
  ENSG00000114423_94 (sequence is synthesized)
ttgagatatttacttctacattttaaaataagggatgagtatcttgatgttattactggtaattttgagaaaagaaaaatatatgttcaaactttattaaataaacaggaatactagttc

SEQ ID NO: 202018 - DNA, 120 bp, Artificial Sequence
  ENSG00000114423_95 (sequence is synthesized)
cctctacctctcaagttacttttaattggaaagtattctccttatataattttactctgaactgtcctttaggtcttgtgataatggtcactgtatgctgaatggaacacatggtccatc

SEQ ID NO: 202019 - DNA, 120 bp, Artificial Sequence
  ENSG00000114423_96 (sequence is synthesized)
tcaggtttctgataattttacagaatatcttatttatttaacatgatacaaagacattctaaatagtaagagctttgcttcttcaccttgtcaaggaagagagtaaaagtaatcttccta

SEQ ID NO: 202020 - DNA, 120 bp, Artificial Sequence
  ENSG00000114423_97 (sequence is synthesized)
gtgcacctcttgccttacggcatggcagccagaagttattgagtttctgtgggagatactgtgctttgaaaattcttggtatggatccaacctattctcagtgcatttatatacatataa

SEQ ID NO: 202021 - DNA, 120 bp, Artificial Sequence
  ENSG00000114423_98 (sequence is synthesized)
tttttccagttataattgctatgtttaaaaaaagatttgtggcaacctcatagctacatgaaatatagcaaggagtcggatggtcagggctgccctttctgtcgttgtgaaataaaagga

SEQ ID NO: 202022 - DNA, 90 bp, Artificial Sequence
  ENSG00000114423_99 (sequence is synthesized)
cttacttatacaaatttctgcagccagcttgaggttcttctcagagaatgtgtttttcttttttatcacattgtcaggctgcaaattttc

SEQ ID NO: 202023 - DNA, 85 bp, Artificial Sequence
  ENSG00000114423_100 (sequence is synthesized)
taatgctccgcttcttcttgaaacataagttccaattccatatcatatctttgtgaatgaataaaacttaatgcttttaacagta

SEQ ID NO: 202024 - DNA, 120 bp, Artificial Sequence
  ENSG00000114439_0 (sequence is synthesized)
tgctcagatcagcttcctgcttctcatgaaagctgttcccctataaagctggtctgctttcactgaaagaattatattcataagtctgaggctggttttgtggaagtattgttggtttgg

SEQ ID NO: 202025 - DNA, 120 bp, Artificial Sequence
  ENSG00000114439_1 (sequence is synthesized)
tttcctttgggggatgaaggaggaggaaacaattttttttaaaaaaaaagtgggggcaggctgaaagagcaaaatcatcttgaattttgttgtcacatcgtgccggtgttataaccagct

SEQ ID NO: 202026 - DNA, 120 bp, Artificial Sequence
  ENSG00000114439_2 (sequence is synthesized)
ctgtagactgccgcactgaaaacatttctgtgagagaatcctgctgcatcacagaagctggaagttctgatgttccactgaaatcacaatggaaagtcttgacttgactggtaagagctg

SEQ ID NO: 202027 - DNA, 120 bp, Artificial Sequence
  ENSG00000114439_3 (sequence is synthesized)
ttgtgaaggtacatcttacttacttacctggaagcagtgaggcagtcaagaattatgtgctgtcagagctggtctcagcatgatcaaggaagtgtgatcattggatatttttttcttgtc

SEQ ID NO: 202028 - DNA, 120 bp, Artificial Sequence
  ENSG00000114439_4 (sequence is synthesized)
aattttattattttttaaagtgtgacttttattgatctccattatcaagtcacagtaatgaaaggcagtaatagaaataaggatcattcagcagaaggagaaggggttggaaaacgacca

SEQ ID NO: 202029 - DNA, 120 bp, Artificial Sequence
  ENSG00000114439_5 (sequence is synthesized)
aaacgaaagtgtcttcagtggcatccattgctagcaaagaaacttcttgatttttcagaagaggaagaagaggaagacgaagaggaggatattgataaggttcaacttcttggggccgat

SEQ ID NO: 202030 - DNA, 120 bp, Artificial Sequence
  ENSG00000114439_6 (sequence is synthesized)
ggcctagagcaagatgttggtgaaactgaagatgatgaatcaccagagcagcgagcccggagaccaatgaatgcatttcttttattttgcaaacgccatcgctctcttgtacgtcaggaa

SEQ ID NO: 202031 - DNA, 120 bp, Artificial Sequence
  ENSG00000114439_7 (sequence is synthesized)
caccccaggcttgataaccgaggtgctaccaagatactagctgattggtgggctgttcttgatccaaaggaaaagcagaaatacacagacatggccaaggagtataaggatgcatttatg

SEQ ID NO: 202032 - DNA, 120 bp, Artificial Sequence
  ENSG00000114439_8 (sequence is synthesized)
aaagcaaatcctggctacaaatggtgtcctaccacaaacaagcctgtgaaatccccaacacccactgtcaatccacgaaagaaactttgggccttcccatctgactcttcaagagacttg

SEQ ID NO: 202033 - DNA, 120 bp, Artificial Sequence
  ENSG00000114439_9 (sequence is synthesized)
ccaagccccaagaaagcaaagactgaagaaatgcctcagcttaactttggaatggctgatcctactcaaatgggaggcctgagtatgctgctgttagctggagaacatgctcttggcaca

SEQ ID NO: 202034 - DNA, 120 bp, Artificial Sequence
  ENSG00000114439_10 (sequence is synthesized)
ccagaggtatcctctggcacatgcaggcctgatgtttcagaatctcctgaattacgtcagaagtcaccattgtttcagtttgccgagatatcttcaagtacgtcccactctgatgcttct

SEQ ID NO: 202035 - DNA, 120 bp, Artificial Sequence
  ENSG00000114439_11 (sequence is synthesized)
acaaagcagtgtcaaacatctgccttgtttcagtttgcagagatttcttcaaacacttcgcagttgggtggtgctgagcctgtaaaacgctgtggaaagtctgcactctttcaactggca

SEQ ID NO: 202036 - DNA, 120 bp, Artificial Sequence
  ENSG00000114439_12 (sequence is synthesized)
gagatgtgcctggcatcagaagggatgaaaatggaagaatcaaagctaataaaagcaaaagaatccgatggtggaagaattaaagaattagagaagggaaaggaagaaaaagaaattaaa

SEQ ID NO: 202037 - DNA, 120 bp, Artificial Sequence
  ENSG00000114439_13 (sequence is synthesized)
atggagaaaacagatgaaactaggttacagaaggaagcagaatttgaaaaatcggctaaggaaaatttaagagattctaaggaattgagaaattttgaggcattgcaaatagatgacata

SEQ ID NO: 202038 - DNA, 120 bp, Artificial Sequence
  ENSG00000114439_14 (sequence is synthesized)
atggctataaaaatggaagatcccaaagaaattagaaaggaagagttagaagaagatcacaaatgtagtcattttcctgatttttcttattctgccagtagcaagataataattagtgat

SEQ ID NO: 202039 - DNA, 120 bp, Artificial Sequence
  ENSG00000114439_15 (sequence is synthesized)
gccagaaaagctaaaaaagaaaaagaagaaaagcaaaatggatcgacatggaaatgataaatccacacccaagaagacttgcaaaaagaggcagtcttcggaatctgacattgagagcgt

SEQ ID NO: 202040 - DNA, 120 bp, Artificial Sequence
  ENSG00000114439_16 (sequence is synthesized)
catatataccattgaagccgtcgcaaaaggagactggggcatagagaaacttggagatacccctcgcaagaaggtccgcacatcctcaagtggcaagggaagcattttggatgccaagcc

SEQ ID NO: 202041 - DNA, 120 bp, Artificial Sequence
  ENSG00000114439_17 (sequence is synthesized)
accaaagaaaaaagtgaaatcaagagagaagaaaatgtcaaaggagaaatcctcagacaccaccaaagagtcaagacctccagatttcattagtatttctgctagcaagaacatttctgg

SEQ ID NO: 202042 - DNA, 120 bp, Artificial Sequence
  ENSG00000114439_18 (sequence is synthesized)
tgagacaccagagggtataaaagcagaaccattgacccctatggaagatgcactaccacccagcctatcaggacaggccaagcctgaggacagtgactgtcacagaaaaatagaaacttg

SEQ ID NO: 202043 - DNA, 120 bp, Artificial Sequence
  ENSG00000114439_19 (sequence is synthesized)
tggttccaggaaatccgagaggtcttgcaaaggtgctctttataaaaccctggtgtctgagggcatgctcacctctctgcgagctaatgttgacagaggaaaacgaagctcaggaaaagg

SEQ ID NO: 202044 - DNA, 120 bp, Artificial Sequence
  ENSG00000114439_20 (sequence is synthesized)
aaactcctctgatcatgaagggtgttggaatgaagaaagctggacatttagtcagagtgggaccagtgggagcaagaagttcaagaagacaaagccaaaagaagactgtctccttggctc

SEQ ID NO: 202045 - DNA, 120 bp, Artificial Sequence
  ENSG00000114439_21 (sequence is synthesized)
cgcaaagctggatgaagaatttgaaaaaaaattcaacagcctccctcaatatagtcctgttacatttgaccggaaatgtgtacctgtcccaagaaaaaagaagaagactggaaatgtgtc

SEQ ID NO: 202046 - DNA, 120 bp, Artificial Sequence
  ENSG00000114439_22 (sequence is synthesized)
ctcagaaccgactaaaaccagcaaaggaagtggggataaatggtcaaacaagcaactcttcttggatgccattcaccctacagaagccatattttcagaagacagaaacaccatggagcc

SEQ ID NO: 202047 - DNA, 120 bp, Artificial Sequence
  ENSG00000114439_23 (sequence is synthesized)
tgttcataaggttaaaaatatcccatccattttcaacactccagagccaacaacaacgcaagaacctttggtgggcagccaaaagagaaaagcaaggaaaaccaagattacacaccttgt

SEQ ID NO: 202048 - DNA, 120 bp, Artificial Sequence
  ENSG00000114439_24 (sequence is synthesized)
caggacagcagatggccgggtatcaccagcaggaggtactttggatgacaaaccaaaggaacaactgcagaggagtctccctaaagcaactgagacagactgcaatgacaaatgctcaca

SEQ ID NO: 202049 - DNA, 120 bp, Artificial Sequence
  ENSG00000114439_25 (sequence is synthesized)
caacaccgaggtcggggagacgcggagcagtactccagaaatgcctgccgtgtctgcgttctttagcctcgctgcgctggctgaagtggcagccatggaaaatgtgcacagaggtcagag

SEQ ID NO: 202050 - DNA, 120 bp, Artificial Sequence
  ENSG00000114439_26 (sequence is synthesized)
gtcaactccgctcacccatgatggacagccaaaagaaatgccgcaggctcctgtacttatttcctgcgctgaccagtgaagcgccctttcattgtaaaacattgtgctttacctactacc

SEQ ID NO: 202051 - DNA, 120 bp, Artificial Sequence
  ENSG00000114439_27 (sequence is synthesized)
ctagccttgtctttaccgagggatgctagtgagtccaagtggtggaaaatatagactgcaaacaagtgcttgttgccccacacggcccagattcacttgaagcagaagttagcatcctgg

SEQ ID NO: 202052 - DNA, 120 bp, Artificial Sequence
  ENSG00000114439_28 (sequence is synthesized)
gccagtttgttctctcagaacccagaatctttgagggtaaggttatctgtctgatactgagcagaaacagaatgatcctggagctttgctttctattgaaggcttttgacggtaataggt

SEQ ID NO: 202053 - DNA, 120 bp, Artificial Sequence
  ENSG00000114439_29 (sequence is synthesized)
ggtaacttggtaaaaggctgcctttactgtagctcacccagcatctcttttaccaaccagagagtgtgaaactagtttcatatattacctagttattctttcaaaacaaaacaaaaaaaa

SEQ ID NO: 202054 - DNA, 120 bp, Artificial Sequence
  ENSG00000114439_30 (sequence is synthesized)
aaaatgagtgttttcagtctctccgggttgcatgtactgtatgtggagcagtgtacagtgaagcggaggcagagcggctccgcgagcttctctccactttcccatagagaaaccctgact

SEQ ID NO: 202055 - DNA, 120 bp, Artificial Sequence
  ENSG00000114439_31 (sequence is synthesized)
ggccgctgagggctagctacacacacgccctcacgcccggcgagcccgcgaggtcactatcatatgacaaaggctttgccgcagttcatcttcctccctgtgtactttccatttgccttc

SEQ ID NO: 202056 - DNA, 120 bp, Artificial Sequence
  ENSG00000114439_32 (sequence is synthesized)
ctggaatcctgctgcatcacagaagctggaagttctgatgttccactgaaatcacaatggaaagtcttgacttgactggtcacagtaatgaaaggcagtaatagaaataaggatcattca

SEQ ID NO: 202057 - DNA, 120 bp, Artificial Sequence
  ENSG00000114439_33 (sequence is synthesized)
ctgacgcactgcactagttattattagatattcttagtcttttttgtacatggagatttaagtttaagatggtttatataataggttatacctacatttatattgtagaataaatattaa

SEQ ID NO: 202058 - DNA, 120 bp, Artificial Sequence
  ENSG00000114439_34 (sequence is synthesized)
ttccagagactcccaagcagcctgggcaggcagatgtaccattgttagtggtgtatgctcggcctcgtggtccatatattctgcacttttatatttgccaccagaatggtagtttgctgg

SEQ ID NO: 202059 - DNA, 120 bp, Artificial Sequence
  ENSG00000114439_35 (sequence is synthesized)
aaaaaaaaaaaaagagagagagaaaaaattacaactcttacaatctgaatttttttcttagccttgagtgaccaagaagaatttgcttgaggcaaattgtggcaaatattttcccagaca

SEQ ID NO: 202060 - DNA, 120 bp, Artificial Sequence
  ENSG00000114439_36 (sequence is synthesized)
gacaggggaagagtcctgcagattacagattactggtgttttcatgccttgaggattcttttatttttacataggggtctaagtgaccaatggattgttcatacaaacaaaaaaaaagac

SEQ ID NO: 202061 - DNA, 120 bp, Artificial Sequence
  ENSG00000114439_37 (sequence is synthesized)
aaaaatattattcagaagtgaccttagtattacttcactattctaaacacattgaagacactcacttcatgtggacttggagctacagaccttttacatccatcacagattggctggacg

SEQ ID NO: 202062 - DNA, 120 bp, Artificial Sequence
  ENSG00000114439_38 (sequence is synthesized)
ggttgcaattgctatgcacagcctgattggcactgcaggtttttagagccattttgagtttgtgttgtttaggaggtactgagtcaatgatgagggaggtatgcctgaccagagtgggac

SEQ ID NO: 202063 - DNA, 120 bp, Artificial Sequence
  ENSG00000114439_39 (sequence is synthesized)
tctcagtcatagatccacctgcaagtctctgtttcctttttgtgttttgttgcttttgaacataaaaccaaccatacataagcagcgccaagtggattaactggcttagaacattcaaca

SEQ ID NO: 202064 - DNA, 120 bp, Artificial Sequence
  ENSG00000114439_40 (sequence is synthesized)
tattgacttaaccacctgacattcacagtgtcttgtttcctagcaacagatgcaaagtgataaatcaaaattagtctgaggctacagattttacagggtatttgttctatagcacaaagt

SEQ ID NO: 202065 - DNA, 120 bp, Artificial Sequence
  ENSG00000114439_41 (sequence is synthesized)
attccagcaataatttttaatggttttcaaactggcggaattttgacagtgctagttcgagtttgaagcttttgaattagatctctaaatggtgacagtttacatggttttatctagctt

SEQ ID NO: 202066 - DNA, 120 bp, Artificial Sequence
  ENSG00000114439_42 (sequence is synthesized)
tcttatttatacttgactgaattgtaatgattttttttctaattgtaatttgacgtaatagccatacaaaaaatgactctattcatactaggtttagcttctcatggttgtagatattac

SEQ ID NO: 202067 - DNA, 120 bp, Artificial Sequence
  ENSG00000114439_43 (sequence is synthesized)
ttcagttccggtgctggaaaatatgtacaacatactaacaggattgaaaaaaaaatagaggtttttcttcttgtttttttttccaaagcaggtaaagagggtagcaaagcatcggaatga

SEQ ID NO: 202068 - DNA, 120 bp, Artificial Sequence
  ENSG00000114439_44 (sequence is synthesized)
tgtgctcaaaaatgcatattcctggtggggatggaggaagaaggcattagtaaaaggttaatcaaacgttacaacttaaccccattcatgtaggaataaatcaagtgagcagttccagac

SEQ ID NO: 202069 - DNA, 120 bp, Artificial Sequence
  ENSG00000114439_45 (sequence is synthesized)
ttttgcataatatttttactatgatgctgttttattaatattttctaaatttcaaaacaaaaagtgaatgtttgaaattgctgggtcccgatgttggtggctgttggagttttggaccac

SEQ ID NO: 202070 - DNA, 120 bp, Artificial Sequence
  ENSG00000114439_46 (sequence is synthesized)
tcgctagcagtgatttgaagattataattagctaaaatccaaaacaaaaaaccaacaacaaaaattgtatggtgcggaacatgcaccttgacaatggtactaacttgttattctatagaa

SEQ ID NO: 202071 - DNA, 120 bp, Artificial Sequence
  ENSG00000114439_47 (sequence is synthesized)
cacgttagaatagatctatttttgccagagcaccctccttcagtcctccgattacatttcactagagttccttacgagattgctgtatattcctgggaccttttttaaaaaaaaaaaaag

SEQ ID NO: 202072 - DNA, 120 bp, Artificial Sequence
  ENSG00000114439_48 (sequence is synthesized)
caaaacaaaagattactttttttctatgtgattaatatcttacttgatctgcttttcctaaacctcagtggcttttcccttaggcagggttgggggtgggagggcaacttactggagatg

SEQ ID NO: 202073 - DNA, 120 bp, Artificial Sequence
  ENSG00000114439_49 (sequence is synthesized)
actgttttcagatactttaaaacaaacctttttgtagaaatgcttaatttttaagcggttaggcactgagagtagcagaaatcctgcaaagctttatagttccttagactcaccttgtcg

SEQ ID NO: 202074 - DNA, 120 bp, Artificial Sequence
  ENSG00000114439_50 (sequence is synthesized)
attctctgagtaaagtcttgatttcaataattgtgcttctcatgccctgaaactgctggagaggagtgttgttattttcaggtaacaacattcgttagcacaaatatttcagaccaatat

SEQ ID NO: 202075 - DNA, 120 bp, Artificial Sequence
  ENSG00000114439_51 (sequence is synthesized)
tagtgctctccaccccaccttttgttatcattttcatttcatttctctcattcttttttattttggaaaatcatattgctatagtgtgtactttaatctgccagcagataccatctacac

SEQ ID NO: 202076 - DNA, 120 bp, Artificial Sequence
  ENSG00000114439_52 (sequence is synthesized)
taacatttgtcccacagcatcctcaagagaaaaagttgttgcaccttatatatatctcaagcaaaccaaaatatgatgctcttctgctttgttttattctaaattgttgtatcatatctt

SEQ ID NO: 202077 - DNA, 120 bp, Artificial Sequence
  ENSG00000114439_53 (sequence is synthesized)
tctgaaaccattctgaatttagttgaaattatcaatatttatgcttttaaccttaatttctggattcaagcctgtatataaatcttttgaaaaaaaattgtcctagcccttctctgcgat

SEQ ID NO: 202078 - DNA, 120 bp, Artificial Sequence
  ENSG00000114439_54 (sequence is synthesized)
gctggaagtagaagattgcgtctcagatggagacgcagtactgttccagttttctttagccttttatttatttagttattctgggtatttcctatgtaattttgaagtgtgtagagtata

SEQ ID NO: 202079 - DNA, 120 bp, Artificial Sequence
  ENSG00000114439_55 (sequence is synthesized)
ttatagtaactgaagctgcagctgtaagaagctgagtgaaagaaaaaatactgtaagacatccttaaagtttttatttgtttgggtactgtatatgagatcaggaaaaagaaaaatgtcc

SEQ ID NO: 202080 - DNA, 120 bp, Artificial Sequence
  ENSG00000114439_56 (sequence is synthesized)
cacagccacattggaaatacaggttcttgtccccaaattaggttagttcccagattttagatcaaaactgttaattcattaaaaccccttttaaaaggtaaattctactgttgtaattcc

SEQ ID NO: 202081 - DNA, 120 bp, Artificial Sequence
  ENSG00000114439_57 (sequence is synthesized)
gatagtctttttcccacaaatatcagaaatatatttatttaattctgtcagatgagctttctaccgatgccatgtcccaaagccatgttaaaataattcccacgttatcattgtgattct

SEQ ID NO: 202082 - DNA, 120 bp, Artificial Sequence
  ENSG00000114439_58 (sequence is synthesized)
acttcctgccactaaaattgctggagaaacaaaataatgatggaacactatgaacaaaaaggagcatctgaactggtctggttatttagaatccaatgtgttcaaatccttttgttttct

SEQ ID NO: 202083 - DNA, 120 bp, Artificial Sequence
  ENSG00000114439_59 (sequence is synthesized)
tattaagtcagatgctactgtaagtcagataaaattttgtttgcactctgcagtctttggctcaatgtatggaaatgtttgcacctatgtaaagtcacaagctaattacaaattgctaca

SEQ ID NO: 202084 - DNA, 120 bp, Artificial Sequence
  ENSG00000114439_60 (sequence is synthesized)
gaacaggagtaagctgaaaactgaatgccatgttttgtttataaggtggggaggggagggaaaataccaaaaaactctgttccaagtttggcatttgacattaatgtgaagcagtgggac

SEQ ID NO: 202085 - DNA, 120 bp, Artificial Sequence
  ENSG00000114439_61 (sequence is synthesized)
catgctgcctgctaaactactgtatgaatcgtaaatgttctgaagacgagcagctggaggctggaggatggcattccatacagcaaaggagaagcacccaccacttcatctgggaaaagg

SEQ ID NO: 202086 - DNA, 120 bp, Artificial Sequence
  ENSG00000114439_62 (sequence is synthesized)
aaggaaattgcaggaggcctggagccatcatttgtaaaggggatgttgcggggtgtgatgctgttgaggagattcaccttcaattgcactgctccacagagccctcatataaggccaatc

SEQ ID NO: 202087 - DNA, 120 bp, Artificial Sequence
  ENSG00000114439_63 (sequence is synthesized)
ctaatgggctacctcggctttaaaagttaatttcagtaagtcctgtttcaaaagtttgtctttttttgcttctaccttcagtgccactattttccactgcagtgttttgacttcacaaac

SEQ ID NO: 202088 - DNA, 120 bp, Artificial Sequence
  ENSG00000114439_64 (sequence is synthesized)
tgcctcctccagagagaacaatgtattgctgaaaatgggcagtagaagcaaatgctgttgttacatttgacctataaagtattcagagtgactgctaggtagaaattaaaacttagcttt

SEQ ID NO: 202089 - DNA, 120 bp, Artificial Sequence
  ENSG00000114439_65 (sequence is synthesized)
cccaaatagctccttattttgcaccttataaaaagtatactaattgttaattagatgttgcttttgtttatacaagcattcccaaagaactagatttggattttgttttgagtttttgga

SEQ ID NO: 202090 - DNA, 120 bp, Artificial Sequence
  ENSG00000114439_66 (sequence is synthesized)
tttttaaaaattatcttatttagattgactaacagcatacttacaattttaaaagaagctgttgttcagttcatcttaccagatgtgtctggcgaagtattcagggtttgatggactgct

SEQ ID NO: 202091 - DNA, 120 bp, Artificial Sequence
  ENSG00000114439_67 (sequence is synthesized)
ttactttcgtttggaagtgatagctaagtttattatactctatattaaacaactttgttcatttcactgaggaccttatcttccttatatttcagaacaaagaagcaacaagcgtgaata

SEQ ID NO: 202092 - DNA, 120 bp, Artificial Sequence
  ENSG00000114439_68 (sequence is synthesized)
aaaagacaaatgtatttgactccctcataatccccatctgtatgtgctacccttccttcaaatatataaatgtgcatcttttttttaaaaaaaaaaaaaaaaaaggttcctcttctggcc

SEQ ID NO: 202093 - DNA, 120 bp, Artificial Sequence
  ENSG00000114439_69 (sequence is synthesized)
aaatttgatctatggtggtatgattcatactgttaaattgagagaggaaaccttgtggttaaaaattatatggctgctgttttctttttgcagtcagtggtcaaaactgatcatgtgctt

SEQ ID NO: 202094 - DNA, 120 bp, Artificial Sequence
  ENSG00000114439_70 (sequence is synthesized)
aaatcgatttttatgcacagaactagttattgtgaacattactgctccctccaaagatttcctgataacttgggccagaggtggttactgagtaacaaggatctaattcaatgcctcaaa

SEQ ID NO: 202095 - DNA, 120 bp, Artificial Sequence
  ENSG00000114439_71 (sequence is synthesized)
actcttccacccacaatgcaaatcttacctcacaagctctaacctaaatcacagagacatgcatgtttcatgcattaacactgatttcgctctgtggcccaccagaggggtgggctcatg

SEQ ID NO: 202096 - DNA, 120 bp, Artificial Sequence
  ENSG00000114439_72 (sequence is synthesized)
tcccctgactcctcacatgagtgcctcagctctaagagccgtggaacggggggtagggaaggtttgcgatctggagctcagcaactggctcagcaacgttttctccatttcattagcact

SEQ ID NO: 202097 - DNA, 120 bp, Artificial Sequence
  ENSG00000114439_73 (sequence is synthesized)
aaacaagtctcttgctctcaggaatttgtcagaaaaaagaataaaatcacctgagactccacataccagattataaactcttctcgtaggtttgaattgcttactcacatgtcataaatt

SEQ ID NO: 202098 - DNA, 120 bp, Artificial Sequence
  ENSG00000114439_74 (sequence is synthesized)
aaccacagcttcatttgaccaccaggtctaaagtctgttgacagtttcagcatgactgaatcgctcattttttttttttgctttcagaaattggcttggttctctttagagttggtgtaa

SEQ ID NO: 202099 - DNA, 120 bp, Artificial Sequence
  ENSG00000114439_75 (sequence is synthesized)
acatgccatgtaataaatgatttccacttaatggtacaacagaattattgctttcttagatgtatgtgtagtaaaagtcaatatacacatttatataatttctttcttcaaaatcttata

SEQ ID NO: 202100 - DNA, 120 bp, Artificial Sequence
  ENSG00000114439_76 (sequence is synthesized)
atcttatacctaatttgatatttctaaaaattgcacatgtaagtcatgtgtataacatgctaaagtactttaactgtgatcttaaaactgaataaaaatatttaataaaactttgaaata

SEQ ID NO: 202101 - DNA, 120 bp, Artificial Sequence
  ENSG00000114439_77 (sequence is synthesized)
atattattcaaatatatttctttatgttcacactactggccgtagagtatgtgcctttaatgtaccattttcactaaaaacagtaggaaaaatactaataaaagtaagatatttcaacta

SEQ ID NO: 202102 - DNA, 120 bp, Artificial Sequence
  ENSG00000114439_78 (sequence is synthesized)
ccttgtctcactgagtttcccacagcataagtcagtttatgattcttagtgtttagaattcagctgtgggttattattaagatagtaaatattcattttgtgtttatctacaagtaattg

SEQ ID NO: 202103 - DNA, 120 bp, Artificial Sequence
  ENSG00000114439_79 (sequence is synthesized)
tcgtttcaaaacttattctcaaatagacattttaatttataatgaaattttacatggcattgaaggtctagtaaatttaatgctagacaatactataggaagagtgcagtgtatgagtgg

SEQ ID NO: 202104 - DNA, 120 bp, Artificial Sequence
  ENSG00000114439_80 (sequence is synthesized)
ctccattatcaagcatatgggccactgaaaacttctgagcaatggatataaatgagatggaacagaaggaaaaaaaggtagacattggaaagactggtttagggggctttactattatcc

SEQ ID NO: 202105 - DNA, 120 bp, Artificial Sequence
  ENSG00000114439_81 (sequence is synthesized)
agaccgccgccagttcgagcaggcacgggcacggggacaccccactcgttgctcctccgttatggaaaggtgtttagcagacttttacgcccggagtgtggtcactatcatatgacaaag

SEQ ID NO: 202106 - DNA, 120 bp, Artificial Sequence
  ENSG00000114439_82 (sequence is synthesized)
gcaagcattgaggctccccaacagaagcatttctctgatgcttctattagaaactgctgaagctgtaagagagattttcatcaattttctttgaggaacaagataagtgaaacaatcttg

SEQ ID NO: 202107 - DNA, 120 bp, Artificial Sequence
  ENSG00000114439_83 (sequence is synthesized)
agactcgaggtttcttttcctcctccacctcgtctcgctcactcaccctctgaaatttattatcatattttatttattttttggtattgtatgaaacttaacataactgagaccgaaccc

SEQ ID NO: 202108 - DNA, 120 bp, Artificial Sequence
  ENSG00000114439_84 (sequence is synthesized)
gagtcctgtaatttacaaggaccctgaatcccagaatctggaacacgtttatgtgtgaaatagccgcgatcatttctgctaaatgaggaaggtcactatcatatgacaaaggctttgccg

SEQ ID NO: 202109 - DNA, 120 bp, Artificial Sequence
  ENSG00000114439_85 (sequence is synthesized)
aaatggtcaaacaagcaactcttcttggatgccattcaccctacagaagagccaacaacaacgcaagaacctttggtgggcagccaaaagagaaaagcaaggaaaaccaagattacacac

SEQ ID NO: 202110 - DNA, 120 bp, Artificial Sequence
  ENSG00000114439_86 (sequence is synthesized)
agttcgagcaggcacgggcacggggacaccccactcgttgctcctccgttatggaaaggtgtttagcagacttttacgcccggagtgtcactatcatatgacaaaggctttgccgcagtt

SEQ ID NO: 202111 - DNA, 120 bp, Artificial Sequence
  ENSG00000114439_87 (sequence is synthesized)
atgcattctgaataacataaactgaaatagtaagctgaaatataacaagtctgggtttttttttttttttttttgcattagaaatttatttttgctgttgtatttttagacggtcctagc

SEQ ID NO: 202112 - DNA, 120 bp, Artificial Sequence
  ENSG00000114439_88 (sequence is synthesized)
tagtagatgcatgcttttcacgtttggatatcagagttggatatggtttgaatcccagctgtactagcttttaaacgttgggcaatctacttcacaatgctgaatctcaatttccacatg

SEQ ID NO: 202113 - DNA, 120 bp, Artificial Sequence
  ENSG00000114439_89 (sequence is synthesized)
aataagtttaaggtggagagagcgaggctgagggtggtggtggaggggaggaggaaggccttggccgtttaaagtcttatttctgaaggtcactatcatatgacaaaggctttgccgcag

SEQ ID NO: 202114 - DNA, 120 bp, Artificial Sequence
  ENSG00000114439_90 (sequence is synthesized)
gtgcctggcacatagttcaacttcttggggccgatggcctagagcaagatgttggtgaaactgaagatgatgaatcaccagagcagcgagcccggagaccaatgaatgcatttcttttat

SEQ ID NO: 202115 - DNA, 120 bp, Artificial Sequence
  ENSG00000114439_91 (sequence is synthesized)
ttacgctgctaataagtggcaaagctggaattcaaactcaggctgtctggctgcagggtttgttctcctaaccacaccaccacactgcctgtagattatcctcacatgtttgggtatcct

SEQ ID NO: 202116 - DNA, 120 bp, Artificial Sequence
  ENSG00000114439_92 (sequence is synthesized)
aaatatccaaggaagcagcagtggcggagcaaaggcagccacttctagcctggcaactaaaagctgaaaactcacatgactgaatttcagggaacagttttcccatagttgagagtgggg

SEQ ID NO: 202117 - DNA, 120 bp, Artificial Sequence
  ENSG00000114439_93 (sequence is synthesized)
gggctggggagtagtaggccagccggtgccaggctgcgtttgcaaccagcacctctcggcacacaggcagcgccgcctgagaggggcacgggcgccggggcgcgggctggagcggcccca

SEQ ID NO: 202118 - DNA, 120 bp, Artificial Sequence
  ENSG00000114439_94 (sequence is synthesized)
gttgattttttaaaattatatttttttcaatgtgtaagttgtttaaatggagctaagaaaaaaatacaatttgcaaaccaagactaactgttaaatcaaaattatccaaaatatgttaaa

SEQ ID NO: 202119 - DNA, 120 bp, Artificial Sequence
  ENSG00000114439_95 (sequence is synthesized)
ttttttaaagtgtgacttttattgatctccattatcaaatgctctttgacttaaaatggggctacatcctgatacactcactgtcacagtaatgaaaggcagtaatagaaataaggatca

SEQ ID NO: 202120 - DNA, 120 bp, Artificial Sequence
  ENSG00000114446_0 (sequence is synthesized)
gcctggtaaccggtcgtggctgtactggcggcggcagggctggcggcttaggccgcagaggtctgtgggcctgagcccacgctggactctgtccgttctgcgatgactgctgctctggcc

SEQ ID NO: 202121 - DNA, 120 bp, Artificial Sequence
  ENSG00000114446_1 (sequence is synthesized)
gtcgtcacgacgtcgggtttggaagatggggtgcctaggtcccgtggcgaagggaccggggaagtggtcttggagcgggggcccggcgcggcctaccacatgttcgtggtgatggaggac

SEQ ID NO: 202122 - DNA, 120 bp, Artificial Sequence
  ENSG00000114446_2 (sequence is synthesized)
ttggtggagaagctgaagctgctccgctacgaggaggagttcctccggaagagcaacctgaaggccccgtccagacactattttgcactgcctaccaaccctggcgaacagttctacatg

SEQ ID NO: 202123 - DNA, 120 bp, Artificial Sequence
  ENSG00000114446_3 (sequence is synthesized)
ttttgtactcttgctgcttggttgattaataaagcgggacgtccctttgagcagcctcaagaatatgatgaccctaatgcaacaatatctaacatactatccgagcttcggtcatttgga

SEQ ID NO: 202124 - DNA, 120 bp, Artificial Sequence
  ENSG00000114446_4 (sequence is synthesized)
agaactgcagattttcctccttcaaaattaaagtcaggttatggagaacatgtatgctatgttcttgattgcttcgctgaagaagcattgaaatatattggtttcacctggaaaaggcca

SEQ ID NO: 202125 - DNA, 120 bp, Artificial Sequence
  ENSG00000114446_5 (sequence is synthesized)
atatacccagtagaagaattagaagaagaaagcgttgcagaagatgatgcagaattaacattaaataaagtggatgaagaatttgtggaagaagagacagataatgaagaaaactttatt

SEQ ID NO: 202126 - DNA, 120 bp, Artificial Sequence
  ENSG00000114446_6 (sequence is synthesized)
gatctcaacgttttaaaggcccagacatatcacttggatatgaacgagactgccaaacaagaagatattttggaatccacaacagatgctgcagaatggagcctagaagtggaacgtgta

SEQ ID NO: 202127 - DNA, 120 bp, Artificial Sequence
  ENSG00000114446_7 (sequence is synthesized)
ctaccgcaactgaaagtcacgattaggactgacaataaggattggagaatccatgttgaccaaatgcaccagcacagaagtggaattgaatctgctctaaaggagaccaagggatttttg

SEQ ID NO: 202128 - DNA, 120 bp, Artificial Sequence
  ENSG00000114446_8 (sequence is synthesized)
gacaaactccataatgaaattactaggactttggaaaagatcagcagccgagaaaagtacatcaacaatcagcttgagaatttggttcaagaatatcgtgcagctcaagcccagctgagt

SEQ ID NO: 202129 - DNA, 120 bp, Artificial Sequence
  ENSG00000114446_9 (sequence is synthesized)
gaggcaaaggagcgataccagcagggaaatggaggagtgacggaaagaaccagactcctctctgaggttatggaagaattagaaaaggtaaaacaagaaatggaagaaaagggcagcagc

SEQ ID NO: 202130 - DNA, 120 bp, Artificial Sequence
  ENSG00000114446_10 (sequence is synthesized)
atgactgatggtgctcctttggtgaagattaaacagagcttaacaaaactgaagcaagaaactgtagagatggacattagaattggcattgtggaacacacactactccaatcaaagctg

SEQ ID NO: 202131 - DNA, 120 bp, Artificial Sequence
  ENSG00000114446_11 (sequence is synthesized)
aaggagaagtccaacatgactaggaacatgcatgccacagttattccagaaccagcaacaggcttttattaaaacatactggttttcatgtttctgattagttgggttttttatatcaaa

SEQ ID NO: 202132 - DNA, 120 bp, Artificial Sequence
  ENSG00000114446_12 (sequence is synthesized)
ttacatatacatactcacatattatatcatggtgattatgatggttaaagcctttacactgaatgtaatgtttaataaagaaattacaaattctcactttctaagaagctttcactaatc

SEQ ID NO: 202133 - DNA, 120 bp, Artificial Sequence
  ENSG00000114446_13 (sequence is synthesized)
attacctatgttaaagctcccacctggtggctcatttttcatagcattccttgtgtaagccaaggtatatgacctgcgttttctgcagatgctgctgctgtcacaacatgaactgctgac

SEQ ID NO: 202134 - DNA, 120 bp, Artificial Sequence
  ENSG00000114446_14 (sequence is synthesized)
acagtcctttaccttgctccacctctgcagtgatcataagtgctttgtgcccagaggccactgaagatggtaggcaggattctttccaagaacccaaactgcctttgcctcagctttatg

SEQ ID NO: 202135 - DNA, 120 bp, Artificial Sequence
  ENSG00000114446_15 (sequence is synthesized)
gttacctaaaattgccactttttttaggttaaaaaaaacttcagtatcctcattaacatttgaagttggtttcttatgaatatttcgtggctaaaatgattttatagggaatctatcttc

SEQ ID NO: 202136 - DNA, 120 bp, Artificial Sequence
  ENSG00000114446_16 (sequence is synthesized)
taggatctaagccactaaataaaaggataaatgaatgatgataagtcagtcactcatgtttgactctgttcttagaatgaagagaaggtgcatatgcatgtctcaatttctacctttttc

SEQ ID NO: 202137 - DNA, 120 bp, Artificial Sequence
  ENSG00000114446_17 (sequence is synthesized)
tgtggtatcggctatactagggaaccattttgtagaagaaggaacgatgacaggtcgcatgaagatcagcctctagtactgatgatctttacttatgcatcttcctgagcaactttctag

SEQ ID NO: 202138 - DNA, 120 bp, Artificial Sequence
  ENSG00000114446_18 (sequence is synthesized)
gctaggatttctaaattggtgaaaaaagcagcattagagtgccagaattagcactggggaaaactggccaggggaacacaaagcaggagacagcctgcgttaattttttttttttaataa

SEQ ID NO: 202139 - DNA, 120 bp, Artificial Sequence
  ENSG00000114446_19 (sequence is synthesized)
ttttcaaaagcagtggtagaaaatttgataagaatgctttatgtttaggacaacaaaaataattttaaaaagttattttttaccctaatacttttctccactgaatattattattttttt

SEQ ID NO: 202140 - DNA, 120 bp, Artificial Sequence
  ENSG00000114446_20 (sequence is synthesized)
cttagctttttctttctagatgtattccccaacatgctcacatacacagatctttccctttccttactagacctctctttagtttaagataagtttagacaggagaaagtgtatgtaaac

SEQ ID NO: 202141 - DNA, 120 bp, Artificial Sequence
  ENSG00000114446_21 (sequence is synthesized)
tacctgaaaggatgacaatcaatacaatgacaaatatgccagtttatttaatttgtttaaaaaaaaaaaggcagaaaacccaccatgggaaaataagcattttttaaaatctgaagttgc

SEQ ID NO: 202142 - DNA, 120 bp, Artificial Sequence
  ENSG00000114446_22 (sequence is synthesized)
tcttttcctgtgtggtctttgggaggagtctaatacaaaaactgaaaacctttggtcctgggaatttattttcatggctgttgtcatggctgagtagttttttgatgaattcaatcaatg

SEQ ID NO: 202143 - DNA, 120 bp, Artificial Sequence
  ENSG00000114446_23 (sequence is synthesized)
cagagaacgcttttagataaatcagaactctccttaaaatgcatttcaatcagaagcaaagtacacccattatttatgcagacatgtaaaaaatctaaaaattcttgcaatgagtagtat

SEQ ID NO: 202144 - DNA, 120 bp, Artificial Sequence
  ENSG00000114446_24 (sequence is synthesized)
aagccacctatttttacttccttctctgaaatattccagttaactcagcttgggttctgtgctcctcctctcttcctatagaacactgtgcataccttgaataaagagcttattatacta

SEQ ID NO: 202145 - DNA, 120 bp, Artificial Sequence
  ENSG00000114446_25 (sequence is synthesized)
atagtaattttatgggcatagcatttgcctctgagggtacagagctgttcaattgaacataaaagaattattctttttgactattctaaattgaaaatgccacagataattaagaaaagc

SEQ ID NO: 202146 - DNA, 120 bp, Artificial Sequence
  ENSG00000114446_26 (sequence is synthesized)
taaaactcttctaagtgtggttaaaatatttctcatcacagatattttgtgctattgaaaatttcaagctgtcttcttttgcacatgtagttgattatttgtagaatggattgagatgta

SEQ ID NO: 202147 - DNA, 120 bp, Artificial Sequence
  ENSG00000114446_27 (sequence is synthesized)
ctgaactttctgttcattttcacctttcggccacttcccattctcttaatttcccccagacttccattatctggaatatattttatttcattgtttctaaagaagaaaagcttttaaata

SEQ ID NO: 202148 - DNA, 120 bp, Artificial Sequence
  ENSG00000114450_0 (sequence is synthesized)
gtggccggcggctctggtctcggctgtgagctgcgctctccacgccggctccgcgctccaggggctgctgagcgcccagcggacaccggcagcgcgcggtcgacgcgggcctgagctccc

SEQ ID NO: 202149 - DNA, 120 bp, Artificial Sequence
  ENSG00000114450_1 (sequence is synthesized)
tccagctgttttcactcattagctcctgaggtaaacaaattgaaaaaatgagcgaactggaacagttgaggcaagaagcagaacaactgcggaatcagattcaggatgctcggaaagcat

SEQ ID NO: 202150 - DNA, 120 bp, Artificial Sequence
  ENSG00000114450_2 (sequence is synthesized)
gtaatgatgcaacgcttgttcagattacatcaaatatggactctgtgggtcgaatacaaatgcgaacaagacgtacactgaggggccacctagctaaaatctatgctatgcattggggat

SEQ ID NO: 202151 - DNA, 120 bp, Artificial Sequence
  ENSG00000114450_3 (sequence is synthesized)
acgattccaggctgctagtcagtgcttctcaagatggaaaattaattatttgggatagctatacaacaaataagatgcatgctattcctttgaggtcctcctgggtgatgacctgtgctt

SEQ ID NO: 202152 - DNA, 120 bp, Artificial Sequence
  ENSG00000114450_4 (sequence is synthesized)
atgctccctctggtaattatgttgcctgtggaggcttggacaacatctgctctatatataacttaaagaccagagagggaaatgtgagagtaagccgagagttgccaggtcacacagggt

SEQ ID NO: 202153 - DNA, 120 bp, Artificial Sequence
  ENSG00000114450_5 (sequence is synthesized)
acttgtcctgctgtcgttttttagatgacagccaaattgttacaagttcaggagatacaacttgtgctttatgggacatcgaaactgcccagcagaccaccacattcactgggcattctg

SEQ ID NO: 202154 - DNA, 120 bp, Artificial Sequence
  ENSG00000114450_6 (sequence is synthesized)
gagatgtgatgagtctttctttgagtcctgacatgaggacttttgtttctggtgcttgtgatgcctcttccaaattatgggatattcgagatggaatgtgtagacagtctttcacgggac

SEQ ID NO: 202155 - DNA, 120 bp, Artificial Sequence
  ENSG00000114450_7 (sequence is synthesized)
atgtctcagatatcaatgctgtcagttttttcccaaatggatatgccttcgccactggctctgatgatgccacttgccggctctttgaccttcgtgcagatcaagagttattattgtatt

SEQ ID NO: 202156 - DNA, 120 bp, Artificial Sequence
  ENSG00000114450_8 (sequence is synthesized)
ctcatgacaatatcatctgtggaatcacttctgtagccttctcaaaaagtgggcgtctcttgttggctggttacgatgactttaattgtaatgtatgggacacgctaaaaggagatcgtg

SEQ ID NO: 202157 - DNA, 120 bp, Artificial Sequence
  ENSG00000114450_9 (sequence is synthesized)
caggtgtccttgctggtcatgacaaccgtgtgagctgcttaggtgtaactgatgatggcatggctgtggcaacaggctcttgggacagttttcttagaatctggaattaacagtgtcata

SEQ ID NO: 202158 - DNA, 120 bp, Artificial Sequence
  ENSG00000114450_10 (sequence is synthesized)
catatttgttctccattgatatatctggagaaatcaatgctacagcctatagctgtgaaaaaattctaccttatatttgcaggtgaagatttttctattagattatctacaaaaacaagc

SEQ ID NO: 202159 - DNA, 120 bp, Artificial Sequence
  ENSG00000114450_11 (sequence is synthesized)
tttcagtaaactaccaaaaaaaaagtgggggtggaggaaaaaaggcaaaggcgccttctgagatcaaaaggaccagtgtattaatttgaggggttgggttattttaaccttggtgaattg

SEQ ID NO: 202160 - DNA, 120 bp, Artificial Sequence
  ENSG00000114450_12 (sequence is synthesized)
ttgtgtgtactcagagtgtattttctttgtgtagaacagaatgtacacattatagcagctcgccattgtgtttgcattttttaagaagtacatttttaactttgtatacacaagaaatgt

SEQ ID NO: 202161 - DNA, 120 bp, Artificial Sequence
  ENSG00000114450_13 (sequence is synthesized)
catatttttgagttttgtaatggaagaaccaggcacagaaacagacagaaatgatactgtatgtgtgtgtatttatgtctgaagaaagtccccttgaattctgatatctctttgaatcta

SEQ ID NO: 202162 - DNA, 120 bp, Artificial Sequence
  ENSG00000114450_14 (sequence is synthesized)
agagatcctgatagcttcatgtttaagagcattgacaggtggggcacctctgaggggagttcattgtttctcatgcatcatttgccatatactattaatcaaagtgcttgctttcagtcc

SEQ ID NO: 202163 - DNA, 120 bp, Artificial Sequence
  ENSG00000114450_15 (sequence is synthesized)
tttgaggggacagataatctgaaggccagagattagagatttcactgatattttggacatacataagaaacatcattataattaataaaaagtaggtaatagcatataaatggttcttga

SEQ ID NO: 202164 - DNA, 120 bp, Artificial Sequence
  ENSG00000114450_16 (sequence is synthesized)
cattttaaaagcctggttatgatcagttgacactttgagtacccccctaaatagctggactttccttttcatttcatatttggaactaagtttgtagcgtatactcatctttcagaagtt

SEQ ID NO: 202165 - DNA, 120 bp, Artificial Sequence
  ENSG00000114450_17 (sequence is synthesized)
tggtaaacattgggattgtccctgcatctgaacatctttcccagtgctatcagtatacatctagagaggaaatgcaatgtgacagtgttacatttggagagaagtgtgaaatctaaccaa

SEQ ID NO: 202166 - DNA, 120 bp, Artificial Sequence
  ENSG00000114450_18 (sequence is synthesized)
tcgctagcacatatttgttgtaatacggtggtttatttcatgtttgcatactataaaatctgaattgatgtgaaatatctgtgcctttaaatttcttaaacctttaagctttttgttctg

SEQ ID NO: 202167 - DNA, 120 bp, Artificial Sequence
  ENSG00000114450_19 (sequence is synthesized)
ttttgcaacattttgtagtatttcttcccttccttagcacaaaatactggtttctaagtggttttgcttcaaaggatgtctagatgtaagtgattccacttaaagccaaaataaaaattc

SEQ ID NO: 202168 - DNA, 120 bp, Artificial Sequence
  ENSG00000114450_20 (sequence is synthesized)
ctaaagcagttcttaaaggagttagagagctatattaaacagtttttctgtggtataataatgtgtctcttactagaagtcccccacgaccaagttaaagatacttttcctgttggattc

SEQ ID NO: 202169 - DNA, 120 bp, Artificial Sequence
  ENSG00000114450_21 (sequence is synthesized)
tcttttacaaataagtctaaatgactgataatagaagattgttagtcttgcttgatggtaaagtcttggattattctgatatatagacgtgcattgttttgtaacttagttacttttcag

SEQ ID NO: 202170 - DNA, 120 bp, Artificial Sequence
  ENSG00000114450_22 (sequence is synthesized)
ataggtctgtgttaacttttgaacatgtgtaacttaacctaaatactcccaaactttacctctaaatttttgtttttatgttgtgaatgtgctaatatgtgcatcaactgtaaagatgta

SEQ ID NO: 202171 - DNA, 120 bp, Artificial Sequence
  ENSG00000114450_23 (sequence is synthesized)
tcagttttattaaaatcagttgacaattagaataataaagtggataaaggcaaattaagatataggaccaaaacagaatattgtagatggcagttatgaatgtatatttatattttgatt

SEQ ID NO: 202172 - DNA, 81 bp, Artificial Sequence
  ENSG00000114450_24 (sequence is synthesized)
ttgtagatggcagttatgaatgtatatttatattttgattaagatttctattaactttttggctgggcagagtggcttaca

SEQ ID NO: 202173 - DNA, 120 bp, Artificial Sequence
  ENSG00000114450_25 (sequence is synthesized)
aaaaaattatatgaacttttgctattaatgtttatttgtaggctatttatatcacttcataaagaacagttctttgagaaaagaataaaggaatgtattcatttccagaaaaagagggtt

SEQ ID NO: 202174 - DNA, 120 bp, Artificial Sequence
  ENSG00000114450_26 (sequence is synthesized)
ggggaaagtttgccatgtaggttagtcagaagaaagcaattctattatgcataaaaataaccttaaatatgtaagagagtatctcctctacttaaaagttattatagtagtcacaggcat

SEQ ID NO: 202175 - DNA, 120 bp, Artificial Sequence
  ENSG00000114450_27 (sequence is synthesized)
acagaccacaggaattctatggtcttaacatattttaaaattacatttattttaatgttcttaaagtttatgaagaggagtttaaagcaattcccataattaaatatttactcggcaact

SEQ ID NO: 202176 - DNA, 120 bp, Artificial Sequence
  ENSG00000114450_28 (sequence is synthesized)
aaaaactatttaacacttgtggttaattatacacataaacaaatggcgacagagtagcctcactaccacaattacttcatggttacacctttgctttctaataataggggctccagttgc

SEQ ID NO: 202177 - DNA, 120 bp, Artificial Sequence
  ENSG00000114450_29 (sequence is synthesized)
taaatatatttgtttacttacagtttaagttgagctgattgttgaattctgttattgttcctgaattcaatgagtatataatttgtagagatgttgaatagtttggatcttagtttttaa

SEQ ID NO: 202178 - DNA, 120 bp, Artificial Sequence
  ENSG00000114450_30 (sequence is synthesized)
aatagtttggatcttagtttttaaggctgaaaaatctggctggatttagtttttaaaaatttgcatcatcaagaatattgcagttaatgttcctttttttttttttttaaagacagagtc

SEQ ID NO: 202179 - DNA, 120 bp, Artificial Sequence
  ENSG00000114450_31 (sequence is synthesized)
ccaccgtgcccagccaggtttccttctttaccttctaagaaacatttaaacataatgtgcctgagaaggttaatttgttgactctgtagcatgtcaagaagagtagttttttgagatctg

SEQ ID NO: 202180 - DNA, 120 bp, Artificial Sequence
  ENSG00000114450_32 (sequence is synthesized)
gcaagaatattttagagatacatattcttttctaagtatgttatcaccctgtggtgttgagcatatcgtcccaaaaacctgcttcagcaagcagttcttggccaggcatggtggctcaca

SEQ ID NO: 202181 - DNA, 120 bp, Artificial Sequence
  ENSG00000114450_33 (sequence is synthesized)
aatacaaaaattagccgggcgtggaggtgggcgcctgtcagctactcgtgaggctgaggcagagaattacttgaactcaggaggtggaggttttggtgagctgagatggcgccactgcac

SEQ ID NO: 202182 - DNA, 120 bp, Artificial Sequence
  ENSG00000114450_34 (sequence is synthesized)
aagattccgtcccaaaaagaaaaagcagtttttgccatcagcaaggatatctcctccactttaatggacaggcctcatttttggcagctatgctgtttgagatgtagactgaatatccaa

SEQ ID NO: 202183 - DNA, 120 bp, Artificial Sequence
  ENSG00000114450_35 (sequence is synthesized)
ggttcctccctagctcaagtttttacttgtgattacacacaccacattgaattccgtcttcagaggcaaagatttgggcttcatatctcaacagcaaaagggcctgttcagcaattccct

SEQ ID NO: 202184 - DNA, 120 bp, Artificial Sequence
  ENSG00000114450_36 (sequence is synthesized)
tcattttagactcatatgacctcagcgattgcatgatagtagtaaactagtctcctggaaataatggatgtaggtgcttctagaatatgttacagaatttcagacttaacctattaatag

SEQ ID NO: 202185 - DNA, 120 bp, Artificial Sequence
  ENSG00000114450_37 (sequence is synthesized)
ataaatggatcttgacttaaggtgacaaaatgaaacttttattattgcttaaaaatgctgtgccaatattgtataactagctcctctaatacttttggtattttggatttaataataaga

SEQ ID NO: 202186 - DNA, 120 bp, Artificial Sequence
  ENSG00000114450_38 (sequence is synthesized)
ccttaagcattttaaatgtgaacatgttcagggaagtatgctttgatgtaaatgtctcagatctaagttgtaacacaattgaatacttgtggcttattcttggtttaacttaggaaaact

SEQ ID NO: 202187 - DNA, 120 bp, Artificial Sequence
  ENSG00000114450_39 (sequence is synthesized)
ggttaaacaatcccccatttgggcctgtcatcattttaatagtgacgatgttctttctgaaatcttcagggtcggagtcaggctgaatttttttaaaaattaaatattatgttcaaattc

SEQ ID NO: 202188 - DNA, 120 bp, Artificial Sequence
  ENSG00000114450_40 (sequence is synthesized)
tttcctttttgccattgtgaaaaagcaaaattttaaatgatttctcctgttagaatttttaaaaatacccacaggttggaccatctttcttatgggttgcacaatgaatttatattttaa

SEQ ID NO: 202189 - DNA, 120 bp, Artificial Sequence
  ENSG00000114450_41 (sequence is synthesized)
attagattaagtagaatgtgaagtacatttcagatttactagttttctttccattgttcattttgggttgcctcagattcagtgtatattttaaaatattggttacataataggtactca

SEQ ID NO: 202190 - DNA, 120 bp, Artificial Sequence
  ENSG00000114450_42 (sequence is synthesized)
atgaaatggtttatagtagaatatctaagctagcactttattttaaaaagtaacttattaattaatcacacattgatggtacaccttgtatttagcaaatgtttgcatgttgataaaatc

SEQ ID NO: 202191 - DNA, 120 bp, Artificial Sequence
  ENSG00000114450_43 (sequence is synthesized)
tcctatgtcttctttcttaaatccagttgctgattttgtaaaatacagttgtgataaagcagcattacgggggggaaaaagctatattccaactggtgttaaatgtattcaacaaaatct

SEQ ID NO: 202192 - DNA, 120 bp, Artificial Sequence
  ENSG00000114450_44 (sequence is synthesized)
tacatcatacagtatttatttcttaattaatagaacttcagtgatatacttggtagatatctcaagccttttgtcttttacacaatggtgctctatcctattgttttcttttcaaagaag

SEQ ID NO: 202193 - DNA, 120 bp, Artificial Sequence
  ENSG00000114450_45 (sequence is synthesized)
catctgaacacttgcatttctattttcctatccaaaggcatccacatctaagtgtgtttttaaagttgattaaaattatttttctgttaaagcattctgaaagtgtttgtctttacctag

SEQ ID NO: 202194 - DNA, 120 bp, Artificial Sequence
  ENSG00000114450_46 (sequence is synthesized)
aatgatttgtacacactcgtggtcaactgaacatgaatgtcagtagtagtctaattatgggaagggtaaacgtgttagattaaggctcttaaagctctaaaccatataaactatggactt

SEQ ID NO: 202195 - DNA, 120 bp, Artificial Sequence
  ENSG00000114450_47 (sequence is synthesized)
gtatcatgatttaactgttcttagatctttcttacacagtgattcattcctctatttgtacagtggctttatgaaatgttgtgaattgatactgtaatcaataaagtgcttttaaccaga

SEQ ID NO: 202196 - DNA, 120 bp, Artificial Sequence
  ENSG00000114450_48 (sequence is synthesized)
agctgccacgcgggaactggccccacgaccgccggcgcaggcacttcccgggcggtccagaccgctcgccccggggagcgaggaacggtcggcggtccaagtcctgcagacccccctggt

SEQ ID NO: 202197 - DNA, 120 bp, Artificial Sequence
  ENSG00000114450_49 (sequence is synthesized)
agatgatgtgaagagacacaggagaagacagtcatctacaggacagtgagaagattacacatctttctgtcacagtcctcagatatcttggtttcaagtttctagcctccagaactgtga

SEQ ID NO: 202198 - DNA, 120 bp, Artificial Sequence
  ENSG00000114450_50 (sequence is synthesized)
gacaatacattccttttgtttaagccacccagcttgtggtgctttgttatggcagccttagcaatgaacatatctatctatctatctatcaatcaataaataaatcaactatctcctcag

SEQ ID NO: 202199 - DNA, 120 bp, Artificial Sequence
  ENSG00000114455_0 (sequence is synthesized)
agttctcttcaagtcatgtaatcgacttttttgaattagttttcagtttcattttgttttccctaattcaagttgggaacacttcattttccccaattcaagttgggaacacttccttgg

SEQ ID NO: 202200 - DNA, 85 bp, Artificial Sequence
  ENSG00000114455_1 (sequence is synthesized)
acttcattttccccaattcaagttgggaacacttccttggtatttccttgctacatggactttagcaaatgctactttactctcc

SEQ ID NO: 202201 - DNA, 120 bp, Artificial Sequence
  ENSG00000114455_2 (sequence is synthesized)
agttttactgttggaagcctaactcacaggagagattatgcaatacagtcctgaagtcaagggaggagagcatgtaggagaatactaaccctgcacagattgtgatggtgatgtggaata

SEQ ID NO: 202202 - DNA, 120 bp, Artificial Sequence
  ENSG00000114455_3 (sequence is synthesized)
tactaaagcctagaacgcacctcctctgcatgactaatatgttctgcacaagacatgaaggcacagacagcactgtctttcttcctcattctcataacatctctgagtggatctcaaggc

SEQ ID NO: 202203 - DNA, 120 bp, Artificial Sequence
  ENSG00000114455_4 (sequence is synthesized)
atattccctttggctttcttcatttatgttcctatgaatgaacaaatcgtcattggaagacttgatgaagatataattctcccttcttcatttgagaggggatccgaagtcgtaatacac

SEQ ID NO: 202204 - DNA, 120 bp, Artificial Sequence
  ENSG00000114455_5 (sequence is synthesized)
tggaagtatcaagatagctataaggttcacagttactacaaaggcagtgaccatttggaaagccaagatcccagatatgcaaacaggacatcccttttctataatgagattcaaaatggg

SEQ ID NO: 202205 - DNA, 120 bp, Artificial Sequence
  ENSG00000114455_6 (sequence is synthesized)
aatgcgtcgctatttttcagaagagtaagccttctggacgaaggaatttacacctgctatgtaggaacagcaattcaagtgattacaaacaaagtggtgctaaaggtgggagtttttctc

SEQ ID NO: 202206 - DNA, 120 bp, Artificial Sequence
  ENSG00000114455_7 (sequence is synthesized)
acacccgtgatgaagtatgaaaagaggaacacaaacagcttcttaatatgcagcgtgttaagtgtttatcctcgtccaattatcacgtggaaaatggacaacacacctatctctgaaaac

SEQ ID NO: 202207 - DNA, 120 bp, Artificial Sequence
  ENSG00000114455_8 (sequence is synthesized)
aacatggaagaaacagggtctttggattctttttctattaacagcccactgaatattacaggatcaaattcatcttatgaatgtacaattgaaaattcactgctgaagcaaacatggaca

SEQ ID NO: 202208 - DNA, 120 bp, Artificial Sequence
  ENSG00000114455_9 (sequence is synthesized)
gggcgctggacgatgaaagatggccttcataaaatgcaaagtgaacacgtttcactctcatgtcaacctgtaaatgattatttttcaccaaaccaagacttcaaagttacttggtccaga

SEQ ID NO: 202209 - DNA, 120 bp, Artificial Sequence
  ENSG00000114455_10 (sequence is synthesized)
atgaaaagtgggactttctctgtcctggcttactatctgagctcctcacaaaatacaattatcaatgaatcccgattctcatggaacaaagagctgataaaccagagtgacttctctatg

SEQ ID NO: 202210 - DNA, 120 bp, Artificial Sequence
  ENSG00000114455_11 (sequence is synthesized)
cagtggggaatatttatgcaatatttcttcggatgaatatactttacttaccatccacacagtgcatgtagaaccgagccaagaaacagcttcccataacaaaggcttatggattttggt

SEQ ID NO: 202211 - DNA, 120 bp, Artificial Sequence
  ENSG00000114455_12 (sequence is synthesized)
gccctctgcgattttggcagcttttctgctgatttggagcgtaaaatgttgcagagcccagctagaagccaggaggagcagacaccctgctgatggagcccaacaagaaagatgttgtgt

SEQ ID NO: 202212 - DNA, 120 bp, Artificial Sequence
  ENSG00000114455_13 (sequence is synthesized)
ccctcctggtgagcgctgtcccagtgcacccgataatggcgaagaaaatgtgcctctttcaggaaaagtataggaaatgagagaagactgtgacaactcatgacctgcatccttaatatc

SEQ ID NO: 202213 - DNA, 120 bp, Artificial Sequence
  ENSG00000114455_14 (sequence is synthesized)
cagtgacttcatctcccctttcttcaccacaattccaggcaatggcctgtcggagcagacaattctaccactgcaaagagttgtaaccattttctggtatcacatttatttttcaagaca

SEQ ID NO: 202214 - DNA, 120 bp, Artificial Sequence
  ENSG00000114455_15 (sequence is synthesized)
tacttttcaagacatcattcactgacccactacctgcattgagtataaatgcctggatgttaaggattccaatttaactttgaaaagaactgtctcattcatttacatttctgttacagt

SEQ ID NO: 202215 - DNA, 120 bp, Artificial Sequence
  ENSG00000114455_16 (sequence is synthesized)
cagcccaggaggttacagtgagctctccactaagaatctggaagaaatgcatcactaggggttgattcccaatctgatcaactgataatgggtgagagagcaggtaagagccaaagtcac

SEQ ID NO: 202216 - DNA, 120 bp, Artificial Sequence
  ENSG00000114455_17 (sequence is synthesized)
cttagtggaaaggttaaaaaccagagcctggaaaccaagatgattgatttgacaaggtattttagtctagttttatatgaacggttgtatcagggtaaccaactcgatttgggatgaatc

SEQ ID NO: 202217 - DNA, 120 bp, Artificial Sequence
  ENSG00000114455_18 (sequence is synthesized)
ttagggcaccaaagactaagacagtatctttaagattgctagggaaaagggccctatgtgtcaggcctctgagcccaagccaagcatcgcatcccctgtgatttgcacgtatacatccag

SEQ ID NO: 202218 - DNA, 120 bp, Artificial Sequence
  ENSG00000114455_19 (sequence is synthesized)
atttctcatctcagcacatatagaactggatgcccttgtggtacatctcaaggctgatttgaaagcttgagagaccatcaagaattggatttggggaagagcatgactaatatgttctgc

SEQ ID NO: 202219 - DNA, 120 bp, Artificial Sequence
  ENSG00000114455_20 (sequence is synthesized)
aaatcaaacgtaccttggactttactctctgagaaactcatagctgaattcaatgtttattcttatggactacttagcatttgactagacggtatgaatttctaagtaagcacatataga

SEQ ID NO: 202220 - DNA, 120 bp, Artificial Sequence
  ENSG00000114455_21 (sequence is synthesized)
tttctgctgatttggagcgtaaaatgttgcagagaaagatgttgtgtccctcctggtgagcgctgtcccagtgcacccgataatggcgaagaaaatgtgcctctttcaggaaaagtatag

SEQ ID NO: 202221 - DNA, 120 bp, Artificial Sequence
  ENSG00000114455_22 (sequence is synthesized)
atagctgaattcaatgtttattcttatggactacttagcatttgactagacggtatgaatttctaagtaagcatgtaggagaatactaaccctgcacagattgtgatggtgatgtggaat

SEQ ID NO: 202222 - DNA, 120 bp, Artificial Sequence
  ENSG00000114455_23 (sequence is synthesized)
atacagtataaaaatgcttctttaaaagggtaattgaagttctgactgattcacatatcatcaagcaagacttttatacagaaaaaaacagcagcaggggttgcaggataatatagcacg

SEQ ID NO: 202223 - DNA, 120 bp, Artificial Sequence
  ENSG00000114455_24 (sequence is synthesized)
aaaaatataattaggcttttcccaatgtctataattaaacaggctctacttgcttaaatacatggttgttcttcttgtctcctattgttatttgtagagaagatctccaatggcattgtg

SEQ ID NO: 202224 - DNA, 120 bp, Artificial Sequence
  ENSG00000114455_25 (sequence is synthesized)
catatgagggtgagccaatgtacttattcttatgatagaagcatgaaacatgggattgtatacaagtggaaagaaacacaactataattcacttgcaaattatagtttgattgtatactt

SEQ ID NO: 202225 - DNA, 120 bp, Artificial Sequence
  ENSG00000114455_26 (sequence is synthesized)
ttagtatttatgtgttccattaatcagagtataaataagggccaggagtgtggtaaacttgttttttccactgttaaaaaccatgaaacagctagtagggagattaaaattaactgataa

SEQ ID NO: 202226 - DNA, 120 bp, Artificial Sequence
  ENSG00000114455_27 (sequence is synthesized)
gactcagacttattttataatggtctcatggatctttaatttcagatgcaagcaatagactaaagctttttgccgcccaccccaaaacactactatcaataaatatttaagatataaatg

SEQ ID NO: 202227 - DNA, 120 bp, Artificial Sequence
  ENSG00000114473_0 (sequence is synthesized)
agcgggcgttggccgtatgtgggtgtcttgaggcagtttttcagttctttcatttaccaaagtgacatgcacctactaggtgccaggtgtttagacgtacatacaaccctctgcaaaatc

SEQ ID NO: 202228 - DNA, 120 bp, Artificial Sequence
  ENSG00000114473_1 (sequence is synthesized)
tttcagtgtagtcctctgtatgaaaagtttccagccaagaattgccactgcacctgagataagggggatcctggccattaaggaaaccttgccttcgaaactgagccgtgaggaactata

SEQ ID NO: 202229 - DNA, 120 bp, Artificial Sequence
  ENSG00000114473_2 (sequence is synthesized)
caaaatgggaaattgggacaaatcccagtggctcatgacactaagaagtaaaattacgaactcactgagctggaagtcattcaacgggaattgaataggtaactgcacttttgtgagatt

SEQ ID NO: 202230 - DNA, 120 bp, Artificial Sequence
  ENSG00000114473_3 (sequence is synthesized)
ataaatataccacggagggtaacgaagctacagaagaatggaagaagacagcctggaagactcaaaccttcctccaaaagtttggcattctgagatgacggtgtcagtgacaggcgaacc

SEQ ID NO: 202231 - DNA, 120 bp, Artificial Sequence
  ENSG00000114473_4 (sequence is synthesized)
acctagtaccgtagaagaagaaggaatacctaaagaaacagacatagaaatcatcccagaaatcccggaaactctagagccactgtcccttccagatgtgctgaggatctcggcagttct

SEQ ID NO: 202232 - DNA, 120 bp, Artificial Sequence
  ENSG00000114473_5 (sequence is synthesized)
ggaggacaccacagaccagctctctattctgaactacatcatgcccgttcagtacgaagggagacagagcatctgcgtgaaaagcagagaaatgaatctagaaggaacgaatctagacaa

SEQ ID NO: 202233 - DNA, 120 bp, Artificial Sequence
  ENSG00000114473_6 (sequence is synthesized)
acttccaatggcctcaacaatcacaaaaatacccagtccgttaataactgaggaaggacccaacttgccagaaatcagacacagaggccggttcgctgtggagtttaacaaaatgcagga

SEQ ID NO: 202234 - DNA, 120 bp, Artificial Sequence
  ENSG00000114473_7 (sequence is synthesized)
tcttgtcttcaaaaaacctacaaggcagaccatcatgactacggagacactgaagaaaattcagattgataggcagtttttcagcgatgtgattgcagataccattaaggagttgcaaga

SEQ ID NO: 202235 - DNA, 120 bp, Artificial Sequence
  ENSG00000114473_8 (sequence is synthesized)
ttcggccacttacaacagtctcctgcaagctttgagcaaagagagggaaaacaaaatgcatttctatgacatcattgccagggaggaaaaaggaagaaaacagataatatcacttcaaaa

SEQ ID NO: 202236 - DNA, 120 bp, Artificial Sequence
  ENSG00000114473_9 (sequence is synthesized)
ggaccaactgcaagagatgaaggcaaaatccaacttggagaatcgctacatgaaaaccaataccgagctgcagattgcccagacccagaaaaagtgtaacagaacagaggaactcttggt

SEQ ID NO: 202237 - DNA, 120 bp, Artificial Sequence
  ENSG00000114473_10 (sequence is synthesized)
ggaagagattgagaaactcaggatgaaaaccgaagaagaggcccggactcatacagagattgaaatgttccttagaaaggagcagcagaaacttgaggagaggctggagttctggatgga

SEQ ID NO: 202238 - DNA, 120 bp, Artificial Sequence
  ENSG00000114473_11 (sequence is synthesized)
gaaatacgataaggacacagaaatgaaacagaatgaactaaatgctctcaaagccacaaaggccagtgacttagcacaccttcaagacctggcaaagatgataagagagtatgaacaggt

SEQ ID NO: 202239 - DNA, 120 bp, Artificial Sequence
  ENSG00000114473_12 (sequence is synthesized)
catcattgaagatcgtatagaaaaggagaggagcaagaagaaggtaaaacaggatctcttggaattaaagagcgttataaagctccaggcctggtggcgaggcactatgatacggagaga

SEQ ID NO: 202240 - DNA, 120 bp, Artificial Sequence
  ENSG00000114473_13 (sequence is synthesized)
aattggtggtttcaagatgcctaaagacaaagttgatagcaaggattcaaaaggcaaaggtaaaggcaaggataagaggagaggcaagaagaagtgaccaagttctcttttgtgttttct

SEQ ID NO: 202241 - DNA, 120 bp, Artificial Sequence
  ENSG00000114473_14 (sequence is synthesized)
gctggtattctggaggtgggaaggacttggagagagttaagaaacacctggtacctcaaagatgactcatctacaggttgtttcctattgagactttcccagggaagcctgatttcactt

SEQ ID NO: 202242 - DNA, 120 bp, Artificial Sequence
  ENSG00000114473_15 (sequence is synthesized)
tgcctgttaatttcactctgcctgttaggtgggttttcaaaccctgatttaggattacaccattgacttagggcttcctcataccttgctgggaagaagtttctagtagtcctgtgaaga

SEQ ID NO: 202243 - DNA, 120 bp, Artificial Sequence
  ENSG00000114473_16 (sequence is synthesized)
ttcattcttcttgctctttctcagcagaacaaaggagttcactggcttagctacagtgacgcattgaaacttgagtaattcctgtaatgtcagattttgattttacccaatttgtctgta

SEQ ID NO: 202244 - DNA, 120 bp, Artificial Sequence
  ENSG00000114473_17 (sequence is synthesized)
gtgaaaaaactcttatgagcaaaagtattcagtaggaattacaatatgatgttattagctgtccagcataatatatacacagcaaagttttaataaatgttggttcctgcctgcctttta

SEQ ID NO: 202245 - DNA, 120 bp, Artificial Sequence
  ENSG00000114473_18 (sequence is synthesized)
gccccacagccttgtgcccttggagcgccgtttctgtccttcagtgggcacctctgttcagctcacgggattgtgctcgtctcgttagggacacacgcagtccacacagtgccgcgccac

SEQ ID NO: 202246 - DNA, 120 bp, Artificial Sequence
  ENSG00000114473_19 (sequence is synthesized)
aggtaagctactatactgggaaatgaaggagtaggaaagaaggaaaacctcaagttacaaactatgggtggagattcagctacgaggatggggtggtgttttaagtattaccattttaca

SEQ ID NO: 202247 - DNA, 120 bp, Artificial Sequence
  ENSG00000114473_20 (sequence is synthesized)
agtaaatactcactaaatgtgtgtatcatcccacaactagtggaaggtgggattccaaaccacatttgtaacttaggaaacgtgccctttccactacaataccacaaataaattgctatt

SEQ ID NO: 202248 - DNA, 120 bp, Artificial Sequence
  ENSG00000114473_21 (sequence is synthesized)
accacaaataaattgctattgtgaataaagaatggaaccagtcatcctaagctcctggctgtaacaatagtgttatgctgaggaaaggctgtttcttttttttttgagacggagtttcac

SEQ ID NO: 202249 - DNA, 80 bp, Artificial Sequence
  ENSG00000114473_22 (sequence is synthesized)
tttttgagacggagtttcactatgcaacctctgcctcccgggatcaagctattcccctgcctcagcctcccgagtagccg

SEQ ID NO: 202250 - DNA, 120 bp, Artificial Sequence
  ENSG00000114473_23 (sequence is synthesized)
ccagccaggaggcaaagctgtttcaatggtgtagtggacaagttaccagccacgcaagccctttcctgtaaaccacaggactcctcctttggcaacggtgacttgagtacttttgactta

SEQ ID NO: 202251 - DNA, 120 bp, Artificial Sequence
  ENSG00000114473_24 (sequence is synthesized)
atttccatatgggaggagaaaaacataaaaacatacatttattatttacaaatgctgcatcatctcagtaaggaagagcatgtatttgcttttgagtctcatttgccattgcacatgtaa

SEQ ID NO: 202252 - DNA, 120 bp, Artificial Sequence
  ENSG00000114473_25 (sequence is synthesized)
gttactcgagttaaagtctcaaccgtttgttttcccccgctttgctcagatgcctaccacttaccgtgtgtctgttccactcagaataccatccacttctccatatgcctaacccagacc

SEQ ID NO: 202253 - DNA, 120 bp, Artificial Sequence
  ENSG00000114473_26 (sequence is synthesized)
tgaaatacccatctgtcttcatggatatgtccacaggttaacatcttacagcttcctcaaattcaactttagctcctcccacaaaaccatctcctgattccccaactttgtaaatgcacc

SEQ ID NO: 202254 - DNA, 120 bp, Artificial Sequence
  ENSG00000114473_27 (sequence is synthesized)
attatccatccagcccccaaagccagaaacatgttagaattctccatttgagactgaaaagcccacctaattttcccttgtttatgctgggatgccattgggatttgaaataatctgagc

SEQ ID NO: 202255 - DNA, 120 bp, Artificial Sequence
  ENSG00000114473_28 (sequence is synthesized)
tatctgtaatcccagtactttaggagaacaaggcagggggatcacttgaggccaggaatcgagaccagcctgggaccccgaaaaaacattttaattggctggacgtgcctggcatgcacc

SEQ ID NO: 202256 - DNA, 120 bp, Artificial Sequence
  ENSG00000114473_29 (sequence is synthesized)
aaaaaacattttaattggctggacgtgcctggcatgcaccagattctctggaggttgtgggcaggggattgtctgagcctagaagttcaaaggtgcagtgagctatgatcacaccactgc

SEQ ID NO: 202257 - DNA, 120 bp, Artificial Sequence
  ENSG00000114473_30 (sequence is synthesized)
aattttaaaatttcctgtgaatcaagttcttcagtgacgttgtattacactcaagaacaatcttaagcctaagatcctcagttcagtacaggagacctctcatgtggcattttagttttc

SEQ ID NO: 202258 - DNA, 120 bp, Artificial Sequence
  ENSG00000114473_31 (sequence is synthesized)
tggactttccagtcagccacttgtgttcctaaaatcttcctgccatttcctctttgagatgccgccctatttcttcctctacactttacggttttatgttacgcagccagtatacctaca

SEQ ID NO: 202259 - DNA, 120 bp, Artificial Sequence
  ENSG00000114473_32 (sequence is synthesized)
tgcctctatccctgaataccccgagtactactgatcacatctacttaactggcacaatgaacacagtaggtacttttagcttatgttggccttttggagtgggtgtccaagatcagcact

SEQ ID NO: 202260 - DNA, 120 bp, Artificial Sequence
  ENSG00000114473_33 (sequence is synthesized)
tcctcgcgctgactgcgtaattcccaagttcaatttcattagcattctaatatacaacttccaacttccggccttgaagtactgctcacttctggtgaatacagcatcagtgcactttgt

SEQ ID NO: 202261 - DNA, 79 bp, Artificial Sequence
  ENSG00000114473_34 (sequence is synthesized)
actgctcacttctggtgaatacagcatcagtgcactttgtttgccttaaaaccacaatcctgggaggctgagaaagatt

SEQ ID NO: 202262 - DNA, 120 bp, Artificial Sequence
  ENSG00000114473_35 (sequence is synthesized)
ctcaaaaaaaaaaaaaaaaaaaccaccacaatcctaataaatgagcctggcagagtactaacacaagcccatgtccacgaagcacgggactccaacaatggcagctttggcttgcatacc

SEQ ID NO: 202263 - DNA, 120 bp, Artificial Sequence
  ENSG00000114473_36 (sequence is synthesized)
accattggactgaccaaacctttcttagaactgccagtgtgacagagggacctctgggggagggcgtcttgctttctcttgggtcagtatatctcactaccctctttgtaggttagcaga

SEQ ID NO: 202264 - DNA, 120 bp, Artificial Sequence
  ENSG00000114473_37 (sequence is synthesized)
tttgtaacaggatgttactggaggaaggggaagtgggaaagctggacagtattcccactcttttcccttactacaaaaactttccttctcagtcctgtctccaggagatggaagaccaaa

SEQ ID NO: 202265 - DNA, 120 bp, Artificial Sequence
  ENSG00000114473_38 (sequence is synthesized)
taacacaacagccagtgtgcttttcctacccaatcctttctttcaccctcttatcctaatacatttccagcatgttaattcttttgcagcatagacaagagaacccatacacgctgcaaa

SEQ ID NO: 202266 - DNA, 120 bp, Artificial Sequence
  ENSG00000114473_39 (sequence is synthesized)
actgcaaaagggcttaggtggcaaactcccagtttcttgttgacattttcagtgcaatttaaagatgttaatttaaaaaactacctgtgctgtagagatcagtaaccctcagggggcaga

SEQ ID NO: 202267 - DNA, 120 bp, Artificial Sequence
  ENSG00000114473_40 (sequence is synthesized)
caaaaagactgttactgcatcagttagaaatgtagtactacctgggcaacatagtgaggcccatctccacaaataactaaaaagttaactggttgtggctgcacatgcctgtggccccag

SEQ ID NO: 202268 - DNA, 120 bp, Artificial Sequence
  ENSG00000114473_41 (sequence is synthesized)
ctatttaggaggctgaggcaggaggtttgcctgagccgaggaggttgaggttgaggttgcagtaagctgtaatcacgccactgcactccagcccaagcaacaaaacaagaccttgtcttc

SEQ ID NO: 202269 - DNA, 120 bp, Artificial Sequence
  ENSG00000114473_42 (sequence is synthesized)
atttcacaaagaactttacttttgagcagagtgtaccaggtggtaagttggggaatgacggagaagaagaatgttgtgtgaagttagcagcagggcgcgtgtggtttggtgtggctgaag

SEQ ID NO: 202270 - DNA, 120 bp, Artificial Sequence
  ENSG00000114473_43 (sequence is synthesized)
aaaggggcacattttcttggagtatagagtagaagtcagagaagataatgttgaaaaatgtacacaaaggcctctttcttgttgtattgtctctttaaaaaaattctttctaattgttta

SEQ ID NO: 202271 - DNA, 120 bp, Artificial Sequence
  ENSG00000114473_44 (sequence is synthesized)
atcttatatagctgtaatttgagagagtgcaggccctactcagaagacctgtgctatttacagagtgactgtgcactggggaaagcaaactacccaggccttctgagatgactgaagcat

SEQ ID NO: 202272 - DNA, 120 bp, Artificial Sequence
  ENSG00000114473_45 (sequence is synthesized)
tggctctgaattgatgttcatgcacggggacccaaagtgacagcgtggccactagtcaaaatgggagattaatggtggttaggtgacagataccttactaaaagttttttttgttgtttt

SEQ ID NO: 202273 - DNA, 120 bp, Artificial Sequence
  ENSG00000114473_46 (sequence is synthesized)
gttttgttttcctaatctggatgcgtactcaattagggaaaaaaaaaaaagaaaaacagtttttttgtccattgagttattttttctcctttaatatgttaataaagtagaatacattga

SEQ ID NO: 202274 - DNA, 120 bp, Artificial Sequence
  ENSG00000114473_47 (sequence is synthesized)
ctcaccatgacagagaaatgaatctagaaggaacgaatctagacaaacttccaatggcctcaacaatcacaaaaatacccagtccgttaataactgaggaaggacccaacttgccagaaa

SEQ ID NO: 202275 - DNA, 120 bp, Artificial Sequence
  ENSG00000114473_48 (sequence is synthesized)
ggcagtgaggcaggaggatccttgagtttgaagccagcctgggcaacttcagacttcaactagggagactcccttctcacaaaaaagaaaagaaaacaagaaagagcagcaggcagatgg

SEQ ID NO: 202276 - DNA, 120 bp, Artificial Sequence
  ENSG00000114473_49 (sequence is synthesized)
gaagagggaagcaggaacaaacgtccttgggccgtggaatctgtgtgtgggaggactcctcgctctgagactgacgtggctcaaggccacgtcaacactcttcctggcactccggaatcc

SEQ ID NO: 202277 - DNA, 120 bp, Artificial Sequence
  ENSG00000114473_50 (sequence is synthesized)
gatgttcccgctgcctaaagaatgattgactgtaagattgatttgccaacagtggggtgcttttctctcgatacacacagcaatagacagaacggaaattctgggatcctaatctagcat

SEQ ID NO: 202278 - DNA, 120 bp, Artificial Sequence
  ENSG00000114473_51 (sequence is synthesized)
ggaagagaaaggccgggagcacgaaggcagcaggacctcttccttctcttttttctttttctatacttcttttctcccctctacttatttatctctttcaagaaatgagactgggcacag

SEQ ID NO: 202279 - DNA, 120 bp, Artificial Sequence
  ENSG00000114473_52 (sequence is synthesized)
cgaaccctgagtggaggatgttcccgctgcctaaagaatgattgactgtatgaggaggactgcctgcaggaggctttatcgcccttttaggagaactcgtttagctgcctcgtgtccgca

SEQ ID NO: 202280 - DNA, 120 bp, Artificial Sequence
  ENSG00000114473_53 (sequence is synthesized)
aattgagctgtcactcctgatcccctctcagctaacaaaggagggagacaaagatttccctccatctctatcggcaacagcccctccacttgaggttgaaaataaaagcctaaatgagga

SEQ ID NO: 202281 - DNA, 120 bp, Artificial Sequence
  ENSG00000114473_54 (sequence is synthesized)
agtcccaactactctgtaggctgaggcaggaggatttcttgagcctgggaggtcaaagttacagtgagccgtgatcatgccactgcacttcagcctgagtgacagaacaagaccgtctca

SEQ ID NO: 202282 - DNA, 120 bp, Artificial Sequence
  ENSG00000114473_55 (sequence is synthesized)
aaaacaacaacaacaacaacaacaacaaagccgggcgcagtggctcatgtctgtgatcccagcactttgagagaccaaggcaggaggatcccttgaagccaagagtttgagaccagcctg

SEQ ID NO: 202283 - DNA, 120 bp, Artificial Sequence
  ENSG00000114473_56 (sequence is synthesized)
gaacttcgttcaaacctgagtttataggatgagaagtcacggtgaaaaatgccaggaggaagaaagaagtggtagatcttctttgaggggaatgctaaatggcacacacgcacgcacgca

SEQ ID NO: 202284 - DNA, 120 bp, Artificial Sequence
  ENSG00000114473_57 (sequence is synthesized)
ggcgctttccgattggacagcgtcacccgctagaagttcgccgcagaagatgagggcggcgatcacgtccatcgcgtctcgtggcgcgaagccggccaataaatgctgtttggaggccca

SEQ ID NO: 202285 - DNA, 120 bp, Artificial Sequence
  ENSG00000114473_58 (sequence is synthesized)
cgtgcagagaaatgaatctagaaggaacgaatctagacaaacttccaatggcctcaacaatcacaaaaatacccagtccgttaataactgaggaaggacccaacttgccagaaatcagac

SEQ ID NO: 202286 - DNA, 120 bp, Artificial Sequence
  ENSG00000114480_0 (sequence is synthesized)
cggcttgcctcgacacgcctaggcgccctccggctccgccctagccgccgcgtcccagctagagctccagcgcccgctcaggccccactcgacctctcgggcctcggctacttggactgc

SEQ ID NO: 202287 - DNA, 120 bp, Artificial Sequence
  ENSG00000114480_1 (sequence is synthesized)
ggcggaatatggcggctccgatgactcccgcggctcggcccgaggactacgaggcggcgctcaatgccgccctggctgacgtgcccgaactggccagactcctggagatcgacccgtact

SEQ ID NO: 202288 - DNA, 120 bp, Artificial Sequence
  ENSG00000114480_2 (sequence is synthesized)
tgaagccctacgccgtggacttccagcgcaggtataagcagtttagccaaattttgaagaacattggagaaaatgaaggtggtattgataagttttccagaggctatgaatcatttggcg

SEQ ID NO: 202289 - DNA, 120 bp, Artificial Sequence
  ENSG00000114480_3 (sequence is synthesized)
tccacagatgtgctgatggtggtttatactgcaaagaatgggccccgggagcagaaggagtttttcttactggagattttaatggttggaatccattttcgtacccatacaaaaaactgg

SEQ ID NO: 202290 - DNA, 120 bp, Artificial Sequence
  ENSG00000114480_4 (sequence is synthesized)
attatggaaaatgggagctgtatatcccaccaaagcagaataaatctgtactcgtgcctcatggatccaaattaaaggtagttattactagtaaaagcggagagatcttgtatcgtattt

SEQ ID NO: 202291 - DNA, 120 bp, Artificial Sequence
  ENSG00000114480_5 (sequence is synthesized)
caccgtgggcaaagtatgtggttcgtgaaggtgataatgtgaattatgattggatacactgggatccagaacactcatatgagtttaagcattccagaccaaagaagccacggagtctaa

SEQ ID NO: 202292 - DNA, 120 bp, Artificial Sequence
  ENSG00000114480_6 (sequence is synthesized)
gaatttatgaatctcatgtgggaatttcttcccatgaaggaaaagtagcttcttataaacattttacatgcaatgtactaccaagaatcaaaggccttggatacaactgcattcagttga

SEQ ID NO: 202293 - DNA, 120 bp, Artificial Sequence
  ENSG00000114480_7 (sequence is synthesized)
tggcaatcatggagcatgcttactatgccagctttggttaccaaatcacaagcttctttgcagcttccagccgttatggaacacctgaagagctacaagaactggtagacacagctcatt

SEQ ID NO: 202294 - DNA, 120 bp, Artificial Sequence
  ENSG00000114480_8 (sequence is synthesized)
ccatgggtatcatagtcctcttagatgtggtacacagccatgcttcaaaaaattcagcagatggattgaatatgtttgatgggacagattcctgttattttcattctggacctagaggga

SEQ ID NO: 202295 - DNA, 120 bp, Artificial Sequence
  ENSG00000114480_9 (sequence is synthesized)
ctcatgatctttgggatagcagattgtttgcctactccagctgggaaattttaagattccttctgtcaaacataagatggtggttggaagaatatcgctttgatggatttcgttttgatg

SEQ ID NO: 202296 - DNA, 120 bp, Artificial Sequence
  ENSG00000114480_10 (sequence is synthesized)
gtgttacgtccatgctttatcatcaccatggagtgggtcaaggtttctcaggtgattacagtgaatatttcggactacaagtagatgaagatgccttgacttacctcatgttggcaaatc

SEQ ID NO: 202297 - DNA, 120 bp, Artificial Sequence
  ENSG00000114480_11 (sequence is synthesized)
atttggttcacacgctgtgtcccgattctataacaatagctgaggatgtatcaggaatgccagctctgtgctctccaatttcccagggagggggtggttttgactatcgactagccatgg

SEQ ID NO: 202298 - DNA, 120 bp, Artificial Sequence
  ENSG00000114480_12 (sequence is synthesized)
cgatatagtatacacgctcacaaacaggcgctaccttgaaaagtgcattgcttatgcagagagccatgatcaggcattggttggggataagtcgctggcattttggttgatggatgccga

SEQ ID NO: 202299 - DNA, 120 bp, Artificial Sequence
  ENSG00000114480_13 (sequence is synthesized)
aatgtatacaaacatgagtgtcctgactccttttactccagttattgatcgtggaatacagcttcataaaatgattcgactcattacgcatgggcttggtggagaaggctatctcaattt

SEQ ID NO: 202300 - DNA, 120 bp, Artificial Sequence
  ENSG00000114480_14 (sequence is synthesized)
catgggtaatgaatttgggcatcctgaatggttagacttcccaagaaaaggaaataatgagagttaccattatgccaggcggcagtttcatttaactgacgacgaccttcttcgctacaa

SEQ ID NO: 202301 - DNA, 120 bp, Artificial Sequence
  ENSG00000114480_15 (sequence is synthesized)
gttcctaaataattttgacagggatatgaatagattggaagaaagatatggttggcttgcagctccacaggcctacgtgagtgaaaaacatgaaggcaataagatcattgcttttgaaag

SEQ ID NO: 202302 - DNA, 120 bp, Artificial Sequence
  ENSG00000114480_16 (sequence is synthesized)
agcaggtcttcttttcattttcaacttccatccaagcaagagctacactgactaccgagttggaacagcattgccagggaaattcaaaattgtgctagattcagatgcagcggaatatgg

SEQ ID NO: 202303 - DNA, 120 bp, Artificial Sequence
  ENSG00000114480_17 (sequence is synthesized)
agggcatcagagactggaccacagcactgactttttttctgaggcttttgaacataatgggcgtccctattctcttttggtgtacattccaagcagagtggccctcatccttcagaatgt

SEQ ID NO: 202304 - DNA, 120 bp, Artificial Sequence
  ENSG00000114480_18 (sequence is synthesized)
ggatctgccgaattgaagaggcctgatttcagctccaccagatgcagatttgtgttttgttttcttgttatcactgtcacacagcttataacatgtatgcttttcagaatacagttgtct

SEQ ID NO: 202305 - DNA, 120 bp, Artificial Sequence
  ENSG00000114480_19 (sequence is synthesized)
agccaagccatcaagtgtctgaaattcaatattggtttatgcaaatacagcaaacttttatttaagtagatgggagaatatgtttaaaatattaggaatcctagaccatattttcaagtc

SEQ ID NO: 202306 - DNA, 120 bp, Artificial Sequence
  ENSG00000114480_20 (sequence is synthesized)
atcttagcagctaggattctcaaatggaagtgttatatataatatgttaaaaacattttgctttcctggctaattatttgatccttttaaattcaaatttgaatcatttgtcatgtatga

SEQ ID NO: 202307 - DNA, 120 bp, Artificial Sequence
  ENSG00000114480_21 (sequence is synthesized)
ttatttctgttaaatgtacacagtatttaagatggatatttggtggctctatttgttctgatatcttttggtctaaattatgaggtaccaagattgtttctttgtttctttttttcaaat

SEQ ID NO: 202308 - DNA, 120 bp, Artificial Sequence
  ENSG00000114480_22 (sequence is synthesized)
tgtgtttagaaatactgtaataaatatgcagtagtgatataaagaattatatccaaggtaatataaaagccattacgtatgaactcatccgtgtctcattttgtgttttattttgtgatc

SEQ ID NO: 202309 - DNA, 120 bp, Artificial Sequence
  ENSG00000114480_23 (sequence is synthesized)
tcttgtccactaagtatcttgttaaatgccagtatctcagtctttctgaagccctgaaatggtaattgtagcatttcagaaaatgtctttcatttcaatcaataaaaagcttttgtaaaa

SEQ ID NO: 202310 - DNA, 120 bp, Artificial Sequence
  ENSG00000114480_24 (sequence is synthesized)
attacattataggacaaaaaaaaaaaaaagactaaggttgatcttgatgacagaaacattcattttcctcatctgaaaaatgaggaacttaaaatagttgatggataaatctttgctcga

SEQ ID NO: 202311 - DNA, 120 bp, Artificial Sequence
  ENSG00000114480_25 (sequence is synthesized)
ctcagttatactgaattattcctaagcttcattttgggtttaaacagaggggttagtgcagacgtggttcacatcaaaggaaagagctgtggatcttgctgtcctgaaggtttcactatg

SEQ ID NO: 202312 - DNA, 120 bp, Artificial Sequence
  ENSG00000114480_26 (sequence is synthesized)
gagccctgctctccaggtccccacatccaccaatacagaagacaataaatgaagtcttctgagataatagcagaggctctggacttaggggaccaggctttaaaaagtataactgaatat

SEQ ID NO: 202313 - DNA, 120 bp, Artificial Sequence
  ENSG00000114480_27 (sequence is synthesized)
ttcttaaataatatttcttaaataatatttagagcagcaatatgggagacgattgtagttttactctatgaaaatattttgtaagttacctctgagacttgtttcttttcctccactcag

SEQ ID NO: 202314 - DNA, 120 bp, Artificial Sequence
  ENSG00000114480_28 (sequence is synthesized)
ttgggatagcagattgtttgcctactccaggtaggtacatacaatatagaaatgttttctattgttgctgtttaacattaatttttaagaatttcactaaattcattgtgtgtgtactct

SEQ ID NO: 202315 - DNA, 120 bp, Artificial Sequence
  ENSG00000114480_29 (sequence is synthesized)
ctcactggtacttaatgttcttaattggatttatttttgttgtacaggggattttaccttgttttgtatagcacatgtatttgtggtatatttcattaaatttcaattttacatatctta

SEQ ID NO: 202316 - DNA, 120 bp, Artificial Sequence
  ENSG00000114480_30 (sequence is synthesized)
ttgttaactgatcttcttcatttttttagatggttggaatccattttcgtacccatacaaaaaactggattatggaaaatgggagctgtatatcccaccaaagcagaataaatctgtact

SEQ ID NO: 202317 - DNA, 120 bp, Artificial Sequence
  ENSG00000114480_31 (sequence is synthesized)
cgtgcctcatggatccaaattaaagaacttccagaactcgggacaactcagctattaaaggattaacagctggcaaatactctgtggccatcatctcatctgattggtagaaacaaaaaa

SEQ ID NO: 202318 - DNA, 120 bp, Artificial Sequence
  ENSG00000114480_32 (sequence is synthesized)
ataactcaataaagctgaaattttaaaagtgaaataaaaaagaagtggaagtagtatttttctataaattagaaatcacttgtttgataattcactttgacctgtagcctatcaaatagt

SEQ ID NO: 202319 - DNA, 120 bp, Artificial Sequence
  ENSG00000114480_33 (sequence is synthesized)
tatcttgatcaatatgttttttttcactctgctttaagcaaaaattttttaaagaaaagcttctcctcacaacattaggagatatttgtagtataattggggcaatttgaattatatgat

SEQ ID NO: 202320 - DNA, 120 bp, Artificial Sequence
  ENSG00000114480_34 (sequence is synthesized)
ttagttgctatagaaagcaaatgaaagagatggttatataactcactaattgctttttttaatggagtaggatgattttctcccattgattgattaattgacagaagcttccaaataata

SEQ ID NO: 202321 - DNA, 120 bp, Artificial Sequence
  ENSG00000114480_35 (sequence is synthesized)
ttcttgtctttttagtatctactgttcgtttaagtaagcactcttatggctggtttgcagtggtggaaattgccagaaagccataaaatgttcaagctggaagttactttaaggatgata

SEQ ID NO: 202322 - DNA, 120 bp, Artificial Sequence
  ENSG00000114480_36 (sequence is synthesized)
ttcctacttgtagcagtgctcctaaaccattatgtattatcagagttctggatgtattttaaagcaataacatgtcattctctttttaggtagttattactagtaaaagcggagagatct

SEQ ID NO: 202323 - DNA, 120 bp, Artificial Sequence
  ENSG00000114487_0 (sequence is synthesized)
gggcgcgggcgcaggcgaacggctgccggtcaggtgtccttgtccccttgagttgcgcgggtcgtgttcgagggcatggacgacaggtaccctgcgcttcagcgggcccagctgcgtctg

SEQ ID NO: 202324 - DNA, 120 bp, Artificial Sequence
  ENSG00000114487_1 (sequence is synthesized)
gatttcatccacgccaactccaccactcacagtttcctttttggagcactggctgaattgctggacaatgcaagagatgcaggggctgaaagacttgatgtcttttcagtggataatgaa

SEQ ID NO: 202325 - DNA, 120 bp, Artificial Sequence
  ENSG00000114487_2 (sequence is synthesized)
aaactgcaggggggattcatgttgtgtttcctggatgatggatgtggcatgagccctgaggaagcttcagacatcatttactttggacgatccaaaaaacggctgtcaaccttgaagttc

SEQ ID NO: 202326 - DNA, 120 bp, Artificial Sequence
  ENSG00000114487_3 (sequence is synthesized)
atagggcaatacggcaatggtcttaaaagtgggtccatgagaattggaaaagactttattctttttacgaagaaggaagaaacgatgacctgtgtgtttttttctcagacattctgtgaa

SEQ ID NO: 202327 - DNA, 120 bp, Artificial Sequence
  ENSG00000114487_4 (sequence is synthesized)
gaagaaagtcttagtgaggttgtagttccaatgccctcatggttaataagaaccagagaatctgtcacagatgatccccagaaatttgcaatggaattatctataatttataaatactcc

SEQ ID NO: 202328 - DNA, 120 bp, Artificial Sequence
  ENSG00000114487_5 (sequence is synthesized)
ccatttaaaactgaagcagaattgatgcagcagtttgatgtgatctatggaaaatgtggtactttgctggttatttataacttgaagcttctgcttaatggagaaccagagttggatgtt

SEQ ID NO: 202329 - DNA, 120 bp, Artificial Sequence
  ENSG00000114487_6 (sequence is synthesized)
aaaactgacaaagaagatatactgatggctggagctctggaggatttcccagcgaggtggtcattcagagcctacacatctgttctgtattttaacccatggatgagaatattcattcaa

SEQ ID NO: 202330 - DNA, 120 bp, Artificial Sequence
  ENSG00000114487_7 (sequence is synthesized)
gccaagagagttaaaactaaacatctttgctattgcctctacagacccagaaagtatctttatgtcacatcttcttttaaaggagcatttaaagatgaagttaaaaaggcagaagaagca

SEQ ID NO: 202331 - DNA, 120 bp, Artificial Sequence
  ENSG00000114487_8 (sequence is synthesized)
gtaaagattgctgaatccatattgaaagaagcacaaatcaaagtaaaccagtgtgacagaacctctttatcttctgccaaggatgtattacagagagctttggaagatgtagaagcaaag

SEQ ID NO: 202332 - DNA, 120 bp, Artificial Sequence
  ENSG00000114487_9 (sequence is synthesized)
caaaagaatcttaaagagaaacaaagagaattaaaaacagcaagaacgctctccctgttctatggagtgaacgtagaaaaccgaagccaagctggaatgttcatttacagtaataaccgt

SEQ ID NO: 202333 - DNA, 120 bp, Artificial Sequence
  ENSG00000114487_10 (sequence is synthesized)
ttgatcaaaatgcatgaaaaagtgggctcacagttgaaactgaagtccttacttggcgcaggcgtggttggaattgttaatatacccttggaggtcatggaaccatcccataataaacag

SEQ ID NO: 202334 - DNA, 120 bp, Artificial Sequence
  ENSG00000114487_11 (sequence is synthesized)
gaatttctcaatgtccaagagtataatcatctactaaaagtcatgggacagtacttggtccagtactgtaaggacaccggcatcaataatagaaatttaacattgttttgcaatgaattt

SEQ ID NO: 202335 - DNA, 120 bp, Artificial Sequence
  ENSG00000114487_12 (sequence is synthesized)
ggataccagaatgacatcgatgtggagaaacctttaaattcttttcaatatcaaagaagacaagccatgggtatcccattcatcatacaatgtgatctttgtcttaaatggagagtcttg

SEQ ID NO: 202336 - DNA, 120 bp, Artificial Sequence
  ENSG00000114487_13 (sequence is synthesized)
ccttcctctactaattatcaggaaaaagaattttttgacatttggatttgtgctaataatcccaaccgcttggaaaacagttgtcatcaggtagaatgtctaccttccatcccactgggc

SEQ ID NO: 202337 - DNA, 120 bp, Artificial Sequence
  ENSG00000114487_14 (sequence is synthesized)
accatgagcacaatatcaccatcaaaaaatgagaaagagaagcaacttagagagtcggtcataaagtatcaaaatagactggcagaacagcagccacagcctcaatttataccagtggac

SEQ ID NO: 202338 - DNA, 120 bp, Artificial Sequence
  ENSG00000114487_15 (sequence is synthesized)
acttcagcacataaggaaaataccaaaacccagaaaatcaggcttttgggcgatgacttgaagcatgaatctctttcatcctttgagctttcagcgagccgtagaggacagaaaagaaac

SEQ ID NO: 202339 - DNA, 120 bp, Artificial Sequence
  ENSG00000114487_16 (sequence is synthesized)
atagaagagacagactctgatgtagagtatatttcagaaacaaaaattatgaaaaagtctatggaggagaaaatgaactctcaacagcagagaattccagtagctctgccagaaaatgtc

SEQ ID NO: 202340 - DNA, 120 bp, Artificial Sequence
  ENSG00000114487_17 (sequence is synthesized)
aaactagctgagagatcccagagaagtcagattgctaatattaccactgtctggagagctcaaccaactgaagggtgcctgaagaatgcccaggccgcttcttgggaaatgaaaaggaag

SEQ ID NO: 202341 - DNA, 120 bp, Artificial Sequence
  ENSG00000114487_18 (sequence is synthesized)
cagagtctgaactttgtagaggaatgtaaggtattgactgaagatgagaacacgagtgattcagatataatcctggtttcagataaaagcaacactgatgtttcattgaaacaagaaaaa

SEQ ID NO: 202342 - DNA, 120 bp, Artificial Sequence
  ENSG00000114487_19 (sequence is synthesized)
aaggaaattcctcttttaaaccaagaaaaacaggagctgtgcaatgatgttctagcaatgaaaagaagctcttcattacctagctggaaaagcttgctcaatgtgccgatggaagatgtg

SEQ ID NO: 202343 - DNA, 120 bp, Artificial Sequence
  ENSG00000114487_20 (sequence is synthesized)
aatctaagttctggacacatagccagagtttctgtgagtggcagttgtaaagttgcttcttcgccagcgtcttctcaaagcacacctgtcaaggaaacagtgagaaaactgaagtctaag

SEQ ID NO: 202344 - DNA, 120 bp, Artificial Sequence
  ENSG00000114487_21 (sequence is synthesized)
ttaagggagattcttctgtatttttttcctgagcatcagctaccatcagaattggaagaacctgcattaagttgtgagctggagcagtgcccagagcagatgaacaaaaagctgaaaatg

SEQ ID NO: 202345 - DNA, 120 bp, Artificial Sequence
  ENSG00000114487_22 (sequence is synthesized)
tgtttcaaccagatacagaatacttacatggtccaatatgaaaaaaaaataaagaggaaattgcagtccattatctatgattcaaatacaagaggaatacataatgaaatctctctgggg

SEQ ID NO: 202346 - DNA, 120 bp, Artificial Sequence
  ENSG00000114487_23 (sequence is synthesized)
caatgtgaaaataaaagaaaaatctctgaggataagctgaagaatcttcgtataaaactggcactattgttgcagaaactccaactgggtggtccagaaggtgacctggagcagactgac

SEQ ID NO: 202347 - DNA, 120 bp, Artificial Sequence
  ENSG00000114487_24 (sequence is synthesized)
acttatttagaagctttgcttaaagaagataatcttctcttccagaacaatttaaataaagtaactatagatgcaagacatagactccctttagaaaaaaatgaaaagacttcggaaaat

SEQ ID NO: 202348 - DNA, 120 bp, Artificial Sequence
  ENSG00000114487_25 (sequence is synthesized)
taagtcagagatggtattaccttttaaaaaatgctaataagaaaattggaagattcttttaaaaatttttcttttttgttgttgttactgtaaagtctattctgtttaacaataagaaat

SEQ ID NO: 202349 - DNA, 120 bp, Artificial Sequence
  ENSG00000114487_26 (sequence is synthesized)
aagaaataatttttttcaaataagaaaattgtgtactctagaaatggagaccgatttacaatttatgtattccctaatccaattatctaaatcttccttttctttcagaaatattaataa

SEQ ID NO: 202350 - DNA, 120 bp, Artificial Sequence
  ENSG00000114487_27 (sequence is synthesized)
tatctagagttctctaattttcatgtgagctactgaaaaaaatgaaaatgtcactcaagcttaacttttgttattccttaaaagattgttattgtaattttgttattccttaaaaacatt

SEQ ID NO: 202351 - DNA, 120 bp, Artificial Sequence
  ENSG00000114487_28 (sequence is synthesized)
taaaagcagattttttcaaaatcgatatgtgaaggactacagaatcacctcctcttgaagatattgaaaaagaaagacattatgccctttctccactatagccaacactcagtcaagcag

SEQ ID NO: 202352 - DNA, 120 bp, Artificial Sequence
  ENSG00000114487_29 (sequence is synthesized)
aaaatacaaatccccccaaaactttgagacatagcttatataattttattatttagtcatagtaaaagaataaatctcctaagcataatatgtatacatattacacatatgtaaaaattg

SEQ ID NO: 202353 - DNA, 120 bp, Artificial Sequence
  ENSG00000114487_30 (sequence is synthesized)
ttgttttacatttacatatacgtaaagaagtatgtttttacacttttcttgataagtgttttttttttgtttagaaatgtctgaaactttagacaaaaacagtaaaacatttaatattca

SEQ ID NO: 202354 - DNA, 120 bp, Artificial Sequence
  ENSG00000114491_0 (sequence is synthesized)
caaacaggcagcgcgcgacaatggcggtcgctcgtgcagctttggggccattggtgacgggtctgtacgacgtgcaggctttcaagtttggggacttcgtgctgaagagcgggctttcct

SEQ ID NO: 202355 - DNA, 120 bp, Artificial Sequence
  ENSG00000114491_1 (sequence is synthesized)
cccccatctacatcgatctgcggggcatcgtgtctcgaccgcgtcttctgagtcaggttgcagatattttattccaaactgcccaaaatgcaggcatcagttttgacaccgtgtgtggag

SEQ ID NO: 202356 - DNA, 120 bp, Artificial Sequence
  ENSG00000114491_2 (sequence is synthesized)
tgccttatacagctttgccattggctacagttatctgttcaaccaatcaaattccaatgcttattagaaggaaagaaacaaaggattatggaactaagcgtcttgtagaaggaactatta

SEQ ID NO: 202357 - DNA, 120 bp, Artificial Sequence
  ENSG00000114491_3 (sequence is synthesized)
atccaggagaaacctgtttaatcattgaagatgttgtcaccagtggatctagtgttttggaaactgttgaggttcttcagaaggagggcttgaaggtcactgatgccatagtgctgttgg

SEQ ID NO: 202358 - DNA, 120 bp, Artificial Sequence
  ENSG00000114491_4 (sequence is synthesized)
acagagagcagggaggcaaggacaagttgcaggcgcacgggatccgcctccactcagtgtgtacattgtccaaaatgctggagattctcgagcagcagaaaaaagttgatgctgagacag

SEQ ID NO: 202359 - DNA, 120 bp, Artificial Sequence
  ENSG00000114491_5 (sequence is synthesized)
ttgggagagtgaagaggtttattcaggagaatgtctttgtggcagcgaatcataatggttctcccctttctataaaggaagcacccaaagaactcagcttcggtgcacgtgcagagctgc

SEQ ID NO: 202360 - DNA, 120 bp, Artificial Sequence
  ENSG00000114491_6 (sequence is synthesized)
ccaggatccacccagttgcatcgaagcttctcaggcttatgcaaaagaaggagaccaatctgtgtctatctgctgatgtttcactggccagagagctgttgcagctagcagatgctttag

SEQ ID NO: 202361 - DNA, 120 bp, Artificial Sequence
  ENSG00000114491_7 (sequence is synthesized)
gacctagtatctgcatgctgaagactcatgtagatattttgaatgattttactctggatgtgatgaaggagttgataactctggcaaaatgccatgagttcttgatatttgaagaccgga

SEQ ID NO: 202362 - DNA, 120 bp, Artificial Sequence
  ENSG00000114491_8 (sequence is synthesized)
agtttgcagatataggaaacacagtgaaaaagcagtatgaaggaggtatctttaaaatagcttcctgggcagatctagtaaatgctcacgtggtgccaggctcaggagttgtgaaaggcc

SEQ ID NO: 202363 - DNA, 120 bp, Artificial Sequence
  ENSG00000114491_9 (sequence is synthesized)
tgcaagaagtgggcctgcctttgcatcgggggtgcctccttattgcggaaatgagctccaccggctccctggccactggggactacactagagcagcggttagaatggctgaggagcact

SEQ ID NO: 202364 - DNA, 120 bp, Artificial Sequence
  ENSG00000114491_10 (sequence is synthesized)
ctgaatttgttgttggttttatttctggctcccgagtaagcatgaaaccagaatttcttcacttgactccaggagttcagttggaagcaggaggagataatcttggccaacagtacaata

SEQ ID NO: 202365 - DNA, 120 bp, Artificial Sequence
  ENSG00000114491_11 (sequence is synthesized)
gcccacaagaagttattggcaaacgaggttccgatatcatcattgtaggtcgtggcataatctcagcagctgatcgtctggaagcagcagagatgtacagaaaagctgcttgggaagcgt

SEQ ID NO: 202366 - DNA, 120 bp, Artificial Sequence
  ENSG00000114491_12 (sequence is synthesized)
atttgagtagacttggtgtttgagtgcttcagatacatttttcagatacaatgtgaagacattgaagatatgtggtcctcctgaaagtcactggctggaaataatccaattattcctgct

SEQ ID NO: 202367 - DNA, 120 bp, Artificial Sequence
  ENSG00000114491_13 (sequence is synthesized)
tggattcttccacagggcctgtgtaagaatgggttctggagttctcatggtctttaggaaatattgagtaatttgtaatcaccgcattgatactataataagttcattcttaagcttgct

SEQ ID NO: 202368 - DNA, 120 bp, Artificial Sequence
  ENSG00000114491_14 (sequence is synthesized)
ttttttgagactggtgtttgttagacagccacagtcctgtctgggttagggtcttccacatttgaggatccttcctatctctccatgggactagactgctttgttattctatttattttt

SEQ ID NO: 202369 - DNA, 120 bp, Artificial Sequence
  ENSG00000114491_15 (sequence is synthesized)
tgttgcccaggatggagtgcagtggtgagatcacggctcattgcagcctcgacctcccaggtgatcctcccacctcagcttccagattagctggtgctataggcatgcaccaccacgtcc

SEQ ID NO: 202370 - DNA, 120 bp, Artificial Sequence
  ENSG00000114491_16 (sequence is synthesized)
agctggtgctataggcatgcaccaccacgtccatctaaatttctttattatttgtagagatgaggtcttgccatgttacccaggctggtctcaactcctgggctcaagcgatcctcctgc

SEQ ID NO: 202371 - DNA, 120 bp, Artificial Sequence
  ENSG00000114491_17 (sequence is synthesized)
ggtgtgagccactgtgcccagcctaattgcagtaagacaaaaattctagggcaccaagaggctaaagtcagcacagcttttcttgtgtcctgtattctctgtctaatgtgttgcccaaat

SEQ ID NO: 202372 - DNA, 120 bp, Artificial Sequence
  ENSG00000114491_18 (sequence is synthesized)
ctctgtctaatgtgttgcccaaataatacctaattgttagccattcccctccatctctggcctaaaagtgatagtccaggtatccacatgggctggttcccagaactgccattgctcact

SEQ ID NO: 202373 - DNA, 120 bp, Artificial Sequence
  ENSG00000114491_19 (sequence is synthesized)
ctccaaagaggggaaggtggggaaggggaaggtgactatagctcagctcctgagctagtatctggctgttatttcaacaaccggagttggggtttgggctcattttttcccctagccagc

SEQ ID NO: 202374 - DNA, 120 bp, Artificial Sequence
  ENSG00000114491_20 (sequence is synthesized)
aattatggaccagtagtaacacaagtgacagcttcctgtgactgacttcacaattaggaggtctaagattccatttgggtatttgcttaaggatcccacataattgtcccaacggtcatt

SEQ ID NO: 202375 - DNA, 120 bp, Artificial Sequence
  ENSG00000114491_21 (sequence is synthesized)
agtagaggggaggtaagccttcattaataataaagagaaagcccacattcaaggtggtgtttgagcaggggcagggtgagggctgtcccggtgctcattgcaccagcacactcacattcc

SEQ ID NO: 202376 - DNA, 120 bp, Artificial Sequence
  ENSG00000114491_22 (sequence is synthesized)
ttctcatttggggcccacctgcaggaagtggcacaggatcagccatttccccacccttgtcagctgatggcccactgttctttaatgactcagaggaatgcctaggattttttttttttt

SEQ ID NO: 202377 - DNA, 120 bp, Artificial Sequence
  ENSG00000114491_23 (sequence is synthesized)
tacaagcctaggatttttaactcaggtttttattatattccctcctgaagtttttacttcaagagcttctgctctaaagtccaatttgggcttcatgtccccagtgctgcatctccaggg

SEQ ID NO: 202378 - DNA, 120 bp, Artificial Sequence
  ENSG00000114491_24 (sequence is synthesized)
aaatgctgtctgtgggagagaccaactctcaaggaagaagtggccacagaaggagcaggaagggagttggccctcagggctactctggggaagccaaaagtcatgaaggggagaagaatt

SEQ ID NO: 202379 - DNA, 120 bp, Artificial Sequence
  ENSG00000114491_25 (sequence is synthesized)
ttctgacaaaaacttgcaggaatctcttaggtgtcttcagtgttggagtgatatgttgagaggcctttggagtgatgtgctgaggtctcaggcgcccacctccctggctgtcacttccat

SEQ ID NO: 202380 - DNA, 120 bp, Artificial Sequence
  ENSG00000114491_26 (sequence is synthesized)
caaaacaggtaccagccccacccgcagcgtttctgactctgggtagctctgggatggggcttgagaatttgcgtttccaaaaaggtcccaggtgatgctgcggttgcctgcgcagggact

SEQ ID NO: 202381 - DNA, 120 bp, Artificial Sequence
  ENSG00000114491_27 (sequence is synthesized)
ggactttgagaaccacttcactggttattcacatttctgcctctgcagtgagacagccttgaggtctgcctcctgctaagagtcacatgctcctgtcctttagaaatgtgggctcctgcc

SEQ ID NO: 202382 - DNA, 120 bp, Artificial Sequence
  ENSG00000114491_28 (sequence is synthesized)
atctccaggacgcaggcactgttcctgttgatgaaccctatttcacaggacccctgctaaggtgatttgaggggaaatgagaggaggctcaaataatcacccagcccctgccacttactg

SEQ ID NO: 202383 - DNA, 120 bp, Artificial Sequence
  ENSG00000114491_29 (sequence is synthesized)
aaagtgtaggtccttgtgccccacaccatcagagtttctgcgttagcagatttgtggtttgcccagcagcctgggcgtgtgcatttctaatgggtgcctcaagtgatctgtttctgattt

SEQ ID NO: 202384 - DNA, 120 bp, Artificial Sequence
  ENSG00000114491_30 (sequence is synthesized)
gtatttctattgtgaagagtcagcccagtactgcaggcctcttacctaagcagaatcccagtctggcatcaaagctttagaggacaagttgattcaggcagagaagaacttgggctatac

SEQ ID NO: 202385 - DNA, 120 bp, Artificial Sequence
  ENSG00000114491_31 (sequence is synthesized)
aagcgctgttcttcagcattgaagtattttggaggcattagatagtttaaccctttctcagtcaaggaatatttacagaacatgatctctgggcattgtaactcctggtcttagtgggga

SEQ ID NO: 202386 - DNA, 120 bp, Artificial Sequence
  ENSG00000114491_32 (sequence is synthesized)
atatagggaccccatgtctccatggggtgcacagaatgtctgtgagactgatggagtggagaacgccatcccccagcctctccagctactcgaggcattctgtagaacataagcccatag

SEQ ID NO: 202387 - DNA, 120 bp, Artificial Sequence
  ENSG00000114491_33 (sequence is synthesized)
tgtgtgtgtgtgtgtgtgtgcatgcgcgcgcgtgcgcactggaggaacctaagaaactatttggtgcacttcctcttattttagagctcccaaagtgtagctccagaatcgtaaagggat

SEQ ID NO: 202388 - DNA, 120 bp, Artificial Sequence
  ENSG00000114491_34 (sequence is synthesized)
gtagctccagaatcgtaaagggatatgctcagtctcacagccagcctgtggatctcagtcccaacactcacccttgtgctactgagtcagctctaagaaaatctgccaaaagtaggccga

SEQ ID NO: 202389 - DNA, 120 bp, Artificial Sequence
  ENSG00000114491_35 (sequence is synthesized)
gggctggttttttgttttgttttgtttgtttgatacagggtcttcactctgttgcccaggctggagtatatcatggctcactgcaaccttgacttgggctcaagcgatccgctcaagtag

SEQ ID NO: 202390 - DNA, 120 bp, Artificial Sequence
  ENSG00000114491_36 (sequence is synthesized)
ctggaactactctcaagtagctctcaagagcctctcgagtggctggaactacaggcgtgcaccaccacagctggttaatttttaaaattttttgtagagacggtggaggaggttctcact

SEQ ID NO: 202391 - DNA, 120 bp, Artificial Sequence
  ENSG00000114491_37 (sequence is synthesized)
gtgactcagtgtgtgcccgacagcagagcccacaccactccagttgcagtggttgccatctgggtcatcagacctggctgtcaggggtgcagccacaggagagccaacagcagagggtgc

SEQ ID NO: 202392 - DNA, 120 bp, Artificial Sequence
  ENSG00000114491_38 (sequence is synthesized)
tggccgctgagctagctgctaatgctggcctgggtgcagttctcatccaaagtacccggtgggtgggagtcactcagtaccagttccgagcctgaacccaaactctcgtgtttctgctca

SEQ ID NO: 202393 - DNA, 120 bp, Artificial Sequence
  ENSG00000114491_39 (sequence is synthesized)
cccctctctggcttctgccaccacatgggaagaatatgccctggttagcccatggcttctgaagagcaagagaaagtagagcagagcctactccagcctcccccgtccaatgtatgaaag

SEQ ID NO: 202394 - DNA, 120 bp, Artificial Sequence
  ENSG00000114491_40 (sequence is synthesized)
ccccagctgatctgtaagcctgggagcgtgataaatgcttagtagtgcatgccatggagttccagggtggtttattacacggcaatatctagctaaatacatttaacttgctgcagctct

SEQ ID NO: 202395 - DNA, 120 bp, Artificial Sequence
  ENSG00000114491_41 (sequence is synthesized)
ctggatccagcctggttaccaggaagacaaaaactgggctccaccaggaaccagtcttctgccttcccaaccatcacctctggctgcatcagcgatctctcccagcgaaatagctgcttg

SEQ ID NO: 202396 - DNA, 120 bp, Artificial Sequence
  ENSG00000114491_42 (sequence is synthesized)
gtcttgtgtgaatcctgtactttaacacagtggaccaagtgtcagtcattgaaaatgaccatgagtaaccctgtggactctctgcagcttggttcctttgccccttaacaggtgggtatg

SEQ ID NO: 202397 - DNA, 120 bp, Artificial Sequence
  ENSG00000114491_43 (sequence is synthesized)
aatcgtgtcttcagtgccagggctgaatgagaaagggcattcctttttgaaggaatctgatactaaacacaaagcatgagaaaaatcaggacttgttggagttatatttttaaaatatat

SEQ ID NO: 202398 - DNA, 120 bp, Artificial Sequence
  ENSG00000114491_44 (sequence is synthesized)
ttacaggtgtgagccactgctcccggcctgttggagttctttacatttattttataatcaatgctgttttattaaatgcggattttattttggattacaggatgtagaatgccatatttt

SEQ ID NO: 202399 - DNA, 120 bp, Artificial Sequence
  ENSG00000114491_45 (sequence is synthesized)
catatttttcttagatcatagggcctttcacatttgtaatttggccttgtatgagttaccctgcaatccctttgttttccccataacccttccaaaggaaggccgcaatagaaatacaaa

SEQ ID NO: 202400 - DNA, 120 bp, Artificial Sequence
  ENSG00000114491_46 (sequence is synthesized)
gagaaacaaaataattagaatattttttaacttctaaagttcaaggttttggcataagtctggtttagaagcacatttgcctagccctttccttcccaccaagggggaaagtcttcctct

SEQ ID NO: 202401 - DNA, 120 bp, Artificial Sequence
  ENSG00000114491_47 (sequence is synthesized)
agacaagaggcagagggctcctcagagtcagatcctggtgtgggctctcacgtgctgctgctgaatcccagggaaggagggaggaagggcagttgacacccaaaataagggtggggaact

SEQ ID NO: 202402 - DNA, 120 bp, Artificial Sequence
  ENSG00000114491_48 (sequence is synthesized)
gtcagcagaggaggtctgtgtcatgtttttcagcgctggggttggggggagcccaggagagcaggaagatccagagatccctcgccccagctcggccatgtgtgtctgggacagagcctg

SEQ ID NO: 202403 - DNA, 120 bp, Artificial Sequence
  ENSG00000114491_49 (sequence is synthesized)
aggtggcctgagcttcctgtggctccagagtaacattatagagaagctgaattctcctgtttttctgaaaagggcatgggagttagctgagaagcagacctggtgggcctgagagtctca

SEQ ID NO: 202404 - DNA, 120 bp, Artificial Sequence
  ENSG00000114491_50 (sequence is synthesized)
atcgtcaggtaaggacagtcagtgggaagtggacgggccgcacaaccaaggttctcatgaggacaaccatgtcttcgggggtgcccttgtgcacagacagctccatagtcctgcctccaa

SEQ ID NO: 202405 - DNA, 120 bp, Artificial Sequence
  ENSG00000114491_51 (sequence is synthesized)
tgtcccaacactgcattgtctccctgcacttagcagccctgcagggtgagacttggggaggatcctgaaatgattgtatttaacaagacatgctgtccttgtttacctggaacctagcaa

SEQ ID NO: 202406 - DNA, 120 bp, Artificial Sequence
  ENSG00000114491_52 (sequence is synthesized)
tgttgttttctgccacaacttgaatagatacttgaagcagagatgatgttgagttaaaaaaaatatatacataaaaatatgggttcttttcaacctgaatagatggcctaaaaattcaaa

SEQ ID NO: 202407 - DNA, 120 bp, Artificial Sequence
  ENSG00000114491_53 (sequence is synthesized)
tctttacccatggcaggcaaaataaaactttgcatattattatacacttgcttaagaaaagccttcttagtctagaacaataatgaatgagccctttggtaactatgtatctttggacaa

SEQ ID NO: 202408 - DNA, 120 bp, Artificial Sequence
  ENSG00000114491_54 (sequence is synthesized)
gtcagtttacttcttttagtctaattgtctgtaaaatggggatgataacagtattgacctcataaggtaatcaagatgctttaatgagataacatgtagaatatttaacacaatgtcttg

SEQ ID NO: 202409 - DNA, 120 bp, Artificial Sequence
  ENSG00000114491_55 (sequence is synthesized)
gcacagagtaaacactctgtacttataagcccttattcgtaagccctaataattgtttgactagatattatagttagggtctaggcttttaagaatacttaaagtatcttggatttggaa

SEQ ID NO: 202410 - DNA, 120 bp, Artificial Sequence
  ENSG00000114491_56 (sequence is synthesized)
gaagaagggtatgtgcctgggcaagcaaatttgacagatgtccttggcagaatatgatgttttgaatgaaaattccacataaaggaaacaatgaaaaagaaatataaaatggaggtatct

SEQ ID NO: 202411 - DNA, 120 bp, Artificial Sequence
  ENSG00000114491_57 (sequence is synthesized)
ttcaggaatctgcaagaatcagaaatccagcttaaactgaagaagaaaaaggaaatgctcatgtcattgaaagtccattcatagagcaggctgtcaagcgtggttggatccaggagctca

SEQ ID NO: 202412 - DNA, 120 bp, Artificial Sequence
  ENSG00000114491_58 (sequence is synthesized)
cccccatctacatcgatctgcggggcatcgtgtctcgaccgcgtcttctgagtcagatgggatctctcttacgtcacccaggctggagtgcagctctgtgatcatagctcactgcagcct

SEQ ID NO: 202413 - DNA, 120 bp, Artificial Sequence
  ENSG00000114503_0 (sequence is synthesized)
gcattgtggtccgcttctctgcactatgtcgggtggcctcctgaaggcgctgcgcagcgactcctacgtggagctgagccagtaccgggaccagcacttccggggtgacaatgaagaaca

SEQ ID NO: 202414 - DNA, 120 bp, Artificial Sequence
  ENSG00000114503_1 (sequence is synthesized)
agaaaaattactgaagaaaagctgtacgttatatgttggaaatctttctttttacacaactgaagaacaaatctatgaactcttcagcaaaagtggtgacataaagaaaatcattatggg

SEQ ID NO: 202415 - DNA, 120 bp, Artificial Sequence
  ENSG00000114503_2 (sequence is synthesized)
tctggataaaatgaagaaaacagcatgtggattctgttttgtggaatattactcacgcgcagatgcggaaaacgccatgcggtacataaatgggacgcgtctggatgaccgaatcattcg

SEQ ID NO: 202416 - DNA, 120 bp, Artificial Sequence
  ENSG00000114503_3 (sequence is synthesized)
cacagactgggacgcaggctttaaggagggcaggcaatacggccgtgggcgatctgggggccaggttcgggatgagtatcggcaggactacgatgctgggagaggaggctatggaaaact

SEQ ID NO: 202417 - DNA, 120 bp, Artificial Sequence
  ENSG00000114503_4 (sequence is synthesized)
ggcacagaaccagtgagtggtgagagctctgtcagtgacaaacactcctttggcctgttgaatttgctgaagaacatcacctaaagtctgcacacgagcccatttttaccaagatttgat

SEQ ID NO: 202418 - DNA, 120 bp, Artificial Sequence
  ENSG00000114503_5 (sequence is synthesized)
cagtgtctttactgagctggaagcctctgaaagttattaaaggacagaatccaaaagaatgcctttaattcttgtctgagaatcttggccatgtgtcagattatcagaacaattttgtta

SEQ ID NO: 202419 - DNA, 120 bp, Artificial Sequence
  ENSG00000114503_6 (sequence is synthesized)
ccaggtcagaaattgtgttctttgacaacagattggatctgtaatgttgattagtctttagccataaccactacacttttagaaagacagaaaaatgtaagaatttgtttttaccataat

SEQ ID NO: 202420 - DNA, 120 bp, Artificial Sequence
  ENSG00000114503_7 (sequence is synthesized)
gagtcttaagtaggttcatgatctacattggggcctgggattatttttttaattttaagtttgcatgagatagcctaataaatggaggtggggccaggcatggtggctcacacgtgtaat

SEQ ID NO: 202421 - DNA, 120 bp, Artificial Sequence
  ENSG00000114503_8 (sequence is synthesized)
caacatagcaagaccccgtctctacaaagcacaacgaaaaacaacaaatggagttgtgctatgttgtattgctttgcacaaaattaggaacaggtgtttgacaattgaatttgttttctg

SEQ ID NO: 202422 - DNA, 120 bp, Artificial Sequence
  ENSG00000114503_9 (sequence is synthesized)
tctgtgaattctaacctctaaaggcatgcttagaggtcaaggaccttcctgtgtagttggtgcaaaagcaatctccacaggacagcactgcttccatgcttcatacatcaggaaatgagg

SEQ ID NO: 202423 - DNA, 120 bp, Artificial Sequence
  ENSG00000114503_10 (sequence is synthesized)
ccagaacttgagtatttactaacacgtttttcaaaagatgtcagtgttatacctaaagctaaaaaaaagcaagggtttgtcatagagggaacctctaaataatttcaggggtaggggaga

SEQ ID NO: 202424 - DNA, 120 bp, Artificial Sequence
  ENSG00000114503_11 (sequence is synthesized)
tgttgtcaataggaaatgggataaaatatcaagagacaatgaaaacactgccttgacatgaggaccagcaagtttattcttttcattttcagtgatgttgggaatggactgggttttaaa

SEQ ID NO: 202425 - DNA, 120 bp, Artificial Sequence
  ENSG00000114503_12 (sequence is synthesized)
agggagcttgaagagggaatgtttgacagtcacagaaggttcctgcagcagatgcctcttttagccatttctcatttttttcctcaaattttacctactgaggctcaagccttcacagtg

SEQ ID NO: 202426 - DNA, 120 bp, Artificial Sequence
  ENSG00000114503_13 (sequence is synthesized)
agctgatggtctctacagggaggggagtctagggaatttatttggtatttgtaaggcaagaggtgatttctctctaatatatctgagttattgctcatttaaaactgttaagtccagtat

SEQ ID NO: 202427 - DNA, 120 bp, Artificial Sequence
  ENSG00000114503_14 (sequence is synthesized)
aattttccctgatatgaaaaaatgtgcatttttttcacttagcaacaaagtaccttctaatttccaatagtccgtgaaagttggggctgaagtacctaagtgtgaatgtctctcccgtta

SEQ ID NO: 202428 - DNA, 120 bp, Artificial Sequence
  ENSG00000114503_15 (sequence is synthesized)
aactgagtgtagaaatctgaatttttaaaagagctgtaactagttgtaagtgcttaggaagaaactttgcaaacatttaatgaggatacactgttcatttttaaaattccttcacactgt

SEQ ID NO: 202429 - DNA, 120 bp, Artificial Sequence
  ENSG00000114503_16 (sequence is synthesized)
aatttaatgtgttttatattcttttgtagtaaaacaacataactcagatttctacaggagacagtggttttattcggattgtcttctgtaataggtttcaataaagctggatgaacttat

SEQ ID NO: 202430 - DNA, 120 bp, Artificial Sequence
  ENSG00000114503_17 (sequence is synthesized)
gaccagcacttccgggtgagggaggccgggccgcgagacgggaaggccctgggcaagaacgctgagaaacggtttgctcttgtctcattgtgtcgcctcccattcagctgaaatccgcaa

SEQ ID NO: 202431 - DNA, 120 bp, Artificial Sequence
  ENSG00000114503_18 (sequence is synthesized)
acgccaagtggggccccggtgcctgctggcgaggcagggaatgggtgctggaagggcgcttggatatcactgaagccacttgctctggaagacggggaactggaggctcgcttatcccat

SEQ ID NO: 202432 - DNA, 120 bp, Artificial Sequence
  ENSG00000114503_19 (sequence is synthesized)
tcgctcgcagccgctccctgtaccccagccagtgccgagaggtttgagcggtggtggtggtggcggctcccgtttccacggttgtgcctccgcagacgactacgtagcaagggggagggg

SEQ ID NO: 202433 - DNA, 120 bp, Artificial Sequence
  ENSG00000114503_20 (sequence is synthesized)
tgcccttctctctcccagagtaggcagaggcgccttcctgatgcagatgcggggctttttgctttgttttttaaatcggcgaagcagtgcccttcggcgattcgggccccttctctggga

SEQ ID NO: 202434 - DNA, 120 bp, Artificial Sequence
  ENSG00000114503_21 (sequence is synthesized)
agctgagagtggtagctcataagcgtccctgcactcgtccctacgttttccttcatctccctcctactttccacccagtgtgtctctgcccttatactgtaaagctgatactatttatat

SEQ ID NO: 202435 - DNA, 120 bp, Artificial Sequence
  ENSG00000114503_22 (sequence is synthesized)
tctcttctgaaatccatgctttatggttctttaacaaaaagtttttcaagaatgtttgcccttcacgtaaaaaaaaaaaaattccaaagaatgtagtgaaaatataaaaatctcgtactg

SEQ ID NO: 202436 - DNA, 120 bp, Artificial Sequence
  ENSG00000114503_23 (sequence is synthesized)
ttctaaacccctaatgccctttgccagaggcagtcagttaccagtttcttgggcgtctttcaagaagtaaccctgtgggtgtgcggtagtgtatttcatgtgctgtttttaaaatcattt

SEQ ID NO: 202437 - DNA, 120 bp, Artificial Sequence
  ENSG00000114503_24 (sequence is synthesized)
ttttattttttattgttccatttcagcatatgtaggtctttttttaaaatagctgtacagctgggcatggtggctggtgtttgtagtgccagctgctcaggaagctgaggcaggaggatc

SEQ ID NO: 202438 - DNA, 120 bp, Artificial Sequence
  ENSG00000114503_25 (sequence is synthesized)
agttgagcccaagatttcaaggctgcactgagttgtgactgtgttccagcgggggtgacgggttaagaccccatctttaaagaaaaaaacttttaagtaaatagctgtatagtatttcat

SEQ ID NO: 202439 - DNA, 120 bp, Artificial Sequence
  ENSG00000114503_26 (sequence is synthesized)
tatatagatgtatataacctgactgtataggtacaaaccaaaactatttactttgatcatttaattcccttactcagactcttttaagtattggacctcttggatttatcctatgttctt

SEQ ID NO: 202440 - DNA, 120 bp, Artificial Sequence
  ENSG00000114503_27 (sequence is synthesized)
tttactgtatgttttggtcattcaatttaatattctgagaaattttgcaggcccaatttaatatatcttttgaattttttcctgtgccctgaattatgtttgtttcggttgaaatttttc

SEQ ID NO: 202441 - DNA, 120 bp, Artificial Sequence
  ENSG00000114503_28 (sequence is synthesized)
cttaagtgtctggtgatccctggatttctgctcataattaaggaaaagaatgctgactcactggacccaggcagggcttctctcccagattgcaggcttgcctcggggatacacaggttt

SEQ ID NO: 202442 - DNA, 120 bp, Artificial Sequence
  ENSG00000114503_29 (sequence is synthesized)
cccaaatgctagaatgaaaagagattttattttggcttgctaacatcaaagatactagtttctccagatggtttattcagaacactgttgtcttatttttatttgtctgagattaaatgt

SEQ ID NO: 202443 - DNA, 120 bp, Artificial Sequence
  ENSG00000114503_30 (sequence is synthesized)
cttcccctttaattaaagggaggtctctgatgaagtaggtttgggaactgctaccttggtgacagcttgagtctttcctttagtgaagtgcagcacaattccacgtgcacggtgaccttc

SEQ ID NO: 202444 - DNA, 120 bp, Artificial Sequence
  ENSG00000114503_31 (sequence is synthesized)
tcttgattagggtgccttggaatgtacagaacctaacttgaatatacagcactggtttcttggataagaagtgtacagtgatctaaacttgcaaaccaaaatacagagatgatgggacca

SEQ ID NO: 202445 - DNA, 120 bp, Artificial Sequence
  ENSG00000114503_32 (sequence is synthesized)
aaaattatcaacaggaatgtccaagaaatatgatcagtgtagccatggatacgtgtcatatttgactctatgtgcttccaaaccaatcgcaaacaggcctgggcaagctgaattactgtc

SEQ ID NO: 202446 - DNA, 120 bp, Artificial Sequence
  ENSG00000114503_33 (sequence is synthesized)
tttgaactccatctggttggattagctcttgtactttttaacaactcagcttcatttacatgttgttcccctatttccagaaatgtttggaaaaatgctagtgttccttaatacttaaga

SEQ ID NO: 202447 - DNA, 120 bp, Artificial Sequence
  ENSG00000114503_34 (sequence is synthesized)
ttggcaatttgtatttactcttttgtaaataactttgtgtctataaccttggcttgaagtggatctgaaaaccacccaacggtttgggtgaattttttttttaaaccgtgaaatggtatg

SEQ ID NO: 202448 - DNA, 120 bp, Artificial Sequence
  ENSG00000114503_35 (sequence is synthesized)
ttctgtacgtttctaacaagcaaccattcttgaacttctgctagggctaggtatcttccacctgcaggaacatctaaaatgaaagcaaaacgcactgaagtgagctgaagtgcatatgtc

SEQ ID NO: 202449 - DNA, 120 bp, Artificial Sequence
  ENSG00000114503_36 (sequence is synthesized)
ctgcttgaaatgttcacattgtggcatctgaacaggtttcactgtttgtctaacatgtttgtgggaggcatatttgttacaccattcttttccatactgtaactctggattctttccatt

SEQ ID NO: 202450 - DNA, 120 bp, Artificial Sequence
  ENSG00000114503_37 (sequence is synthesized)
actccgccctcggggaagcttcggagtggggaggtggacccgccaagctcggcactttgagggtgttcggatgtaaagatcggagaattgctggatttcagaagagggaaatttttagtc

SEQ ID NO: 202451 - DNA, 120 bp, Artificial Sequence
  ENSG00000114503_38 (sequence is synthesized)
agcacttccgggtgagggaggccgggccgcgagacgggaaggccctgggcaagaacgctgagaaacgagggagagggaagacagtttctgcgctctgcgagctcataatcccctgtagtg

SEQ ID NO: 202452 - DNA, 120 bp, Artificial Sequence
  ENSG00000114503_39 (sequence is synthesized)
gctatggaaaactggcacagaaccataaaacaacataactcagatttctacaggagacagtggttttattcggattgtcttctgtaataggtttcaataaagctggatgaacttatcgtt

SEQ ID NO: 202453 - DNA, 120 bp, Artificial Sequence
  ENSG00000114503_40 (sequence is synthesized)
caaagtagacttttcagtatcagcggaggtagggatggaatacggttgggggttggcggggcgggactcattaacccaattatttagtaaacgtttatcgagtgctgtcgccaaatcctt

SEQ ID NO: 202454 - DNA, 120 bp, Artificial Sequence
  ENSG00000114520_0 (sequence is synthesized)
gcactgggttcgccgcgccgaactgcagccatggagcaggcacctccggaccccgagcggcagctccagccggcgcccttggagccgctgggctccccagacgctgggctgggggctgcg

SEQ ID NO: 202455 - DNA, 120 bp, Artificial Sequence
  ENSG00000114520_1 (sequence is synthesized)
gtcggcaaggaagcggagggggccggagaagagagctctggggtcgacacgatgacacacaataatttttggttgaagaagatagaaatcagtgtttcagaagcagaaaaacgaactgga

SEQ ID NO: 202456 - DNA, 120 bp, Artificial Sequence
  ENSG00000114520_2 (sequence is synthesized)
agaaatgccatgaacatgcaagaaacatatactgcttacctcattgaaacaaggtcagttgaacataccgatggtcagagtgtcctaacagactcactatggcggcgatatagtgaattt

SEQ ID NO: 202457 - DNA, 120 bp, Artificial Sequence
  ENSG00000114520_3 (sequence is synthesized)
gagttgttgagaagctaccttttagtttactatccacatattgttgtgccacctctgccagaaaaacgggcagaatttgtttggcataaactctctgctgacaacatggatccagatttt

SEQ ID NO: 202458 - DNA, 120 bp, Artificial Sequence
  ENSG00000114520_4 (sequence is synthesized)
gtggagaggcgacggattggtttagaaaactttctcttgaggattgcttcacatcccatcctttgtagagacaaaatcttctatctgtttttaacacaggaaggtaactggaaggagact

SEQ ID NO: 202459 - DNA, 120 bp, Artificial Sequence
  ENSG00000114520_5 (sequence is synthesized)
gtgaatgaaactgggtttcagctgaaggcagactccaggttaaaagcgcttaatgcaacattcagagtgaaaaacccagacaagagatttactgaccttaagcactatagtgatgaactg

SEQ ID NO: 202460 - DNA, 120 bp, Artificial Sequence
  ENSG00000114520_6 (sequence is synthesized)
cagtctgtcatctcacatcttcttcgagtcagagctagagtagcagatcgactctatggtgtatataaagtacatgggaattatggtcgagttttcagtgaatggagtgccatagaaaaa

SEQ ID NO: 202461 - DNA, 120 bp, Artificial Sequence
  ENSG00000114520_7 (sequence is synthesized)
gaaatgggtgatggactgcagagtgctggtcatcatatggatgtgtatgcatcttctattgatgatattttggaagatgaagaacattatgcagatcagttaaaagagtatcttttttat

SEQ ID NO: 202462 - DNA, 120 bp, Artificial Sequence
  ENSG00000114520_8 (sequence is synthesized)
gcagaagcattgcgggctgtgtgcaggaaacatgaacttatgcagtatgacttggagatggctgctcaggacttagcatccaagaagcagcagtgtgaggaactggtaactgggactgtg

SEQ ID NO: 202463 - DNA, 120 bp, Artificial Sequence
  ENSG00000114520_9 (sequence is synthesized)
agaacattctctttgaagggaatgactaccaagctctttggtcaagaaactccagagcagagagaagccagaataaaggtgctagaagaacaaataaatgaaggagaacaacagctaaag

SEQ ID NO: 202464 - DNA, 120 bp, Artificial Sequence
  ENSG00000114520_10 (sequence is synthesized)
tgcagatcagtatgtgcaaaaagggaattcaagtttggaccaatgctaaggaatgctttagcaagatgtaatcctgtgaattgaatttctcttcaatcaaagtgccccaaaacagaagca

SEQ ID NO: 202465 - DNA, 120 bp, Artificial Sequence
  ENSG00000114520_11 (sequence is synthesized)
caagtaaataaaagaaatttaagtcactacctagtatacataaacatatacaataagttaaataaattcagctttctttaacttaattgtggtcgtgttaatgtagcacaaaaaatatat

SEQ ID NO: 202466 - DNA, 120 bp, Artificial Sequence
  ENSG00000114520_12 (sequence is synthesized)
tttaatgaagattaaatattataatttgaggttttggggactggtgctgattccaaaaagttaatttaataatatataccaacagattgtttgtcacgcttctgaaccaatgactgaatg

SEQ ID NO: 202467 - DNA, 120 bp, Artificial Sequence
  ENSG00000114520_13 (sequence is synthesized)
tcaagatgttcgttaatttctagatgtttgtttcaagaccagctgtttcagatctattaatgtagggaatttttccctaagattgaattcctatatttacttggtaagatccactaatct

SEQ ID NO: 202468 - DNA, 120 bp, Artificial Sequence
  ENSG00000114520_14 (sequence is synthesized)
gttatagggagttgttttctcttgccttatagttgagctatttggtttgacaaagctcagcagaaacttgatgtgaaaaatctacgattttcttctacattcattgatgccccttgtaat

SEQ ID NO: 202469 - DNA, 120 bp, Artificial Sequence
  ENSG00000114520_15 (sequence is synthesized)
gtttgcatacactagaaaatgccttcaatttgtgttttaccagaattttgatactggtcagaaattttatactgccaacaaagaagactcaacttctcagatctataatgggatacattg

SEQ ID NO: 202470 - DNA, 120 bp, Artificial Sequence
  ENSG00000114520_16 (sequence is synthesized)
tcatcctctagcaactcctatatagaaagttttaactgaatatgttacatataagaattaaattcttctcaaataattcttaacctcagtaatgagcctaaatttactctgcttggctct

SEQ ID NO: 202471 - DNA, 120 bp, Artificial Sequence
  ENSG00000114520_17 (sequence is synthesized)
ctacacatggcatttcagggtataagatgtagcatttcaatgtgtaagatatatgtactaaacatatgtgttgctatcttcatcattaacatccttcttttctattgcttggctgtaatt

SEQ ID NO: 202472 - DNA, 120 bp, Artificial Sequence
  ENSG00000114520_18 (sequence is synthesized)
tttgtaaagataaattatattgtttttttgtatgtgtgtttgtagtatatgttcagaaggcaagcatcttcattttgctagctttgcagaatcttaaaatgtgtactcgttatttctaat

SEQ ID NO: 202473 - DNA, 120 bp, Artificial Sequence
  ENSG00000114520_19 (sequence is synthesized)
gatgtaaaaaaaaatccctagtcctgtttagcatttgacttttttatatgttttaaatgttgctggatttttgtgctgtttgccaaacttatacaataaataaatgaaatattgtgctga

SEQ ID NO: 202474 - DNA, 120 bp, Artificial Sequence
  ENSG00000114520_20 (sequence is synthesized)
gatattgaacgcttcaaagaacaaaagaaccgagacttaaaggaggccctcataagctatgcagtcatgcagatcagtatgtgcaaaaaggagagacggtttcaccatgttggccaggct

SEQ ID NO: 202475 - DNA, 78 bp, Artificial Sequence
  ENSG00000114520_21 (sequence is synthesized)
ctggcccgagaccttctttcaaaaagaaaagagaagaaaaagaaaattgttcaaaaccttaataaatgacacacttta

SEQ ID NO: 202476 - DNA, 120 bp, Artificial Sequence
  ENSG00000114529_0 (sequence is synthesized)
gctcgactcgccggcgctgtggcctcccgcggagccgctcagactttccctgccggcacatggacctggcccaaccctcacagccagtagacgagctggagctctcggtgctcgagcggc

SEQ ID NO: 202477 - DNA, 120 bp, Artificial Sequence
  ENSG00000114529_1 (sequence is synthesized)
agccagaagagaacacgcctctcaatggtgccgacaaggtcttcccttctttggacgaggaggtccccccggccgaggctaacaaggaaagcccctggagctcctgtaataagaatgtgg

SEQ ID NO: 202478 - DNA, 120 bp, Artificial Sequence
  ENSG00000114529_2 (sequence is synthesized)
ttggaagatgcaaactgtggatgatcatcacctccattttcctaggtgtcattacagtgatcatcataggcttatgtcttgctgcagtaacttatgttgatgaagatgaaaatgaaatac

SEQ ID NO: 202479 - DNA, 120 bp, Artificial Sequence
  ENSG00000114529_3 (sequence is synthesized)
ttgaattatcatcaaacaaaacattcttcatcatgctgaagattccagaggagtgtgttgctgaagaggaattgcctcacctgctcaccgaaaggctcacagatgtgtacagtacatcgc

SEQ ID NO: 202480 - DNA, 120 bp, Artificial Sequence
  ENSG00000114529_4 (sequence is synthesized)
cctctctgggtcgttattttacttcagttgaaatagtggacttcagtggtgaaaatgccacagtaacgtatgacctgcaatttggggttccatcagatgatgaaaattttatgaagtata

SEQ ID NO: 202481 - DNA, 120 bp, Artificial Sequence
  ENSG00000114529_5 (sequence is synthesized)
tgatgagtgaggagttggtgctgggcattttgctacaggatttccgtgatcagaatatacctggttgtgagagtctggggcttgatccaacatccctcttgctctatgaatgaagtgatg

SEQ ID NO: 202482 - DNA, 120 bp, Artificial Sequence
  ENSG00000114529_6 (sequence is synthesized)
gaggctggtctctgtctgaaagcagtgctctaccaagtcctggagatgaagggaattcactctgttttgcagaaaagattctgtggattaatacagaagcaccagcaacaccagaggggt

SEQ ID NO: 202483 - DNA, 120 bp, Artificial Sequence
  ENSG00000114529_7 (sequence is synthesized)
ggagactcctttctctcccgattctacagtctggctctaagcccagtaaaacagctcccgagcactgcttcagctgggtccagtcttgacaaaggcaggaagccagctagggtgggggcg

SEQ ID NO: 202484 - DNA, 120 bp, Artificial Sequence
  ENSG00000114529_8 (sequence is synthesized)
atagggtcagcgggtatgtcccactgttggaggtcactggtattctgtttgtttttgttttgtttcgttttgttttttgagacagggtctcgttctgtcgcttagctggagtgcggtggc

SEQ ID NO: 202485 - DNA, 120 bp, Artificial Sequence
  ENSG00000114529_9 (sequence is synthesized)
cggagaggcaggcagccaggttacgaagactaagccaattattcactgaagtcatcctcctcccccccaccattcgatttgatctacctctaagccaggctgtgaagaaaaggaaggcac

SEQ ID NO: 202486 - DNA, 120 bp, Artificial Sequence
  ENSG00000114529_10 (sequence is synthesized)
tttagaagacctcagcagtgtggttctgtgtctacttccatgacctgtacctgagtatcttagccagccagccttaggaacaccaccaaggttactttgaaatctatgtatatagctagt

SEQ ID NO: 202487 - DNA, 120 bp, Artificial Sequence
  ENSG00000114529_11 (sequence is synthesized)
tacagacgggagctatgtgtttcttcattattttgcagctcctcgttgttcctgtgattcctgaacacctttttggaaatatgggtctctgtgagttttgagcacactactatcactttg

SEQ ID NO: 202488 - DNA, 120 bp, Artificial Sequence
  ENSG00000114529_12 (sequence is synthesized)
gatagtcactccatttatatttttataaacttccattagagaatcattaaggctgtttaatatctgctctggatattacgcattggctttttgttgcctagtgctacaaaccttcctgtg

SEQ ID NO: 202489 - DNA, 120 bp, Artificial Sequence
  ENSG00000114529_13 (sequence is synthesized)
ggactcagtgtcttcaggcaatgattgtgtatcctgttacagatggttgtgatacaagaagaaccactcttctttgaaaataaactcttggaagcttttgccagctatttggggggtagg

SEQ ID NO: 202490 - DNA, 120 bp, Artificial Sequence
  ENSG00000114529_14 (sequence is synthesized)
aggaatattagcaactgtattggttgtctacagatacagaattgcctgttgtgagggaactgattgttttgttgggaaaagaaatttaccaggagaaagagttttgtgctgtattgtgag

SEQ ID NO: 202491 - DNA, 120 bp, Artificial Sequence
  ENSG00000114529_15 (sequence is synthesized)
agatctcgcctctcagttaaatgagccctgggttaaagtcagtgtgaagggcagctgtgtgcgggcacgagccagagtgtctgcctcagactagatttgacttgagttctttatgaccca

SEQ ID NO: 202492 - DNA, 120 bp, Artificial Sequence
  ENSG00000114529_16 (sequence is synthesized)
ggactctggataatgtgaatttgctttcctatttaactagaagatacatgtactatagatcattgtctcattttagtgattgttccttaaactagtgaaactagtggatttctcttcttc

SEQ ID NO: 202493 - DNA, 120 bp, Artificial Sequence
  ENSG00000114529_17 (sequence is synthesized)
ctctttattttctgcatgttaaatgtgaaccttagtgtatttgtattttgtagaaaataatgaaaaattttaatggagaatgatttaaaaacatttacaatacattatttttgcatctgt

SEQ ID NO: 202494 - DNA, 120 bp, Artificial Sequence
  ENSG00000114529_18 (sequence is synthesized)
gaagccgaatcctgaagcactggtgggatttgaataagaagatttgccttcctttacacatgttcgtgtcttcttaggatgaggatgaagatgatactatcaaattcctaatcaggaaaa

SEQ ID NO: 202495 - DNA, 120 bp, Artificial Sequence
  ENSG00000114529_19 (sequence is synthesized)
aagctttctgctgtgttcccagcaaaggaaaaatgtttcctcactctcaattctggtaatttccttggttcccttgtaatgaagaacacgtaagtgttatccccaggaaatcaaggtaca

SEQ ID NO: 202496 - DNA, 120 bp, Artificial Sequence
  ENSG00000114529_20 (sequence is synthesized)
agtgtatggaaattttacaaatcatttttttcaggtatgggttaggcaatatcagtattttactatattctgaatttctccaatttacagtatattgcaattgtttgctcacttgtctat

SEQ ID NO: 202497 - DNA, 120 bp, Artificial Sequence
  ENSG00000114529_21 (sequence is synthesized)
attctacactagaatgtgagcttcacaaagctggggaccatattgatcttgttcatcgtggtatgtatttccagtctatgacacaacatctggcacacagtaaatgggttttcaaaaaat

SEQ ID NO: 202498 - DNA, 120 bp, Artificial Sequence
  ENSG00000114529_22 (sequence is synthesized)
atttgatgaagatatgaatacagaatgaatagccaaggacaggacaaccctggtgcaggaggtcagcaaatctaccaccttgactccaacgatatagttaaataacaggacttctctctc

SEQ ID NO: 202499 - DNA, 120 bp, Artificial Sequence
  ENSG00000114529_23 (sequence is synthesized)
ttattagctgctagactcactccagtggtgggcagctgggcgaaaggccctgaaagttgctcttttctcaaaattcagcctcatgtaaatttaccctgtgacctgccatgggggattagg

SEQ ID NO: 202500 - DNA, 120 bp, Artificial Sequence
  ENSG00000114529_24 (sequence is synthesized)
atgggctggccaggccaggctaggtggcctgattttcccattcagcttctgacctggtcttctgaaagtcagactctggccctcttcattagccagcccaagtccttgcccctgggaatg

SEQ ID NO: 202501 - DNA, 120 bp, Artificial Sequence
  ENSG00000114529_25 (sequence is synthesized)
aggatctggcacatctcccagccgtagtagagtttataagctcaattgtcagccaccttgtaagatcgaagagtatcggcctatgtgacctgtagccagaagagggagctctttgcctat

SEQ ID NO: 202502 - DNA, 120 bp, Artificial Sequence
  ENSG00000114529_26 (sequence is synthesized)
ccttagcaggggcagtggcctgattcacactaatgggactggtgcatctgcaaaacttccccaagtggtgaaaatgccacagtaacgtatgacctgcaatttggggttccatcagatgat

SEQ ID NO: 202503 - DNA, 120 bp, Artificial Sequence
  ENSG00000114529_27 (sequence is synthesized)
gggtggctggctgtgtaggtgttgatcatcattagcgataattagagggcagagctcagggaacaagttatgacacctgcaaactaggggcctctggaaatgggacagaaaagtttctca

SEQ ID NO: 202504 - DNA, 120 bp, Artificial Sequence
  ENSG00000114529_28 (sequence is synthesized)
ctttggggacaaaccagggaagcctgatttgttgctgatacacagggtggtctctgtcaacgttcagaagttctggacccagccaatgtggtgaaaatgccacagtaacgtatgacctgc

SEQ ID NO: 202505 - DNA, 120 bp, Artificial Sequence
  ENSG00000114529_29 (sequence is synthesized)
tcaactacctacatggttgaatgtgaaagccctttataaagtagtatcagttacagtatgtaaaaatgtttggaaaacaccatccaaaaatatctccccccgtgagctttcccatgaagt

SEQ ID NO: 202506 - DNA, 120 bp, Artificial Sequence
  ENSG00000114529_30 (sequence is synthesized)
ttcatcaggaggagcagtggaggagaggctgactgcatcgtgaccttggctgtgatcacctgcttggctgagcattctgacaacctctaagatctatgcatcatcaaagcctttggggcc

SEQ ID NO: 202507 - DNA, 120 bp, Artificial Sequence
  ENSG00000114529_31 (sequence is synthesized)
gaggcacagctgcagctcttcctcttctttaggttaccttcaatgtgcttcagaccgtttgcttacattatctgctttgttgctaaggaaacatcgtaagaaaactactgaatcacacca

SEQ ID NO: 202508 - DNA, 120 bp, Artificial Sequence
  ENSG00000114529_32 (sequence is synthesized)
agttaacaaaccagattcactgaggagaaatgaatgagataagaggagggggatgattttgagagatattctctgaactcctgaggccacagtttttaaatctataaaagaggatgtata

SEQ ID NO: 202509 - DNA, 120 bp, Artificial Sequence
  ENSG00000114529_33 (sequence is synthesized)
tactgcttacacatggagttataagaataagctgaggttaaatatgggcaaaaacgatctgtaagctggctgtttctcctacttgacttttctgcagtttattcttgcatttcaacatgg

SEQ ID NO: 202510 - DNA, 120 bp, Artificial Sequence
  ENSG00000114529_34 (sequence is synthesized)
tggttttggtttgggatgggttcagatagcctccaagaagcaagctagacaaatctctatacccttaggctacgtgtcaggaatttgaggtatctgtctctttcacaatgccttctctgg

SEQ ID NO: 202511 - DNA, 120 bp, Artificial Sequence
  ENSG00000114529_35 (sequence is synthesized)
ctctctggtctacccaacctctcccttgttataatgccgtggcccttctgatttatttcatcatttgaactgtatgccttaaaatatgcccaatgatacccctgaaaatatgtaattctc

SEQ ID NO: 202512 - DNA, 120 bp, Artificial Sequence
  ENSG00000114529_36 (sequence is synthesized)
aacttgaactgaaaaaattcaccctgttgaaaggaatctctgggtctccagcccctaacgcgggcattggtgttagaaaataacaacagtgcttgttttttaattgctcctctttcaaaa

SEQ ID NO: 202513 - DNA, 120 bp, Artificial Sequence
  ENSG00000114529_37 (sequence is synthesized)
tctcctcctgaaaccatgtgaaaagcacagataactttacaggccacagaaaaactgaccttgtcagcccttaggattcttggatcctggaacattagttccatattttaattattcctt

SEQ ID NO: 202514 - DNA, 120 bp, Artificial Sequence
  ENSG00000114529_38 (sequence is synthesized)
tccttagagagaattctttagggctggacatttgaaaggtctgttcaaaaagaattaatgaggtggtctttgtttaacaacatcagggcaatcacaatggtgtctccacaaactttctaa

SEQ ID NO: 202515 - DNA, 120 bp, Artificial Sequence
  ENSG00000114529_39 (sequence is synthesized)
aaattgtcgtaacatggggcatgtggtcacttcagaaatagacacctatagcttaaaataaaatggctagggtggaggttgagcacaaaggtacctgagatagacaaacaaaatgacaac

SEQ ID NO: 202516 - DNA, 120 bp, Artificial Sequence
  ENSG00000114529_40 (sequence is synthesized)
aggaaataagaccttttattttataacagggcataacagggactagcagggtcttagttcctgttgctaggagttacattaggcttctagcaaagtagcatatctcctgtccaaagtttt

SEQ ID NO: 202517 - DNA, 120 bp, Artificial Sequence
  ENSG00000114529_41 (sequence is synthesized)
caagcattttatcttttgtcctgtcttcacatttgttactattgcaactgctactggtctaaacagggccctctctcactgggatgtgaagtccagggcttgacatacttcgttctcctt

SEQ ID NO: 202518 - DNA, 120 bp, Artificial Sequence
  ENSG00000114529_42 (sequence is synthesized)
gggcaaggtctggggggtgtttggttgattttgctctcacctggatgttctctgtttggggctttgcattctcacattccaaggcatctcttgagtgttctgctgccgcctgaaactcaa

SEQ ID NO: 202519 - DNA, 120 bp, Artificial Sequence
  ENSG00000114529_43 (sequence is synthesized)
catatcagaaacaggctaagtatttcctaaacaggcctgtcacttcttttcataatttttccgactttcctcatttctgctatttgtgtgtaactcagaaattgactggttgccctcaca

SEQ ID NO: 202520 - DNA, 120 bp, Artificial Sequence
  ENSG00000114529_44 (sequence is synthesized)
catgttaatactgtttcctcaagcacatgtcgcaagctacctttgatctgacatgctctccattgccacagcaacagcccactgatgttctccaacctccatgaacaagtgatcctaaat

SEQ ID NO: 202521 - DNA, 120 bp, Artificial Sequence
  ENSG00000114529_45 (sequence is synthesized)
catctgatcccaaatatccagggatcctcgtcatgacccttgagagtatccgtgtccagagagaggcctgaggtcctcagctaccatctctttggtgcagttccaggagctatgcacaag

SEQ ID NO: 202522 - DNA, 120 bp, Artificial Sequence
  ENSG00000114529_46 (sequence is synthesized)
taatggggaaaggtactggctttgtcttgtgtaaatcacaccatctttcacagaaagcatggaggcccagaacaagggacagaaggagaagaaaaggattgaataaagaaaataaattgg

SEQ ID NO: 202523 - DNA, 120 bp, Artificial Sequence
  ENSG00000114529_47 (sequence is synthesized)
cttcagttgaaatagtggacttcaggtaagagtgtggaacattacattttgctctctttctctggaaagagatccccccaccccacccttcgtcatttacctagcagggattcccagagc

SEQ ID NO: 202524 - DNA, 120 bp, Artificial Sequence
  ENSG00000114529_48 (sequence is synthesized)
ctcagagcatgaagggaacctgtaatagaatcacagaatgtcagtgctgggaaggtcttttacaccaacaggctcaactcccttattttacaaatgagaaaaaggaagcccagattaatg

SEQ ID NO: 202525 - DNA, 120 bp, Artificial Sequence
  ENSG00000114541_0 (sequence is synthesized)
agcagaagccggcgtcgggagcccaggcgggcaggccgctggggtcggggctgcacgtacgagagccgggacgcccgggttcagagcgaaggaggaggcatggcttcggtgttcatgtgt

SEQ ID NO: 202526 - DNA, 120 bp, Artificial Sequence
  ENSG00000114541_1 (sequence is synthesized)
ggcgtggaggacctgctgttcagcggcagccgcttcgtatggaacttgaccgtgtccacgctgcggagatggtacacggagaggctgcgggcttgccaccaggtgctgcggacgtggtgc

SEQ ID NO: 202527 - DNA, 120 bp, Artificial Sequence
  ENSG00000114541_2 (sequence is synthesized)
gggctgcaggacgtgtaccagatgacagaaggcaggcactgccaggtgcacctcctggatgataggagactggagctgctggttcagcccaaacttctagcaagagagttgctggaccta

SEQ ID NO: 202528 - DNA, 120 bp, Artificial Sequence
  ENSG00000114541_3 (sequence is synthesized)
gtggcttcacatttcaacctgaaagaaaaggagtattttggaataacattcatagatgacacaggtcagcagaactggctgcagttagatcaccgagttcttgaccacgatttgcccaag

SEQ ID NO: 202529 - DNA, 120 bp, Artificial Sequence
  ENSG00000114541_4 (sequence is synthesized)
aaaccaggcccaaccattttgcactttgctgtgaggttttacattgagagcatatcgtttttaaaggataaaaccaccgtggagctgtttttcctgaatgcaaaggcctgtgtgcacaag

SEQ ID NO: 202530 - DNA, 120 bp, Artificial Sequence
  ENSG00000114541_5 (sequence is synthesized)
gggcaaatcgaagtagagagcgaaaccatcttcaagttagcagcgtttattttacaggaagccaagggagattataccagtgatgaaaatgccaggaaagatttaaagacattaccagcc

SEQ ID NO: 202531 - DNA, 120 bp, Artificial Sequence
  ENSG00000114541_6 (sequence is synthesized)
tttccaaccaaaactcttcaggagcatccatcccttgcctactgtgaggacagggtaattgagcattatttgaaaatcaaaggtctcactcgaggtcaagctgtggttcagtatatgaaa

SEQ ID NO: 202532 - DNA, 120 bp, Artificial Sequence
  ENSG00000114541_7 (sequence is synthesized)
atagtagaagctctaccgacttacggtgtccattattatgcagtaaaggataagcaaggacttccttggtggcttggaataagctataagggaattggccaatatgatatacaagacaag

SEQ ID NO: 202533 - DNA, 120 bp, Artificial Sequence
  ENSG00000114541_8 (sequence is synthesized)
gtgaagcctcggaagttattccaatggaaacagctggagaacttatatttccgtgagaaaaaatttgctgttgaagttcatgatccacgaaggatttcagtttcaagaagaacctttggg

SEQ ID NO: 202534 - DNA, 120 bp, Artificial Sequence
  ENSG00000114541_9 (sequence is synthesized)
caaagtggcttgtttgtgcaaacatggtatgctaactcttctctcatcaagtccatttgggtaatggcaattagtcagcatcagttttacttggaccggaagcaaagcaaagcaaaaatt

SEQ ID NO: 202535 - DNA, 120 bp, Artificial Sequence
  ENSG00000114541_10 (sequence is synthesized)
ccttcagccaggagtttagatgagattgcaatggatttgacagagacaggaacacaaagggcctccaagctggtgacactggagacgaaaagtcagttcatcatggcaagtaatggcagt

SEQ ID NO: 202536 - DNA, 120 bp, Artificial Sequence
  ENSG00000114541_11 (sequence is synthesized)
ttaatctcctcaggttctcaagactcagaagttagtgaagagcaaaagagagaaaaaatccttgaactaaagaagaaggagaaactattacaagaaaaacttctgaaaaaagttgaggag

SEQ ID NO: 202537 - DNA, 120 bp, Artificial Sequence
  ENSG00000114541_12 (sequence is synthesized)
cttaagaagatctgtctgcgggaggctgagctcacaggcaaaatgccaaaggagtatcccctgaacataggcgagaagcctcctcaggtcagaagacgtgtgggtactgcgttcaaatta

SEQ ID NO: 202538 - DNA, 120 bp, Artificial Sequence
  ENSG00000114541_13 (sequence is synthesized)
gatgacaacttgctgccgagtgaagaagatcctgctttgcaagaactggagagtaattttctaatacaacaaaagctggtggaagctgcaaagaaacttgccaatgagccagacctttgt

SEQ ID NO: 202539 - DNA, 120 bp, Artificial Sequence
  ENSG00000114541_14 (sequence is synthesized)
aaaactgtgaagaaaaagcgaaagcaagattacacagatgcgatgaaaaagcttcaggagattgaaaatgcaataaacgaataccgaattaggtgtggaaagaaacccagccagaaagca

SEQ ID NO: 202540 - DNA, 120 bp, Artificial Sequence
  ENSG00000114541_15 (sequence is synthesized)
acagtgttaccagaagacataatcccctcagagagtagctctttgtctgacaccaccacctatgatgatcccagtgatgccttcacttttcctgggcagcgatcaagttcagtacctcat

SEQ ID NO: 202541 - DNA, 120 bp, Artificial Sequence
  ENSG00000114541_16 (sequence is synthesized)
tctccaagaattcttccccccaagtctcttggtattgagcgaatccatttcagaaagtcgtccatcaatgaacagtttgtggataccaggcagtccagagaaatgctgtccacacacagc

SEQ ID NO: 202542 - DNA, 120 bp, Artificial Sequence
  ENSG00000114541_17 (sequence is synthesized)
agcccttacaaaactctggagaggcggccccagggaggacgaagcatgcccaccacgccagttcttacccgaaacgcctacagcagcagccacttggaacccgaatcttcatctcagcac

SEQ ID NO: 202543 - DNA, 120 bp, Artificial Sequence
  ENSG00000114541_18 (sequence is synthesized)
tgccgccagcggagtggaagcctggagtcccagtcccacctgctctccgagatggacagcgataagccatttttctccctctccaaatcccaaagaagcagcagcacagaaatcctcgat

SEQ ID NO: 202544 - DNA, 120 bp, Artificial Sequence
  ENSG00000114541_19 (sequence is synthesized)
gacgggtcttcttatacaagccaatcaagcacagagtattactgtgtgacaccagttaccggcccctattacaccacccagaccctggacactcgcaccaggggtcggaggaggtcaaag

SEQ ID NO: 202545 - DNA, 120 bp, Artificial Sequence
  ENSG00000114541_20 (sequence is synthesized)
aaacagaatgtttctacttcaaattcaggaagcatgcccaacctagcacaaaaggatagtttgaggaatggtgtttactcaaagagtcaggagccaccgtcttccagttactacattgcc

SEQ ID NO: 202546 - DNA, 120 bp, Artificial Sequence
  ENSG00000114541_21 (sequence is synthesized)
gggtacacaccctatgcagagtgtgacttttattacagtggtggttatgtctatgagaatgacaccgagggacagtatagtgtcaacccttcctaccggtcctcagcccactatggatat

SEQ ID NO: 202547 - DNA, 120 bp, Artificial Sequence
  ENSG00000114541_22 (sequence is synthesized)
gagcgccagagggactacagcagatcctttcacgaagatgaggtcgaccgggtaccccataacccatatgcaactctccggctgccaaggaaggctgctgcaaaatcggagcacatcacc

SEQ ID NO: 202548 - DNA, 120 bp, Artificial Sequence
  ENSG00000114541_23 (sequence is synthesized)
aaaaacatccacaaggccttagttgccgagcacttgcgtggctggtaccagcgggcctctgggcagaaggatcagggacacagcccgcagaccagctttgactcagacaggggatcacag

SEQ ID NO: 202549 - DNA, 120 bp, Artificial Sequence
  ENSG00000114541_24 (sequence is synthesized)
agatgcctggggtttgcggggctgcaagtaccttgttctccaagcagtcgtgcatcctcgtactcttcagtgtcttctacaaatgcttctgggaactggaggacccagttaaccataggg

SEQ ID NO: 202550 - DNA, 120 bp, Artificial Sequence
  ENSG00000114541_25 (sequence is synthesized)
ctgtcggattacgagactccagcacattcttcttacaccagctgctatggcaatgtctataatcctttaccctctccaagcagacaatacacagaaatcagtcaactggatggtacagat

SEQ ID NO: 202551 - DNA, 120 bp, Artificial Sequence
  ENSG00000114541_26 (sequence is synthesized)
tcttttggcatgaagattcaaagcctggaacattagtctgaactgcagttggacctcctgaccaagcactgcgttctcacactagtgtgccttgcaaattgtatttgtcttccgagagga

SEQ ID NO: 202552 - DNA, 120 bp, Artificial Sequence
  ENSG00000114541_27 (sequence is synthesized)
tgttcgttttagaaacctaaagacatcaaaggttgaagagaagacttagttgccctggaagtgaatcagtgaatcacacaccaagccccacaaagcccctaaaggaggatttggcctttc

SEQ ID NO: 202553 - DNA, 120 bp, Artificial Sequence
  ENSG00000114541_28 (sequence is synthesized)
aaactctaggcactaacgtaactgtagggtctgcccacatgttgaagtattgccaagagaggactcagtgtgaagccttcatcaatagcaagcactttttaagggagtaaaagttgttaa

SEQ ID NO: 202554 - DNA, 120 bp, Artificial Sequence
  ENSG00000114541_29 (sequence is synthesized)
aggcaaacctcaaaaacatgaaagggcattcaggatgtcccatggcaataagaacaggggaaatctcagagcacaattcagcaggatgagagaaggggaaccagaagctccggagtcatt

SEQ ID NO: 202555 - DNA, 120 bp, Artificial Sequence
  ENSG00000114541_30 (sequence is synthesized)
gctcacttcagagtttgaattcgtgagctgacaaagagtaacatgctctttctacacagacatggacaatttagacagtattggaaaattacttgaagctggattttcatgaagttctga

SEQ ID NO: 202556 - DNA, 120 bp, Artificial Sequence
  ENSG00000114541_31 (sequence is synthesized)
atgagtgtaaatgttttttaggatactataaagagtgatgtttttcataagcaccataaaatgggttctggaaaaactgattaccttagcatcctgtaatataacttatggtagcagatt

SEQ ID NO: 202557 - DNA, 120 bp, Artificial Sequence
  ENSG00000114541_32 (sequence is synthesized)
ggggaaaatgaagcagcccactgaataattgacaaagtctgcttggagaacattctaaggtacaatatcatggagctcctttttcctttctccactaattgcgtgatgagctattgttct

SEQ ID NO: 202558 - DNA, 120 bp, Artificial Sequence
  ENSG00000114541_33 (sequence is synthesized)
ggctgttaattctccaactcggctgtcatttgaagtggcagacttaatatggaaagtttttataattatgagtttgaaaaagcattttaagatgatacagaaagtatccaaaacaacaga

SEQ ID NO: 202559 - DNA, 120 bp, Artificial Sequence
  ENSG00000114541_34 (sequence is synthesized)
aaaaaaaagccacgtcattttagatgaattgcgtgccttaaaatggtgaacgttagaaaattaaacaagtctggattccacaagtagttccaagtcaccaagtgacaaaaacaaggttaa

SEQ ID NO: 202560 - DNA, 120 bp, Artificial Sequence
  ENSG00000114541_35 (sequence is synthesized)
cattaaaaaagaaaaacaacaacaacgacaaaaagctccaagctgcagtggatttaattatgaggctaaaactacctcatactttccttggaagaactaattagctatggtttattgtag

SEQ ID NO: 202561 - DNA, 120 bp, Artificial Sequence
  ENSG00000114541_36 (sequence is synthesized)
ggttttgtttgtttgttttttaaagcaaatgatttccatattccagattgatcttttttgtcatctttgcttcaaaattacataaaaggtgctcctttcccccttcttttatacaagttt

SEQ ID NO: 202562 - DNA, 120 bp, Artificial Sequence
  ENSG00000114541_37 (sequence is synthesized)
cttgttcatattgtgaatagaaaagtttctgaacaacttttttggaacattttctatctatattccaaagcatgtaatatatacataaaaacgatttgttaaactggtccttagtcattt

SEQ ID NO: 202563 - DNA, 120 bp, Artificial Sequence
  ENSG00000114541_38 (sequence is synthesized)
gtataattagaaatgaagtttgggaaaaaattttggaaaaaagacaagcaaaaaaaaataacttattccttttttgcatatttgtatagccttctagaatcagaaataacctttttgcat

SEQ ID NO: 202564 - DNA, 120 bp, Artificial Sequence
  ENSG00000114541_39 (sequence is synthesized)
attcttttattgttctgacttttcaagacctattatttttttacataggtcaataaacaaaaggtgtgctactgaaaatgtttacgttttcttccatttatgtcaggggttcatgtgaag

SEQ ID NO: 202565 - DNA, 120 bp, Artificial Sequence
  ENSG00000114541_40 (sequence is synthesized)
caggtcgcagtgctctacttcaagtaatcatattgggcaaggcttcggatttttatttatagtattaccgtattttattaattccgggatgtacatttttaaatatttacattaaaaaca

SEQ ID NO: 202566 - DNA, 120 bp, Artificial Sequence
  ENSG00000114541_41 (sequence is synthesized)
tggttcatctttttattgatggcatattctacttgaattggcagttttttcttaatagtacattaaaaataatgctgtgtcttacaataaagttgccttagaattgatgaaatgcggtag

SEQ ID NO: 202567 - DNA, 120 bp, Artificial Sequence
  ENSG00000114541_42 (sequence is synthesized)
tttgtctcactgaggatgactggtgagaacttttaggttttttaatcttgggaatgttgtttatttgtagcaagtaatttatactaatttcacagactggcaaacaggtcttctaaattc

SEQ ID NO: 202568 - DNA, 120 bp, Artificial Sequence
  ENSG00000114541_43 (sequence is synthesized)
aagaaattagttctctgacatcctttaatcctacataatgtggagaagggagtggaaatgaaatatatttccatacatgtatcttgcataaaataacatttttctgttcctgaaatagta

SEQ ID NO: 202569 - DNA, 120 bp, Artificial Sequence
  ENSG00000114541_44 (sequence is synthesized)
tggttacacttgcaagcatgccttgaaagggcaaatataacttggctcccacagaggaaaagaaggtatagaaatggaagctcagggccaggcatagcggctcacacctgtaatcccagc

SEQ ID NO: 202570 - DNA, 80 bp, Artificial Sequence
  ENSG00000114541_45 (sequence is synthesized)
agttgggaggatagtgccactgcattccagcctaggcaataacagaccttgtctcaagaaaaaaaaaaaaaaaaaaaaaa

SEQ ID NO: 202571 - DNA, 120 bp, Artificial Sequence
  ENSG00000114541_46 (sequence is synthesized)
aaaaaaaaaaaaaaaagaaagaaatggaagttcagcaatcctactgcacggttttcttcgtctcttttgaaaaacatttctcaaccgcattggtattaaaccaattaaactacgttattt

SEQ ID NO: 202572 - DNA, 120 bp, Artificial Sequence
  ENSG00000114541_47 (sequence is synthesized)
actacgttatttattaaaagccaaaagtgacaaaagtacattattcaacatgtacgtttcctcttttttattacaaaataccatggttaaatgcaaaaccaaaatagtacataacaaaaa

SEQ ID NO: 202573 - DNA, 120 bp, Artificial Sequence
  ENSG00000114541_48 (sequence is synthesized)
cataatcgtgcccattagccgaacactctcagatataatagttaatttattgtatatttgtttggatttttttctatgcatatagtaatttttttaaagtccagcatattacaagtacag

SEQ ID NO: 202574 - DNA, 120 bp, Artificial Sequence
  ENSG00000114541_49 (sequence is synthesized)
ttttacaacatttttttttgtttgttttgttttctgcctaatatatcttgggcctctgtatcaagacatactgatctacctcataaagatatatgtttaacaaggtggatttttaaaatt

SEQ ID NO: 202575 - DNA, 120 bp, Artificial Sequence
  ENSG00000114541_50 (sequence is synthesized)
gcctcaccctactagatgtttatctatttttctatatttgacaaaaattttcaaaattcttccttgtactcacaaaagcttaaatattacaagaaataaagattccggaattgttttaaa

SEQ ID NO: 202576 - DNA, 120 bp, Artificial Sequence
  ENSG00000114541_51 (sequence is synthesized)
attgtaactcttcctgtagaacctgttcatgtccagggtgagtaaactagggtagaaatgtcttcctaaaacagcctccggtgaaattcgtccttggattcaaagcaacttacttcctag

SEQ ID NO: 202577 - DNA, 120 bp, Artificial Sequence
  ENSG00000114541_52 (sequence is synthesized)
gaagtatcaggcaaatcccaactgccctccattttagaaaggtctcttttctgggaaaatctgccactgagaactttgccctcctctccctgatgggaggaaggagtagaattagggagg

SEQ ID NO: 202578 - DNA, 120 bp, Artificial Sequence
  ENSG00000114541_53 (sequence is synthesized)
tgtcactcaggagagttgctgatgtcagtagtgtgtcagccgtgggaggctcagtttgtgaaattgagttacacctaagtgtcttatgaaactcagttcagaactcaccggagctgccgt

SEQ ID NO: 202579 - DNA, 120 bp, Artificial Sequence
  ENSG00000114541_54 (sequence is synthesized)
ctgggaggggggagggcggaagaaccctgaggtttttcctcacatttctgtcccatttttggaacctctggatttaaagaaatgaaaacctcaagtttgtggagattttaagaaatggtt

SEQ ID NO: 202580 - DNA, 120 bp, Artificial Sequence
  ENSG00000114541_55 (sequence is synthesized)
agcgagaggaggcaggcaggacggaaggacgcgagaaaggcggcccggggcacagctgtaagtgtggagcaaagcgaggacgcacggcgagcggcggtggcgggggcgacctgcagaccc

SEQ ID NO: 202581 - DNA, 120 bp, Artificial Sequence
  ENSG00000114541_56 (sequence is synthesized)
gggccgggggatgcggcaggcgctggctgcccagagagcccgggagtcgggctgcgtagctcacgtgctgagctggagcttggacagagaggaagaggaagaagaggaaggcagccgccg

SEQ ID NO: 202582 - DNA, 120 bp, Artificial Sequence
  ENSG00000114541_57 (sequence is synthesized)
ccggggaaggcacagcgcagagtggacttgcaggactggcgcagagccgggtccccaggtcccgcgcggtgcgcagccgagacaataaagtagccgtctacagccccggagcgccgcagg

SEQ ID NO: 202583 - DNA, 120 bp, Artificial Sequence
  ENSG00000114541_58 (sequence is synthesized)
gtggcggagcaggctttgatgagaaatccagaagaaagagtgtatgaaagaaaaagatgacatctatgcatagcaaacaaaatctgaagattattacagtaaaaacaaaagaaaggcaag

SEQ ID NO: 202584 - DNA, 120 bp, Artificial Sequence
  ENSG00000114541_59 (sequence is synthesized)
attcctgcgatctgttaggacttgtaaacataccagagccaagtcctctgaacttcgcgaactgatttggtgtgtttgctggtacccagacggctgcgactagaggctgggcctttcggg

SEQ ID NO: 202585 - DNA, 120 bp, Artificial Sequence
  ENSG00000114541_60 (sequence is synthesized)
aagaaaaggagtattttggaataacattcatagatgacaccccaatttgcctacattttatgcagcccgatacattatcagaggaatccttccactttctgcagataatttccaaagagc

SEQ ID NO: 202586 - DNA, 120 bp, Artificial Sequence
  ENSG00000114541_61 (sequence is synthesized)
tgagttctctctcccactttgacagccctgattttgcaactgagtgtagataactttgagcacttcagaatctcctcctacagagacagtagaagtctaaaacggtgtattcagtgacat

SEQ ID NO: 202587 - DNA, 120 bp, Artificial Sequence
  ENSG00000114541_62 (sequence is synthesized)
tcacaaccaggaataagagagggagggggacctcagtggtgattttatgctaaggattatggataacaccatccccccattttacaaatgaagaaactggggctcaaaaagcttaattaa

SEQ ID NO: 202588 - DNA, 120 bp, Artificial Sequence
  ENSG00000114541_63 (sequence is synthesized)
atgtctaaggccactgaggcagcaattaaagaggatgtgaagccagtctgctttgtcttcttctggagcctctccttgaggctgacacacctgatcatagccccattatcttaagagtgt

SEQ ID NO: 202589 - DNA, 120 bp, Artificial Sequence
  ENSG00000114541_64 (sequence is synthesized)
tagccatatccagtggccagcacactctagacacttctgttattgtagagagacctgttagagatggatgcaagagatttaccctttttcagccttgcctctgctgtcttggggaagtgg

SEQ ID NO: 202590 - DNA, 120 bp, Artificial Sequence
  ENSG00000114541_65 (sequence is synthesized)
actggcttgtagttggagaaaatgcaagcacatgcgcgcacacacacgcgcgcgcacacacacacacaccgcacaagtgcttaatacgtgtgtcttttgtcttaagcactctcttcagtt

SEQ ID NO: 202591 - DNA, 120 bp, Artificial Sequence
  ENSG00000114541_66 (sequence is synthesized)
gtatgacacagttactatacaaataacgctgctatcaacatttgtgtacaagtttttatatgaacatatgttttcatttctcttgggtgtatacctaggaatggaattgctgggtcaaat

SEQ ID NO: 202592 - DNA, 120 bp, Artificial Sequence
  ENSG00000114541_67 (sequence is synthesized)
ggtaactatctttaaccctctgaggaatggcaaggctgcttttcaaagtgctgcaccattttacatcccaagcagcagtatatgtggttccaatgccgacacatcctcaccgacacttgt

SEQ ID NO: 202593 - DNA, 120 bp, Artificial Sequence
  ENSG00000114541_68 (sequence is synthesized)
tatttttagttttgtgtgcatgtatagtttatgccatcctagtgggttgaagtggtaccttcttgtggttttgatttgcacttccctcatgactaatgatggctgagcatcttttcatgt

SEQ ID NO: 202594 - DNA, 120 bp, Artificial Sequence
  ENSG00000114541_69 (sequence is synthesized)
gctgcttagctattcctatatctttagtagagaaatgtctattcagatcttttgctcatttaaaatgttggtgttcttggtcatttaaaaaaaaaaaaaaaagccaaattaccaacatga

SEQ ID NO: 202595 - DNA, 120 bp, Artificial Sequence
  ENSG00000114541_70 (sequence is synthesized)
actgaagtcaggatgtgggttctcaaatatcttaggagaaatcccgcccccctccgcccgcccccaactgccagacagagtcttactctgtcacccagactgcagtgcagtggcgcaatc

SEQ ID NO: 202596 - DNA, 60 bp, Artificial Sequence
  ENSG00000114541_71 (sequence is synthesized)
ctcactgcaacctacacctcccaggttcaggtgatggtacaggcatgcaccaccacgcca

SEQ ID NO: 202597 - DNA, 120 bp, Artificial Sequence
  ENSG00000114541_72 (sequence is synthesized)
tcctgacctcaggtgatccgcccgtctccgcctcccaaagtgctgagccatggcacccggccttaagagaaattcttaatcagtccttagtgggtacttttcagtcccgagatggttatg

SEQ ID NO: 202598 - DNA, 120 bp, Artificial Sequence
  ENSG00000114541_73 (sequence is synthesized)
ccttagtgggtacttttcagtcccgagatggttatggatgtttagaggccagagggatgggaggaaatacctgtgataaaaaggtgacctgaagagataagccaaattcctacaaagaac

SEQ ID NO: 202599 - DNA, 120 bp, Artificial Sequence
  ENSG00000114541_74 (sequence is synthesized)
gaacttgaccgtgtccacgctgcggagatggtacacggagaggctgcgggcttgccaccaggtgctgcggacgtggtgcgggctgcaggacgtgtaccagataagtaccagtgcaaaagc

SEQ ID NO: 202600 - DNA, 120 bp, Artificial Sequence
  ENSG00000114541_75 (sequence is synthesized)
agggcttcccgtgccccgggagcatcgagggccagcttggtggagcttagcacagcttgctcggcgctgcgagcgggcgggggtggacactgggcttctgtgtgccagtcgcagccgttg

SEQ ID NO: 202601 - DNA, 120 bp, Artificial Sequence
  ENSG00000114541_76 (sequence is synthesized)
aaagcatttttgaacctttgttgcacagcttgaaaagcatcaagaacggactctccggactcttcaaatgagtgtttgtttttcacattccatcttttcttggtggagcttgtagcataa

SEQ ID NO: 202602 - DNA, 120 bp, Artificial Sequence
  ENSG00000114541_77 (sequence is synthesized)
aataactttctcattcatcccctacttatgtttattctgaacattatatttttgttgtcccagttggttgttgtggaaaagtctgaatgactcaaatgaggaatcagatctgcagttcta

SEQ ID NO: 202603 - DNA, 120 bp, Artificial Sequence
  ENSG00000114541_78 (sequence is synthesized)
aagccttctcacaaaagatgcaagcacatatatttttgctctctgagatttttttgcgtttaacttccaactatttcaggttttttatatgtttacatgatgggcaatatataagctgct

SEQ ID NO: 202604 - DNA, 120 bp, Artificial Sequence
  ENSG00000114541_79 (sequence is synthesized)
aggtcacgttactgggagagggatagcatttctgagattacgcttgttagggccttgcgcagctctgtgtgcaaagttagtctttcacccctagagggcagtcacggccctcctgaggca

SEQ ID NO: 202605 - DNA, 120 bp, Artificial Sequence
  ENSG00000114541_80 (sequence is synthesized)
ccagtccttcaggtcaccgtagtggttccatctcttcacccatttcactttttgttttgccttctcatgttttgaaaggctttgctaaataagctttgtttaccaagaaataacagatag

SEQ ID NO: 202606 - DNA, 120 bp, Artificial Sequence
  ENSG00000114541_81 (sequence is synthesized)
acaccccccactttcccctgcaatggtatgatctgcatttgatcgtaaactggaggtgccaagctgtgacagcttcctcaacttcagagccatttgctacaatctaggacagccccatgt

SEQ ID NO: 202607 - DNA, 80 bp, Artificial Sequence
  ENSG00000114544_0 (sequence is synthesized)
cggctcccagccccccgggcccccggcggggctctgcgctgccggagcttgggcgtctgctgctgtcccggagcgccaag

SEQ ID NO: 202608 - DNA, 120 bp, Artificial Sequence
  ENSG00000114544_1 (sequence is synthesized)
ccttcccgcttcctgcctgagccgcaggcccgcccctgcgtcctccgcccgcctctttcccgccgccgcctgggaggggacccgggctgccaggcgcccagctgtgcccagatggatggg

SEQ ID NO: 202609 - DNA, 120 bp, Artificial Sequence
  ENSG00000114544_2 (sequence is synthesized)
tggatgggacagagacccggcagcggaggctggacagctgtggcaagccaggggagctggggcttcctcaccccctcagcacaggaggactccctgtagcctcagaagatggagctctca

SEQ ID NO: 202610 - DNA, 120 bp, Artificial Sequence
  ENSG00000114544_3 (sequence is synthesized)
gggcccctgagagccaaagcgtgacccccaagccactggagactgagcctagcagggagaccacctggtccataggccttcaggtgaccgtgcccttcatgtttgcaggcctgggactgt

SEQ ID NO: 202611 - DNA, 120 bp, Artificial Sequence
  ENSG00000114544_4 (sequence is synthesized)
cctgggccggcatgcttctggactatttccagcactggcctgtgtttgtggaggtgaaagaccttttgacattggtgccgcccctggtgggcctgaaggggaacctggagatgacactgg

SEQ ID NO: 202612 - DNA, 120 bp, Artificial Sequence
  ENSG00000114544_5 (sequence is synthesized)
catccagactctccacagctgccaacactggacaaattgatgacccccaggagcagcacagagtcatcagcagcaacctggccctcatccaggtgcaggccactgtcgtggggctcttgg

SEQ ID NO: 202613 - DNA, 120 bp, Artificial Sequence
  ENSG00000114544_6 (sequence is synthesized)
ctgctgtggctgcgctgctgttgggcgtggtgtctcgagaggaagtggatgtcgccaaggtggagttgctgtgtgccagcagtgtcctcactgccttccttgcagcctttgccctggggg

SEQ ID NO: 202614 - DNA, 120 bp, Artificial Sequence
  ENSG00000114544_7 (sequence is synthesized)
ttagcagcttcttctacagacacaaagatagtcggtatctgacgccgctggtctgcctcagctttgcggctctgaccccagtgtgggtcctcattgccaagcagagcccacccatcgtga

SEQ ID NO: 202615 - DNA, 120 bp, Artificial Sequence
  ENSG00000114544_8 (sequence is synthesized)
agatcctgaagtttggctggttcccaatcatcctggccatggtcatcagcagtttcggaggactcatcttgagcaaaaccgtttctaaacagcagtacaaaggcatggcgatatttaccc

SEQ ID NO: 202616 - DNA, 120 bp, Artificial Sequence
  ENSG00000114544_9 (sequence is synthesized)
ccgtcatatgtggtgttggtggcaatctggtggccattcagaccagccgaatctcaacctacctgcacatgtggagtgcacctggcgtcctgcccctccagatgaagaaattctggccca

SEQ ID NO: 202617 - DNA, 120 bp, Artificial Sequence
  ENSG00000114544_10 (sequence is synthesized)
acccgtgttctactttctgcacgtcagaaatcaattccatgtcagctcgagtcctgctcttgctggtggtcccaggccatctgattttcttctacatcatctacctggtggagggtcagt

SEQ ID NO: 202618 - DNA, 120 bp, Artificial Sequence
  ENSG00000114544_11 (sequence is synthesized)
cagtcataaacagccagacctttgtggtgctctacctgctggcaggcctgatccaggtgacaatcctgctgtacctcgcagaagtgatggttcggctgacttggcaccaggccctggatc

SEQ ID NO: 202619 - DNA, 120 bp, Artificial Sequence
  ENSG00000114544_12 (sequence is synthesized)
ctgacaaccactgcatcccctaccttacagggctgggggacctgctcggttcaagctccgtgggccacactgctgctgtgccaagaaggtgtacagcctccccaggatggggcctcatac

SEQ ID NO: 202620 - DNA, 120 bp, Artificial Sequence
  ENSG00000114544_13 (sequence is synthesized)
aacccttcatctgcactcaacatttaatcgtgtccttgctgtctttttattttcctttttgtttgttagcaaaaacctctatttagatttcaataatcagagaagtgtaaaataaaacag

SEQ ID NO: 202621 - DNA, 120 bp, Artificial Sequence
  ENSG00000114544_14 (sequence is synthesized)
tactgaagagcaaggcagagctgggtggcatctcagaactggcatctggacctccctaactgggccccgctggtcccatttgctcattagaatttcctctcacatcagtgggatacagaa

SEQ ID NO: 202622 - DNA, 120 bp, Artificial Sequence
  ENSG00000114544_15 (sequence is synthesized)
ttcagtttctcccttgccaggtccttgggatggttgacccctgcctctgcagtagccttttgtgagtctgctaaggtagctctcacacacctcggctctggggttgatacctgagcctgc

SEQ ID NO: 202623 - DNA, 120 bp, Artificial Sequence
  ENSG00000114544_16 (sequence is synthesized)
aatagagccctgaaatcaagagcatggcttgagtgtgtgaatatgatgtgtgcacatgcttaatgagcgtgcaagtgtgcacacgtttgtggagaggagggtgttctggcctgagaaggt

SEQ ID NO: 202624 - DNA, 120 bp, Artificial Sequence
  ENSG00000114544_17 (sequence is synthesized)
aaagaagaggcatgtccagtatgctttgcagggtgtgtttgctcttttccatgcccatgcaacccagattggggtggagcaggaaggagctcttttctgttcccaagcctcagaactctt

SEQ ID NO: 202625 - DNA, 120 bp, Artificial Sequence
  ENSG00000114544_18 (sequence is synthesized)
actgtctgaggagagcctgaccttcagggagggacagcagggcctggcagagtctctgtaatgaggccgtgagtcacactggcctttgttcctcactcatctgtgctggccctcagccga

SEQ ID NO: 202626 - DNA, 120 bp, Artificial Sequence
  ENSG00000114544_19 (sequence is synthesized)
ggggctgttggggaactctctgcaggcacagggcacctggtgactgggaagcttctgtttgtgtggacttcttgggaacagcgtcctggtgtgggccaggaggagaggactggagcaccc

SEQ ID NO: 202627 - DNA, 120 bp, Artificial Sequence
  ENSG00000114544_20 (sequence is synthesized)
caggctctgacttcgtgctcctgggatcgtggtgcattgcctggccatggtggtcacccagctgaatctggagttttgctttcagggcaagaagctgcgaggcttcagctgtgagcttac

SEQ ID NO: 202628 - DNA, 120 bp, Artificial Sequence
  ENSG00000114544_21 (sequence is synthesized)
ccggtccccacatggggtcttgcctgaatctttcttcaccatcatgtgccaggtcgtggtgcccattctgctgtccggcttgtgcatgatgacagccggcctggtgatgaacaccattca

SEQ ID NO: 202629 - DNA, 120 bp, Artificial Sequence
  ENSG00000114544_22 (sequence is synthesized)
acaaacagagcttggttttagccagggcgcccactgcagtcacgctggagacctctggtgcagatgggcgagactggacccagctttccagctttcttcccctttccataattctcctga

SEQ ID NO: 202630 - DNA, 120 bp, Artificial Sequence
  ENSG00000114544_23 (sequence is synthesized)
gtgatagtccccttcagagcacagtctgaacagtctgaacaggaaggaggacttcggaggcatggtagccacggaaacgtgagcctcacctcttcagtgctgcccccagaaatccgccac

SEQ ID NO: 202631 - DNA, 120 bp, Artificial Sequence
  ENSG00000114544_24 (sequence is synthesized)
cactgcacgtgcttcccagtgcaccatggacagcaccgctaagctcccagtgcaggactgttcctgggagacacggggccctccgagtatgcatctgacagcctggctgagcgcacctag

SEQ ID NO: 202632 - DNA, 120 bp, Artificial Sequence
  ENSG00000114544_25 (sequence is synthesized)
aaatgcagtgcagtcttagatgtaccccaccttcgctgcccccctcccctgtgccctaactgtgttgatgtcctccagtgctcccagctccctcctgccctccctgtcttccctcacagg

SEQ ID NO: 202633 - DNA, 120 bp, Artificial Sequence
  ENSG00000114544_26 (sequence is synthesized)
cttagtccctaatcaatctcttacctagctgtttccatctggatgtctgcttctcagaggatgccagtaaacacaggaggccatgagctcaccccgaggggttccattgctccgagcatc

SEQ ID NO: 202634 - DNA, 120 bp, Artificial Sequence
  ENSG00000114544_27 (sequence is synthesized)
tttggagcagccctcatgcagcatggggctgtgggctgcctgtctctgtggttcctggtgatttgggagctcgggagccacgggtcactccttagcatcatgtgcacaggtcacaaagtg

SEQ ID NO: 202635 - DNA, 120 bp, Artificial Sequence
  ENSG00000114544_28 (sequence is synthesized)
gagtccaactctcccagccttctcaggcctccagtgtagtgggaagctctgaaagtcagggcagcctggcttcacgtcaaggactttgtggagggaggcaagttaatgagcagcctccct

SEQ ID NO: 202636 - DNA, 120 bp, Artificial Sequence
  ENSG00000114544_29 (sequence is synthesized)
gccacctgccagtccctactcagtgccgcccatccctgtgctgctgtgcctgctcagagccatctggctccctgggatttgagtctgctgtttctcctctctctctctgcaggggtgctg

SEQ ID NO: 202637 - DNA, 120 bp, Artificial Sequence
  ENSG00000114544_30 (sequence is synthesized)
ttactcctcgtggggctgcaggctggagcccgaggttgggcgtctgcggggctgggctcacagctgctccctttgaggctgcagtcggcccttctcgctgtcctcacacagtggagagag

SEQ ID NO: 202638 - DNA, 120 bp, Artificial Sequence
  ENSG00000114544_31 (sequence is synthesized)
gtgggagctctttggagcctctttcataagggccctcatctcattcgtggggcccccatcctcatgacctcacctcccaaaggcgccacctcctcaccttgtgggtgaggatttcaacat

SEQ ID NO: 202639 - DNA, 120 bp, Artificial Sequence
  ENSG00000114544_32 (sequence is synthesized)
gtgggttagggggacagcagtgttgagtgcacagcaccacactcccacatgcacccacgtcctctctccccttcccatgggccccggctctgcttgtgtagctcagattgtcttgttgca

SEQ ID NO: 202640 - DNA, 120 bp, Artificial Sequence
  ENSG00000114544_33 (sequence is synthesized)
tcatcttgctgcctcacctccctgctaaaatgtcagctcctcaagagtggggacccagtagttcccacctgctgtctgctgctcctttctcatgccaaacacagctggtgcttaacgtgt

SEQ ID NO: 202641 - DNA, 120 bp, Artificial Sequence
  ENSG00000114544_34 (sequence is synthesized)
atctgcgacacacgggagacagatgcgggcagacataccccttccttggggctcgcacatgtgcagggaaagcagttgccacacgttggccacgttgcatggttgtccattggtgattca

SEQ ID NO: 202642 - DNA, 120 bp, Artificial Sequence
  ENSG00000114544_35 (sequence is synthesized)
gttgttgctgggtgtctgctgtgtgcctggcacggtgtagtgctggggatatactgtcaacaaaatgtgttttgattttatattctagctcaggggcagacaataagcttatgaatatac

SEQ ID NO: 202643 - DNA, 120 bp, Artificial Sequence
  ENSG00000114544_36 (sequence is synthesized)
aggacactagagtgagtgccacatgtcgcttttgtcctgaggcctcctctgaccaacactaaagtgaccattccagccatgctttacgttagtgtcctgttttactcacctcacctcaaa

SEQ ID NO: 202644 - DNA, 120 bp, Artificial Sequence
  ENSG00000114544_37 (sequence is synthesized)
tgtgtgttcacacatgtgtgtactgtctctccccacacccgacaggcatttccactgatgggaacagagccttttggttattgtcatcacttaaaccagggccaggcttataaccagctt

SEQ ID NO: 202645 - DNA, 120 bp, Artificial Sequence
  ENSG00000114544_38 (sequence is synthesized)
gcagatgttcgctgaatgaatggactctcctccagctctctcctgggtcacgtgtctttgtgaatcttccagaccacgtgccttgctttggttcagtgaaagaaggaaaagttgataact

SEQ ID NO: 202646 - DNA, 120 bp, Artificial Sequence
  ENSG00000114544_39 (sequence is synthesized)
tcataattgaacctgtgtttatacatccattcccccacctacttgctcagtcagtatcctctgggctcagctctctgtgggttacccatgtgggctattctcattcctaccaggcagcta

SEQ ID NO: 202647 - DNA, 120 bp, Artificial Sequence
  ENSG00000114544_40 (sequence is synthesized)
atcaggcccattcctgtgccagtgcatggagggtgtaggccagaagaggactgtgccaaagcaggctgcaggtttacaaaccacgtgtccctgctcagggtgttggctgaggctggctcc

SEQ ID NO: 202648 - DNA, 120 bp, Artificial Sequence
  ENSG00000114544_41 (sequence is synthesized)
tagtcacagcctgcgcaggcatggacggatggtggatgccatgacccagcctggtccacagatggggcgggatgaatgtgccagactttccagagaagaacagtccaggagaccctcagc

SEQ ID NO: 202649 - DNA, 120 bp, Artificial Sequence
  ENSG00000114544_42 (sequence is synthesized)
ataaagtctcctgaaaacaacacagtctgacagtcctgaaggccagccctgtctttgcagggacttgtagagaacaccattcccagctccccattttacagaagggaaaactgaggccca

SEQ ID NO: 202650 - DNA, 120 bp, Artificial Sequence
  ENSG00000114544_43 (sequence is synthesized)
gagatcggatgaagcttagcaacacaagcaaaatctgtattgtccatggctgttcagaagcattgcggttacctcaccaggcagtgttgaagaggctatcacagaagcctcagggtagtg

SEQ ID NO: 202651 - DNA, 120 bp, Artificial Sequence
  ENSG00000114544_44 (sequence is synthesized)
gttttcaataggtgcccccaaaccactggtgttcctttaaatggtccttgcaagattgtccccagctcactgaatcagcgtgcgaactcggattcacttacagctggcattcaaaaggag

SEQ ID NO: 202652 - DNA, 120 bp, Artificial Sequence
  ENSG00000114544_45 (sequence is synthesized)
cataaggagcacacaacctagatcccctgcgtgcgcagttcacaatacggtttgagctcctatgaggatctgatgctgccggtgatctgacaggagagggaacctgatcaggcagtgatg

SEQ ID NO: 202653 - DNA, 120 bp, Artificial Sequence
  ENSG00000114544_46 (sequence is synthesized)
tgatcaggcagtgatgctcgccgggagccgctcaccttctgctgtgtggcccagttcccaacgggggttggggacccctgctctaaaggatctcttggctgccaggcgcccagctgtgcc

SEQ ID NO: 202654 - DNA, 120 bp, Artificial Sequence
  ENSG00000114544_47 (sequence is synthesized)
cgcccgggagtgggtgcgcgggaggcgagtgagccgggcgccgggccctgggggctcggcgggagggggagtcagggctgccaggcgcccagctgtgcccagatggatgggacagagacc

SEQ ID NO: 202655 - DNA, 120 bp, Artificial Sequence
  ENSG00000114544_48 (sequence is synthesized)
ctgggccggcatgcttctggactatttccagttctagaggctggaagtccaagatcaaggtgttggcagcattggtttctcctgtggcctctccttggcttgcagacggctgccttttct

SEQ ID NO: 202656 - DNA, 120 bp, Artificial Sequence
  ENSG00000114544_49 (sequence is synthesized)
ccgtgtcttcagcactggcctgtgtttgtggaggtgaaagaccttttgacattggtgccgcccctggtgggcctgaaggggaacctggagatgacactggcatccagactctccacagct

SEQ ID NO: 202657 - DNA, 120 bp, Artificial Sequence
  ENSG00000114544_50 (sequence is synthesized)
cgaggcggccacaacgtgaggcaggtgcaggccactgtcgtggggctcttggctgctgtggctgcgctgctgttgggcgtggtgtctcgagaggaagtggatgtcgccaaggtggagttg

SEQ ID NO: 202658 - DNA, 80 bp, Artificial Sequence
  ENSG00000114544_51 (sequence is synthesized)
tctttcccgccgccgcctgggaggggacccgagggtttcaccatcttgcctaagctggtcttcaactcctgagctcaagc

SEQ ID NO: 202659 - DNA, 120 bp, Artificial Sequence
  ENSG00000114547_0 (sequence is synthesized)
tggcagcggagcccgcgcagggtttgccaggcgaaggcggagcgctaacgtctaacgctaacggcggtcgtgccccgccgctgctgtcacccccggccgctgctgccctccccgccgagg

SEQ ID NO: 202660 - DNA, 120 bp, Artificial Sequence
  ENSG00000114547_1 (sequence is synthesized)
ttctactgctctccttcttaagaagggtgggaggcactcggtctctccccacacctctcgcctgaggccaggcgccaggtgtcgcctgaagccagacagccggtttgggagcgagcctga

SEQ ID NO: 202661 - DNA, 120 bp, Artificial Sequence
  ENSG00000114547_2 (sequence is synthesized)
ggtcaaccaatcaatggctcagacagataagccaacatgcatcccgccggagctgccgaaaatgctgaaggagtttgccaaagccgccattcgggcgcagccgcaggacctcatccagtg

SEQ ID NO: 202662 - DNA, 120 bp, Artificial Sequence
  ENSG00000114547_3 (sequence is synthesized)
gggggccgattattttgaggccctgtcccgtggagagacgcctccggtgagagagcggtctgagcgagtcgctttgtgtaactgggcagagctaacacctgagctgttaaagatcctgca

SEQ ID NO: 202663 - DNA, 120 bp, Artificial Sequence
  ENSG00000114547_4 (sequence is synthesized)
tctcccaacagatctgtttaatagtgtgatgaatgtgggtcgcttcacggaggagatcgagtggctgaagtttttagcccttgcttgcagcgctctgggagttactattaccaaaactct

SEQ ID NO: 202664 - DNA, 120 bp, Artificial Sequence
  ENSG00000114547_5 (sequence is synthesized)
caagatagtgtgtgaggtcttatcatgtgaccacaatggtgggttgccccgaatcccattcagcaccttccagtttctctacacgtatattgccgaagtggatggggagatctgtgcatc

SEQ ID NO: 202665 - DNA, 120 bp, Artificial Sequence
  ENSG00000114547_6 (sequence is synthesized)
acatgtcagcaggatgctaaactacattgaacaggaagtaattggtcctgatggtttaatcacggtgaatgactttacccaaaaccccagggtttggctggagtaacagcacaattttgg

SEQ ID NO: 202666 - DNA, 120 bp, Artificial Sequence
  ENSG00000114547_7 (sequence is synthesized)
caattttaaaggaagatacagaggtgattgtacttcagaatgataaacccatataccacctaaaatcaattttcttgtacaactggtacacactaataaacaaacatgtgagatcagaaa

SEQ ID NO: 202667 - DNA, 120 bp, Artificial Sequence
  ENSG00000114547_8 (sequence is synthesized)
tccttggacaaacttgcctgcttgaaactggggaaccaggacttgagacaggagttggaagataactagacctcacggaccattttcaggctatttttactgtttgatgattccctgctt

SEQ ID NO: 202668 - DNA, 120 bp, Artificial Sequence
  ENSG00000114547_9 (sequence is synthesized)
aggagggtttcagtgggaaagtgagagtgagagaggccgttgagagaaagccagtgagttggggaagggaagatgtcctcaggctgaggttgtgagtgggtgtcctgggcagatggtggg

SEQ ID NO: 202669 - DNA, 120 bp, Artificial Sequence
  ENSG00000114547_10 (sequence is synthesized)
ggtgagcaaaaactgaccagtcctgccgtggagtttgctgggggagacacatgttactcaaagaatcacactaaggatagcaatttatctcaaagcttcaagttcctgccatctacatgt

SEQ ID NO: 202670 - DNA, 120 bp, Artificial Sequence
  ENSG00000114547_11 (sequence is synthesized)
gctttgtgtaactgggcagagctaacacctgagctgttaaagatcctgcattctcagcatgctcttcactaggatttgcaaaggtaactgccacacagagccatctttaccttcctaaca

SEQ ID NO: 202671 - DNA, 120 bp, Artificial Sequence
  ENSG00000114547_12 (sequence is synthesized)
ccccctcccgccccttgccatgtgctgggagatgtggacctggcctggggacagggtgtttctcagggccttgtctcaacttctcccacaacctctgtgttgtgtctgtcccctgccctg

SEQ ID NO: 202672 - DNA, 120 bp, Artificial Sequence
  ENSG00000114547_13 (sequence is synthesized)
tgcctcttctcctattgtccttctcctctctaaagcaaggtcatttctgtgctcgtcaggcagtggcaggggttgggaggaggagagagggaaacactgtggtcaggctctggggagagt

SEQ ID NO: 202673 - DNA, 120 bp, Artificial Sequence
  ENSG00000114547_14 (sequence is synthesized)
tgactacagtgtagctcttggattatttatgaatattgccctcagatttattttcactctgctccttccattcatattcccagagacaaccaagagccgactgtagaaaaagacttccag

SEQ ID NO: 202674 - DNA, 120 bp, Artificial Sequence
  ENSG00000114547_15 (sequence is synthesized)
acacctagaatatatatcaatagacactgtttaaaaggggtacaatcttatagaaaactatgtaataaacagaattggatgcagaactcagacataagaaagcaaaaacaaagagagatg

SEQ ID NO: 202675 - DNA, 120 bp, Artificial Sequence
  ENSG00000114547_16 (sequence is synthesized)
aggctatttctgaatttagtcatgacatctccatggatacaggatgttcatacagatttatgccttttccaaatttgacttgtttgatattggaaaaacaattttactgttttgaagcca

SEQ ID NO: 202676 - DNA, 120 bp, Artificial Sequence
  ENSG00000114547_17 (sequence is synthesized)
aagatgttgaaatcagtttatatgtatagatatttaaagcttgggtatcttatatgtggacttacattgttaaacattgttaaaataaaatgaatcaaaaacatggtttttaaaaagaat

SEQ ID NO: 202677 - DNA, 120 bp, Artificial Sequence
  ENSG00000114547_18 (sequence is synthesized)
ccctgagatacataaaagtttgaaaattattgagaaaataattgcctctgccaaaaacaaatggtatgaaaaggtagtctgaatcattcagcatatctaaacataatcttgttcttctca

SEQ ID NO: 202678 - DNA, 120 bp, Artificial Sequence
  ENSG00000114547_19 (sequence is synthesized)
gccgagtacgtgctcctttctcgccttcatctcttggaggacgggcggggagagagggtcctgtaaaaccgcggaggttgtcatggctgcagccagggggtcgggactaactggcatcgt

SEQ ID NO: 202679 - DNA, 120 bp, Artificial Sequence
  ENSG00000114547_20 (sequence is synthesized)
ctttgttttagctcttgcattgctttgatgctttaaaatccacacataaatactacatctagccgggcaaggatgggatgcctcccctaagcgagccagattgagcagtaggacgccagg

SEQ ID NO: 202680 - DNA, 120 bp, Artificial Sequence
  ENSG00000114547_21 (sequence is synthesized)
tcaataggccgtgtcctggggcaagcagcaagttagatgaccgcgtcacaccagcgtatgcacacccacctcctccctgcacgccttttcccactctcggtggaaagaagggctgggaat

SEQ ID NO: 202681 - DNA, 120 bp, Artificial Sequence
  ENSG00000114547_22 (sequence is synthesized)
ctccgcagcttaatctgcctttcttcattctcctgtctcaccactagatggcagcagtgcagccgggggagggaagcgacagccctgggtggatggggtgggaccagtcctgctagttca

SEQ ID NO: 202682 - DNA, 120 bp, Artificial Sequence
  ENSG00000114547_23 (sequence is synthesized)
ctcctttaaggagacacttcctcccctgctgttaaaactcatacttggacccaaccaaagaggctttgtatctttgaggaaattattgttattttctttggtgtttctctgaactgattt

SEQ ID NO: 202683 - DNA, 120 bp, Artificial Sequence
  ENSG00000114547_24 (sequence is synthesized)
cataatgatgtcctcacagtacacactgcattctggggaaaggccaggcagagtgatggggtcctcaggcatggctgaaaacagtgtgcctcaaacacgggtgccttctttcaggagaga

SEQ ID NO: 202684 - DNA, 120 bp, Artificial Sequence
  ENSG00000114547_25 (sequence is synthesized)
agacacaaaatggcacctaagaggggcctttcggagtctctgggccagtgttgtgctcctggtctggattaggatgcagcttttacaattggaaggaaaataggccagtggtgctcataa

SEQ ID NO: 202685 - DNA, 120 bp, Artificial Sequence
  ENSG00000114547_26 (sequence is synthesized)
aaagaaacataaatgggggttgctttgcctagtaataagccctgtttagttttccattctaaattttatatattgcctctaagattgaactttagcttcagaagactaatttattttggc

SEQ ID NO: 202686 - DNA, 120 bp, Artificial Sequence
  ENSG00000114547_27 (sequence is synthesized)
atagtcagatagacagactttatcttatacgttagtttcaaacccatttgattgttcttgtgctgccgttttatagtaagcaaaatgacattgcttagtattgtccctgacatttatgga

SEQ ID NO: 202687 - DNA, 120 bp, Artificial Sequence; identical to SEQ ID NO: 47070
  ENSG00000114547_28 (sequence is synthesized)

SEQ ID NO: 202688 - DNA, 120 bp, Artificial Sequence; identical to SEQ ID NO: 47071
  ENSG00000114547_29 (sequence is synthesized)

SEQ ID NO: 202689 - DNA, 120 bp, Artificial Sequence
  ENSG00000114554_0 (sequence is synthesized)
atgccgctgccaccgcggagcctgcaggtgctcctgctgctgctgctgttgctgctgctgctgccgggcatgtgggctgaggcaggcttgcccagggcaggcgggggttcacagcccccc

SEQ ID NO: 202690 - DNA, 120 bp, Artificial Sequence
  ENSG00000114554_1 (sequence is synthesized)
ttccgcaccttctcggccagcgactggggcctcacccacctagtggtgcatgagcagacaggcgaggtgtatgtgggcgcagtgaaccgcatctataagctgtcggggaacctgacactg

SEQ ID NO: 202691 - DNA, 120 bp, Artificial Sequence
  ENSG00000114554_2 (sequence is synthesized)
ctgcgggcccacgtcacgggccctgtggaggacaacgagaagtgctacccgccgcccagcgtgcagtcctgcccccacggcctgggcagtactgacaacgtcaacaagctgctgctgctg

SEQ ID NO: 202692 - DNA, 120 bp, Artificial Sequence
  ENSG00000114554_3 (sequence is synthesized)
gactatgccgctaaccgcctgctggcctgtggcagcgcctcccagggcatctgccagttcctgcgtctggacgatctcttcaaactgggtgagccacaccaccgtaaggagcactacctg

SEQ ID NO: 202693 - DNA, 120 bp, Artificial Sequence
  ENSG00000114554_4 (sequence is synthesized)
tccagcgtgcaggaggcaggcagcatggcgggcgtgctcattgccgggccaccgggccagggccaggccaagctcttcgtgggcacacccatcgatggcaagtccgagtacttccccaca

SEQ ID NO: 202694 - DNA, 120 bp, Artificial Sequence
  ENSG00000114554_5 (sequence is synthesized)
ctgtccagccgtcggctcatggccaacgaggaggatgccgacatgttcggcttcgtgtaccaggatgagtttgtgtcatcacagctcaagatcccttcggacacgctgtccaagttcccg

SEQ ID NO: 202695 - DNA, 120 bp, Artificial Sequence
  ENSG00000114554_6 (sequence is synthesized)
gcctttgacatctactatgtgtacagcttccgcagcgagcagtttgtctactacctcacgctgcagctagacacacagctgacctcgcctgatgccgccggcgagcacttcttcacgtcc

SEQ ID NO: 202696 - DNA, 120 bp, Artificial Sequence
  ENSG00000114554_7 (sequence is synthesized)
aagatcgtgcggctctgtgtggacgaccccaaattctactcgtacgttgagttccccattggctgcgagcaggcgggtgtggagtaccgcctggtgcaggatgcctacctgagccggccc

SEQ ID NO: 202697 - DNA, 120 bp, Artificial Sequence
  ENSG00000114554_8 (sequence is synthesized)
ggccgtgccctggcccaccagctgggcctggctgaggacgaggacgtgctgttcactgtgttcgcccagggccagaagaaccgcgtgaagccaccaaaggagtcagcactgtgcctgttc

SEQ ID NO: 202698 - DNA, 120 bp, Artificial Sequence
  ENSG00000114554_9 (sequence is synthesized)
acgctcagggccatcaaggagaagattaaggagcgcatccagtcctgctaccgtggtgagggcaagctctccctgccgtggctgctcaacaaggagctgggctgcatcaactcgcccctg

SEQ ID NO: 202699 - DNA, 120 bp, Artificial Sequence
  ENSG00000114554_10 (sequence is synthesized)
cagatcgatgacgacttctgcgggcaggacttcaaccagcccctggggggcacagtcaccattgaggggacgcccctgttcgtggacaaggatgatggcctgaccgccgtggctgcctat

SEQ ID NO: 202700 - DNA, 120 bp, Artificial Sequence
  ENSG00000114554_11 (sequence is synthesized)
gactatcggggccgcactgtggtattcgccggcacgcgaagtggccgcatccgcaagatcctggtggacctctcaaaccccggtggccggcctgccctggcctacgagagcgtcgtggcc

SEQ ID NO: 202701 - DNA, 120 bp, Artificial Sequence
  ENSG00000114554_12 (sequence is synthesized)
caggagggcagccccatcctgcgagacctcgtcctcagccccaaccaccagtacctctacgccatgaccgagaagcaggtgacgcgggtgcctgtggagagctgtgtgcagtacacgtcc

SEQ ID NO: 202702 - DNA, 120 bp, Artificial Sequence
  ENSG00000114554_13 (sequence is synthesized)
tgtgagctgtgtctggggtcacgggacccccactgtggctggtgtgtcctgcacagcatctgctcgcggcgggacgcctgtgagcgagcagacgagccccagcgctttgctgcggacctg

SEQ ID NO: 202703 - DNA, 120 bp, Artificial Sequence
  ENSG00000114554_14 (sequence is synthesized)
ctgcagtgtgtgcagctgactgtgcagccccgcaatgtgtctgtcaccatgtcccaggtcccacttgtgctgcaggcctggaacgtgcctgacctctcagctggcgtcaactgctccttc

SEQ ID NO: 202704 - DNA, 120 bp, Artificial Sequence
  ENSG00000114554_15 (sequence is synthesized)
gaggacttcacggaatctgagagcgtcctggaggatggccggatccactgccgctcaccctccgcccgggaggtggcgcccatcacgcggggccagggagaccagcgggtggtgaaactc

SEQ ID NO: 202705 - DNA, 120 bp, Artificial Sequence
  ENSG00000114554_16 (sequence is synthesized)
tacctaaagtccaaggagacagggaagaagtttgcgtctgtggacttcgtcttctacaactgcagcgtccaccagtcctgcctgtcctgtgtcaacggctcctttccctgccactggtgc

SEQ ID NO: 202706 - DNA, 120 bp, Artificial Sequence
  ENSG00000114554_17 (sequence is synthesized)
aaataccgccacgtgtgcacacacaacgtggctgactgcgccttcctggagggccgtgtcaacgtgtctgaggactgcccacagatcctgccctccacgcagatctacgtgccagtggga

SEQ ID NO: 202707 - DNA, 120 bp, Artificial Sequence
  ENSG00000114554_18 (sequence is synthesized)
gtggtaaaacccatcaccctggccgcacggaacctgccacagccacagtcaggccagcgtggatatgagtgcctcttccacatcccgggcagcccggcccgtgtcaccgccctgcgcttc

SEQ ID NO: 202708 - DNA, 120 bp, Artificial Sequence
  ENSG00000114554_19 (sequence is synthesized)
aacagctccagcctgcagtgccagaattcctcgtactcctacgaggggaacgatgtcagcgacctgccagtgaacctgtcagtcgtgtggaacggcaactttgtcattgacaacccacag

SEQ ID NO: 202709 - DNA, 120 bp, Artificial Sequence
  ENSG00000114554_20 (sequence is synthesized)
aacatccaggcgcacctctacaagtgcccggccctgcgcgagagctgcggcctctgcctcaaggccgacccgcgcttcgagtgcggatggtgcgtggccgagcgccgctgctccctgcga

SEQ ID NO: 202710 - DNA, 120 bp, Artificial Sequence
  ENSG00000114554_21 (sequence is synthesized)
caccactgcgctgccgacacacctgcatcgtggatgcacgcgcgtcacggcagcagtcgctgcaccgaccccaagatcctcaagctgtcccccgagacgggcccgaggcagggcggcacg

SEQ ID NO: 202711 - DNA, 120 bp, Artificial Sequence
  ENSG00000114554_22 (sequence is synthesized)
cggctcactatcacaggcgagaacctgggcctgcgattcgaagacgtgcgtctgggcgtgcgcgtgggcaaggtgctgtgcagccctgtggagagcgagtacatcagtgcggagcagatc

SEQ ID NO: 202712 - DNA, 120 bp, Artificial Sequence
  ENSG00000114554_23 (sequence is synthesized)
gtctgtgagatcggggacgccagctccgtgcgtgcccatgacgccctggtggaggtgtgtgtgcgggactgctcaccacactaccgcgccctgtcacccaagcgcttcaccttcgtgaca

SEQ ID NO: 202713 - DNA, 120 bp, Artificial Sequence
  ENSG00000114554_24 (sequence is synthesized)
ccaaccttctaccgtgtgagcccctcccgtgggcctctgtcagggggcacctggattggcatcgagggaagccacctgaacgcaggcagtgatgtggctgtgtcggtcggtggccggccc

SEQ ID NO: 202714 - DNA, 120 bp, Artificial Sequence
  ENSG00000114554_25 (sequence is synthesized)
tgctccttctcctggaggaactcccgtgagatccggtgcctgacaccccccgggcagagccctggcagcgctcccatcatcatcaacatcaaccgcgcccagctcaccaaccctgaggtg

SEQ ID NO: 202715 - DNA, 120 bp, Artificial Sequence
  ENSG00000114554_26 (sequence is synthesized)
aagtacaactacaccgaggaccccaccatcctgaggatcgaccccgagtggagcatcaacagcggtgggaccctcctgacggtcacaggcaccaacctggccactgtccgtgaaccccga

SEQ ID NO: 202716 - DNA, 120 bp, Artificial Sequence
  ENSG00000114554_27 (sequence is synthesized)
atccgggccaagtatggaggcattgagagggagaacggctgcctggtgtacaatgacaccaccatggtatgccgcgccccgtctgtggccaaccctgtgcgcagcccaccagagctgggg

SEQ ID NO: 202717 - DNA, 120 bp, Artificial Sequence
  ENSG00000114554_28 (sequence is synthesized)
gagcggccggatgagctgggcttcgtcatggacaacgtgcgctccctgcttgtgctcaactccacctccttcctctactaccctgaccccgtactggagccactcagccccactggcctg

SEQ ID NO: 202718 - DNA, 120 bp, Artificial Sequence
  ENSG00000114554_29 (sequence is synthesized)
ctggagctgaagcccagctccccactcatcctcaagggccggaacctcttgccacctgcacccggcaactcccgactcaactacacggtgctcatcggctccacaccctgtaccctcacc

SEQ ID NO: 202719 - DNA, 120 bp, Artificial Sequence
  ENSG00000114554_30 (sequence is synthesized)
gtgtcggagacgcaactgctgtgcgaggcgcccaacctcactgggcagcacaaggtcacggtgcgggcaggtggcttcgagttctcgccagggacactgcaggtgtactcggacagcctg

SEQ ID NO: 202720 - DNA, 120 bp, Artificial Sequence
  ENSG00000114554_31 (sequence is synthesized)
ctgacgctgcctgccattgtgggcattggcggaggcgggggtctcctgctgctggtcatcgtggctgtgctcatcgcctacaagcgcaagtcacgagatgctgaccgcacactcaagcgg

SEQ ID NO: 202721 - DNA, 120 bp, Artificial Sequence
  ENSG00000114554_32 (sequence is synthesized)
ctgcagctccagatggacaacctggagtcccgcgtggccctcgaatgcaaggaagcctttgcagagctgcagacagacatccacgagctgaccaatgacctggacggtgccggcatcccc

SEQ ID NO: 202722 - DNA, 120 bp, Artificial Sequence
  ENSG00000114554_33 (sequence is synthesized)
ttccttgactaccggacatatgccatgcgggtgctctttcctgggatcgaggaccaccctgtgctcaaggagatggaggtgcaggccaatgtggagaagtcgctgacactgttcgggcag

SEQ ID NO: 202723 - DNA, 120 bp, Artificial Sequence
  ENSG00000114554_34 (sequence is synthesized)
ctgctgaccaagaagcacttcctgctgaccttcatccgcacgctggaggcacagcgcagcttctccatgcgcgaccgcgggaatgtggcctcgctcatcatgacggccctgcagggcgag

SEQ ID NO: 202724 - DNA, 120 bp, Artificial Sequence
  ENSG00000114554_35 (sequence is synthesized)
atggaatacgccacaggcgtgctcaagcagctgctttccgacctcatcgagaagaacctggagagcaagaaccaccccaagctgctactgcgccggactgagtcggtggcagagaagatg

SEQ ID NO: 202725 - DNA, 120 bp, Artificial Sequence
  ENSG00000114554_36 (sequence is synthesized)
ctaactaactggttcaccttcctcttgtataagttcctcaaggagtgcgctggggagccgctgttcatgctgtactgcgccatcaagcagcagatggagaagggccccattgacgccatc

SEQ ID NO: 202726 - DNA, 120 bp, Artificial Sequence
  ENSG00000114554_37 (sequence is synthesized)
ctgaccctgaactgtgtgaaccctgagaatgagaatgcacctgaggtgccggtgaaggggctggactgtgacacggtcacccaggccaaggagaagctgctggacgctgcctacaagggc

SEQ ID NO: 202727 - DNA, 120 bp, Artificial Sequence
  ENSG00000114554_38 (sequence is synthesized)
gtgccctactcccagcggcccaaggccgcggacatggacctggagtggcgccagggccgcatggcgcgcatcatcctgcaggacgaggacgtcaccaccaagattgacaacgattggaag

SEQ ID NO: 202728 - DNA, 120 bp, Artificial Sequence
  ENSG00000114554_39 (sequence is synthesized)
aggctgaacacactggctcactaccaggtgacagacgggtcctcggtggcactggtgcccaagcagacgtccgcctacaacatctccaactcctccaccttcaccaagtccctcagcaga

SEQ ID NO: 202729 - DNA, 120 bp, Artificial Sequence
  ENSG00000114554_40 (sequence is synthesized)
tacgagagcatgctgcgcacggccagcagccccgacagcctgcgctcgcgcacgcccatgatcacgcccgacctggagagcggcaccaagctgtggcacctggtgaagaaccacgaccac

SEQ ID NO: 202730 - DNA, 120 bp, Artificial Sequence
  ENSG00000114554_41 (sequence is synthesized)
ctggaccagcgtgagggtgaccgcggcagcaagatggtctcggagatctacttgacacggctactggccaccaagggcacactgcagaagtttgtggacgacctgtttgagaccatcttc

SEQ ID NO: 202731 - DNA, 120 bp, Artificial Sequence
  ENSG00000114554_42 (sequence is synthesized)
agcacggcacaccggggctcagccctgccgctggccatcaagtacatgttcgacttcctggatgagcaggccgacaagcaccagatccacgatgctgacgtgcgccacacctggaagagc

SEQ ID NO: 202732 - DNA, 120 bp, Artificial Sequence
  ENSG00000114554_43 (sequence is synthesized)
aactgcctgcccctgcgcttctgggtgaacgtgatcaagaacccacagtttgtgttcgacattcacaagaacagcatcacggacgcctgcttgtcggtggtggcccagaccttcatggac

SEQ ID NO: 202733 - DNA, 120 bp, Artificial Sequence
  ENSG00000114554_44 (sequence is synthesized)
tcctgctccacctctgagcacaagctgggcaaggactcaccctccaacaagctgctctacgccaaggacatccccaactacaagagctgggtggagaggtactatgcagacatcgccaag

SEQ ID NO: 202734 - DNA, 120 bp, Artificial Sequence
  ENSG00000114554_45 (sequence is synthesized)
atgccagccatcagcgaccaggacatgagtgcgtatctggctgagcagtcccgcctgcacctgagccagttcaacagcatgagcgccttgcacgagatctactcctacatcaccaagtac

SEQ ID NO: 202735 - DNA, 120 bp, Artificial Sequence
  ENSG00000114554_46 (sequence is synthesized)
aaggatgagatcctggcagccctggagaaggatgagcaggcgcggcggcagcggctgcggagcaagctggagcaggtggtggacacgatggccctgagcagctgagccccagctgtgatc

SEQ ID NO: 202736 - DNA, 120 bp, Artificial Sequence
  ENSG00000114554_47 (sequence is synthesized)
atccagcatgatgcagcgtgaggacagctgagcagggaccgggacagccctcaccgcatgcgtgtggagtgtccggtggtgctcgggccgccgcagtgcagcgactgcccggccctccct

SEQ ID NO: 202737 - DNA, 120 bp, Artificial Sequence
  ENSG00000114554_48 (sequence is synthesized)
cccctgcctcacccggtcgggtcccggctcttcctgtgtggaggtgatggtacctgccacaccacagctgcgcacacagctgcttgctcaggggccgggacagcactgggtgctcaggct

SEQ ID NO: 202738 - DNA, 120 bp, Artificial Sequence
  ENSG00000114554_49 (sequence is synthesized)
ggccaaggaccttcattgcctggcaagagctgcccagtggccttcatgggagaagggctgacctctgaggggctgaggggtgaggccagggccctccagggggaggggtagccagcttgg

SEQ ID NO: 202739 - DNA, 120 bp, Artificial Sequence
  ENSG00000114554_50 (sequence is synthesized)
gctgtccccttgagaccaggacaagaggctgggggtgtcagcattcccagctttccaagctgcccccaggcggcagagtctgagggtcccggggcccggttggcagctggagaaagaggc

SEQ ID NO: 202740 - DNA, 120 bp, Artificial Sequence
  ENSG00000114554_51 (sequence is synthesized)
aaaaagcccgtagccgggcaagaggagctcaagtcggtctgggcccgttgccaccgactcccacctccagcacccatgcccgctgcaccgctgccatcctcagattcaccgcgtgctctg

SEQ ID NO: 202741 - DNA, 120 bp, Artificial Sequence
  ENSG00000114554_52 (sequence is synthesized)
cgcggccgaggccggagcaccacatccacctcgccccagagaggctctgctccctcctatggaggggctgtgggccaggctgctcagactcctgggtggcttccagacggaccgggcagc

SEQ ID NO: 202742 - DNA, 120 bp, Artificial Sequence
  ENSG00000114554_53 (sequence is synthesized)
ccctctccgtcctcagggctgtgcctctgggagccactgggccaggggccccgggtcgcagagagcacgttcccgttatttattcccctccgcgtcctacacaggctgccctggcagctg

SEQ ID NO: 202743 - DNA, 120 bp, Artificial Sequence
  ENSG00000114554_54 (sequence is synthesized)
tcttcaagggtaggctgagctccccaccctggagcccctgagggcggcccctgagcactcctctctctccactctctctgtccctgccccagcggcttccagtgtggcatctcagcagtg

SEQ ID NO: 202744 - DNA, 120 bp, Artificial Sequence
  ENSG00000114554_55 (sequence is synthesized)
tcctggcccctccagagcagtgggacatctggggactgtttttgtgtttaggggaaaaaattctgctgcactctgcttgggccttgaggtctgtggcagggctcctctggcccgcagtgg

SEQ ID NO: 202745 - DNA, 120 bp, Artificial Sequence
  ENSG00000114554_56 (sequence is synthesized)
cctggatctatctgggccatgagtgacgggcagtgaccagagggactggaggccagcggtgtccacccttgccctcagcaagagagaatgcattcttaaaagaaagctgtacatgtatat

SEQ ID NO: 202746 - DNA, 120 bp, Artificial Sequence
  ENSG00000114554_57 (sequence is synthesized)
atatgcatatatatatatgtggctctagcctcaggctccagccccagtggggtactgtacagttaactgaagaagaattttaaagacgatttgaacaagaaaatgaaggcagtgggaaag

SEQ ID NO: 202747 - DNA, 120 bp, Artificial Sequence
  ENSG00000114554_58 (sequence is synthesized)
caatgccaaatggttgtggagaaagtggccggagcctccctggagtggagcagccctgaagcctgtgccccccgacctgcgggccgctgttttggtttgacatgacaaggaaaggacttc

SEQ ID NO: 202748 - DNA, 120 bp, Artificial Sequence
  ENSG00000114554_59 (sequence is synthesized)
ctgctgaccctgagagcctctggggtgccgcggcaccacggggcatgcatgattgtgctagcgtttagtctgagttgatctttttaaaactgcaagtgttgaatactagaggttgttaga

SEQ ID NO: 202749 - DNA, 120 bp, Artificial Sequence
  ENSG00000114554_60 (sequence is synthesized)
cccttttttatgttttttaattaatcagtcacttgtaaaagcaaacaagcggtccatccccttttcaaggtcacttttttgatggtaccgaagatcccatggacattaagggacagctaa

SEQ ID NO: 202750 - DNA, 120 bp, Artificial Sequence
  ENSG00000114554_61 (sequence is synthesized)
ctgtggccagactcagccccatgtccttggccaggcccaaggagaggactcggccccatggggtgtgccagtcttgcagtccgccccagctgagtagcgtgagccagatgacgccacaga

SEQ ID NO: 202751 - DNA, 120 bp, Artificial Sequence
  ENSG00000114554_62 (sequence is synthesized)
gacccgcctcttccctgaacgcgggtcggtgtggagtcagtgactgctgactcagggagctccttggccccgtgggcactgtgccagggctggggccttctgctgctgccacacccagct

SEQ ID NO: 202752 - DNA, 120 bp, Artificial Sequence
  ENSG00000114554_63 (sequence is synthesized)
caggcctgggccagcccctgcccccagcccactgagggggtgggcttactccctgggcagtcttgggggccagagctgaggccagtccatattacagtggctgggctgtttttttcagta

SEQ ID NO: 202753 - DNA, 120 bp, Artificial Sequence
  ENSG00000114554_64 (sequence is synthesized)
gcccctagcattggctgggattcctgttcctgggtgcgcctccacctcccttctgatgtttcctggctatggtggggtgggaacctcagtttcccccaaagtcttccctggatgctggct

SEQ ID NO: 202754 - DNA, 120 bp, Artificial Sequence
  ENSG00000114554_65 (sequence is synthesized)
tcaggttgaagtccctggttcttccagttcctcacgggttaggtaggggctcctgcatcaccttcagaatccagttccaacccccactctccttaggccttgtgctctgctctgccctgc

SEQ ID NO: 202755 - DNA, 120 bp, Artificial Sequence
  ENSG00000114554_66 (sequence is synthesized)
caggctgcccttgtccatgtgagtagcatgggcgggtggtggggacggcagtggtgatgaagggggtgcaccacaggcctcatgaagcagttcccacatgggcgtgtggctggggcgtgg

SEQ ID NO: 202756 - DNA, 120 bp, Artificial Sequence
  ENSG00000114554_67 (sequence is synthesized)
ccaccacagagcacatggctgtgtctaggcgcaagcactttagcagtatctgtttacatgcgcaaggatcaagccgactacctgtgctgtctactgggacagcagtctccgagctactcc

SEQ ID NO: 202757 - DNA, 120 bp, Artificial Sequence
  ENSG00000114554_68 (sequence is synthesized)
gtacctccctctgccaggtcgtggagttaggccccagtccctacttgtcactggttcccactgtgctcctaactgtgcagcacctgggagctctggcctggggctggaggccctggtagg

SEQ ID NO: 202758 - DNA, 120 bp, Artificial Sequence
  ENSG00000114554_69 (sequence is synthesized)
agctgcagttggaggccgttctgtgcccagcagcggtgagcggctcccatgggccctgtgtctgcagggagccagggctgcggcacatgtgctgtgaaactggcacccacctggcgtgct

SEQ ID NO: 202759 - DNA, 120 bp, Artificial Sequence
  ENSG00000114554_70 (sequence is synthesized)
gctgccgccacttgcttcctgcagcacctcctaccctgctccgtgtcctccctctccccgcgcctggctcaggagtgctggaaaagctcacgcctcggcctgggagcctggcctcttgat

SEQ ID NO: 202760 - DNA, 120 bp, Artificial Sequence
  ENSG00000114554_71 (sequence is synthesized)
atacctcgagcttcccctgtgctccccagccccaggaccactggccccttggcctgaggggctgggggccccacgacctgcagcgtcgagtccgggagagagcccggagcggcgtgccat

SEQ ID NO: 202761 - DNA, 120 bp, Artificial Sequence
  ENSG00000114554_72 (sequence is synthesized)
ctcggctcggccttgctgagagcctccgccctggctttctccctgtctggattcagtggctcacgttggtgctacacagctagaatagatatatttagagagagagatatttttaagaca

SEQ ID NO: 202762 - DNA, 120 bp, Artificial Sequence
  ENSG00000114554_73 (sequence is synthesized)
aagcccacaattagctgtcctttaacaccgcagaaccccctcccagaagaagagcgatccctcggacggtccgggcgggcaccctcagccgggctctttgcagaagcagcaccgctgact

SEQ ID NO: 202763 - DNA, 120 bp, Artificial Sequence
  ENSG00000114554_74 (sequence is synthesized)
gtgggcccggccctcagatgtgtacatatacggctatttcctattttactgttcttcagatttagtacttgtaaataaacacacacattaaggagagattaaacatttttgctaaaagct

SEQ ID NO: 202764 - DNA, 120 bp, Artificial Sequence
  ENSG00000114554_75 (sequence is synthesized)
gtttcttgctgtgtgaccttgggccaatatctgcactgccctgaccttcagagactagctgccgtcctttcactctctgaggccaggcctgggaaccctcggacaggtgtctgactttgg

SEQ ID NO: 202765 - DNA, 120 bp, Artificial Sequence
  ENSG00000114554_76 (sequence is synthesized)
gaaaccctcaaaggcttcctgtcacattaatggctctccatccggatctgcaccccttttcctcctccttcgtggctaacttaatgaaaccaagtttgcaaatgaaacataatttcatag

SEQ ID NO: 202766 - DNA, 120 bp, Artificial Sequence
  ENSG00000114554_77 (sequence is synthesized)
acagacatgttgttggaaggtctgggatggtcttaacagctgtctctctaattaccgcagatgctaacgaggtgcctggagcctctggttacaggagcagagctgctgtttgtttgccag

SEQ ID NO: 202767 - DNA, 120 bp, Artificial Sequence
  ENSG00000114554_78 (sequence is synthesized)
ggccgggtaggaggcagggctgccaaacctgcccctccattgaggtgtacacacacctgaaggcccttgggcaggcaggacctacagtggaccccatgcccaggctctgggcgggcctcg

SEQ ID NO: 202768 - DNA, 120 bp, Artificial Sequence
  ENSG00000114554_79 (sequence is synthesized)
cctgtgtggccaactcacccagcccagacgtgaacgtttcccagggacagctctccattcactcaattcatccagcaagtgtctgtgatgccccatgcacaggctcagccagtgctagca

SEQ ID NO: 202769 - DNA, 120 bp, Artificial Sequence
  ENSG00000114554_80 (sequence is synthesized)
gtagggtatagtgagcaggccaggcagctcccactccagaggggttgccaggggtgcacaggatccttcagagaacgacagatggcggggagactcagcgaggcagtggtcgggggtacg

SEQ ID NO: 202770 - DNA, 120 bp, Artificial Sequence
  ENSG00000114554_81 (sequence is synthesized)
tgtgctgggcgctccccaggagcctttctgaagagggcacattgggttgggtccacaagggcccatgaagatgccaggggaaatttctggttgtagaggcagcagttgcaaaggccctga

SEQ ID NO: 202771 - DNA, 120 bp, Artificial Sequence
  ENSG00000114554_82 (sequence is synthesized)
ggtgggacaggaggcggttctcatgctacagcgcggggagccggagggtgaggggtcaggtgcccgctgagggcccggggctgtgctgctggccctgtgctgtgtgcttgggtgctggtg

SEQ ID NO: 202772 - DNA, 120 bp, Artificial Sequence
  ENSG00000114554_83 (sequence is synthesized)
aacctccctgggtgggcaagcctcctcaggtgggtatgtcagtatccatgacacaccatagttgtgtcccagagtaatatgggggcccagctgggtggtccctaggaggccagtggatca

SEQ ID NO: 202773 - DNA, 120 bp, Artificial Sequence
  ENSG00000114554_84 (sequence is synthesized)
cagtcacacttggagttgcgtagtatggggtccgcttgtgccatgggcggtgggccatggggagctttgtcctgagcacctccagctggggagcaggcccctgggaggctggagctaggc

SEQ ID NO: 202774 - DNA, 120 bp, Artificial Sequence
  ENSG00000114554_85 (sequence is synthesized)
ggggatcctgctgagaccaggggagacttctgggtgaaataggcctcggccctccctgatgcaggtcccgcgtgccacgccatgttcctcgatacactactgcgcctcctggctcatgtg

SEQ ID NO: 202775 - DNA, 120 bp, Artificial Sequence
  ENSG00000114554_86 (sequence is synthesized)
taatttagggttttcatgtgatatttgtgggatggtgggtatgttttgtttcctgattttcttgcagtctctgctgggctttgggactaaggctgtacttgcctcccaaagagttgggaa

SEQ ID NO: 202776 - DNA, 120 bp, Artificial Sequence
  ENSG00000114554_87 (sequence is synthesized)
gtgctgctcatttctccttgccaggaacaccatggctggcactcgacgggtggaggggcaggttgggggtaggcccgggggtcctggctgcagcctcatgccgccacccccgcaggagtg

SEQ ID NO: 202777 - DNA, 120 bp, Artificial Sequence
  ENSG00000114554_88 (sequence is synthesized)
cccccttaggctggggctgctgtggcagattgggagggctgtggcacattgcaggggactatggcaggttaagtgtgctgcagcaggggcggaggtatgtccctgccctgtgctggtgct

SEQ ID NO: 202778 - DNA, 120 bp, Artificial Sequence
  ENSG00000114573_0 (sequence is synthesized)
gcagctgaggacttcccctccgtggtgacagcctctgggtcctcggtcggtacagtctctgcacctcgcgccccagcaggtaaactaacattatggatttttccaagctacccaaaatac

SEQ ID NO: 202779 - DNA, 120 bp, Artificial Sequence
  ENSG00000114573_1 (sequence is synthesized)
tcgatgaagataaagaaagcacatttggttatgtgcatggggtctcaggacctgtggttacagcctgtgacatggcgggtgcagccatgtatgagctggtgagagtgggccacagcgaat

SEQ ID NO: 202780 - DNA, 120 bp, Artificial Sequence
  ENSG00000114573_2 (sequence is synthesized)
tggttggagagattattcgattggagggtgacatggctactattcaggtgtatgaagaaacttctggtgtgtctgttggagatcctgtacttcgcactggtaaacccctctctgtagagc

SEQ ID NO: 202781 - DNA, 120 bp, Artificial Sequence
  ENSG00000114573_3 (sequence is synthesized)
ttggtcctggcattatgggagccatttttgatggtattcaaagacctttgtcggatatcagcagtcagacccaaagcatctacatccccagaggagtaaacgtgtctgctcttagcagag

SEQ ID NO: 202782 - DNA, 120 bp, Artificial Sequence
  ENSG00000114573_4 (sequence is synthesized)
atatcaaatgggactttacaccttgcaaaaacctacgggttggtagtcatatcactggcggagacatttatggaattgtcagtgagaactcgcttatcaaacacaaaatcatgttacccc

SEQ ID NO: 202783 - DNA, 120 bp, Artificial Sequence
  ENSG00000114573_5 (sequence is synthesized)
cacgaaacagaggaactgtaacttacattgctccacctgggaattatgatacctctgatgttgtcttggagcttgaatttgaaggtgtaaaggagaagttcaccatggtgcaagtatggc

SEQ ID NO: 202784 - DNA, 120 bp, Artificial Sequence
  ENSG00000114573_6 (sequence is synthesized)
ctgtacgtcaagttcgacctgtcactgagaagctgccagccaatcatcctctgttgactggccagagagtccttgatgccctttttccgtgtgtccagggaggaactactgctatccctg

SEQ ID NO: 202785 - DNA, 120 bp, Artificial Sequence
  ENSG00000114573_7 (sequence is synthesized)
gagcctttggctgtggaaagacagtgatatcacagtctctatccaagtattctaacagtgatgtaatcatctatgtaggatgtggtgaaagaggaaatgagatgtctgaagtcctccggg

SEQ ID NO: 202786 - DNA, 120 bp, Artificial Sequence
  ENSG00000114573_8 (sequence is synthesized)
acttcccagagctcacaatggaggttgatggtaaggtagagtcaattatgaagaggacagctttggtagccaatacctccaatatgcctgttgctgctagagaagcctctatttatactg

SEQ ID NO: 202787 - DNA, 120 bp, Artificial Sequence
  ENSG00000114573_9 (sequence is synthesized)
gaatcacactgtcagagtacttccgtgacatgggctatcatgtcagtatgatggctgactctacctctagatgggctgaggcccttagagaaatctctggtcgtttagctgaaatgcctg

SEQ ID NO: 202788 - DNA, 120 bp, Artificial Sequence
  ENSG00000114573_10 (sequence is synthesized)
cagatagtggatatccagcctatcttggtgcccgtctggcctcgttttatgaacgagcaggcagggtgaaatgtcttggaaatcctgaaagagaagggagtgtcagcattgtaggagcag

SEQ ID NO: 202789 - DNA, 120 bp, Artificial Sequence
  ENSG00000114573_11 (sequence is synthesized)
tttctccacctggtggtgatttttctgatccagttacatctgccactcttggtatcgttcaggtgttctggggcttagataagaaactagctcaacgtaagcatttcccctctgtcaatt

SEQ ID NO: 202790 - DNA, 120 bp, Artificial Sequence
  ENSG00000114573_12 (sequence is synthesized)
ggctcatcagctacagcaagtatatgcgtgccttggatgaatactatgacaaacacttcacagagttcgttcctctgaggacgaaagctaaggaaattctgcaggaagaagaagacctgg

SEQ ID NO: 202791 - DNA, 120 bp, Artificial Sequence
  ENSG00000114573_13 (sequence is synthesized)
cagaaattgtacagcttgtgggaaaggcttctttggcagaaacagataaaatcactctggaggtagcaaaacttatcaaagatgatttcctacaacaaaatggatatactccttatgaca

SEQ ID NO: 202792 - DNA, 120 bp, Artificial Sequence
  ENSG00000114573_14 (sequence is synthesized)
ggttctgcccattctacaagacagtagggatgctgtccaacatgattgcattttatgatatggctcgtagagctgttgaaaccactgcccagagtgacaataaaatcacatggtccatta

SEQ ID NO: 202793 - DNA, 120 bp, Artificial Sequence
  ENSG00000114573_15 (sequence is synthesized)
ttcgtgagcacatgggagacatcctctataaactttcctccatgaaattcaaggatccactgaaagatggtgaggcaaagatcaaaagcgactatgcacaacttcttgaagacatgcaga

SEQ ID NO: 202794 - DNA, 120 bp, Artificial Sequence
  ENSG00000114573_16 (sequence is synthesized)
atgcattccgtagccttgaagattagaagccttgaagattacaactgtgatttccttttcctcagcaagctcctatgtgtatattttcctgaatttctcatctcaaaccctttgcttctt

SEQ ID NO: 202795 - DNA, 120 bp, Artificial Sequence
  ENSG00000114573_17 (sequence is synthesized)
tattgtgcagctttgagactagtgcctatgtgtgttatttgtttccctgtttttttggtaggtcttatataaaacaaacattcctttgttctagtgttgtgaagggcctccctcttcctt

SEQ ID NO: 202796 - DNA, 120 bp, Artificial Sequence
  ENSG00000114573_18 (sequence is synthesized)
tatctgaagtggtgaatatagtaaatatacattctggttacactactgtaaacttgtatgtagggtgatgaccctctttgtcctaggtgtaccctttcctcatctctattaaattgtaaa

SEQ ID NO: 202797 - DNA, 120 bp, Artificial Sequence
  ENSG00000114573_19 (sequence is synthesized)
tactctctttgcagtgaatttggaatggaaggccaggtttctataacttttgaacaggtactttgtgaaatgactcaatttctattgtggtaagctcattggcagcttagcattttgcaa

SEQ ID NO: 202798 - DNA, 120 bp, Artificial Sequence
  ENSG00000114573_20 (sequence is synthesized)
aggaattgctttgcaggaaatatttaattttcaaaaacataatgattaatgttccaattatgcatcacttcccccagtataaatcaggaatgtttgtgagaaaccattgggaactatact

SEQ ID NO: 202799 - DNA, 74 bp, Artificial Sequence
  ENSG00000114573_21 (sequence is synthesized)
aaatcaggaatgtttgtgagaaaccattgggaactataggacggagtgtccctcttgttgcccaggctggagtg

SEQ ID NO: 202800 - DNA, 71 bp, Artificial Sequence
  ENSG00000114573_22 (sequence is synthesized)
actatactctttttaaaatagacatttgtggggctcacacaatatatgaaatagtaccctctaaaaaagag

SEQ ID NO: 202801 - DNA, 120 bp, Artificial Sequence
  ENSG00000114573_23 (sequence is synthesized)
ggctcacacaatatatgaaatagtaccctctaaaaaagagaaaaaaaaaatcaggcggtcaaacttagagcaacattgtcttattaaagcatagtttatttcactagaaaaaatttaata

SEQ ID NO: 202802 - DNA, 120 bp, Artificial Sequence
  ENSG00000114573_24 (sequence is synthesized)
tcaaggactattacatacttcattactaggaagttctttttaaaatgacacttaaaacaatcactgaaaacttgatccacatcacaccctgtttattttccttaaacatcttggaagcct

SEQ ID NO: 202803 - DNA, 120 bp, Artificial Sequence
  ENSG00000114573_25 (sequence is synthesized)
aagcttctgagaatcatgtggcaagtgtgatgggcagtaaaataccagagaagatgtttagtagcaattaaaggctgtttgcacctttaaggaccagctgggctgtagtgattcctgggg

SEQ ID NO: 202804 - DNA, 120 bp, Artificial Sequence
  ENSG00000114573_26 (sequence is synthesized)
ccagagtggcattatgtttttacaaaataatgacatatgtcacatgtttgcatgtttgtttgcttgttgaatttttgaacagccagttgaccaatcatagaaagtattactttctttcat

SEQ ID NO: 202805 - DNA, 120 bp, Artificial Sequence
  ENSG00000114573_27 (sequence is synthesized)
atggtttttggttcactggcttaagaggtttctcagaatatctatggccacagcagcataccagtttccatcctaataggaatgaaattaattttgtatctactgataacagaatctggg

SEQ ID NO: 202806 - DNA, 120 bp, Artificial Sequence
  ENSG00000114573_28 (sequence is synthesized)
tcacatgaaaaaaaatcattttatccgtcttttaagtatatgtttaaaataataatttatgtgtctgcatattgcagaacagctctgagagcaacagtttcccattaactctttctgacc

SEQ ID NO: 202807 - DNA, 120 bp, Artificial Sequence
  ENSG00000114573_29 (sequence is synthesized)
aatagtgctggcaccgttgcttcctctttgggaagaggaaagggtgtgtgaacatggctaacaatcttcaaatacccaaattgtgatagcataaataaagtatttattttatgcctcagt

SEQ ID NO: 202808 - DNA, 120 bp, Artificial Sequence
  ENSG00000114573_30 (sequence is synthesized)
atattattatttaattttttaggtaatgcctatctcttggtctattaaggaaagaagcaatcagtagagaattcaggatagttttgtttaaattcttgcagattacatgtttttacagtg

SEQ ID NO: 202809 - DNA, 120 bp, Artificial Sequence
  ENSG00000114573_31 (sequence is synthesized)
gcctgctattgaggaaaggtattcttctatacaacttgttttaacctttgagaacattgacagaaattatgcaatggtttgttgagatacggacttgatggtgctgtttaatcagtttgc

SEQ ID NO: 202810 - DNA, 120 bp, Artificial Sequence
  ENSG00000114573_32 (sequence is synthesized)
ttccaaagtggcctactcaagaggccctaagactggtagaaattaaaaggatttcaaaaactttctattcctttcttaaacctaccagcaaactaggattgtgatagcaatgaatggtat

SEQ ID NO: 202811 - DNA, 120 bp, Artificial Sequence
  ENSG00000114573_33 (sequence is synthesized)
gatgaagaaagtttgaccaaatttgtttttttgttgttgttgttgttttgaatttgaaatcattcttattccctttaagaatgtttatgtatgagtgtgaagatgctagcgaacctatgc

SEQ ID NO: 202812 - DNA, 120 bp, Artificial Sequence
  ENSG00000114573_34 (sequence is synthesized)
tcagatattcatcgtaagtctcccttcacctgttacagagtttcagatcggtcactgatagtatgtatttctttagtaagaatgtgttaaaattacaatgatcttttaaaaagatgatgc

SEQ ID NO: 202813 - DNA, 120 bp, Artificial Sequence
  ENSG00000114573_35 (sequence is synthesized)
agttctgtatttattgtgctgtgtctggtcctaagtggagccaattaaacaagtttcatatgtatttttccagtgttgaatctcacacactgtactttgaaaatttccttccatcctgaa

SEQ ID NO: 202814 - DNA, 120 bp, Artificial Sequence
  ENSG00000114573_36 (sequence is synthesized)
taacgaatagaagaggccatatatattgcctccttatccttgagatttcactacctttatgttaaaagttgtgtataattgttaaaatctgtgaaagaataaaaagtggatttaaattaa

SEQ ID NO: 202815 - DNA, 120 bp, Artificial Sequence
  ENSG00000114573_37 (sequence is synthesized)
agtgagaccctatctctattaaaaaataagctcaagcaatcttcccaccccagcctcccaagtagctgggtctagaggcgcatgccaccacgcctggacttgcaagatggaaaagctcta

SEQ ID NO: 202816 - DNA, 120 bp, Artificial Sequence
  ENSG00000114573_38 (sequence is synthesized)
gatgaagataaagaaagcacatttggttatgtgcatggggtctcaggacctgccttcactccatgtatcatagcaactctcagaacatacctgaatcctaccagtggttacagcctgtga

SEQ ID NO: 202817 - DNA, 120 bp, Artificial Sequence
  ENSG00000114573_39 (sequence is synthesized)
tacctgcataaattctgtttgtccttaggcgatctcatagtgactataagaccgaagtagaatctctgtcataagggctcatctagcattgattatctaaattttataattattgaggta

SEQ ID NO: 202818 - DNA, 120 bp, Artificial Sequence
  ENSG00000114573_40 (sequence is synthesized)
ctactttgtgatatcctgtttataattatgtaaatgttcaaccagtgttcagttttatatgtcttaattttttgttaaatttgaggtaaataaactatgaagtttatagcttttaatatg

SEQ ID NO: 202819 - DNA, 120 bp, Artificial Sequence
  ENSG00000114626_0 (sequence is synthesized)
gagcgtgtttacatccgccgggtgcgcggcttcgccgcccgaggtcgttcggctcgggtaccatcctccgcgccatggacaccagcgacctgttcgccagctgcaggaagggggatgtgg

SEQ ID NO: 202820 - DNA, 120 bp, Artificial Sequence
  ENSG00000114626_1 (sequence is synthesized)
gccgagtgcggtacctgctggagcagcgagacgtggaggtgaatgtgcgggacaagtgggacagcacccccttgtactatgcctgcttgtgtgggcacgaggagctggtactctaccttc

SEQ ID NO: 202821 - DNA, 120 bp, Artificial Sequence
  ENSG00000114626_2 (sequence is synthesized)
tggccaatggagcccgctgcgaggccaacaccttcgatggtgagcgctgcctctatggggcactgagtgaccccatccgccgggctctacgcgattacaagcaggtcacggcttcctgca

SEQ ID NO: 202822 - DNA, 120 bp, Artificial Sequence
  ENSG00000114626_3 (sequence is synthesized)
ggaggcgggattactatgacgacttcttgcagcggcttctagagcagggcatccacagtgacgtggtctttgtagtacacgggaagccattccgggtgcatcgctgcgtcctgggtgcac

SEQ ID NO: 202823 - DNA, 120 bp, Artificial Sequence
  ENSG00000114626_4 (sequence is synthesized)
gtagtgcctactttgccaacatgctggacaccaaatggaagggcaagagtgtcgtggttctcaggcacccactgatcaaccccgtggcctttggggccctgctgcagtacctgtacacag

SEQ ID NO: 202824 - DNA, 120 bp, Artificial Sequence
  ENSG00000114626_5 (sequence is synthesized)
gccgcctggacattggcgtagagcatgtgagtgactgtgagcgcctggccaagcaatgccagctgtgggacctgctcagcgacctggaggccaagtgcgagaaggtgtctgagtttgtgg

SEQ ID NO: 202825 - DNA, 120 bp, Artificial Sequence
  ENSG00000114626_6 (sequence is synthesized)
cgtctaagccaggcacgtgtgtgaaggtgctgaccatcgagcccccacctgcagacccccgcctccgggaggacatggcgctgctggccgattgtgccctgccccccgagctccgaggtg

SEQ ID NO: 202826 - DNA, 120 bp, Artificial Sequence
  ENSG00000114626_7 (sequence is synthesized)
atctttgggagctgcccttcccttgtcctgacggcttcaacagctgccctgacatctgcttccgagtggctggctgcagcttcctctgccacaaggcctttttctgtggccgcagtgact

SEQ ID NO: 202827 - DNA, 120 bp, Artificial Sequence
  ENSG00000114626_8 (sequence is synthesized)
agccagcgacctcagggggccccccagccgtcaccctgcatggcatctcacccgacgtcttcactcacgtgctctactacatgtacagcgaccacactgagctgtcccccgaggcagcct

SEQ ID NO: 202828 - DNA, 120 bp, Artificial Sequence
  ENSG00000114626_9 (sequence is synthesized)
atgatgtgctgagcgtcgccgacatgtacctgctgccaggcctgaagaggctgtgcggccgcagcctggctcagatgctagacgaggacactgtggtgggtgtgtggcgcgtggccaagc

SEQ ID NO: 202829 - DNA, 120 bp, Artificial Sequence
  ENSG00000114626_10 (sequence is synthesized)
tcttccgcctggcgcggcttgaggaccagtgcactgagtacatggccaaggtcattgagaagctggtggagcgggaggacttcgtggaggcggtgaaggaggaggcagcggctgtggcag

SEQ ID NO: 202830 - DNA, 120 bp, Artificial Sequence
  ENSG00000114626_11 (sequence is synthesized)
cccggcaggagacggactctatcccgctggtggacgacatccgcttccacgtggccagcacggtgcagacctacagcgccatagaggaggcgcagcagcgtctgcgggcactcgaggacc

SEQ ID NO: 202831 - DNA, 120 bp, Artificial Sequence
  ENSG00000114626_12 (sequence is synthesized)
tgctcgtgtccatcggtctggactgttgagcccctggctgggcagccccaggggccaggagctctcttggagacaagcatgtgtatgcgtttgtgtgcagctcttcttcctgctccctgc

SEQ ID NO: 202832 - DNA, 120 bp, Artificial Sequence
  ENSG00000114626_13 (sequence is synthesized)
acattgagggcttcatggggggtgcgaggggctcagtggggcttctcttccctccatgagcctggagaccccaggggaggatccatttgggatgagccccctccccccaatgcacaagcc

SEQ ID NO: 202833 - DNA, 120 bp, Artificial Sequence
  ENSG00000114626_14 (sequence is synthesized)
agcccccaagaccctgggggtggacaccactcagggaaacctggggtgggggtgggctttggtcttagcactttccttctccagatcccccctacccaccccagtcccaaatccagtcct

SEQ ID NO: 202834 - DNA, 120 bp, Artificial Sequence
  ENSG00000114626_15 (sequence is synthesized)
ctggcccttgcctagccctgaattgcttctctaagctggtgttcccatgcacagggccattcaggaagggctgggggagtgtgtgtggcaataaagcttgaaggcaccgtgggagcatga

SEQ ID NO: 202835 - DNA, 120 bp, Artificial Sequence
  ENSG00000114626_16 (sequence is synthesized)
ccccccggggtggttccagctgcctctcgggttgggttgcaagagagaggactagtgtgcctgctcaggaagagcttgtcccacccacatgctgaggccctcccatctgttccctggggc

SEQ ID NO: 202836 - DNA, 120 bp, Artificial Sequence
  ENSG00000114626_17 (sequence is synthesized)
aaccatggtggcaagtgggcccaggagtcctagtcctgcagccaggtggccaggtgggaggggatcaccctttttctgtgggcctgatgacagctgaggtcccgcaggccctcatcctcc

SEQ ID NO: 202837 - DNA, 120 bp, Artificial Sequence
  ENSG00000114626_18 (sequence is synthesized)
aaaggtccagcctcggcactggctctggcttctgtccctgtagcccatcgtcccccagcactgatagcacacagtgtctgcctgttcgaccccacctccacatccttgcctgcactttgc

SEQ ID NO: 202838 - DNA, 120 bp, Artificial Sequence
  ENSG00000114626_19 (sequence is synthesized)
cttgagtgcctctcctgctctggtctgcctgtcacctgccctcacctgggggaggcttccccataccaaaagggatgttttctctccgttcctttccacgggccttctttctcagaccat

SEQ ID NO: 202839 - DNA, 120 bp, Artificial Sequence
  ENSG00000114626_20 (sequence is synthesized)
ccaggttggtctcaaactcctgagcccaagtgatccacctaccttggtctcgcaaagtgcctggattataggtgtgagctgccacgcccaggcttgtttttcttaatagtccctgccatc

SEQ ID NO: 202840 - DNA, 120 bp, Artificial Sequence
  ENSG00000114626_21 (sequence is synthesized)
gttaggtagtgggttgattgtcctgcctcactagagtataagttcagcaggacagggacctgtgtctcgttcactgctgtgctccagtgtgtgggacaagcccagccaccaagtcagctc

SEQ ID NO: 202841 - DNA, 120 bp, Artificial Sequence
  ENSG00000114626_22 (sequence is synthesized)
tccgttctgtgttgtctgtcttccgtgtgagtgagtatgtgcctgtgtgagtgcacacagacgtgcccattcgcctagcccttgactgggagggtgttggggtcagagtgggcccagggt

SEQ ID NO: 202842 - DNA, 120 bp, Artificial Sequence
  ENSG00000114626_23 (sequence is synthesized)
aatttgggaaggcatcgccagagattcggagccccatgtgtgggaaggtggggaggagggacagggagattagaatttcccccaggccccttccctgctaactggtgagccctgcctccc

SEQ ID NO: 202843 - DNA, 120 bp, Artificial Sequence
  ENSG00000114626_24 (sequence is synthesized)
cgggattactatgacgacttcttgcagcggtgagccagggcacacgaggggtgcagcatggggtgcggtggccctggtgggtgtggcgagtctgctctgactgtggcctgcactgggttc

SEQ ID NO: 202844 - DNA, 120 bp, Artificial Sequence
  ENSG00000114626_25 (sequence is synthesized)
ctgtgccctcctgttgcccctggccccagcccgttgccctgagcccccgtctagctcctcaggagacagaccctggccctcacacttcctgagcccggcctcccccaggcctttttctgt

SEQ ID NO: 202845 - DNA, 120 bp, Artificial Sequence
  ENSG00000114626_26 (sequence is synthesized)
ggaagggcccagctggccccatggttgacgttttgagaaggctggaggggaaggctgtgggactttggatttttctttcaggtagaggaagccttgttgggctccagagagaggatgagt

SEQ ID NO: 202846 - DNA, 120 bp, Artificial Sequence
  ENSG00000114626_27 (sequence is synthesized)
gatgagcctgtgtcacagacactccacacttgtcagccacttgggatcctcagcttctctagcaggagggtggagggtgggtggggacagcctcctctctgtggtgctgcagatccctgg

SEQ ID NO: 202847 - DNA, 120 bp, Artificial Sequence
  ENSG00000114626_28 (sequence is synthesized)
ggttctgggttcccagtctcctcttcccttgctgcctgcctctgtctccagctgccccaaggtgtccgtaagccaaggctgcagggcagcagcagagtgctgaaggtttgctctgccagg

SEQ ID NO: 202848 - DNA, 120 bp, Artificial Sequence
  ENSG00000114626_29 (sequence is synthesized)
tgtgtgtgtgcgtgcgcgtgcgcgcgcactataaagcaatccccatatctggtggcttaaagaagaggggagtttgtttctccttcacttctgactgaggtgggtgccccagggcaagtg

SEQ ID NO: 202849 - DNA, 120 bp, Artificial Sequence
  ENSG00000114626_30 (sequence is synthesized)
gcttgcggaagatcaggtcatccctccatcttgcccctgtatgcctaagggtgaaggtcaaaaaccttttctctgaaggtgagtgtttcaggttctgtgggccatatggccctgttgtag

SEQ ID NO: 202850 - DNA, 120 bp, Artificial Sequence
  ENSG00000114626_31 (sequence is synthesized)
ctactcaactctgtagcgcaaaggtagccagagacagtacagagatgagtgggtgaggctgcattccaataaaactttacttgcacaaacaggctggatttggtccacaggccgtagctt

SEQ ID NO: 202851 - DNA, 120 bp, Artificial Sequence
  ENSG00000114626_32 (sequence is synthesized)
acccatcctgcctggggcatcgcgtttggccatggagattgggtcctaggcaaactcatgctctaggaggaagaggaaggcagggcaagcaatgctgtttttgtagaagccaccggaaat

SEQ ID NO: 202852 - DNA, 120 bp, Artificial Sequence
  ENSG00000114626_33 (sequence is synthesized)
tgcaccacttctcatgttcccctggagagaacttcgtgcctacctgccaacaagggaggcttggaaagtcattctgtggccagggccctgttttgtgggggaaggggaggaagcatgctg

SEQ ID NO: 202853 - DNA, 120 bp, Artificial Sequence
  ENSG00000114626_34 (sequence is synthesized)
ggagacagagggcagtccctactgctgctctatctccagtggcagctcccttgtccatccctccgcgcggcctgacagcccctcagcctccatctttcccaccccctctactgggcatct

SEQ ID NO: 202854 - DNA, 120 bp, Artificial Sequence
  ENSG00000114626_35 (sequence is synthesized)
cctgcagctcagcccagctctctggcccctgtagcaggggttacctttgcccaccctggagaagctccctcttcaaggagcctcgccacccaaagggcaccttgtctcagagtgtggctt

SEQ ID NO: 202855 - DNA, 120 bp, Artificial Sequence
  ENSG00000114626_36 (sequence is synthesized)
gggctcttaacctgggttgatactggttgagctgtgtgacactgggtgagctttgtgatcttgggccagttacttaactgctctgtgcctctagaacatggggatagctctcgtcgtcac

SEQ ID NO: 202856 - DNA, 120 bp, Artificial Sequence
  ENSG00000114626_37 (sequence is synthesized)
ttcctaaggccttgtgcagatgcatgggttacccaggtaaaggaggtggcatggcacatggcacatggcttgtaatgtggtcgcagagctccccttgtctctgtctgcagcttgctccct

SEQ ID NO: 202857 - DNA, 120 bp, Artificial Sequence
  ENSG00000114626_38 (sequence is synthesized)
gtgccacccaggctctggcctgaatctgagggcttcagtcttatccagcacaggatgtatctgtaggtgggctctgtgtccccacagcctcttgagagggagggagctggtagatagtct

SEQ ID NO: 202858 - DNA, 120 bp, Artificial Sequence
  ENSG00000114626_39 (sequence is synthesized)
cccacccctggcagagtccctgcataggtcttgactagctgcctctgtcccaccattctgacagcccccgcaggtaggcatggttatctatacctcatggactgggaactagaggcacag

SEQ ID NO: 202859 - DNA, 120 bp, Artificial Sequence
  ENSG00000114626_40 (sequence is synthesized)
ggaggtgcagtgacttgcccagggccccacagctagaagtgtcagacccaggtctgtataactcggagctcagaccctggctcctgcgagggccctgcctcccgcctgccctgccagcct

SEQ ID NO: 202860 - DNA, 120 bp, Artificial Sequence
  ENSG00000114626_41 (sequence is synthesized)
gctcagggcatgggagaaccccccagtcttctgccccctagcggtcctgcagatccctgtgggaatctgggccagccccccgacccccaaccccatacatgcgcagggagctcctactcc

SEQ ID NO: 202861 - DNA, 120 bp, Artificial Sequence
  ENSG00000114626_42 (sequence is synthesized)
cactggaagccttcccgccagtgccccccaaccaccacaggccctagccttggctgttgtgccctgggagcccttggtgacctcggggggcaccttcatccctgtcttcactgcagctgt

SEQ ID NO: 202862 - DNA, 120 bp, Artificial Sequence
  ENSG00000114626_43 (sequence is synthesized)
atcctccgcgccatggacaccagcgacctgttcgccagctgcaggaagggggatgtgggccgagtgcggtgaggacctcgcagtcccggggagggtgcgggaggtggccgccctcggaac

SEQ ID NO: 202863 - DNA, 80 bp, Artificial Sequence
  ENSG00000114626_44 (sequence is synthesized)
gaacgcctcgggccctgggacgggcggctgggcggccgcggagaggcgggcgcctctgccgggtcacagccctcggagcg

SEQ ID NO: 202864 - DNA, 120 bp, Artificial Sequence
  ENSG00000114626_45 (sequence is synthesized)
ccactgttcgccctggtagggcccggacgtcagaccccccgggcgcagggcgcgggtataggcctgggactccagacgtggcccctttctctcgtgctctctggacctggcgcggggaac

SEQ ID NO: 202865 - DNA, 120 bp, Artificial Sequence
  ENSG00000114626_46 (sequence is synthesized)
acctagagcccataatcggcctccggtccctgaggattcggaaactcctgacgcagctaaagtgaatctggcgctgagatgccccctccatgggccggacgcggagggaaggggtgccca

SEQ ID NO: 202866 - DNA, 120 bp, Artificial Sequence
  ENSG00000114626_47 (sequence is synthesized)
tgacttgcccagggccccacagctagaagtgtcagacccagctgtcccccgaggcagcctatgatgtgctgagcgtcgccgacatgtacctgctgccaggcctgaagaggctgtgcggcc

SEQ ID NO: 202867 - DNA, 120 bp, Artificial Sequence
  ENSG00000114631_0 (sequence is synthesized)
gcgccgctgcggctgcaggcggcgacggctacaccatgggccggctgctgcgggccgcccggctgccgccgctgctttcgccgctgctgcttctgctggttgggggagcgttcctgggtg

SEQ ID NO: 202868 - DNA, 120 bp, Artificial Sequence
  ENSG00000114631_1 (sequence is synthesized)
cctgtgtggctgggtctgatgagcctggcccagagggcctcacctccacctccctgctagacctcctgctgcccactggcttggagccactggactcagaggagcctagtgagaccatgg

SEQ ID NO: 202869 - DNA, 120 bp, Artificial Sequence
  ENSG00000114631_2 (sequence is synthesized)
gcctgggagctgggctgggagcccctggctcaggcttccccagcgaagagaatgaagagtctcggattctgcagccaccacagtacttctgggaagaggaggaagagctgaatgactcaa

SEQ ID NO: 202870 - DNA, 120 bp, Artificial Sequence
  ENSG00000114631_3 (sequence is synthesized)
gtctggacctgggacccactgcagattatgtttttcctgacttaactgagaaggcaggttccattgaagacaccagccaggctcaagagctgccaaacctcccctctcccttgcccaaga

SEQ ID NO: 202871 - DNA, 120 bp, Artificial Sequence
  ENSG00000114631_4 (sequence is synthesized)
tgaatctggttgagcctccctggcatatgcctcccagagaggaggaagaagaggaagaggaagaggaggagagggagaaggaagaggtagagaaacaagaggaggaggaagaggaggagc

SEQ ID NO: 202872 - DNA, 120 bp, Artificial Sequence
  ENSG00000114631_5 (sequence is synthesized)
tgctccctgtgaatggatcccaagaagaagccaagcctcaggtccgtgacttttctctcaccagcagcagccagaccccaggggccaccaaaagcaggcatgaagactccggggaccagg

SEQ ID NO: 202873 - DNA, 120 bp, Artificial Sequence
  ENSG00000114631_6 (sequence is synthesized)
cctcatcaggtgtggaggtggagagcagcatggggcccagcttgctgctgccttcagtcaccccaactacagtgactccgggggaccaggactccaccagccaagaggcagaggccacag

SEQ ID NO: 202874 - DNA, 120 bp, Artificial Sequence
  ENSG00000114631_7 (sequence is synthesized)
tgctgccagctgcagggcttggggtagagttcgaggctcctcaggaagcaagcgaggaagccactgcaggagcagctggtttgtctggccagcacgaggaggtgccggccttgccttcat

SEQ ID NO: 202875 - DNA, 120 bp, Artificial Sequence
  ENSG00000114631_8 (sequence is synthesized)
tccctcaaaccacagctcccagtggggccgagcacccagatgaagatccccttggctctagaacctcagcctcttccccactggcccctggagacatggaactgacaccttcctctgcta

SEQ ID NO: 202876 - DNA, 120 bp, Artificial Sequence
  ENSG00000114631_9 (sequence is synthesized)
atctcaaccagcagctcctagaagggcaggcagctgaagctcaatccaggataccctgggattctacgcaggtgatctgcaaggactggagcaatctggctgggaaaaactacatcattc

SEQ ID NO: 202877 - DNA, 120 bp, Artificial Sequence
  ENSG00000114631_10 (sequence is synthesized)
tgaacatgacagagaacatagactgtgaggtgttccggcagcaccgggggccacagctcctggccctggtggaagaggtgctgccccgccatggcagtggccaccatggggcctggcaca

SEQ ID NO: 202878 - DNA, 120 bp, Artificial Sequence
  ENSG00000114631_11 (sequence is synthesized)
tctctctgagcaagcccagcgagaaggagcagcaccttctcatgacactggtgggcgagcagggggtggtgcccactcaagatgtcctttccatgctgggtgacatccgcaggagcctgg

SEQ ID NO: 202879 - DNA, 120 bp, Artificial Sequence
  ENSG00000114631_12 (sequence is synthesized)
aggagattggcatccagaactattccacaaccagcagctgccaggcgcgggccagccaggtgcgcagcgactacggcacgctcttcgtggtgctggtggtcattggggccatctgcatca

SEQ ID NO: 202880 - DNA, 120 bp, Artificial Sequence
  ENSG00000114631_13 (sequence is synthesized)
tcatcattgcgcttggcctgctctacaactgctggcagcgccggctgcccaagctcaagcacgtgtcgcacggcgaggagctgcgcttcgtggagaacggctgccacgacaaccccacgc

SEQ ID NO: 202881 - DNA, 120 bp, Artificial Sequence
  ENSG00000114631_14 (sequence is synthesized)
tggacgtggccagcgacagccagtcggagatgcaggagaagcaccccagcctgaacggcggcggggccctcaacggcccggggagctggggggcgctcatggggggcaagcgggaccccg

SEQ ID NO: 202882 - DNA, 120 bp, Artificial Sequence
  ENSG00000114631_15 (sequence is synthesized)
aggactcggacgtgttcgaggaggacacgcacctgtgagcgcagccgaggcgcaggccgagtgggccgccaggaccaagcgaggtggaccccgaaacggacggcccggagcccgcaccag

SEQ ID NO: 202883 - DNA, 120 bp, Artificial Sequence
  ENSG00000114631_16 (sequence is synthesized)
gcgcctacccgggccgcccccgcggcctggccctcggcgcgggctccttcccgcttcccccgacttcacacggcggcttcggaccaactccctcactcccgcccgaggggcaggcctcaa

SEQ ID NO: 202884 - DNA, 120 bp, Artificial Sequence
  ENSG00000114631_17 (sequence is synthesized)
ggcaggcctcaaagcccgccttggccccgctttcccgcccctgaaccccggccccgcgggcggcgggcggcgcttcctgcgccccgggactcaattaaacccgcccggagaccacgccgg

SEQ ID NO: 202885 - DNA, 120 bp, Artificial Sequence
  ENSG00000114638_0 (sequence is synthesized)
gcggagcgggccctaccgtgtgcgcagaaagaggaggcgcttgccttcagcttgtgggaaatcccgaagatggccaaagacaactcaactgttcgttgcttccagggcctgctgattttt

SEQ ID NO: 202886 - DNA, 120 bp, Artificial Sequence
  ENSG00000114638_1 (sequence is synthesized)
ggaaatgtgattattggttgttgcggcattgccctgactgcggagtgcatcttctttgtatctgaccaacacagcctctacccactgcttgaagccaccgacaacgatgacatctatggg

SEQ ID NO: 202887 - DNA, 120 bp, Artificial Sequence
  ENSG00000114638_2 (sequence is synthesized)
gctgcctggatcggcatatttgtgggcatctgcctcttctgcctgtctgttctaggcattgtaggcatcatgaagtccagcaggaaaattcttctggcgtatttcattctgatgtttata

SEQ ID NO: 202888 - DNA, 120 bp, Artificial Sequence
  ENSG00000114638_3 (sequence is synthesized)
gtatatgcctttgaagtggcatcttgtatcacagcagcaacacaacaagactttttcacacccaacctcttcctgaagcagatgctagagaggtaccaaaacaacagccctccaaacaat

SEQ ID NO: 202889 - DNA, 120 bp, Artificial Sequence
  ENSG00000114638_4 (sequence is synthesized)
gatgaccagtggaaaaacaatggagtcaccaaaacctgggacaggctcatgctccaggacaattgctgtggcgtaaatggtccatcagactggcaaaaatacacatctgccttccggact

SEQ ID NO: 202890 - DNA, 120 bp, Artificial Sequence
  ENSG00000114638_5 (sequence is synthesized)
gagaataatgatgctgactatccctggcctcgtcaatgctgtgttatgaacaatcttaaagaacctctcaacctggaggcttgtaaactaggcgtgcctggtttttatcacaatcagggc

SEQ ID NO: 202891 - DNA, 120 bp, Artificial Sequence
  ENSG00000114638_6 (sequence is synthesized)
tgctatgaactgatctctggtccaatgaaccgacacgcctggggggttgcctggtttggatttgccattctctgctggactttttgggttctcctgggtaccatgttctactggagcaga

SEQ ID NO: 202892 - DNA, 120 bp, Artificial Sequence
  ENSG00000114638_7 (sequence is synthesized)
attgaatattaagcataaagtgttgccaccatacctccttccccgagtgactctggatttggtgctggaaccagctctctcctaatattccacgtttgtgccccacactaacgtgtgtgt

SEQ ID NO: 202893 - DNA, 120 bp, Artificial Sequence
  ENSG00000114638_8 (sequence is synthesized)
agactgttgaaaggagaatttgaaaaatgcataataactacttccatccctgcttatttttaatttgggaaaataaatacattcgaaggaacctgtgttatcacagtaacccagagctgt

SEQ ID NO: 202894 - DNA, 120 bp, Artificial Sequence
  ENSG00000114638_9 (sequence is synthesized)
atttggctagcaatctgcctgtatctctcactattatctaaaagaaaccttccaatgcttctgttgatctcagtattgtcaggggaacagagaagttgggaaaagattactgaaatatac

SEQ ID NO: 202895 - DNA, 120 bp, Artificial Sequence
  ENSG00000114638_10 (sequence is synthesized)
cttttgcatttctttctagagtagctcccatatatggagatgggtgattctcttgatgccaccttcagatccttttattctccagaataattcttaacagtggttcaaatttcctttcat

SEQ ID NO: 202896 - DNA, 120 bp, Artificial Sequence
  ENSG00000114638_11 (sequence is synthesized)
tccagaataattcttaacagtggttcaaatttcctttcataccttgaagtatgtgtttagtagcctcaattctccattaattaaaagtgtgggctgggcgtgggggctcatgcctgtaat

SEQ ID NO: 202897 - DNA, 64 bp, Artificial Sequence
  ENSG00000114638_12 (sequence is synthesized)
tagctacttggcaggctaacgcaggagaatcacttgaccgggagacagaggttgcagtgagctg

SEQ ID NO: 202898 - DNA, 120 bp, Artificial Sequence
  ENSG00000114638_13 (sequence is synthesized)
acagaggttgcagtgagctgagatcgtacctattgcactccatcctggatgaaagagccagactctgtctcaaaacaaacaaaaaagcgtggggacttctggggacagacaaggtgcctg

SEQ ID NO: 202899 - DNA, 120 bp, Artificial Sequence
  ENSG00000114638_14 (sequence is synthesized)
ggggacagacaaggtgcctgttatatatttactcagtctttgccctgaatggtctcagcttgagaccatttcaaactggagagaagcaagccagccaatagaatggggtgatttacaggg

SEQ ID NO: 202900 - DNA, 120 bp, Artificial Sequence
  ENSG00000114638_15 (sequence is synthesized)
atttctgtttactgtcaaaatatttctcatctgcactatgtttccatttgtggtcctgaaggaaattcttataactcaacatttgtctggtcttataagtaaagacagctttaaaatctg

SEQ ID NO: 202901 - DNA, 120 bp, Artificial Sequence
  ENSG00000114638_16 (sequence is synthesized)
aatcacagactacccttccctggtcctggaggttcaaagaattgcaggagggtagaaaagcacctgggtcgggtgcagactgcggagcgggccctaccgtgtgcgcagaaagaggaggcg

SEQ ID NO: 202902 - DNA, 120 bp, Artificial Sequence
  ENSG00000114638_17 (sequence is synthesized)
ggagcgggccctaccgtgtgcgcagaaagaggaggcgctggacttatcctaccttaagttgaagcagaccagcaattgttgtgacctacaatctccacacccatctttactctgagccaa

SEQ ID NO: 202903 - DNA, 120 bp, Artificial Sequence
  ENSG00000114646_0 (sequence is synthesized)
agatacttaaataattaacaaaatatatttaaaatgagtgggagaacttcctccattaaaccctgttgaaaatgtgtgagtggttgtcatgccccagacatcaaggaacccatccatgag

SEQ ID NO: 202904 - DNA, 120 bp, Artificial Sequence
  ENSG00000114646_1 (sequence is synthesized)
gtcttcccacacagactggcctcaggaagggaaggaggaggtaggccgctctgacagccacaacccgagttgaggaaacaagcaaaggaacacagagagtctacatacagtaaaaggtga

SEQ ID NO: 202905 - DNA, 120 bp, Artificial Sequence
  ENSG00000114646_2 (sequence is synthesized)
caggagttaagctgcacacaagggaagcagagatgggttggaggcagttaagggtgcgttgctgcctctgtggctgaggtgagtgcaaagccctacatggtcccctgtttagagaaggct

SEQ ID NO: 202906 - DNA, 120 bp, Artificial Sequence
  ENSG00000114646_3 (sequence is synthesized)
attgtttcaaacatattttacttggtccccggaggcagcatgaaactatgaaagaaagagccttaccccttttttcaaggctctccagaccacagttctgggatgggtgtgggtggttgc

SEQ ID NO: 202907 - DNA, 120 bp, Artificial Sequence
  ENSG00000114646_4 (sequence is synthesized)
cattcgttcatttatgcctgtctgatatggagcctccctctgttaccagccctgtgcactcaagtgccttgcagtccagtgaggaataactgtagataagatgagatgatgggcattaag

SEQ ID NO: 202908 - DNA, 120 bp, Artificial Sequence
  ENSG00000114646_5 (sequence is synthesized)
tgtaactgctgagaagccttcatagagggaaaggtgataagaactgagtttttctggcatgaggagtttaccaggcaggagaggtggagacgctaggctaggcaaataggctgcagccat

SEQ ID NO: 202909 - DNA, 120 bp, Artificial Sequence
  ENSG00000114646_6 (sequence is synthesized)
agttctgctgagaaacaggttttgaaccaaggcaactccatctggagatatgtatcagaaagattaggagatagaatctccatcttggtcacttatttggtcttctaagacagcaatggg

SEQ ID NO: 202910 - DNA, 120 bp, Artificial Sequence
  ENSG00000114646_7 (sequence is synthesized)
accgtctcttaaatactggagttgtcctatctccttgggctgataccctgaactgtcatttgggtgagtaacacattaaggggtagacggtcggtttgggggaataaactaagtaactag

SEQ ID NO: 202911 - DNA, 120 bp, Artificial Sequence
  ENSG00000114646_8 (sequence is synthesized)
gttgcggttcctcctgccgactaagcagacctcctggtgcgtggtcttgggttgccctgtgagccctgaagctgtgaatgggccccacagatcactctaaagccaagcatccatgtgtgc

SEQ ID NO: 202912 - DNA, 120 bp, Artificial Sequence
  ENSG00000114646_9 (sequence is synthesized)
ccggctggggatctagacccccctggtctacccaggaacctgagttttggtggtctgagacacctgggggacgacgtatcccggagaagggaccaggattaaaggccgctccccaggctg

SEQ ID NO: 202913 - DNA, 120 bp, Artificial Sequence
  ENSG00000114646_10 (sequence is synthesized)
cccggagactagaaggaaggcgaggtagccgcagtcccagggagggtcttaccccttgctcccgggatgcgttatggcgggcctggctgtgcgagatctaggctagtggctttggctgcg

SEQ ID NO: 202914 - DNA, 120 bp, Artificial Sequence
  ENSG00000114646_11 (sequence is synthesized)
aacggattagatctgatccgattagagcctgggcggtcggcttcgcccccttgccaggctctgccaacgcccgcccctccctcgtggagacccggagacctccctgagagccttcccgcc

SEQ ID NO: 202915 - DNA, 120 bp, Artificial Sequence
  ENSG00000114646_12 (sequence is synthesized)
cggaacacgggattggtgcagaatccgagaggctccatgcgccccgggcctggcttgtttccacagtgggggctcgtgcttccgccccctgcggctcttctggaccccgccccgaccctg

SEQ ID NO: 202916 - DNA, 120 bp, Artificial Sequence
  ENSG00000114646_13 (sequence is synthesized)
cgggtaactgggcccgcgacgtccccgcctccgtgcttgccgcgtggcgggtgggttcctccgggtcggggccccgtgccgcctgttcacctggggcgggaccgtggccccatcccacag

SEQ ID NO: 202917 - DNA, 120 bp, Artificial Sequence
  ENSG00000114646_14 (sequence is synthesized)
gtctcccgcccgtgcacctgccgcctaacgccgcgcgccgcgccgtgcgcctgcctcgcgctccccgtccgcctgccccgcactccccgtccgtgtgtctcctagtccccagcgaggggt

SEQ ID NO: 202918 - DNA, 120 bp, Artificial Sequence
  ENSG00000114646_15 (sequence is synthesized)
cctagtccccagcgaggggtctgtctgttcccctggcaggctgaccaaggggccggcgtcaccgctacgtgcggcggggccggcgcggcgggcggggtgagggcggcgctgagcgcagcg

SEQ ID NO: 202919 - DNA, 80 bp, Artificial Sequence
  ENSG00000114646_16 (sequence is synthesized)
cggacggcggcggcggcggcatgcggctcctcgcgctgcccatcgtgggctgaggcggccgcagaaccggcgggaggcgc

SEQ ID NO: 202920 - DNA, 120 bp, Artificial Sequence
  ENSG00000114646_17 (sequence is synthesized)
gggccgggggccgccgccactgctgctgtttctgggggccgcgctggtcctggcctctggggccgtgccggcgcgtgaggcgggcagcgcggttgaggccgaagagctggtgaagggcag

SEQ ID NO: 202921 - DNA, 120 bp, Artificial Sequence
  ENSG00000114646_18 (sequence is synthesized)
gcagcccggcgtgggagccgcctgccaacgacacgcgggaagaagccggcccaccagcggctggggaagatgaggcgtcgtggacggcgcccggtggcgagctggccgggccagaagagg

SEQ ID NO: 202922 - DNA, 120 bp, Artificial Sequence
  ENSG00000114646_19 (sequence is synthesized)
tgctgcaggagtcggctgcggtgaccggcaccgcctggctggaagctgacagcccaggcctgggaggagtgaccgcagaggcgggcagcggcgatgcccaggcccttccagctacgctcc

SEQ ID NO: 202923 - DNA, 120 bp, Artificial Sequence
  ENSG00000114646_20 (sequence is synthesized)
aggctccccacgaggtcctcgggcagtcaatcatgccccctgccattcctgaggctacagaggccagcgggccaccctcccccacccccggcgacaagctgagcccagcttctgaactcc

SEQ ID NO: 202924 - DNA, 120 bp, Artificial Sequence
  ENSG00000114646_21 (sequence is synthesized)
ccaaggagagccccttggaggtttggctgaacctggggggcagcacacccgaccctcaagggccagagctgacttacccatttcagggcaccctggagccccaaccggcatcagatatca

SEQ ID NO: 202925 - DNA, 120 bp, Artificial Sequence
  ENSG00000114646_22 (sequence is synthesized)
ttgacatcgactacttcgaaggactggatggtgagggtcgtggcgcagatctggggagcttcccagggtcaccaggaacctcagagaaccaccctgatactgagggagagaccccttcct

SEQ ID NO: 202926 - DNA, 120 bp, Artificial Sequence
  ENSG00000114646_23 (sequence is synthesized)
ggagcctgcttgacttatacgatgatttcacccccttcgatgaatctgatttctaccccaccacatccttttatgatgacttggatgaagaggaggaggaagaggaggatgacaaagatg

SEQ ID NO: 202927 - DNA, 120 bp, Artificial Sequence
  ENSG00000114646_24 (sequence is synthesized)
cagtaggaggtggagacctagaagatgaaaatgagcttctagtgcccactgggaagcctggtctggggcccgggacaggccagcccaccagtcggtggcatgctgtccctccacagcaca

SEQ ID NO: 202928 - DNA, 120 bp, Artificial Sequence
  ENSG00000114646_25 (sequence is synthesized)
ctctggggtcggtccccggcagcagcatcgccctcaggccccgcccaggagagccaggcagggacttggcctccagtgaaaatggcactgagtgccgcagtggctttgtgcggcataacg

SEQ ID NO: 202929 - DNA, 120 bp, Artificial Sequence
  ENSG00000114646_26 (sequence is synthesized)
gctcctgccggtcagtgtgcgacctcttcccaagttactgtcacaatggcggccagtgctacctggtggagaacataggggccttctgcaggtgcaacacgcaggactacatctggcaca

SEQ ID NO: 202930 - DNA, 120 bp, Artificial Sequence
  ENSG00000114646_27 (sequence is synthesized)
aggggatgcgctgcgagtccatcatcaccgacttccaggtgatgtgcgtggccgtgggctcggctgccctcgtcctgctcctgctcttcatgatgacggtgttctttgccaagaagctct

SEQ ID NO: 202931 - DNA, 120 bp, Artificial Sequence
  ENSG00000114646_28 (sequence is synthesized)
acctgctcaagacggagaataccaagctgcgtaggaccaacaaattccggaccccatctgagctccacaatgataacttctccctctccaccattgccgagggctctcacccaaatgtaa

SEQ ID NO: 202932 - DNA, 120 bp, Artificial Sequence
  ENSG00000114646_29 (sequence is synthesized)
ggaaactttgcaacactccccgtacctcctccccccatgcccgtgccttggctcactatgataacgttatctgtcaggatgatcctagtgctccccacaaaatccaggaggttctcaagt

SEQ ID NO: 202933 - DNA, 120 bp, Artificial Sequence
  ENSG00000114646_30 (sequence is synthesized)
cctgcctgaaagaggaggagtcatttaacatccagaactccatgtcgcccaaacttgagggtggcaaaggtgaccaggctgacttggatgtgaactgtcttcagaataatttaacctaaa

SEQ ID NO: 202934 - DNA, 120 bp, Artificial Sequence
  ENSG00000114646_31 (sequence is synthesized)
gcagagcaagaagagaggaagcgggggtagtgggtggggggtaggggaagaaacattatctcctcttgtacagagtctatttcttgtaaccatttgttaaactcttttctttttctgatc

SEQ ID NO: 202935 - DNA, 120 bp, Artificial Sequence
  ENSG00000114646_32 (sequence is synthesized)
tcatggcatgcttttatgtattttgtacaggaggcaaaaaaatacttaaaataagcaaagaaactgaacagaattgcatacattgggttgttttttctgtgctgtctgtacattgcttct

SEQ ID NO: 202936 - DNA, 120 bp, Artificial Sequence
  ENSG00000114646_33 (sequence is synthesized)
gctgctgtgatttctaaacctgtgctgttattcaactgacttttttttgtactttgacccacgtttttttgaaataccagtaaaaaacaaagttcttgaaataaaactttttaaaaagtt

SEQ ID NO: 202937 - DNA, 120 bp, Artificial Sequence
  ENSG00000114646_34 (sequence is synthesized)
gtgtgatcctcgtcttgggggcagactccgggacggggcttagaggtaccgggtggctggggtcacactggggcggtggggtctgagggtggcgaggtctgggttgaccaggtctaggcg

SEQ ID NO: 202938 - DNA, 120 bp, Artificial Sequence
  ENSG00000114646_35 (sequence is synthesized)
gtctgggttgaccaggtctaggcgagcgggcctgaccggggcgggccggggctccagggctcctcagcgcgccgccctgacgtcccgccccttgccctcccgcccgcagcgcgtgaggcg

SEQ ID NO: 202939 - DNA, 120 bp, Artificial Sequence
  ENSG00000114648_0 (sequence is synthesized)
gcagttgcagcggccggggaagatggtggaggacggcgcggaggagctggaggatctggtgcacttctccgtgtctgagttgcctagtcgcggctacggcgtcatggaggagatccggcg

SEQ ID NO: 202940 - DNA, 120 bp, Artificial Sequence
  ENSG00000114648_1 (sequence is synthesized)
gcagggcaagctgtgcgacgtgaccctcaagattggggaccacaaattcagtgcccaccggattgtcttagcagcctcgatcccgtatttccatgctatgtttacaaatgacatgatgga

SEQ ID NO: 202941 - DNA, 120 bp, Artificial Sequence
  ENSG00000114648_2 (sequence is synthesized)
gtgcaagcaggatgagattgtaatgcaaggaatggacccaagtgccctggaggctctgatcaactttgcctacaacggcaaccttgccattgaccagcaaaatgtccagtcattgctgat

SEQ ID NO: 202942 - DNA, 120 bp, Artificial Sequence
  ENSG00000114648_3 (sequence is synthesized)
gggggcgagcttcctgcagctgcagagcatcaaagacgcctgctgcacattccttcgagaacggcttcacccaaaaaactgcctgggtgtgcgccagtttgctgagacaatgatgtgtgc

SEQ ID NO: 202943 - DNA, 120 bp, Artificial Sequence
  ENSG00000114648_4 (sequence is synthesized)
tgtgctgtacgacgctgccaacagcttcatccaccagcactttgtggaggtgtccatgtcagaagagttcctggccctgcccttggaagacgtgcttgagctggtgtctcgggatgagct

SEQ ID NO: 202944 - DNA, 120 bp, Artificial Sequence
  ENSG00000114648_5 (sequence is synthesized)
gaatgtcaaatctgaggagcaggtctttgaagctgcattggcctgggtcagatacgaccgggagcagaggggtccctacctgcctgagctgctgtccaatatccgcctgcccctctgtcg

SEQ ID NO: 202945 - DNA, 120 bp, Artificial Sequence
  ENSG00000114648_6 (sequence is synthesized)
gccccagttcctttcagacagagtacagcaggatgacctggtgcgttgctgccacaaatgcagggacctggtagacgaagcaaaggactaccacctcatgccagagcgccggccccacct

SEQ ID NO: 202946 - DNA, 120 bp, Artificial Sequence
  ENSG00000114648_7 (sequence is synthesized)
gccagctttcagaacccggccacgctgctgcacatccatcgctggacttatctacgctgtagggggcctcaactcagcaggtgattccctgaatgtggtggaagtgttcgaccccattgc

SEQ ID NO: 202947 - DNA, 120 bp, Artificial Sequence
  ENSG00000114648_8 (sequence is synthesized)
caattgctgggagagatgccgtcccatgacaacagcccgcagccgcgttggcgtggctgtggtgaacgggcttctctatgccatcggaggatatgacggccagctacggctgagcactgt

SEQ ID NO: 202948 - DNA, 120 bp, Artificial Sequence
  ENSG00000114648_9 (sequence is synthesized)
ggaggcctacaacccggagacagacacatggaccagagtggggagcatgaatagcaagagaagtgccatggggacagtcgtgctggatgggcagatctacgtctgtgggggctacgatgg

SEQ ID NO: 202949 - DNA, 120 bp, Artificial Sequence
  ENSG00000114648_10 (sequence is synthesized)
caactcttccctcagctccgtggagacctactcacctgagacggacaaatggacagtggtgacctcgatgagctcgaatcgcagtgctgctggggttacagtctttgagggcaggatata

SEQ ID NO: 202950 - DNA, 120 bp, Artificial Sequence
  ENSG00000114648_11 (sequence is synthesized)
tgtgtcaggcggccatgatggtttgcagatcttcagcagtgtggaacactacaaccaccacacagccacctggcaccctgcagctggcatgctcaacaagcgctgccggcacggagccgc

SEQ ID NO: 202951 - DNA, 120 bp, Artificial Sequence
  ENSG00000114648_12 (sequence is synthesized)
ctccctggggagcaagatgtttgtctgcgggggctacgatggctctggcttcctcagcattgccgagatgtacagctctgtggcagaccagtggtgcctgattgtccccatgcacacgcg

SEQ ID NO: 202952 - DNA, 120 bp, Artificial Sequence
  ENSG00000114648_13 (sequence is synthesized)
caggagccgggtctccctggtggccagctgtgggcgcctctacgctgttgggggctacgacggacagtcaaacctaagctcagtggagatgtatgacccagagacagactgctggacatt

SEQ ID NO: 202953 - DNA, 120 bp, Artificial Sequence
  ENSG00000114648_14 (sequence is synthesized)
catggcccccatggcgtgccatgagggaggggtcggtgtgggctgcatccctctcctcaccatctaaggcagaggatgggatgtggtggggcagggatctggtacagacataggcgcttc

SEQ ID NO: 202954 - DNA, 120 bp, Artificial Sequence
  ENSG00000114648_15 (sequence is synthesized)
cttccaggaacagtccctcaggagaggcagtggaccagaagagatggcgaaacgtgagctcgccggaggtacagtttttccaggtgcttaagccctcccccactgtgccacccttgtgac

SEQ ID NO: 202955 - DNA, 120 bp, Artificial Sequence
  ENSG00000114648_16 (sequence is synthesized)
cttcaggcttgggtcatcaagatgcacagcatggaacacaagctcctctggatcctgcagctggtgacatggaactgttttctggtccacatgaacacaggctccatccaggcccagctc

SEQ ID NO: 202956 - DNA, 120 bp, Artificial Sequence
  ENSG00000114648_17 (sequence is synthesized)
ctacccaccgcctctctgtgggccagctgttcacagaaggccttccatctgatgctccccatcgcctgcttgctctccagccgagtctggccaatttgccatggggaggctgcagtgtcc

SEQ ID NO: 202957 - DNA, 120 bp, Artificial Sequence
  ENSG00000114648_18 (sequence is synthesized)
aagcctgctggaaactgggatgtagctggggacgaaaggacagacccaagcgttctccctgcctgagatggtgtggccacagcagtggaaggctgcacacaggcacattccttcttccac

SEQ ID NO: 202958 - DNA, 120 bp, Artificial Sequence
  ENSG00000114648_19 (sequence is synthesized)
atgtctaattttgggatttcagtgaggccttttgatctgtccaggagaacagaagggaaaaaaagatacttgaaagaaactgaaggaaatttaaacaaagaaacacttgaaagaaactgg

SEQ ID NO: 202959 - DNA, 120 bp, Artificial Sequence
  ENSG00000114648_20 (sequence is synthesized)
aaagaaaaataatttttttatgtgaacaaattttgcaagaagaaaaaagcataaaagacactaacggcaaatctatgtttaaatggaaaatcgtctaactggagaagggcggtatccacc

SEQ ID NO: 202960 - DNA, 120 bp, Artificial Sequence
  ENSG00000114648_21 (sequence is synthesized)
ccacattcggatcccagggtcctgaggcctcgcattgagctgggggttccctctgagccccagtgtgtgtggaatcagtgcactcttgactgggcctgtagtaaggtgctcatggggttt

SEQ ID NO: 202961 - DNA, 120 bp, Artificial Sequence
  ENSG00000114648_22 (sequence is synthesized)
gtcttctcacccaccatcagaggacttttaaaatcataggcgtagagagttaggctatctgctgaattactgccactcttcttggtgggggctcctagctgtggctgggggctccaggcg

SEQ ID NO: 202962 - DNA, 120 bp, Artificial Sequence
  ENSG00000114648_23 (sequence is synthesized)
cccctgtgattacctcctactgccaccatggcgctcattcagattccccactctcactaacattgcttccttttttgaccagcaggaaacagcaggtctggccagattctcacttgccca

SEQ ID NO: 202963 - DNA, 120 bp, Artificial Sequence
  ENSG00000114648_24 (sequence is synthesized)
tcaatctcgttcttggatgatttccctcattgtgatgcttctggggcacgttgaccatatgcacctctagaacctaaccagggcttccttctaccagctgtgggcgggcttggtctggta

SEQ ID NO: 202964 - DNA, 120 bp, Artificial Sequence
  ENSG00000114648_25 (sequence is synthesized)
accttgtctgctctgccattccactgctcctccatccactcgccaatcccaagagtctggcctccctccagccctgggcagactgaccagcaaggtggacctttacattcaagcacagct

SEQ ID NO: 202965 - DNA, 120 bp, Artificial Sequence
  ENSG00000114648_26 (sequence is synthesized)
ggcttttatgacataaagaactaaaggccgaaagaatctcttgctgctgcaaagaacagattttatatttcttcctctaatcttggcaaatgacctttaccttttggaaagatttcatat

SEQ ID NO: 202966 - DNA, 120 bp, Artificial Sequence
  ENSG00000114648_27 (sequence is synthesized)
tgcttcctcctccctggataggacctaatgtagcacagcgggactcaaagaggaggacattttctcttgccagtgcactgggcagtggggctgtccttcaactgctgctgccaaaattgg

SEQ ID NO: 202967 - DNA, 120 bp, Artificial Sequence
  ENSG00000114648_28 (sequence is synthesized)
ttttctaaaattcttccagtagagactaaaagaagattcaattcctgtaacccaagactgagtcttagggctccagtctccacctgcttggtttcctatcctttgctgcctgcctggggt

SEQ ID NO: 202968 - DNA, 120 bp, Artificial Sequence
  ENSG00000114648_29 (sequence is synthesized)
ggcctggaagcctgttcagaaaggcacaatgtggagcctggggtgtctcccccaccccaggaccgtcaggtttaccagtgtgtgcaatcgccatgtattcagagggaagtacctttgtta

SEQ ID NO: 202969 - DNA, 120 bp, Artificial Sequence
  ENSG00000114648_30 (sequence is synthesized)
cctacaacttaggagctaggcctctgctacaagcacttgaaaatgatatttttatttttaacgtctcaacaatctgatatcggatgtcgtttaacctgggctcgtggtagggctccagca

SEQ ID NO: 202970 - DNA, 120 bp, Artificial Sequence
  ENSG00000114648_31 (sequence is synthesized)
tttctccctccttcctggtttgcctgtaggggtagactcggaaggtgggtggggtgtgcatttcctgttaggagtgtatcagtgcttgtcttattataagcccctttcttttgtgaattt

SEQ ID NO: 202971 - DNA, 120 bp, Artificial Sequence
  ENSG00000114648_32 (sequence is synthesized)
gaagtagcaccaacaagcctggattgtgaaggtattaagaatcggtctgtgggctactgagtgggtccttaggatactggcccagattttgccactgggtatggcagatcattttctacc

SEQ ID NO: 202972 - DNA, 120 bp, Artificial Sequence
  ENSG00000114648_33 (sequence is synthesized)
atggcctgctgctcttgtagtggacttcctgagtccaatcccacctcctggtgtagaatttacactgctgcacctgaggtcgatgtttcaaagtaagatcaagccagtgttttgatctgg

SEQ ID NO: 202973 - DNA, 120 bp, Artificial Sequence
  ENSG00000114648_34 (sequence is synthesized)
gctctgagcacaagtcaggaaacaccaacatattcacactctcccagtaggttcctcagtccgatggtgaatggctattcgtaaatggctggtctggctctttggtgttggagcctttcc

SEQ ID NO: 202974 - DNA, 120 bp, Artificial Sequence
  ENSG00000114648_35 (sequence is synthesized)
aatagccccatgaaaagaagcatcacccaaggatattgtaaaaaggatgtaacaaggagatagggtagacattgtactcagtgggccttggggcctagcccagctctgagcagaggactg

SEQ ID NO: 202975 - DNA, 120 bp, Artificial Sequence
  ENSG00000114648_36 (sequence is synthesized)
tggcattcactgtccttgagtgtttcaccttcttggataacacacgggccttctcttctggatttcatcagagattacagccagatgggggctgaagaccatcctcttgaccacagaggt

SEQ ID NO: 202976 - DNA, 120 bp, Artificial Sequence
  ENSG00000114648_37 (sequence is synthesized)
gtgactgtgggaattcctcccaatttatggtttcccagaaaatcttagttccttttatttatagaatgcatgtcttttgtgttaagaaaccaaagagaaataaagagaacactcctaata

SEQ ID NO: 202977 - DNA, 120 bp, Artificial Sequence
  ENSG00000114648_38 (sequence is synthesized)
ctagacgagcaggggcacacagtagagtaaaatacaagctttggcctgggagtttcctgcagccaggccagccactgccagtacctcctgggagcgagcccccatctgcttaaaagtaaa

SEQ ID NO: 202978 - DNA, 120 bp, Artificial Sequence
  ENSG00000114648_39 (sequence is synthesized)
atatccaccttgtcctttggggaacttggggagaccaggcatggacatgtggaagttgtgttgttattttaagtgccagataaggactggaaatgtgtattatggaagattcgaagaggg

SEQ ID NO: 202979 - DNA, 120 bp, Artificial Sequence
  ENSG00000114648_40 (sequence is synthesized)
agagaaactggactggaacttctggaagatttcagggaagaggtgggattaaagttgaaacttgaagaataaggaggatttacctttattagtgataaaaggaaatccaaggtgtttttc

SEQ ID NO: 202980 - DNA, 120 bp, Artificial Sequence
  ENSG00000114648_41 (sequence is synthesized)
taggtcacacacattctcccagacaggagcacataggtatttgcaaggtgggccaagttgatatgtcactcagtacattctagctacctgctctctccacttctctgcttatattgtctg

SEQ ID NO: 202981 - DNA, 120 bp, Artificial Sequence
  ENSG00000114648_42 (sequence is synthesized)
aataagaagtgggattagaagacatcccagtgcctttgtttagcccttcttactgctgaggtgacaggtggcatgtttcattatgtcagacacgtgatggagtcatcacatgtgtgggca

SEQ ID NO: 202982 - DNA, 120 bp, Artificial Sequence
  ENSG00000114648_43 (sequence is synthesized)
gctgaaaagctggcgcagcccaaggaggggagaggaaagctgcccagagccccctggccgttacccaggacagctctgcactgattgcttttacacattgagcttccttgatatatgcct

SEQ ID NO: 202983 - DNA, 120 bp, Artificial Sequence
  ENSG00000114648_44 (sequence is synthesized)
aatgttgttccacatccagcagcgtttgcatgtggatgtgagctgggagggatctgcctttgtactggtgagaccagttcacaaagcatcggagtaggttcctttgggaagaaaaaaata

SEQ ID NO: 202984 - DNA, 120 bp, Artificial Sequence
  ENSG00000114648_45 (sequence is synthesized)
cgtaagatctgcccctcccaagaacgcattgagagtcctttcctcccaccatccccacttttgctccttggatactttgcagcttcctatgtttgagtgactcattgctccgtgtcccca

SEQ ID NO: 202985 - DNA, 120 bp, Artificial Sequence
  ENSG00000114648_46 (sequence is synthesized)
accatgagtagcttttttgctttgactgcagtcagctgtccttccttgtgtgtctgctctggaccacttccttgctttgatgttactgggtttagagggctgtcttggaggaaagttctc

SEQ ID NO: 202986 - DNA, 120 bp, Artificial Sequence
  ENSG00000114648_47 (sequence is synthesized)
tgggtattcctttccttcactgtggttaatatcctgttattagtgtgggcccggttccattacatcccttttaaattacaggctaccttaaaacgttcctagtcacttctcttctgacat

SEQ ID NO: 202987 - DNA, 120 bp, Artificial Sequence
  ENSG00000114648_48 (sequence is synthesized)
cccacacagctgtctgttctgccagttagtgacatcctgccatctttccttcctatctcccccagtgttctacgccatcccatagacctttcttacactggactattccagtccatgctg

SEQ ID NO: 202988 - DNA, 120 bp, Artificial Sequence
  ENSG00000114648_49 (sequence is synthesized)
atcagcattttctccttctcttcacactcgcctttaccacctagttgatagttaatctcatgcagttttggggcacctcttaattcattttcatattgttcaacacctgttttgttatgt

SEQ ID NO: 202989 - DNA, 120 bp, Artificial Sequence
  ENSG00000114648_50 (sequence is synthesized)
aatttttatgtttgttttgtgtccgtatccagaaggatagtgatcatgtctagtaaatttgtgatcttcccacaatacttgcctaaggcaagtccctctcctctttctggctggttcagg

SEQ ID NO: 202990 - DNA, 120 bp, Artificial Sequence
  ENSG00000114648_51 (sequence is synthesized)
ttctggctggttcagggggtcagttatcatgtccctgaaagggacattctgtggatcagtttgattactatgtacatttaaaaggtagcagcaagccaggtatggtggctcacgcctata

SEQ ID NO: 202991 - DNA, 120 bp, Artificial Sequence
  ENSG00000114648_52 (sequence is synthesized)
tcccagctacttgggaggctaaggcagggagaattgcttaaaccggggaggcgggggttgcaatgagctaagatcgtgccactgcattccagcctggttgacagagtgagactccgtctc

SEQ ID NO: 202992 - DNA, 120 bp, Artificial Sequence
  ENSG00000114648_53 (sequence is synthesized)
gagctttgctgttccttgatcatcagtccgaaaggcggtatcacacagactctgcagccacactgcctacgtttgagttctgggtctgccacttgttagctgtgaaaatgagcagcttcc

SEQ ID NO: 202993 - DNA, 120 bp, Artificial Sequence
  ENSG00000114648_54 (sequence is synthesized)
ttaaacactggtgattctctgtctcgtctgtaaaatgcacatcaccacctacttgagtgttgaggattcaattagttaatgtacttcaaataatcatgtagtaaatgctcagtagtgtgt

SEQ ID NO: 202994 - DNA, 80 bp, Artificial Sequence
  ENSG00000114650_0 (sequence is synthesized)
gggcacccggcggccaggagagagagggagggcgccacgcaccggactgcgggccgagagcgcgcacgccgcgctccgcc

SEQ ID NO: 202995 - DNA, 120 bp, Artificial Sequence
  ENSG00000114650_1 (sequence is synthesized)
cttgggaggtgctgccaccacaggtacctgcacatgttgttctttgtcagtgctgtcaagtgtgtgccagggtgatccatggtcactttccgggatggcagcaaggtgacttcggctgag

SEQ ID NO: 202996 - DNA, 120 bp, Artificial Sequence
  ENSG00000114650_2 (sequence is synthesized)
gatgaccctgactgaaaggctgcgtgagaagatatctcgggccttctacaaccatgggctcctctgtgcatcctatcccatccccatcatcctcttcacagggttctgcatcttagcctg

SEQ ID NO: 202997 - DNA, 120 bp, Artificial Sequence
  ENSG00000114650_3 (sequence is synthesized)
ctgctacccactgctgaaactccccttgccaggaacaggacctgtggaattcaccacccctgtgaaggattactcgcccccacctgtggactctgaccgcaaacaaggagagcctactga

SEQ ID NO: 202998 - DNA, 120 bp, Artificial Sequence
  ENSG00000114650_4 (sequence is synthesized)
gcagcctgagtggtatgtgggtgccccggtggcttatgtccagcagatatttgtgaagtcctcagtgtttccctggcacaagaacctcctggcagtagatgtatttcgttcacctttgtc

SEQ ID NO: 202999 - DNA, 120 bp, Artificial Sequence
  ENSG00000114650_5 (sequence is synthesized)
ccgggcattccaactggtggaggagatccggaaccacgtgctgagagacagctctgggatcaggagcttggaggagttgtgtctgcaagtgaccgacctgctgccaggccttaggaagct

SEQ ID NO: 203000 - DNA, 120 bp, Artificial Sequence
  ENSG00000114650_6 (sequence is synthesized)
caggaacctactccctgagcatggatgcctgctgctgtcccctgggaacttctggcagaatgactgggaacgcttccatgctgatcctgacatcattgggaccatccaccagcacgagcc

SEQ ID NO: 203001 - DNA, 120 bp, Artificial Sequence
  ENSG00000114650_7 (sequence is synthesized)
taaaaccctgcagacttcagccacactcaaagacttgttatttggtgttcctgggaagtacagcggggtgagcctctacaccaggaagaggatggtctcctacaccatcaccctggtctt

SEQ ID NO: 203002 - DNA, 120 bp, Artificial Sequence
  ENSG00000114650_8 (sequence is synthesized)
ccagcactaccatgccaagttcctgggcagcctgcgtgcccgcctgatgcttctgcaccccagccccaactgcagccttcgggcggagagcctggtccacgtgcacttcaaggaggagat

SEQ ID NO: 203003 - DNA, 120 bp, Artificial Sequence
  ENSG00000114650_9 (sequence is synthesized)
tggtgtcgctgagctcatcccccttgtgaccacctacatcatcttgtttgcctacatctacttctccacgcggaagatcgacatggtcaagtccaagtgggggctggccctggctgccgt

SEQ ID NO: 203004 - DNA, 120 bp, Artificial Sequence
  ENSG00000114650_10 (sequence is synthesized)
ggtcacagtgctcagctcgctgctcatgtctgtgggactctgcacactcttcggcctgacgcccaccctcaatggcggcgagattttcccctaccttgtggtggttattgggttagagaa

SEQ ID NO: 203005 - DNA, 120 bp, Artificial Sequence
  ENSG00000114650_11 (sequence is synthesized)
tgtgttggtgctcaccaagtctgtggtctcaaccccggtagacctggaggtgaagctgcggatcgcccaaggcctaagcagcgagagctggtccatcatgaagaacatggccacggagct

SEQ ID NO: 203006 - DNA, 120 bp, Artificial Sequence
  ENSG00000114650_12 (sequence is synthesized)
gggcatcatcctcatcggctacttcaccctagtgcccgccatccaggagttctgtctctttgctgtcgtggggctggtgtctgacttcttccttcagatgctgtttttcaccactgtcct

SEQ ID NO: 203007 - DNA, 120 bp, Artificial Sequence
  ENSG00000114650_13 (sequence is synthesized)
gtccattgacattcgccggatggagctagcagacctgaacaagcgactgccccctgaggcctgcctgccctcagccaagccagtgggacagccaacgcgctacgagcggcagctggctgt

SEQ ID NO: 203008 - DNA, 120 bp, Artificial Sequence
  ENSG00000114650_14 (sequence is synthesized)
gaggccgtccacaccccacaccatcacgttgcagccgtcttccttccgaaacctgcggctccccaagaggctgcgtgttgtctacttcctggcccgcacccgcctggcacagcgcctcat

SEQ ID NO: 203009 - DNA, 120 bp, Artificial Sequence
  ENSG00000114650_15 (sequence is synthesized)
catggctggcaccgttgtctggattggcatcctggtatacacagacccagcagggctgcgcaactacctcgctgcccaggtgacggaacagagcccattgggtgagggagccctggctcc

SEQ ID NO: 203010 - DNA, 120 bp, Artificial Sequence
  ENSG00000114650_16 (sequence is synthesized)
catgcccgtgcctagtggcatgctgccccccagccacccggaccctgccttctccatcttcccacctgatgcccctaagctacctgagaaccagacgtcgccaggcgagtcacctgagcg

SEQ ID NO: 203011 - DNA, 120 bp, Artificial Sequence
  ENSG00000114650_17 (sequence is synthesized)
gcctgaggatgaggaactttggaggaaattgtccttccgccactggccgacgctcttcagctattacaacatcacactggccaagaggtacatcagcctgctgcccgtcatcccagtcac

SEQ ID NO: 203012 - DNA, 120 bp, Artificial Sequence
  ENSG00000114650_18 (sequence is synthesized)
gctccgcctgaacccgagggaggctctggagggccggcaccctcaggacggccgcagtgcctggcccccaccggggcccatacctgctgggcactgggaagcaggacccaagggcccagg

SEQ ID NO: 203013 - DNA, 120 bp, Artificial Sequence
  ENSG00000114650_19 (sequence is synthesized)
tggggtgcaggcccatggagacgtcacgctgtacaaggtggcggcgctgggcctggccaccggcatcgtcttggtgctgctgctgctctgcctctaccgcgtgctatgcccgcgcaacta

SEQ ID NO: 203014 - DNA, 120 bp, Artificial Sequence
  ENSG00000114650_20 (sequence is synthesized)
cgggcagctgggtggtgggcccgggcggcggaggcgcggggagctgccctgcgacgactacggctatgcgccacccgagacggagatcgtgccgcttgtgctgcgcggccacctcatgga

SEQ ID NO: 203015 - DNA, 120 bp, Artificial Sequence
  ENSG00000114650_21 (sequence is synthesized)
catcgagtgcctggccagcgacggcatgctgctggtgagctgctgcctggcaggccacgtctgcgtgtgggacgcgcagaccggggattgcctaacgcgcattccgcgcccaggcaggca

SEQ ID NO: 203016 - DNA, 120 bp, Artificial Sequence
  ENSG00000114650_22 (sequence is synthesized)
gcgccgggacagtggcgtgggcagcgggcttgaggctcaggagagctgggaacgactttcagatggtgggaaggctggtccagaggagcctggggacagccctcccctgagacaccgccc

SEQ ID NO: 203017 - DNA, 120 bp, Artificial Sequence
  ENSG00000114650_23 (sequence is synthesized)
ccggggccctccgccgccttccctcttcggggaccagcctgacctcacctgcttaattgacaccaacttttcagcgcagcctcggtcctcacagcccactcagcccgagccccggcaccg

SEQ ID NO: 203018 - DNA, 120 bp, Artificial Sequence
  ENSG00000114650_24 (sequence is synthesized)
ggcggtctgtggccgctctcgggactccccaggctatgacttcagctgcctggtgcagcgggtgtaccaggaggaggggctggcggccgtctgcacaccagccctgcgcccaccctcgcc

SEQ ID NO: 203019 - DNA, 120 bp, Artificial Sequence
  ENSG00000114650_25 (sequence is synthesized)
tgggccggtgctgtcccaggcccctgaggacgagggtggctcccccgagaaaggctccccttccctcgcctgggcccccagtgccgagggttccatctggagcttggagctgcagggcaa

SEQ ID NO: 203020 - DNA, 120 bp, Artificial Sequence
  ENSG00000114650_26 (sequence is synthesized)
cctcatcgtggtggggcggagcagcggccggctggaggtgtgggacgccattgaaggggtgctgtgctgcagcagcgaggaggtctcctcaggcattaccgctctggtgttcttggacaa

SEQ ID NO: 203021 - DNA, 120 bp, Artificial Sequence
  ENSG00000114650_27 (sequence is synthesized)
aaggattgtggctgcacggctcaacggttcccttgatttcttctccttggagacccacactgccctcagccccctgcagtttagagggaccccagggcggggcagttcccctgcctctcc

SEQ ID NO: 203022 - DNA, 120 bp, Artificial Sequence
  ENSG00000114650_28 (sequence is synthesized)
agtgtacagcagcagcgacacagtggcctgtcacctgacccacacagtgccctgtgcacaccaaaaacccatcacagccctgaaagccgctgctgggcgcttggtgactgggagccaaga

SEQ ID NO: 203023 - DNA, 120 bp, Artificial Sequence
  ENSG00000114650_29 (sequence is synthesized)
ccacacactgagagtgttccgtctggaggactcgtgctgcctcttcacccttcagggccactcaggggccatcacgaccgtgtacattgaccagaccatggtgctggccagtggaggaca

SEQ ID NO: 203024 - DNA, 120 bp, Artificial Sequence
  ENSG00000114650_30 (sequence is synthesized)
agatggggccatctgcctgtgggatgtactgactggcagccgggtcagccatgtgtttgctcaccgtggggatgtcacctcccttacctgtaccacctcctgtgtcatcagcagtggcct

SEQ ID NO: 203025 - DNA, 120 bp, Artificial Sequence
  ENSG00000114650_31 (sequence is synthesized)
ggatgacctcatcagcatctgggaccgcagcacaggcatcaagttctactccattcagcaggacctgggctgtggtgcaagcttgggtgtcatctcagacaacctgctggtgactggcgg

SEQ ID NO: 203026 - DNA, 120 bp, Artificial Sequence
  ENSG00000114650_32 (sequence is synthesized)
ccagggctgtgtctccttttgggacctaaactacggggacctgttacagacagtctacctggggaagaacagtgaggcccagcctgcccgccagatcctggtgctggacaacgctgccat

SEQ ID NO: 203027 - DNA, 120 bp, Artificial Sequence
  ENSG00000114650_33 (sequence is synthesized)
tgtctgcaactttggcagtgagctcagcctggtgtatgtgccctctgtgctggagaagctggactgagcgcagggcctccttgcccaggcaggaggctggggtgctgtgtgggggccaat

SEQ ID NO: 203028 - DNA, 120 bp, Artificial Sequence
  ENSG00000114650_34 (sequence is synthesized)
gcactgaacctggacttgggggaaagagccgagtatcttccagccgctgcctcctgactgtaataatattaaacttttttaaaaaaccatatcatcatctgtcaggcactttgggagcta

SEQ ID NO: 203029 - DNA, 120 bp, Artificial Sequence
  ENSG00000114650_35 (sequence is synthesized)
gggattacaggcgtgagccactgcacgcagcccacagtcttttctgttgctcattggcaggttagatgggtagtgctgacatcataacaaggttcaagaatgactcatctcacatgtgtg

SEQ ID NO: 203030 - DNA, 84 bp, Artificial Sequence
  ENSG00000114650_36 (sequence is synthesized)
gattgaggtcactagaccttgcatataggcattctgaaaccattccccagccacataactatcgcctccctccagcagccctag

SEQ ID NO: 203031 - DNA, 120 bp, Artificial Sequence
  ENSG00000114650_37 (sequence is synthesized)
ttttgatgattatagctctcctctgcaccctccaggctgtgaacacccgttccccgtagcagctgtgtggtggtgatggccccttaaagtctgggcattagcaggaccctgagggttggg

SEQ ID NO: 203032 - DNA, 120 bp, Artificial Sequence
  ENSG00000114650_38 (sequence is synthesized)
gtgctttggtggaatggctccttcaaagggctggggggccttgccatgcctctgccactccgaggcccatgaggttgtgtgagtcatgtcgcagagtggccatgtgttgccctgtgccct

SEQ ID NO: 203033 - DNA, 120 bp, Artificial Sequence
  ENSG00000114650_39 (sequence is synthesized)
cttcggcctgacgcccaccctcaatggcgggtaggtccctagcaggctccactgggccacagggtgggctcaggccagagagccttgcacttctgggttcttggccttccctggactttg

SEQ ID NO: 203034 - DNA, 120 bp, Artificial Sequence
  ENSG00000114650_40 (sequence is synthesized)
ctgtgacctcacgtcttcacattgttgtttttgacatttaagaggtacattttcttcctcttctttgtctggcttgtattcatacttgtgtttgtatatagcatatctagctatagtgag

SEQ ID NO: 203035 - DNA, 120 bp, Artificial Sequence
  ENSG00000114650_41 (sequence is synthesized)
gtgtccctgcaccggccggcccctggagctccgcgtccccaccagacctccgcgggcccctggtgtgacggggggagatgcgcggcgtcgcatcccctggcctagttgctccgggaagct

SEQ ID NO: 203036 - DNA, 120 bp, Artificial Sequence
  ENSG00000114650_42 (sequence is synthesized)
gcgttgggtggagactggctgaggcaggggtctgccagtgagattgaggttggtcagcttctgatttgtgaattcatgtactttaacagctttatcagtgtaccatatagatacttagtt

SEQ ID NO: 203037 - DNA, 120 bp, Artificial Sequence
  ENSG00000114650_43 (sequence is synthesized)
tgagattgagtatgtgggtgccccggtggcttatgtccagcagatatttgtgaagtcctcagtgtttccctggcacaagaacctcctggcagtagatgtatttcgttcacctttgtcccg

SEQ ID NO: 203038 - DNA, 120 bp, Artificial Sequence
  ENSG00000114650_44 (sequence is synthesized)
gatgccacctcacaggtcccatgtgcaaattccggggggagttagtatgaaacatggcagtggaaattcaggctgtgacatcggcaagctcattctgcacaactccagtcggccatcttg

SEQ ID NO: 203039 - DNA, 120 bp, Artificial Sequence
  ENSG00000114650_45 (sequence is synthesized)
gttccagcttatttcagccagttcttttatctcataagcggagggagtttctgggtttcagcaaattgtttcttttcttatctgccatcctgcaaactcaagaacttgtattagtcattg

SEQ ID NO: 203040 - DNA, 120 bp, Artificial Sequence
  ENSG00000114650_46 (sequence is synthesized)
ctttttggggagcaggctggtggggcttagaggtttccgggttggatcaggccttcagtcccctctagagggaccggaagattcagggaaggtacttccccttccctttcagccctttct

SEQ ID NO: 203041 - DNA, 120 bp, Artificial Sequence
  ENSG00000114650_47 (sequence is synthesized)
gaagaaagtgtgagggtttcttctgccccctggtggagacggggtgagctgctgctggtatgtgagctgaggaccaaccagcatctctcatctctgctgtgccctgcctgctgctgccct

SEQ ID NO: 203042 - DNA, 120 bp, Artificial Sequence
  ENSG00000114650_48 (sequence is synthesized)
agagtccggtgggaactgggttttaggaggaggtatctgaagaatgtgtagtgggtcgggggctggtgcggtcagaagggccacctctaatttctgccttgcattggtgactagatctgc

SEQ ID NO: 203043 - DNA, 120 bp, Artificial Sequence
  ENSG00000114654_0 (sequence is synthesized)
atggagccggtcagcacgggcgcggaggccggcatggagggcgcgggaggtgacccgtaccggcgacctgcgcggcgcacgcagtggctgctgagcgccctggcgcaccactacgggctg

SEQ ID NO: 203044 - DNA, 120 bp, Artificial Sequence
  ENSG00000114654_1 (sequence is synthesized)
gaccgcggcgtggagaacgagatcgtggtgctggccaccggcctggaccagtacctgcaggaggtcttccaccacctggactgccgcggcgccggccgtctgccccgcgccgacttccga

SEQ ID NO: 203045 - DNA, 120 bp, Artificial Sequence
  ENSG00000114654_2 (sequence is synthesized)
gcgctctgcgctgtgctggggctgcgcgcggagggggccaccacggccgggcaggcagcaggtgacgggaactccagagatgtgacccccggggatgcggccgctgagttggccacggac

SEQ ID NO: 203046 - DNA, 120 bp, Artificial Sequence
  ENSG00000114654_3 (sequence is synthesized)
ggggactcagataccgatgaagaggcgcgcctggcgctgcgcgccgagccgccggagctcaccttccgccagttccacgcgcgcctctgtggctacttcggcacccgtgcggggccccgg

SEQ ID NO: 203047 - DNA, 120 bp, Artificial Sequence
  ENSG00000114654_4 (sequence is synthesized)
ctgccccgcggcgctctcagcgagcacatcgagacgcagatccgcctgcgccgtccgcgccgccgccgccgcccgccctgcgcgcctggccccgacagcggtcctgactgtgagcgcgtt

SEQ ID NO: 203048 - DNA, 120 bp, Artificial Sequence
  ENSG00000114654_5 (sequence is synthesized)
gcgcggctggaggaggagaatagcagcttgcgcgagttggtggaggacctgcgcgccgcgctgcagagcagtgatgcgcgctgcctagcactgcaggtcggactctggaagagccaggcg

SEQ ID NO: 203049 - DNA, 120 bp, Artificial Sequence
  ENSG00000114654_6 (sequence is synthesized)
gtcggactctggaagagccaggcgagcacccacgagatggggcacggcgggccggaggctgcggtgcgggagctgcgtcaggcgcagggcgccctggctgcggcggaggcccgcgctggg

SEQ ID NO: 203050 - DNA, 120 bp, Artificial Sequence
  ENSG00000114654_7 (sequence is synthesized)
gcgcgcggaggaggcccggcaggtggtgctgcgcagcctgcaccgcgtgcgagagctggaggcgctggcgcaacaggtgcccggcttgcagcgctgggtgcggcggctggaggcggagct

SEQ ID NO: 203051 - DNA, 120 bp, Artificial Sequence
  ENSG00000114654_8 (sequence is synthesized)
gcggagctgcaacgctacaggtcagaggattcccagctcccaaccccgcagctagccaacccagagccaggagacaagagtaatgaacctgaagatgctgggaccagagacccagacccc

SEQ ID NO: 203052 - DNA, 120 bp, Artificial Sequence
  ENSG00000114654_9 (sequence is synthesized)
actccagagggagcctggcagtcagacagcagctctggaagcagagccctggatgaagtggacgagcagctgttccgctccgtggagggccaggccgcctctgacgaggaggaggtggag

SEQ ID NO: 203053 - DNA, 120 bp, Artificial Sequence
  ENSG00000114654_10 (sequence is synthesized)
gaggagaggtggcaggaggagaagaagacgccggcagccgaggccaagacactgctggcccggctctccagctgcagaggcaggtgtgatgaccagacggcggagaagctcatgacttac

SEQ ID NO: 203054 - DNA, 120 bp, Artificial Sequence
  ENSG00000114654_11 (sequence is synthesized)
gcctgcattgccatgctggtggagcagctgaggactcagggctgcggtgggaggaccctggggacctctgaggaggaggcagagttgcagcagaaggtggaagagaatgagcacctgagg

SEQ ID NO: 203055 - DNA, 120 bp, Artificial Sequence
  ENSG00000114654_12 (sequence is synthesized)
ctggagctgcagatggtagagaccgagagggtgcggctgtccctgctggaggagaagctggtggacgtgctgcagctcctgcagaggctccgggacctgaacatatcgaaaagagccctg

SEQ ID NO: 203056 - DNA, 120 bp, Artificial Sequence
  ENSG00000114654_13 (sequence is synthesized)
gggaagattttgctgagcacgctggacgctttcagggaccccacccacgagggaaggcccagccctgcagccatcctggatgccctgcaccaagccttggctgcctgccagctgttgcgg

SEQ ID NO: 203057 - DNA, 120 bp, Artificial Sequence
  ENSG00000114654_14 (sequence is synthesized)
agacagccctcggcaccagcctctgcagcagctgcgctcaccaaccccctcctcgtctcctgctgaggttactggcccaccctgtgggcaccctgctcagcctgactgcctttggaccag

SEQ ID NO: 203058 - DNA, 120 bp, Artificial Sequence
  ENSG00000114654_15 (sequence is synthesized)
cctccatgatcagcccaaccactgacagctggtctgaccaccgtcacatcatcagaacttgagtctctgctggctccttccaaggttaagcccgagcccagagcctcccattgcagcacc

SEQ ID NO: 203059 - DNA, 120 bp, Artificial Sequence
  ENSG00000114654_16 (sequence is synthesized)
tggcagccaccccttcctcgggctcctccacattacctcgcagcccctgcattcctgccaccagagtccacattaaagccctgcagttgctggatcagcctgcacctgatgctgtatctt

SEQ ID NO: 203060 - DNA, 120 bp, Artificial Sequence
  ENSG00000114654_17 (sequence is synthesized)
tcccctgccctcagggcagagatgcccactttctgactgagtctgaccccaaatctcttccccagagtttcaggatctcctcccctcccagcactgtctccttcctcccactggcatgcc

SEQ ID NO: 203061 - DNA, 120 bp, Artificial Sequence
  ENSG00000114654_18 (sequence is synthesized)
tgctgcaacggagactgggcccaacctttgggatacctggtctgtaggaaagcactccacaccccaggaaatgttgatgactaggaaaggctgagggaattccaaggaaggaacaatcac

SEQ ID NO: 203062 - DNA, 120 bp, Artificial Sequence
  ENSG00000114654_19 (sequence is synthesized)
tgtaggctccctggtagaagctggccttgaaccagctctagaggacaggtaggatttagacaggtaaagaaaggagggaagggcatagaatctaaggtaatggcaagagcaaaggtgtgg

SEQ ID NO: 203063 - DNA, 120 bp, Artificial Sequence
  ENSG00000114654_20 (sequence is synthesized)
aaccagaggggggccccaggaatgcagtgcttggagcccctgctcctgaacacgcattaactcctgaactgcgagcccctcctcctgaactgcgtcatggggttgcaggaaggagtaggc

SEQ ID NO: 203064 - DNA, 120 bp, Artificial Sequence
  ENSG00000114654_21 (sequence is synthesized)
caagatacccagtctcacctaacttagactgtcattagagagaaagatccattgccaaacagtgccatgggggtgaaaccagtgctaaatggaggtaaaataaagtttgtaagagcccaa

SEQ ID NO: 203065 - DNA, 120 bp, Artificial Sequence
  ENSG00000114654_22 (sequence is synthesized)
ttttttataaggatgaaaatccgttgcagaagattttgccttgagtcccattggctaaaactgggttccatgcctgtgccctagctgcaagggatgctgggaatctgagtatctagcact

SEQ ID NO: 203066 - DNA, 120 bp, Artificial Sequence
  ENSG00000114654_23 (sequence is synthesized)
tcctcctggactgtgggaagctgactctgccagggtgacaatgggtgttcatagacagcttgcccatgtacagtggggaatggaagagtcctgtactctcctcctcaatgcctgtgtctc

SEQ ID NO: 203067 - DNA, 120 bp, Artificial Sequence
  ENSG00000114656_0 (sequence is synthesized)
gggcctgcggccctccctgcaccggcggacgctcctctcagtcttggagtctcttcgcccaggtggctgtggatccggtacgggagttgccgccgcggtccaactccccgctgccgccca

SEQ ID NO: 203068 - DNA, 120 bp, Artificial Sequence
  ENSG00000114656_1 (sequence is synthesized)
gcgcatccgctcgcaggagcgccggcggccagcagtgcgctctgcagcatgtcgctacatgcctgggagtgggaagaggaccccgcaagcatagagcccatctcctccatcactagcttt

SEQ ID NO: 203069 - DNA, 120 bp, Artificial Sequence
  ENSG00000114656_2 (sequence is synthesized)
taccagtccacgagcgagtgtgacgtggaggaacacctgaaggccaaggccagggcccaggagtctgactctgaccgcccgtgcagcagcatcgagtcctcatctgagcctgccagcact

SEQ ID NO: 203070 - DNA, 120 bp, Artificial Sequence
  ENSG00000114656_3 (sequence is synthesized)
ttcagctccgacgtgccccacgtggtcccctgcaaattcaccatctcactggccttccctgtgaatatgggtcagaagggaaaatatgcaagtttgattgaaaaatataagaaacaccct

SEQ ID NO: 203071 - DNA, 120 bp, Artificial Sequence
  ENSG00000114656_4 (sequence is synthesized)
aaaacagacagttctgttacaaagatgcgtcgtttttaccacattgagtatttccttctgccggacgatgaagaacctaaaaaagttgacatattgctatttccaatggtggccaaagta

SEQ ID NO: 203072 - DNA, 120 bp, Artificial Sequence
  ENSG00000114656_5 (sequence is synthesized)
ttcctggagtcaggagtaaagactgtgaagccgtggcacgaaggtgacaaagcctgggtgtcgtgggagcagacttttaatatcactgtgacaaaggaattattaaagaaaataaatttc

SEQ ID NO: 203073 - DNA, 120 bp, Artificial Sequence
  ENSG00000114656_6 (sequence is synthesized)
cacaaaatcaccttgaggctctggaacactaaagacaagatgtcaagaaaagtcagatattaccgattaaagactgccggcttcacagacgacgtgggagcttttcataagtcagaagtg

SEQ ID NO: 203074 - DNA, 120 bp, Artificial Sequence
  ENSG00000114656_7 (sequence is synthesized)
agacatttggttttaaatcagagaaaattatctgaacagggcattgagaataccaacattgtcagagaagagtcgaaccaggaacatccgccaggaaaacaagaaaaaacagaaaaacac

SEQ ID NO: 203075 - DNA, 120 bp, Artificial Sequence
  ENSG00000114656_8 (sequence is synthesized)
ccaaagtctttgcaaggttctcaccaagcagagcccgaaacttcttccaagaacagtgaggaatatgagaagtccctcaaaatggacgattcttccacgattcaatggagtgtttcaaga

SEQ ID NO: 203076 - DNA, 120 bp, Artificial Sequence
  ENSG00000114656_9 (sequence is synthesized)
acaccaaccatttctttggcaggagcaagcatgatggagatcaaggaattaattgagagtgaatcacttagcagcttaacaaacatattagacagacaaaggtctcaaattaaagggaaa

SEQ ID NO: 203077 - DNA, 120 bp, Artificial Sequence
  ENSG00000114656_10 (sequence is synthesized)
gattcagagggaagaaggaaaatccagaggagacataagaagcccctggcagaagaagaggcagaccccacgctgacaggccccaggaagcagagcgctttctccatccagctggccgtc

SEQ ID NO: 203078 - DNA, 120 bp, Artificial Sequence
  ENSG00000114656_11 (sequence is synthesized)
atgccgctccttgccggtacccactgcttgccctgttcccagcagctcctgcttgtcttgtggccagaacggccataagcggatgctcctaatgacaaccctgctgcgtgccacctcatt

SEQ ID NO: 203079 - DNA, 120 bp, Artificial Sequence
  ENSG00000114656_12 (sequence is synthesized)
tcatcctcacagccacctcaggaaactcaggggaattggcttcatagtacagggggaaacaaaggcccagagagggtagctaccttgcctgagatcacacagctaggaaatgtgaagcct

SEQ ID NO: 203080 - DNA, 120 bp, Artificial Sequence
  ENSG00000114656_13 (sequence is synthesized)
ggacttgaacccagctctgtttgattccaaaatccaaggaagcctatgggaatattaaatgtcatcattgtgtttgttaagaagatgctgcttttaataaatgctttcctacagattttt

SEQ ID NO: 203081 - DNA, 120 bp, Artificial Sequence
  ENSG00000114656_14 (sequence is synthesized)
acaaaaacatctagtaaagggaatgaggaaagggaaccctttttgactgagcccctctgggtgcaggcacttcccgtgtgacacatcacttacttctcagaccaaattctgacccactca

SEQ ID NO: 203082 - DNA, 120 bp, Artificial Sequence
  ENSG00000114656_15 (sequence is synthesized)
gccaacctgtggtgtggtggtggctgtggtggttatcatagttaccatttttttcagtgaggaaaagaactcaaagaggttaagtaactttcctaatcccacacagctcagtggccaaac

SEQ ID NO: 203083 - DNA, 120 bp, Artificial Sequence
  ENSG00000114656_16 (sequence is synthesized)
agggatttaattattttgctttataagatctaccacaatttatgaactggactttatacatactggtaaatcataactaaatattatatcaatatgttttgatgattgaaagctcagcat

SEQ ID NO: 203084 - DNA, 120 bp, Artificial Sequence
  ENSG00000114656_17 (sequence is synthesized)
atattttggtaaaattatgttgctttgttccaaaaaagagtaatatggggtgaactccccccctttttttttctttttagagaaaattcagactttgttcgtttttttgccatcacgtgt

SEQ ID NO: 203085 - DNA, 120 bp, Artificial Sequence
  ENSG00000114656_18 (sequence is synthesized)
cttgtgcgccctctcctggctactctgcagaagcgcgtgcgttggtcttttctgagctggaaccagcattcatagagaagggggcaaaaaccccgtaagtcagagcctccagttcagttc

SEQ ID NO: 203086 - DNA, 120 bp, Artificial Sequence
  ENSG00000114656_19 (sequence is synthesized)
gttccacaggtgccagtcgtcatcctcctctcgcgctcttgggttggtgtcaattcagtttgagaaagtgctattaacttttcagtttgcactttttttttttttgagatagggtcttgc

SEQ ID NO: 203087 - DNA, 120 bp, Artificial Sequence
  ENSG00000114656_20 (sequence is synthesized)
ttgctctctcacccaggctggagtgtaagtgacatgatcatagctcactccagcctgaagcaagcctcccgcctctgccacccgcatagctaagactacaggtgcacaccaccacacctg

SEQ ID NO: 203088 - DNA, 120 bp, Artificial Sequence
  ENSG00000114656_21 (sequence is synthesized)
cccaggctggtctcaaactcctggtcacaagtaatcctcctgcttcagcctctcagagttctagaattacaggcatgagctgccgcatttggcagtttgcagttttaaatgactttttga

SEQ ID NO: 203089 - DNA, 120 bp, Artificial Sequence
  ENSG00000114656_22 (sequence is synthesized)
gcatttggcagtttgcagttttaaatgactttttgaaaatgatacttcacctacagcttgtccttcctgatcaccttcactttctcgtagcatcagaacctcttgagaggcaacagtgac

SEQ ID NO: 203090 - DNA, 120 bp, Artificial Sequence
  ENSG00000114656_23 (sequence is synthesized)
agagagtaaactttcagagggtcttaccccaccccacgctccagcctgaccctccagcatacctattgcacacagtagctttgagcgaacgcctttgctagctgcttccttcgtcctaca

SEQ ID NO: 203091 - DNA, 120 bp, Artificial Sequence
  ENSG00000114656_24 (sequence is synthesized)
gtcccaaggaggaacccatgatcctcctgggggagcgtaccatgggacctgccccgctttggattttactgtgagaggaaaaagaagttcaaccatttgggcctgcctggcatgactgtt

SEQ ID NO: 203092 - DNA, 74 bp, Artificial Sequence
  ENSG00000114656_25 (sequence is synthesized)
gcctctgcccccccaggtttaagcaattctcctgcttcaacctctagagtagctgggattacaggcgcatgcca

SEQ ID NO: 203093 - DNA, 71 bp, Artificial Sequence
  ENSG00000114656_26 (sequence is synthesized)
tggtcttgaactcctgacctcgtgattgtcttacatgtccgtgtgaagagaccaaacaggctttgtgtaag

SEQ ID NO: 203094 - DNA, 79 bp, Artificial Sequence
  ENSG00000114656_27 (sequence is synthesized)
agggtggggagaattacaaaaaaatgtgggggagattacaaagtacattgatagttagggtggggcagaaacaaatcac

SEQ ID NO: 203095 - DNA, 120 bp, Artificial Sequence
  ENSG00000114656_28 (sequence is synthesized)
gctgggattacaggcgtgagctaccgcactggacctagcctcccctctctataacctgccccgtcatgtacaatgctgtacagtgcaggggttcacatgtaagaactttggtgaccaaaa

SEQ ID NO: 203096 - DNA, 120 bp, Artificial Sequence
  ENSG00000114656_29 (sequence is synthesized)
gaccaaaacactttgatcatggctcagccacttaccagcaagttacctactttctctgagtctcactttcctcctctgtgaaatgggggtgattactcctacctcagagcgttgttttaa

SEQ ID NO: 203097 - DNA, 120 bp, Artificial Sequence
  ENSG00000114656_30 (sequence is synthesized)
ggatcacaggagctgacgtgtgtaaactgctagcacagtgggacccagggggtgcaggtgtggaggcagcagctgtcctgaggccatgtgtgtgggccgctccattatacccatgacata

SEQ ID NO: 203098 - DNA, 120 bp, Artificial Sequence
  ENSG00000114656_31 (sequence is synthesized)
gcctatggtcatcgacagagaacgggtcagctcagcaggccagttgtatgtctggttttgccagaaactaatagcataagattatttactgtaagcccagcataattatttttggtaatc

SEQ ID NO: 203099 - DNA, 120 bp, Artificial Sequence
  ENSG00000114656_32 (sequence is synthesized)
atcttcaatttcaaattaggccatagatcatgtatgtataccttattagtaaatattggttggctagtaacccagtaagattctagaaagattctgtgtctgggaatgagctcttatttt

SEQ ID NO: 203100 - DNA, 120 bp, Artificial Sequence
  ENSG00000114656_33 (sequence is synthesized)
aaaaggatagtattgcatagcggaggggccccacttagcccaacagaactggtttggatgctggttctacaacgtattttctaagagaccttggatgattgcgtcagaactctgggcctc

SEQ ID NO: 203101 - DNA, 120 bp, Artificial Sequence
  ENSG00000114656_34 (sequence is synthesized)
atttcccccatctgtaatgtggagatgacagcaaccacacaaggttaaggatgaaatgacattagcgcatgtttgggactggctgttggaggagcacaaacattcccttacaccattcca

SEQ ID NO: 203102 - DNA, 120 bp, Artificial Sequence
  ENSG00000114656_35 (sequence is synthesized)
ctcttaaccagggctcttaactcagggggcttgtgtctgctggggacacttggctgtgtgtggaggcattttggttggcacgactgagagtgggatgccactggcatctagtaagatact

SEQ ID NO: 203103 - DNA, 120 bp, Artificial Sequence
  ENSG00000114656_36 (sequence is synthesized)
gttaaacatgccataatgcacaggactgtcccctgagcaaagaatggtctgccccaactgtcagcagtgtggaggctgtgagcccgcagcctggaattctgttctggtgtatgtctccct

SEQ ID NO: 203104 - DNA, 120 bp, Artificial Sequence
  ENSG00000114656_37 (sequence is synthesized)
ttctgttctggtgtatgtctccctgactctgatgatttgagcactttttttttatttttatttttgcaatggggattccttctaccttgagtagtcttttttttttttttgagacggagt

SEQ ID NO: 203105 - DNA, 120 bp, Artificial Sequence
  ENSG00000114656_38 (sequence is synthesized)
cctcccgggttcaagcgattctcctgcattagccttcctgagtagttgggaatacaggcatgcgctaccacgtccggctgattttgtatttttggtagagacgaggtttctccattttgg

SEQ ID NO: 203106 - DNA, 64 bp, Artificial Sequence
  ENSG00000114656_39 (sequence is synthesized)
gttgggaatacaggcatgcgctaccacgtccggctgattttgtatttttggtagagacgtgcct

SEQ ID NO: 203107 - DNA, 120 bp, Artificial Sequence
  ENSG00000114656_40 (sequence is synthesized)
tacccggcctacccttgggtagtctttcatgtgaaaaggctcacaaaattatagaacacaggcgtaatgggtgacagcttttatgaatcagctttgttaaagaggatcctgcgggagcat

SEQ ID NO: 203108 - DNA, 120 bp, Artificial Sequence
  ENSG00000114656_41 (sequence is synthesized)
gagggctacccccaggagctgtgcacgcctctgttcacagcctgtgcagatggctgtgcacacctggcccgggacttgttttagaagtgcctactctttctgaatgtgagcgacttggct

SEQ ID NO: 203109 - DNA, 120 bp, Artificial Sequence
  ENSG00000114656_42 (sequence is synthesized)
tttacatgccctagaaatacatttacaggcatgttgaaaggaatagactgatctttttgagcaccatctcatatatcatctttcttaatcctttaaacccaaggaaggtggtgtctatcc

SEQ ID NO: 203110 - DNA, 120 bp, Artificial Sequence
  ENSG00000114656_43 (sequence is synthesized)
ccattttgaagatgaaattgagccttggagactctagcttatcacatgacaaagagtcagatctgggattcaaacccaggtcaatcctgcctccaaaacttgaggtgattttttttgttt

SEQ ID NO: 203111 - DNA, 120 bp, Artificial Sequence
  ENSG00000114656_44 (sequence is synthesized)
gtgattttttttgtttatttgttttgttttttccttacctagtacatctctgactggtgaaatacatggataccttttatagaaaaagcattctgggctgggtgtggtggctcacgcctg

SEQ ID NO: 203112 - DNA, 83 bp, Artificial Sequence
  ENSG00000114656_45 (sequence is synthesized)
ggatcacgaggtcaggagatcgagaacaatacaaaaaattagccaggcatgttgtcgggcacctgtagtcccagctacttggg

SEQ ID NO: 203113 - DNA, 120 bp, Artificial Sequence
  ENSG00000114656_46 (sequence is synthesized)
agtcttggagtctcttcgcccaggtggctgtggatccggtacgggagttgccgccgcggtccaactccccgctgccgcccagcgcatccgctcgcaggtaccgccagcacctggagggga

SEQ ID NO: 203114 - DNA, 120 bp, Artificial Sequence
  ENSG00000114656_47 (sequence is synthesized)
accccgacccctgcccccacctcggccgccgcagcccgggactcttcccgcctcgcctcgatgcgtgttccctcttcggcgtttgcccggcgttccgcctccatgggcctgagctgatgc

SEQ ID NO: 203115 - DNA, 120 bp, Artificial Sequence
  ENSG00000114656_48 (sequence is synthesized)
cccgagcccagcacccagtgcacattcatgttctgtcttggggacagggcttgccctccccgacctcgccaggctcctgcacgtgctgcccccggcctggtttgcctctccccaaatagc

SEQ ID NO: 203116 - DNA, 120 bp, Artificial Sequence
  ENSG00000114656_49 (sequence is synthesized)
aaacgcatcttgtgcttaggcgcagcaggcctgcctgagcagacgtcccctctcccgcctggtggctcccgggagctgctcacctggggcaggcattccagaagcccggcgactgactcc

SEQ ID NO: 203117 - DNA, 120 bp, Artificial Sequence
  ENSG00000114656_50 (sequence is synthesized)
tggttaggcgaaggaaacggggttgctcgtcgtcgtgcttactgccagccacccttatctgttgttccttcatccattcattctctaagtcgattgagtaccgactgtgtggcaggcagt

SEQ ID NO: 203118 - DNA, 120 bp, Artificial Sequence
  ENSG00000114656_51 (sequence is synthesized)
gaaggagccccggcgttcatctaggagcaggcgggggaagcagggaagagaagggtgggtgcttctgcaggaggccgggcttacctcctggagcagccctggaatacaggcggggacagc

SEQ ID NO: 203119 - DNA, 120 bp, Artificial Sequence
  ENSG00000114656_52 (sequence is synthesized)
cgctccttgccgtcaggaagaagaaagggaacagccccatctcctgagcagcacagaccctcccacggccaccgcatggtgaacctgcacagcctcccccacacccgaccacaccctcct

SEQ ID NO: 203120 - DNA, 120 bp, Artificial Sequence
  ENSG00000114656_53 (sequence is synthesized)
caacaatcaacttcattaaagtgcagcaggacagatggcagcagccaggccctgtgtgaggctgggctgggctcacctcgtggtcgtggttgcggagcccaatgcggatggagcggctgg

SEQ ID NO: 203121 - DNA, 120 bp, Artificial Sequence
  ENSG00000114656_54 (sequence is synthesized)
cccgcgacagcacggccgtcatgccatacaggttgatgaggatgttggccacccgcttcagtaccagctgctcctccatgatggtctgggatcacagaggctccaagtggggactcacta

SEQ ID NO: 203122 - DNA, 120 bp, Artificial Sequence
  ENSG00000114656_55 (sequence is synthesized)
cctagaccagtcccccacatggtccctccctgggctgcatctttgcctgtcttagtctcctgtgttccttgagaaagtggagtcaataacacctttctcttcaggttgtgggagaacggc

SEQ ID NO: 203123 - DNA, 120 bp, Artificial Sequence
  ENSG00000114656_56 (sequence is synthesized)
acaagtagtacttcacatcttgatagaccttgctttgttttgttttcatctgcttacttgaactagcccaccattatgatttcaacttctcctggtattctgtcgatggtgtaagtttct

SEQ ID NO: 203124 - DNA, 120 bp, Artificial Sequence
  ENSG00000114656_57 (sequence is synthesized)
tgtatgggttggaaccccgagagcgcaccaacagacaacacgaggcggtgtggagcaacatgctgtttcaatgaacgccttggtgcaggccggctgaggcctaaaatggcgtcagcccca

SEQ ID NO: 203125 - DNA, 120 bp, Artificial Sequence
  ENSG00000114656_58 (sequence is synthesized)
agtgaggacggggcaaaggttttatagtctcctgtaaacaggaagtgtcctagtctggcgtaactgctacgctgtacccggatggcctctttctcatcttcatgtcttccggccagggta

SEQ ID NO: 203126 - DNA, 120 bp, Artificial Sequence
  ENSG00000114656_59 (sequence is synthesized)
atgccgctccttgccggatggcaaactgtcgtgagtcgtggcagtgagaagtctgccaacattttagattgccttttgactttaaaaacagaagttccgatcatgaccgaggagcaaaag

SEQ ID NO: 203127 - DNA, 120 bp, Artificial Sequence
  ENSG00000114656_60 (sequence is synthesized)
caggatttaaatcccctgaccataaagatcaagtgtgcttcctgccttccatcacagcctgtacccattcaggaactagagaggctgtgcatgcctgtgtactgcaagtaccagttccat

SEQ ID NO: 203128 - DNA, 120 bp, Artificial Sequence
  ENSG00000114656_61 (sequence is synthesized)
aagactccagttcacaagaccaagggggagccccatggaacccacgtttatttccaggacatcaacgtcatcttccttggggcactgcaccccagtgacctaagggaatacctggagggc

SEQ ID NO: 203129 - DNA, 120 bp, Artificial Sequence
  ENSG00000114656_62 (sequence is synthesized)
ccccccatggtggtggaagttcacgaccgggaccgcaagtcagaggagtgttctcagaagcccgtgctgtttggggaggaccctctggattcatacctcaacttccaggccctcatctct

SEQ ID NO: 203130 - DNA, 120 bp, Artificial Sequence
  ENSG00000114656_63 (sequence is synthesized)
cccagagagacagagaacaacccctttgagtcccagaacaagatgtggtacccttatggcatcgcccaggtcagttttgctgacctcctccttggccacaagtacttgaatctggccgtc

SEQ ID NO: 203131 - DNA, 120 bp, Artificial Sequence
  ENSG00000114656_64 (sequence is synthesized)
gcttggggtccccagagatggccaccagcacggcccaatgcccaggggcaactacctagaggctgactcccagctcaagttgcgagtggacatcgcggtgccactgagggccggggccag

SEQ ID NO: 203132 - DNA, 120 bp, Artificial Sequence
  ENSG00000114656_65 (sequence is synthesized)
agctgctgatcctgaccttgggggctcccagtttggccgcatcatcttcgtctttgactttaagaaggtctccctgctccacagcctgctgcaggacatcaccatgatcaacgctaaggc

SEQ ID NO: 203133 - DNA, 120 bp, Artificial Sequence
  ENSG00000114656_66 (sequence is synthesized)
cctcggcctggactcctaccctgtcaggaccctgcagcagatcctgtcagccttcaaggtgcgtgtgcgggtccaggagcagcagcacctggatgtgctcactggcttccacctgctgga

SEQ ID NO: 203134 - DNA, 120 bp, Artificial Sequence
  ENSG00000114656_67 (sequence is synthesized)
cgggaagacacaccttttcatcctggaaggcctggccgaccaaggcttgaggcagctgtgggagaaccaccaaagctggattcccaggtcagaacacaggaaatacaaggtgctgtacaa

SEQ ID NO: 203135 - DNA, 120 bp, Artificial Sequence
  ENSG00000114656_68 (sequence is synthesized)
ctcacagctgctgttccgcagccggctctatggggacctggaggccatcctgtaccacgtgcacctcttccagcccacggagctgctgctgcagcaggcggtgttcttcctgcgagacac

SEQ ID NO: 203136 - DNA, 120 bp, Artificial Sequence
  ENSG00000114656_69 (sequence is synthesized)
tgagcggaggcgggtcttccaggctctagccaggatccacgacatctgctataacagcaccaccctctgggacgtgacggtgagggacctgctgccctcctctgctatgataaaagactt

SEQ ID NO: 203137 - DNA, 120 bp, Artificial Sequence
  ENSG00000114656_70 (sequence is synthesized)
gagccaagagtttgggatgcccctttcgcaagaagaactcacagatgagaaactgtttgccctaccacctcagcctgcccccaatcttgaggactaccacagtcggaactccaccctcac

SEQ ID NO: 203138 - DNA, 120 bp, Artificial Sequence
  ENSG00000114656_71 (sequence is synthesized)
cttagagatccacgcccaccaggagaagtacctgcagtggcggagtgccatgcttatgaagaacaaagacaaaaagcacagtttcatccagaaaaatatcacagaagcctaccaggtcag

SEQ ID NO: 203139 - DNA, 120 bp, Artificial Sequence
  ENSG00000114656_72 (sequence is synthesized)
caagaagcctccgaagtccgtggcgaaggtgattaaaatttcagcccctgccaacaaggccgtctacaactatagtacccagaccatgaattctacagagcttgccaagaaggagctgta

SEQ ID NO: 203140 - DNA, 120 bp, Artificial Sequence
  ENSG00000114656_73 (sequence is synthesized)
tcaagagatagccaaggagccaagaaagagattcacgtactcacaggattacctctcagccatggtggagcccctggacttgaaggaagaggagaagaaagcccagaagaaatcccgcca

SEQ ID NO: 203141 - DNA, 120 bp, Artificial Sequence
  ENSG00000114656_74 (sequence is synthesized)
ggcctggctcacagccaggggattccaagtgacaggtcttcagagcgacaccgaaagcagctttcaggatctcaagctgccacccatcaaagagctgaatgaggagtggaaggaaaactc

SEQ ID NO: 203142 - DNA, 120 bp, Artificial Sequence
  ENSG00000114656_75 (sequence is synthesized)
cctgtttgctaatgtactggagcctgtgttggatcgagacaggtggagctgggacaggcaccacgtggactttgatctgtacaagaaaccaccacctttcctcgagctgctcccttcgcc

SEQ ID NO: 203143 - DNA, 120 bp, Artificial Sequence
  ENSG00000114656_76 (sequence is synthesized)
aggaaggagagagaaagatgcttgttgaaagggaatatgtgagactacccagacaggtgcaattcctaggttaaaggggcaagacgcgatgatgtggcggtggagcagaaaagtggggtc

SEQ ID NO: 203144 - DNA, 120 bp, Artificial Sequence
  ENSG00000114656_77 (sequence is synthesized)
ctcctgatgccgtgggcaggcaggagctctgtgccactctgcatcttcagtggtatccattttgtttacactatcaaccaaactttctatgctaagaaaagcaagatgcagaatgggtct

SEQ ID NO: 203145 - DNA, 120 bp, Artificial Sequence
  ENSG00000114656_78 (sequence is synthesized)
gaaaaaagagattgaatgctgggctggaactcagaccaggattctagccccaagtgtgacatttgtgtgacttgaggcaaatcccttcatgccctgggtctggtttcttggctataaagt

SEQ ID NO: 203146 - DNA, 120 bp, Artificial Sequence
  ENSG00000114656_79 (sequence is synthesized)
ggggaagttggaagacaggtctaaaggcttcctgagcttcaacactattacccatgactgatctctaggtgtccagccaagagctgggggcagaggctctgggcttcactgggaccttcc

SEQ ID NO: 203147 - DNA, 120 bp, Artificial Sequence
  ENSG00000114656_80 (sequence is synthesized)
agtcctcttcctctttatccctgtttatgaaaattgatctcaggatcatctggaggttaacatagaacccaaacttggttaacagagccagaacctttgttcagggagaaagagacatga

SEQ ID NO: 203148 - DNA, 120 bp, Artificial Sequence
  ENSG00000114656_81 (sequence is synthesized)
gcctatctaaaaacaaggtctgccagagaaacttctcccagaaaactaggtcaggtgaacgtgatggcttcctctcctcctcgactcctaaggacaactgatcacagctccatggaagtg

SEQ ID NO: 203149 - DNA, 120 bp, Artificial Sequence
  ENSG00000114656_82 (sequence is synthesized)
ctaacaagtttgctgaaatgtcactttctccatttgcctagacttggctccctccctccccagtaggccctagatctcccaggttgcctgaagagacctgctctctgtgggcatgtccca

SEQ ID NO: 203150 - DNA, 120 bp, Artificial Sequence
  ENSG00000114656_83 (sequence is synthesized)
ggcccacagttactgctgtggctctcaaggaggctccagctaggagagctgtctagcctaagaacacaaggcttttccttggtaagaaggcttcctagtgagctccactgccagccttcc

SEQ ID NO: 203151 - DNA, 120 bp, Artificial Sequence
  ENSG00000114656_84 (sequence is synthesized)
cagcaaaagtctcctgggggtttcactggtgaaatcacttaagaaacacttgctggggtctcctcttcccacaacatgtttaagaaaagttagcaactacagatgagagggagaggcttg

SEQ ID NO: 203152 - DNA, 120 bp, Artificial Sequence
  ENSG00000114656_85 (sequence is synthesized)
aactggtcgctaggccttttcaacccagatggatgaatggagaacttgccattctccattggcatgtaagactgaggccttacacgccaccagcctagagtgaagcccccttccagaagg

SEQ ID NO: 203153 - DNA, 120 bp, Artificial Sequence
  ENSG00000114656_86 (sequence is synthesized)
ctgcacagaaggggggtgggtctgacagcccctccccaaacttctcctgtgcaaagaaactctaagcagccttctgtccagaggtatgcatgcttcattttgtgcaaaatgctgccctgc

SEQ ID NO: 203154 - DNA, 120 bp, Artificial Sequence
  ENSG00000114656_87 (sequence is synthesized)
tatcactaacagaacttcaggtttcactgagaggttatttacacggtcacaatatttacaaactttccccattttaaaaactagttaccaaacccctggcagaatgctcaggccagcccc

SEQ ID NO: 203155 - DNA, 120 bp, Artificial Sequence
  ENSG00000114656_88 (sequence is synthesized)
actcagccagctcagctctccaagttcccagtctcctccttgcctatttccagcatcacagtaaattgggaatatacttggaggaaaaagagtcggctgccttctctgtgctcaagggag

SEQ ID NO: 203156 - DNA, 120 bp, Artificial Sequence
  ENSG00000114656_89 (sequence is synthesized)
tgtccacaataggcattttagagctccagaccacccaaggaccacatcaaagcttaaagttcaccacagtgagcacgctgggacctggtgtaatctttcaagtgccagcagaagggaggc

SEQ ID NO: 203157 - DNA, 120 bp, Artificial Sequence
  ENSG00000114656_90 (sequence is synthesized)
tggagaaatgcaaaggcctgctggcctggagataccattcatcctctcctcaagagtagaagccagttcttgtaaagaaactaaagtccctaggtgggaacatcatcagctgagacagcc

SEQ ID NO: 203158 - DNA, 120 bp, Artificial Sequence
  ENSG00000114656_91 (sequence is synthesized)
tccccatcatctcctgagaaggataaaaactaagggctcataaccccaagggattgtggcctgcactgtgtgtctgctccttagcattctgggccctccttgcagggtgaggacaaaggg

SEQ ID NO: 203159 - DNA, 120 bp, Artificial Sequence
  ENSG00000114656_92 (sequence is synthesized)
gacccgaggccatcaccaaagggtggttctcagggtcctgctgtcacccattaaaggctggttctaaggaacagtgtgacaagtacagcaaaggctaacagtacacagattgtgacattt

SEQ ID NO: 203160 - DNA, 120 bp, Artificial Sequence
  ENSG00000114656_93 (sequence is synthesized)
tattgtgatatttactttagtgtagtctgaaaccgaacgcccagtgtctccaagaaatgcccatagtagttaattcaataaatattttggattgattgagtcaatgatcctttcttctcc

SEQ ID NO: 203161 - DNA, 120 bp, Artificial Sequence
  ENSG00000114670_0 (sequence is synthesized)
acggttccaaacagccgtggcccgcggtgtctggcgctcggtgggtgtggttgcccctagtttgaggcctgcccgattacccgcaagacttgggcagccccgggcgccgctccgaccacg

SEQ ID NO: 203162 - DNA, 120 bp, Artificial Sequence
  ENSG00000114670_1 (sequence is synthesized)
acagggaaaggaaccttaatctcatctttaaaataaggagaattactgagtgacctgaaggacccttttcagctggaaagtctgaactgaccaacactggatgaatttgaccatttctta

SEQ ID NO: 203163 - DNA, 120 bp, Artificial Sequence
  ENSG00000114670_2 (sequence is synthesized)
ggagactggaatgttaagtttctataaatgaatgaaccagttctctcttgtttggagcaatgctgaaattccaagaggcagctaagtgtgtgagtggatcaacagccatttccacttatc

SEQ ID NO: 203164 - DNA, 120 bp, Artificial Sequence
  ENSG00000114670_3 (sequence is synthesized)
caaagaccttgattgcaagaagatacgtgcttcaacaaaaacttggcagtggaagttttggaactgtctatctggtttcagacaagaaagccaaacgaggagaggaattaaaggtactta

SEQ ID NO: 203165 - DNA, 120 bp, Artificial Sequence
  ENSG00000114670_4 (sequence is synthesized)
aggaaatatctgttggagaactaaatccaaatgaaactgtacaggccaatttggaagcccaactcctctccaagctggaccacccagccattgtcaagttccatgcaagttttgtggagc

SEQ ID NO: 203166 - DNA, 120 bp, Artificial Sequence
  ENSG00000114670_5 (sequence is synthesized)
aagataatttctgcattatcacggagtactgtgagggccgagatctggacgataaaattcaggaatataaacaagctggaaaaatctttccagaaaatcaaataatagaatggtttatcc

SEQ ID NO: 203167 - DNA, 120 bp, Artificial Sequence
  ENSG00000114670_6 (sequence is synthesized)
agctgctgctgggagttgactacatgcatgagaggaggatacttcatcgagacttaaagtcaaagaatgtatttctgaaaaataatctccttaaaattggagattttggagtttctcgac

SEQ ID NO: 203168 - DNA, 120 bp, Artificial Sequence
  ENSG00000114670_7 (sequence is synthesized)
ttctaatgggatcctgtgacctggccacaactttaactggaactccccattatatgagtcctgaggctctgaaacaccaaggctatgacacaaagtcggacatctggtcactggcatgca

SEQ ID NO: 203169 - DNA, 120 bp, Artificial Sequence
  ENSG00000114670_8 (sequence is synthesized)
ttttgtatgagatgtgctgcatgaatcatgcattcgctggctccaatttcttatccattgttttaaaaattgttgaaggtgacacaccttctctccctgagagatatccaaaagaactaa

SEQ ID NO: 203170 - DNA, 120 bp, Artificial Sequence
  ENSG00000114670_9 (sequence is synthesized)
atgccatcatggaaagcatgttgaacaagaatccttcattaagaccatctgctatcgaaattttaaaaatcccttaccttgatgagcagctacagaacctaatgtgtagatattcagaaa

SEQ ID NO: 203171 - DNA, 120 bp, Artificial Sequence
  ENSG00000114670_10 (sequence is synthesized)
tgactctggaagacaaaaatttggattgtcagaaggaggctgctcatataattaatgccatgcaaaaaaggatccacctgcagactctgagggcactgtcagaagtacagaaaatgacgc

SEQ ID NO: 203172 - DNA, 120 bp, Artificial Sequence
  ENSG00000114670_11 (sequence is synthesized)
caagagaaaggatgcggctgaggaagctccaggcggctgatgagaaagccaggaagctgaaaaagattgtggaagaaaaatatgaagaaaatagcaaacgaatgcaagaattgagatctc

SEQ ID NO: 203173 - DNA, 120 bp, Artificial Sequence
  ENSG00000114670_12 (sequence is synthesized)
tttaaaaggaatggaagaaaaggaggagcaacctgagggaagactttcttgttcaccccaggacgaggatgaagagaggtggcaaggcagggaagaggaatctgatgaaccaactttaga

SEQ ID NO: 203174 - DNA, 120 bp, Artificial Sequence
  ENSG00000114670_13 (sequence is synthesized)
gaacctgcctgagtctcagcctattccttccatggacctccacgaacttgaatcaattgtagaggatgccacatctgaccttggataccatgagatcccagaagacccacttgtggctga

SEQ ID NO: 203175 - DNA, 120 bp, Artificial Sequence
  ENSG00000114670_14 (sequence is synthesized)
agagtactacgctgatgcatttgattcctattgtgaagagagtgatgaggaggaagaagaaatagcgttagaaagaccagagaaagaaatcaggaatgagggatcccagcctgcttacag

SEQ ID NO: 203176 - DNA, 120 bp, Artificial Sequence
  ENSG00000114670_15 (sequence is synthesized)
aacaaaccaacaggacagtgatatcgaagcgttggccaggtgtttggaaaatgtcctgggttgcacttctctagacacaaagaccatcaccaccatggctgaagacatgtccccaggacc

SEQ ID NO: 203177 - DNA, 120 bp, Artificial Sequence
  ENSG00000114670_16 (sequence is synthesized)
accaattttcaacagtgtgatggccaggaccaagatgaaacgcatgagggaatcagccatgcagaagctggggacagaagtatttgaagaggtctataattacctcaagagagcaaggca

SEQ ID NO: 203178 - DNA, 120 bp, Artificial Sequence
  ENSG00000114670_17 (sequence is synthesized)
tcagaatgctagcgaagcagagatccgcgagtgtttggaaaaagtggtgcctcaagccagcgactgttttgaagtggaccagctcctgtactttgaagagcagttgctgatcacgatggg

SEQ ID NO: 203179 - DNA, 120 bp, Artificial Sequence
  ENSG00000114670_18 (sequence is synthesized)
aaaagaacctactctccagaaccatctctaggcaactatcaaaaagaagcagaagttcaagtggacaaatttatgtgaaaattcatttaacatataagctgaactctattatggggaatg

SEQ ID NO: 203180 - DNA, 120 bp, Artificial Sequence
  ENSG00000114670_19 (sequence is synthesized)
gatacaaaagcagagctcccatcttgactttcaattcctcatcagaagtactggcttctttagagagtagtaagcatggctgcctatgcttggagtcataagtgttatttggactatacc

SEQ ID NO: 203181 - DNA, 120 bp, Artificial Sequence
  ENSG00000114670_20 (sequence is synthesized)
ctgagataagcttatagatcaagtttggctcccttgaaaagcatttctctcatgtgcgccctcagggcttccagcaggattgagtcaccctgacgatgaccggggagaagccgtgtgctc

SEQ ID NO: 203182 - DNA, 120 bp, Artificial Sequence
  ENSG00000114670_21 (sequence is synthesized)
ttcattattttcagctggaggacagagctcagtgcctgactgcctagggtctcatggactgtaggcagcctgccagtgaaggtcactggactctagcctacaacatgctgagctacagcc

SEQ ID NO: 203183 - DNA, 120 bp, Artificial Sequence
  ENSG00000114670_22 (sequence is synthesized)
cagaagccagacatgcctgtcttagctgacctgtttttggtccacttttgcccttccatgactaataaggaagatatgtgtgtatttcatacacacacaaggacctggattaaaaatcca

SEQ ID NO: 203184 - DNA, 120 bp, Artificial Sequence
  ENSG00000114670_23 (sequence is synthesized)
aaaagtgattctcttctatgatttatttcaaactcatccatagataattcaagatttgtattcaaaataaacatagttttcacagttacaaaataaatcacctattttatcttttcctta

SEQ ID NO: 203185 - DNA, 120 bp, Artificial Sequence
  ENSG00000114670_24 (sequence is synthesized)
tcacagctgactttcagagcagtgttttttccaaagctggaatagcctgagactctagggcctgggtctacaaggagcatgactccctaccccaccattcagatgtggagaatgcagtga

SEQ ID NO: 203186 - DNA, 120 bp, Artificial Sequence
  ENSG00000114670_25 (sequence is synthesized)
agtaggccttggctgcttacccacatcctgaccagctgtcacctcttcatttcctgttcagccactctttaagcaatcactgagcccaatgctcagagatagctcagacctgtaggtggt

SEQ ID NO: 203187 - DNA, 120 bp, Artificial Sequence
  ENSG00000114670_26 (sequence is synthesized)
tgtgctttgcttgcctgtaggagccccacatgccctttacagttctgggctgtctatgacttacgatatcacctcttctttttaaatgtccaagtggaaataaagtgatttgaactttgc

SEQ ID NO: 203188 - DNA, 120 bp, Artificial Sequence
  ENSG00000114670_27 (sequence is synthesized)
ggatgacctaaaagtggactgggatgggggtggcagggctgagtctgtgagggtgggcgggagggaacctagtcccagagtcttctgcagcctggaccagactacttaagcactgctggg

SEQ ID NO: 203189 - DNA, 120 bp, Artificial Sequence
  ENSG00000114670_28 (sequence is synthesized)
gttagactcctaaccttccttagagattgggagacaagagccctatcttcaggcattggctggaagaaactgtcaattcttctgtctaccttgagttttctcagggccgagatctggacg

SEQ ID NO: 203190 - DNA, 120 bp, Artificial Sequence
  ENSG00000114670_29 (sequence is synthesized)
agggaaaggtaaagcgaactgtcctccttggggctagccaggctcccctgcgagggggaaggtaatggtttcaagctgcccgggctgggttccgaatctctaggacgccatggctgcgat

SEQ ID NO: 203191 - DNA, 120 bp, Artificial Sequence
  ENSG00000114670_30 (sequence is synthesized)
ctcctcgctttcctggacatcttacctccggatgtactccagtctcagtgcccctcaataaacgttaacctgctttgccaaaatgtaaatgtttaaaaaggtgaagaagcaaggaattgt

SEQ ID NO: 203192 - DNA, 120 bp, Artificial Sequence
  ENSG00000114670_31 (sequence is synthesized)
tcgttttaccttaaggttaagatttactttaaaggtagatttgtgctgtagcagaaactggtgacaaattgccttcctcttattacctgggaagataactactggttttcaacttgtgat

SEQ ID NO: 203193 - DNA, 120 bp, Artificial Sequence
  ENSG00000114670_32 (sequence is synthesized)
aaatactccttccgttgtcttttgcccccagccagatctgtttcaccgagaacgggtagtttgcacaaggtagtaactttctccaagttcccatctagctttcttaactaaccttttttc

SEQ ID NO: 203194 - DNA, 120 bp, Artificial Sequence
  ENSG00000114670_33 (sequence is synthesized)
tctcctttgggcggcagttgatctgctggacacttacttgccttaacaaggtttgttaaacacctagtatatgccaggaggtatgccagggattggggatgcagaaataaagaagatgtg

SEQ ID NO: 203195 - DNA, 120 bp, Artificial Sequence
  ENSG00000114670_34 (sequence is synthesized)
ttcgcagtgcccaagttcactcaaacctcgagggggagcgtgttgtcaagtgaacagatagttctagaatctagacaatgcgacacattcttgggtaggtttatggttgcgcagaggaga

SEQ ID NO: 203196 - DNA, 120 bp, Artificial Sequence
  ENSG00000114670_35 (sequence is synthesized)
catacattcactttatccctttgacatgaatatttctgtgaccagagtaaaagaaggtcttttgcatttagaactcaatatatttcattaaactagtttcaaaaattctttttattcagt

SEQ ID NO: 203197 - DNA, 120 bp, Artificial Sequence
  ENSG00000114670_36 (sequence is synthesized)
gataattggttggttttggatttttggttcctgaatcacaagggaaagttcttaatgtaccataagcattaaattttaatacatttctgttaacctattaaataaagtatttgtaaccct

SEQ ID NO: 203198 - DNA, 120 bp, Artificial Sequence
  ENSG00000114670_37 (sequence is synthesized)
agctacatgtaattttacataacccagggaaaactagcatgctttgttctcaggctccctgccatggtcaaaagcaccccaaatctgaaaagattcttggtaatttattccctttcatcc

SEQ ID NO: 203199 - DNA, 120 bp, Artificial Sequence
  ENSG00000114670_38 (sequence is synthesized)
acattcaccttgatgaggaagagacctgatggcctggctttctaatcccccagtcagtctgttgaaataaggatcacactcatctgtataatatagacatggttttagcaattcgcagtt

SEQ ID NO: 203200 - DNA, 120 bp, Artificial Sequence
  ENSG00000114670_39 (sequence is synthesized)
gggctgtccacacctcaggactgtcttcagtggtttgcattgctgggattgctgctgattgaaggaactaagcattgttttcagagtggtgggtcccatcggggccctctgattttcctg

SEQ ID NO: 203201 - DNA, 120 bp, Artificial Sequence
  ENSG00000114686_0 (sequence is synthesized)
gcagagagcatcggccggcgaccgttccggcggccattgcgaaaacttccccacggctactgcgtccacgtggcggtggcgtggggactccctgaaagcagagcggcagggcgcccggaa

SEQ ID NO: 203202 - DNA, 120 bp, Artificial Sequence
  ENSG00000114686_1 (sequence is synthesized)
gtcgtgagtcgagtcttcccgggctaatccatgccgggttggaggctgctgacgcaggtcggcgcccaggtgctgggtcgactcggggacggcctgggtgctgccctgggcccggggaac

SEQ ID NO: 203203 - DNA, 120 bp, Artificial Sequence
  ENSG00000114686_2 (sequence is synthesized)
agaacacacatctggctttttgttagaggtcttcatggaaagagtggtacatggtgggatgagcatctttctgaagaaaatgtcccattcattaagcagttggtctctgatgaagataaa

SEQ ID NO: 203204 - DNA, 120 bp, Artificial Sequence
  ENSG00000114686_3 (sequence is synthesized)
gcccaattagcaagtaaactgtgtcctctgaaagatgaaccatggcctatacatccttgggaaccaggttcctttagagttggtcttattgccttgaagctgggcatgatgcctttatgg

SEQ ID NO: 203205 - DNA, 120 bp, Artificial Sequence
  ENSG00000114686_4 (sequence is synthesized)
accaaggatggtcaaaagcatgtggtcacattacttcaggtacaagactgtcatgtcttaaaatatacgtcaaaggaaaactgtaatggaaaaatggcaaccctgtctgtaggaggaaaa

SEQ ID NO: 203206 - DNA, 120 bp, Artificial Sequence
  ENSG00000114686_5 (sequence is synthesized)
actgtatcacgttttcgtaaagctacatccatattggaattttaccgggaacttggattgccgccgaaacagacagttaaaatctttaatataacagataatgctgcaattaaaccaggc

SEQ ID NO: 203207 - DNA, 120 bp, Artificial Sequence
  ENSG00000114686_6 (sequence is synthesized)
actcctctttatgctgctcactttcgtccaggacagtatgtggatgtcacagccaaaactattggtaaaggttttcaaggtgtcatgaaaagatggggatttaaaggccagcctgctacg

SEQ ID NO: 203208 - DNA, 120 bp, Artificial Sequence
  ENSG00000114686_7 (sequence is synthesized)
ctggagctgttgcaactggtgatattggcagagtctggcctggaactaaaatgcctggaaaaatgggaaacatatacaggacagaatatggactgaaagtgtggagaataaacacaaagc

SEQ ID NO: 203209 - DNA, 120 bp, Artificial Sequence
  ENSG00000114686_8 (sequence is synthesized)
acaacataatctatgtaaatggctctgtacctggacataaaaattgcttagtaaaggtcaaagattctaaactgcctgcatataaggatctcggtaaaaatctaccattccctacatatt

SEQ ID NO: 203210 - DNA, 120 bp, Artificial Sequence
  ENSG00000114686_9 (sequence is synthesized)
ttcctgatggagatgaagaggaactgccagaagatttgtatgatgaaaacgtgtgtcagcccggtgcgccttctattacatttgcctaacatctttggacgtggcagaaccttacatatt

SEQ ID NO: 203211 - DNA, 120 bp, Artificial Sequence
  ENSG00000114686_10 (sequence is synthesized)
ctgtgagcttcgatgagccagagtgatatcataaccaccagaaatcatactctcctttcttagtcacaacaaaatcacacatgtcatctttgtcaagggcataaatatatcattcatacc

SEQ ID NO: 203212 - DNA, 120 bp, Artificial Sequence
  ENSG00000114686_11 (sequence is synthesized)
cccattaaattttgttagaaaaattaccacattaaatatatgagttaagtagattggatttgctgaaattggtgttgggcatattagcaaaatattcttaatttgtggactcgattcttt

SEQ ID NO: 203213 - DNA, 120 bp, Artificial Sequence
  ENSG00000114686_12 (sequence is synthesized)
tttactacatatttcccaagttatcttaagatgtctgtaaatttaacttttattaaagttttgtcaatctttgtgaaatagtggttgtggaacagtagaaaaccatatggggactatagt

SEQ ID NO: 203214 - DNA, 120 bp, Artificial Sequence
  ENSG00000114686_13 (sequence is synthesized)
gcaacctatttgggtaaagaaaccatttgctaaaatggagaaagtaaatagatttttatttaaattacagaaacatgttaaaggccggacaaaggaaagacaataaaatcataaattatc

SEQ ID NO: 203215 - DNA, 120 bp, Artificial Sequence
  ENSG00000114686_14 (sequence is synthesized)
gttaaaatctttaatataacagataatgctgcaattaaaccaggcactcctctttatgctgctcactttcgtccaggacagtatgtggatgtcacagccaaaacgtaggtcctcatagcg

SEQ ID NO: 203216 - DNA, 120 bp, Artificial Sequence
  ENSG00000114686_15 (sequence is synthesized)
agttctcttttccttttgttttcatctattaaaagagaatagaataagtgaaagaagtacagtctttcaagtcagtgaataaaggataaatatatttctcattctgaattcaaatctttc

SEQ ID NO: 203217 - DNA, 90 bp, Artificial Sequence
  ENSG00000114686_16 (sequence is synthesized)
tctttcatgttacctacactggtttttaaattgtgccaaattaattgtatgtaaagggttcacatcaggttatagcactttaagttctag

SEQ ID NO: 203218 - DNA, 120 bp, Artificial Sequence
  ENSG00000114686_17 (sequence is synthesized)
tccacagccacaaacttgcatttgtttgtgaggtaaattgtgtatttgggggaggcagtctggcacagccattttgcccaggagtcttggagactcttgagtttgttctaatacctctcc

SEQ ID NO: 203219 - DNA, 120 bp, Artificial Sequence
  ENSG00000114686_18 (sequence is synthesized)
gcctatataaatccaggttgggttataacttaaaggaagttccccccctgcaatcttacagcactttgctgcttgtattaaataaactataactataaataaactttcagttacattctc

SEQ ID NO: 203220 - DNA, 120 bp, Artificial Sequence
  ENSG00000114686_19 (sequence is synthesized)
tgggaatggtctatgctcttttcattatgtaaattctaacgtttgttttgttcagtattggtaaaggttttcaaggtgtcatgaaaagatggggatttaaaggccagcctgctacgcatg

SEQ ID NO: 203221 - DNA, 120 bp, Artificial Sequence
  ENSG00000114698_0 (sequence is synthesized)
ctcccttccgcgcgcttactttgtttataacttgaaaaatcctctccgtctcccttccctgcctcctttcctttccctttcctctgccagtacaactagacccggcgtctggcgtccccg

SEQ ID NO: 203222 - DNA, 120 bp, Artificial Sequence
  ENSG00000114698_1 (sequence is synthesized)
gtgcccagcattctgcggggcaggcggattaattggaattcttcaaaatgtcaggtgtggtacccacagcccctgaacagcctgcaggtgaaatggaaaatcaaacaaaaccaccagatc

SEQ ID NO: 203223 - DNA, 120 bp, Artificial Sequence
  ENSG00000114698_2 (sequence is synthesized)
caaggcctgatgctcctcctgaatacaattctcattttttaccaggaccccctggaacagctgtccctccacctactggctacccaggaggcttgcctatgggatactacagtccacagc

SEQ ID NO: 203224 - DNA, 120 bp, Artificial Sequence
  ENSG00000114698_3 (sequence is synthesized)
aacccagtaccttccctttgtaccagccagttggtggtatccatcctgtccggtatcagcctggcaaatatcctatgccaaatcagtctgttccaataacatggatgccagggccaactc

SEQ ID NO: 203225 - DNA, 120 bp, Artificial Sequence
  ENSG00000114698_4 (sequence is synthesized)
ctatggcaaactgccctcctggtctggaatacttagttcagttggacaacatacatgttcttcagcattttgagcctctggaaatgatgacatgttttgaaactaataatagatatgata

SEQ ID NO: 203226 - DNA, 120 bp, Artificial Sequence
  ENSG00000114698_5 (sequence is synthesized)
ttaaaaacaactcagaccagatggtttacattgtaaccgaagacacagatgactttaccaggaatgcctatcggacactaaggcccttcgtcctccgggtcactgattgtatgggccgag

SEQ ID NO: 203227 - DNA, 120 bp, Artificial Sequence
  ENSG00000114698_6 (sequence is synthesized)
aaatcatgacaatgcagagacccttcagatgcacctgctgttgcttctgttgcccctctgccagacaagagctggaggtgcagtgtcctcctggtgtcaccattggctttgttgcggaac

SEQ ID NO: 203228 - DNA, 120 bp, Artificial Sequence
  ENSG00000114698_7 (sequence is synthesized)
attggaacctgtgcagggcggtgtacagcatccaaaatgagaagaaagaaaatgtgatgagagttcgtgggccatgctcaacctatggctgtggttcagattctgtttttgaggtcaaat

SEQ ID NO: 203229 - DNA, 120 bp, Artificial Sequence
  ENSG00000114698_8 (sequence is synthesized)
cccttgatggcatatccaacatcggcagtattatccggaagtggaatggtttgttatcagcaatggcagatgctgaccattttgacattcacttcccactagacctggatgtgaagatga

SEQ ID NO: 203230 - DNA, 120 bp, Artificial Sequence
  ENSG00000114698_9 (sequence is synthesized)
aagccatgatttttggagcttgcttcctcattgacttcatgtattttgaaagatctccaccacaacgttcaagatagagagacacagcaagccatcaactatggttaattttgaaaaatg

SEQ ID NO: 203231 - DNA, 120 bp, Artificial Sequence
  ENSG00000114698_10 (sequence is synthesized)
gaaaagttggattgggcttacagtcagcactcagttatttgcaagtgtatttctttgctttgtagagtatttttattgggtgttaactttgacagctgagagtgggcttgcaagaacaca

SEQ ID NO: 203232 - DNA, 120 bp, Artificial Sequence
  ENSG00000114698_11 (sequence is synthesized)
atctaaaagtgtgtttcaattgagtatctctctagtagaataggagttcatcctgaaaagctgtgactcattaacccagtaaacatatacaaagtaagcttaaaacactataaacatgag

SEQ ID NO: 203233 - DNA, 120 bp, Artificial Sequence
  ENSG00000114698_12 (sequence is synthesized)
ataagggaaaatgaatccagagttctcatattaataggtagtgaaacaataaggctttttagagcagactttgttggcataaaataacctggcttctatccctaaccctttcctaccttt

SEQ ID NO: 203234 - DNA, 120 bp, Artificial Sequence
  ENSG00000114698_13 (sequence is synthesized)
aggtactacttgtacacatatatcaaaacctcattctgcaaagtttttgaaggtttcaatgggaaatttgattttattacaaaataaaacattttttaatgttaaagtttatatattcca

SEQ ID NO: 203235 - DNA, 120 bp, Artificial Sequence
  ENSG00000114698_14 (sequence is synthesized)
tgcttgttttctcattcactggcatggatgatcaggagctgcctatatatgaaggcagaatcagactatcaggaaaggagctggccagggccacagccagtcaagatctctgagcaactt

SEQ ID NO: 203236 - DNA, 120 bp, Artificial Sequence
  ENSG00000114698_15 (sequence is synthesized)
agagacattggtgtcattatatgaagcttgcatttaatacatttatacataatacatttgtacatttaattcataacgtctcttggtcacagatgccttatatataaaataagttgccag

SEQ ID NO: 203237 - DNA, 120 bp, Artificial Sequence
  ENSG00000114698_16 (sequence is synthesized)
acagatgccttatatataaaataagttgccagatctctaagattgcctagtacacctttgtatctcatttgatgtgatacccagaagagatcattgttttttgtttttgtttttgttttt

SEQ ID NO: 203238 - DNA, 120 bp, Artificial Sequence
  ENSG00000114698_17 (sequence is synthesized)
tctcatggtaagaactggagttatgtttttaaatttggaaatatgacattttatgtagcactttataaaaagtgaaagcgacaaattccaccgctgcttaatactgctttgcttcttttt

SEQ ID NO: 203239 - DNA, 120 bp, Artificial Sequence
  ENSG00000114698_18 (sequence is synthesized)
attgacatgatagataaatatgtatctacacagagtaataataataaaacacagtaaacattctatttctctatggtctacagcatgccagtaaataatatgtaggaccaataataaatt

SEQ ID NO: 203240 - DNA, 120 bp, Artificial Sequence
  ENSG00000114698_19 (sequence is synthesized)
atcaattacacatttttgtgttaactaattaaaagcatagtgtataagtgagtacactctaattaacttgcttctgttgcactttagttttctacctgcatatggactgcattttttttt

SEQ ID NO: 203241 - DNA, 120 bp, Artificial Sequence
  ENSG00000114698_20 (sequence is synthesized)
tttaacacagtcagtatgtagaatgggatgtattcttctgctgctgcttattaaataaagaaagcctgagtgttcttagatggggttattctgagatgagggtcttagcctacagttctt

SEQ ID NO: 203242 - DNA, 120 bp, Artificial Sequence
  ENSG00000114698_21 (sequence is synthesized)
tttgaaatgaaaggtgctttgttttttaattatattcatcttttcagggtaaatttgtttttctgagtttctcgtaatgctcatttttacatgctgctactagcttttttttttaaaaaa

SEQ ID NO: 203243 - DNA, 120 bp, Artificial Sequence
  ENSG00000114698_22 (sequence is synthesized)
agtaaaagttgctgctttctaaaatattaattgccttatatttgaaagtgccattgcaatcgtaagtagactatgtatttcctataatgatgtctgatatttaaataggaaatcagacaa

SEQ ID NO: 203244 - DNA, 120 bp, Artificial Sequence
  ENSG00000114698_23 (sequence is synthesized)
acaatattcagaaagtttaagcatataaactttttatttttaacttgcctaaatccctgtattccaaaacctgctgcatcataataaatatatctatatatatttagcataagacgtgat

SEQ ID NO: 203245 - DNA, 120 bp, Artificial Sequence
  ENSG00000114698_24 (sequence is synthesized)
atttgtctcttagagttaaaattttctttatataatattgtcatatgtcatagttttaatacaattcacatgatttctatgtttcttaatgatattttgttgtgtaaaattgatcggatt

SEQ ID NO: 203246 - DNA, 120 bp, Artificial Sequence
  ENSG00000114698_25 (sequence is synthesized)
tattttgttgtgtaaaattgatcggattgattaaaaaacaaattctctggaatttgtgcgttcatgctttttcgtattctttatggcttttaaataaatatacaatggttaatagtaaaa

SEQ ID NO: 203247 - DNA, 120 bp, Artificial Sequence
  ENSG00000114698_26 (sequence is synthesized)
ggccgcggtgcctgcgggcaggcgcggaggttgcgcggcgtcctgcgctagcagttcccggacactgcgctcgcgtcgcatcctcaggtggttgcagaagttccgtggtgtcgggcgcgc

SEQ ID NO: 203248 - DNA, 120 bp, Artificial Sequence
  ENSG00000114698_27 (sequence is synthesized)
gtctgcactgcagacgcagagggtttgggagcgagcagtttcctgcccagggatgggggtcctggctgcacttcacgggggcggccctttcgtttcgctctgcgtgacaggtctcgcttg

SEQ ID NO: 203249 - DNA, 120 bp, Artificial Sequence
  ENSG00000114698_28 (sequence is synthesized)
gtgttaggaaagagttaattaaccagttgacatcaaaagattttaaagttattgtgagtagattgaggttttccaaaatgaaagctttttttatgacttcagtacttgataaaaataaaa

SEQ ID NO: 203250 - DNA, 120 bp, Artificial Sequence
  ENSG00000114698_29 (sequence is synthesized)
aacatttcttgactttttttaaatctcattctactacaatataaactgcagcacagtaggtggcagagtgtctgtctgcttcattgctgtactctcaacatctgtattagtgcctcgtac

SEQ ID NO: 203251 - DNA, 120 bp, Artificial Sequence
  ENSG00000114698_30 (sequence is synthesized)
ataataggtgctcaataagtatttttttaattaatgaagggacaaatgtaaggtaactggaggttaaaaaaattacagaaatccttacctgtgttactgagtagcaatactatttattat

SEQ ID NO: 203252 - DNA, 120 bp, Artificial Sequence
  ENSG00000114735_0 (sequence is synthesized)
gttcctaaacgccagctcggagcaatccccttgggctggagccaaatccctgctgtgattttaaggaagaccggcaggtccgggcccccaagggtcaaccccacacacatccccgcactt

SEQ ID NO: 203253 - DNA, 120 bp, Artificial Sequence
  ENSG00000114735_1 (sequence is synthesized)
tcctgtatgcaggcctgcgagcgtagagggagtggaattcacagcctccccacccatccgcaggggtctcctgggaggaacccaccagcgataggaacactgaagctgggctacggcgtc

SEQ ID NO: 203254 - DNA, 120 bp, Artificial Sequence
  ENSG00000114735_2 (sequence is synthesized)
cgcccgagccttttcttaaaggcgccgaccccggaagcggggcgtccgagggagcgcgcgacgggccacgcacgtccgggcgtccagttcggggcagcttctccggctggtgggtgggtg

SEQ ID NO: 203255 - DNA, 120 bp, Artificial Sequence
  ENSG00000114735_3 (sequence is synthesized)
gggcagcctttcaggcagggtggcaaccaactatatctgaggaccagagccattttggggcaccagagcttgtgacctctccatctccacccagctgggtccaggggccactctcagcac

SEQ ID NO: 203256 - DNA, 120 bp, Artificial Sequence
  ENSG00000114735_4 (sequence is synthesized)
tcacctcagcagctgacatcataaagcagacttgggaacctggaagcactctggagaacctttccctgagacatggagctttggggccgaatgctgtgggccctcctgtctggcccaggg

SEQ ID NO: 203257 - DNA, 120 bp, Artificial Sequence
  ENSG00000114735_5 (sequence is synthesized)
aggaggggaagtacccggggctgggccttcagctcatggcaaccccaaccacctctggctgggttatccagtgccatagaactggtcagccactggactggggtctttgagaagaggggt

SEQ ID NO: 203258 - DNA, 120 bp, Artificial Sequence
  ENSG00000114735_6 (sequence is synthesized)
atccctgaggcccgggaatccagtgagtacatcgtggctcatgtccttggagccaaaacatttcagagcctgaggccggcactttggacccagcccttgacctctcagcaactacagtgt

SEQ ID NO: 203259 - DNA, 120 bp, Artificial Sequence
  ENSG00000114735_7 (sequence is synthesized)
atccgggagctgagtagccgtcgattgcagaggatgccggtgcagtacatccttggagagtgggacttccaggggctcagcctaaggatggtgcccccagtgtttattcctcggccagaa

SEQ ID NO: 203260 - DNA, 120 bp, Artificial Sequence
  ENSG00000114735_8 (sequence is synthesized)
acagaggaactggttgagtgggtgctggaagaggtggcccagaggtcccatgctgtgggatccccaggcagccccctcattctggaggtgggctgcggatcaggagccatctccctcagc

SEQ ID NO: 203261 - DNA, 120 bp, Artificial Sequence
  ENSG00000114735_9 (sequence is synthesized)
ctgctgagccagctcccccagagccgagtcattgctgtggataagcgggaagctgctatctctctgacccatgagaatgctcagaggcttcggttgcaggacaggatttggatcatccac

SEQ ID NO: 203262 - DNA, 120 bp, Artificial Sequence
  ENSG00000114735_10 (sequence is synthesized)
ctcgacatgacctcagaaaggagctggacacacctgccctggggccccatggacctgattgtcagcaaccctccctacgtcttccaccaggacatggagcagctggcccctgagatccgc

SEQ ID NO: 203263 - DNA, 120 bp, Artificial Sequence
  ENSG00000114735_11 (sequence is synthesized)
agctatgaagaccccgcggccctggatggtggggaggagggcatggacatcattacccacattctggccttggcaccccggctcctgaaagactctggtagtatcttcttagaagtggac

SEQ ID NO: 203264 - DNA, 120 bp, Artificial Sequence
  ENSG00000114735_12 (sequence is synthesized)
ccaaggcacccggagcttgtcagcagctggcttcagagccggcctgacctgtaccttaatcttgtggctgtgcgcagggacttctgtgggaggccccggttcctgcatatccggaggtct

SEQ ID NO: 203265 - DNA, 120 bp, Artificial Sequence
  ENSG00000114735_13 (sequence is synthesized)
gggccatagcatggctgccctgtggatgccttgtcagtgccgccagcctgaccagaggggaggtggatggcactttccagagcccaggttcttatggcatttcccagggttctgtgattt

SEQ ID NO: 203266 - DNA, 120 bp, Artificial Sequence
  ENSG00000114735_14 (sequence is synthesized)
ccccatgctctgcatttctaggatatttctaggacacctggattggctccatcacatcagagtggctgagggcagttgctctgtgttggtgaaattgctgtgggggtatcgggggatatg

SEQ ID NO: 203267 - DNA, 120 bp, Artificial Sequence
  ENSG00000114735_15 (sequence is synthesized)
gccagtaaagtattgagagactaacaaatggtgacctaatgttttgtccatgacttgcaggtcccctgacccccttactcccaggtagcactggggcaagggtttccttctgccccagca

SEQ ID NO: 203268 - DNA, 120 bp, Artificial Sequence
  ENSG00000114735_16 (sequence is synthesized)
gggctggccgtcagtcccctgcttggtagtggtgtgggggtgcagtgtggaggaaggcacgtgagtcctcactcctggccttggataccatgggtcctggcatagagcagctcactccca

SEQ ID NO: 203269 - DNA, 120 bp, Artificial Sequence
  ENSG00000114735_17 (sequence is synthesized)
gggattgattagtcctccactgccctgggtgcatgcgtacacaattccctggccaagcctggctcgagcacaggaagctcatctgcgttttggctcaaggatgactgcctgctttctgga

SEQ ID NO: 203270 - DNA, 120 bp, Artificial Sequence
  ENSG00000114735_18 (sequence is synthesized)
ggggagggtctggaggtctttgctgcacagttcctgggtcgcacatccacgttcatttaactgaaggcttgagccagtgaggggtgtttcctttttatccccatagcttttagctaaaac

SEQ ID NO: 203271 - DNA, 120 bp, Artificial Sequence
  ENSG00000114735_19 (sequence is synthesized)
atccctcccgagttgaccccctggggtttcaaataacccatgtgtccctggttggggctggggagagtgagaagctgagatactgggcacagggttgtggcctccaccccagctctggtc

SEQ ID NO: 203272 - DNA, 120 bp, Artificial Sequence
  ENSG00000114735_20 (sequence is synthesized)
tgtgcagactcatggccaccaggaggcctgcagatccagccttcctgtcaacagcgacaggaaatctctaggttggtgagtgctggtgatgtgagcctacatcagggtgggtcctaagaa

SEQ ID NO: 203273 - DNA, 120 bp, Artificial Sequence
  ENSG00000114735_21 (sequence is synthesized)
acatggcaaaccaggctgtctcattccactagactgccccctgccaccctggcacttcccagggcctggcagtatggtctgatgggcagtatggtccaataggcagcatcctctgctgca

SEQ ID NO: 203274 - DNA, 120 bp, Artificial Sequence
  ENSG00000114735_22 (sequence is synthesized)
gctgggagagctgagttccagggctgtgtcctgcagtgggaccttgggcaactcctttccctatgagaagctggctcttctgagtccagggccaacgccaactggcaacctctttactct

SEQ ID NO: 203275 - DNA, 120 bp, Artificial Sequence
  ENSG00000114735_23 (sequence is synthesized)
tagtcaagtggaatgtgcatgctggcatctgaatgtccattcgccaggcatggagagcaagagaaggtatgtactgcctgaggtcacatgacagtgaccaagtggagacagtaagttaga

SEQ ID NO: 203276 - DNA, 120 bp, Artificial Sequence
  ENSG00000114735_24 (sequence is synthesized)
tccctccctttggggagcctatattgctggagtcatacccagcctaagtgttgccctgcactatggctggaggacacatttggtagaggtcacactgcagctcccagtgccccagtgtcc

SEQ ID NO: 203277 - DNA, 120 bp, Artificial Sequence
  ENSG00000114735_25 (sequence is synthesized)
agggcgaagggggtgcacaaccagggcaaggctccccacttccttagtcccccatgctcacagacctttgcctgctaaggtcctcaccagtattgccctttctgtctttctccttgtgcc

SEQ ID NO: 203278 - DNA, 120 bp, Artificial Sequence
  ENSG00000114735_26 (sequence is synthesized)
ctttggctcttgctgtcttcagcagcatctcagggtagctgccctgacctcggagcagtctgtcgcccccctacacctcagccagtcctggcttccctgatggtctctccctcctggcct

SEQ ID NO: 203279 - DNA, 120 bp, Artificial Sequence
  ENSG00000114735_27 (sequence is synthesized)
caggcccattcctgaggaagggccttggcgagcttgtggatgttgcaccagaagagagtgcagtgttggagagtgacactgtcggggcagctggggccacaagcaggagccggcctcggg

SEQ ID NO: 203280 - DNA, 120 bp, Artificial Sequence
  ENSG00000114735_28 (sequence is synthesized)
cacaactttctgcccagaaaaatgtgcagcttgactctgctgaggaaaaggtccaagccaagaggactggcaggcggggcctcaagcctgcagccactggcttgattgggccctggacgt

SEQ ID NO: 203281 - DNA, 120 bp, Artificial Sequence
  ENSG00000114735_29 (sequence is synthesized)
tgagcccagatgttggagccacaccagcctggatttcaatcccagaatctgcccctcacgaggatgtgaccttgggcagatgacttcacctcactcagccttggcttctaaggctgagaa

SEQ ID NO: 203282 - DNA, 120 bp, Artificial Sequence
  ENSG00000114735_30 (sequence is synthesized)
atgggacttaatgctttattttataggatgcatgtgaggagcccatgggatgtgcctggcttggcacattgtggcatttttccttgccttcctcggagggcagacacagggaggaaggac

SEQ ID NO: 203283 - DNA, 120 bp, Artificial Sequence
  ENSG00000114735_31 (sequence is synthesized)
ccagtgccctcaggcgtccatctgatgcatgggaccaacataaggcaggcagggatacaaggcagtctggaaagaagggaaggcaggagtttcagtcttgggctcttgactcctcactgt

SEQ ID NO: 203284 - DNA, 120 bp, Artificial Sequence
  ENSG00000114735_32 (sequence is synthesized)
tgtctagagatggagccagcaggctggtagcctggcagcctacatctcccctcagcctctcctcactatggccccagtgccttgaggcccaggccagggcagccagtggctctagctcag

SEQ ID NO: 203285 - DNA, 120 bp, Artificial Sequence
  ENSG00000114735_33 (sequence is synthesized)
ggaaagccaggcccacctgccctatcccctcccttgctcctgaggccaaagccagagactcgaacagcctccccaccaccaccagcatatgtcaaggagcacttgcaggcagaatgggag

SEQ ID NO: 203286 - DNA, 120 bp, Artificial Sequence
  ENSG00000114735_34 (sequence is synthesized)
gaggacatggagctgatggagtccaggctgtgcaagcccctgaggtcttgagagatgtgcccactgcccgtgcagcctccttcagccagagcccagagcatagacaggagtgtaggagtc

SEQ ID NO: 203287 - DNA, 120 bp, Artificial Sequence
  ENSG00000114735_35 (sequence is synthesized)
cctgtttgatgtactctgggagagtaattctatctcctcttctgatagttggggaaactgaggccttgtctcacagttggatgcttttcccagttgtcagtgggtttctccatgggtctc

SEQ ID NO: 203288 - DNA, 120 bp, Artificial Sequence
  ENSG00000114735_36 (sequence is synthesized)
atacagctgccttattgaaataggccccgaaccccctaaatgcaaaaaatactcttttttgctcctttacccccacctggaccctgggctattggctgctcccaatccttgccccaaaca

SEQ ID NO: 203289 - DNA, 120 bp, Artificial Sequence
  ENSG00000114735_37 (sequence is synthesized)
cttagctggctccccatgacttaagtgtgttctcttgtgtcctatggaatccagttctgaagaggtgggggaggacaactgtgggaaaagccctgggggcccctcccaaggccccatcag

SEQ ID NO: 203290 - DNA, 120 bp, Artificial Sequence
  ENSG00000114735_38 (sequence is synthesized)
tgctctgagtaggctgtcatcagaacaaagggctccactgctgacaaggtttgagaactgctggcttgaggtgagaacccctttaacctctgcgggacagcatgtctttccctatccacc

SEQ ID NO: 203291 - DNA, 120 bp, Artificial Sequence
  ENSG00000114735_39 (sequence is synthesized)
ttcgattcttttctcttttttttcttcattggctccttcttagtggattctcttctctactgccctgggcttcagcctttgtgcagtactctcgatgccctgaacacacaccttcccttt

SEQ ID NO: 203292 - DNA, 120 bp, Artificial Sequence
  ENSG00000114735_40 (sequence is synthesized)
gcccaggcggtgcaaacaatccacttcttcaagctccaacacaaatgctgcctcctttaggatgcctgctctgtgctctccctgcctcccctagcccatacctctgctggcaccttctgt

SEQ ID NO: 203293 - DNA, 120 bp, Artificial Sequence
  ENSG00000114735_41 (sequence is synthesized)
accatgccttcagaaaccttcttatccccctcatctctggggccccctgtggatctggcatacccaagttcagtaaatgtctatcagtaagctgatggtacatgcattttctagaataga

SEQ ID NO: 203294 - DNA, 120 bp, Artificial Sequence
  ENSG00000114735_42 (sequence is synthesized)
gctgggacttcccatgtggcccacatctgacctggcagcccatgtattccggtcattagggatgggaagccatgaggacctggccttctgcccgacccaggcagccattcaagttgagca

SEQ ID NO: 203295 - DNA, 120 bp, Artificial Sequence
  ENSG00000114735_43 (sequence is synthesized)
atggccacttcgaagactcaagtgcacctgatccctgcgcaacagccacaccaggagaacaggctgtccttggcggcagtaggagcaggcgccaggtttcctggagctcttggcttcagc

SEQ ID NO: 203296 - DNA, 120 bp, Artificial Sequence
  ENSG00000114735_44 (sequence is synthesized)
cagcccccagccagagtcctggctaggacagtgacctgatctcctcctcatgaccttctgccctggacaagccccctgaactggatttgggactgtcaaagcaactctacccctgctctg

SEQ ID NO: 203297 - DNA, 120 bp, Artificial Sequence
  ENSG00000114735_45 (sequence is synthesized)
gtaggctgaacagtgaccccccaaaatggcagtgtcttaatcacctaaaccttaacatgtgactatattaccttcacatagcaaaatggactttgcagatgtgattaaggatcttgagat

SEQ ID NO: 203298 - DNA, 120 bp, Artificial Sequence
  ENSG00000114735_46 (sequence is synthesized)
ggaaggagtatcctggatttttcaggtaaactgagtataatcacaagggcctctgtaaaggaggcaggagtgtcagagtgacggaagaaaatgtatgtaacaatggaagcagaggtcaga

SEQ ID NO: 203299 - DNA, 120 bp, Artificial Sequence
  ENSG00000114735_47 (sequence is synthesized)
gtgatgcaattgctggaggaagagccatgagccgaggaatgcagacagcctcttctcctctggggcctcaagaagaatgcagtcctgccaataccttgattttaagccctgtgaaactga

SEQ ID NO: 203300 - DNA, 120 bp, Artificial Sequence
  ENSG00000114735_48 (sequence is synthesized)
tttcagattgctgacctccagaacagtaagatcataaatttgtgttgttttcacatgtgtgaaaacacatgtgtgataatttgttacagcagccacgggaaacgaatatagattgtggtg

SEQ ID NO: 203301 - DNA, 120 bp, Artificial Sequence
  ENSG00000114735_49 (sequence is synthesized)
cccaaattagagtgctgctgtaacacacgcctactgattgaagtggctttggaattgcaacgtggaaatgggcagaggctggaagaattttgagagtcatgataaattgccttaaccacc

SEQ ID NO: 203302 - DNA, 120 bp, Artificial Sequence
  ENSG00000114735_50 (sequence is synthesized)
ctttccggcaggctactgggctccgcccacacacctcccggcctggttcctaaacgccagctcggagcaatccccttgggctggagccaaatccctgctgtgattttaaggaagaccggc

SEQ ID NO: 203303 - DNA, 120 bp, Artificial Sequence
  ENSG00000114735_51 (sequence is synthesized)
acctaaactgcccaggccccccctttttttactcatatttggagagaggtggccctttcccagagtgagaagactgaaagactgaccagcatgggtcccagaagggagtgggtgaggaat

SEQ ID NO: 203304 - DNA, 120 bp, Artificial Sequence
  ENSG00000114735_52 (sequence is synthesized)
gggactgggatgtggggagaaagtgcaaggctggcctccatggcccatctccagagactgggtccagagaggacctcagagactgggaccaagcctgttcctgctctcctgtggagttat

SEQ ID NO: 203305 - DNA, 120 bp, Artificial Sequence
  ENSG00000114735_53 (sequence is synthesized)
gtgactggcccaggaccccttgggtgtgtgaggatgagcaggggccctgtactctctgggttgcaggtactgcatctgtgaaatgagcacagcagcccctgactttgagctaatgggcct

SEQ ID NO: 203306 - DNA, 120 bp, Artificial Sequence
  ENSG00000114735_54 (sequence is synthesized)
ggcccctccatgtaagccataggcctgagcagagctgtgtcaccattctgttcctatggtggagtggggctatccctggggttctcaacctcctggttcctaaaactgaattggccaact

SEQ ID NO: 203307 - DNA, 120 bp, Artificial Sequence
  ENSG00000114735_55 (sequence is synthesized)
ggtgccctcagccctgtccctgtccaagctgggactaggacctccctttccaggggtactaaaggactctggagacaccatcccacccagccaaggcttggggctcctgaagccagtcct

SEQ ID NO: 203308 - DNA, 120 bp, Artificial Sequence
  ENSG00000114735_56 (sequence is synthesized)
aacccaggagccacatggagagctactgggaggccagacatgggcctcatgctgggtttcagagctgagaagctgggggacagagagcatggacacctgggttcaagggtcagcttggcc

SEQ ID NO: 203309 - DNA, 120 bp, Artificial Sequence
  ENSG00000114735_57 (sequence is synthesized)
ccaaatcacctggatacgctttggatgaagccaggagggcctgtttatactggaaggggtggatcatggcaagacttatattcaatccctgatcttttttcccagagagggatggggctt

SEQ ID NO: 203310 - DNA, 120 bp, Artificial Sequence
  ENSG00000114735_58 (sequence is synthesized)
acttgaagtaacacagcacttgactcctgactcccagtatgatgctctcatctcctattgcttccaaaggcctggggttagttaattaagtcaattaggtggtgctcatatggctgtcca

SEQ ID NO: 203311 - DNA, 120 bp, Artificial Sequence
  ENSG00000114735_59 (sequence is synthesized)
tgtagctactaaacccagggattctggcccataaagccctctgggccaggtttatgggcaggtaagagtcacattaggccaactgtagccctgggtgtgcagacagatctgagtcccatc

SEQ ID NO: 203312 - DNA, 120 bp, Artificial Sequence
  ENSG00000114735_60 (sequence is synthesized)
tgaagctctggtagctgtgggaggagagcaggatttcccccgcttgcggaatgagtgggtgccttcccctctgaggtaattggctgtacagcccccagcctctgccccccagggccctcc

SEQ ID NO: 203313 - DNA, 120 bp, Artificial Sequence
  ENSG00000114735_61 (sequence is synthesized)
tgaggtgtctggaaggacctttgggatctttggcctcataaccagaaatcagaagcttcaaattctagaggccccttttcttccaaagactacctctcacacatacagcagtcctgcagg

SEQ ID NO: 203314 - DNA, 120 bp, Artificial Sequence
  ENSG00000114735_62 (sequence is synthesized)
aaaatggtcaggaaaggctaattttacagctcacaaagtgggaaaggcagggaagcctacctcagcttcatggaaagccctgaactgggctgacctccacctgccccagctatgcctaaa

SEQ ID NO: 203315 - DNA, 120 bp, Artificial Sequence
  ENSG00000114735_63 (sequence is synthesized)
gggggagggtgagacagcttagagtagccatgccccgtggcaggcaggcctggctaagtggcccccttcccaggggctggggtcttccccaaacactctacctctcagagcagaggatgt

SEQ ID NO: 203316 - DNA, 120 bp, Artificial Sequence
  ENSG00000114735_64 (sequence is synthesized)
caccttattgctccctcttgtactaggtctgcggccctcttctggggcatgtggctggggaaatggtgggatcagatatcccctactgagcccagggagcagattgttggtgcctgaagc

SEQ ID NO: 203317 - DNA, 120 bp, Artificial Sequence
  ENSG00000114735_65 (sequence is synthesized)
gctcacagagatccctgtggtacagatgaggaaactgaggcttagcaggacaggagcagggctggggcacgagccaggtctcttctctggctcacagctgccagtccttcctttgccacc

SEQ ID NO: 203318 - DNA, 120 bp, Artificial Sequence
  ENSG00000114735_66 (sequence is synthesized)
tgaagaccccccaccccacctggctttccaggaacaggcctgcctgcctggagaggcgtccaagtccctctgctgttcctggaagtcagtgtgaggctgagctacgtgaccaagcaaagc

SEQ ID NO: 203319 - DNA, 120 bp, Artificial Sequence
  ENSG00000114735_67 (sequence is synthesized)
aaactaggactacaggtgtgaacaaccctgcctggctaatttttaatttttttttttttttagaaacggggtcttgctatgttgccagggctggcacatggggtttttagttgtccccac

SEQ ID NO: 203320 - DNA, 120 bp, Artificial Sequence
  ENSG00000114735_68 (sequence is synthesized)
attacaaagttgaggacaccaaggctcagcagggtgcagttgcaggtcaggttgcatagctggacaggaagggaggatgaggctgccattggtgtccatttgactatcagagacgctgag

SEQ ID NO: 203321 - DNA, 120 bp, Artificial Sequence
  ENSG00000114735_69 (sequence is synthesized)
gccagcataactaggtcctgggctgtcccctgcagagcttagcgcagaagttacctgggcttgtggacccttggagcaggagcaagggtttccagggctgtccctagagggctttctaga

SEQ ID NO: 203322 - DNA, 120 bp, Artificial Sequence
  ENSG00000114735_70 (sequence is synthesized)
agacctgcagctgctcctgggtgcatctcctgaggtatagggccagggcctcagtctctcaagacctactttgtgtcaggcaccagggagatgataccaagtggagggtcctatagaata

SEQ ID NO: 203323 - DNA, 120 bp, Artificial Sequence
  ENSG00000114735_71 (sequence is synthesized)
tggtgcatcctgcgccaagtacttccaggattatcttactcaaccttcatgacatcctcagagatggaggctgtgaaccctctcgttatactgacgaagaaacaaactggggctaagaaa

SEQ ID NO: 203324 - DNA, 120 bp, Artificial Sequence
  ENSG00000114735_72 (sequence is synthesized)
cttgctcataggctggctgagctgtgattctggcataggctgagtgacctggagctggaggccttagtcatcacaccaggcttgaggaggggcggataggacaggaatataccaggcagt

SEQ ID NO: 203325 - DNA, 120 bp, Artificial Sequence
  ENSG00000114735_73 (sequence is synthesized)
gagttctgcagacatgcgggtagggatatgtaggggtgaggtggtgccgagaggtccccttggctgagctctgaatgcatttctggggaccaggggcctaaagagctttttgagctgagt

SEQ ID NO: 203326 - DNA, 120 bp, Artificial Sequence
  ENSG00000114735_74 (sequence is synthesized)
tacagggttagagaagcattgaggctgctctttctggctgccaggaaaaaggggctggggcaggaggctgcaacttgtccagggtctggaggtggctggggtctgtagcagtggcatcag

SEQ ID NO: 203327 - DNA, 120 bp, Artificial Sequence
  ENSG00000114735_75 (sequence is synthesized)
atattctggaacagaactgactcacaaccattgctgagggtttggatgtgagatggccaggaccacagtgggcccagggatctgattgggacctgggggaaatggggccaccctgagttg

SEQ ID NO: 203328 - DNA, 120 bp, Artificial Sequence
  ENSG00000114735_76 (sequence is synthesized)
gagactggggtgctggggggaacagtcggggagcttgacagtgtaggatgccttcagaatatccgagaagcagcattggggcgtctggagatgcaaatgtgaccatgtggggacacagtc

SEQ ID NO: 203329 - DNA, 120 bp, Artificial Sequence
  ENSG00000114735_77 (sequence is synthesized)
caaaggcaacccttgaggtagagttgtgaagaccactctcctagacctgagtgctggcgacaacagtaccgggcatctgcagtgtgtaaactagtgccaggtgctgcacacacgtggtca

SEQ ID NO: 203330 - DNA, 120 bp, Artificial Sequence
  ENSG00000114735_78 (sequence is synthesized)
taaatccatctgttggcacatcagggatcccttccttggcccactgtatggatgaagggactgaggcttaacatgcccaaggtcacacagccagcagctggccatgctggagtttgaacc

SEQ ID NO: 203331 - DNA, 120 bp, Artificial Sequence
  ENSG00000114735_79 (sequence is synthesized)
tagtcctctgacatcccagtcaggagaggcgtgagcaggctgccgaggccaaatgcagcccagggcctcaaccccccagaggggcctcaggagccagttaggtgccccacagccaacgtg

SEQ ID NO: 203332 - DNA, 120 bp, Artificial Sequence
  ENSG00000114735_80 (sequence is synthesized)
ggctccagggtgaaggggaaagtgatgaatcaaacagaaagcagcagacgcagactgagctctctccctgtcggcccgggtgccagattttcacgcccacagcaaaggggccaggcagag

SEQ ID NO: 203333 - DNA, 120 bp, Artificial Sequence
  ENSG00000114735_81 (sequence is synthesized)
cgctaggtgtggggcaggagagggcagcgaaagtggctgccactgaacccagactctgatgtactccggatatgggtggcgtggactgacagacacccagcccagttccagactgaaagt

SEQ ID NO: 203334 - DNA, 120 bp, Artificial Sequence
  ENSG00000114735_82 (sequence is synthesized)
tgagtctgtctcagcatgtgaggatatgaagtttgccttgtcatggggagcatttcaggtccctaggcctgtgaggttctgggatgaggcaccagatggatgtgtctaaaaacccttgtt

SEQ ID NO: 203335 - DNA, 120 bp, Artificial Sequence
  ENSG00000114735_83 (sequence is synthesized)
gaaggcactccacagctcaataactgaccattgctcactactctcttggcccgcactgaaagccactgtttcttcatcatttcactcagcccgcctgtctcagccccccagaactttgga

SEQ ID NO: 203336 - DNA, 120 bp, Artificial Sequence
  ENSG00000114735_84 (sequence is synthesized)
gctcattctttcaaagtacatttcatgtgcaactgaaatacatatttttaaaaagataaaatgagcatctagttagcaaaaatgtattttgcaagtgcaaattctttcttagcatacagt

SEQ ID NO: 203337 - DNA, 120 bp, Artificial Sequence
  ENSG00000114735_85 (sequence is synthesized)
ccatcagggcgaagagcaatgaacacaaatgtttgaactgggggctgggatggtagttgtagtcttatgttggtctcaatgtccattttctttcagtgtttgattttggtagcacaggac

SEQ ID NO: 203338 - DNA, 120 bp, Artificial Sequence
  ENSG00000114735_86 (sequence is synthesized)
aaagtgaccgctgattctcacagataattgtttacaaatgctagcactgtgtctgaagcccaccttgcagtctctttgattgacagggacagcaagagaagccttatctcaagctcagca

SEQ ID NO: 203339 - DNA, 120 bp, Artificial Sequence
  ENSG00000114735_87 (sequence is synthesized)
caaaccctgttctctgagcacataggaaggattctaatgtgtcataatttggtgctgtgcccatttgagtctgtgtgtggtttttaaaattgggttttttttttttcaataattaaaaat

SEQ ID NO: 203340 - DNA, 90 bp, Artificial Sequence
  ENSG00000114735_88 (sequence is synthesized)
ctcacaagagtttaagacagcagtgagctataatagcgccactgcactccagcctggacatcagagtcagaccctgtctctaaaaaaata

SEQ ID NO: 203341 - DNA, 79 bp, Artificial Sequence
  ENSG00000114735_89 (sequence is synthesized)
tttaagacagcagtgagctataatagcgccactgcactccagcctggacatcagagtcagaccctgtctctaaaaaaat

SEQ ID NO: 203342 - DNA, 120 bp, Artificial Sequence
  ENSG00000114735_90 (sequence is synthesized)
agctagactccatctcaaaaaaaaaaatttaaaaataataattttaaaaaaatgttttaaaaatgaaagaaaaggaagaagggaggaggaagccagaaagaaaggggccgtgcagggtgg

SEQ ID NO: 203343 - DNA, 120 bp, Artificial Sequence
  ENSG00000114735_91 (sequence is synthesized)
gtgggcgacagcaagactgtttcaaaaaaaaaaaagaggaagagtgaaaggatggacgaaaggaactcctgtggggtggggcatctggggcacttgatgccccacgtgaccattcccttc

SEQ ID NO: 203344 - DNA, 120 bp, Artificial Sequence
  ENSG00000114735_92 (sequence is synthesized)
ccggaggtctgccccaactgctccagcccccatagcctgaggctcccggcacctcccacccagcatctgtcacagcaaatcaatctgggccacatgctcctgaaaggtccttgggagccc

SEQ ID NO: 203345 - DNA, 120 bp, Artificial Sequence
  ENSG00000114735_93 (sequence is synthesized)
caccaggctccagtgtggttgccccaagtactccatgagtagacatgggctagggacttacccaggcccttggtggtgcctccaagggtggaaagactgggggaccctgtgcccctgaaa
